United States Patent Application Publication US 2013/0267429 A1 - sequence listing, part 4

SEQ ID NO: 69469 - DNA, 51 bp, Artificial
  Synthetic oligonucleotide
aacaggagataagaactttctcgtttcagcttatttaatgataaaaaacac

SEQ ID NO: 69470 - DNA, 56 bp, Artificial
  Synthetic oligonucleotide
tggcctgatggggcgaatatcaatttcatgcctatataagctttcgcaattttaga

SEQ ID NO: 69471 - DNA, 60 bp, Artificial
  Synthetic oligonucleotide
gatagatctatggtcttacaatgcagagcttctggtggccttggaaaaccagcatacaat

SEQ ID NO: 69472 - DNA, 60 bp, Artificial
  Synthetic oligonucleotide
gatagatctatggtcttacaatgcagagcttctggtggccttggaaaaccaacatacaat

SEQ ID NO: 69473 - DNA, 60 bp, Artificial
  Synthetic oligonucleotide
ccagttggaatttctagcatggtggaggccatggtatctagggccaggattgatgcacgg

SEQ ID NO: 69474 - DNA, 60 bp, Artificial
  Synthetic oligonucleotide
cttgggcaaaagagatacaccaaaacaacatactggtgggatggactccaatcttctgat

SEQ ID NO: 69475 - DNA, 60 bp, Artificial
  Synthetic oligonucleotide
gaacggctgcattgagggcaagctttctcaaatgtccaaagaggtgaatgcaaaaattga

SEQ ID NO: 69476 - DNA, 60 bp, Artificial
  Synthetic oligonucleotide
cggctgcattgagggcaagctttctcaaatgtccaaagaagtgaatgccaaaattgaaca

SEQ ID NO: 69477 - DNA, 60 bp, Artificial
  Synthetic oligonucleotide
aacggctgcattgagggcaagctttctcaaatgtccaaagaagtgaatgccaaaattgaa

SEQ ID NO: 69478 - DNA, 55 bp, Artificial
  Synthetic oligonucleotide
gaacggctgcattgagggcaagctttctcaaatgtccaaagaggtgaatgcaaaa

SEQ ID NO: 69479 - DNA, 60 bp, Artificial
  Synthetic oligonucleotide
gaacggctgcattgagggcaagctttctcaaatgtccaaggaagtgaatgcaaaaattga

SEQ ID NO: 69480 - DNA, 55 bp, Artificial
  Synthetic oligonucleotide
gaacggctgcattgagggcaagctttctcaaatgtccaaggaagtgaatgcaaaa

SEQ ID NO: 69481 - DNA, 60 bp, Artificial
  Synthetic oligonucleotide
tgaccgactagagagcatagtattactaagggctttcaccgaagagggagcaattgttgg

SEQ ID NO: 69482 - DNA, 60 bp, Artificial
  Synthetic oligonucleotide
tgaccgactagtgaccatagtattactaagggctttcaccgaagagggagcaattgttgg

SEQ ID NO: 69483 - DNA, 60 bp, Artificial
  Synthetic oligonucleotide
agccaagagcatggaatatgatgctgttgcaactacacactcctggattcccaagaggaa

SEQ ID NO: 69484 - DNA, 60 bp, Artificial
  Synthetic oligonucleotide
gagcatggaatatgatgctgttgcaactacacactcctggattcccaagaggaaccgctc

SEQ ID NO: 69485 - DNA, 56 bp, Artificial
  Synthetic oligonucleotide
aaaacatgaagaaaacgagtcaactaaagtgggcacttggtgagaacatggcacca

SEQ ID NO: 69486 - DNA, 60 bp, Artificial
  Synthetic oligonucleotide
acacaagccaaaggggaattcttgaggatgaacagatgtatcagaaatgctgcaacctgt

SEQ ID NO: 69487 - DNA, 60 bp, Artificial
  Synthetic oligonucleotide
tatataaataagacaggaacatttgaattcacaagctttttttatcgctatggatttgtg

SEQ ID NO: 69488 - DNA, 60 bp, Artificial
  Synthetic oligonucleotide
actctgaagttggcaacaggaatgcggaatgtaccagagaaacaaactagaggcatattc

SEQ ID NO: 69489 - DNA, 60 bp, Artificial
  Synthetic oligonucleotide
agtctctaaaaatctacagagattcgcttggagaagcagtaatgagaatgggggacctct

SEQ ID NO: 69490 - DNA, 60 bp, Artificial
  Synthetic oligonucleotide
tacaccatggacacagtcaacagaacacaccaatattcagaaaaagggaagtggacaaca

SEQ ID NO: 69491 - DNA, 60 bp, Artificial
  Synthetic oligonucleotide
ggatttgtattcacgctcaccgtgcccagtgagcgaggactgcagcgtagacgctttgtc

SEQ ID NO: 69492 - DNA, 60 bp, Artificial
  Synthetic oligonucleotide
cccattgcagggctactgagtacataatgaagggagtatacataaacacagctttgctca

SEQ ID NO: 69493 - DNA, 60 bp, Artificial
  Synthetic oligonucleotide
gctttgctcaatgcatcttgtgcagccatggatgacttccagctaattccaatgataagc

SEQ ID NO: 69494 - DNA, 60 bp, Artificial
  Synthetic oligonucleotide
ccgattcaagctggatagaacttgatgagataggagaagatgttgccccaattgagcaca

SEQ ID NO: 69495 - DNA, 60 bp, Artificial
  Synthetic oligonucleotide
gccccaattgagcacattgcaagtatgagaaggaactatttcacagcggaagtatcccat

SEQ ID NO: 69496 - DNA, 60 bp, Artificial
  Synthetic oligonucleotide
cacagcggaagtatcccattgcagggctactgagtacataatgaagggagtatacataaa

SEQ ID NO: 69497 - DNA, 60 bp, Artificial
  Synthetic oligonucleotide
ggagacatgctcctgcggactgcaataggccaagtgtcaaggcccatgttcctgtatgtg

SEQ ID NO: 69498 - DNA, 60 bp, Artificial
  Synthetic oligonucleotide
ccttcgatctcggagggctatatgaagcaatcgaggagtgcctgattaatgatccctggg

SEQ ID NO: 69499 - DNA, 60 bp, Artificial
  Synthetic oligonucleotide
aatgaaagaatatggggaagatccgaaaatcgaaacgaacaaattcgctgcaatatgcac

SEQ ID NO: 69500 - DNA, 60 bp, Artificial
  Synthetic oligonucleotide
gcacacacttagaagtctgtttcatgtattcagatttccactttattgacgaaaggggtg

SEQ ID NO: 69501 - DNA, 60 bp, Artificial
  Synthetic oligonucleotide
acaacaggagtcgagaagcctaaatttctcccggatctgtatgattacaaggagaaccga

SEQ ID NO: 69502 - DNA, 60 bp, Artificial
  Synthetic oligonucleotide
attgacgaaaggggtgaatcaataattgtggaatctggtgatccaaatgcattattgaaa

SEQ ID NO: 69503 - DNA, 60 bp, Artificial
  Synthetic oligonucleotide
ccaggctgttcaccataaggcaagaaatggccagtaggggtctatgggattcctttcgtc

SEQ ID NO: 69504 - DNA, 60 bp, Artificial
  Synthetic oligonucleotide
cgattcattgaaattggagtgacacgaagggaagtccacatatactacctagagaaagcc

SEQ ID NO: 69505 - DNA, 60 bp, Artificial
  Synthetic oligonucleotide
cggagacatggccaattggagagtcacccaagggagtggaggaaggctccatcgggaaag

SEQ ID NO: 69506 - DNA, 60 bp, Artificial
  Synthetic oligonucleotide
tgaaaacaagtcggagacatggccaattggagagtcacccaagggagtggaggaaggctc

SEQ ID NO: 69507 - DNA, 60 bp, Artificial
  Synthetic oligonucleotide
ggcccatgttcctgtatgtgagaaccaacggaacctccaagatcaagatgaaatggggca

SEQ ID NO: 69508 - DNA, 60 bp, Artificial
  Synthetic oligonucleotide
gagaaaattgctcctcattgttcaggcgcttagggacaacctggaacctggaaccttcga

SEQ ID NO: 69509 - DNA, 60 bp, Artificial
  Synthetic oligonucleotide
gcatctccacaactcgaggggttttcagccgaatcgagaaaattgctcctcattgttcag

SEQ ID NO: 69510 - DNA, 60 bp, Artificial
  Synthetic oligonucleotide
ttcaacagtctatatgcatctccacaactcgaggggttttcagccgaatcgagaaaattg

SEQ ID NO: 69511 - DNA, 60 bp, Artificial
  Synthetic oligonucleotide
ggaaggctccatcgggaaagtgtgcagaaccttgctagcaaaatctgtattcaacagtct

SEQ ID NO: 69512 - DNA, 60 bp, Artificial
  Synthetic oligonucleotide
cctcattgttcaggcgcttagggacaacctggaacctggaaccttcgatctcggagggct

SEQ ID NO: 69513 - DNA, 60 bp, Artificial
  Synthetic oligonucleotide
ccattcctaaagacaacaccacgccctctcagattacctgatgggcccccctgctctcag

SEQ ID NO: 69514 - DNA, 60 bp, Artificial
  Synthetic oligonucleotide
gttgaagaaagatttgaaatcacaggaaccatgcgcaggcttgccgaccaaagtctccca

SEQ ID NO: 69515 - DNA, 60 bp, Artificial
  Synthetic oligonucleotide
ctgctctcagcggtcgaaattcctgctgatggatgcccttaaattaagcattgaagaccc

SEQ ID NO: 69516 - DNA, 60 bp, Artificial
  Synthetic oligonucleotide
aaatgcatgaaaacatttttcggctggaaagagcccaacatcgtaaaaccacatgagaag

SEQ ID NO: 69517 - DNA, 60 bp, Artificial
  Synthetic oligonucleotide
tgagccagaagctagatcgctagcaagctggatccagagtgaattcaacaaggcatgtga

SEQ ID NO: 69518 - DNA, 59 bp, Artificial
  Synthetic oligonucleotide
ttttcggctggaaagagcccaacatcgtaaaaccacatgagaagggcataaatcccaat

SEQ ID NO: 69519 - DNA, 61 bp, Artificial
  Synthetic oligonucleotide
caaatatattcaatatggagagaataaaagaattaagagatctaatgtcgcagtcccgcac

SEQ ID NO: 69520 - DNA, 60 bp, Artificial
  Synthetic oligonucleotide
agcgaaagcaggtcaaatatattcaatatggagagaataaaagaattaagagatctaatg

SEQ ID NO: 69521 - DNA, 60 bp, Artificial
  Synthetic oligonucleotide
agcgaaagcaggtcaaatatattcaatatggagagaataaaagagctaagagatctaatg

SEQ ID NO: 69522 - DNA, 60 bp, Artificial
  Synthetic oligonucleotide
atgatgtgccagattatgcctcccttaggtcactagttgcctcatcaggcaccctggagt

SEQ ID NO: 69523 - DNA, 60 bp, Artificial
  Synthetic oligonucleotide
acccaaggtcgtcagacctatgactggacattaaacagaaatcaaccggccgcaactgca

SEQ ID NO: 69524 - DNA, 60 bp, Artificial
  Synthetic oligonucleotide
acaggagaccggttggaatttccagcatggtggaggccatgatgtctagggcccggattg

SEQ ID NO: 69525 - DNA, 60 bp, Artificial
  Synthetic oligonucleotide
gagaccggttggaatttccagcatggtggaggccatgatgtctagggcccggattgatgc

SEQ ID NO: 69526 - DNA, 60 bp, Artificial
  Synthetic oligonucleotide
aatacgtcgaagagttgacataaaccctggtcatgcagacctcagtgccaaggaggcaca

SEQ ID NO: 69527 - DNA, 60 bp, Artificial
  Synthetic oligonucleotide
atacatcagggagacaggaaaagaacccgtcacttaggatgaaatggatgatggcgatga

SEQ ID NO: 69528 - DNA, 60 bp, Artificial
  Synthetic oligonucleotide
acacatcagggagacaggaaaagaacccgtcacttaggatgaaatggatgatggcaatga

SEQ ID NO: 69529 - DNA, 53 bp, Artificial
  Synthetic oligonucleotide
ccagttggaatttccagcatggtggaggccatggtgtctagggcccggattga

SEQ ID NO: 69530 - DNA, 60 bp, Artificial
  Synthetic oligonucleotide
gggacaggctcatggcctgatggggcgaacatcaatctcatgcctatataagctttcgca

SEQ ID NO: 69531 - DNA, 53 bp, Artificial
  Synthetic oligonucleotide
aagttgtcacgatggaaaagcatggctgcatgtttgtgtaacaggggatgata

SEQ ID NO: 69532 - DNA, 60 bp, Artificial
  Synthetic oligonucleotide
atgcacccaatcatgagggaatacaagcaggagtggataggttttataggacttgcaaac

SEQ ID NO: 69533 - DNA, 60 bp, Artificial
  Synthetic oligonucleotide
atagcattgattccagttatgtgtgctcaggacttgttggagacacaccaaggaacgatg

SEQ ID NO: 69534 - DNA, 60 bp, Artificial
  Synthetic oligonucleotide
aaatcatgaggggatacaagcaggagtggatagattctacaggacctgcaagttagtggg

SEQ ID NO: 69535 - DNA, 60 bp, Artificial
  Synthetic oligonucleotide
aatgcaccaaatcatgaggggatacaagcaggagtggatagattctacaggacctgcaag

SEQ ID NO: 69536 - DNA, 60 bp, Artificial
  Synthetic oligonucleotide
cttgtcgccctggagaaccaacatacaattgatctgactgattcagaaatgaacaaactg

SEQ ID NO: 69537 - DNA, 60 bp, Artificial
  Synthetic oligonucleotide
cttgttgccctggagaaccaacatacaattgatctgactgactcagaaatgaacaaactg

SEQ ID NO: 69538 - DNA, 60 bp, Artificial
  Synthetic oligonucleotide
aggaaggctgatccaaaacagcataacaatagagagaatggttctctcggcatttgatga

SEQ ID NO: 69539 - DNA, 60 bp, Artificial
  Synthetic oligonucleotide
gctgatccaaaacagcataacaatagagagaatggttctctcggcatttgatgagaggag

SEQ ID NO: 69540 - DNA, 60 bp, Artificial
  Synthetic oligonucleotide
ggatttggcgtcaagcgaataatggagaagacgcaactgctggtctcactcatctgatga

SEQ ID NO: 69541 - DNA, 60 bp, Artificial
  Synthetic oligonucleotide
ggcgtcaagcgaataatggagaagacgcaactgctggtctcacccacttgatgatctggc

SEQ ID NO: 69542 - DNA, 60 bp, Artificial
  Synthetic oligonucleotide
tgaaggaaggctgatccaaaacagcataacaatagagagaatggttctctctgcatttga

SEQ ID NO: 69543 - DNA, 51 bp, Artificial
  Synthetic oligonucleotide
tgaaggaaggctgatccaaaacagcataacaatagagagaatggttctctc

SEQ ID NO: 69544 - DNA, 60 bp, Artificial
  Synthetic oligonucleotide
cagagggacaagagtagtcccaagaggacaactgtccaccagaggagttcagattgcttc

SEQ ID NO: 69545 - DNA, 60 bp, Artificial
  Synthetic oligonucleotide
ggcgtcaagcgaataatggagaagacgcaactgctggcctcacccatttgatgatctggc

SEQ ID NO: 69546 - DNA, 60 bp, Artificial
  Synthetic oligonucleotide
ggcgtcaagcgaataatggagaagacgcaactgctggtctcactcatctgatgatctggc

SEQ ID NO: 69547 - DNA, 60 bp, Artificial
  Synthetic oligonucleotide
ggcgtcaagcgaataatggagaagacgcaactgccggtctcacccatttgatgatctggc

SEQ ID NO: 69548 - DNA, 60 bp, Artificial
  Synthetic oligonucleotide
tggcgtcaagcgaataatggagaagacgcaactgccggtctcacccatttgatgatctgg

SEQ ID NO: 69549 - DNA, 60 bp, Artificial
  Synthetic oligonucleotide
ttggcgtcaagcgaataatggagaagacgcaactgctggtctcacccacttgatgatctg

SEQ ID NO: 69550 - DNA, 60 bp, Artificial
  Synthetic oligonucleotide
gaagagaccaaaaggcattaaagggaagaggcagcacacttggactcgatctaagagtgg

SEQ ID NO: 69551 - DNA, 60 bp, Artificial
  Synthetic oligonucleotide
cagaagagaccaaaaggcattaaagggaagaggcagcacacttggactcgatctaagagt

SEQ ID NO: 69552 - DNA, 60 bp, Artificial
  Synthetic oligonucleotide
tcaccgaagagggagcaattgttggcgaaatctcaccattgcattctcttccaggacata

SEQ ID NO: 69553 - DNA, 60 bp, Artificial
  Synthetic oligonucleotide
ggtggatggttggtacggtttcaggcatcaaaattctgagggaatagggcaagcagcaga

SEQ ID NO: 69554 - DNA, 60 bp, Artificial
  Synthetic oligonucleotide
ttgtggcacttcaggtacctatggaacaggctcatggcctgatggggcggacatcaattt

SEQ ID NO: 69555 - DNA, 60 bp, Artificial
  Synthetic oligonucleotide
ctaagaggaagaggcagcactctcggtctagacatcaaagcagccacccatgttggaaag

SEQ ID NO: 69556 - DNA, 56 bp, Artificial
  Synthetic oligonucleotide
gcacttaaaatgaccatggcctccacacctgcttcgcgatacataactgacatgac

SEQ ID NO: 69557 - DNA, 60 bp, Artificial
  Synthetic oligonucleotide
gatggttggtacggtttcaggcatcaaaattctgagggaataggacaagcagcagatctc

SEQ ID NO: 69558 - DNA, 60 bp, Artificial
  Synthetic oligonucleotide
cttagttattctgctggtgcacttgccagttgcatgggcctcatatacaacaggatgggg

SEQ ID NO: 69559 - DNA, 60 bp, Artificial
  Synthetic oligonucleotide
gtgacaaagacataatggattccaacactgtgtcaagttttcaggtagattgcttccttt

SEQ ID NO: 69560 - DNA, 60 bp, Artificial
  Synthetic oligonucleotide
cagatccgctagcatctttattggagatgtgccacagcacacaaattggcgggacaagga

SEQ ID NO: 69561 - DNA, 60 bp, Artificial
  Synthetic oligonucleotide
cagcagacccactagcatctttattggagatgtgccacagcacacaaattggcgggacaa

SEQ ID NO: 69562 - DNA, 60 bp, Artificial
  Synthetic oligonucleotide
gcagacccactagcatctttattggagatgtgccacagcacacaaattggcgggacaaga

SEQ ID NO: 69563 - DNA, 60 bp, Artificial
  Synthetic oligonucleotide
cgctagcatctttattggagatgtgccacagcacacaaattggcgggacaaggatggtgg

SEQ ID NO: 69564 - DNA, 60 bp, Artificial
  Synthetic oligonucleotide
gggaatggtggatggttggtacggtttcaggcatcaaaattctgagggaatagggcaagc

SEQ ID NO: 69565 - DNA, 60 bp, Artificial
  Synthetic oligonucleotide
cagtctcgcactcgcgagatactaacaaaaaccacagtggaccatatggccataattaag

SEQ ID NO: 69566 - DNA, 60 bp, Artificial
  Synthetic oligonucleotide
cagcaaggatttacgctcaggttatgaaaccttcaaagtcattggtggttggtccacacc

SEQ ID NO: 69567 - DNA, 60 bp, Artificial
  Synthetic oligonucleotide
ctgaaggaagaatctgatgaggcacttaaaatgaccatggtctccacacctgcttcgcga

SEQ ID NO: 69568 - DNA, 60 bp, Artificial
  Synthetic oligonucleotide
gctgctcagcatgagagacatgtgtgatgctccctttagtgacaggctcagaagagacca

SEQ ID NO: 69569 - DNA, 60 bp, Artificial
  Synthetic oligonucleotide
aagctgctcagcatgagagacatgtgtgatgctccctttagtgacaggctcagaagagac

SEQ ID NO: 69570 - DNA, 60 bp, Artificial
  Synthetic oligonucleotide
gcctccagtcctgctcctcggtatattactgatatgagcatagaggagataagccgagaa

SEQ ID NO: 69571 - DNA, 60 bp, Artificial
  Synthetic oligonucleotide
gccattgcctccagtcctgctcctcggtatattactgatatgagcatagaggagataagc

SEQ ID NO: 69572 - DNA, 60 bp, Artificial
  Synthetic oligonucleotide
ggagataagccgagaatggtatatgctgatgcctaggcagaaaataactggaggcctaat

SEQ ID NO: 69573 - DNA, 60 bp, Artificial
  Synthetic oligonucleotide
cctcgtttcaggtagattgttatctatggcacataaggaagctgctcagcatgagagaca

SEQ ID NO: 69574 - DNA, 60 bp, Artificial
  Synthetic oligonucleotide
gagataagccgagaatggtatatgctgatgcctaggcagaaaataactggaggcctaatg

SEQ ID NO: 69575 - DNA, 60 bp, Artificial
  Synthetic oligonucleotide
ctgatatgagcatagaggagataagccgagaatggtatatgctgatgcctaggcagaaaa

SEQ ID NO: 69576 - DNA, 60 bp, Artificial
  Synthetic oligonucleotide
tcctcggtatattactgatatgagcatagaggagataagccgagaatggtatatgctgat

SEQ ID NO: 69577 - DNA, 58 bp, Artificial
  Synthetic oligonucleotide
agataaggactttctcttttcagcttatttaatactaaaaaacacccttgtttctact

SEQ ID NO: 69578 - DNA, 60 bp, Artificial
  Synthetic oligonucleotide
ctatttgaccaactagagacgttagtctctctgagggcattcacagaagatggtgctatt

SEQ ID NO: 69579 - DNA, 58 bp, Artificial
  Synthetic oligonucleotide
agataaggactttctcctttcagcttatttaatactaaaaaacacccttgtttctact

SEQ ID NO: 69580 - DNA, 60 bp, Artificial
  Synthetic oligonucleotide
tgcaggcattgcaactcttacttgaagttgagagtgagataaggactttctcctttcagc

SEQ ID NO: 69581 - DNA, 60 bp, Artificial
  Synthetic oligonucleotide
acagataacgttcttgcaggcattgcaactcttacttgaagttgagagtgagataaggac

SEQ ID NO: 69582 - DNA, 60 bp, Artificial
  Synthetic oligonucleotide
cgtaaacagtgccgtggtaatgccagctcatggtccagccaagagcatggaatatgatgc

SEQ ID NO: 69583 - DNA, 60 bp, Artificial
  Synthetic oligonucleotide
gttccagcgcaaaatgccataagcaccacattcccttatactggagatcctccatacagc

SEQ ID NO: 69584 - DNA, 58 bp, Artificial
  Synthetic oligonucleotide
ccagcgcaaaatgccataagcaccacattcccttatactggagatcctccatacagcc

SEQ ID NO: 69585 - DNA, 60 bp, Artificial
  Synthetic oligonucleotide
tcccagcgcaaaatgccataagcaccacattcccttatactggagatcctccatacagcc

SEQ ID NO: 69586 - DNA, 60 bp, Artificial
  Synthetic oligonucleotide
ggacagaaaagttgacaataacttactcatcatcaatgatgtgggagatcaatggtcctg

SEQ ID NO: 69587 - DNA, 60 bp, Artificial
  Synthetic oligonucleotide
caagggacagaaaagttgacaataacttactcatcatcaatgatgtgggagatcaatggt

SEQ ID NO: 69588 - DNA, 60 bp, Artificial
  Synthetic oligonucleotide
tagcattgtttccagttatgtgtgctcaggacttgttggagacacacccagaaaaaacga

SEQ ID NO: 69589 - DNA, 60 bp, Artificial
  Synthetic oligonucleotide
ccgccgaagagtagacataaaccctggtcatgcagacctcagtgccaaggaggcacaaga

SEQ ID NO: 69590 - DNA, 60 bp, Artificial
  Synthetic oligonucleotide
gagtcgggaaggctgatagatttcctcaaggatgtgatggaatcaatggataaagaggaa

SEQ ID NO: 69591 - DNA, 60 bp, Artificial
  Synthetic oligonucleotide
tatagcattgactccagttatgtgtgctcaggacttgttggagacacaccaaggaacgat

SEQ ID NO: 69592 - DNA, 60 bp, Artificial
  Synthetic oligonucleotide
aaacgagtcagctgatatgagcattggagtaacagtgataaagaacaacatgataaacaa

SEQ ID NO: 69593 - DNA, 60 bp, Artificial
  Synthetic oligonucleotide
ttggagtaacagtgataaagaacaacatgataaacaatgaccttggaccagcaacagccc

SEQ ID NO: 69594 - DNA, 60 bp, Artificial
  Synthetic oligonucleotide
ctgatatgagcattggagtaacagtgataaagaacaacatgataaacaatgatcttggac

SEQ ID NO: 69595 - DNA, 60 bp, Artificial
  Synthetic oligonucleotide
ccaaacattgaaaataagagtacatgaggggtatgaggagttcacaatggtggggaaaag

SEQ ID NO: 69596 - DNA, 60 bp, Artificial
  Synthetic oligonucleotide
ggagtgacagtgataaagaacaacatgataaacaatgatctcggaccagcaactgcccaa

SEQ ID NO: 69597 - DNA, 60 bp, Artificial
  Synthetic oligonucleotide
gaatcggctgatatgagcattggggtgacagtgataaagaacaacatgataaacaatgat

SEQ ID NO: 69598 - DNA, 60 bp, Artificial
  Synthetic oligonucleotide
ggagtgacagtgataaagaacaacatgataaacaatgatcttggaccagcaactgcccaa

SEQ ID NO: 69599 - DNA, 60 bp, Artificial
  Synthetic oligonucleotide
cagatgtgcactgaactcaaacttagcgactatgaaggaaggctgatccaaaacagcata

SEQ ID NO: 69600 - DNA, 60 bp, Artificial
  Synthetic oligonucleotide
tttgatatgagtaatgaaggatcttatttcttcggagacaatgcagaagagtacgacaat

SEQ ID NO: 69601 - DNA, 60 bp, Artificial
  Synthetic oligonucleotide
ccttgaacctggaacatttgatcttggggggctatatgaagcaattgaggagtgcctgat

SEQ ID NO: 69602 - DNA, 60 bp, Artificial
  Synthetic oligonucleotide
ggaagaatccaggaccttgagaaatatgttgaggacactaagatagatctatggtcttac

SEQ ID NO: 69603 - DNA, 60 bp, Artificial
  Synthetic oligonucleotide
gttgaacgcagcaaagctttcagcaactgttacccttatgatgtgccggattatgcctcc

SEQ ID NO: 69604 - DNA, 60 bp, Artificial
  Synthetic oligonucleotide
tggcatgtccgaaaacaagttgtagaccaagaactgagtgatgccccattccttgatcgg

SEQ ID NO: 69605 - DNA, 60 bp, Artificial
  Synthetic oligonucleotide
gcttacaggcaatctccaaacattgaaaataagagtacatgaggggtatgaggagttcac

SEQ ID NO: 69606 - DNA, 60 bp, Artificial
  Synthetic oligonucleotide
ttgaaagatgagccttctaaccgaggtcgaaacgtacgttctctctatcgtcccatcagg

SEQ ID NO: 69607 - DNA, 60 bp, Artificial
  Synthetic oligonucleotide
atattgaaagatgagccttctaaccgaggtcgaaacgtacgttctctctatcgtcccatc

SEQ ID NO: 69608 - DNA, 60 bp, Artificial
  Synthetic oligonucleotide
tagatattgaaagatgagccttctaaccgaggtcgaaacgtacgttctctctatcgtccc

SEQ ID NO: 69609 - DNA, 60 bp, Artificial
  Synthetic oligonucleotide
gcaggtagatattgaaagatgagccttctaaccgaggtcgaaacgtacgttctctctatc

SEQ ID NO: 69610 - DNA, 60 bp, Artificial
  Synthetic oligonucleotide
gacagcgataataggtcaggttattctggtattttctctgttgagggcaaaagctgcatc

SEQ ID NO: 69611 - DNA, 60 bp, Artificial
  Synthetic oligonucleotide
gttgacagcgataatcgatcaggttactctggtattttctctgttgagggcaaaagctgc

SEQ ID NO: 69612 - DNA, 60 bp, Artificial
  Synthetic oligonucleotide
gttgacagcgataatcggtcaggttactctggtattttctctgttgagggcaaaagctgc

SEQ ID NO: 69613 - DNA, 60 bp, Artificial
  Synthetic oligonucleotide
gtattttctctgttgagggcaaaagctgcatcaatagatgcttttacgtggagttgataa

SEQ ID NO: 69614 - DNA, 60 bp, Artificial
  Synthetic oligonucleotide
ggttattctggtattttctctgttgagggcaaaagctgcatcaatagatgcttttacgtg

SEQ ID NO: 69615 - DNA, 60 bp, Artificial
  Synthetic oligonucleotide
gtattttctctgttgagggcaaaagctgcatcaataggtgcttttacgtggagttgataa

SEQ ID NO: 69616 - DNA, 60 bp, Artificial
  Synthetic oligonucleotide
gttgacagcgacaataggtcaggttattctggtattttctctgttgagggcaaaagctgc

SEQ ID NO: 69617 - DNA, 60 bp, Artificial
  Synthetic oligonucleotide
tggtctggttactctggtattttctctgttgagggcaaaagctgcatcaataggtgtttt

SEQ ID NO: 69618 - DNA, 51 bp, Artificial
  Synthetic oligonucleotide
aaataggtcaggttattctggtattttctctgttgagggcaaaagctgcat

SEQ ID NO: 69619 - DNA, 60 bp, Artificial
  Synthetic oligonucleotide
gaaatcacaggaaccatgcgcaggcttgccgaccaaagtctcccaccgaacttctccagc

SEQ ID NO: 69620 - DNA, 60 bp, Artificial
  Synthetic oligonucleotide
caggaactatgcgtaggcttgccgaccaaagtctcccaccgaacttctcctgccttgaga

SEQ ID NO: 69621 - DNA, 60 bp, Artificial
  Synthetic oligonucleotide
aaatttgaaatctcaggaactatgcgtaggcttgccgaccaaagtctcccaccgaacttc

SEQ ID NO: 69622 - DNA, 60 bp, Artificial
  Synthetic oligonucleotide
ccataattaagaaatacacatcagggagacaggaaaagaacccgtcacttaggatgaaat

SEQ ID NO: 69623 - DNA, 60 bp, Artificial
  Synthetic oligonucleotide
ccataattaagaagtatacatcagggagacaggaaaagaacccgtcacttaggatgaaat

SEQ ID NO: 69624 - DNA, 60 bp, Artificial
  Synthetic oligonucleotide
gaagtatacatcagggagacaggaaaagaacccgtcacttaggatgaaatggatgatggc

SEQ ID NO: 69625 - DNA, 60 bp, Artificial
  Synthetic oligonucleotide
taggacaggaacatttgaattcacaagctttttctaccgctatgggtttgtagccaattt

SEQ ID NO: 69626 - DNA, 60 bp, Artificial
  Synthetic oligonucleotide
tgtgcatagcatggtccagctcaagttgtcacgatggaaaagcatggttgcatgtttgtg

SEQ ID NO: 69627 - DNA, 60 bp, Artificial
  Synthetic oligonucleotide
atgtgccggattatgcctcccttaggtcactagttgcctcatccggcacactggagttta

SEQ ID NO: 69628 - DNA, 60 bp, Artificial
  Synthetic oligonucleotide
gccggattatgcctcccttaggtcactagttgcctcatccggcaccctggagtttaacaa

SEQ ID NO: 69629 - DNA, 60 bp, Artificial
  Synthetic oligonucleotide
ttcatttacgatgggaggcttgtagacagcattggttcatggtctcaaaatatcctcagg

SEQ ID NO: 69630 - DNA, 60 bp, Artificial
  Synthetic oligonucleotide
cgggaggcttgtggacagtattggttcatggtctcaaaatatcctcaggacccaggagtc

SEQ ID NO: 69631 - DNA, 60 bp, Artificial
  Synthetic oligonucleotide
gagaaatgggacctttttgttgaacgcagcaaagctttcagcaactgttacccttatgat

SEQ ID NO: 69632 - DNA, 60 bp, Artificial
  Synthetic oligonucleotide
atattcatcatcaatgatgtgggagatcaatggtcctgagtcagtgcttgttaacaccta

SEQ ID NO: 69633 - DNA, 60 bp, Artificial
  Synthetic oligonucleotide
tattcatcatcaatgatgtgggagatcaatggtcctgagtcagtgcttgttaacacctat

SEQ ID NO: 69634 - DNA, 60 bp, Artificial
  Synthetic oligonucleotide
ggaacaggctcatggcctgatggagcggatatcaatctcatgcctatataagctttcgca

SEQ ID NO: 69635 - DNA, 58 bp, Artificial
  Synthetic oligonucleotide
agtgcctgattaatgatccctgggttttgcttaatgcgtcgtggttcaactccttcct

SEQ ID NO: 69636 - DNA, 60 bp, Artificial
  Synthetic oligonucleotide
tgaagtggaacaggagataagaactttctcatttcagcttatttaatgataaaaaacacc

SEQ ID NO: 69637 - DNA, 60 bp, Artificial
  Synthetic oligonucleotide
cttgccagttgcatgggcctcatatacaacagaatggggactgtgaccaccgaagtggca

SEQ ID NO: 69638 - DNA, 60 bp, Artificial
  Synthetic oligonucleotide
ccctttcagaatgtaaacaagatcacttacggagcatgtcctaagtatgtcaaacagggc

SEQ ID NO: 69639 - DNA, 60 bp, Artificial
  Synthetic oligonucleotide
ccccaatgacaagccctttcagaatgtaaacaagatcacttacggagcatgtcctaagta

SEQ ID NO: 69640 - DNA, 60 bp, Artificial
  Synthetic oligonucleotide
gccgggggatgtgctagtaattaacagtaatggtaacctgatcgctcctcgagggtactt

SEQ ID NO: 69641 - DNA, 60 bp, Artificial
  Synthetic oligonucleotide
caacaaaccataatcccgaatattggatccaggccttgggtcaggggccaatcaggacgg

SEQ ID NO: 69642 - DNA, 60 bp, Artificial
  Synthetic oligonucleotide
ccagaaggagtcaacaaaccataatcccgaatattggatccaggccttgggtcaggggcc

SEQ ID NO: 69643 - DNA, 60 bp, Artificial
  Synthetic oligonucleotide
gcatccccaatgacaagccctttcagaatgtaaacaagatcacttacggagcatgtccta

SEQ ID NO: 69644 - DNA, 60 bp, Artificial
  Synthetic oligonucleotide
ggaagcatccccaatgacaagccctttcagaatgtaaacaagatcacttacggagcatgt

SEQ ID NO: 69645 - DNA, 56 bp, Artificial
  Synthetic oligonucleotide
ggggatgtgctagtaattaacagtaatggtaacctgatcgctcctcgagggtactt

SEQ ID NO: 69646 - DNA, 60 bp, Artificial
  Synthetic oligonucleotide
accgggggatgtactagtaattaacagtaatggtaacctgatcgctcctcgaggatactt

SEQ ID NO: 69647 - DNA, 60 bp, Artificial
  Synthetic oligonucleotide
gcattaaacaaccgatttcaaatcaagggtgtagagctaaaatctgggtacaaagattgg

SEQ ID NO: 69648 - DNA, 60 bp, Artificial
  Synthetic oligonucleotide
cactgtgatgtattccaagatgaaacctgggacctttatgtggaacgtagcagcgccttc

SEQ ID NO: 69649 - DNA, 60 bp, Artificial
  Synthetic oligonucleotide
cgcatgtatagagtcaatcaggaacgggacttatgatcatgacacatacagagatgaagc

SEQ ID NO: 69650 - DNA, 60 bp, Artificial
  Synthetic oligonucleotide
catacagagatgaagcattaaacaaccgatttcaaatcaagggtgtagagctaaaatctg

SEQ ID NO: 69651 - DNA, 60 bp, Artificial
  Synthetic oligonucleotide
agctactttttctgtctggctctcagccaagactactcagaaagcaacaacagcactgca

SEQ ID NO: 69652 - DNA, 60 bp, Artificial
  Synthetic oligonucleotide
cagcactgcaacactgtgcttggggcatcatgcggtaccaaatgggacaatagtgaagac

SEQ ID NO: 69653 - DNA, 60 bp, Artificial
  Synthetic oligonucleotide
ctggctctcagccaagactactcagaaagcaacaacagcactgcaacactgtgcttgggg

SEQ ID NO: 69654 - DNA, 60 bp, Artificial
  Synthetic oligonucleotide
tccttgatggaagggactgtacactgatagatgccctactgggagacccccactgtgatg

SEQ ID NO: 69655 - DNA, 60 bp, Artificial
  Synthetic oligonucleotide
tatacagagatgaagcattaaacaaccgatttcaaatcaagggtgtagagctaaaatctg

SEQ ID NO: 69656 - DNA, 60 bp, Artificial
  Synthetic oligonucleotide
ctgtatgtctggggagttcaccacccgagcacaaaccaagagcaaaccaacctatacgtt

SEQ ID NO: 69657 - DNA, 60 bp, Artificial
  Synthetic oligonucleotide
caaccagaaggagtcaacaaaccataatcccgaatattggatccaggccttgggtcaggg

SEQ ID NO: 69658 - DNA, 60 bp, Artificial
  Synthetic oligonucleotide
tcctcaggaaccctagagttcatcacggaaggattcacatggacaggagtcactcaaaat

SEQ ID NO: 69659 - DNA, 60 bp, Artificial
  Synthetic oligonucleotide
gacaactttgacaaactgtatgtctggggagttcaccacccgagcacaaaccaagagcaa

SEQ ID NO: 69660 - DNA, 60 bp, Artificial
  Synthetic oligonucleotide
ttgtatgtctggggagttcaccacccgagcacaaaccaagagcaaaccaacctatacgtt

SEQ ID NO: 69661 - DNA, 60 bp, Artificial
  Synthetic oligonucleotide
ccaagatgaaacctgggacctttatgtggaacgtagcagcgccttcagcaactgctaccc

SEQ ID NO: 69662 - DNA, 60 bp, Artificial
  Synthetic oligonucleotide
aggtctctagttgcttcctcaggaaccctagagttcatcacggaaggattcacatggaca

SEQ ID NO: 69663 - DNA, 60 bp, Artificial
  Synthetic oligonucleotide
gcttcctcaggaaccctagagttcatcacagaaggattcacatggacaggagtcactcaa

SEQ ID NO: 69664 - DNA, 60 bp, Artificial
  Synthetic oligonucleotide
gaagtagaaggaagaatccaggaccttgagaaatatgttgaggacactaagatagatcta

SEQ ID NO: 69665 - DNA, 60 bp, Artificial
  Synthetic oligonucleotide
tggtcttacaatgcagagcttctggtggccttggaaaaccaacatacaattgatctgact

SEQ ID NO: 69666 - DNA, 60 bp, Artificial
  Synthetic oligonucleotide
tgaccagattaatgggaagttgaaccgagtaatcgagaagacaaatgagaagtttcacca

SEQ ID NO: 69667 - DNA, 60 bp, Artificial
  Synthetic oligonucleotide
gaccagattaatgggaagttgaaccgagtaatcgagaagacaaatgagaagtttcaccag

SEQ ID NO: 69668 - DNA, 60 bp, Artificial
  Synthetic oligonucleotide
gacggctggtatggcttcagacaccagaactctgagggtacaggacaagctgcagaccta

SEQ ID NO: 69669 - DNA, 60 bp, Artificial
  Synthetic oligonucleotide
gacggttggtatggtttcagacaccagaactctgagggtacaggacaagctgcagaccta

SEQ ID NO: 69670 - DNA, 60 bp, Artificial
  Synthetic oligonucleotide
tgatagacggttggtatggtttcagacaccagaactctgagggtacaggacaagctgcag

SEQ ID NO: 69671 - DNA, 60 bp, Artificial
  Synthetic oligonucleotide
tgatagacggctggtatggcttcagacaccagaactctgagggtacaggacaagctgcag

SEQ ID NO: 69672 - DNA, 60 bp, Artificial
  Synthetic oligonucleotide
tggtcttacaatgcagagcttctggtggccttggaaaaccagcatacaattgatctgact

SEQ ID NO: 69673 - DNA, 60 bp, Artificial
  Synthetic oligonucleotide
tgacaacgcatgtatagagtcaatcaggaacgggacttatgatcatgacacatacagaga

SEQ ID NO: 69674 - DNA, 60 bp, Artificial
  Synthetic oligonucleotide
aaagaaatagcactcagttattctgctggtgcacttgccagttgcatgggcctcatatac

SEQ ID NO: 69675 - DNA, 60 bp, Artificial
  Synthetic oligonucleotide
cttgggcaaaagaaatacaccaaaacaacatactggtgggatggactccaatcttctgat

SEQ ID NO: 69676 - DNA, 60 bp, Artificial
  Synthetic oligonucleotide
gcgagactaggaaaaggatacatgttcgaaagtaagagaatgaagctccgaacacaaata

SEQ ID NO: 69677 - DNA, 60 bp, Artificial
  Synthetic oligonucleotide
gagactaggaaaaggatacatgttcgaaagtaagagaatgaagctccgaacacaaatacc

SEQ ID NO: 69678 - DNA, 60 bp, Artificial
  Synthetic oligonucleotide
gattccaagaactaaaaacatgaagaaaacgagtcaactaaagtgggcacttggtgagaa

SEQ ID NO: 69679 - DNA, 60 bp, Artificial
  Synthetic oligonucleotide
caagaactaaaaacatgaagaaaacgagtcaactaaaatgggcacttggtgagaacatgg

SEQ ID NO: 69680 - DNA, 60 bp, Artificial
  Synthetic oligonucleotide
gagaagattccaaaaacaaaaaacatgaagaaaacgagtcagctaaagtgggcacttggt

SEQ ID NO: 69681 - DNA, 60 bp, Artificial
  Synthetic oligonucleotide
gtggttggtccacacctaattccaaatcgcagataaataggcaagtcatagttgacagcg

SEQ ID NO: 69682 - DNA, 60 bp, Artificial
  Synthetic oligonucleotide
caaaatagaccaggcaatcatggataagaacatcatgttgaaagcgaatttcagtgtaat

SEQ ID NO: 69683 - DNA, 60 bp, Artificial
  Synthetic oligonucleotide
atcagaatggaccaggcaatcatgaagaaaaacatcatgttgaaagcgaatttcagtgtg

SEQ ID NO: 69684 - DNA, 60 bp, Artificial
  Synthetic oligonucleotide
atcaaaatagaccaggcaatcatggataagaacatcatgttgaaagcgaatttcagtgta

SEQ ID NO: 69685 - DNA, 60 bp, Artificial
  Synthetic oligonucleotide
acaggaggccagttggaatttccagcatggtggaggccatggtatctagggccaggattg

SEQ ID NO: 69686 - DNA, 60 bp, Artificial
  Synthetic oligonucleotide
agcgagacgcaaggaacggaaaagttgacaataacttactcatcatcaatgatgtgggag

SEQ ID NO: 69687 - DNA, 60 bp, Artificial
  Synthetic oligonucleotide
acataatggattccaacactgtgtcaagtttccaggtagattgctttctttggcatgtcc

SEQ ID NO: 69688 - DNA, 60 bp, Artificial
  Synthetic oligonucleotide
aaaattctgaaggcacaggacaagcagcagatcttaaaagcactcaagcagcaatcgacc

SEQ ID NO: 69689 - DNA, 60 bp, Artificial
  Synthetic oligonucleotide
gttgatagcggtaataggtccggttattctggtattttctctgttgagggcaaaagctgc

SEQ ID NO: 69690 - DNA, 60 bp, Artificial
  Synthetic oligonucleotide
atgacgtgtggatgggaagaacgatcagcgaggattcacgctcaggttatgaaaccttca

SEQ ID NO: 69691 - DNA, 60 bp, Artificial
  Synthetic oligonucleotide
tgttgagggcaaaagctgcatcaataggtgcttttatgtggagttgataaggggaaggga

SEQ ID NO: 69692 - DNA, 60 bp, Artificial
  Synthetic oligonucleotide
caacaccagccaaaggggaattcttgaggatgaacaaatgtaccagaaatgctgcaatct

SEQ ID NO: 69693 - DNA, 60 bp, Artificial
  Synthetic oligonucleotide
ctggagcacttgccagttgcatgggcctcatatacaacagaatggggacagtaaccacag

SEQ ID NO: 69694 - DNA, 60 bp, Artificial
  Synthetic oligonucleotide
tccccagtagttcatacaggagaccggttggaatttctagcatggtggaggccatggtgt

SEQ ID NO: 69695 - DNA, 60 bp, Artificial
  Synthetic oligonucleotide
ccaagaggaaccgctctattctcaacacaagccaaaggggaattcttgaggatgaacaga

SEQ ID NO: 69696 - DNA, 60 bp, Artificial
  Synthetic oligonucleotide
gaccaatcctgtcacctctgactaaggggattttgggatttgtattcacgctcaccgtgc

SEQ ID NO: 69697 - DNA, 60 bp, Artificial
  Synthetic oligonucleotide
cgtacgttctttctatcatcccatcaggccccctcaaagccgagatcgcgcagagactgg

SEQ ID NO: 69698 - DNA, 60 bp, Artificial
  Synthetic oligonucleotide
gttctctctatcgttccgtcaggccccctcaaagccgagatcgcgcagagacttgaagat

SEQ ID NO: 69699 - DNA, 60 bp, Artificial
  Synthetic oligonucleotide
atgttctctctatcgttccatcaggccccctcaaagccgagatcgcgcagagacttgaag

SEQ ID NO: 69700 - DNA, 60 bp, Artificial
  Synthetic oligonucleotide
cgtatgttctctctatcgtcccatcaggccccctcaaagccgagatcgcgcagagacttg

SEQ ID NO: 69701 - DNA, 60 bp, Artificial
  Synthetic oligonucleotide
cgtacgttctctctatcatcccatcaggccccctcaaagccgagatcgcgcagagactgg

SEQ ID NO: 69702 - DNA, 60 bp, Artificial
  Synthetic oligonucleotide
ctatcgtcccatcaggccccctcaaagccgagatcgcgcagagacttgaagatgtctttg

SEQ ID NO: 69703 - DNA, 60 bp, Artificial
  Synthetic oligonucleotide
gcacagagacttgaagatgtctttgctgggaagaacacagatcttgaggctctcatggaa

SEQ ID NO: 69704 - DNA, 56 bp, Artificial
  Synthetic oligonucleotide
gtgaccctcttgttgttgctgcgagtatcattgggatcttgcacttgatattgtgg

SEQ ID NO: 69705 - DNA, 60 bp, Artificial
  Synthetic oligonucleotide
acaggagaccggttggaatttccagcatggtggaggccatggtgtctagggcccgaattg

SEQ ID NO: 69706 - DNA, 60 bp, Artificial
  Synthetic oligonucleotide
cagtttcatttatgacgggaggcttgtcgacagtattggttcatggtctcaaaatattct

SEQ ID NO: 69707 - DNA, 60 bp, Artificial
  Synthetic oligonucleotide
tgtccacattagtccattgtcaggaagtgctcagcatatagaggaatgttcctgttatcc

SEQ ID NO: 69708 - DNA, 60 bp, Artificial
  Synthetic oligonucleotide
tgtccacattagcccactgtcaggaagtgctcagcatatagaggaatgttcctgttatcc

SEQ ID NO: 69709 - DNA, 60 bp, Artificial
  Synthetic oligonucleotide
gggaaaattgttcatattagtccattgtcaggaagtgctcagcatatagaggaatgttcc

SEQ ID NO: 69710 - DNA, 60 bp, Artificial
  Synthetic oligonucleotide
gggaaaattgtccacattagcccactgtcaggaagtgctcagcatatagaggaatgttcc

SEQ ID NO: 69711 - DNA, 60 bp, Artificial
  Synthetic oligonucleotide
gggaaaattgtccacattagtccattgtcaggaagtgctcagcatatagaggaatgttcc

SEQ ID NO: 69712 - DNA, 60 bp, Artificial
  Synthetic oligonucleotide
gtccggccaagagcatggaatatgatgctgttgcaactacacactcctggattcccaaga

SEQ ID NO: 69713 - DNA, 60 bp, Artificial
  Synthetic oligonucleotide
ttttgggattcgtgtttacgctcaccgtgcccagtgagcgaggactgcagcgtagacgct

SEQ ID NO: 69714 - DNA, 60 bp, Artificial
  Synthetic oligonucleotide
cgaacggtttaacagctaatgaatcaggaaggctaatagatttcctcaaggatgtgatgg

SEQ ID NO: 69715 - DNA, 60 bp, Artificial
  Synthetic oligonucleotide
cgaatggactaacagctaatgaatcaggaaggctaatagatttcctcaaggatgtgatgg

SEQ ID NO: 69716 - DNA, 60 bp, Artificial
  Synthetic oligonucleotide
tcgaacggtttaacagctaatgaatcaggaaggctaatagatttcctcaaggatgtgatg

SEQ ID NO: 69717 - DNA, 60 bp, Artificial
  Synthetic oligonucleotide
cgaatggtctaacagctaatgaatcgggaaggctaatagatttcctcaaggatgtgatgg

SEQ ID NO: 69718 - DNA, 60 bp, Artificial
  Synthetic oligonucleotide
gatcgaatggtctaacagctaatgaatcgggaaggctaatagatttcctcaaggatgtga

SEQ ID NO: 69719 - DNA, 60 bp, Artificial
  Synthetic oligonucleotide
gatcaaatggactaacagctaatgaatcaggaaggctaatagatttcctcaaggatgtga

SEQ ID NO: 69720 - DNA, 60 bp, Artificial
  Synthetic oligonucleotide
tagatcgaatggactaacagctaatgaatcaggaaggctaatagatttcctcaaggatgt

SEQ ID NO: 69721 - DNA, 60 bp, Artificial
  Synthetic oligonucleotide
tgtgccacagcacacaaatcggtggaataaggatggtggacattcttaggcagaatccga

SEQ ID NO: 69722 - DNA, 60 bp, Artificial
  Synthetic oligonucleotide
atgaatactccagcacagagagagtggtggtgagcattgaccgttttttaagggttcggg

SEQ ID NO: 69723 - DNA, 60 bp, Artificial
  Synthetic oligonucleotide
tgtcccattgtagagccactgagtacataatgaagggggtatacattaatactgccctgc

SEQ ID NO: 69724 - DNA, 60 bp, Artificial
  Synthetic oligonucleotide
ccattgcagagccactgagtacataatgaagggggtatacattaatactgccttgctcaa

SEQ ID NO: 69725 - DNA, 60 bp, Artificial
  Synthetic oligonucleotide
agggcaaaagctgcatcaataggtgcttttatgtggagttgataaggggaaggaaacagg

SEQ ID NO: 69726 - DNA, 60 bp, Artificial
  Synthetic oligonucleotide
ggattttgggatttgtattcacgctcaccgtgcccagtgagcgaggactgcagcgtagac

SEQ ID NO: 69727 - DNA, 60 bp, Artificial
  Synthetic oligonucleotide
tttaagcaacatgaatgcaactcccccgcaaccaaccaagtgaccccatgtgagccaatc

SEQ ID NO: 69728 - DNA, 55 bp, Artificial
  Synthetic oligonucleotide
gagttgataaggggaagggaacaggagactagagtatggtggacctcaaacagta

SEQ ID NO: 69729 - DNA, 60 bp, Artificial
  Synthetic oligonucleotide
ggataattctattaatcatgaagaccatcattgctttgagctacattttctgtctggctc

SEQ ID NO: 69730 - DNA, 60 bp, Artificial
  Synthetic oligonucleotide
cgtacgttctttctatcatcccgtcaggccccctcaaagccgagatcgcgcagagactgg

SEQ ID NO: 69731 - DNA, 54 bp, Artificial
  Synthetic oligonucleotide
cgcaaaatgccataagcaccacattcccttatactggagatcctccatacagcc

SEQ ID NO: 69732 - DNA, 60 bp, Artificial
  Synthetic oligonucleotide
tttgttgaacgcagcaaagctttcagcaactgttacccttatgatgtgccggattatgcc

SEQ ID NO: 69733 - DNA, 60 bp, Artificial
  Synthetic oligonucleotide
cgtaaacaatgccgtggtaatgccatctcatggtccagccaagagcatggaatatgatgc

SEQ ID NO: 69734 - DNA, 60 bp, Artificial
  Synthetic oligonucleotide
ctgcatttgatgaaaggaggaacaaatacctggaagaacatcccagcgcggggaaggacc

SEQ ID NO: 69735 - DNA, 52 bp, Artificial
  Synthetic oligonucleotide
atgaaggatcttatttcttcggagacaatgcagaggagtacgacagttaagg

SEQ ID NO: 69736 - DNA, 60 bp, Artificial
  Synthetic oligonucleotide
catgagtaatgaaggatcttatttcttcggagacaatgcagaggagtacgacaattaaga

SEQ ID NO: 69737 - DNA, 60 bp, Artificial
  Synthetic oligonucleotide
catgagtaatgaaggatcttatttcttcggagacaatgcagaggagtacgacagttaagg

SEQ ID NO: 69738 - DNA, 60 bp, Artificial
  Synthetic oligonucleotide
ggtagacggctggtacggtttcaggcatcaaaattctgagggcacaggacaagcagcaga

SEQ ID NO: 69739 - DNA, 60 bp, Artificial
  Synthetic oligonucleotide
ggtagatggctggtacggtttcaggcatcaaaattctgagggcacaggacaagcagcaga

SEQ ID NO: 69740 - DNA, 60 bp, Artificial
  Synthetic oligonucleotide
tccttcctaacacatgcattaaaatagttgtggcaatgctactatttgctatccatactg

SEQ ID NO: 69741 - DNA, 60 bp, Artificial
  Synthetic oligonucleotide
gggaccaagcaagtgtgcatagcatggtccagctcaagttgtcacgatggaaaagcatgg

SEQ ID NO: 69742 - DNA, 60 bp, Artificial
  Synthetic oligonucleotide
gggactaagcaagtgtgcatagcatggtccagctcaagttgtcacgatggaaaagcatgg

SEQ ID NO: 69743 - DNA, 60 bp, Artificial
  Synthetic oligonucleotide
aacattaggtgcaacatttgcatttgagtgcattagtaattaaaaacacccttgtttcta

SEQ ID NO: 69744 - DNA, 60 bp, Artificial
  Synthetic oligonucleotide
agcaaaagcaggggataattctattaatcatgaagaccatcattgttctaagctactttt

SEQ ID NO: 69745 - DNA, 60 bp, Artificial
  Synthetic oligonucleotide
tatataaataggacaggaacatttgaattcacaagctttttttatcgctatggatttgtg

SEQ ID NO: 69746 - DNA, 57 bp, Artificial
  Synthetic oligonucleotide
tgggcgtggatgaatactccagcacagagagagtggtggttagcattgatcggtttt

SEQ ID NO: 69747 - DNA, 60 bp, Artificial
  Synthetic oligonucleotide
tgggcgtggatgaatactccagcacagagagagtggtggttagcattgatcggtttttga

SEQ ID NO: 69748 - DNA, 60 bp, Artificial
  Synthetic oligonucleotide
ccgtcacttaggatgaaatggatgatggcaatgaaatacccaattacagctgataagagg

SEQ ID NO: 69749 - DNA, 60 bp, Artificial
  Synthetic oligonucleotide
atttgggaaccaggcaagtgtgtatagcatggtccagctcaagttgtcacgatgggaaag

SEQ ID NO: 69750 - DNA, 56 bp, Artificial
  Synthetic oligonucleotide
atacagaagaccggttggaatctctagcatggtggaggccatggtgtctagggccc

SEQ ID NO: 69751 - DNA, 60 bp, Artificial
  Synthetic oligonucleotide
ctagggaaaggatacatgttcgaaagtaagagaatgaagctccgaacacaaataccagca

SEQ ID NO: 69752 - DNA, 60 bp, Artificial
  Synthetic oligonucleotide
aacaggagataagaactttctcttttcagcttatttaatgataaaaaacacccttgtttc

SEQ ID NO: 69753 - DNA, 60 bp, Artificial
  Synthetic oligonucleotide
cctggaagcaatggccttccttgaagaatcccacccagggatctttgaaaactcgtgtct

SEQ ID NO: 69754 - DNA, 60 bp, Artificial
  Synthetic oligonucleotide
tcaggacattgaaaatgaggagaagattccaaaaacaaaaaacatgaagaaaacaagcca

SEQ ID NO: 69755 - DNA, 60 bp, Artificial
  Synthetic oligonucleotide
gtacggtttcaggcatcaaaattctgagggtacaggacaagcagcagatcttaaaagcac

SEQ ID NO: 69756 - DNA, 60 bp, Artificial
  Synthetic oligonucleotide
ggcatcaaaattctgagggtacaggacaagcagcagatcttaaaagcactcaagcagcca

SEQ ID NO: 69757 - DNA, 60 bp, Artificial
  Synthetic oligonucleotide
ctaaaatagatctatggtcttacaatgcagagcttcttgttgctctggagaatcaacaca

SEQ ID NO: 69758 - DNA, 60 bp, Artificial
  Synthetic oligonucleotide
gatatggaccagcattgagcatcaatgaactgagcaatcttgcgaaaggggagaaagcta

SEQ ID NO: 69759 - DNA, 60 bp, Artificial
  Synthetic oligonucleotide
gctcctgctatcctcgatatcctggtgtcagatgtgtctgcagagacaactggaaaggct

SEQ ID NO: 69760 - DNA, 60 bp, Artificial
  Synthetic oligonucleotide
gagttgacacaaaccctggccatgcagacctcagtgccaaagaggcacaggatgtaatca

SEQ ID NO: 69761 - DNA, 60 bp, Artificial
  Synthetic oligonucleotide
gagacttgaagatgtctttgctgggaagaacacagatcttgaggctctcatggaatggct

SEQ ID NO: 69762 - DNA, 60 bp, Artificial
  Synthetic oligonucleotide
cagccaagagcatggaatatgatgctgttgcaactacacactcctggattcccaagagga

SEQ ID NO: 69763 - DNA, 60 bp, Artificial
  Synthetic oligonucleotide
ccggccaagagcatggaatatgatgctgttgcaactacacactcctggattcccaagagg

SEQ ID NO: 69764 - DNA, 60 bp, Artificial
  Synthetic oligonucleotide
cctaacacatgcattaaaatagttgtggcaatgctactatttgctatccatactgtccaa

SEQ ID NO: 69765 - DNA, 60 bp, Artificial
  Synthetic oligonucleotide
gggaagaacgatcagcgaggagtcacgctcaggttatgaaaccttcaaagtcattggtgg

SEQ ID NO: 69766 - DNA, 60 bp, Artificial
  Synthetic oligonucleotide
gatgggaagaacgatcagcgaggagtcacgctcaggttatgaaaccttcaaagtcattgg

SEQ ID NO: 69767 - DNA, 60 bp, Artificial
  Synthetic oligonucleotide
aagtgcttacgggcaacctccaaacattgaaaataagagtacatgaggggtatgaggaat

SEQ ID NO: 69768 - DNA, 60 bp, Artificial
  Synthetic oligonucleotide
cgggcaacctccaaacattgaaaataagagtacatgaggggtatgaggaattcacaatgg

SEQ ID NO: 69769 - DNA, 52 bp, Artificial
  Synthetic oligonucleotide
atgaaggatcttatttcttcggagacaatgcagaggagtacgacaattaagg

SEQ ID NO: 69770 - DNA, 60 bp, Artificial
  Synthetic oligonucleotide
tggctgtgacatggtggaataggaatggaccaacaacaagtacagttcactacccaaagg

SEQ ID NO: 69771 - DNA, 60 bp, Artificial
  Synthetic oligonucleotide
ggtcctgagtcagtattggttaatacttaccagtggatcatcagaaactgggagactgtg

SEQ ID NO: 69772 - DNA, 60 bp, Artificial
  Synthetic oligonucleotide
ccaccggaacagagtaggatgcagttctcctccttaactgtgaatgtaagaggatcagga

SEQ ID NO: 69773 - DNA, 60 bp, Artificial
  Synthetic oligonucleotide
ttcgagccatttcagtctctggtccctaaggcagctagaggtcaatacagcggattcgtg

SEQ ID NO: 69774 - DNA, 60 bp, Artificial
  Synthetic oligonucleotide
caaggcggcaatgggcttgaggattagctcatctttcagcttcggtggattcacttttaa

SEQ ID NO: 69775 - DNA, 60 bp, Artificial
  Synthetic oligonucleotide
tgatgccggctcagaccgagtgatggtatcacctctggctgtgacatggtggaataggaa

SEQ ID NO: 69776 - DNA, 60 bp, Artificial
  Synthetic oligonucleotide
ctccagcacagagagagtggtggtgagcattgaccgttttttaagggttcgggatcaacg

SEQ ID NO: 69777 - DNA, 60 bp, Artificial
  Synthetic oligonucleotide
ctaatgtcacagtcccgcactcgcgagatactcaccaaaaccactgtggaccatatggcc

SEQ ID NO: 69778 - DNA, 60 bp, Artificial
  Synthetic oligonucleotide
cgaaaaggtcgaaaggttaaaacatgggacctttggccccgttcacttcaggaatcaagt

SEQ ID NO: 69779 - DNA, 60 bp, Artificial
  Synthetic oligonucleotide
agtaagaagagcaacggtatcagcagacccactagcgtctctattggagatgtgccacag

SEQ ID NO: 69780 - DNA, 60 bp, Artificial
  Synthetic oligonucleotide
ccccttaatggtagcatacatgctagaaagagagttagtccgcaaaacgaggttcctccc

SEQ ID NO: 69781 - DNA, 60 bp, Artificial
  Synthetic oligonucleotide
ggatgcttgttgacagtattggttcatggtctcaaaatatcctcagaactcaggagtcag

SEQ ID NO: 69782 - DNA, 60 bp, Artificial
  Synthetic oligonucleotide
cttgttgacagtattggttcatggtctcaaaatatcctcagaactcaggagtcagagtgc

SEQ ID NO: 69783 - DNA, 60 bp, Artificial
  Synthetic oligonucleotide
tgactccaagcacagagatgtcaatgagagggataagagtcagcaaaatgggagtggatg

SEQ ID NO: 69784 - DNA, 60 bp, Artificial
  Synthetic oligonucleotide
aacacagatcttgaggctctcatggagtgggtaaagacaagaccaatcctgtcacctctg

SEQ ID NO: 69785 - DNA, 60 bp, Artificial
  Synthetic oligonucleotide
aacagagaggctgacaataacttactcatcatcaatgatgtgggagattaacggtcctga

SEQ ID NO: 69786 - DNA, 60 bp, Artificial
  Synthetic oligonucleotide
tctaacagctaatgagtcgggaaggctgatagatttcctcaaggatgtgatggaatcaat

SEQ ID NO: 69787 - DNA, 60 bp, Artificial
  Synthetic oligonucleotide
aaatcatgagggaatacaagcaggagtggatagattctacaggacctgcaagttagtcgg

SEQ ID NO: 69788 - DNA, 60 bp, Artificial
  Synthetic oligonucleotide
gacagcggtaataggtccggttattctggtattttctctgttgagggcaaaagctgcatc

SEQ ID NO: 69789 - DNA, 60 bp, Artificial
  Synthetic oligonucleotide
aagcaggggataattctattaatcatgaagaccatcattgctttgagctacattttctgt

SEQ ID NO: 69790 - DNA, 60 bp, Artificial
  Synthetic oligonucleotide
gacgatggaaatgacgtgtggatgggaagaacaatcagcaaggattcacgctcaggttat

SEQ ID NO: 69791 - DNA, 60 bp, Artificial
  Synthetic oligonucleotide
ggcctttgatgatggaaatgacgtgtggatgggaagaacgatcagcgggaagttacgctc

SEQ ID NO: 69792 - DNA, 55 bp, Artificial
  Synthetic oligonucleotide
tagcattgtttccagttatgtgtgctcaggacttgttggagacacacccagaaaa

SEQ ID NO: 69793 - DNA, 60 bp, Artificial
  Synthetic oligonucleotide
ttctggggtttgtgttcacgctcaccgtgcccagtgagcgaggactgcagcgtagacgct

SEQ ID NO: 69794 - DNA, 60 bp, Artificial
  Synthetic oligonucleotide
tggggtttgtgttcacgctcaccgtgcccagtgagcgaggactgcagcgtagacgctttg

SEQ ID NO: 69795 - DNA, 60 bp, Artificial
  Synthetic oligonucleotide
ttacagctactatttgaagtggaacaggagataagaactttctcgtttcagcttatttaa

SEQ ID NO: 69796 - DNA, 60 bp, Artificial
  Synthetic oligonucleotide
tacaccatggacacagtcaacagaacacaccaatattcagaaaaggggaagtggacgaca

SEQ ID NO: 69797 - DNA, 59 bp, Artificial
  Synthetic oligonucleotide
tacaccatggacacagtcaacagaacacaccaatattcagaaaagggaaagtggacaac

SEQ ID NO: 69798 - DNA, 60 bp, Artificial
  Synthetic oligonucleotide
ccgaaaacaagttgtagaccaagaactgagtgatgccccattccttgatcggcttcgccg

SEQ ID NO: 69799 - DNA, 60 bp, Artificial
  Synthetic oligonucleotide
ccggaaacaagttgtggaccaagaactgagtgatgccccattccttgatcggcttcgccg

SEQ ID NO: 69800 - DNA, 60 bp, Artificial
  Synthetic oligonucleotide
cgtacgttctctctatcgtcccgtcaggccccctcaaagccgagatcgcgcagagactgg

SEQ ID NO: 69801 - DNA, 60 bp, Artificial
  Synthetic oligonucleotide
ctatcgttccgtcaggccccctcaaagccgagatcgcgcagagacttgaagatgtctttg

SEQ ID NO: 69802 - DNA, 60 bp, Artificial
  Synthetic oligonucleotide
cgtacgttctctctatcgtcccgtcaggccccctcaaagccgagatcgcgcagagacttg

SEQ ID NO: 69803 - DNA, 60 bp, Artificial
  Synthetic oligonucleotide
ctatcgtcccgtcaggccccctcaaagccgagatcgcgcagagacttgaagatgtctttg

SEQ ID NO: 69804 - DNA, 60 bp, Artificial
  Synthetic oligonucleotide
cataattaagaagtacacatcagggagacaggaaaagaacccgtcacttaggatgaaatg

SEQ ID NO: 69805 - DNA, 60 bp, Artificial
  Synthetic oligonucleotide
tacaggagaccggttggaatttccagcatggtggaggccatggtgtctagggcccggatc

SEQ ID NO: 69806 - DNA, 60 bp, Artificial
  Synthetic oligonucleotide
ttccagcgcaaaatgccataagcaccacattcccttacactggagatcctccatacagcc

SEQ ID NO: 69807 - DNA, 60 bp, Artificial
  Synthetic oligonucleotide
cgcttgcattgagtcaatcagaaatgggacttatgaccatgatgtatacagagacgaagc

SEQ ID NO: 69808 - DNA, 60 bp, Artificial
  Synthetic oligonucleotide
gctcaccgtgcccagtgagcgaggactgcagcgtagacgctttgtccaaaatgccctcaa

SEQ ID NO: 69809 - DNA, 60 bp, Artificial
  Synthetic oligonucleotide
cgtagacgctttgtccaaaatgccctcaatgggaatggggatccaaataacatggacaga

SEQ ID NO: 69810 - DNA, 60 bp, Artificial
  Synthetic oligonucleotide
gttattctgctggtgcacttgccagttgcatgggcctcatatacaacaggatgggagctg

SEQ ID NO: 69811 - DNA, 60 bp, Artificial
  Synthetic oligonucleotide
ggattatagcactgtttccagttatgtgtgctcaggacttgttggagacacacccagaaa

SEQ ID NO: 69812 - DNA, 60 bp, Artificial
  Synthetic oligonucleotide
gcgatttaaagcaatatgatagtgacgaacctgaattaaggtcactttcaagctggatac

SEQ ID NO: 69813 - DNA, 60 bp, Artificial
  Synthetic oligonucleotide
cataagcgatttgaagcaatatgatagtgacgaacctgaattaaggtcactttcaagctg

SEQ ID NO: 69814 - DNA, 60 bp, Artificial
  Synthetic oligonucleotide
tagagacgtaagcgatttgaagcaatatgatagtgacgaacctgaattaaggtcactttc

SEQ ID NO: 69815 - DNA, 60 bp, Artificial
  Synthetic oligonucleotide
aatcgaaaaggaattctcagaagtagaagggagaattcaggacctcgaaaaatacgttga

SEQ ID NO: 69816 - DNA, 60 bp, Artificial
  Synthetic oligonucleotide
aaggaattctcagaagtagaagggagaattcaggacctcgagaaatatgttgaagacact

SEQ ID NO: 69817 - DNA, 60 bp, Artificial
  Synthetic oligonucleotide
gattgaaaaagaattctcagaagtagaagggagaattcaggacctcgagaaatatgtcga

SEQ ID NO: 69818 - DNA, 60 bp, Artificial
  Synthetic oligonucleotide
gattgaaaaagaattctcagaagtagaagggagaattcaggaccttgagaaatatgttga

SEQ ID NO: 69819 - DNA, 60 bp, Artificial
  Synthetic oligonucleotide
gattgaaaaagaattctcagaagtagaagggagaattcaggacctcgagaaatatgttga

SEQ ID NO: 69820 - DNA, 60 bp, Artificial
  Synthetic oligonucleotide
agcaaaagcaggtagatattgaaagatgagccttctaaccgaggtcgaaacgtacgttct

SEQ ID NO: 69821 - DNA, 60 bp, Artificial
  Synthetic oligonucleotide
agcggatatgcacaaacagactgtgtcctggaggcaatggccttccttgaggaatcccac

SEQ ID NO: 69822 - DNA, 60 bp, Artificial
  Synthetic oligonucleotide
tacagagattcgcttggggaagcagtaatgagaatgggggacctccacttactccaaaac

SEQ ID NO: 69823 - DNA, 60 bp, Artificial
  Synthetic oligonucleotide
tgatgtgccagattatgcctcccttaggtcactagttgcctcgtcaggcaccctggagtt

SEQ ID NO: 69824 - DNA, 60 bp, Artificial
  Synthetic oligonucleotide
tatataaataagacaggaacatttgaattcacaagctttttctatcgctatggatttgtg

SEQ ID NO: 69825 - DNA, 60 bp, Artificial
  Synthetic oligonucleotide
gggcaaaagagatacaccaaaacaacatactggtgggatggactccaatcttctgatgat

SEQ ID NO: 69826 - DNA, 60 bp, Artificial
  Synthetic oligonucleotide
gggcaaaagaaatacaccaaaacaacatactggtgggatggactccaatcttctgatgat

SEQ ID NO: 69827 - DNA, 60 bp, Artificial
  Synthetic oligonucleotide
gaggctgacaataacttactcatcatcaatgatgtgggagattaacggtcctgagtcggt

SEQ ID NO: 69828 - DNA, 60 bp, Artificial
  Synthetic oligonucleotide
ggagaccagttggaatttctagcatggtggaggccatggtgtctagggcccggattgatg

SEQ ID NO: 69829 - DNA, 60 bp, Artificial
  Synthetic oligonucleotide
gagacttgaggatgtctttgcagggaagaacacagatcttgaggctctcatggaatggct

SEQ ID NO: 69830 - DNA, 60 bp, Artificial
  Synthetic oligonucleotide
gaggctgacaataacttactcatcgtcaatgatgtgggagattaacggtcctgagtcggt

SEQ ID NO: 69831 - DNA, 60 bp, Artificial
  Synthetic oligonucleotide
cacttcaggtacctatggaacaggctcatggcctgatggggcggacatcaatttcatgcc

SEQ ID NO: 69832 - DNA, 60 bp, Artificial
  Synthetic oligonucleotide
catcggaggacttgaatggaatgataacacagttcgagtctctaaaactctacagagatt

SEQ ID NO: 69833 - DNA, 60 bp, Artificial
  Synthetic oligonucleotide
gcaattggggtcctcatcggaggacttgaatggaatgataacacagttcgagtctctaag

SEQ ID NO: 69834 - DNA, 58 bp, Artificial
  Synthetic oligonucleotide
aatgcctgattaatgatccctgggttttgcttaatgcatcttggttcaactccttcct

SEQ ID NO: 69835 - DNA, 58 bp, Artificial
  Synthetic oligonucleotide
aatgcctgattaatgatccctgggttttgcttaatgcgtcttggttcaactccttcct

SEQ ID NO: 69836 - DNA, 58 bp, Artificial
  Synthetic oligonucleotide
aatgcctgattaatgatccctgggttttgcttaatgcttcttggttcaactccttcct

SEQ ID NO: 69837 - DNA, 60 bp, Artificial
  Synthetic oligonucleotide
acataatggattccaacactgtgtcaagttttcaggtagattgcttcctttggcatgtcc

SEQ ID NO: 69838 - DNA, 60 bp, Artificial
  Synthetic oligonucleotide
gaaaaggaattctcagaagtagaagggagaattcaggacctcgagaaatacgttgaagac

SEQ ID NO: 69839 - DNA, 55 bp, Artificial
  Synthetic oligonucleotide
gacatctgggtgacaagagaaccttatgtgtcatgcgatcctgacaagtgttatc

SEQ ID NO: 69840 - DNA, 60 bp, Artificial
  Synthetic oligonucleotide
aaaggctgggcctttgacgatggaaatgacgtgtggatgggaagaacgatcagcgaggag

SEQ ID NO: 69841 - DNA, 60 bp, Artificial
  Synthetic oligonucleotide
aaggctgggcctttgacgatggaaatgacgtgtggatgggaagaacgatcggcgaggagt

SEQ ID NO: 69842 - DNA, 60 bp, Artificial
  Synthetic oligonucleotide
tgaagatgtctttgctgggaaaaacacagatcttgaggctctcatggaatggctaaagac

SEQ ID NO: 69843 - DNA, 60 bp, Artificial
  Synthetic oligonucleotide
agtggcatttggcctggtatgtgcaacatgtgagcagattgctgactcccagcacaggtc

SEQ ID NO: 69844 - DNA, 60 bp, Artificial
  Synthetic oligonucleotide
ataggatgggggctgtaaccaccgaagtggcatttggcctggtatgtgcaacatgtgaac

SEQ ID NO: 69845 - DNA, 60 bp, Artificial
  Synthetic oligonucleotide
aaagacaagaccaattctgtcacctctgactaaggggattttggggtttgtgttcacgct

SEQ ID NO: 69846 - DNA, 60 bp, Artificial
  Synthetic oligonucleotide
aagaaatagctcttagttattctgctggtgcacttgccagttgcatgggcctcatataca

SEQ ID NO: 69847 - DNA, 60 bp, Artificial
  Synthetic oligonucleotide
gccaaagaaatagctctcagttattctgctggtgcacttgccagttgcatgggcctcata

SEQ ID NO: 69848 - DNA, 60 bp, Artificial
  Synthetic oligonucleotide
cagttattctgctggtgcacttgccagttgcatgggcctcatatacaatagaatgggggc

SEQ ID NO: 69849 - DNA, 60 bp, Artificial
  Synthetic oligonucleotide
agtactggtctgagagatgatcttcttgaaaatttgcagacctatcagaaacgaatgggg

SEQ ID NO: 69850 - DNA, 60 bp, Artificial
  Synthetic oligonucleotide
gaatgggggctgtaaccactgaagtggcatttggcctggtatgtgcaacatgtgaacaga

SEQ ID NO: 69851 - DNA, 60 bp, Artificial
  Synthetic oligonucleotide
acatgtgaacagattgctgactcccagcacaggtcccataggcaaatggtggcaacaacc

SEQ ID NO: 69852 - DNA, 60 bp, Artificial
  Synthetic oligonucleotide
atgagccttctaaccgaggtcgaaacgtatgttctctctatcgttccatcaggccccctc

SEQ ID NO: 69853 - DNA, 60 bp, Artificial
  Synthetic oligonucleotide
gtgaacagattgctgactcccagcacaggtcccataggcaaatggtggcaacaaccaatc

SEQ ID NO: 69854 - DNA, 60 bp, Artificial
  Synthetic oligonucleotide
agatgagccttctaaccgaggtcgaaacgtatgttctctctatcgttccatcaggccccc

SEQ ID NO: 69855 - DNA, 60 bp, Artificial
  Synthetic oligonucleotide
ttgaaagatgagccttctaacagaggtcgaaacgtatgttctctctatcgttccatcagg

SEQ ID NO: 69856 - DNA, 60 bp, Artificial
  Synthetic oligonucleotide
gcccagtgagcgaggactgcagcgtagacgctttgtccaaaatgccctcaatgggaatgg

SEQ ID NO: 69857 - DNA, 60 bp, Artificial
  Synthetic oligonucleotide
ccactgaagtggcatttggcctggtatgtgcaacatgtgaacagattgctgactcccagc

SEQ ID NO: 69858 - DNA, 60 bp, Artificial
  Synthetic oligonucleotide
gggctgtaaccaccgaagtggcatttggcctggtatgtgcaacatgtgaacagattgctg

SEQ ID NO: 69859 - DNA, 58 bp, Artificial
  Synthetic oligonucleotide
tgagtctatgagggaagaatatcgaaaggaacagcagaatgctgtgaatgctgacgac

SEQ ID NO: 69860 - DNA, 60 bp, Artificial
  Synthetic oligonucleotide
tagctccagtactggtctgagagatgatcttcttgaaaatttgcagacctatcagaaacg

SEQ ID NO: 69861 - DNA, 60 bp, Artificial
  Synthetic oligonucleotide
ccattgaaggcaaaagctgcatcaatcggtgcttttatgtggagttgataaggggaagga

SEQ ID NO: 69862 - DNA, 60 bp, Artificial
  Synthetic oligonucleotide
tctgttgaaggcaaaagctgcatcaatcggtgcttttatgtggagttgataaggggaaga

SEQ ID NO: 69863 - DNA, 60 bp, Artificial
  Synthetic oligonucleotide
ggcctttgatgatggaaatgacgtgtggatgggaaggacgatcagcgagaagttacgctc

SEQ ID NO: 69864 - DNA, 60 bp, Artificial
  Synthetic oligonucleotide
ggaaatgacgtgtggatgggaagaacgatcagcgagaagttacgctcaggttatgaaacc

SEQ ID NO: 69865 - DNA, 60 bp, Artificial
  Synthetic oligonucleotide
ttctggtattttctccattgaaggcaaaagctgcatcaatcggtgcttttatgtggagtt

SEQ ID NO: 69866 - DNA, 60 bp, Artificial
  Synthetic oligonucleotide
gaacccaggagtcggaatgcgtttgtatcaatggaacttgtacagtagtaatgattgatg

SEQ ID NO: 69867 - DNA, 60 bp, Artificial
  Synthetic oligonucleotide
ggcaagtgtgcatagcatggtccagctcaagttgtcacgatggaaaagcatggctgcatg

SEQ ID NO: 69868 - DNA, 60 bp, Artificial
  Synthetic oligonucleotide
aggcaagtgtgcatagcatggtccagctcaagttgtcacgatggaaaagcatggctgcat

SEQ ID NO: 69869 - DNA, 60 bp, Artificial
  Synthetic oligonucleotide
gttccatttcatctggggaccaagcaagtgtgcatagcatggtccagctcaagttgtcac

SEQ ID NO: 69870 - DNA, 60 bp, Artificial
  Synthetic oligonucleotide
gttccatttcatctggggactaagcaagtgtgcatagcatggtccagctcaagttgtcac

SEQ ID NO: 69871 - DNA, 60 bp, Artificial
  Synthetic oligonucleotide
aaaactgcatcaatcggtgcttttatgtggagttgataaggggaagaaaagaggaaactg

SEQ ID NO: 69872 - DNA, 60 bp, Artificial
  Synthetic oligonucleotide
ggcaaaagctgcatcaatcggtgcttttatgtggagttgataaggggaagaaaagaggaa

SEQ ID NO: 69873 - DNA, 60 bp, Artificial
  Synthetic oligonucleotide
ggacaacactaaacaacgtgcattcaaatgacacagtacatgataggaccccttatcgga

SEQ ID NO: 69874 - DNA, 60 bp, Artificial
  Synthetic oligonucleotide
ggacagggaacaacactaaacaacgtgcattcaaatgacacagtacatgataggacccct

SEQ ID NO: 69875 - DNA, 60 bp, Artificial
  Synthetic oligonucleotide
gggtgttccattccatttgggaaccaggcaagtgtgcatagcatggtccagctcaagttg

SEQ ID NO: 69876 - DNA, 60 bp, Artificial
  Synthetic oligonucleotide
aacactaaacaacgggcattcaaatgacacagtacatgataggaccccttaccggaccct

SEQ ID NO: 69877 - DNA, 60 bp, Artificial
  Synthetic oligonucleotide
ggattatagcattgtttccagttatgtgtgctcaggacttgttggagacacacccagaag

SEQ ID NO: 69878 - DNA, 60 bp, Artificial
  Synthetic oligonucleotide
gttgaggagtgctcctgctatcctcgatatcctggtgtcagatgtgtctgcagagacaac

SEQ ID NO: 69879 - DNA, 60 bp, Artificial
  Synthetic oligonucleotide
ggagtcagaatgcgtttgtatcaatggaacttgtacagtagtaatgaccgatgggagtgc

SEQ ID NO: 69880 - DNA, 60 bp, Artificial
  Synthetic oligonucleotide
atcgcaaaatgccataagcaccacattcccttatactggagatcctccatacagccatgg

SEQ ID NO: 69881 - DNA, 60 bp, Artificial
  Synthetic oligonucleotide
gttcgagaaatttttccctagtagttcatataggagaccgattggaatttctagcatggt

SEQ ID NO: 69882 - DNA, 60 bp, Artificial
  Synthetic oligonucleotide
aatgcaccaaatcatgagggaatacaagcaggggtggatagattctacaggatctgcaag

SEQ ID NO: 69883 - DNA, 60 bp, Artificial
  Synthetic oligonucleotide
gagggaatacaagcaggagtggatagattctacaggatctgcaagttggtgggaatcaac

SEQ ID NO: 69884 - DNA, 60 bp, Artificial
  Synthetic oligonucleotide
aaaaacaaagagtgaataagagaggctacctaataagagctttgacattgaacacgatga

SEQ ID NO: 69885 - DNA, 60 bp, Artificial
  Synthetic oligonucleotide
acatgtttgagagtaagagaatgaagctccgaacacaaatacccgcagaaatgctagcaa

SEQ ID NO: 69886 - DNA, 60 bp, Artificial
  Synthetic oligonucleotide
gtgaataagagaggctatctaataagagctttgacattgaacacgatgaccaaagatgca

SEQ ID NO: 69887 - DNA, 60 bp, Artificial
  Synthetic oligonucleotide
ataagagaggctacctaataagagctttgacattgaacacgatgaccaaagatgcagaga

SEQ ID NO: 69888 - DNA, 60 bp, Artificial
  Synthetic oligonucleotide
aatactgtagtgatgccagcccatggtccagccaaaagtatggaatatgatgccgttgca

SEQ ID NO: 69889 - DNA, 60 bp, Artificial
  Synthetic oligonucleotide
tcccttatactggagatcctccatacagccatggaacaggaacagggtacaccatggaca

SEQ ID NO: 69890 - DNA, 60 bp, Artificial
  Synthetic oligonucleotide
gaccctccatacagccatggaacaggaacagggtacaccatggacacagtcaacagaaca

SEQ ID NO: 69891 - DNA, 60 bp, Artificial
  Synthetic oligonucleotide
atggaacaggaacagggtacaccatggacacagtcaacagaacacaccaatattcagaga

SEQ ID NO: 69892 - DNA, 60 bp, Artificial
  Synthetic oligonucleotide
acagccatggaacaggaacagggtacaccatggacacagtcaacagaacacaccaatatt

SEQ ID NO: 69893 - DNA, 60 bp, Artificial
  Synthetic oligonucleotide
gacattaaacagaaatcaaccggcagcaactgcattagccaacaccatagaagtttttag

SEQ ID NO: 69894 - DNA, 60 bp, Artificial
  Synthetic oligonucleotide
aacagaaatcaaccggcagcaactgcattagccaacaccatagaagtttttagatcgaat

SEQ ID NO: 69895 - DNA, 60 bp, Artificial
  Synthetic oligonucleotide
aaatgccataagcaccacattcccttatactggagatcctccatacagccatggaacagg

SEQ ID NO: 69896 - DNA, 60 bp, Artificial
  Synthetic oligonucleotide
ccataagcaccacattcccttatactggagatcctccatacagccatggaacaggaacag

SEQ ID NO: 69897 - DNA, 60 bp, Artificial
  Synthetic oligonucleotide
agcgcaaaatgccataagcaccacattcccttatactggggatcctccatacagccatgg

SEQ ID NO: 69898 - DNA, 60 bp, Artificial
  Synthetic oligonucleotide
gcgcaaaatgccataagcaccacattcccttatactggagaccctccatacagccatgga

SEQ ID NO: 69899 - DNA, 60 bp, Artificial
  Synthetic oligonucleotide
taaaggttccagcgcaaaatgccataagcaccacattcccttatactggagaccctccat

SEQ ID NO: 69900 - DNA, 58 bp, Artificial
  Synthetic oligonucleotide
aaaatgatgactaattcacaagacactgagctttctttcacaatcactggggacaaca

SEQ ID NO: 69901 - DNA, 60 bp, Artificial
  Synthetic oligonucleotide
gactagggaaaggatacatgttcgagagtaagagaatgaagctccgaacacaaatacccg

SEQ ID NO: 69902 - DNA, 60 bp, Artificial
  Synthetic oligonucleotide
gtacatgttcgagagtaagagaatgaagctccgaacacaaatacccgcagaaatgctagc

SEQ ID NO: 69903 - DNA, 60 bp, Artificial
  Synthetic oligonucleotide
ccagctcatggtccagccaaaagtatggaatatgatgccgttgcaactacacactcctgg

SEQ ID NO: 69904 - DNA, 60 bp, Artificial
  Synthetic oligonucleotide
gattggacattaaacagaaatcaaccggcggcaactgcattagccaacaccatagaagtt

SEQ ID NO: 69905 - DNA, 60 bp, Artificial
  Synthetic oligonucleotide
gactggacattaaacagaaatcaaccggcagcaactgcattagccaacaccatagaagtt

SEQ ID NO: 69906 - DNA, 60 bp, Artificial
  Synthetic oligonucleotide
caccccaactcaacccaattgatggaccactacctgaagataatgagccaagtggatatg

SEQ ID NO: 69907 - DNA, 60 bp, Artificial
  Synthetic oligonucleotide
cccaactcaacccaattgatggaccactacctgaagataatgagccaagtggatatgcac

SEQ ID NO: 69908 - DNA, 60 bp, Artificial
  Synthetic oligonucleotide
tatgagtaatgaaggatcttatttcttcggagacaatgcagaagagtacgacaattaagg

SEQ ID NO: 69909 - DNA, 60 bp, Artificial
  Synthetic oligonucleotide
gatatgagtaatgaaggatcttatttcttcggagacaatgcagaagagtacgacaattag

SEQ ID NO: 69910 - DNA, 60 bp, Artificial
  Synthetic oligonucleotide
ttgatggaattgggcgattctacatccaaatgtgcactgaacttaaactcagtgattatg

SEQ ID NO: 69911 - DNA, 60 bp, Artificial
  Synthetic oligonucleotide
atgagtaatgaaggatcttatttcttcggagacaatgcagaagagtacgacaattaagga

SEQ ID NO: 69912 - DNA, 60 bp, Artificial
  Synthetic oligonucleotide
caaaattatggcgtcccaaggcaccaaacggtcttatgaacagatggaaactgatgggga

SEQ ID NO: 69913 - DNA, 60 bp, Artificial
  Synthetic oligonucleotide
gagggagataacattccatggggccaaagaaatagcactcagttattctgctggtgcact

SEQ ID NO: 69914 - DNA, 60 bp, Artificial
  Synthetic oligonucleotide
tatagaaaacttaagagggagataacattccatggggccaaagaaatagcactcagttat

SEQ ID NO: 69915 - DNA, 60 bp, Artificial
  Synthetic oligonucleotide
aagtcgaaaggttaaaacatggaacctttggccctgttcatttcagaaatcaagtcaaga

SEQ ID NO: 69916 - DNA, 60 bp, Artificial
  Synthetic oligonucleotide
ccaaggccattagaggccaatacagtgggtttgtcagaactctattccaacaaatgagag

SEQ ID NO: 69917 - DNA, 60 bp, Artificial
  Synthetic oligonucleotide
tttagttcccaaggccattagaggccaatacagtgggtttgtcagaactctattccaaca

SEQ ID NO: 69918 - DNA, 60 bp, Artificial
  Synthetic oligonucleotide
ccaaacggtcttatgaacagatggagactgatggggaacgccagaatgcaactgaaatca

SEQ ID NO: 69919 - DNA, 60 bp, Artificial
  Synthetic oligonucleotide
taatcagaccaaacgagaatcccgcacacaagagccagttggtgtggatggcttgcaatt

SEQ ID NO: 69920 - DNA, 60 bp, Artificial
  Synthetic oligonucleotide
ccaaatgtgcaccgagcttaagctcaatgattatgagggacggctgatccagaacagctt

SEQ ID NO: 69921 - DNA, 59 bp, Artificial
  Synthetic oligonucleotide
caagagctcttgttcgcaccggaatggatcccaggatgtgctctttgatgcaaggttca

SEQ ID NO: 69922 - DNA, 60 bp, Artificial
  Synthetic oligonucleotide
agcagttagaggtgacctgaatttcgtcaacagagcaaaccaacgattgaaccccatgca

SEQ ID NO: 69923 - DNA, 60 bp, Artificial
  Synthetic oligonucleotide
ccggcactttaattgaagacccagatgaaagcacatccggagtggagtctgccgtcttga

SEQ ID NO: 69924 - DNA, 60 bp, Artificial
  Synthetic oligonucleotide
ccggcactttaattgaagacccagatgaaagcacatctggagtggagtctgctgtcttga

SEQ ID NO: 69925 - DNA, 60 bp, Artificial
  Synthetic oligonucleotide
ccggcactttaattgaagacccagatgaaagcacatctggagtggagtccgctgtcttga

SEQ ID NO: 69926 - DNA, 60 bp, Artificial
  Synthetic oligonucleotide
ccggcactttaattgaagacccagatgaaagcacatccggagtggagtccgccgtcttga

SEQ ID NO: 69927 - DNA, 60 bp, Artificial
  Synthetic oligonucleotide
cagttagaggtgacctgaatttcgtcaacagagcaaaccaacgattgaaccccatgcatc

SEQ ID NO: 69928 - DNA, 60 bp, Artificial
  Synthetic oligonucleotide
gaccactaaaagactaacagttctcggaaaagatgccggcactttaattgaagacccaga

SEQ ID NO: 69929 - DNA, 60 bp, Artificial
  Synthetic oligonucleotide
gttctcggaaaagatgccggcactttaattgaagacccagatgaaagcacatccggagtg

SEQ ID NO: 69930 - DNA, 60 bp, Artificial
  Synthetic oligonucleotide
ctaacagttctcggaaaagatgccggcactttaattgaagacccagatgaaagcacatcc

SEQ ID NO: 69931 - DNA, 60 bp, Artificial
  Synthetic oligonucleotide
aatgtgaggggatcagggatgagaatacttgtaagaggcaattctcctgtattcaactac

SEQ ID NO: 69932 - DNA, 60 bp, Artificial
  Synthetic oligonucleotide
ccgagattgcaaaatttctcccttgatggttgcatacatgttagagagagaacttgtccg

SEQ ID NO: 69933 - DNA, 60 bp, Artificial
  Synthetic oligonucleotide
ccgagattgcaaaatttctcccttgatggttgcatacatgttagagagagaacttgttcg

SEQ ID NO: 69934 - DNA, 53 bp, Artificial
  Synthetic oligonucleotide
gcaaaatttctcccttgatggttgcatacatgttagagagagaacttgtacga

SEQ ID NO: 69935 - DNA, 60 bp, Artificial
  Synthetic oligonucleotide
ccaggtggagaagtgaggaatgacgatgttgatcaaagcctaattattgcagccaggaac

SEQ ID NO: 69936 - DNA, 60 bp, Artificial
  Synthetic oligonucleotide
aatgtgaggggatcagggatgagaatacttgtaaggggcaattctcctgtgttcaactac

SEQ ID NO: 69937 - DNA, 60 bp, Artificial
  Synthetic oligonucleotide
caagctgtggatatatgcaaggctgcaatggggttgagaatcagctcatccttcagcttt

SEQ ID NO: 69938 - DNA, 60 bp, Artificial
  Synthetic oligonucleotide
ctatactcagaaaagcaaccagaagattggttcagctcatagtgagtggaaaggacgaac

SEQ ID NO: 69939 - DNA, 60 bp, Artificial
  Synthetic oligonucleotide
aagaccactaaaagactaacagttctcggaaaagatgccggcactttaattgaagaccca

SEQ ID NO: 69940 - DNA, 60 bp, Artificial
  Synthetic oligonucleotide
gacaactaaaagactaacgattctcggaaaagatgccggcactttaattgaagacccaga

SEQ ID NO: 69941 - DNA, 60 bp, Artificial
  Synthetic oligonucleotide
ataaaagcagttagaggtgacctgaatttcgtcaacagggcaaaccaacgattgaacccc

SEQ ID NO: 69942 - DNA, 60 bp, Artificial
  Synthetic oligonucleotide
gacaactaaaagactaacaattctcggaaaagatgccggcactttaattgaagacccaga

SEQ ID NO: 69943 - DNA, 60 bp, Artificial
  Synthetic oligonucleotide
gccggcactttaattgaagacccagatgaaagcacatccggagtggagtccgctgtcttg

SEQ ID NO: 69944 - DNA, 60 bp, Artificial
  Synthetic oligonucleotide
gtacagagagggtggtggttagcattgatcggtttttgagagttcgagaccaacttggga

SEQ ID NO: 69945 - DNA, 60 bp, Artificial
  Synthetic oligonucleotide
gtacagagagggtggtggttagcattgatcggtttttgagagttcgggaccaacgtggga

SEQ ID NO: 69946 - DNA, 60 bp, Artificial
  Synthetic oligonucleotide
caacgtgggaatgtattattatctcctgaggaggtcagtgaaacacagggaactgagaga

SEQ ID NO: 69947 - DNA, 60 bp, Artificial
  Synthetic oligonucleotide
gagagactgacaataacttactcatcgtcaatgatgtgggagattaacggtcctgagtcg

SEQ ID NO: 69948 - DNA, 60 bp, Artificial
  Synthetic oligonucleotide
gcagttctcttcattgactgtaaatgtgaggggatcagggatgagaatacttgtaagggg

SEQ ID NO: 69949 - DNA, 60 bp, Artificial
  Synthetic oligonucleotide
gtgaggggatcagggatgagaatacttgtaaggggcaattctcctgtgttcaactacaac

SEQ ID NO: 69950 - DNA, 60 bp, Artificial
  Synthetic oligonucleotide
cattgactgtaaatgtgaggggatcagggatgagaatacttgtaaggggcaattctcctg

SEQ ID NO: 69951 - DNA, 60 bp, Artificial
  Synthetic oligonucleotide
ctcttcattgactgtaaatgtgaggggatcagggatgagaatacttgtaaggggcaattc

SEQ ID NO: 69952 - DNA, 60 bp, Artificial
  Synthetic oligonucleotide
aatgtgaggggatcagggatgagaatacttgtaaggggtaattctcctgtattcaactac

SEQ ID NO: 69953 - DNA, 60 bp, Artificial
  Synthetic oligonucleotide
tgaccgactagagaacatagtattactaagggctttcaccgaagagggagcaattgttgg

SEQ ID NO: 69954 - DNA, 60 bp, Artificial
  Synthetic oligonucleotide
ggcgggaacaattaggtcagaagtttgaagaaataagatggctgattgaagaagtgaggc

SEQ ID NO: 69955 - DNA, 60 bp, Artificial
  Synthetic oligonucleotide
gtcagaatggaccaggcgataatggataagaacatcatactgaaagctaatttcagtgtg

SEQ ID NO: 69956 - DNA, 60 bp, Artificial
  Synthetic oligonucleotide
gctaatttcagtgtgatttttgaccggttggagaatctgacattactaagggctttcacc

SEQ ID NO: 69957 - DNA, 60 bp, Artificial
  Synthetic oligonucleotide
tttgtgtcagaatggaccaggcgataatggataagaacatcatactgaaagctaatttca

SEQ ID NO: 69958 - DNA, 60 bp, Artificial
  Synthetic oligonucleotide
ccgcacttgcttcgcggtacctaactgacatgactgttgaagaaatgtcaagggactggt

SEQ ID NO: 69959 - DNA, 60 bp, Artificial
  Synthetic oligonucleotide
tagagaggattctgaaagaagaatccgatgaggcatttaaaatgaccatggcttccgcac

SEQ ID NO: 69960 - DNA, 60 bp, Artificial
  Synthetic oligonucleotide
atgcccccttccttgatcggcttcgccgagatcagaagtctctaaagggaagaggcagca

SEQ ID NO: 69961 - DNA, 57 bp, Artificial
  Synthetic oligonucleotide
ttgcttcctttggcatgtccgcaaacaagttgcagacaaagatctaggcgatgcccc

SEQ ID NO: 69962 - DNA, 60 bp, Artificial
  Synthetic oligonucleotide
ttgcttcctttggcatgtccgcaaacaagttgcagacaaagatctaggcgatgccccctt

SEQ ID NO: 69963 - DNA, 60 bp, Artificial
  Synthetic oligonucleotide
ggtgacaaagacataatggattcccacactgtgtcaagctttcaggtagattgcttcctt

SEQ ID NO: 69964 - DNA, 60 bp, Artificial
  Synthetic oligonucleotide
gcttccgcacttgcttcgcggtacctaactgacatgactgttgaagaaatgtcaagggac

SEQ ID NO: 69965 - DNA, 53 bp, Artificial
  Synthetic oligonucleotide
atccgatgaggcatttaaaatgaccatggcttccgcacttgcttcgcggtacc

SEQ ID NO: 69966 - DNA, 60 bp, Artificial
  Synthetic oligonucleotide
atttatgcaagcattacagctattgtttgaagtggaacaagagattagaacgttctcgtt

SEQ ID NO: 69967 - DNA, 60 bp, Artificial
  Synthetic oligonucleotide
gcaagcattacagctattgtttgaagtggaacaagagattagaacgttctcgtttcagct

SEQ ID NO: 69968 - DNA, 60 bp, Artificial
  Synthetic oligonucleotide
tgcacaaagagcaatggtggatcaagtgagagaaagtcgaaacccaggaaatgctgagat

SEQ ID NO: 69969 - DNA, 55 bp, Artificial
  Synthetic oligonucleotide
ggatcaagtactcttgaactgagaagcgggtactgggccataaggaccaggagtg

SEQ ID NO: 69970 - DNA, 50 bp, Artificial
  Synthetic oligonucleotide
gagcactcttgaactgagaagcgggtactgggccataaggaccaggagtg

SEQ ID NO: 69971 - DNA, 60 bp, Artificial
  Synthetic oligonucleotide
atatgggatcgagcactcttgaactgagaagcgggtactgggccataaggaccaggagtg

SEQ ID NO: 69972 - DNA, 60 bp, Artificial
  Synthetic oligonucleotide
ggggatcaacgatcgaaatttctggagaggtgagaatggacggaaaacaagaagtgctta

SEQ ID NO: 69973 - DNA, 60 bp, Artificial
  Synthetic oligonucleotide
cagctggtgtggatggcatgccattccgctgcatttgaagatttaagattgttaagcttc

SEQ ID NO: 69974 - DNA, 55 bp, Artificial
  Synthetic oligonucleotide
tgagaatgggcggaaaacaagaagtgcttatgagagaatgtgcaacattcttaaa

SEQ ID NO: 69975 - DNA, 60 bp, Artificial
  Synthetic oligonucleotide
caaaatcatggcgtctcaaggcaccaaacggtcttatgaacagatggaaactgacgggga

SEQ ID NO: 69976 - DNA, 60 bp, Artificial
  Synthetic oligonucleotide
aatatgggatcgagcactcttgaactgagaagcgggtactgggccataaggaccaggagt

SEQ ID NO: 69977 - DNA, 60 bp, Artificial
  Synthetic oligonucleotide
actcagtgatcatgaagggcgattaatccagaacagcttgacaatagagaaaatggtgct

SEQ ID NO: 69978 - DNA, 60 bp, Artificial
  Synthetic oligonucleotide
gtggatggcatgccattccgctgcatttgaagatttaagattgttaagcttcatcagggg

SEQ ID NO: 69979 - DNA, 60 bp, Artificial
  Synthetic oligonucleotide
tgcacaaagagcaatggtggatcaagtgagagaaagtcggaacccaggaaatactgagat

SEQ ID NO: 69980 - DNA, 60 bp, Artificial
  Synthetic oligonucleotide
ctcagtgattatgaagggcggttgatccaaaacagcttgacaatagagaaaatggtgctc

SEQ ID NO: 69981 - DNA, 60 bp, Artificial
  Synthetic oligonucleotide
tcagtgatcatgaagggcgattaatccagaacagcttgacaatagagaaaatggtgctct

SEQ ID NO: 69982 - DNA, 60 bp, Artificial
  Synthetic oligonucleotide
agtgattatgaagggcggttgatccaaaacagcttgacaatagagaaaatggtgctctct

SEQ ID NO: 69983 - DNA, 60 bp, Artificial
  Synthetic oligonucleotide
actcagtgatcatgaagggcgattgatccagaacagcttgacaatagagaaaatggtgct

SEQ ID NO: 69984 - DNA, 60 bp, Artificial
  Synthetic oligonucleotide
actcagtgattatgaaggacggttgatccaaaacagcttgacaatagagaaaatggtgct

SEQ ID NO: 69985 - DNA, 60 bp, Artificial
  Synthetic oligonucleotide
ctcagtgatcatgaagggcgattgatccagaacagcttgacaatagagaaaatggtgctc

SEQ ID NO: 69986 - DNA, 60 bp, Artificial
  Synthetic oligonucleotide
ctcagtgatcatgaagggcgattaatccagaacagcttgacaatagagaaaatggtgctc

SEQ ID NO: 69987 - DNA, 60 bp, Artificial
  Synthetic oligonucleotide
gatcatgaagggcgattaatccagaacagcttgacaatagagaaaatggtgctctctgct

SEQ ID NO: 69988 - DNA, 60 bp, Artificial
  Synthetic oligonucleotide
cctcttttgaaatgagtaatgaaagatcttatttcttcggagacaatgcagaagagtacg

SEQ ID NO: 69989 - DNA, 60 bp, Artificial
  Synthetic oligonucleotide
tcagctggtgtggatggcatgccattccgctgcatttgaagatttaagattgttaagctt

SEQ ID NO: 69990 - DNA, 60 bp, Artificial
  Synthetic oligonucleotide
atgctgagatagaagatctcatatttttggcaagatctgcattaatattgagagggtcag

SEQ ID NO: 69991 - DNA, 60 bp, Artificial
  Synthetic oligonucleotide
ctgatcagaatggtcaaacgggggatcaacgatcgaaatttctggagaggtgagaatggg

SEQ ID NO: 69992 - DNA, 60 bp, Artificial
  Synthetic oligonucleotide
ttgggcaaggagacgtggtattggtaatgaaacgaaaacgggactctagcatacttactg

SEQ ID NO: 69993 - DNA, 60 bp, Artificial
  Synthetic oligonucleotide
tactgattcgaaatggaagattttgtgcgacaatgcttcaacccgatgattgtcgaactt

SEQ ID NO: 69994 - DNA, 60 bp, Artificial
  Synthetic oligonucleotide
gccaggaacatagtaagaagagctgcagtatcagcagatccactagcatctttattggag

SEQ ID NO: 69995 - DNA, 60 bp, Artificial
  Synthetic oligonucleotide
agccaggaacatagtaagaagagctgcagtatcagcagatccactagcatctttattgga

SEQ ID NO: 69996 - DNA, 60 bp, Artificial
  Synthetic oligonucleotide
caattgagtacattgcaagcatgaggaggaattatttcacagcagaggtgtcccattgta

SEQ ID NO: 69997 - DNA, 60 bp, Artificial
  Synthetic oligonucleotide
attgagtacattgcaagcatgaggaggaattatttcacagcggaggtgtcccattgtaga

SEQ ID NO: 69998 - DNA, 60 bp, Artificial
  Synthetic oligonucleotide
cagcagaggtgtcccattgtagagccactgagtacataatgaagggggtatacattaata

SEQ ID NO: 69999 - DNA, 60 bp, Artificial
  Synthetic oligonucleotide
atccaaatgcactgttgaagcacagatttgaaataatcgaggggagagacagaacaatgg

SEQ ID NO: 70000 - DNA, 60 bp, Artificial
  Synthetic oligonucleotide
acaaatttgcagcaatatgcacccacttggaggtatgtttcatgtattcagattttcatt

SEQ ID NO: 70001 - DNA, 60 bp, Artificial
  Synthetic oligonucleotide
atggaagattttgtgcgacaatgcttcaacccgatgattgttgaacttgcagaaaaagca

SEQ ID NO: 70002 - DNA, 60 bp, Artificial
  Synthetic oligonucleotide
cactgttgaagcacagatttgaaataatcgaggggagagacagaacaatggcctggacag

SEQ ID NO: 70003 - DNA, 60 bp, Artificial
  Synthetic oligonucleotide
cagatcgagagcatgattgaagccgagtcctcgattaaagagaaagacatgaccaaagag

SEQ ID NO: 70004 - DNA, 60 bp, Artificial
  Synthetic oligonucleotide
acaaacaaatttgcagcaatatgcactcacttggaggtatgtttcatgtattcagatttt

SEQ ID NO: 70005 - DNA, 60 bp, Artificial
  Synthetic oligonucleotide
agctggatacagaatgagttcaacaaggcctgcgagctaactgattcagtctggatagag

SEQ ID NO: 70006 - DNA, 60 bp, Artificial
  Synthetic oligonucleotide
ggatacagaatgagttcaacaaggcctgcgagctaactgattcagtctggatagagctcg

SEQ ID NO: 70007 - DNA, 60 bp, Artificial
  Synthetic oligonucleotide
tgaaattgagcattgaagacccaagtcacgaaggagaagggattccattatatgatgcga

SEQ ID NO: 70008 - DNA, 60 bp, Artificial
  Synthetic oligonucleotide
ccgaacggctgcattgagggcaagctttctcaaatgtccaaagaagtgaatgccaaaatt

SEQ ID NO: 70009 - DNA, 60 bp, Artificial
  Synthetic oligonucleotide
ggacttagccccaattgagtacattgcaagcatgaggaggaattatttcacagcagaggt

SEQ ID NO: 70010 - DNA, 51 bp, Artificial
  Synthetic oligonucleotide
gaccaaagtctcccgccgaacttctcctgccttgagaattttagagcctat

SEQ ID NO: 70011 - DNA, 60 bp, Artificial
  Synthetic oligonucleotide
gcagatcgagagcatgattgaagccgagtcctcgattaaagagaaagacatgaccaaaga

SEQ ID NO: 70012 - DNA, 60 bp, Artificial
  Synthetic oligonucleotide
taaaaggaagatctcatttaaggaatgacacagatgtggtaaactttgtgagcatggagt

SEQ ID NO: 70013 - DNA, 60 bp, Artificial
  Synthetic oligonucleotide
gtgcagaactaaagagggaaggcgaaaaaccaatttatatggattcatcataaaaggaag

SEQ ID NO: 70014 - DNA, 55 bp, Artificial
  Synthetic oligonucleotide
ggggtatacattaatactgccttgctcaatgcatcctgtgcagcaatggacgatt

SEQ ID NO: 70015 - DNA, 60 bp, Artificial
  Synthetic oligonucleotide
atttaaggaatgacacagatgtggtaaactttgtgagcatggagttttctctcactgacc

SEQ ID NO: 70016 - DNA, 60 bp, Artificial
  Synthetic oligonucleotide
tgtcacctctgactaaagggattttggggtttgtgttcacgctcaccgtgcccagtgagc

SEQ ID NO: 70017 - DNA, 60 bp, Artificial
  Synthetic oligonucleotide
tttgtgttcacgctcaccgtgcccagtgagcgaggactgcagcgtagacgctttgtccaa

SEQ ID NO: 70018 - DNA, 60 bp, Artificial
  Synthetic oligonucleotide
cttagttattctgctggtgcacttgccagttgcatgggcctcatatacaatagaatgggg

SEQ ID NO: 70019 - DNA, 60 bp, Artificial
  Synthetic oligonucleotide
tctcagttattctgctggtgcacttgccagttgcatgggcctcatatacaatagaatggg

SEQ ID NO: 70020 - DNA, 60 bp, Artificial
  Synthetic oligonucleotide
actcagttattctgctggtgcacttgccagttgcatgggcctcatatacaataggatggg

SEQ ID NO: 70021 - DNA, 60 bp, Artificial
  Synthetic oligonucleotide
ggccaggcagatggtgcaggcaatgagagccattgggactcatcctagctctagcactgg

SEQ ID NO: 70022 - DNA, 60 bp, Artificial
  Synthetic oligonucleotide
cctagctctagcactggtctgaaaaatgatctccttgataatttgcaggcctatcagaaa

SEQ ID NO: 70023 - DNA, 60 bp, Artificial
  Synthetic oligonucleotide
ccaccgaatcagcatttggccttatatgcgcaacctgtgaacagattgccgactcccagc

SEQ ID NO: 70024 - DNA, 60 bp, Artificial
  Synthetic oligonucleotide
ctagtcaggccaggcagatggtgcaggcaatgagagccattgggactcatcctagctcta

SEQ ID NO: 70025 - DNA, 60 bp, Artificial
  Synthetic oligonucleotide
gggatccaaataatatggacaaagcagtcaaactgtatcgaaagcttaagagggagataa

SEQ ID NO: 70026 - DNA, 60 bp, Artificial
  Synthetic oligonucleotide
gggcctgctacggaaggagtaccagagtctatgagggaagaatatcgagaggaacagcag

SEQ ID NO: 70027 - DNA, 60 bp, Artificial
  Synthetic oligonucleotide
aaggagggcctgctacggaaggagtaccagagtctatgagggaagaatatcgagaggaac

SEQ ID NO: 70028 - DNA, 60 bp, Artificial
  Synthetic oligonucleotide
gttgttgccgcaagtataattgggattgtgcacctgatattgtggattattgatcggctt

SEQ ID NO: 70029 - DNA, 60 bp, Artificial
  Synthetic oligonucleotide
ccaaaagcatttatcgtatctttaaacacggtttaaaaggagggcctgctacggaaggag

SEQ ID NO: 70030 - DNA, 60 bp, Artificial
  Synthetic oligonucleotide
aaagacaagaccaatcctgtcacctctgactaaggggattttggggtttgtgttcacgct

SEQ ID NO: 70031 - DNA, 60 bp, Artificial
  Synthetic oligonucleotide
tctggaagaacaccccagcgcggggaaagatcctaagaaaactggagggcccatatacaa

SEQ ID NO: 70032 - DNA, 60 bp, Artificial
  Synthetic oligonucleotide
aagaacaccccagcgcggggaaagatcctaagaaaactggagggcccatatacaaaagag

SEQ ID NO: 70033 - DNA, 55 bp, Artificial
  Synthetic oligonucleotide
aagaacaccccagcgcggggaaagatcctaagaaaactggagggcccatatacaa

SEQ ID NO: 70034 - DNA, 60 bp, Artificial
  Synthetic oligonucleotide
agagacataagcgatttgaagcaatatgacagtgacgaacctgaattaaggtcactttca

SEQ ID NO: 70035 - DNA, 60 bp, Artificial
  Synthetic oligonucleotide
gcgatttgaagcaatatgacagtgacgaacctgaattaaggtcactttcaagctggatac

SEQ ID NO: 70036 - DNA, 60 bp, Artificial
  Synthetic oligonucleotide
tactgattcaaaatggaagattttgtgcgacaatgcttcaacccgatgattgtcgaactt

SEQ ID NO: 70037 - DNA, 60 bp, Artificial
  Synthetic oligonucleotide
taatgaagggggtatacattaatactgctttgctcaatgcatcctgtgcagcaatggatg

SEQ ID NO: 70038 - DNA, 60 bp, Artificial
  Synthetic oligonucleotide
ctgatgtggtaaactttgtgagcatggagttttctctcactgacccgagacttgagccac

SEQ ID NO: 70039 - DNA, 60 bp, Artificial
  Synthetic oligonucleotide
gacactgatgtggtaaactttgtgagcatggagttttctctcactgacccgagacttgag

SEQ ID NO: 70040 - DNA, 60 bp, Artificial
  Synthetic oligonucleotide
ccaaagaaataggaaatgggtgttttgaattctatcacaagtgtaacgatgaatgcatgg

SEQ ID NO: 70041 - DNA, 60 bp, Artificial
  Synthetic oligonucleotide
cacaagtgtaacgatgaatgcatggagagtgtaaaaaatggaacttatgactatccaaaa

SEQ ID NO: 70042 - DNA, 60 bp, Artificial
  Synthetic oligonucleotide
tagcgccaagatatgctttcgcactgagtagaggctttggatcaggaatcatcaactcaa

SEQ ID NO: 70043 - DNA, 60 bp, Artificial
  Synthetic oligonucleotide
ctgcttgaacccggggatacaataatatttgaggcaaatggaaatctaatagcgccaaga

SEQ ID NO: 70044 - DNA, 60 bp, Artificial
  Synthetic oligonucleotide
aaaagacccaaagtaagagatcaagaaggaagaatcaactactactggactctgcttgaa

SEQ ID NO: 70045 - DNA, 60 bp, Artificial
  Synthetic oligonucleotide
ctgtagtgtcttcacattatagcagaaaattcaccccagaaatagccaaaagacccaaag

SEQ ID NO: 70046 - DNA, 60 bp, Artificial
  Synthetic oligonucleotide
tctgcttgaacccggggatacaataatatttgaggcaaatggaaatctaatagcgccaag

SEQ ID NO: 70047 - DNA, 60 bp, Artificial
  Synthetic oligonucleotide
ccaaagtaagagatcaagaaggaagaatcaactactactggactctgcttgaacccgggg

SEQ ID NO: 70048 - DNA, 60 bp, Artificial
  Synthetic oligonucleotide
gccaaacataggtgaccaaaaggccctctatcatacagaaaatgcttatgtctctgtagt

SEQ ID NO: 70049 - DNA, 60 bp, Artificial
  Synthetic oligonucleotide
aaagaagtccttgtactatggggtgttcatcacccgccaaacataggtgaccaaaaggcc

SEQ ID NO: 70050 - DNA, 60 bp, Artificial
  Synthetic oligonucleotide
tctctgtagtgtcttcacattatagcagaaaattcaccccagaaatagccaaaagaccca

SEQ ID NO: 70051 - DNA, 60 bp, Artificial
  Synthetic oligonucleotide
ggtgaccaaaaggccctctatcatacagaaaatgcttatgtctctgtagtgtcttcacat

SEQ ID NO: 70052 - DNA, 60 bp, Artificial
  Synthetic oligonucleotide
aattaaagaataatgccaaagaaataggaaatgggtgttttgaattctatcacaagtgta

SEQ ID NO: 70053 - DNA, 60 bp, Artificial
  Synthetic oligonucleotide
ggatttccatgactccaatgtgaagaatctgtatgagaaagtaaaaagccaattaaagaa

SEQ ID NO: 70054 - DNA, 60 bp, Artificial
  Synthetic oligonucleotide
gcagaactgttggttctactggaaaatgaaaggactttggatttccatgactccaatgtg

SEQ ID NO: 70055 - DNA, 60 bp, Artificial
  Synthetic oligonucleotide
tggacatataatgcagaactgttggttctactggaaaatgaaaggactttggatttccat

SEQ ID NO: 70056 - DNA, 60 bp, Artificial
  Synthetic oligonucleotide
gcaaacaacaaagagaaagaagtccttgtactatggggtgttcatcacccgccaaacata

SEQ ID NO: 70057 - DNA, 60 bp, Artificial
  Synthetic oligonucleotide
tgaacactcaattcacagctgtgggcaaagaattcaacaaattggaaagaaggatggaaa

SEQ ID NO: 70058 - DNA, 60 bp, Artificial
  Synthetic oligonucleotide
aaatgccattaatgggattacaaacaaggtgaattctgtaattgagaaaatgaacactca

SEQ ID NO: 70059 - DNA, 60 bp, Artificial
  Synthetic oligonucleotide
aaagctcatggcccaaccacaccgtaaccggagtatcagcatcatgctcccataatggga

SEQ ID NO: 70060 - DNA, 60 bp, Artificial
  Synthetic oligonucleotide
atcttcatttgagaggttcgaaatattccccaaagaaagctcatggcccaaccacaccgt

SEQ ID NO: 70061 - DNA, 60 bp, Artificial
  Synthetic oligonucleotide
tatggctgacggggaagaatggtttgtacccaaacctgagcaagtcctatgcaaacaaca

SEQ ID NO: 70062 - DNA, 60 bp, Artificial
  Synthetic oligonucleotide
tcatggcccaaccacaccgtaaccggagtatcagcatcatgctcccataatgggaaaagc

SEQ ID NO: 70063 - DNA, 60 bp, Artificial
  Synthetic oligonucleotide
aggaaacccagaatgcgaattactgatttccaaggaatcatggtcctacattgtagaaaa

SEQ ID NO: 70064 - DNA, 60 bp, Artificial
  Synthetic oligonucleotide
gccgggtggatcttaggaaacccagaatgcgaattactgatttccaaggaatcatggtcc

SEQ ID NO: 70065 - DNA, 60 bp, Artificial
  Synthetic oligonucleotide
gcaattgagttcagtatcttcatttgagaggttcgaaatattccccaaagaaagctcatg

SEQ ID NO: 70066 - DNA, 60 bp, Artificial
  Synthetic oligonucleotide
ggctgacggggaagaatggtttgtacccaaacctgagcaagtcctatgcaaacaacaaag

SEQ ID NO: 70067 - DNA, 60 bp, Artificial
  Synthetic oligonucleotide
ggggtggactggaatggtagatggttggtatggttatcatcatcagaatgagcaaggatc

SEQ ID NO: 70068 - DNA, 60 bp, Artificial
  Synthetic oligonucleotide
catcagaatgagcaaggatctggctatgctgcagatcaaaaaagcacacaaaatgccatt

SEQ ID NO: 70069 - DNA, 60 bp, Artificial
  Synthetic oligonucleotide
caccaatggatgaatgtgatgcgaagtgccaaacacctcagggagctataaacagcagtc

SEQ ID NO: 70070 - DNA, 60 bp, Artificial
  Synthetic oligonucleotide
ctttcgcactgagtagaggctttggatcaggaatcatcaactcaaatgcaccaatggatg

SEQ ID NO: 70071 - DNA, 60 bp, Artificial
  Synthetic oligonucleotide
atcaactcaaatgcaccaatggatgaatgtgatgcgaagtgccaaacacctcagggagct

SEQ ID NO: 70072 - DNA, 60 bp, Artificial
  Synthetic oligonucleotide
cagcttctggatgtgttccaatgggtctttgcagtgtagaatatgcatctaagaccagaa

SEQ ID NO: 70073 - DNA, 60 bp, Artificial
  Synthetic oligonucleotide
tatgtctattaaaaggaatagccccactacaattgggtaattgcagcgttgccgggtgga

SEQ ID NO: 70074 - DNA, 60 bp, Artificial
  Synthetic oligonucleotide
gaatagccccactacaattgggtaattgcagcgttgccgggtggatcttaggaaacccag

SEQ ID NO: 70075 - DNA, 60 bp, Artificial
  Synthetic oligonucleotide
ctatccaaaatattccgaagaatcaaagttaaacagggagaaaattgatggagtgaaatt

SEQ ID NO: 70076 - DNA, 60 bp, Artificial
  Synthetic oligonucleotide
tccgaagaatcaaagttaaacagggagaaaattgatggagtgaaattggaatcaatggga

SEQ ID NO: 70077 - DNA, 60 bp, Artificial
  Synthetic oligonucleotide
atcatggtcctacattgtagaaaaaccaaatcctgagaatggaacatgttacccagggca

SEQ ID NO: 70078 - DNA, 60 bp, Artificial
  Synthetic oligonucleotide
gacagtgacacactctgtcaacctgcttgaggacagtcacaatggaaaactatgtctatt

SEQ ID NO: 70079 - DNA, 60 bp, Artificial
  Synthetic oligonucleotide
cgtcgggaagatgattgatggaattgggcgattctacatccaaatgtgcactgaacttaa

SEQ ID NO: 70080 - DNA, 60 bp, Artificial
  Synthetic oligonucleotide
catctgcagtggagtgttcggtgacaatccgcgtcccaaagatggagagggcagctgcaa

SEQ ID NO: 70081 - DNA, 59 bp, Artificial
  Synthetic oligonucleotide
tatgcagggacaactggcatggttcaaatcgaccttgggtgtcttttaatcaaaacttg

SEQ ID NO: 70082 - DNA, 60 bp, Artificial
  Synthetic oligonucleotide
acaagagtctgaatgtgtctgtatgaacgggtcatgtttcaccataatgaccgatggccc

SEQ ID NO: 70083 - DNA, 57 bp, Artificial
  Synthetic oligonucleotide
ctgttacccagacactggcacagtgatgtgtgtatgcagggacaactggcatggttc

SEQ ID NO: 70084 - DNA, 60 bp, Artificial
  Synthetic oligonucleotide
tcattatgaggaatgttcctgttacccagacactggcacagtgatgtgtgtatgcaggga

SEQ ID NO: 70085 - DNA, 60 bp, Artificial
  Synthetic oligonucleotide
atcgaaaaggggaaggttactaaatcaatagagttgaatgcacccaattttcattatgag

SEQ ID NO: 70086 - DNA, 60 bp, Artificial
  Synthetic oligonucleotide
acagcggaagtttcgtccaacatcctgagttaacaggattggactgtataagaccttgct

SEQ ID NO: 70087 - DNA, 60 bp, Artificial
  Synthetic oligonucleotide
cgtccaacatcctgagttaacaggattggactgtataagaccttgcttctgggttgagtt

SEQ ID NO: 70088 - DNA, 60 bp, Artificial
  Synthetic oligonucleotide
tgatttctcagtgaaacaggatgttgtagcaataactgattggtcagggtacagcggaag

SEQ ID NO: 70089 - DNA, 60 bp, Artificial
  Synthetic oligonucleotide
gaaccttttttctgacccaaggcgctctattaaatgacaaacattcaaatgggaccgtaa

SEQ ID NO: 70090 - DNA, 50 bp, Artificial
  Synthetic oligonucleotide
ttttgtggcgttaatagtgatactgcaaactggtcttggccagacggtgc

SEQ ID NO: 70091 - DNA, 60 bp, Artificial
  Synthetic oligonucleotide
acaggatgttgtagcaataactgattggtcagggtacagcggaagtttcgtccaacatcc

SEQ ID NO: 70092 - DNA, 60 bp, Artificial
  Synthetic oligonucleotide
gggaccgtaaaggacagaagtccttatagggccttaatgagctgtcctctaggtgaagct

SEQ ID NO: 70093 - DNA, 60 bp, Artificial
  Synthetic oligonucleotide
gcagtggagtgttcggtgacaatccgcgtcccaaagatggagagggcagctgcaatccag

SEQ ID NO: 70094 - DNA, 60 bp, Artificial
  Synthetic oligonucleotide
gcagctgcaatccagtgactgttgatggagcagacggagtaaaagggttttcatacaaat

SEQ ID NO: 70095 - DNA, 60 bp, Artificial
  Synthetic oligonucleotide
aaggggtttgagatgatttgggatcctaatggatggacaaataccgacagtgatttctca

SEQ ID NO: 70096 - DNA, 60 bp, Artificial
  Synthetic oligonucleotide
gagtttaaaatgaacccaaatcaaaagataataaccattggatcaatcagtatagcaatc

SEQ ID NO: 70097 - DNA, 55 bp, Artificial
  Synthetic oligonucleotide
acaacactaatgttgttgctggaaaggacaaaacttcagtgacattggccggcaa

SEQ ID NO: 70098 - DNA, 60 bp, Artificial
  Synthetic oligonucleotide
tcacacatatgttaatattaacaacactaatgttgttgctggaaaggacaaaacttcagt

SEQ ID NO: 70099 - DNA, 60 bp, Artificial
  Synthetic oligonucleotide
ggaagaggcaacactctcggtctagacatcaaagcagccacccatgttggaaagcagatt

SEQ ID NO: 70100 - DNA, 50 bp, Artificial
  Synthetic oligonucleotide
gaggcaacactctcggtctagacatcaaagcagccacccatgttggaaag

SEQ ID NO: 70101 - DNA, 60 bp, Artificial
  Synthetic oligonucleotide
gaagaggcaacactctcggtctagacatcaaagcagccacccatgttggaaagcagattg

SEQ ID NO: 70102 - DNA, 60 bp, Artificial
  Synthetic oligonucleotide
ccctttgcatcagaatggaccagacaatcatggagaaaaacatcatgttgaaagcgaatt

SEQ ID NO: 70103 - DNA, 60 bp, Artificial
  Synthetic oligonucleotide
ccccagcgcggggaaagatcctaagaaaactggagggcccatatacaaaagagtagatgg

SEQ ID NO: 70104 - DNA, 60 bp, Artificial
  Synthetic oligonucleotide
gaacggctgcattgagggcaagctttctcaaatgtccaaagaagtgaatgctaaaattga

SEQ ID NO: 70105 - DNA, 60 bp, Artificial
  Synthetic oligonucleotide
ccactgagtacataatgaagggggtatacattaatactgccttgctcaatgcatcctgtg

SEQ ID NO: 70106 - DNA, 60 bp, Artificial
  Synthetic oligonucleotide
gcagcaatatgcacccacttggaggtatgtttcatgtattcagattttcatttcatcaat

SEQ ID NO: 70107 - DNA, 60 bp, Artificial
  Synthetic oligonucleotide
ctactgagtacataatgaagggggtatacattaatactgccttgctcaatgcatcctgtg

SEQ ID NO: 70108 - DNA, 60 bp, Artificial
  Synthetic oligonucleotide
ggacaaagcagttaagctgtatagaaaacttaagagggagataacattccatggggccaa

SEQ ID NO: 70109 - DNA, 60 bp, Artificial
  Synthetic oligonucleotide
tggacaaagcagtcaaactgtatcgaaagcttaagagggagataacattccatggggcca

SEQ ID NO: 70110 - DNA, 60 bp, Artificial
  Synthetic oligonucleotide
cccaaaaggaatcgatccattttgaacacgagccaaagggggatacttgaggatgagcaa

SEQ ID NO: 70111 - DNA, 60 bp, Artificial
  Synthetic oligonucleotide
gccatgggacaggaacagggtacaccatggatacagtcaacaggacacatcagtactcag

SEQ ID NO: 70112 - DNA, 60 bp, Artificial
  Synthetic oligonucleotide
cgcaactcaacccaattgatgggccactaccagaagacaatgaaccaagtggctatgccc

SEQ ID NO: 70113 - DNA, 60 bp, Artificial
  Synthetic oligonucleotide
caccgcaactcaacccaattgatgggccactaccagaagacaatgaaccaagtggctatg

SEQ ID NO: 70114 - DNA, 60 bp, Artificial
  Synthetic oligonucleotide
tacagccatgggacaggaacagggtacaccatggatacagtcaacaggacacatcagtac

SEQ ID NO: 70115 - DNA, 60 bp, Artificial
  Synthetic oligonucleotide
taaaagattacagatacacgtatcgatgccacagaggtgacacacaaatacaaacccgga

SEQ ID NO: 70116 - DNA, 60 bp, Artificial
  Synthetic oligonucleotide
cttggcccagcaactgctcaaatggcccttcagttatttataaaagattacagatacacg

SEQ ID NO: 70117 - DNA, 60 bp, Artificial
  Synthetic oligonucleotide
caaacccggagatcatttgagataaagaaattatgggaccaaacccgctccaaagctggg

SEQ ID NO: 70118 - DNA, 60 bp, Artificial
  Synthetic oligonucleotide
gatacacgtatcgatgccacagaggtgacacacaaatacaaacccggagatcatttgaga

SEQ ID NO: 70119 - DNA, 60 bp, Artificial
  Synthetic oligonucleotide
cccggagatcatttgagataaagaaattatgggaccaaacccgctccaaagctgggctgt

SEQ ID NO: 70120 - DNA, 55 bp, Artificial
  Synthetic oligonucleotide
accaggggcgtttatgcaacccattgaacccgtttgtcagtcataaagagattga

SEQ ID NO: 70121 - DNA, 60 bp, Artificial
  Synthetic oligonucleotide
cctgaatggttcagaaatattctaagtattgctccaataatgttttcaaacaaaatggcg

SEQ ID NO: 70122 - DNA, 58 bp, Artificial
  Synthetic oligonucleotide
caaatgttgtaaggaagatgatgaccaactcccaggacactgaaatttctttcaccat

SEQ ID NO: 70123 - DNA, 60 bp, Artificial
  Synthetic oligonucleotide
gagttacctaattagagcattaaccctgaacacaatgaccaaagatgctgagagggggaa

SEQ ID NO: 70124 - DNA, 53 bp, Artificial
  Synthetic oligonucleotide
tgatgatgccggcacatggtccagccaaaaatatggagtatgacgctgttgca

SEQ ID NO: 70125 - DNA, 60 bp, Artificial
  Synthetic oligonucleotide
aatattctaagtattgctccaataatgttttcaaacaaaatggcgagactaggtaagggg

SEQ ID NO: 70126 - DNA, 60 bp, Artificial
  Synthetic oligonucleotide
tctccatattcctgaagtctgcttgaaatgggagttgatggatgaggattaccaggggcg

SEQ ID NO: 70127 - DNA, 57 bp, Artificial
  Synthetic oligonucleotide
ttttgaaaactcttgtattgaaacaatggaggttgttcagcaaacaagggtggacaa

SEQ ID NO: 70128 - DNA, 60 bp, Artificial
  Synthetic oligonucleotide
gattttgctctgatagtgaatgcgcccaactatgcaggaattcaagctggagttgacagg

SEQ ID NO: 70129 - DNA, 60 bp, Artificial
  Synthetic oligonucleotide
ggcgagactaggtaaggggtacatgtttgaaagcaagagtatgaaactgagaactcaaat

SEQ ID NO: 70130 - DNA, 60 bp, Artificial
  Synthetic oligonucleotide
agaatcccatcctggtatttttgaaaactcttgtattgaaacaatggaggttgttcagca

SEQ ID NO: 70131 - DNA, 60 bp, Artificial
  Synthetic oligonucleotide
tgagcaaaaagaagtcttacataaacaggacaggtacctttgaattcacgagctttttct

SEQ ID NO: 70132 - DNA, 60 bp, Artificial
  Synthetic oligonucleotide
aggaaccagcctgctgccacagcattggccaacactatagaagtattcagatcaaacggc

SEQ ID NO: 70133 - DNA, 60 bp, Artificial
  Synthetic oligonucleotide
ccaagactacttactggtgggatggtcttcaatcgtctgatgattttgctctgatagtga

SEQ ID NO: 70134 - DNA, 60 bp, Artificial
  Synthetic oligonucleotide
tctgatgattttgctctgatagtgaatgcgcccaactatgcaggaattcaagctggagtt

SEQ ID NO: 70135 - DNA, 60 bp, Artificial
  Synthetic oligonucleotide
caactcattttcagagaaagaggagagtgagagacaatgtaactaaaaaaatggtgaccc

SEQ ID NO: 70136 - DNA, 60 bp, Artificial
  Synthetic oligonucleotide
atggtgacccaaagaacaataggcaaaaagaaacataaattagacaaaaggagttaccta

SEQ ID NO: 70137 - DNA, 60 bp, Artificial
  Synthetic oligonucleotide
atagaagtattcagatcaaacggcctcatagcaaatgaatctgggaggctaatagacttc

SEQ ID NO: 70138 - DNA, 58 bp, Artificial
  Synthetic oligonucleotide
tagttttggggtgtctggggtcaatgaatctgcagacatgagtattggagtcactgtt

SEQ ID NO: 70139 - DNA, 60 bp, Artificial
  Synthetic oligonucleotide
aaacaatgaccttggcccagcaactgctcaaatggcccttcagttatttataaaagatta

SEQ ID NO: 70140 - DNA, 60 bp, Artificial
  Synthetic oligonucleotide
gaaagaggaattcgctgagatcatgaagacctgttccaccattgaagacctcagacggca

SEQ ID NO: 70141 - DNA, 60 bp, Artificial
  Synthetic oligonucleotide
tcatggcgtctcaaggcaccaaacggtcttatgaacagatggaaactgatggggatcgcc

SEQ ID NO: 70142 - DNA, 60 bp, Artificial
  Synthetic oligonucleotide
tcatggcgtcccaaggcaccaaacggtcttatgaacagatggaaactgatggggatcgcc

SEQ ID NO: 70143 - DNA, 60 bp, Artificial
  Synthetic oligonucleotide
aaatcatggcgtcccaaggcaccaaacggtcttatgaacagatggaaactgatggggatc

SEQ ID NO: 70144 - DNA, 58 bp, Artificial
  Synthetic oligonucleotide
aaaacatggcgtcccaaggcaccaaacggtcttatgaacagatggaaactgatgggga

SEQ ID NO: 70145 - DNA, 60 bp, Artificial
  Synthetic oligonucleotide
gagcaaggcgaatcaataatagtagaacctgaggacccaaatgcacttttaaagcacaga

SEQ ID NO: 70146 - DNA, 60 bp, Artificial
  Synthetic oligonucleotide
atggcccattggagagtcaccaaaaggagtggaagaaggttccattgggaaagtatgcag

SEQ ID NO: 70147 - DNA, 60 bp, Artificial
  Synthetic oligonucleotide
tggcgaagaaatggccacaaaggccgattacactcttgatgaagaaagcagagctaggat

SEQ ID NO: 70148 - DNA, 60 bp, Artificial
  Synthetic oligonucleotide
aaaccaaagtttctgccagatctgtatgattacaaagagaatagattcatcgagattgga

SEQ ID NO: 70149 - DNA, 60 bp, Artificial
  Synthetic oligonucleotide
gggagaagtactgtgttcttgagataggggatatgcttctaaggagtgcaataggccaag

SEQ ID NO: 70150 - DNA, 58 bp, Artificial
  Synthetic oligonucleotide
ctgtcgtggaagcaagtattggaagagctgcaggacattgagagtgaggagaagattc

SEQ ID NO: 70151 - DNA, 60 bp, Artificial
  Synthetic oligonucleotide
ctcctccaatccctccaacaaatagagagcatgattgaagctgagtcctctgtcaaagag

SEQ ID NO: 70152 - DNA, 60 bp, Artificial
  Synthetic oligonucleotide
cagggacaatgcgcaggctcgctgaccaaagcctcccgccgaacttctcctgcattgaga

SEQ ID NO: 70153 - DNA, 60 bp, Artificial
  Synthetic oligonucleotide
ggatccaaatcatgaaggtgagggaataccactatatgatgcaatcaagtgtatgagaac

SEQ ID NO: 70154 - DNA, 60 bp, Artificial
  Synthetic oligonucleotide
aggaattacttcacagctgaggtgtcccattgcagagccacagaatatataatgaagggg

SEQ ID NO: 70155 - DNA, 60 bp, Artificial
  Synthetic oligonucleotide
tttggggggttcaccacccgggtacggacaatgaccaaatcagcctatatgctcaagcat

SEQ ID NO: 70156 - DNA, 60 bp, Artificial
  Synthetic oligonucleotide
tggactggagtcactcagaatggaacaagctctgcttgcaaaaggagatctaataaaagt

SEQ ID NO: 70157 - DNA, 60 bp, Artificial
  Synthetic oligonucleotide
aaaaatttgacaaattgtacatttggggggttcaccacccgggtacagacagtgaccaaa

SEQ ID NO: 70158 - DNA, 60 bp, Artificial
  Synthetic oligonucleotide
gcttcaattggactggagtcgctcagaatggaacaagctctgcttgcaaaaggagatctg

SEQ ID NO: 70159 - DNA, 60 bp, Artificial
  Synthetic oligonucleotide
ttgttgaacgcagcagagcctacagcaactgttacccttatgatgtgccggattatgcct

SEQ ID NO: 70160 - DNA, 60 bp, Artificial
  Synthetic oligonucleotide
tcaggaagaatcacagtctctaccaaaagaagccaacaaactgtaatcccgaatatcgga

SEQ ID NO: 70161 - DNA, 60 bp, Artificial
  Synthetic oligonucleotide
gctcaagcatcaggaagaatcacagtctctaccaaaagaagccaacaaactgtaatcccg

SEQ ID NO: 70162 - DNA, 60 bp, Artificial
  Synthetic oligonucleotide
ggacaatgaccaaatcagcctatatgctcaagcatcaggaagaatcacagtctctaccaa

SEQ ID NO: 70163 - DNA, 60 bp, Artificial
  Synthetic oligonucleotide
ggggttcaccacccgggtacggacaatgaccaaatcagcctatatgctcaagcatcagga

SEQ ID NO: 70164 - DNA, 60 bp, Artificial
  Synthetic oligonucleotide
agaaatgggacctttttgttgaacgcagcagagcctacagcaactgttacccttatgatg

SEQ ID NO: 70165 - DNA, 60 bp, Artificial
  Synthetic oligonucleotide
gctcctcggggttacttcaaaatacgaagtgggaaaagctcaataatgagatcagatgcg

SEQ ID NO: 70166 - DNA, 60 bp, Artificial
  Synthetic oligonucleotide
ctacagcaactgttacccttatgatgtgccggatcatgcctcccttaggtcactagttgc

SEQ ID NO: 70167 - DNA, 60 bp, Artificial
  Synthetic oligonucleotide
agttgcctcatccggcacactggagtttaacaatgaaagcttcaattggactggagtcac

SEQ ID NO: 70168 - DNA, 60 bp, Artificial
  Synthetic oligonucleotide
cttgttgccctggagaaccaacacacaattgatctaactgactcagaaatgaacaaactg

SEQ ID NO: 70169 - DNA, 60 bp, Artificial
  Synthetic oligonucleotide
agcattgaacgtgactatgccaaacaatgaaaaatttgacaaattgtacatttggggggt

SEQ ID NO: 70170 - DNA, 60 bp, Artificial
  Synthetic oligonucleotide
aatacccagcattgaacgtgactatgccaaacaatgaaaaatttgacaaattgtacattt

SEQ ID NO: 70171 - DNA, 60 bp, Artificial
  Synthetic oligonucleotide
actatgccaaacaatgaaaaatttgacaaattgtacatttggggggttcaccacccgggt

SEQ ID NO: 70172 - DNA, 60 bp, Artificial
  Synthetic oligonucleotide
taattgctcctcggggttacttcaaaatacgaagtgggaaaagctcaataatgagatcag

SEQ ID NO: 70173 - DNA, 60 bp, Artificial
  Synthetic oligonucleotide
cggcacactggagtttaacaatgaaagcttcaattggactggagtcactcaaaatggaac

SEQ ID NO: 70174 - DNA, 60 bp, Artificial
  Synthetic oligonucleotide
ccaccaaaagaagccaacaaactgtaatcccgaatatcggatctagacccagggtaaggg

SEQ ID NO: 70175 - DNA, 60 bp, Artificial
  Synthetic oligonucleotide
gaatcacagtctccaccaaaagaagccaacaaactgtaatcccgaatatcggatctagac

SEQ ID NO: 70176 - DNA, 60 bp, Artificial
  Synthetic oligonucleotide
aaaagcactcaagcagcaatcaaccaaatcaatgggaagctgaataggttgatcgggaaa

SEQ ID NO: 70177 - DNA, 60 bp, Artificial
  Synthetic oligonucleotide
gcagatctcaaaagcactcaagcagcaatcaaccaaatcaatgggaagctgaataggttg

SEQ ID NO: 70178 - DNA, 60 bp, Artificial
  Synthetic oligonucleotide
caaaacactctgaaattggcaacagggatgcggaatgtgccagggaaacaaactagaggc

SEQ ID NO: 70179 - DNA, 60 bp, Artificial
  Synthetic oligonucleotide
tgcctcatccggcacactggagtttaacaatgaaagcttcaattggactggagtcactca

SEQ ID NO: 70180 - DNA, 60 bp, Artificial
  Synthetic oligonucleotide
gaacgcagcaaagcctacagcaactgttacccttatgatgtgccggattatgcctccctt

SEQ ID NO: 70181 - DNA, 60 bp, Artificial
  Synthetic oligonucleotide
atgggacctttttgttgaacgcagcaaagcctacagcaactgttacccttatgatgtgcc

SEQ ID NO: 70182 - DNA, 60 bp, Artificial
  Synthetic oligonucleotide
aaaaccgggagacatacttttgattaacagcacagggaatctaattgctcctcggggtta

SEQ ID NO: 70183 - DNA, 60 bp, Artificial
  Synthetic oligonucleotide
gtgaaaccgggagacatacttttgattaacagcacagggaatctaattgctcctcggggt

SEQ ID NO: 70184 - DNA, 60 bp, Artificial
  Synthetic oligonucleotide
accgggagacatacttttgattaacagcacagggaatctaattgctcctcggggttactt

SEQ ID NO: 70185 - DNA, 60 bp, Artificial
  Synthetic oligonucleotide
tttgattaacagcacagggaatctaattgctcctcggggttacttcaaaatacgaagtgg

SEQ ID NO: 70186 - DNA, 60 bp, Artificial
  Synthetic oligonucleotide
ggagacatacttttgattaacagcacagggaatctaattgctcctcggggttacttcaaa

SEQ ID NO: 70187 - DNA, 60 bp, Artificial
  Synthetic oligonucleotide
cactgagtgacatcaaaatcatggcgtcccaaggcaccaaacggtcttatgaacagatgg

SEQ ID NO: 70188 - DNA, 60 bp, Artificial
  Synthetic oligonucleotide
cactgagtgacatcaaaatcatggcgtctcaaggcaccaaacggtcttatgaacagatgg

SEQ ID NO: 70189 - DNA, 60 bp, Artificial
  Synthetic oligonucleotide
tgagtgacatcaaaatcatggcgtctcaaggcaccaaacggtcttatgaacagatggaaa

SEQ ID NO: 70190 - DNA, 60 bp, Artificial
  Synthetic oligonucleotide
tgagtgacatcaaaatcatggcgtcccaaggcaccaaacggtcttatgaacagatggaaa

SEQ ID NO: 70191 - DNA, 60 bp, Artificial
  Synthetic oligonucleotide
ctcactgagtgacatcaaaaacatggcgtcccaaggcaccaaacggtcttatgaacagat

SEQ ID NO: 70192 - DNA, 60 bp, Artificial
  Synthetic oligonucleotide
ctcactgagtgacatcaaaattatggcgtcccaaggcaccaaacggtcttatgaacagat

SEQ ID NO: 70193 - DNA, 60 bp, Artificial
  Synthetic oligonucleotide
ctcactgagtgacatcaaaatcatggcgtcccaaggcaccaaacggtcttatgaacagat

SEQ ID NO: 70194 - DNA, 60 bp, Artificial
  Synthetic oligonucleotide
ctcactgagtgacatcaaaatcatggcgtctcaaggcaccaaacggtcttatgaacagat

SEQ ID NO: 70195 - DNA, 60 bp, Artificial
  Synthetic oligonucleotide
tcactgagtgacatcaaaatcatggcgtcccaaggcaccaaacggtcttatgaacagatg

SEQ ID NO: 70196 - DNA, 60 bp, Artificial
  Synthetic oligonucleotide
tcactgagtgacatcaaaatcatggcgtctcaaggcaccaaacggtcttatgaacagatg

SEQ ID NO: 70197 - DNA, 60 bp, Artificial
  Synthetic oligonucleotide
cactgagtgacatcaaagtcatggcgtcccaaggcaccaaacggtcttatgaacagatgg

SEQ ID NO: 70198 - DNA, 60 bp, Artificial
  Synthetic oligonucleotide
agccaggaacatagtgagaagagctgcagtatcagcagatccactagcatctttattgga

SEQ ID NO: 70199 - DNA, 60 bp, Artificial
  Synthetic oligonucleotide
ggccaggaacatagtaagaagagccgccgtatcagcagatccactagcatctttattgga

SEQ ID NO: 70200 - DNA, 60 bp, Artificial
  Synthetic oligonucleotide
aagaagagctgcagtatcagcagatccactagcatctttattggagatgtgccacagcac

SEQ ID NO: 70201 - DNA, 60 bp, Artificial
  Synthetic oligonucleotide
aagaagagcggcagtatcagcagatccactagcatctttattggagatgtgccacagcac

SEQ ID NO: 70202 - DNA, 60 bp, Artificial
  Synthetic oligonucleotide
gttaataatcactcactgagtgacatcaaaatcatggcgtcccaaggcaccaaacggtct

SEQ ID NO: 70203 - DNA, 60 bp, Artificial
  Synthetic oligonucleotide
aggaagatctcatttaaggaatgacactgatgtggtaaactttgtgagcatggagttttc

SEQ ID NO: 70204 - DNA, 60 bp, Artificial
  Synthetic oligonucleotide
ggcatatccggaaacaagttgtagaccaagaactgagtgatgctccattccttgatcggc

SEQ ID NO: 70205 - DNA, 60 bp, Artificial
  Synthetic oligonucleotide
catatccggaaacaagttgtagaccaagaactgagtgatgccccattccttgatcggctt

SEQ ID NO: 70206 - DNA, 60 bp, Artificial
  Synthetic oligonucleotide
attgctttctttggcatatccggaaacaagttgtagaccaagaactgagtgatgctccat

SEQ ID NO: 70207 - DNA, 60 bp, Artificial
  Synthetic oligonucleotide
tgctttctttggcatatccggaaacaagttgtagaccaagaactgagtgatgctccattc

SEQ ID NO: 70208 - DNA, 60 bp, Artificial
  Synthetic oligonucleotide
ttggcatatccggaaacaagttgtagaccaagaactgagtgatgccccattccttgatcg

SEQ ID NO: 70209 - DNA, 60 bp, Artificial
  Synthetic oligonucleotide
tggcatatccggaaacaagttgtagaccaagaactgagtgatgccccattccttgatcgg

SEQ ID NO: 70210 - DNA, 60 bp, Artificial
  Synthetic oligonucleotide
tgctttctttggcatatacggaaacaagttgtagaccaagaactgagtgatgccccattc

SEQ ID NO: 70211 - DNA, 60 bp, Artificial
  Synthetic oligonucleotide
tgctttctttggcatatccggaaacaagttgtagaccaagaactgagtgatgccccattc

SEQ ID NO: 70212 - DNA, 56 bp, Artificial
  Synthetic oligonucleotide
aaagcgaatttcagtgtgatctttgaccgactagagaccatagtattactaagggc

SEQ ID NO: 70213 - DNA, 60 bp, Artificial
  Synthetic oligonucleotide
tttcagtgtgatctttgaccgactagagaacatagtattactaagggctttcaccgaaga

SEQ ID NO: 70214 - DNA, 60 bp, Artificial
  Synthetic oligonucleotide
tttcagtgtgatttttgaacgactagagaccatagtattactaagggctttcaccgaaga

SEQ ID NO: 70215 - DNA, 60 bp, Artificial
  Synthetic oligonucleotide
atacggaaacaagttgtagaccaagaactgagtgatgccccattccttgatcggcttcgc

SEQ ID NO: 70216 - DNA, 60 bp, Artificial
  Synthetic oligonucleotide
atccggaaacaagttgtagaccaagaactgagtgatgccccattccttgaccggcttcgc

SEQ ID NO: 70217 - DNA, 60 bp, Artificial
  Synthetic oligonucleotide
ccggaaacaagttgtagaccaagaactgagtgatgctccattccttgatcggcttcgccg

SEQ ID NO: 70218 - DNA, 60 bp, Artificial
  Synthetic oligonucleotide
tatccggaaacaagttgtagaccaagaactgagtgatgctccattccttgatcggcttcg

SEQ ID NO: 70219 - DNA, 60 bp, Artificial
  Synthetic oligonucleotide
atccggaaacaagttgtagaccaagaactgagtgatgctccattccttgatcggcttcgc

SEQ ID NO: 70220 - DNA, 60 bp, Artificial
  Synthetic oligonucleotide
tctctgttgaaggcaaaaactgcatcaatcggtgcttttatgtggagttgataaggggaa

SEQ ID NO: 70221 - DNA, 60 bp, Artificial
  Synthetic oligonucleotide
tggatgggaagaacgatcagcgagaagttacgctcaggatatgaaaccttcaaagtcatt

SEQ ID NO: 70222 - DNA, 60 bp, Artificial
  Synthetic oligonucleotide
atcggtgcttttatgtggagttgataaggggaaggaaagaggaaattgaagtctggtgga

SEQ ID NO: 70223 - DNA, 60 bp, Artificial
  Synthetic oligonucleotide
ctgattcgaaatggaagattttgtgcgacaatgcttcaacccgatgattgtcgaacttgc

SEQ ID NO: 70224 - DNA, 60 bp, Artificial
  Synthetic oligonucleotide
gggggctatatgaagcaattgaggagtgcctgattaatgatccctgggttttgctcaatg

SEQ ID NO: 70225 - DNA, 60 bp, Artificial
  Synthetic oligonucleotide
catttcagtctctggtccccaaggccattagaggccaatacagtgggtttgttagaactc

SEQ ID NO: 70226 - DNA, 60 bp, Artificial
  Synthetic oligonucleotide
aaccatttcagtctctggtccccaaggccattagaggccaatacagtgggtttgttagaa

SEQ ID NO: 70227 - DNA, 60 bp, Artificial
  Synthetic oligonucleotide
gaaccatttcaatctttagttcccaaggccattagaggccaatacagtgggtttgtcaga

SEQ ID NO: 70228 - DNA, 60 bp, Artificial
  Synthetic oligonucleotide
aaggagaacagattcatcgagattggagtgacaaggagagaagtccacatatattacctt

SEQ ID NO: 70229 - DNA, 60 bp, Artificial
  Synthetic oligonucleotide
gacataatggattccaacactgtgtcaagtttccaggtagattgctttctttggcatatc

SEQ ID NO: 70230 - DNA, 60 bp, Artificial
  Synthetic oligonucleotide
gcgatttgaagcaatatgacagtgacgaacctgaattaaggtcattttcaagttggatcc

SEQ ID NO: 70231 - DNA, 60 bp, Artificial
  Synthetic oligonucleotide
agatataagcgatttgaagcaatatgacagtgacgaacctgaattaaggtcattttcaag

SEQ ID NO: 70232 - DNA, 60 bp, Artificial
  Synthetic oligonucleotide
cggggagacaggaaaagaacccgtcacttaggatgaaatggatgatggcaatgaaatacc

SEQ ID NO: 70233 - DNA, 60 bp, Artificial
  Synthetic oligonucleotide
ggggagacaggaaaagaacccgtcacttaggatgaaatggatgatggcaatgaaataccc

SEQ ID NO: 70234 - DNA, 60 bp, Artificial
  Synthetic oligonucleotide
aaaacccatcacttaggatgaaatggatgatggcaatgaaatacccaattacagctgata

SEQ ID NO: 70235 - DNA, 60 bp, Artificial
  Synthetic oligonucleotide
aggatgaaatggatgatggcaatgaaatacccaatcactgctgacaaaaggataacagaa

SEQ ID NO: 70236 - DNA, 60 bp, Artificial
  Synthetic oligonucleotide
aggatgaaatggatgatggcaatgaaatacccaatcactgctgacaaaaggataacagga

SEQ ID NO: 70237 - DNA, 57 bp, Artificial
  Synthetic oligonucleotide
ttttcagaaggatgctagagtacttttcttaaattggggaattgaacctattgacaa

SEQ ID NO: 70238 - DNA, 60 bp, Artificial
  Synthetic oligonucleotide
taagagaacaagtggatcatcagtcaaaagggaggaagaagtgctcacgggcaatctgca

SEQ ID NO: 70239 - DNA, 60 bp, Artificial
  Synthetic oligonucleotide
agggcaacagctatattcagaaaagcaaccaggagattgattcaactgatagtgagtgga

SEQ ID NO: 70240 - DNA, 60 bp, Artificial
  Synthetic oligonucleotide
ccaattacagctgataaaaggataacggaaatgattcctgaaagaaatgagcaaggacag

SEQ ID NO: 70241 - DNA, 60 bp, Artificial
  Synthetic oligonucleotide
aagaaatgagcaaggacagacattatggagtaaggtgaatgatgccggatcagaccgagt

SEQ ID NO: 70242 - DNA, 60 bp, Artificial
  Synthetic oligonucleotide
gccgctcctccaaagcaaagcagaatgcaattctcttcattaactgtgaatgtgagggga

SEQ ID NO: 70243 - DNA, 60 bp, Artificial
  Synthetic oligonucleotide
agtaggagccagaatactaacatcagaatcgcaattaacgataaccaaggagaaaaaaga

SEQ ID NO: 70244 - DNA, 60 bp, Artificial
  Synthetic oligonucleotide
aaatacgccgaagagtcgacataaatcctggtcatgcagacctcagcgccaaggaggcac

SEQ ID NO: 70245 - DNA, 60 bp, Artificial
  Synthetic oligonucleotide
ggggattcctcattctaggcaaagaagatagaagatatgggccagcattaagcatcaatg

SEQ ID NO: 70246 - DNA, 60 bp, Artificial
  Synthetic oligonucleotide
gtggatcatcagaaattgggagactgttaaaattcagtggtctcagaatcctacgatgct

SEQ ID NO: 70247 - DNA, 60 bp, Artificial
  Synthetic oligonucleotide
gactccaagcaccgagatgtcaatgagaggagtgagagtcagcaaaatgggtgtagatga

SEQ ID NO: 70248 - DNA, 60 bp, Artificial
  Synthetic oligonucleotide
cgggaccaaagaggaaatgtactactgtctccagaggaagtcagtgaaacacaagggaca

SEQ ID NO: 70249 - DNA, 60 bp, Artificial
  Synthetic oligonucleotide
attagaaatgtgccatagcacacagattggtggaacaaggatggtggatattctcaggca

SEQ ID NO: 70250 - DNA, 60 bp, Artificial
  Synthetic oligonucleotide
gtggggaggtgaggaatgatgatgttgatcaaagcctaattattgctgctaggaacatag

SEQ ID NO: 70251 - DNA, 60 bp, Artificial
  Synthetic oligonucleotide
tccagaattgcaaaatttcccctttgatggttgcatacatgttagagagggaacttgtcc

SEQ ID NO: 70252 - DNA, 60 bp, Artificial
  Synthetic oligonucleotide
ttctcaggcaaaatccaacagaagaacaagctgtggacatatgcaaagcagcaatggggc

SEQ ID NO: 70253 - DNA, 60 bp, Artificial
  Synthetic oligonucleotide
tctcatggaatggttaaagacaagaccaatcctgtcacctctgactaaggggattttggg

SEQ ID NO: 70254 - DNA, 50 bp, Artificial
  Synthetic oligonucleotide
aggagtgcctgattaatgatccctgggttttgctcaatgcgtcttggttc

SEQ ID NO: 70255 - DNA, 60 bp, Artificial
  Synthetic oligonucleotide
gagaatctgatgaggcacttaaaatgaccatggcctccacacctgcttcgcgatacataa

SEQ ID NO: 70256 - DNA, 60 bp, Artificial
  Synthetic oligonucleotide
ggagggaaggacctcagacatgagggcagaaatcataagaatgatggaaggtgcaaaacc

SEQ ID NO: 70257 - DNA, 60 bp, Artificial
  Synthetic oligonucleotide
ctgagaatagttttgagcaaataacattcatgcaagccttacagctgctgtttgaagtgg

SEQ ID NO: 70258 - DNA, 60 bp, Artificial
  Synthetic oligonucleotide
gcaatggtggatcaagtgagagaaagccggaacccaggaaatgctgagatcgaagatctc

SEQ ID NO: 70259 - DNA, 60 bp, Artificial
  Synthetic oligonucleotide
atagctctcagttattctgctggtgcacttgccagttgcatgggcctcatatacaataga

SEQ ID NO: 70260 - DNA, 60 bp, Artificial
  Synthetic oligonucleotide
gataacgttccatggggctaaagaaatagctctcagttattctgctggtgcacttgccag

SEQ ID NO: 70261 - DNA, 60 bp, Artificial
  Synthetic oligonucleotide
acattccatggggccaaagaaatagcactcagttattctgctggtgcacttgccagttgc

SEQ ID NO: 70262 - DNA, 60 bp, Artificial
  Synthetic oligonucleotide
tccatggggccaaagaaatagctctcagttattctgctggtgcacttgccagttgcatgg

SEQ ID NO: 70263 - DNA, 60 bp, Artificial
  Synthetic oligonucleotide
aagaaatagctctcagttattctgctggtgcacttgccagttgtatgggcctcatataca

SEQ ID NO: 70264 - DNA, 60 bp, Artificial
  Synthetic oligonucleotide
gcagcgtagacgctttgtccaaaatgccctcaatgggaatggggatccaaataacatgga

SEQ ID NO: 70265 - DNA, 60 bp, Artificial
  Synthetic oligonucleotide
ccagcgagcgaggactgcagcgtagacgctttgtccaaaatgccctcaatgggaatgggg

SEQ ID NO: 70266 - DNA, 52 bp, Artificial
  Synthetic oligonucleotide
gctcaccgtgcccagtgagcgaggactgcagcgtagacgctttgtccaaaat

SEQ ID NO: 70267 - DNA, 54 bp, Artificial
  Synthetic oligonucleotide
agccttctaaccgaggtcgaaacgtatgttctctctatcgttccatcaggcccc

SEQ ID NO: 70268 - DNA, 60 bp, Artificial
  Synthetic oligonucleotide
ctctcatggaatggctaaagacaagaccaatcctgtcacctctgactaaggggattttgg

SEQ ID NO: 70269 - DNA, 59 bp, Artificial
  Synthetic oligonucleotide
aaaacacagatcttgaggctctcatggaatggctaaagacaagaccaatcctgtcacct

SEQ ID NO: 70270 - DNA, 60 bp, Artificial
  Synthetic oligonucleotide
gatgagccttctaaccgaggtcgaaacgtatgttctctctatcgttccatcaggccccct

SEQ ID NO: 70271 - DNA, 58 bp, Artificial
  Synthetic oligonucleotide
gatgagccttctaaccgaggtcgaaacgtatgttctctctatcgttccatcaggcccc

SEQ ID NO: 70272 - DNA, 60 bp, Artificial
  Synthetic oligonucleotide
tactttgtgttgttttgctggggttcatcatgtgggcctgccaaaaaggcaacattaggt

SEQ ID NO: 70273 - DNA, 60 bp, Artificial
  Synthetic oligonucleotide
ttgctttgtgttgttttgctggggttcatcatgtgggcctgccaaaaaggcaacattagg

SEQ ID NO: 70274 - DNA, 60 bp, Artificial
  Synthetic oligonucleotide
agtcagctgatatgagcattggagtaacagtgataaagaacaacatgataaacaatgacc

SEQ ID NO: 70275 - DNA, 60 bp, Artificial
  Synthetic oligonucleotide
gagcattggagtaacagtgataaagaacaacatggtaaacaatgaccttggaccagcaac

SEQ ID NO: 70276 - DNA, 60 bp, Artificial
  Synthetic oligonucleotide
tggaaatacagagggaagaacctcagacatgagggcagaaatcataagaatgatggaagg

SEQ ID NO: 70277 - DNA, 60 bp, Artificial
  Synthetic oligonucleotide
cctcttttgacatgagtaatgaaggatcttatttcttcggagacaatgcagaagattacg

SEQ ID NO: 70278 - DNA, 60 bp, Artificial
  Synthetic oligonucleotide
ctgagaatagttttgagcaaataacattcatgcaagccttacagctactatttgaagtgg

SEQ ID NO: 70279 - DNA, 60 bp, Artificial
  Synthetic oligonucleotide
gaggagtgctcctgttatcctcgatatcctggtgtcagatgtgtctgcagagacaactgg

SEQ ID NO: 70280 - DNA, 60 bp, Artificial
  Synthetic oligonucleotide
tcctcgatatcctggtgtcagatgtgtctgcagagacaactggaaaggctccaataggcc

SEQ ID NO: 70281 - DNA, 60 bp, Artificial
  Synthetic oligonucleotide
tcatcgaagagggagcaattgttggcgaaatctcaccattgccttcttttccaggacata

SEQ ID NO: 70282 - DNA, 60 bp, Artificial
  Synthetic oligonucleotide
tcactgaagagggagcaattgttggcgaaatctcaccattgccttcttttccaggacata

SEQ ID NO: 70283 - DNA, 60 bp, Artificial
  Synthetic oligonucleotide
caccgaagagggagcaattgttggcgaaatctcaccattgctttcttttccaggacatac

SEQ ID NO: 70284 - DNA, 60 bp, Artificial
  Synthetic oligonucleotide
cactgaagagggagcaattgttggcgaaatctcaccattgccttcttttccaggacatac

SEQ ID NO: 70285 - DNA, 60 bp, Artificial
  Synthetic oligonucleotide
caccgaagagggagcaattgttggcgaaatctcaccattgccttcttttccagggcatac

SEQ ID NO: 70286 - DNA, 60 bp, Artificial
  Synthetic oligonucleotide
catcgaagagggagcaattgttggcgaaatctcaccattgccttcttttccaggacatac

SEQ ID NO: 70287 - DNA, 57 bp, Artificial
  Synthetic oligonucleotide
aagagggagcaattgttggcgaaatctcaccattgccttcttttccaggacatacta

SEQ ID NO: 70288 - DNA, 60 bp, Artificial
  Synthetic oligonucleotide
gcaatggtggatcaagtgagggaaagtcggaacccaggaaatgctgagatcgaagatctc

SEQ ID NO: 70289 - DNA, 60 bp, Artificial
  Synthetic oligonucleotide
gcaatggtggatcaagtaagagaaagtcggaacccaggaaatgctgagatcgaagatctc

SEQ ID NO: 70290 - DNA, 52 bp, Artificial
  Synthetic oligonucleotide
ttggaatttctagcatgggggaggccatggtgtctagggcccggattgatgc

SEQ ID NO: 70291 - DNA, 52 bp, Artificial
  Synthetic oligonucleotide
ttggaatttctagtatggtggaggccatggtgtctagggcccggattgatgc

SEQ ID NO: 70292 - DNA, 60 bp, Artificial
  Synthetic oligonucleotide
ggaacaggctcatggcctgatggggcggacatcaatctcatgcctatataagcttttcgc

SEQ ID NO: 70293 - DNA, 60 bp, Artificial
  Synthetic oligonucleotide
tatacagagacgaagcattaaacaaccggttccagatcaaaggtgttgagctgaggtcag

SEQ ID NO: 70294 - DNA, 60 bp, Artificial
  Synthetic oligonucleotide
ggatgggaagaacgatcagcgagaagttacgctcaggttatgaaaccttcaaagtcattg

SEQ ID NO: 70295 - DNA, 60 bp, Artificial
  Synthetic oligonucleotide
gtggatgggaagaacgatcagcgagaagttacgctcaggttatgaaaccttcaaagtcat

SEQ ID NO: 70296 - DNA, 60 bp, Artificial
  Synthetic oligonucleotide
gttgacagcgagaataggtccggttattctggtattttctctgttgagggcaaaagctgc

SEQ ID NO: 70297 - DNA, 60 bp, Artificial
  Synthetic oligonucleotide
gttgacatcgataataggtccggttattctggtattttctctgttgagggcaaaagctgc

SEQ ID NO: 70298 - DNA, 60 bp, Artificial
  Synthetic oligonucleotide
ctcagaagtagaagggagaattcaggacctcgagaaatatgttgaggacactaaagtaga

SEQ ID NO: 70299 - DNA, 58 bp, Artificial
  Synthetic oligonucleotide
agctcaagttgtcacgatggaaaagcatggctgcatgtttgtgtcactggatatgata

SEQ ID NO: 70300 - DNA, 60 bp, Artificial
  Synthetic oligonucleotide
agctcaagttgtcacgatggaaaagcatggctgcatgtttgtgtcactggatatgataaa

SEQ ID NO: 70301 - DNA, 60 bp, Artificial
  Synthetic oligonucleotide
ggtccagctcaagttgtcacgatggaaaagcatggctgcatgtttgtgttactgggcatg

SEQ ID NO: 70302 - DNA, 60 bp, Artificial
  Synthetic oligonucleotide
gctcaagttgtcacgatggaaaagcatggctgcatgtttgtgtcactggatatgataaaa

SEQ ID NO: 70303 - DNA, 60 bp, Artificial
  Synthetic oligonucleotide
ttgcagcaatatgcactcacttggaggtgtgtttcatgtattcagattttcatttcatca

SEQ ID NO: 70304 - DNA, 60 bp, Artificial
  Synthetic oligonucleotide
atttgcagcaatatgcactcacttggaggtgtgtttcatgtattcagattttcatttcat

SEQ ID NO: 70305 - DNA, 60 bp, Artificial
  Synthetic oligonucleotide
tttgcagcaatatgcactcacttggaggtgtgtttcatgtattcagattttcatttcatc

SEQ ID NO: 70306 - DNA, 60 bp, Artificial
  Synthetic oligonucleotide
ccctccccagaaggtccggagctgcaggtgctgcagtcaaaggaatcgggacaatggtga

SEQ ID NO: 70307 - DNA, 60 bp, Artificial
  Synthetic oligonucleotide
gacggttggtacggtttcaggcatcaaaattctgagggcacaggacaagcagcagacctt

SEQ ID NO: 70308 - DNA, 60 bp, Artificial
  Synthetic oligonucleotide
caactgagaatagttttgagcaaataacattcatgcaagcattacagctgctgtttgaag

SEQ ID NO: 70309 - DNA, 60 bp, Artificial
  Synthetic oligonucleotide
tcagctggtgtggatggcatgccattctgctgcatttgaagatctaagattattaagctt

SEQ ID NO: 70310 - DNA, 60 bp, Artificial
  Synthetic oligonucleotide
cagctggtgtggatggcatgccattctgctgcatttgaagatctaagattattaagcttc

SEQ ID NO: 70311 - DNA, 60 bp, Artificial
  Synthetic oligonucleotide
ggattatagcattgtttccagttatgtgtgctcaggacttgttggagacacacctagaaa

SEQ ID NO: 70312 - DNA, 60 bp, Artificial
  Synthetic oligonucleotide
acgctcaccgtgcccagcgagcgaggactgcagcgtagacgctttgtccaaaatgccctc

SEQ ID NO: 70313 - DNA, 60 bp, Artificial
  Synthetic oligonucleotide
actcagtgattatgaagggcgattgatccagaacagcttgacaatagagaaaatggtgct

SEQ ID NO: 70314 - DNA, 56 bp, Artificial
  Synthetic oligonucleotide
gggcctgccaaaaaggcaacattaggtgcaacatttgcatttgagtgcattaatta

SEQ ID NO: 70315 - DNA, 57 bp, Artificial
  Synthetic oligonucleotide
gaggagtgctcctgttatcctcgatatcctggtgtcagatgtgtctgcagagacaac

SEQ ID NO: 70316 - DNA, 60 bp, Artificial
  Synthetic oligonucleotide
agcatgtcgaggagtgctcctgttatcctcgatatcctggtgtcagatgtgtctgcagag

SEQ ID NO: 70317 - DNA, 60 bp, Artificial
  Synthetic oligonucleotide
tcaagtgacccgcttgttgttgccgcgagtatcattgggatcttgcacttgatattgtgg

SEQ ID NO: 70318 - DNA, 60 bp, Artificial
  Synthetic oligonucleotide
cagtaatgagaatgggggacctccacttactccaaaacagaaacggaaaatggcgagaac

SEQ ID NO: 70319 - DNA, 60 bp, Artificial
  Synthetic oligonucleotide
atgctgagatcgaagatctcatatttttggcacggtctgcactaatattgagagggtcag

SEQ ID NO: 70320 - DNA, 60 bp, Artificial
  Synthetic oligonucleotide
caagatacgcagaagagtagacataaaccctggtcatgcagacctcagtgccaaagaggc

SEQ ID NO: 70321 - DNA, 60 bp, Artificial
  Synthetic oligonucleotide
gcagaagagtagacataaaccctggtcatgcagacctcagtgccaaagaggcacaagatg

SEQ ID NO: 70322 - DNA, 60 bp, Artificial
  Synthetic oligonucleotide
gcagaagggtagacataaaccctggtcatgcagacctcagtgccaaagaggcacaagatg

SEQ ID NO: 70323 - DNA, 60 bp, Artificial
  Synthetic oligonucleotide
cgcctgcatagggtcaatcagaaatggaacttatgaccatgatgtatacagagatgaagc

SEQ ID NO: 70324 - DNA, 60 bp, Artificial
  Synthetic oligonucleotide
tgacaacgcctgcatagggtcaatcagaaatggaacttatgaccatgatgtatacagaga

SEQ ID NO: 70325 - DNA, 60 bp, Artificial
  Synthetic oligonucleotide
gaatctgatgaggcacttaaaatgaccatggtctccacacctgcttcgcaatacataact

SEQ ID NO: 70326 - DNA, 60 bp, Artificial
  Synthetic oligonucleotide
tggattccaacactgtgtcaagtttccaggtagattgcttcctttggcatgtccgaaaac

SEQ ID NO: 70327 - DNA, 60 bp, Artificial
  Synthetic oligonucleotide
gatgtctttgctggaaagaacacagatcttgaggctctcatggaatggctaaagacaaga

SEQ ID NO: 70328 - DNA, 60 bp, Artificial
  Synthetic oligonucleotide
atggagaaaactgcacactaatagatgctctattgggagaccctcattgtgatggcttcc

SEQ ID NO: 70329 - DNA, 60 bp, Artificial
  Synthetic oligonucleotide
gacacagactaaaaacaactgagaatagttttgagcaaataacattcatgcaagcattac

SEQ ID NO: 70330 - DNA, 60 bp, Artificial
  Synthetic oligonucleotide
gggacaggctcatggcctgatggagcggacatcaatctcatgcctatataagctttcgca

SEQ ID NO: 70331 - DNA, 60 bp, Artificial
  Synthetic oligonucleotide
gagggaatacaagcaggagtggatagattctacaggacctgcaaattagtgggaatcaac

SEQ ID NO: 70332 - DNA, 60 bp, Artificial
  Synthetic oligonucleotide
gagggaatacaagcaggagtggatagattctacaggacctgcaagttggtgggaatcaac

SEQ ID NO: 70333 - DNA, 60 bp, Artificial
  Synthetic oligonucleotide
taaaagcagttagaggtgacctgaatttcgttaacagggcaaatcagcggttgaacccca

SEQ ID NO: 70334 - DNA, 60 bp, Artificial
  Synthetic oligonucleotide
taaaagcagttagaggtgacctgaatttcgttaacagggcaaatcagcggttgaatccaa

SEQ ID NO: 70335 - DNA, 60 bp, Artificial
  Synthetic oligonucleotide
taaaagcagttagaggtgacctgaatttcgttaacagggcaaatcagcggttgaatccca

SEQ ID NO: 70336 - DNA, 60 bp, Artificial
  Synthetic oligonucleotide
gattatgcctcccttaggtcactagttgcctcatccggcaccctggagtttaccaaagaa

SEQ ID NO: 70337 - DNA, 60 bp, Artificial
  Synthetic oligonucleotide
caaaaccatggcgtcccaaggcaccaaacggtcttatgaacagatggaaactgatgggga

SEQ ID NO: 70338 - DNA, 60 bp, Artificial
  Synthetic oligonucleotide
ctcactgagtgacattaaaatcatggcgtcccaaggcaccaaacggtcttatgaacagat

SEQ ID NO: 70339 - DNA, 60 bp, Artificial
  Synthetic oligonucleotide
ctcactgagtgacatcaaaaccatggcgtcccaaggcaccaaacggtcttatgaacagat

SEQ ID NO: 70340 - DNA, 60 bp, Artificial
  Synthetic oligonucleotide
taaaatcatggcgtcccaaggcaccaaacggtcttatgaacagatggaaactgatgggga

SEQ ID NO: 70341 - DNA, 60 bp, Artificial
  Synthetic oligonucleotide
caaaatcatggcgtcccaaggcaccaaacggtcttatgaacagatggagactgatgggga

SEQ ID NO: 70342 - DNA, 60 bp, Artificial
  Synthetic oligonucleotide
cgaaatcatggcgtcccaaggcaccaaacggtcttatgaacagatggaaactgatgggga

SEQ ID NO: 70343 - DNA, 60 bp, Artificial
  Synthetic oligonucleotide
ctcactgagtgacatcgaaatcatggcgtcccaaggcaccaaacggtcttatgaacagat

SEQ ID NO: 70344 - DNA, 60 bp, Artificial
  Synthetic oligonucleotide
caaaatcatggcgtcccaaggcaccaaacggtcttatgagcagatggaaactgatgggga

SEQ ID NO: 70345 - DNA, 60 bp, Artificial
  Synthetic oligonucleotide
ctcactgagtgacatcaaaatcatggcgtcccaaggcaccaaacggtcttatgagcagat

SEQ ID NO: 70346 - DNA, 60 bp, Artificial
  Synthetic oligonucleotide
atcagaatggaccaggcaatcatggagaagaacatcatgttgaaagcgaatttcagtgtg

SEQ ID NO: 70347 - DNA, 60 bp, Artificial
  Synthetic oligonucleotide
atcagaatggaccaggcaatcatggaaaagaacatcatgttgaaagcgaatttcagtgtg

SEQ ID NO: 70348 - DNA, 53 bp, Artificial
  Synthetic oligonucleotide
aaaacatcatgttgaaagcgaatttcagtgtgatctttgaccgactagagacc

SEQ ID NO: 70349 - DNA, 60 bp, Artificial
  Synthetic oligonucleotide
cagaatggaccaggcaatcatggaaaagaacatcatgttgaaagcgaatttcagtgtgat

SEQ ID NO: 70350 - DNA, 60 bp, Artificial
  Synthetic oligonucleotide
cagaatggaccaggcaatcatggagaagaacatcatgttgaaagcgaatttcagtgtgat

SEQ ID NO: 70351 - DNA, 60 bp, Artificial
  Synthetic oligonucleotide
atcatagcattgtttccagttatgtgtgctcaggacttgttggagacacacccagaaaaa

SEQ ID NO: 70352 - DNA, 60 bp, Artificial
  Synthetic oligonucleotide
aggattatagcattgtttccagttatgtgtgctcaggacttgttggagacacacccagaa

SEQ ID NO: 70353 - DNA, 60 bp, Artificial
  Synthetic oligonucleotide
ggatcatagcattgtttccagttatgtgtgctcaggacttgttggagacacacccagaaa

SEQ ID NO: 70354 - DNA, 59 bp, Artificial
  Synthetic oligonucleotide
atcatagcattgtttccagttatgtgtgctcaggacttgttggagacacacccagaaaa

SEQ ID NO: 70355 - DNA, 60 bp, Artificial
  Synthetic oligonucleotide
gagatgaagcattaaacaaccggttccagatcaaaggtgttgagctgaagtcaggataca

SEQ ID NO: 70356 - DNA, 60 bp, Artificial
  Synthetic oligonucleotide
atgataacacagttcgagtctctaaaaatctacagagattcgcttggagaagcagtaatg

SEQ ID NO: 70357 - DNA, 60 bp, Artificial
  Synthetic oligonucleotide
ggaaaagagcaacagctatactcagaaaagcaaccagaagattggttcagctcatagtga

SEQ ID NO: 70358 - DNA, 60 bp, Artificial
  Synthetic oligonucleotide
gaaaatttgcaggcctatcagaagcgaatgggggtgcagatgcaacgattcaagtgaccc

SEQ ID NO: 70359 - DNA, 60 bp, Artificial
  Synthetic oligonucleotide
ggtggacggttggtacggtttcaggcatcaaaattctgaaggcacaggacaagcagcaga

SEQ ID NO: 70360 - DNA, 60 bp, Artificial
  Synthetic oligonucleotide
tgacaaagacataatggattccaacactgtgtcaagtttccaggtagattgctttctttg

SEQ ID NO: 70361 - DNA, 60 bp, Artificial
  Synthetic oligonucleotide
acacagatgtggtaaactttgtgagcatggagttttctctcactgacccgagacttgagc

SEQ ID NO: 70362 - DNA, 60 bp, Artificial
  Synthetic oligonucleotide
ctcatttaaggaatgacacagatgtggtaaactttgtgagcatggagttttctctcactg

SEQ ID NO: 70363 - DNA, 60 bp, Artificial
  Synthetic oligonucleotide
atgaacagatggaaactgatggggaacgccagaatgcaactgagattagggcatccgtcg

SEQ ID NO: 70364 - DNA, 60 bp, Artificial
  Synthetic oligonucleotide
tgccccattccttgatcggcttcgccgagatcagaagtccctaaggggaagaggcagcac

SEQ ID NO: 70365 - DNA, 60 bp, Artificial
  Synthetic oligonucleotide
tcagctggtgtggatggcatgccattctgctgcatttgaagatctaagattattgagctt

SEQ ID NO: 70366 - DNA, 60 bp, Artificial
  Synthetic oligonucleotide
cagctggtgtggatggcatgccattctgctgcatttgaagatctaagattattgagcttc

SEQ ID NO: 70367 - DNA, 60 bp, Artificial
  Synthetic oligonucleotide
gggtcatggagtgaaaggctgggcctttgatgatggaaatgacgtgtggatgggaagaac

SEQ ID NO: 70368 - DNA, 60 bp, Artificial
  Synthetic oligonucleotide
cctgtgaacagattgctgactcccagcacaggtctcataggcaaatggtggcaacaacca

SEQ ID NO: 70369 - DNA, 60 bp, Artificial
  Synthetic oligonucleotide
gagcagattgctgactcccagcacaggtctcataggcaaatggtggcaacaaccaatcca

SEQ ID NO: 70370 - DNA, 60 bp, Artificial
  Synthetic oligonucleotide
tgagcagattgctgactcccagcacaggtctcataggcaaatggtggcaacaaccaatcc

SEQ ID NO: 70371 - DNA, 60 bp, Artificial
  Synthetic oligonucleotide
gtgcaacatgtgaacagattgctgactcccagcacaggtctcataggcaaatggtggcaa

SEQ ID NO: 70372 - DNA, 60 bp, Artificial
  Synthetic oligonucleotide
cagattgctgactcccagcacaggtctcataggcaaatggtggcaacaaccaatccacta

SEQ ID NO: 70373 - DNA, 60 bp, Artificial
  Synthetic oligonucleotide
cggcactttaattgaagacccagatgaaagcacatccggagtggagtccgccgtcttgag

SEQ ID NO: 70374 - DNA, 60 bp, Artificial
  Synthetic oligonucleotide
ccggcactttaattgaagacccagatgaaagcacatccggagtggagtccgccgttttga

SEQ ID NO: 70375 - DNA, 60 bp, Artificial
  Synthetic oligonucleotide
ctgatgaggcacttaaaatgaccatggcctccacacctgcttcgcgatacataactgaca

SEQ ID NO: 70376 - DNA, 60 bp, Artificial
  Synthetic oligonucleotide
cgctgcagtcaaaggaatcgggacaatggtgatggagctgatcagaatgatcaaacgggg

SEQ ID NO: 70377 - DNA, 60 bp, Artificial
  Synthetic oligonucleotide
agcagtaatgagaatgggggacctccacttactccaaaacagaaacggaaaatggcgaga

SEQ ID NO: 70378 - DNA, 60 bp, Artificial
  Synthetic oligonucleotide
ttacagctactatttgaagtggaacaggagataagaactttctcatttcagcttatttaa

SEQ ID NO: 70379 - DNA, 60 bp, Artificial
  Synthetic oligonucleotide
ggaacaggctcgtggcctgatggggcggacatcaatctcatgcctatataagctttcgca

SEQ ID NO: 70380 - DNA, 60 bp, Artificial
  Synthetic oligonucleotide
ggggcaggctcatggcctgatggggcggacatcaatctcatgcctatataagctttcgca

SEQ ID NO: 70381 - DNA, 60 bp, Artificial
  Synthetic oligonucleotide
ctcagtgattatgaagggcggttgatccagaacagcttgacaatagagaaaatggtgctc

SEQ ID NO: 70382 - DNA, 60 bp, Artificial
  Synthetic oligonucleotide
gagcagatggaaactgatggggatcgccagaatgcaactgagattagggcatccgtcggg

SEQ ID NO: 70383 - DNA, 60 bp, Artificial
  Synthetic oligonucleotide
tgaacagatggaaactgatggggatcgccagaatgcaactgagattagggcatccgtcgg

SEQ ID NO: 70384 - DNA, 60 bp, Artificial
  Synthetic oligonucleotide
cagatggaaactgatggggatcgccagaatgcaactgagattagggcatccgtcgggaag

SEQ ID NO: 70385 - DNA, 60 bp, Artificial
  Synthetic oligonucleotide
cagatggagactgatggggatcgccagaatgcaactgagattagggcatccgtcgggaag

SEQ ID NO: 70386 - DNA, 60 bp, Artificial
  Synthetic oligonucleotide
atgagcagatggaaactgatggggatcgccagaatgcaactgagattagggcatccgtcg

SEQ ID NO: 70387 - DNA, 60 bp, Artificial
  Synthetic oligonucleotide
atggcatgccattctgctgcatttgaagatttaagattgttaagcttcatcagagggacc

SEQ ID NO: 70388 - DNA, 60 bp, Artificial
  Synthetic oligonucleotide
atgacgtgtggatgggaagaacgatcagcgatgagtcacgctcaggttatgaaactttca

SEQ ID NO: 70389 - DNA, 60 bp, Artificial
  Synthetic oligonucleotide
tggattccaacactgtgtcaagtttccaggtagattgctttctttggcatgtccgaaaac

SEQ ID NO: 70390 - DNA, 60 bp, Artificial
  Synthetic oligonucleotide
acactgtgtcaagtttccaggtagattgctttctttggcatatccggaaacaagttgtag

SEQ ID NO: 70391 - DNA, 60 bp, Artificial
  Synthetic oligonucleotide
tgctttgtgttgttttgctggggttcattatgtgggcctgccaaaaaggcaacattaggt

SEQ ID NO: 70392 - DNA, 60 bp, Artificial
  Synthetic oligonucleotide
gactgaaaacaactgagaatagttttgagcaaataacattcatgcaagccttacagctac

SEQ ID NO: 70393 - DNA, 60 bp, Artificial
  Synthetic oligonucleotide
gaatagttttgagcaaataacattcatgcaagcattacagctgctgtttgaagttgaaca

SEQ ID NO: 70394 - DNA, 60 bp, Artificial
  Synthetic oligonucleotide
aattctcggaaaagatgccggcactttaattgaagacccagatgaaagcacatccggagt

SEQ ID NO: 70395 - DNA, 60 bp, Artificial
  Synthetic oligonucleotide
cagctggtgtggatggcatgccattctgctgcttttgaagatctaagattgttaagcttc

SEQ ID NO: 70396 - DNA, 60 bp, Artificial
  Synthetic oligonucleotide
tcagctggtgtggatggcatgccattctgctgcttttgaagatctaagattgttaagctt

SEQ ID NO: 70397 - DNA, 60 bp, Artificial
  Synthetic oligonucleotide
catccgtcgggaagatgattgatggaattggacgattctacatccaaatgtgcactgaac

SEQ ID NO: 70398 - DNA, 60 bp, Artificial
  Synthetic oligonucleotide
gcatccgtcgggaagatgattgatggaattggacgattctacatccaaatgtgcactgaa

SEQ ID NO: 70399 - DNA, 60 bp, Artificial
  Synthetic oligonucleotide
agcgcaaaatgccataagcacaacattcccttatactggagatcctccatacagccatgg

SEQ ID NO: 70400 - DNA, 60 bp, Artificial
  Synthetic oligonucleotide
atccggaaacaagctgtagaccaagaactgagtgatgccccattccttgatcggcttcgc

SEQ ID NO: 70401 - DNA, 60 bp, Artificial
  Synthetic oligonucleotide
tgtgatctttgaccgactagagaccctagtattactaagggctttcaccgaagagggagc

SEQ ID NO: 70402 - DNA, 60 bp, Artificial
  Synthetic oligonucleotide
ttgcaactacacactcctggattcccaagaggaaccgctctattctcaacacaagccaaa

SEQ ID NO: 70403 - DNA, 60 bp, Artificial
  Synthetic oligonucleotide
ggattcccaagaggaaccgctctattctcaacacaagccaaaggggaattcttgaggatg

SEQ ID NO: 70404 - DNA, 52 bp, Artificial
  Synthetic oligonucleotide
ttggaatttccagcatggtggaggccatggtgtctagggcccggattgatgc

SEQ ID NO: 70405 - DNA, 60 bp, Artificial
  Synthetic oligonucleotide
atgacgccgttgcaactacacactcctggattcccaagaggaaccgctctattctcaaca

SEQ ID NO: 70406 - DNA, 60 bp, Artificial
  Synthetic oligonucleotide
ccccccaactcaacccaattgatggaccactacctgaggataatgagccaagtggatatg

SEQ ID NO: 70407 - DNA, 60 bp, Artificial
  Synthetic oligonucleotide
ttggcatgtccgcaaacaagttgcagaccaaggtctaggcgatgcccccttccttgatcg

SEQ ID NO: 70408 - DNA, 53 bp, Artificial
  Synthetic oligonucleotide
agcaaaagcagggtgacaaagacataatggattcccacactgtgtcaagcttt

SEQ ID NO: 70409 - DNA, 60 bp, Artificial
  Synthetic oligonucleotide
tggagaggattctgaaagaagaatccgatgaggcatttaaaatgacaatggcctccgcac

SEQ ID NO: 70410 - DNA, 60 bp, Artificial
  Synthetic oligonucleotide
gcgaatttcagtgtgatttttgatcggttggagaatctgacattactaagggctttcacc

SEQ ID NO: 70411 - DNA, 60 bp, Artificial
  Synthetic oligonucleotide
catgctcatgcccaagcagaaagtggctggccctctttgtgtcaaaatggaccaggcgat

SEQ ID NO: 70412 - DNA, 60 bp, Artificial
  Synthetic oligonucleotide
aagaagaatccgatgaggcatttaaaatgacaatggcctccgcacttgcttcgcggtacc

SEQ ID NO: 70413 - DNA, 60 bp, Artificial
  Synthetic oligonucleotide
gcaagcattacagctattgtttgaagtggaacaagagattagaacgttttcgtttcagct

SEQ ID NO: 70414 - DNA, 60 bp, Artificial
  Synthetic oligonucleotide
attcatgcaagcattacagctattgtttgaagtggaacaagagattagaacgttttcgtt

SEQ ID NO: 70415 - DNA, 60 bp, Artificial
  Synthetic oligonucleotide
gtcaaagggatcgggacaatggtgatggagctgatcagaatggtcaaacgggggatcaac

SEQ ID NO: 70416 - DNA, 60 bp, Artificial
  Synthetic oligonucleotide
gcttgcataggatcaatcagaaatggaacttatgaccatgatgtatacagagacgaagca

SEQ ID NO: 70417 - DNA, 54 bp, Artificial
  Synthetic oligonucleotide
gaccctagtattactaagggctttcaccgaagagggagcaattgttggcgaaat

SEQ ID NO: 70418 - DNA, 60 bp, Artificial
  Synthetic oligonucleotide
actggggttcatcatgtgggcctgccaaaaaggcaacattaggtgcaacatttgcatttg

SEQ ID NO: 70419 - DNA, 60 bp, Artificial
  Synthetic oligonucleotide
ctggggttcatcatgtgggcctgccaaaaaggcaacattaggtgcaacatttgcatttga

SEQ ID NO: 70420 - DNA, 60 bp, Artificial
  Synthetic oligonucleotide
gtgaggcataaattgaagacgacagagaatagttttgagcaaataacattcatgcaagca

SEQ ID NO: 70421 - DNA, 60 bp, Artificial
  Synthetic oligonucleotide
gaagtgaggcataaattgaagacgacagagaatagttttgagcaaataacattcatgcaa

SEQ ID NO: 70422 - DNA, 60 bp, Artificial
  Synthetic oligonucleotide
tcaccgaagagggagcaattgttggcgaaatctcaccattgccttcttttccagggcata

SEQ ID NO: 70423 - DNA, 60 bp, Artificial
  Synthetic oligonucleotide
tcaccgaagagggagcaattgttggcgaaatctcaccattgctttcttttccaggacata

SEQ ID NO: 70424 - DNA, 60 bp, Artificial
  Synthetic oligonucleotide
tgaggcatttaaaatgaccatggtctccacacctgcttcgcgatacataactgacatgac

SEQ ID NO: 70425 - DNA, 60 bp, Artificial
  Synthetic oligonucleotide
gcatctattggacaatagtaaaaccgggagacatacttttgattaacagcacagggaatc

SEQ ID NO: 70426 - DNA, 60 bp, Artificial
  Synthetic oligonucleotide
caaaacactctgaaattggcaacagggatgcggaatgtaccagagaagcaaactagaggc

SEQ ID NO: 70427 - DNA, 60 bp, Artificial
  Synthetic oligonucleotide
caaaacactctgaaattggcaacagggatgcggaatgtaccagataaacaaactagaggc

SEQ ID NO: 70428 - DNA, 60 bp, Artificial
  Synthetic oligonucleotide
gaggattgcatgataaaagcagttagaggtgacctgaatttcgtcaacagggcaaaccag

SEQ ID NO: 70429 - DNA, 56 bp, Artificial
  Synthetic oligonucleotide
gtacagagagggtggtggttagcattgatcggtttttgagagttcgagaccaacgt

SEQ ID NO: 70430 - DNA, 60 bp, Artificial
  Synthetic oligonucleotide
gtacagagagggtggtggttagcattgatcggtttttgagagttcgagaccaacgtggaa

SEQ ID NO: 70431 - DNA, 60 bp, Artificial
  Synthetic oligonucleotide
aactctatggagtaaaatgagtgatgctgggtcagatcgagtgatggtatcacctttggc

SEQ ID NO: 70432 - DNA, 60 bp, Artificial
  Synthetic oligonucleotide
tggaatatgatgccgttgcaactacacattcctggattcccaagaggaaccgctctattc

SEQ ID NO: 70433 - DNA, 60 bp, Artificial
  Synthetic oligonucleotide
ctattggacaatagtaaaaccgggagacatacttttgattaacagcacagggaatctaat

SEQ ID NO: 70434 - DNA, 60 bp, Artificial
  Synthetic oligonucleotide
agaggcaattctcctgtattcaactacaacaagaccactaaaagactaacaattctcgga

SEQ ID NO: 70435 - DNA, 60 bp, Artificial
  Synthetic oligonucleotide
gtgcactgaacttaaactcagtgattatgaagggcggttgatccagaacagcttgacaat

SEQ ID NO: 70436 - DNA, 60 bp, Artificial
  Synthetic oligonucleotide
gtgtactgaacttaaactcagtgattatgaagggcggttgatccagaacagcttgacaat

SEQ ID NO: 70437 - DNA, 60 bp, Artificial
  Synthetic oligonucleotide
tgcactgaacttaaactcagtgattatgaagggcggttgatccagaacagcttgacaata

SEQ ID NO: 70438 - DNA, 60 bp, Artificial
  Synthetic oligonucleotide
ggactaacagctaatgaatcaggaaggctaatagatttcctcaaggatgtgatggaatca

SEQ ID NO: 70439 - DNA, 60 bp, Artificial
  Synthetic oligonucleotide
tggactaacagctaatgaatcaggaaggctaatagatttcctcaaggatgtgatggaatc

SEQ ID NO: 70440 - DNA, 60 bp, Artificial
  Synthetic oligonucleotide
tcagaagtagaagggagaattcaggacctcgagaaatatgtcgaggacactaaaatagat

SEQ ID NO: 70441 - DNA, 60 bp, Artificial
  Synthetic oligonucleotide
tcagaagtagaagggagaattcaggacctcgaggaatatgttgaggacactaaaatagat

SEQ ID NO: 70442 - DNA, 60 bp, Artificial
  Synthetic oligonucleotide
gatcgaatggtttaacagctaatgaatcaggaaggctaatagatttcctcaaggatgtga

SEQ ID NO: 70443 - DNA, 60 bp, Artificial
  Synthetic oligonucleotide
gatcgaatggattaacagctaatgaatcaggaaggctaatagatttcctcaaggatgtga

SEQ ID NO: 70444 - DNA, 60 bp, Artificial
  Synthetic oligonucleotide
ccctcgaatgttcttagcgatgattacatatatcacaaaaaatcaacctgagtggttcag

SEQ ID NO: 70445 - DNA, 60 bp, Artificial
  Synthetic oligonucleotide
cccccgaatgtttttggcgatgattacatatatcacaaaaaatcaacctgagtggttcag

SEQ ID NO: 70446 - DNA, 60 bp, Artificial
  Synthetic oligonucleotide
tggagaggaaatggccacaaaggcagactacactcttgatgaggaaagcagggctaggat

SEQ ID NO: 70447 - DNA, 60 bp, Artificial
  Synthetic oligonucleotide
agcatggaattttctctcactgacccgagacttgagccacataaatgggagaaatactgt

SEQ ID NO: 70448 - DNA, 60 bp, Artificial
  Synthetic oligonucleotide
tctctcactgacccgagacttgagccacataaatgggagaaatactgtgtccttgagata

SEQ ID NO: 70449 - DNA, 60 bp, Artificial
  Synthetic oligonucleotide
atgataagcaagtgcagaactaaagagggaaggcgaaaaaccaacttatatggattcatc

SEQ ID NO: 70450 - DNA, 60 bp, Artificial
  Synthetic oligonucleotide
cggctgcattgagggcaagctttctcaaatgtccaaagaagtgaatgcccaaattgagcc

SEQ ID NO: 70451 - DNA, 60 bp, Artificial
  Synthetic oligonucleotide
accaaacggctgcattgagggcaagctttctcaaatgtccaaagaagtgaatgccaaaat

SEQ ID NO: 70452 - DNA, 56 bp, Artificial
  Synthetic oligonucleotide
gaacggctgcattgagggcaagctttctcaaatgtccaaagaagtgaatgcccaaa

SEQ ID NO: 70453 - DNA, 60 bp, Artificial
  Synthetic oligonucleotide
cctcgaacctgggacctttgatctcagggggctatatgaagcaattgaggagtgcctgat

SEQ ID NO: 70454 - DNA, 60 bp, Artificial
  Synthetic oligonucleotide
gaacggctgcattgagggcaagctttctcaaatgtccaaagaagtgaatgcaaaagttga

SEQ ID NO: 70455 - DNA, 60 bp, Artificial
  Synthetic oligonucleotide
catgataagcaagtgcagaactaaagagggaagacgaaaaaccaatttatatggattcat

SEQ ID NO: 70456 - DNA, 60 bp, Artificial
  Synthetic oligonucleotide
atgataagcaagtgcagaactaaagagggaaggcgaaaaaccaatttatatggatttatc

SEQ ID NO: 70457 - DNA, 60 bp, Artificial
  Synthetic oligonucleotide
tggggaagaaatggccacaaaggcagactacactcttgatgaggaaagcagggctaggat

SEQ ID NO: 70458 - DNA, 60 bp, Artificial
  Synthetic oligonucleotide
ccaggctgtttaccataagacaagaaatggccaacagaggcctctgggattcctttcgtc

SEQ ID NO: 70459 - DNA, 60 bp, Artificial
  Synthetic oligonucleotide
cgaacctgggacctttgatcttggggggctatatgaagcaattgaggagtgcctgattaa

SEQ ID NO: 70460 - DNA, 60 bp, Artificial
  Synthetic oligonucleotide
ggagggaagaacctcagacatgagggcagaaatcataagaatgatggaaggtgcaaaccc

SEQ ID NO: 70461 - DNA, 60 bp, Artificial
  Synthetic oligonucleotide
atgtgccggattatgcctcccttaggtcactagttgcctcatccggcaccctggagttta

SEQ ID NO: 70462 - DNA, 60 bp, Artificial
  Synthetic oligonucleotide
gggaatcacggagtgaaaggctgggcctttgatgatggaaatgacgtgtggatgggaaga

SEQ ID NO: 70463 - DNA, 57 bp, Artificial
  Synthetic oligonucleotide
aaccatgaagactatcattgctttgagctacattctatgtctggttttcgctcaaaa

SEQ ID NO: 70464 - DNA, 60 bp, Artificial
  Synthetic oligonucleotide
attaaccatgaagactatcattgctttgagctacattctatgtctggttttcgctcaaaa

SEQ ID NO: 70465 - DNA, 60 bp, Artificial
  Synthetic oligonucleotide
tattaaccatgaagactatcattgctttgagctacattctatgtctggttttcgctcaaa

SEQ ID NO: 70466 - DNA, 60 bp, Artificial
  Synthetic oligonucleotide
tcagctggtctggatggcatgccattctgctgcatttgaagatctaagattgttaagctt

SEQ ID NO: 70467 - DNA, 60 bp, Artificial
  Synthetic oligonucleotide
cagctggtctggatggcatgccattctgctgcatttgaagatctaagattgttaagcttc

SEQ ID NO: 70468 - DNA, 60 bp, Artificial
  Synthetic oligonucleotide
taaaggattatagcattgtttccagttatgtgtgctcaggacttgttggagacacaccca

SEQ ID NO: 70469 - DNA, 60 bp, Artificial
  Synthetic oligonucleotide
tctctgttgaaagcaaaagctgcatcaatcggtgcttttatgtggagttgataaggggaa

SEQ ID NO: 70470 - DNA, 60 bp, Artificial
  Synthetic oligonucleotide
ggacaagcagcagatcttaaaagcactcaagcagcaatcgaccaaatcaatgggaaactg

SEQ ID NO: 70471 - DNA, 60 bp, Artificial
  Synthetic oligonucleotide
caggacaagcagcagatcttaaaagcactcaagcagcaatcgaccaaatcaatgggaaac

SEQ ID NO: 70472 - DNA, 59 bp, Artificial
  Synthetic oligonucleotide
tcatggcctgatggggcggacatcaatctcatgcctatataagctttcgcaattttaga

SEQ ID NO: 70473 - DNA, 60 bp, Artificial
  Synthetic oligonucleotide
cagctgctgtttgaagtggaacaggagataagaactttctcatttcagcttatttaatga

SEQ ID NO: 70474 - DNA, 60 bp, Artificial
  Synthetic oligonucleotide
tacagctgctgtttgaagtggaacaggagataagaactttctcatttcagcttatttaat

SEQ ID NO: 70475 - DNA, 60 bp, Artificial
  Synthetic oligonucleotide
ctaatgctactgagctggttcagagttcctcaacaggtagaatatgcgacagtcctcaca

SEQ ID NO: 70476 - DNA, 60 bp, Artificial
  Synthetic oligonucleotide
ggtatgtgcaacatgtgaacagattgctgactcccagcacaggtctcataggcaaatggt

SEQ ID NO: 70477 - DNA, 60 bp, Artificial
  Synthetic oligonucleotide
caactaaaagactaacaattctcggaaaagatgccggcactttaattgaagacccagatg

SEQ ID NO: 70478 - DNA, 60 bp, Artificial
  Synthetic oligonucleotide
gatgccggcactttaattgaagacccagatgaaagcacatccggagtggagtccgctgtc

SEQ ID NO: 70479 - DNA, 60 bp, Artificial
  Synthetic oligonucleotide
caagaccactaaaagactaacaattctcggaaaagatgccggcactttaattgaagaccc

SEQ ID NO: 70480 - DNA, 60 bp, Artificial
  Synthetic oligonucleotide
ctctgttgaaagcaaaagctgcatcaatcggtgcttttatgtggagttgataaggggaag

SEQ ID NO: 70481 - DNA, 60 bp, Artificial
  Synthetic oligonucleotide
tgtgcatagcatggtccagctcaagttgtcacgatggaaaggcatggctgcatgtttgtg

SEQ ID NO: 70482 - DNA, 58 bp, Artificial
  Synthetic oligonucleotide
tgagtctatgagggaagaatatcgaaaggaacagcagaatgctgtggatgctgacaac

SEQ ID NO: 70483 - DNA, 60 bp, Artificial
  Synthetic oligonucleotide
atgctactgagctggttcagagttcctcaacaggtggaatatgcgacagtcctcatcaga

SEQ ID NO: 70484 - DNA, 60 bp, Artificial
  Synthetic oligonucleotide
atgacgtgtggatgggaagaacgatcagcgaggagtcacgctcaggttatgaaaccttca

SEQ ID NO: 70485 - DNA, 60 bp, Artificial
  Synthetic oligonucleotide
tggtccagccaagagcatggaatatgacgctgttgcaactacacactcctggattcccaa

SEQ ID NO: 70486 - DNA, 60 bp, Artificial
  Synthetic oligonucleotide
tgccgttgcaactacacactcctggattcccaagaggaatcgctctattctcaacacaag

SEQ ID NO: 70487 - DNA, 60 bp, Artificial
  Synthetic oligonucleotide
ccgttgcaactacacactcctggattcccaagaggaatcgctctattctcaacacaagcc

SEQ ID NO: 70488 - DNA, 55 bp, Artificial
  Synthetic oligonucleotide
ctttaattgaagacccagatgaaagcacatccggagtggagtccgctgtcttgag

SEQ ID NO: 70489 - DNA, 60 bp, Artificial
  Synthetic oligonucleotide
ggtggggaaaagagcaacagctatactcagaaaagcaaccaggagattgattcagctcat

SEQ ID NO: 70490 - DNA, 60 bp, Artificial
  Synthetic oligonucleotide
atccggaaacaaattgtagaccaagaactgagtgatgccccattccttgatcggcttcgc

SEQ ID NO: 70491 - DNA, 60 bp, Artificial
  Synthetic oligonucleotide
taataatcactcactgagtgacatcaaaatcatggcgtcccaaggcaccaaacggtctta

SEQ ID NO: 70492 - DNA, 60 bp, Artificial
  Synthetic oligonucleotide
tgataatcactcactgagtgacatcaaaatcatggcgtcccaaggcaccaaacggtctta

SEQ ID NO: 70493 - DNA, 60 bp, Artificial
  Synthetic oligonucleotide
attatgcctcccttaggtcactagttgcctcatccggcacactggagtttaacaacgaaa

SEQ ID NO: 70494 - DNA, 60 bp, Artificial
  Synthetic oligonucleotide
ccagccaaaagtatggagtatgatgccgttgcaactacacactcctggattcccaagagg

SEQ ID NO: 70495 - DNA, 60 bp, Artificial
  Synthetic oligonucleotide
ctgttgcaactacacactcctggattcccaagaggaaccgctctattctcaacacaagcc

SEQ ID NO: 70496 - DNA, 60 bp, Artificial
  Synthetic oligonucleotide
cacactcctggattcccaagaggaaccgctctattctcaacacaagccagaggggaattc

SEQ ID NO: 70497 - DNA, 60 bp, Artificial
  Synthetic oligonucleotide
gggaatgatagacggttggtacggtttcaggcatcaaaattccgagggcacaggacaagc

SEQ ID NO: 70498 - DNA, 60 bp, Artificial
  Synthetic oligonucleotide
gggaatggtggacggttggtacggtttcaggcatcaaaactctgaaggcacaggacaagc

SEQ ID NO: 70499 - DNA, 60 bp, Artificial
  Synthetic oligonucleotide
atgaaaagaaggccaaactggcaaatgttgtgagaaagatgatgaccaattcacaagaca

SEQ ID NO: 70500 - DNA, 60 bp, Artificial
  Synthetic oligonucleotide
cctcttttgaaataagtaatgaaggatcttatttcttcggagacaatgcagaagagtacg

SEQ ID NO: 70501 - DNA, 60 bp, Artificial
  Synthetic oligonucleotide
catgagtaatgaaggatcttatttcttcggagacaatgcagaagagtacgacaactaagg

SEQ ID NO: 70502 - DNA, 60 bp, Artificial
  Synthetic oligonucleotide
catgagtaatgaaggatcttatttcttcggagacaatgcagaggagtacgacaattaaag

SEQ ID NO: 70503 - DNA, 60 bp, Artificial
  Synthetic oligonucleotide
ggttgtacgaatcagaaagcaaatatccagtgctgaacgtgactatgccaaacaatggca

SEQ ID NO: 70504 - DNA, 57 bp, Artificial
  Synthetic oligonucleotide
aaagatgagccttctaaccgaggtcgaaacgtatgttctctctatcgttccatcagg

SEQ ID NO: 70505 - DNA, 60 bp, Artificial
  Synthetic oligonucleotide
ggggccaaagaaatcgcactcagttattctgctggtgcacttgccagttgcatgggcctc

SEQ ID NO: 70506 - DNA, 60 bp, Artificial
  Synthetic oligonucleotide
agcactcagttattctgctggtgcacttgccagttgcatgggcctcatatacaacaggat

SEQ ID NO: 70507 - DNA, 60 bp, Artificial
  Synthetic oligonucleotide
actgacaataacttactcatcgtcaatgatgtgggagattaatggtcctgagtcagtgtt

SEQ ID NO: 70508 - DNA, 59 bp, Artificial
  Synthetic oligonucleotide
ctgagtctatgagggaagaatatcgaaaggaacagcagaatgctgtggatgctgatgac

SEQ ID NO: 70509 - DNA, 60 bp, Artificial
  Synthetic oligonucleotide
attgaacgcagcaaagctttcagcaactgttacccttatgatgtgccggattatgcctcc

SEQ ID NO: 70510 - DNA, 60 bp, Artificial
  Synthetic oligonucleotide
cactctgaaattggcaacagggatgcggaatgtaccagagaaacaaactagaggcatatt

SEQ ID NO: 70511 - DNA, 60 bp, Artificial
  Synthetic oligonucleotide
gtagaagggagaattcaggacctcgagaaatatgttgaggacactaaaatagatctctgg

SEQ ID NO: 70512 - DNA, 60 bp, Artificial
  Synthetic oligonucleotide
gcatctattggacaatagtaaaaccgggagacatacttttgattaatagcacagggaatc

SEQ ID NO: 70513 - DNA, 60 bp, Artificial
  Synthetic oligonucleotide
taagcatctattggacaatagtaaaaccgggagacatactgttgattaatagcactggga

SEQ ID NO: 70514 - DNA, 60 bp, Artificial
  Synthetic oligonucleotide
gcatctattggacaatagtaaaaccgggagacatactgttgattaatagcactggaaacc

SEQ ID NO: 70515 - DNA, 60 bp, Artificial
  Synthetic oligonucleotide
actcagtgattatgaagggcggttgatccagaacagcttaacaatagagagaatggtgct

SEQ ID NO: 70516 - DNA, 60 bp, Artificial
  Synthetic oligonucleotide
aagaattctcagaagtagaagggagaattcaggacctcgagaaatatgttgaggacacta

SEQ ID NO: 70517 - DNA, 60 bp, Artificial
  Synthetic oligonucleotide
cccagcgcagggaaagatcctaagaaaactggagggcccatatacaagagagtagatgga

SEQ ID NO: 70518 - DNA, 60 bp, Artificial
  Synthetic oligonucleotide
aaaacttaaaagggagataacattccatggggccaaagaaatagcactcagttattctgc

SEQ ID NO: 70519 - DNA, 60 bp, Artificial
  Synthetic oligonucleotide
aaaacttaagagggagataacattccatggggccaaagaaatagcactcagttattctgc

SEQ ID NO: 70520 - DNA, 60 bp, Artificial
  Synthetic oligonucleotide
ttgtacagaaaacttaagagggagataacattccatggggccaaagaaatagcactcagt

SEQ ID NO: 70521 - DNA, 60 bp, Artificial
  Synthetic oligonucleotide
acagaaaacttaagagggagataacattccatggggccaaagaaatagcactcagttatt

SEQ ID NO: 70522 - DNA, 60 bp, Artificial
  Synthetic oligonucleotide
aagagggagataacattccatggggccaaagaaatagcactcagttattctgctggtgca

SEQ ID NO: 70523 - DNA, 60 bp, Artificial
  Synthetic oligonucleotide
gaagctcaagagggagataacattccatggggccaaagaaatctcactcagttattctgc

SEQ ID NO: 70524 - DNA, 60 bp, Artificial
  Synthetic oligonucleotide
gggagataacattccatggggccaaagaaatagcactcagttattctgctggtgcacttg

SEQ ID NO: 70525 - DNA, 60 bp, Artificial
  Synthetic oligonucleotide
ctggacggattaaaaaagaagagttcgccgagatcatgaagatctgttccaccattgaag

SEQ ID NO: 70526 - DNA, 60 bp, Artificial
  Synthetic oligonucleotide
ctggacggattaagaaagaagagttctctgagatcatgaagatctgttccaccattgaag

SEQ ID NO: 70527 - DNA, 60 bp, Artificial
  Synthetic oligonucleotide
ctggacggattaagaaagaagagttcgccgagatcatgaagatctgttccaccattgaag

SEQ ID NO: 70528 - DNA, 60 bp, Artificial
  Synthetic oligonucleotide
ctggacggattaagaaagaggagttctctgagatcatgaagatctgttccaccattgaag

SEQ ID NO: 70529 - DNA, 60 bp, Artificial
  Synthetic oligonucleotide
ctggacggattaagaaggaagagttctctgagatcatgaagatctgttccaccattgaag

SEQ ID NO: 70530 - DNA, 60 bp, Artificial
  Synthetic oligonucleotide
ctggacggattaagaaagaagagttcgctgagatcatgaagatctgttccaccattgaag

SEQ ID NO: 70531 - DNA, 60 bp, Artificial
  Synthetic oligonucleotide
aagaaagaggagttctctgagatcatgaagatctgttccaccattgaagagctcagacgg

SEQ ID NO: 70532 - DNA, 60 bp, Artificial
  Synthetic oligonucleotide
aagaaagaagagttcgccgagatcatgaagatctgttccaccattgaagagctcagacgg

SEQ ID NO: 70533 - DNA, 60 bp, Artificial
  Synthetic oligonucleotide
aagaaggaagagttctctgagatcatgaagatctgttccaccattgaagagctcagacgg

SEQ ID NO: 70534 - DNA, 60 bp, Artificial
  Synthetic oligonucleotide
aagaaagaagagttcgctgagatcatgaagatctgttccaccattgaagagctcagacgg

SEQ ID NO: 70535 - DNA, 60 bp, Artificial
  Synthetic oligonucleotide
aagaagagttcgccgagatcatgaagatctgttccaccattgaagagctcagacggcaaa

SEQ ID NO: 70536 - DNA, 60 bp, Artificial
  Synthetic oligonucleotide
gaaagaagagttctctgagatcatgaagatctgttccaccattgaagagctcagacggca

SEQ ID NO: 70537 - DNA, 60 bp, Artificial
  Synthetic oligonucleotide
aaggctgggcctttgacgatggaaatgacgtgtggatgggaagaacgatcggagaggagt

SEQ ID NO: 70538 - DNA, 60 bp, Artificial
  Synthetic oligonucleotide
ggtagacggttggtatggtttcaggcatcaaaattctgagggcacaggacaagcagcaga

SEQ ID NO: 70539 - DNA, 50 bp, Artificial
  Synthetic oligonucleotide
ccagttggaatttccagcatggtggaggccatggtgtctagggcccggat

SEQ ID NO: 70540 - DNA, 60 bp, Artificial
  Synthetic oligonucleotide
ttggaatttctagcatggtggaggccatggtgtctagggcccggattgatgccagagttg

SEQ ID NO: 70541 - DNA, 60 bp, Artificial
  Synthetic oligonucleotide
gttcatataggagaccggttggaatttctagcatggtggaggccatggtgtctagggccc

SEQ ID NO: 70542 - DNA, 60 bp, Artificial
  Synthetic oligonucleotide
gttcaactacaacaagaccactaaaagactaacaattctcggaaaagatgccggcacttt

SEQ ID NO: 70543 - DNA, 60 bp, Artificial
  Synthetic oligonucleotide
attcaactacaacaagaccactaaaagactaacaattctcggaaaagatgctggcacttt

SEQ ID NO: 70544 - DNA, 60 bp, Artificial
  Synthetic oligonucleotide
attcaactacaacaagaccactaaaagactaacaattctcggaaaagacgccggcacttt

SEQ ID NO: 70545 - DNA, 60 bp, Artificial
  Synthetic oligonucleotide
cctgtattcaactacaacaagaccactaaaagactaacaattctcggaaaagatgctggc

SEQ ID NO: 70546 - DNA, 60 bp, Artificial
  Synthetic oligonucleotide
gagcaaataacattcatgcaggcattacagctgctgtttgaagtggaacaggagataaga

SEQ ID NO: 70547 - DNA, 60 bp, Artificial
  Synthetic oligonucleotide
gcaaataacattcatgcaagccttacagctgctgtttgaagtggaacaggagataagaac

SEQ ID NO: 70548 - DNA, 60 bp, Artificial
  Synthetic oligonucleotide
caagcattacagctgctgtttgaagtggaacaggagatgagaactttctcttttcagctt

SEQ ID NO: 70549 - DNA, 60 bp, Artificial
  Synthetic oligonucleotide
tagattcatcgaaattggagtaacaaggagagaagtccacatatattaccttgaaaaggc

SEQ ID NO: 70550 - DNA, 60 bp, Artificial
  Synthetic oligonucleotide
cagattcatcgaaattggagtaacaaggagagaagtccacatatattaccttgaaaaggc

SEQ ID NO: 70551 - DNA, 60 bp, Artificial
  Synthetic oligonucleotide
gcatggtccagctcaagttgtcacgatggaaaagcatggctgcatgtttgtgtcactggg

SEQ ID NO: 70552 - DNA, 60 bp, Artificial
  Synthetic oligonucleotide
gcagggaagaacaccgatcttgaggttctcatggaatggctaaagacaagaccaatcctg

SEQ ID NO: 70553 - DNA, 50 bp, Artificial
  Synthetic oligonucleotide
gttcctgttatcctcgatatcctggtgtcagatgtatctgcagagacaac

SEQ ID NO: 70554 - DNA, 60 bp, Artificial
  Synthetic oligonucleotide
agacataatggattccaacactgtgtcaagtttccaggtagattgctttctttggcatgt

SEQ ID NO: 70555 - DNA, 60 bp, Artificial
  Synthetic oligonucleotide
ttcagaaacatcctgagcattgcacccataatgttctcaaacaaaatggcgagactaggg

SEQ ID NO: 70556 - DNA, 60 bp, Artificial
  Synthetic oligonucleotide
ttcagaaacgttctgagcatcgcacccataatgttctcaaacaaaatggcgagactaggg

SEQ ID NO: 70557 - DNA, 60 bp, Artificial
  Synthetic oligonucleotide
ttcagaaacattctgagcatcgcacccataatgttctcaaacaaaatggcgagactaggg

SEQ ID NO: 70558 - DNA, 60 bp, Artificial
  Synthetic oligonucleotide
ttcagaaacatcctgagcatcgcacccataatgttctcaaacaaaatggcgagactagga

SEQ ID NO: 70559 - DNA, 60 bp, Artificial
  Synthetic oligonucleotide
gttcagaaacatcctgagcatcgcacccataatgttctcaaacaaaatggcgagactagg

SEQ ID NO: 70560 - DNA, 55 bp, Artificial
  Synthetic oligonucleotide
tctcatggaatggctaaagacaagaccaatcctgtcacctctgactaaggggatt

SEQ ID NO: 70561 - DNA, 50 bp, Artificial
  Synthetic oligonucleotide
gttcctgttatcctcggtatcctggtgtcagatgtgtctgcagagacaac

SEQ ID NO: 70562 - DNA, 60 bp, Artificial
  Synthetic oligonucleotide
ccagattatgcctcccttaggtcactagttgcctcgtcaggcaccctggagtttatcaat

SEQ ID NO: 70563 - DNA, 60 bp, Artificial
  Synthetic oligonucleotide
gattatgcctcccttaggtcactagttgcctcatccggcacacttgagtttaacaatgaa

SEQ ID NO: 70564 - DNA, 60 bp, Artificial
  Synthetic oligonucleotide
gattatgcctcccttaggtcactagttgcctcatccggcactctggagtttaacaatgaa

SEQ ID NO: 70565 - DNA, 60 bp, Artificial
  Synthetic oligonucleotide
ggaaggaaggacctcagacatgagggcagaaatcataaggatgatggaaggtgcaaaacc

SEQ ID NO: 70566 - DNA, 60 bp, Artificial
  Synthetic oligonucleotide
gtcgaagagtagacataaaccctggtcatgcagacctcagtgccaaggaggcacaagatg

SEQ ID NO: 70567 - DNA, 60 bp, Artificial
  Synthetic oligonucleotide
gaggagttcacaatggtggggaaaagagcaacagctatactcagaaaagcaaccagaaga

SEQ ID NO: 70568 - DNA, 60 bp, Artificial
  Synthetic oligonucleotide
gccttttgctttgtgtctttctgctggggttcattatgtgggcctgccagagaggcaaca

SEQ ID NO: 70569 - DNA, 60 bp, Artificial
  Synthetic oligonucleotide
aaggaattctccgaagtagaagggaggattcaggaccttgagaagtacgttgaagacacg

SEQ ID NO: 70570 - DNA, 60 bp, Artificial
  Synthetic oligonucleotide
ccgaagtagaagggaggattcaggaccttgagaagtacgttgaagacacgaaagtagatc

SEQ ID NO: 70571 - DNA, 60 bp, Artificial
  Synthetic oligonucleotide
gcgcaatagcaggttttatagaaaatggatgggagggaatgatagatggctggtatggct

SEQ ID NO: 70572 - DNA, 60 bp, Artificial
  Synthetic oligonucleotide
caggttttatagaaaatggatgggagggaatgatagatggctggtatggcttcagacacc

SEQ ID NO: 70573 - DNA, 60 bp, Artificial
  Synthetic oligonucleotide
tggtatggcttcagacaccaaaattctgaaggtacaggacaagcagcagatcttaagagc

SEQ ID NO: 70574 - DNA, 60 bp, Artificial
  Synthetic oligonucleotide
gacaccaaaattctgaaggtacaggacaagcagcagatcttaagagcacccaggcagcca

SEQ ID NO: 70575 - DNA, 60 bp, Artificial
  Synthetic oligonucleotide
gacacctgtatttctgaatgcattactccaaatggaagtattcccaatgacaagcccttc

SEQ ID NO: 70576 - DNA, 60 bp, Artificial
  Synthetic oligonucleotide
tattcccaatgacaagcccttcaaaaatgtgaataagatcacatacggagcatgtcccaa

SEQ ID NO: 70577 - DNA, 60 bp, Artificial
  Synthetic oligonucleotide
catgtcccaagtatgttaagcagaacaccttgaagttggcgacagggatgcggaatgtac

SEQ ID NO: 70578 - DNA, 60 bp, Artificial
  Synthetic oligonucleotide
cccaagtatgttaagcagaacaccttgaagttggcgacagggatgcggaatgtacgagag

SEQ ID NO: 70579 - DNA, 60 bp, Artificial
  Synthetic oligonucleotide
tggatctagaccctgggtaaggggccagcctggcagaataagcatctattggacaatagt

SEQ ID NO: 70580 - DNA, 60 bp, Artificial
  Synthetic oligonucleotide
ggttgtttcaagatataccacaaatgtgacaatacttgcatagaatcaattagaaacggg

SEQ ID NO: 70581 - DNA, 60 bp, Artificial
  Synthetic oligonucleotide
caattagaaacgggacttatgatcatgatagatacagagatgaggcactgaacaaccggt

SEQ ID NO: 70582 - DNA, 60 bp, Artificial
  Synthetic oligonucleotide
gggaatgacaacagtacagcaacactgtgcctggggcaccatgcggtgccgaatgggaca

SEQ ID NO: 70583 - DNA, 60 bp, Artificial
  Synthetic oligonucleotide
ggacttcccagggaatgacaacagtacagcaacactgtgcctggggcaccatgcggtgcc

SEQ ID NO: 70584 - DNA, 60 bp, Artificial
  Synthetic oligonucleotide
gctttaagctacattttctgtctgactttcggtcaggacttcccagggaatgacaacagt

SEQ ID NO: 70585 - DNA, 60 bp, Artificial
  Synthetic oligonucleotide
atgaagaccgttattgctttaagctacattttctgtctgactttcggtcaggacttccca

SEQ ID NO: 70586 - DNA, 60 bp, Artificial
  Synthetic oligonucleotide
gctactgagctagtccaaagctcctcaactgggaaaatatgcaacaatcctcacaagatc

SEQ ID NO: 70587 - DNA, 60 bp, Artificial
  Synthetic oligonucleotide
attgaggtgactaatgctactgagctagtccaaagctcctcaactgggaaaatatgcaac

SEQ ID NO: 70588 - DNA, 60 bp, Artificial
  Synthetic oligonucleotide
ccaagaacagaccaacctgtatgttcaagcatcaggaagagtcacagtctctaccaggag

SEQ ID NO: 70589 - DNA, 60 bp, Artificial
  Synthetic oligonucleotide
ggatacaaagattggatcctgtggatttcctttgccatatcatgccttttgctttgtgtc

SEQ ID NO: 70590 - DNA, 60 bp, Artificial
  Synthetic oligonucleotide
atccgagcacaaaccaagaacagaccaacctgtatgttcaagcatcaggaagagtcacag

SEQ ID NO: 70591 - DNA, 60 bp, Artificial
  Synthetic oligonucleotide
caattttgacaaactatacatctggggagttcaccatccgagcacaaaccaagaacagac

SEQ ID NO: 70592 - DNA, 60 bp, Artificial
  Synthetic oligonucleotide
agagtcacagtctctaccaggagaagtcagcaaactgcaatcccgaacattggatctaga

SEQ ID NO: 70593 - DNA, 60 bp, Artificial
  Synthetic oligonucleotide
ccagaaggaaactgagggaaaatgctgaagacatgggcaatggttgtttcaagatatacc

SEQ ID NO: 70594 - DNA, 60 bp, Artificial
  Synthetic oligonucleotide
cagcacacaatagatctgactgattcagaaatgaacaaattgtttgaaaagaccagaagg

SEQ ID NO: 70595 - DNA, 60 bp, Artificial
  Synthetic oligonucleotide
accaggagaagtcagcaaactgcaatcccgaacattggatctagaccctgggtaaggggc

SEQ ID NO: 70596 - DNA, 60 bp, Artificial
  Synthetic oligonucleotide
gaaagtagatctttggtcttacaatgcggaacttctcgttgccctagagaatcagcacac

SEQ ID NO: 70597 - DNA, 60 bp, Artificial
  Synthetic oligonucleotide
gggtaaggggccagcctggcagaataagcatctattggacaatagttaagcctggggacg

SEQ ID NO: 70598 - DNA, 60 bp, Artificial
  Synthetic oligonucleotide
ggacaatagttaagcctggggacgtgctggtaatcaacagtaatggaaacctaatcgctc

SEQ ID NO: 70599 - DNA, 60 bp, Artificial
  Synthetic oligonucleotide
tgaagacacgaaagtagatctttggtcttacaatgcggaacttctcgttgccctagagaa

SEQ ID NO: 70600 - DNA, 60 bp, Artificial
  Synthetic oligonucleotide
attggagttcataactgagggtttcacctggacaggagtaactcaggatggagggagcag

SEQ ID NO: 70601 - DNA, 60 bp, Artificial
  Synthetic oligonucleotide
tgagggtttcacctggacaggagtaactcaggatggagggagcagtgcttgcaaaagggg

SEQ ID NO: 70602 - DNA, 60 bp, Artificial
  Synthetic oligonucleotide
tgggacctttttgtggagcgaagcaatgcttccagcaactgttacccttatgatgtacca

SEQ ID NO: 70603 - DNA, 60 bp, Artificial
  Synthetic oligonucleotide
agatgctctacttggggatcctcattgcgatgtctttcaaggtgaaacatgggacctttt

SEQ ID NO: 70604 - DNA, 60 bp, Artificial
  Synthetic oligonucleotide
aatatgcaacaatcctcacaagatccttgatggaagagactgcacactaatagatgctct

SEQ ID NO: 70605 - DNA, 60 bp, Artificial
  Synthetic oligonucleotide
ctcacaagatccttgatggaagagactgcacactaatagatgctctacttggggatcctc

SEQ ID NO: 70606 - DNA, 60 bp, Artificial
  Synthetic oligonucleotide
gagggagcagtgcttgcaaaaggggacctgataacggttttttcagtagactgaactggt

SEQ ID NO: 70607 - DNA, 60 bp, Artificial
  Synthetic oligonucleotide
ctgaactggttgactaaatcaggaagcagctacccagtgctgaacgtgactatgccaaac

SEQ ID NO: 70608 - DNA, 60 bp, Artificial
  Synthetic oligonucleotide
ctggtaattaatagtaatgggaacctaattgctcctcggggttacttcaaaatgcgcact

SEQ ID NO: 70609 - DNA, 60 bp, Artificial
  Synthetic oligonucleotide
ggctttcaccgaagatggagcaattgttggcgaaatctcaccattgccttcttttccagg

SEQ ID NO: 70610 - DNA, 60 bp, Artificial
  Synthetic oligonucleotide
ctaagggctttcaccgaagatggagcaattgttggcgaaatctcaccattgccttctttt

SEQ ID NO: 70611 - DNA, 60 bp, Artificial
  Synthetic oligonucleotide
caagatacgtcgaagagtagacataaaccctggtcatgcagacctcagtgccaaggaggc

SEQ ID NO: 70612 - DNA, 60 bp, Artificial
  Synthetic oligonucleotide
aagtcaaaatacgccgaagagtagacataaaccctggtcatgcagacctcagtgccaagg

SEQ ID NO: 70613 - DNA, 60 bp, Artificial
  Synthetic oligonucleotide
ccggcactttaagtgaagacccagatgaaagcacatccggagtggagtccgctgtcttga

SEQ ID NO: 70614 - DNA, 60 bp, Artificial
  Synthetic oligonucleotide
cggcactttaagtgaagacccagatgaaagcacatccggagtggagtccgctgtcttgag

SEQ ID NO: 70615 - DNA, 60 bp, Artificial
  Synthetic oligonucleotide
aggggcaattctcctgtattcaactacaacaagaccactaaaagactaacaattctcgga

SEQ ID NO: 70616 - DNA, 60 bp, Artificial
  Synthetic oligonucleotide
ggcctttgacgatggaaatgacgtgtggatgggaagaacgatcggagaggagttacgctc

SEQ ID NO: 70617 - DNA, 60 bp, Artificial
  Synthetic oligonucleotide
ctcacatgatgatctggcattccaatttgaatgacacaacataccagaggacaagagctc

SEQ ID NO: 70618 - DNA, 60 bp, Artificial
  Synthetic oligonucleotide
atgacgtgtggatgggaagaacgatcagcgagaagttacgctcaggttatgaaaccttca

SEQ ID NO: 70619 - DNA, 60 bp, Artificial
  Synthetic oligonucleotide
ctgtagagacataagcgatttgaagcaatatgatagtgacgaacctgaattaaggtcact

SEQ ID NO: 70620 - DNA, 60 bp, Artificial
  Synthetic oligonucleotide
agccaggaacatagtaagaagagccgcagtatcagcagatccactagcatctttattgga

SEQ ID NO: 70621 - DNA, 60 bp, Artificial
  Synthetic oligonucleotide
aggaacatagtgagaagagctgcagtatcagcagatccactagcatctttattggagata

SEQ ID NO: 70622 - DNA, 60 bp, Artificial
  Synthetic oligonucleotide
ggtccagctcaagttgtcacgatggaaaagcatggctgcatgtttgtgtgactgggcatg

SEQ ID NO: 70623 - DNA, 60 bp, Artificial
  Synthetic oligonucleotide
acaaatttgcagcaatatgcactcacttggaggtatgtttcatgtattcagattttcatt

SEQ ID NO: 70624 - DNA, 60 bp, Artificial
  Synthetic oligonucleotide
caaacaaatttgcagcaatatgcactcacttggaggtatgtttcatgtattcagattttc

SEQ ID NO: 70625 - DNA, 60 bp, Artificial
  Synthetic oligonucleotide
tacagatatacataccggtgccacagaggagacacacaaattcagacgagaagatcattc

SEQ ID NO: 70626 - DNA, 60 bp, Artificial
  Synthetic oligonucleotide
tcgaatgttcttggcgatgattacatatatcacaaaaaatcaacctgagtggttcaggaa

SEQ ID NO: 70627 - DNA, 60 bp, Artificial
  Synthetic oligonucleotide
gctgcagtcaaaggaatcgggacaatggtgatggagctgatcagaatgatcaaacgtggg

SEQ ID NO: 70628 - DNA, 60 bp, Artificial
  Synthetic oligonucleotide
caggcgctgcagtcaaaggaatcgggacaatggtgatggagctgatcagaatgatcaaac

SEQ ID NO: 70629 - DNA, 60 bp, Artificial
  Synthetic oligonucleotide
cttactcatcgtcaatgatgtgggagattaatggtcctgagtcagtgttggttaatacct

SEQ ID NO: 70630 - DNA, 60 bp, Artificial
  Synthetic oligonucleotide
ttcaggtacctatgggacaggctcatggcctgatggggcggacatcaatatcatgcctat

SEQ ID NO: 70631 - DNA, 60 bp, Artificial
  Synthetic oligonucleotide
caggcatcaaaattctgagggcacaggacaagcagcagatcttaaaagcactcaagcagc

SEQ ID NO: 70632 - DNA, 60 bp, Artificial
  Synthetic oligonucleotide
caggcatcaaaattctgagggcacaggacaagcagcagatcttaaaagcactcaagctgc

SEQ ID NO: 70633 - DNA, 60 bp, Artificial
  Synthetic oligonucleotide
gagattagggcatccgtcgggaagatgattgatggaattgggcgattctacatccaaatg

SEQ ID NO: 70634 - DNA, 60 bp, Artificial
  Synthetic oligonucleotide
catccgtcgggaagatgattgatggaattgggcgattctacatccaaatgtgcactgagc

SEQ ID NO: 70635 - DNA, 60 bp, Artificial
  Synthetic oligonucleotide
gcatccgtcgggaagatgattgatggaattgggcgattctacatccaaatgtgcactgag

SEQ ID NO: 70636 - DNA, 60 bp, Artificial
  Synthetic oligonucleotide
ttgaaagatgagccttctgaccgaggtcgaaacgtatgttctctctatcgttccatcagg

SEQ ID NO: 70637 - DNA, 60 bp, Artificial
  Synthetic oligonucleotide
agtggcctttggcctggtatgtgcgacatgtgaacagattgctgactcccagcacaggtc

SEQ ID NO: 70638 - DNA, 54 bp, Artificial
  Synthetic oligonucleotide
gatgagccttctgaccgaggtcgaaacgtatgttctctctatcgttccatcagg

SEQ ID NO: 70639 - DNA, 60 bp, Artificial
  Synthetic oligonucleotide
gggcatccgtcgggaagatgattgatggaattggacgattctacatccaaatgtgcactg

SEQ ID NO: 70640 - DNA, 60 bp, Artificial
  Synthetic oligonucleotide
tgctctgtgttgttttgctggggttcataatgtgggcctgccaaaaaggcaacattaggt

SEQ ID NO: 70641 - DNA, 60 bp, Artificial
  Synthetic oligonucleotide
cggttggtacggtttcaggcatcaaaattctgagggcacaggacaagcagcagatcttaa

SEQ ID NO: 70642 - DNA, 60 bp, Artificial
  Synthetic oligonucleotide
ttgtttgaaaagaccagaaggaaactgagggaaaatgctgaagacatgggcaatggttgt

SEQ ID NO: 70643 - DNA, 60 bp, Artificial
  Synthetic oligonucleotide
ccgtgcccagtgagcgaggactgcagcgtagacgctttgtccaaaatgcccttaatggga

SEQ ID NO: 70644 - DNA, 60 bp, Artificial
  Synthetic oligonucleotide
gaccaaatcaggaagcacatatccagtgctgaacgtgactatgccaaacaatgacaattt

SEQ ID NO: 70645 - DNA, 60 bp, Artificial
  Synthetic oligonucleotide
tatcctcggtatcctggtgtcagatgtgtctgcagagacaactggaaaggctccaatagg

SEQ ID NO: 70646 - DNA, 60 bp, Artificial
  Synthetic oligonucleotide
ataccctggtgtcagatgtgtctgcagagacaactggaaaggctccaataggcccatcgt

SEQ ID NO: 70647 - DNA, 60 bp, Artificial
  Synthetic oligonucleotide
ctggaaggattaagaaagaagagttctccgagatcatgaagatctgttccaccattgaag

SEQ ID NO: 70648 - DNA, 60 bp, Artificial
  Synthetic oligonucleotide
ctggacggatcaagaaagaagagttctccgagatcatgaagatctgttccaccattgaag

SEQ ID NO: 70649 - DNA, 60 bp, Artificial
  Synthetic oligonucleotide
gcaatgatggaccaagtgagagaaagccggaacccaggaaatgctgagatcgaagatctc

SEQ ID NO: 70650 - DNA, 60 bp, Artificial
  Synthetic oligonucleotide
gaatagttttgagcaaataacattcatgcaagccttacagctgctgtttgaagtggaaca

SEQ ID NO: 70651 - DNA, 58 bp, Artificial
  Synthetic oligonucleotide
aaatggaagattttgtgcgacaatgcttcaacccgatgattgtcgaacttgcagaaaa

SEQ ID NO: 70652 - DNA, 60 bp, Artificial
  Synthetic oligonucleotide
cacctcaggtacatatggaacaggctcatggcctgatggggcggacatcaatctcatgcc

SEQ ID NO: 70653 - DNA, 60 bp, Artificial
  Synthetic oligonucleotide
cctcaggtacatatggaacaggctcatggcctgatggggcggacatcaatctcatgccta

SEQ ID NO: 70654 - DNA, 60 bp, Artificial
  Synthetic oligonucleotide
acctcaggtacatatggaacaggctcatggcctgatggggcggacatcaatctcatgcct

SEQ ID NO: 70655 - DNA, 60 bp, Artificial
  Synthetic oligonucleotide
caaaatcatggcgtcccaaggcaccaaacgatcttatgaacagatggaaactgatgggga

SEQ ID NO: 70656 - DNA, 60 bp, Artificial
  Synthetic oligonucleotide
attgatggaattgggcgattctacatccaaatgtgcactgaacttaaactcagtgattat

SEQ ID NO: 70657 - DNA, 60 bp, Artificial
  Synthetic oligonucleotide
atggcgtctcaaggcaccaaacggtcttatgaacagatggaaactgatggggatcgccag

SEQ ID NO: 70658 - DNA, 60 bp, Artificial
  Synthetic oligonucleotide
aagatgattgatggaattgggcgattctacatccaaatgtgcactgaacttaaactcagt

SEQ ID NO: 70659 - DNA, 60 bp, Artificial
  Synthetic oligonucleotide
aatcatggcgtcccaaggcaccaaacggtcttatgaacagatggaaactgatggggatcg

SEQ ID NO: 70660 - DNA, 60 bp, Artificial
  Synthetic oligonucleotide
aacggtcttatgaacagatggaaactgatggggaacgccagaatgcaactgagatcaggg

SEQ ID NO: 70661 - DNA, 60 bp, Artificial
  Synthetic oligonucleotide
aacggtcttatgaacagatggaaactgatggggaacgccagaatgcaactgagattaggg

SEQ ID NO: 70662 - DNA, 60 bp, Artificial
  Synthetic oligonucleotide
catcaaaatcatggcgtcccaaggcaccaaacggtcttatgaacagatggaaactgatgg

SEQ ID NO: 70663 - DNA, 60 bp, Artificial
  Synthetic oligonucleotide
catccaaatgtgcactgaacttaaactcagtgattatgaagggcggttgatccagaacag

SEQ ID NO: 70664 - DNA, 60 bp, Artificial
  Synthetic oligonucleotide
gggaagatgattgatggaattgggcgattctacatccaaatgtgcactgaacttaaactc

SEQ ID NO: 70665 - DNA, 60 bp, Artificial
  Synthetic oligonucleotide
tcgggaagatgattgatggaattgggcgattctacatccaaatgtgcactgaacttaaac

SEQ ID NO: 70666 - DNA, 60 bp, Artificial
  Synthetic oligonucleotide
caggatgggggctgtaaccactgaagtggcctttggcctggtatgtgcaacatgtgaaca

SEQ ID NO: 70667 - DNA, 60 bp, Artificial
  Synthetic oligonucleotide
gggctgtaaccactgaagtggcctttggcctggtatgtgcaacatgtgaacagattgctg

SEQ ID NO: 70668 - DNA, 60 bp, Artificial
  Synthetic oligonucleotide
atccgaaaacaagttgtagaccaagaactgagtgatgccccattccttgatcggcttcgc

SEQ ID NO: 70669 - DNA, 60 bp, Artificial
  Synthetic oligonucleotide
tgacaatgcctgcatagggtcaatcagaaatgggacttatgaccatgatgtatacagaga

SEQ ID NO: 70670 - DNA, 55 bp, Artificial
  Synthetic oligonucleotide
aaatggaagattttgtgcgacaatgcttcaatccgatgattgtcgagcttgcgga

SEQ ID NO: 70671 - DNA, 59 bp, Artificial
  Synthetic oligonucleotide
gaaatggaagattttgtgcgacaatgcttcaatccgatgattgtcgaacttgcagaaaa

SEQ ID NO: 70672 - DNA, 60 bp, Artificial
  Synthetic oligonucleotide
gaaatggaagattttgtgcgacaatgcttcaatccgatgattgtcgaacttgcagaaaaa

SEQ ID NO: 70673 - DNA, 60 bp, Artificial
  Synthetic oligonucleotide
cagaatagaccaggcaatcatgaataagaacatcatgttgaaagcgaatttcagtgtgat

SEQ ID NO: 70674 - DNA, 60 bp, Artificial
  Synthetic oligonucleotide
atcagaatagaccaggcaatcatgaataagaacatcatgttgaaagcgaatttcagtgtg

SEQ ID NO: 70675 - DNA, 60 bp, Artificial
  Synthetic oligonucleotide
atcagaacagaccaggcaatcatggataagaacatcatgttgaaagcgaatttcagtgtg

SEQ ID NO: 70676 - DNA, 60 bp, Artificial
  Synthetic oligonucleotide
ccgaagagggagcaattgttggcgaaatctcaccattgccttcttttccaggacatactg

SEQ ID NO: 70677 - DNA, 60 bp, Artificial
  Synthetic oligonucleotide
acagggaacagagagactgacaataacttactcatcgtcaatgatgtgggagataaacgg

SEQ ID NO: 70678 - DNA, 60 bp, Artificial
  Synthetic oligonucleotide
cctgaggaggtcagtgaaacacagggaacagagagactgacaataacttactcatcgtca

SEQ ID NO: 70679 - DNA, 60 bp, Artificial
  Synthetic oligonucleotide
ggaggtcagtgaaacacagggaacagagagactgacaataacttactcatcgtcaatgat

SEQ ID NO: 70680 - DNA, 60 bp, Artificial
  Synthetic oligonucleotide
gtgaaacacagggaacagagagactgacaataacttactcatcgtcaatgatgtgggaga

SEQ ID NO: 70681 - DNA, 60 bp, Artificial
  Synthetic oligonucleotide
tctgccagatttgtacgattacaaggagaacagattcatcgaaattggagtaacaaggag

SEQ ID NO: 70682 - DNA, 60 bp, Artificial
  Synthetic oligonucleotide
caggaagcacatatccagtgctgaacgtgactatgccaaacaatgacaattttgacaaac

SEQ ID NO: 70683 - DNA, 60 bp, Artificial
  Synthetic oligonucleotide
tatgccaaacaatgacaattttgacaaactatacatctggggagttcaccatccgagcac

SEQ ID NO: 70684 - DNA, 60 bp, Artificial
  Synthetic oligonucleotide
tcaggaagcacatatccagtgctgaacgtgactatgccaaacaatgacaattttgacaaa

SEQ ID NO: 70685 - DNA, 60 bp, Artificial
  Synthetic oligonucleotide
aaagctgcatcaataggtgcttttatgtggagttgataaggggaaggaaacaggaaactg

SEQ ID NO: 70686 - DNA, 60 bp, Artificial
  Synthetic oligonucleotide
ttacagctgctgtttgaagtggaacaggagataagaactttctcgtttcagcttatttaa

SEQ ID NO: 70687 - DNA, 59 bp, Artificial
  Synthetic oligonucleotide
gaaatggaagattttgtgcgacaatgcttcaacccgatggttgtcgaacttgcagaaaa

SEQ ID NO: 70688 - DNA, 60 bp, Artificial
  Synthetic oligonucleotide
catccgtcgggaggatgattgatggaattggacgattctacatccaaatgtgcactgaac

SEQ ID NO: 70689 - DNA, 60 bp, Artificial
  Synthetic oligonucleotide
gtgactaagacataatggattccaacactgtgtcaagtttccaggtagattgctttcttt

SEQ ID NO: 70690 - DNA, 60 bp, Artificial
  Synthetic oligonucleotide
ctgttgaaagcaaaagctgcatcaataggtgcttttatgtggagttgataaggggaagga

SEQ ID NO: 70691 - DNA, 60 bp, Artificial
  Synthetic oligonucleotide
ctgttgagggcaaaagctgcatcaatcggtgcttttatgtggagttgataaggggaagga

SEQ ID NO: 70692 - DNA, 60 bp, Artificial
  Synthetic oligonucleotide
gggaagatctcacttaaggaatgacaccgacgtggtaaactttgtgagcatggagttttc

SEQ ID NO: 70693 - DNA, 54 bp, Artificial
  Synthetic oligonucleotide
aaaacaaggaggcaactgagggaaaatgctgaagacatgggcaatggttgcttc

SEQ ID NO: 70694 - DNA, 60 bp, Artificial
  Synthetic oligonucleotide
ctgtttgaaaaaacaaggaggcaactgagggaaaatgctgaagacatgggcaatggttgc

SEQ ID NO: 70695 - DNA, 60 bp, Artificial
  Synthetic oligonucleotide
ctcatggaatggctaaagacaagaccaatcctgtcacctctaactaaggggattttgggg

SEQ ID NO: 70696 - DNA, 60 bp, Artificial
  Synthetic oligonucleotide
ctcatggaatggctaaagacaagaccaatcctgtcacctctgactaagggaattttgggg

SEQ ID NO: 70697 - DNA, 60 bp, Artificial
  Synthetic oligonucleotide
tctcatggaatggctaaagacaagaccaatcctgtcacctctgactaagggaattttggg

SEQ ID NO: 70698 - DNA, 60 bp, Artificial
  Synthetic oligonucleotide
tctcatggaatggctaaagacaagaccaatcctgtcacctctaactaaggggattttggg

SEQ ID NO: 70699 - DNA, 60 bp, Artificial
  Synthetic oligonucleotide
tctcatggagtggctaaagacaagaccaatcctgtcacctctgactaaggggattttggg

SEQ ID NO: 70700 - DNA, 60 bp, Artificial
  Synthetic oligonucleotide
ctcatggagtggctaaagacaagaccaatcctgtcacctctgactaaggggattttggga

SEQ ID NO: 70701 - DNA, 60 bp, Artificial
  Synthetic oligonucleotide
agtggcctttggcctggtatgtgcaacctgtgaacagattgctgactcccagcacaggtc

SEQ ID NO: 70702 - DNA, 60 bp, Artificial
  Synthetic oligonucleotide
ggtggggaaaagagcaacagccatactcagaaaagcaaccaggagattggttcagctcat

SEQ ID NO: 70703 - DNA, 59 bp, Artificial
  Synthetic oligonucleotide
aagattatagcattgtttccagttatgtgtgctcagggctggtcggagacacacccaga

SEQ ID NO: 70704 - DNA, 56 bp, Artificial
  Synthetic oligonucleotide
cagagggcctccgcaggccaaatcagtgtgcaacctacattttctgtacaaagaaa

SEQ ID NO: 70705 - DNA, 60 bp, Artificial
  Synthetic oligonucleotide
cagagggcctccgcaggccaaatcagtgtgcaacctacattttctgtacaaagaaacctc

SEQ ID NO: 70706 - DNA, 60 bp, Artificial
  Synthetic oligonucleotide
cagagggcctccgcaggccaaatcagtgtgcaacctacattttctgtgcaaagaaacctc

SEQ ID NO: 70707 - DNA, 60 bp, Artificial
  Synthetic oligonucleotide
gagggcctccgcaggccaaatcagtgtgcaacctacattttctgtgcaaagaaacctccc

SEQ ID NO: 70708 - DNA, 54 bp, Artificial
  Synthetic oligonucleotide
tatgcactcacttggaggtatgtttcatgtattcagattttcatttcatcaatg

SEQ ID NO: 70709 - DNA, 60 bp, Artificial
  Synthetic oligonucleotide
gtgcatagcatggtccagctcaagctgtcacgatggaaaagcatggctgcatgtttgtgt

SEQ ID NO: 70710 - DNA, 60 bp, Artificial
  Synthetic oligonucleotide
agagctgcagtatcagcagatccactagcatctttattggagatatgccacagcacacag

SEQ ID NO: 70711 - DNA, 60 bp, Artificial
  Synthetic oligonucleotide
gcagcaatatgcactcacttggaggtatgtttcatgtattcagattttcatttcatcaat

SEQ ID NO: 70712 - DNA, 60 bp, Artificial
  Synthetic oligonucleotide
cactgttaaagcacagatttgaaataatagaggggagagacagaacaatggcctggacag

SEQ ID NO: 70713 - DNA, 60 bp, Artificial
  Synthetic oligonucleotide
taatgaagggggtatacattaatactgccttgctcaatgcatcctgtgcagcaatggacg

SEQ ID NO: 70714 - DNA, 60 bp, Artificial
  Synthetic oligonucleotide
ccactgtagagccactgagtacataatgaagggggtatacattaatactgccttgctcaa

SEQ ID NO: 70715 - DNA, 60 bp, Artificial
  Synthetic oligonucleotide
aatcacaggaactatgcgcaggcttgccgaccaaagtctcccgccgaacttctcctgcct

SEQ ID NO: 70716 - DNA, 60 bp, Artificial
  Synthetic oligonucleotide
caagaactatgcgcaggcttgccgaccaaagtctcccgccgaacttctcctgccttgaga

SEQ ID NO: 70717 - DNA, 60 bp, Artificial
  Synthetic oligonucleotide
atgcaggcattacagctgctgtttgaagtggaacaggagataagaactttctcatttcag

SEQ ID NO: 70718 - DNA, 60 bp, Artificial
  Synthetic oligonucleotide
ttacagctgctgtttgaagtggaacaggagataagaactttctcatttcagcttatttaa

SEQ ID NO: 70719 - DNA, 60 bp, Artificial
  Synthetic oligonucleotide
caaaacactctgaaattggcaacagggatgcggaatgtaccagagaaacaaaccagaggc

SEQ ID NO: 70720 - DNA, 60 bp, Artificial
  Synthetic oligonucleotide
acctgagtctatgagggaagaatatcgaaaggaacagcagaatgctgtggatgctgacga

SEQ ID NO: 70721 - DNA, 58 bp, Artificial
  Synthetic oligonucleotide
tgagtctatgagggaagaatatcgaaaggaacagcagaatgctgtggatgctgacggc

SEQ ID NO: 70722 - DNA, 60 bp, Artificial
  Synthetic oligonucleotide
aagaacatcccagcgcagggaaagatcctaagaaaactggagggcccatatacaagagag

SEQ ID NO: 70723 - DNA, 60 bp, Artificial
  Synthetic oligonucleotide
ggtccagctcaagttgtcacgatggaaaagcatggctgcatgtttgtgtaacgggtgatg

SEQ ID NO: 70724 - DNA, 57 bp, Artificial
  Synthetic oligonucleotide
agcatggtccagctcaagttgtcacgatggaaaagcatggctgcatgtttgtgtcac

SEQ ID NO: 70725 - DNA, 60 bp, Artificial
  Synthetic oligonucleotide
caacgcgggaatgtattattatctcctgaggaggtcagtgaaacacagggaacagagaga

SEQ ID NO: 70726 - DNA, 60 bp, Artificial
  Synthetic oligonucleotide
caacgtgggaatgtattattatctcctgaggaggtcagtgaaacacagggaacagagaga

SEQ ID NO: 70727 - DNA, 60 bp, Artificial
  Synthetic oligonucleotide
cagcgcgggaatgtattattatctcctgaggaggtcagtgaaacacagggaacagagaga

SEQ ID NO: 70728 - DNA, 60 bp, Artificial
  Synthetic oligonucleotide
aaccttgaacctggaacctttgatcttggggggctatatgaagcaattgaggagtgcctg

SEQ ID NO: 70729 - DNA, 60 bp, Artificial
  Synthetic oligonucleotide
cctcgaacctgggacttttgatcttggagggctatatgaagcaattgaggagtgcctgat

SEQ ID NO: 70730 - DNA, 60 bp, Artificial
  Synthetic oligonucleotide
ccttgagcctggaacctttgatcttggggggctatatgaagcaattgaggagtgcctgat

SEQ ID NO: 70731 - DNA, 60 bp, Artificial
  Synthetic oligonucleotide
tctcgaacctgggacctttgatcttggggggctatatgaagcaattgaggagtgcctgat

SEQ ID NO: 70732 - DNA, 60 bp, Artificial
  Synthetic oligonucleotide
agtgctcctgttatcctcgatatcctggtgtcagatgtgtctgcagagacaactggaaag

SEQ ID NO: 70733 - DNA, 53 bp, Artificial
  Synthetic oligonucleotide
agtgctcctgttatcctcgatatcctggtgtcagatgtgtctgcagagacaac

SEQ ID NO: 70734 - DNA, 60 bp, Artificial
  Synthetic oligonucleotide
gtgtatagcatggtccagctcaagttgtcacgatggaaaagcatggctgcatgtttgtgt

SEQ ID NO: 70735 - DNA, 60 bp, Artificial
  Synthetic oligonucleotide
agggctatatgaagcaattgaggagtgcctgattaatgatccctgggttttgctcaatgc

SEQ ID NO: 70736 - DNA, 60 bp, Artificial
  Synthetic oligonucleotide
ggggctatatgaagcaattgaggagtgcctgattaatgatccctgggttttgctcaatgc

SEQ ID NO: 70737 - DNA, 60 bp, Artificial
  Synthetic oligonucleotide
gcaacctgtgaacagattgctgactcccagcacaggtctcataggcaaatggtggcaaca

SEQ ID NO: 70738 - DNA, 60 bp, Artificial
  Synthetic oligonucleotide
gatggcatgccattctgctgcatttgaagatttaagattgttaagcttcatcagaggggc

SEQ ID NO: 70739 - DNA, 60 bp, Artificial
  Synthetic oligonucleotide
ccggaaacaagttgtagaccaagaacttagtgatgccccattccttgatcggcttcgccg

SEQ ID NO: 70740 - DNA, 60 bp, Artificial
  Synthetic oligonucleotide
gggggtcagggatgagaatacttgtaaggggcaattctcctgtattcaactacaacaaga

SEQ ID NO: 70741 - DNA, 60 bp, Artificial
  Synthetic oligonucleotide
gtgaggggatcagggatgagaatacttgtaaggggcaattctcctgtattcacctacaac

SEQ ID NO: 70742 - DNA, 60 bp, Artificial
  Synthetic oligonucleotide
aatgtgaggggatcagggatgagaatacttgtaaggggcaattctcctgtattcacctac

SEQ ID NO: 70743 - DNA, 60 bp, Artificial
  Synthetic oligonucleotide
cagggatgagaatacttgtaaggggcaattctcctgtattcaactacaacaagaccacca

SEQ ID NO: 70744 - DNA, 60 bp, Artificial
  Synthetic oligonucleotide
tacagatatacatatcggtgccacagaggagacacacaaattcagacgagaagatcattc

SEQ ID NO: 70745 - DNA, 60 bp, Artificial
  Synthetic oligonucleotide
catggaatatgacgctgttgcaactacacactcctggattcccaagaggaaccgctctat

SEQ ID NO: 70746 - DNA, 60 bp, Artificial
  Synthetic oligonucleotide
tatcggtgccacagaggagacacacaaattcagacgagaagatcattcgagctaaagaag

SEQ ID NO: 70747 - DNA, 60 bp, Artificial
  Synthetic oligonucleotide
cggtgccacagaggagacacacaaattcagacgagaagatcattcgagctaaagaagctg

SEQ ID NO: 70748 - DNA, 60 bp, Artificial
  Synthetic oligonucleotide
taccggtgccacagaggagacacacaaattcagacgagaagatcattcgagctaaagaag

SEQ ID NO: 70749 - DNA, 60 bp, Artificial
  Synthetic oligonucleotide
accatcactggagataacaccaaatggaacgaaaatcagaatcctcggatgtttttggcc

SEQ ID NO: 70750 - DNA, 60 bp, Artificial
  Synthetic oligonucleotide
ctaagtattgctccaataatgttctcaaacaaaatggcgagactgggaaaagggtatatg

SEQ ID NO: 70751 - DNA, 60 bp, Artificial
  Synthetic oligonucleotide
tcaatatgttaagcactgtattaggcgtctccatcctgaatcttggacaaaagagataca

SEQ ID NO: 70752 - DNA, 60 bp, Artificial
  Synthetic oligonucleotide
gtttttggccatgatcacatatatgaccagaaatcagcccgaatggttcagaaatgttct

SEQ ID NO: 70753 - DNA, 60 bp, Artificial
  Synthetic oligonucleotide
ttgaaacgatggaggttgttcagcaaacacgagtagacaagctgacacaaggccgacaga

SEQ ID NO: 70754 - DNA, 60 bp, Artificial
  Synthetic oligonucleotide
aagaaaaagtcttacataaacagaacaggtacatttgaattcacaagttttttctatcgt

SEQ ID NO: 70755 - DNA, 60 bp, Artificial
  Synthetic oligonucleotide
tgaacaaaaggagttatctaattagagcattgaccctgaacacaatgaccaaagatgctg

SEQ ID NO: 70756 - DNA, 60 bp, Artificial
  Synthetic oligonucleotide
cgattttgctctgattgtgaatgcacccaatcatgaagggattcaagccggagtcgacag

SEQ ID NO: 70757 - DNA, 60 bp, Artificial
  Synthetic oligonucleotide
gactacttactggtgggatggtcttcaatcctctgacgattttgctctgattgtgaatgc

SEQ ID NO: 70758 - DNA, 60 bp, Artificial
  Synthetic oligonucleotide
atgttgtaaggaagatgatgaccaattctcaggacaccgaactttctttcaccatcactg

SEQ ID NO: 70759 - DNA, 60 bp, Artificial
  Synthetic oligonucleotide
tgctgagagagggaagctaaaacggagagcaattgcaaccccagggatgcaaataagggg

SEQ ID NO: 70760 - DNA, 60 bp, Artificial
  Synthetic oligonucleotide
acaggaacaggatacaccatggatactgtcaacaggacacatcagtactcagaaaaggga

SEQ ID NO: 70761 - DNA, 60 bp, Artificial
  Synthetic oligonucleotide
agaaaagggaagatggacaacaaacaccgaaactggagcaccgcaactcaacccgattga

SEQ ID NO: 70762 - DNA, 60 bp, Artificial
  Synthetic oligonucleotide
ctataagcacaactttcccttatactggagaccctccttacagccatgggacaggaacag

SEQ ID NO: 70763 - DNA, 60 bp, Artificial
  Synthetic oligonucleotide
gaaactgtgggagcaaacccgttccaaagctggactgctggtctccgacggaggcccaaa

SEQ ID NO: 70764 - DNA, 60 bp, Artificial
  Synthetic oligonucleotide
gaacaatgcagtgatgatgccagcacatggtccagccaaaaacatggagtatgatgctgt

SEQ ID NO: 70765 - DNA, 60 bp, Artificial
  Synthetic oligonucleotide
caacacactcctggatccccaaaagaaatcgatccatcttgaatacaagtcaaagaggag

SEQ ID NO: 70766 - DNA, 60 bp, Artificial
  Synthetic oligonucleotide
ttccccagcagttcatacagaagaccagtcgggatatccagtatggtggaggctatggtt

SEQ ID NO: 70767 - DNA, 53 bp, Artificial
  Synthetic oligonucleotide
agctgtggatatatgcaaggctgcaatgggactgaggatcagctcatccttca

SEQ ID NO: 70768 - DNA, 60 bp, Artificial
  Synthetic oligonucleotide
cactgacccgagacttgagccacataaatgggagaaatactgtgtccttgagataggaga

SEQ ID NO: 70769 - DNA, 60 bp, Artificial
  Synthetic oligonucleotide
tcagaagtggaagggagaattcaggacctcgagaaatatgttgaggacactaaaatagat

SEQ ID NO: 70770 - DNA, 60 bp, Artificial
  Synthetic oligonucleotide
tcagaggtggaagggagaattcaggacctcgagaaatatgttgaggacactaaaatagat

SEQ ID NO: 70771 - DNA, 60 bp, Artificial
  Synthetic oligonucleotide
cgcagtatcagcagatccactagcatctttattggagatgtgccacagcacacaaattgg

SEQ ID NO: 70772 - DNA, 60 bp, Artificial
  Synthetic oligonucleotide
ataggtccggttattctggtattttctctgttgaaggcaaaagctgcatcaatcggtgct

SEQ ID NO: 70773 - DNA, 60 bp, Artificial
  Synthetic oligonucleotide
ctacggaaggagtacctgagtctatgagggaagaataccgaaaggaacagcagaatgctg

SEQ ID NO: 70774 - DNA, 60 bp, Artificial
  Synthetic oligonucleotide
tctacggaaggagtacctgagtctatgagggaggaatatcgaaaggaacagcagaatgct

SEQ ID NO: 70775 - DNA, 55 bp, Artificial
  Synthetic oligonucleotide
tcatcgaaattggagtaacaaggagagaagtccacatatattaccttgaaaaggc

SEQ ID NO: 70776 - DNA, 52 bp, Artificial
  Synthetic oligonucleotide
ctcactgagtgacatcaaaatcatggcgtcccaaggcaccaaacggtcttac

SEQ ID NO: 70777 - DNA, 60 bp, Artificial
  Synthetic oligonucleotide
gcaattggggtcctcatcggaggacttgaatggagtgataacacagttcgagtctctaaa

SEQ ID NO: 70778 - DNA, 60 bp, Artificial
  Synthetic oligonucleotide
taaactttgtgagcatggagttttctctcactgaccctagacttgagccacataaatggg

SEQ ID NO: 70779 - DNA, 60 bp, Artificial
  Synthetic oligonucleotide
ggtaaactttgtgagcatggagttttctctcactgacccgaggcttgagccacataaatg

SEQ ID NO: 70780 - DNA, 60 bp, Artificial
  Synthetic oligonucleotide
acactactggagctgagaaaccgaagtttctaccagatttgtatgattacaaggagaaca

SEQ ID NO: 70781 - DNA, 60 bp, Artificial
  Synthetic oligonucleotide
ccacagaatacataatgaagggggtatacattaatactgccttgctcaatgcatcctgtg

SEQ ID NO: 70782 - DNA, 60 bp, Artificial
  Synthetic oligonucleotide
tggtaaactttgtgagcatggagttttctctcactgacccgagacttgagccacataaat

SEQ ID NO: 70783 - DNA, 60 bp, Artificial
  Synthetic oligonucleotide
tgaactttgtgagcatggagttttctctcactgacccgagacttgagccacataaatggg

SEQ ID NO: 70784 - DNA, 60 bp, Artificial
  Synthetic oligonucleotide
atttgcagcaatatgcactcacctggaggtatgtttcatgtattcagattttcatttcat

SEQ ID NO: 70785 - DNA, 60 bp, Artificial
  Synthetic oligonucleotide
ttgcagcaatatgcactcacctggaggtatgtttcatgtattcagattttcatttcatca

SEQ ID NO: 70786 - DNA, 60 bp, Artificial
  Synthetic oligonucleotide
catccaaatgtgcactgaacttaaactcagtgattatgaggggcgattgatccagaacag

SEQ ID NO: 70787 - DNA, 60 bp, Artificial
  Synthetic oligonucleotide
atccaaatgtgcactgaacttaaactcagtgattatgaagggcgattgatccagaacagc

SEQ ID NO: 70788 - DNA, 60 bp, Artificial
  Synthetic oligonucleotide
ccaaatgtgcactgaacttaaactcagtgattatgaggggcgattgatccagaacagctt

SEQ ID NO: 70789 - DNA, 60 bp, Artificial
  Synthetic oligonucleotide
ggaaacaagttgtagaccaagaactgagtgatgccccattccttgatcggcttcgccgag

SEQ ID NO: 70790 - DNA, 60 bp, Artificial
  Synthetic oligonucleotide
gactcacatgatgatctggcattccaatttgaatgatgcaacttatcagaggacaagagc

SEQ ID NO: 70791 - DNA, 60 bp, Artificial
  Synthetic oligonucleotide
ctcacatgatgatctggcattccaatttgaatgatgcaacttatcagaggacaagagctc

SEQ ID NO: 70792 - DNA, 60 bp, Artificial
  Synthetic oligonucleotide
cggtctgaaaagagggccttctacggaaggagtacctgagtctatgagggaagagtatcg

SEQ ID NO: 70793 - DNA, 60 bp, Artificial
  Synthetic oligonucleotide
cctttgaacacggtctgaaaagagggccttctacggaaggagtacctgagtctatgaggg

SEQ ID NO: 70794 - DNA, 60 bp, Artificial
  Synthetic oligonucleotide
cgattctttgaacacggtctgaaaagagggccttctacggaaggagtacctgagtctatg

SEQ ID NO: 70795 - DNA, 60 bp, Artificial
  Synthetic oligonucleotide
cgatcctttgaacacggtctgaaaagagggccttctacggaaggagtacctgagtctatg

SEQ ID NO: 70796 - DNA, 60 bp, Artificial
  Synthetic oligonucleotide
cagctggtgtggatggcatgccattctgctgcatttgaagatctaagagtatcaagcttc

SEQ ID NO: 70797 - DNA, 60 bp, Artificial
  Synthetic oligonucleotide
ccagctggtgtggatggcatgccattctgctgcatttgaagatctaagagtatcaagctt

SEQ ID NO: 70798 - DNA, 60 bp, Artificial
  Synthetic oligonucleotide
gtccggaaacaagttgtagaccaagaacttagtgatgccccattccttgatcggcttcgc

SEQ ID NO: 70799 - DNA, 60 bp, Artificial
  Synthetic oligonucleotide
cggcctgaaaggagggccttctacggaaggagtacctgagtctatgagggaagaatatcg

SEQ ID NO: 70800 - DNA, 60 bp, Artificial
  Synthetic oligonucleotide
gaattaatgaatcagctgatatgagcattggagtaacagtgataaagaacaacatgataa

SEQ ID NO: 70801 - DNA, 60 bp, Artificial
  Synthetic oligonucleotide
gcatcggagtaacagtgataaagaacaacatgataaacaatgaccttggaccagcaacag

SEQ ID NO: 70802 - DNA, 60 bp, Artificial
  Synthetic oligonucleotide
cctaaacaacaggcattcaaatgacacagtacatgataggaccccttatcgaaccctctt

SEQ ID NO: 70803 - DNA, 60 bp, Artificial
  Synthetic oligonucleotide
acaacactaaacaacgggcattcaaatgacacagtacatgataggaccccttatcggacc

SEQ ID NO: 70804 - DNA, 60 bp, Artificial
  Synthetic oligonucleotide
cctcaggacccaggagtcggaatgcgtttgcatcaatggaacttgtacagtagtaatgac

SEQ ID NO: 70805 - DNA, 60 bp, Artificial
  Synthetic oligonucleotide
aaaagaaggccaaactggcaaatgttgtgagaaaaatgatgactaattcacaagacacag

SEQ ID NO: 70806 - DNA, 60 bp, Artificial
  Synthetic oligonucleotide
caggcaccaaaattctgagggcataggacaagcagcagatcttaaaagtacccaagcagc

SEQ ID NO: 70807 - DNA, 60 bp, Artificial
  Synthetic oligonucleotide
ttactgacagccagacagcgaccaaaagaattcggttggccatcaattagtgtcggattg

SEQ ID NO: 70808 - DNA, 60 bp, Artificial
  Synthetic oligonucleotide
catcagggagagtcacagtctctaccaaaagaagccaacaaactgtaatcccgaatatcg

SEQ ID NO: 70809 - DNA, 60 bp, Artificial
  Synthetic oligonucleotide
tcatcagggagaatcacagtctctaccaaaagaagccaacaaactgtaaccccgaatatc

SEQ ID NO: 70810 - DNA, 60 bp, Artificial
  Synthetic oligonucleotide
tcatcagggagagtcacagtctctaccaaaagaagccaacaaactgtaaccccgaatatc

SEQ ID NO: 70811 - DNA, 60 bp, Artificial
  Synthetic oligonucleotide
cagtctctaccaaaagaagccaacaaactgtaatcccgaatatcggatctagaccctggg

SEQ ID NO: 70812 - DNA, 60 bp, Artificial
  Synthetic oligonucleotide
cagtctctaccaaaagaagccaacaaactgtaatcccgaatatcggatctggaccctggg

SEQ ID NO: 70813 - DNA, 60 bp, Artificial
  Synthetic oligonucleotide
cagtctctaccaaaagaagccaacaaactgtaatcccgaatatcgggtctagaccctgga

SEQ ID NO: 70814 - DNA, 60 bp, Artificial
  Synthetic oligonucleotide
acagtctctaccaaaagaagccaacaaactgtaaccccgaatatcgggtctagaccctgg

SEQ ID NO: 70815 - DNA, 60 bp, Artificial
  Synthetic oligonucleotide
aatcacagtctctaccaaaagaagccaacaaactgtaatcccgaatatcggatctagacc

SEQ ID NO: 70816 - DNA, 60 bp, Artificial
  Synthetic oligonucleotide
gccttaaatacggtttgaaaagagggccttctacggaaggagtgcctgagtccatgaggg

SEQ ID NO: 70817 - DNA, 60 bp, Artificial
  Synthetic oligonucleotide
ctactcaactggtgcacttgccagttgcatgggcctcatatacaacaggatgggaacagt

SEQ ID NO: 70818 - DNA, 60 bp, Artificial
  Synthetic oligonucleotide
cgtcgccttaaatacggtttgaaaagagggccttctacggaaggggtgcctgagtccatg

SEQ ID NO: 70819 - DNA, 60 bp, Artificial
  Synthetic oligonucleotide
tcgtcgccttaaatacggtttgaaaagagggccttctacggaaggagtgcctgagtccat

SEQ ID NO: 70820 - DNA, 52 bp, Artificial
  Synthetic oligonucleotide
ggggctatatgaagcaattgaggagtgcctgattaatgatccctgggttttg

SEQ ID NO: 70821 - DNA, 54 bp, Artificial
  Synthetic oligonucleotide
ggaagaggcaacactcttggtctagacatcaaagcagccacccatgttggaaag

SEQ ID NO: 70822 - DNA, 60 bp, Artificial
  Synthetic oligonucleotide
ctttattggggatgtgccacagcacacaaattggcgggacaaggatggtggacattctta

SEQ ID NO: 70823 - DNA, 60 bp, Artificial
  Synthetic oligonucleotide
ctactcaactggtgcacttgccagttgcatgggcctcatatacaacagaatggggacagt

SEQ ID NO: 70824 - DNA, 60 bp, Artificial
  Synthetic oligonucleotide
gtctggacggattaagaaggaggagttcgctgagatcatgaagatctgttccaccattga

SEQ ID NO: 70825 - DNA, 53 bp, Artificial
  Synthetic oligonucleotide
tcggggaggctaatagatttccttaaggatgtgatggaatcaatggataaaga

SEQ ID NO: 70826 - DNA, 60 bp, Artificial
  Synthetic oligonucleotide
ggctgcaatgggactgagaatcagctcatccttcagctttggtgggttcacttttaaaag

SEQ ID NO: 70827 - DNA, 60 bp, Artificial
  Synthetic oligonucleotide
tgcttcaacccgatgattgtcgaacttgcagaaaaggcaatgaaagagtatggagaggat

SEQ ID NO: 70828 - DNA, 60 bp, Artificial
  Synthetic oligonucleotide
gcttcaacccgatgattgtcgaacttgcagaaaaggcaatgaaagagtatggagaggatc

SEQ ID NO: 70829 - DNA, 60 bp, Artificial
  Synthetic oligonucleotide
acaggcaatctccaaacattgaaaataagagtacatgaggggtatgaggagttcactatg

SEQ ID NO: 70830 - DNA, 60 bp, Artificial
  Synthetic oligonucleotide
tgacaatgcctgcatagggtcaatcagaaatggaacttatgaccatgatgtatacaaaga

SEQ ID NO: 70831 - DNA, 60 bp, Artificial
  Synthetic oligonucleotide
atgtgacaatgcctgcatagggtcaatcagaaatggaacttatgaccatgatgtatacag

SEQ ID NO: 70832 - DNA, 60 bp, Artificial
  Synthetic oligonucleotide
tgataatgcctgcatagggtcaatcagaaatggaacttatgaccatgatgtatacagaga

SEQ ID NO: 70833 - DNA, 60 bp, Artificial
  Synthetic oligonucleotide
aacagggtcacatatggggcctgtcccagatatgttaagcaaaacactctgaaattggca

SEQ ID NO: 70834 - DNA, 60 bp, Artificial
  Synthetic oligonucleotide
aacaggatcacatatggggcctgtcccagatatgttaagcaaaacactctgaagttggca

SEQ ID NO: 70835 - DNA, 60 bp, Artificial
  Synthetic oligonucleotide
tgacaatgcctgtatagggtcaatcagaaatggaacttatgaccatgatgtatacagaga

SEQ ID NO: 70836 - DNA, 60 bp, Artificial
  Synthetic oligonucleotide
tgacaatgcatgcatagggtcaatcagaaatggaacttatgaccatgatgtatacagaga

SEQ ID NO: 70837 - DNA, 60 bp, Artificial
  Synthetic oligonucleotide
cttattgccctggagaaccaacatacaattgatctaactgactcagaaatgaacaaactg

SEQ ID NO: 70838 - DNA, 60 bp, Artificial
  Synthetic oligonucleotide
aggatcacatatggggcctgtcccagatatgttaagcaaaaaactctgaaattggcaaca

SEQ ID NO: 70839 - DNA, 60 bp, Artificial
  Synthetic oligonucleotide
cttcttgttgccctggagaaccaacatacaattgatctaactgactcagaaatgaacaaa

SEQ ID NO: 70840 - DNA, 60 bp, Artificial
  Synthetic oligonucleotide
aacaggatcacatatggggcctgtcccagatatgttaagcaaaacactctgaaattggca

SEQ ID NO: 70841 - DNA, 60 bp, Artificial
  Synthetic oligonucleotide
aacaggatcacatatggggcctgtcccagatatgttaagcaaaacactctaaaattggca

SEQ ID NO: 70842 - DNA, 60 bp, Artificial
  Synthetic oligonucleotide
gcctgcatagggtcaatcagaaatggaacttatgaccatgatgtatacaaagacgaagca

SEQ ID NO: 70843 - DNA, 60 bp, Artificial
  Synthetic oligonucleotide
cacaaatgtgacaatgcctgcatagggtcaatcagaaatggaacttatgaccatgatgta

SEQ ID NO: 70844 - DNA, 51 bp, Artificial
  Synthetic oligonucleotide
agtgctgtggatgttgacgatggtcattttgtcaacatagagctggagtaa

SEQ ID NO: 70845 - DNA, 51 bp, Artificial
  Synthetic oligonucleotide
caattggactggagtcacccagaatggaggaagcagtgcttgcaagagggg

SEQ ID NO: 70846 - DNA, 58 bp, Artificial
  Synthetic oligonucleotide
caattggactggggtcacccagaatggaggaagcagtgcttgcaagagggggcctaac

SEQ ID NO: 70847 - DNA, 51 bp, Artificial
  Synthetic oligonucleotide
caattggactggggtcacccagaatggaggaagcagtgcttgcaagagggg

SEQ ID NO: 70848 - DNA, 56 bp, Artificial
  Synthetic oligonucleotide
caattggactggagtcacccagaatggaggaagcagtgcttgcaagagggggccta

SEQ ID NO: 70849 - DNA, 60 bp, Artificial
  Synthetic oligonucleotide
cagggttcatagagaatggttgggaaggaatggtaaacggctggtacggtttcaggcacc

SEQ ID NO: 70850 - DNA, 60 bp, Artificial
  Synthetic oligonucleotide
gcagggttcatagagaatggttgggaaggaatggtaaacggctggtacggtttcaggcac

SEQ ID NO: 70851 - DNA, 56 bp, Artificial
  Synthetic oligonucleotide
aaaagtggcaggctccctctgtatcagaatggaccaggcgatcatggataagaaca

SEQ ID NO: 70852 - DNA, 59 bp, Artificial
  Synthetic oligonucleotide
tacttgaagtggagcaagagataagaactttctcgtttcagcttatttaatgataaaaa

SEQ ID NO: 70853 - DNA, 60 bp, Artificial
  Synthetic oligonucleotide
cggctggagacactaatactactcagagctttcactgaagaaggagcaattgtcggcgaa

SEQ ID NO: 70854 - DNA, 60 bp, Artificial
  Synthetic oligonucleotide
ggggaatccgacgaggcactcaaaatgactattgcttctgtgcctgcttcacgctaccta

SEQ ID NO: 70855 - DNA, 60 bp, Artificial
  Synthetic oligonucleotide
acatcgaaacagccactcgtgctggaaagcagatagtggagaggattctggagggggaat

SEQ ID NO: 70856 - DNA, 60 bp, Artificial
  Synthetic oligonucleotide
gagggggaatccgacgaggcactcaaaatgactattgcttctgtgcctgcttcacgctac

SEQ ID NO: 70857 - DNA, 60 bp, Artificial
  Synthetic oligonucleotide
ttcacgctacctaactgacatgactcttgaagagatgtcaagagactggtttatgctcat

SEQ ID NO: 70858 - DNA, 60 bp, Artificial
  Synthetic oligonucleotide
ccgacgaggcactcaaaatgactattgcctctgtgcctgcttcacgctacctaactgaca

SEQ ID NO: 70859 - DNA, 60 bp, Artificial
  Synthetic oligonucleotide
ggccactcgtgctggaaagcagatagtggagaggattctggaggaagaatccgacgaggc

SEQ ID NO: 70860 - DNA, 60 bp, Artificial
  Synthetic oligonucleotide
tttgaagaaataaggtggctgattgaagaagtgcgacatagactaaagatcacagagaat

SEQ ID NO: 70861 - DNA, 60 bp, Artificial
  Synthetic oligonucleotide
ggtggctgattgaagaagtgcgacatagactaaagatcacagagaatagttttgaacaaa

SEQ ID NO: 70862 - DNA, 60 bp, Artificial
  Synthetic oligonucleotide
ctttattggaaatgtgccacagcacacaaattggcgggacaaggatggtggacattctta

SEQ ID NO: 70863 - DNA, 60 bp, Artificial
  Synthetic oligonucleotide
cctatgggtcaggctcatggcctgatggggcggacatcaatttcatgcctatataagctt

SEQ ID NO: 70864 - DNA, 60 bp, Artificial
  Synthetic oligonucleotide
ttcaggtacctatgggtcaggctcatggcctgatggggcggacatcaatctcatgcctgt

SEQ ID NO: 70865 - DNA, 60 bp, Artificial
  Synthetic oligonucleotide
ctcaggtacatatgggacaggctcatggcctgatggggcggacatcaatctcatgcctat

SEQ ID NO: 70866 - DNA, 60 bp, Artificial
  Synthetic oligonucleotide
gggtcaggctcatggcctgatggggcggacatcaatttcatgcctatataagctttcgca

SEQ ID NO: 70867 - DNA, 60 bp, Artificial
  Synthetic oligonucleotide
ggtccagttcaagttgtcacgatggaaaagcatggctgcatgtttgtgtaactgggcatg

SEQ ID NO: 70868 - DNA, 60 bp, Artificial
  Synthetic oligonucleotide
agtgttgcaatctattcgagaaattcttccctagcagttcatacaggaggccagttggaa

SEQ ID NO: 70869 - DNA, 60 bp, Artificial
  Synthetic oligonucleotide
gaggtgacctgaatttcgttaacagggcaaatcagcggttgaatcccatgcatcagcttt

SEQ ID NO: 70870 - DNA, 60 bp, Artificial
  Synthetic oligonucleotide
aatgaagaaggtggtcatggagtgaaaggctgggcctttgatgatggaaatgacgtatgg

SEQ ID NO: 70871 - DNA, 60 bp, Artificial
  Synthetic oligonucleotide
ggtcatggagtgaaaggctgggcctttgatgatggaaatgacgtatggatgggaagaacg

SEQ ID NO: 70872 - DNA, 60 bp, Artificial
  Synthetic oligonucleotide
gcattgaacaaccggttccagatcaagggtgttgagctgaagtcaggatacaaagattgg

SEQ ID NO: 70873 - DNA, 60 bp, Artificial
  Synthetic oligonucleotide
ctgagattgaagatctcatctttctggcacgatctgcactcattctgagaggatcagtgg

SEQ ID NO: 70874 - DNA, 60 bp, Artificial
  Synthetic oligonucleotide
tgcaacatcctcaaagggaagttccaaacagcagcgcaacgagcaatgatggaccaggtg

SEQ ID NO: 70875 - DNA, 60 bp, Artificial
  Synthetic oligonucleotide
caccgtggaccatatggccataattaagaagtatacatcagggagacaggaaaagaaccc

SEQ ID NO: 70876 - DNA, 60 bp, Artificial
  Synthetic oligonucleotide
caccgtggaccatatggccataattaagaagtatacatcagggaggcaggaaaagaaccc

SEQ ID NO: 70877 - DNA, 60 bp, Artificial
  Synthetic oligonucleotide
cagtgataaagaacaacatgataaacaatgaccttgggccagcaacagcccagatggccc

SEQ ID NO: 70878 - DNA, 60 bp, Artificial
  Synthetic oligonucleotide
cttttgacatgagtaatgagggatcttatttcttcggagacaatgcagaggagtatgaca

SEQ ID NO: 70879 - DNA, 60 bp, Artificial
  Synthetic oligonucleotide
cttcttttgacatgagtaatgagggatcttatttcttcggagacaatgcagaggagtatg

SEQ ID NO: 70880 - DNA, 60 bp, Artificial
  Synthetic oligonucleotide
gctcctcggggttacttcaaaatacgaagtgggaaaagctcaataatgagatcagatgca

SEQ ID NO: 70881 - DNA, 60 bp, Artificial
  Synthetic oligonucleotide
tgacacagtacacgataggaccccttatcggaccctattgatgaatgagttgggtgttcc

SEQ ID NO: 70882 - DNA, 60 bp, Artificial
  Synthetic oligonucleotide
gacacagtacacgataggaccccttatcggaccctattgatgaatgagttgggtgttcca

SEQ ID NO: 70883 - DNA, 60 bp, Artificial
  Synthetic oligonucleotide
aagaagaagtgcttacaggcaatctccaaacattgaaaataagagtgcatgaggggtacg

SEQ ID NO: 70884 - DNA, 60 bp, Artificial
  Synthetic oligonucleotide
acctttttgttgaacgcagcacagcttacagcaactgttacccttatgatgtgccggatt

SEQ ID NO: 70885 - DNA, 60 bp, Artificial
  Synthetic oligonucleotide
atctgttccaccattgaagagctcagacggcagaagtggtgaatttagcttgtccttcat

SEQ ID NO: 70886 - DNA, 59 bp, Artificial
  Synthetic oligonucleotide
aaaacacagatcttgaggctctcatggagtggctaaagacaagaccaatcctgtcacct

SEQ ID NO: 70887 - DNA, 60 bp, Artificial
  Synthetic oligonucleotide
tctcatggaatggctaaagacaagaccaatcctgtcacctctgaccaaggggattttagg

SEQ ID NO: 70888 - DNA, 60 bp, Artificial
  Synthetic oligonucleotide
ctcatggaatggctaaagacaagaccaatcctgtcacctctgaccaaggggattttaggg

SEQ ID NO: 70889 - DNA, 60 bp, Artificial
  Synthetic oligonucleotide
atgagccttctgaccgaggtcgaaacgtatgttctctctatcgttccatcaggccccctc

SEQ ID NO: 70890 - DNA, 60 bp, Artificial
  Synthetic oligonucleotide
ctcaggccttgttggcgacacacccagaaacaacgatgaatctagcaatagcaattgccg

SEQ ID NO: 70891 - DNA, 60 bp, Artificial
  Synthetic oligonucleotide
gcatgcatagggtcaatcagaaatggaacttatgaccatgatgtatacagagacgaagca

SEQ ID NO: 70892 - DNA, 60 bp, Artificial
  Synthetic oligonucleotide
gcctgtatagggtcaatcagaaatggaacttatgaccatgatgtatacagagacgaagca

SEQ ID NO: 70893 - DNA, 60 bp, Artificial
  Synthetic oligonucleotide
gcaactgttacccttatgatgtgccggattatgcctcccttaggtcactagttgcctctt

SEQ ID NO: 70894 - DNA, 60 bp, Artificial
  Synthetic oligonucleotide
atactgtgtcaagctttcaggtagactgctttctttggcatgtccgcaaacgatttgcag

SEQ ID NO: 70895 - DNA, 60 bp, Artificial
  Synthetic oligonucleotide
cagagatcagaagtccctaagaggaagaggcagcactcttggtctggaaatcgaaacagc

SEQ ID NO: 70896 - DNA, 60 bp, Artificial
  Synthetic oligonucleotide
tcgcagagatcagaagtccctaagaggaagaggcagcactcttggtctggaaatcgaaac

SEQ ID NO: 70897 - DNA, 60 bp, Artificial
  Synthetic oligonucleotide
ctgatgtcgcagtctcgcactcgcgagatactaacaaagaccacagtggaccatatggcc

SEQ ID NO: 70898 - DNA, 60 bp, Artificial
  Synthetic oligonucleotide
ctaatgtcgcagtctcgcactcgcgagatactaacaaagaccacagtggaccatatggcc

SEQ ID NO: 70899 - DNA, 60 bp, Artificial
  Synthetic oligonucleotide
acaaacagactgtgtcctggaagcaatggctttccttgaagaatcccacccagggatctt

SEQ ID NO: 70900 - DNA, 54 bp, Artificial
  Synthetic oligonucleotide
atcaaacgtgggatcaatgatcggaacttctggagaggtgaaaatggacgaaaa

SEQ ID NO: 70901 - DNA, 60 bp, Artificial
  Synthetic oligonucleotide
gtggcaatggtgttctcacaagaggattgcatgataaaggctgtccgaggtgatctgaat

SEQ ID NO: 70902 - DNA, 60 bp, Artificial
  Synthetic oligonucleotide
agtggcaatggtgttctcacaagaggattgcatgataaaggctgtccgaggtgatctgaa

SEQ ID NO: 70903 - DNA, 60 bp, Artificial
  Synthetic oligonucleotide
actgtccaaataataaagctgctgccatttgcagcagcgccaccggagcagagcaggatg

SEQ ID NO: 70904 - DNA, 60 bp, Artificial
  Synthetic oligonucleotide
tgaggcgatcatagtggcaatggtgttctcacaagaggattgcatgataaaggctgtccg

SEQ ID NO: 70905 - DNA, 60 bp, Artificial
  Synthetic oligonucleotide
cagccatcttaaggaaagcaactagaaggctgattcagctgatagtaagtggaagagacg

SEQ ID NO: 70906 - DNA, 60 bp, Artificial
  Synthetic oligonucleotide
ggagagcaatagtatcagcagatccactggcatcactattggagatgtgtcacagcacac

SEQ ID NO: 70907 - DNA, 60 bp, Artificial
  Synthetic oligonucleotide
agaaacattgttaggagagcaatagtatcagcagatccactggcatcactattggagatg

SEQ ID NO: 70908 - DNA, 60 bp, Artificial
  Synthetic oligonucleotide
ttctcacaagaggattgcatgataaaggctgtccgaggtgatctgaattttgtaaacaga

SEQ ID NO: 70909 - DNA, 60 bp, Artificial
  Synthetic oligonucleotide
atggtattctcacaagaggattgcatgataaaggctgtccgaggtgatctgaattttgta

SEQ ID NO: 70910 - DNA, 60 bp, Artificial
  Synthetic oligonucleotide
agtagcaatggtgttctcacaagaggattgcatgataaaggctgtccgaggtgatctgaa

SEQ ID NO: 70911 - DNA, 60 bp, Artificial
  Synthetic oligonucleotide
tggatcagatagggtgatggtatcacccctagctgtaacttggtggaataggaatggacc

SEQ ID NO: 70912 - DNA, 60 bp, Artificial
  Synthetic oligonucleotide
ggtgatggtatcacccctagctgtaacttggtggaataggaatggaccgacaacagatac

SEQ ID NO: 70913 - DNA, 60 bp, Artificial
  Synthetic oligonucleotide
tagctgtaacttggtggaataggaatggaccgacaacagatacagtccactatccgaaag

SEQ ID NO: 70914 - DNA, 60 bp, Artificial
  Synthetic oligonucleotide
gctgtaacttggtggaataggaatggaccgacaacagatacagtccactatccgaaagtc

SEQ ID NO: 70915 - DNA, 60 bp, Artificial
  Synthetic oligonucleotide
agcatgggacctttggtcccgtccattttcgaaatcaagttaaaatacgccgaagagttg

SEQ ID NO: 70916 - DNA, 60 bp, Artificial
  Synthetic oligonucleotide
catgggacctttggccccgtccattttcgaaatcaagttaaaatacgccgaagagttgac

SEQ ID NO: 70917 - DNA, 60 bp, Artificial
  Synthetic oligonucleotide
ctattcatcatcaatgatgtgggagatcaacggacctgagtcagtgctcgttaacacata

SEQ ID NO: 70918 - DNA, 50 bp, Artificial
  Synthetic oligonucleotide
aggattgcatgataaaggctgtccgaggtgatctgaattttgtaaacaga

SEQ ID NO: 70919 - DNA, 60 bp, Artificial
  Synthetic oligonucleotide
caataacctattcatcctcaatgatgtgggagatcaacggacctgagtcagtgctcgtta

SEQ ID NO: 70920 - DNA, 60 bp, Artificial
  Synthetic oligonucleotide
cctcaatgatgtgggagatcaacggacctgagtcagtgctcgttaacacatatcagtgga

SEQ ID NO: 70921 - DNA, 60 bp, Artificial
  Synthetic oligonucleotide
tactgcccaaataataaagctgctgccatttgcagcagcgccaccggagcagagtaggat

SEQ ID NO: 70922 - DNA, 60 bp, Artificial
  Synthetic oligonucleotide
gatgtgggagatcaacggacctgagtcagtgctcgttaacacatatcaatggatcattag

SEQ ID NO: 70923 - DNA, 60 bp, Artificial
  Synthetic oligonucleotide
cctgaaagaaatgaacaaggacaaacactttggagtaagacaaatgatgctggatcagat

SEQ ID NO: 70924 - DNA, 60 bp, Artificial
  Synthetic oligonucleotide
ttggagtaagacaaatgatgctggatcagatagggtgatggtatcacccctagccgtaac

SEQ ID NO: 70925 - DNA, 60 bp, Artificial
  Synthetic oligonucleotide
caaggacaaacactttggagtaagacaaatgatgctggatcagatagggtgatggtatca

SEQ ID NO: 70926 - DNA, 60 bp, Artificial
  Synthetic oligonucleotide
atatggagagaataaaagaattaagagatcttatgtcgcagtctcgcacccgcgagatac

SEQ ID NO: 70927 - DNA, 60 bp, Artificial
  Synthetic oligonucleotide
atgattcctgaaagaaatgaacaagggcaaacactttggagtaagacaaatgatgctgga

SEQ ID NO: 70928 - DNA, 60 bp, Artificial
  Synthetic oligonucleotide
gatgattcctgaaagaaatgaacaaggacaaacactttggagtaagacaaatgatgctgg

SEQ ID NO: 70929 - DNA, 60 bp, Artificial
  Synthetic oligonucleotide
ttcctttcgagagagcgaccatcatggcagcatttactggaaacactgaaggcagaacgt

SEQ ID NO: 70930 - DNA, 60 bp, Artificial
  Synthetic oligonucleotide
ctctcccgagaagatctggagctgctggtgcagcagtaaagggaattgggacgatggcga

SEQ ID NO: 70931 - DNA, 60 bp, Artificial
  Synthetic oligonucleotide
caactctcccaaggagatctggagctgctggtgcagcagtaaagggaattgggacgatgg

SEQ ID NO: 70932 - DNA, 60 bp, Artificial
  Synthetic oligonucleotide
gcaaggttcaactctcccaaggagatctggagctgctggtgcagcagtaaagggaattgg

SEQ ID NO: 70933 - DNA, 60 bp, Artificial
  Synthetic oligonucleotide
gatgcaaggttcaactctcccaaggagatctggagctgctggtgcagcagtaaagggaat

SEQ ID NO: 70934 - DNA, 60 bp, Artificial
  Synthetic oligonucleotide
tgatgcaaggatcaactctcccgagaagatctggagctgctggtgcagcagtaaagggaa

SEQ ID NO: 70935 - DNA, 60 bp, Artificial
  Synthetic oligonucleotide
tgatgcaaggttcaactctcccaaggagatctggagctgctggtgcagcagtaaagggaa

SEQ ID NO: 70936 - DNA, 60 bp, Artificial
  Synthetic oligonucleotide
gagatagagtctgtaaacaatgctgtggtgatgccagctcatggcccagccaagagcatg

SEQ ID NO: 70937 - DNA, 60 bp, Artificial
  Synthetic oligonucleotide
atgcagtaccaaacggaacaatagtgaaaacaatcacgaatgaccaaattgaagttacta

SEQ ID NO: 70938 - DNA, 60 bp, Artificial
  Synthetic oligonucleotide
ctgacagccagacagcgaccaaaagaattcggatggccattaattaatgttgaatagtaa

SEQ ID NO: 70939 - DNA, 60 bp, Artificial
  Synthetic oligonucleotide
caaaagctgcatcaataggtgcttttatgtggagttgataaggggaaggaaacaggaggc

SEQ ID NO: 70940 - DNA, 57 bp, Artificial
  Synthetic oligonucleotide
ttcccaagaggaaccgctctattctcaacacaagccaaaggggaattcttgaggatg

SEQ ID NO: 70941 - DNA, 60 bp, Artificial
  Synthetic oligonucleotide
gggaatacaagcaggagtggatagattctacaggacctgcaagttagtgggaatcaacat

SEQ ID NO: 70942 - DNA, 60 bp, Artificial
  Synthetic oligonucleotide
gaatgttcttggcgatgattacatatatcacaaaaaatcaacctgagtggttcagaaaca

SEQ ID NO: 70943 - DNA, 60 bp, Artificial
  Synthetic oligonucleotide
tcgaatatttttggcgatgattacatatatcacaaaaaatcaacctgagtggttcagaaa

SEQ ID NO: 70944 - DNA, 60 bp, Artificial
  Synthetic oligonucleotide
atgaaaagaaggccaaactggcaaatgttgtgagaaagatgatgactaattcacaagaca

SEQ ID NO: 70945 - DNA, 60 bp, Artificial
  Synthetic oligonucleotide
caaataccagcagaaatgctagcaagcattgacctgaagtatttcaatgaatcaacaagg

SEQ ID NO: 70946 - DNA, 60 bp, Artificial
  Synthetic oligonucleotide
cagtgataaagaacaacatgataaacaatgaccttggaccagcaacagctcaaatggctc

SEQ ID NO: 70947 - DNA, 60 bp, Artificial
  Synthetic oligonucleotide
gcgcagagacttgaagatgtatttgctgggaaaaacacagatcttgaggctctcatggaa

SEQ ID NO: 70948 - DNA, 60 bp, Artificial
  Synthetic oligonucleotide
ggtgtctttgcagggaaaaacacagatcttgaggctctcatggagtggctaaagacaaga

SEQ ID NO: 70949 - DNA, 60 bp, Artificial
  Synthetic oligonucleotide
ctgcatttgaagatttaagattgttaagcttcatcagagggaccaaagtatctccgcggg

SEQ ID NO: 70950 - DNA, 60 bp, Artificial
  Synthetic oligonucleotide
gctgcatttgaagatttaagattgttaagcttcatcagagggaccaaagtatctccgcgg

SEQ ID NO: 70951 - DNA, 60 bp, Artificial
  Synthetic oligonucleotide
attctgtcacctctgactaaggggattttggggtttgtgttcacgctcaccgtgcccagt

SEQ ID NO: 70952 - DNA, 60 bp, Artificial
  Synthetic oligonucleotide
tcttgaacctggaacctttgatcttgaggggctatatgaagcaattgaggagtgcctgat

SEQ ID NO: 70953 - DNA, 60 bp, Artificial
  Synthetic oligonucleotide
cctcgaacctgggacctttgattttggggggctatatgaagcaattgaggagtgcctgat

SEQ ID NO: 70954 - DNA, 60 bp, Artificial
  Synthetic oligonucleotide
caaaacactctgaagttggcaacagggatgcgaaatgtaccagagaaacaaactagaggc

SEQ ID NO: 70955 - DNA, 60 bp, Artificial
  Synthetic oligonucleotide
ggcaaaagctgcaccaatcggtgcttttatgtggagttgataaggggaaggaaacaggaa

SEQ ID NO: 70956 - DNA, 60 bp, Artificial
  Synthetic oligonucleotide
gaaacaggtgctagcagagatacaggacattgaaaatgaggagaagattccaaagacaaa

SEQ ID NO: 70957 - DNA, 50 bp, Artificial
  Synthetic oligonucleotide
tgatggggcggacatcaatttcatgcctatataagctttcgcaatttcag

SEQ ID NO: 70958 - DNA, 60 bp, Artificial
  Synthetic oligonucleotide
tttgtattcacgctcaccgtgcccagtgagcgaggactgcagcgtagacgctttgtccaa

SEQ ID NO: 70959 - DNA, 60 bp, Artificial
  Synthetic oligonucleotide
ccaattatgtgtgctcaggacttgttggagacacaccaaggaacgatgatagctctagca

SEQ ID NO: 70960 - DNA, 60 bp, Artificial
  Synthetic oligonucleotide
caagaccttccaggaaagggcaacagcacagcaacgctgtgcctgggacatcatgcggtg

SEQ ID NO: 70961 - DNA, 60 bp, Artificial
  Synthetic oligonucleotide
gtgagtcaggaaggctaatagatttcctaaaggatgtgatggaatcaatggataaagagg

SEQ ID NO: 70962 - DNA, 60 bp, Artificial
  Synthetic oligonucleotide
cccgggatgatgatgggcatgttcaacatgctaagtacggttttaggagtctcgatactg

SEQ ID NO: 70963 - DNA, 60 bp, Artificial
  Synthetic oligonucleotide
cccaacatcggatccaggccttgggtcagaggccaatcaggaagaataagtatctactgg

SEQ ID NO: 70964 - DNA, 60 bp, Artificial
  Synthetic oligonucleotide
cctaacatcgggtccaggccttgggtcagaggccaatcaggaagaataagcatctactgg

SEQ ID NO: 70965 - DNA, 60 bp, Artificial
  Synthetic oligonucleotide
cccctcgaggttattttaagatgcgcactgggaaaagctcgataatgagatcagatgcac

SEQ ID NO: 70966 - DNA, 50 bp, Artificial
  Synthetic oligonucleotide
agaataagtatctactggacaatagtaaagccaggagacatactggtgat

SEQ ID NO: 70967 - DNA, 60 bp, Artificial
  Synthetic oligonucleotide
ccataattcccaacatcggatccaggccttgggtcagaggccaatcaggaagaataagta

SEQ ID NO: 70968 - DNA, 60 bp, Artificial
  Synthetic oligonucleotide
ctataattcctaacatcgggtccaggccttgggtcagaggccaatcaggaagaataagca

SEQ ID NO: 70969 - DNA, 60 bp, Artificial
  Synthetic oligonucleotide
cccaacatcgggtccaggccttgggtcagaggccaatcaggaagaataagtatctactgg

SEQ ID NO: 70970 - DNA, 60 bp, Artificial
  Synthetic oligonucleotide
ccataattcccaacatcgggtccaggccttgggtcagaggccaatcaggaagaataagta

SEQ ID NO: 70971 - DNA, 60 bp, Artificial
  Synthetic oligonucleotide
ccctcgaggttattttaagatgcgcactgggaaaagctcgataatgagatcagatgcacc

SEQ ID NO: 70972 - DNA, 60 bp, Artificial
  Synthetic oligonucleotide
cccctcgaggttattttaagatgcgcactgggaaaagctcgataatgagatcagacgcac

SEQ ID NO: 70973 - DNA, 60 bp, Artificial
  Synthetic oligonucleotide
cgtgtggggagttcatcatccaagcacaaaccaagagcaaaccaatctgtatgttcaggc

SEQ ID NO: 70974 - DNA, 60 bp, Artificial
  Synthetic oligonucleotide
catcatccaagcacaaaccaagagcaaaccagtttgtatgttcaggcatcgggaagggtc

SEQ ID NO: 70975 - DNA, 60 bp, Artificial
  Synthetic oligonucleotide
ttgtacgtgtggggagttcatcatccaagcacaaaccaagagcaaaccaatctgtatgtt

SEQ ID NO: 70976 - DNA, 60 bp, Artificial
  Synthetic oligonucleotide
tacgtgtggggagttcatcatccaagcacaaaccaagagcaaaccaatttgtatgttcag

SEQ ID NO: 70977 - DNA, 60 bp, Artificial
  Synthetic oligonucleotide
tacgtgtggggagttcatcatccaagcacaaaccaagagcaaaccagtttgtatgttcag

SEQ ID NO: 70978 - DNA, 60 bp, Artificial
  Synthetic oligonucleotide
cgtgtggggagttcatcatccaagcacaaaccaagagcaaaccaatttgtatgttcaggc

SEQ ID NO: 70979 - DNA, 60 bp, Artificial
  Synthetic oligonucleotide
tcacgcaaaatggagggagtggtgcttgcaaaagagggcccgccaatggctttttcagta

SEQ ID NO: 70980 - DNA, 54 bp, Artificial
  Synthetic oligonucleotide
tcacgcaaaatggagggagtggtgcttgcaaaagagggcccgccaatggctttt

SEQ ID NO: 70981 - DNA, 60 bp, Artificial
  Synthetic oligonucleotide
tcacacaaaatggagggagtggtgcttgcaaaagagggcccgccaatggctttttcagta

SEQ ID NO: 70982 - DNA, 54 bp, Artificial
  Synthetic oligonucleotide
tcacacaaaatggagggagtggtgcttgcaaaagagggcccgccaatggctttt

SEQ ID NO: 70983 - DNA, 56 bp, Artificial
  Synthetic oligonucleotide
attaagggagtggaactgaaatctggatacaaagattggattctatggatttcctt

SEQ ID NO: 70984 - DNA, 51 bp, Artificial
  Synthetic oligonucleotide
gggagtggaactgaaatctggatacaaagattggattctatggatttcctt

SEQ ID NO: 70985 - DNA, 60 bp, Artificial
  Synthetic oligonucleotide
tatacagagatgaagcactaaacaatcgattccagatcaagggtgtggagctaaagtctg

SEQ ID NO: 70986 - DNA, 60 bp, Artificial
  Synthetic oligonucleotide
gggatgaagcactaaacaatcgattccagatcaagggtgtggaactgaaatctggataca

SEQ ID NO: 70987 - DNA, 60 bp, Artificial
  Synthetic oligonucleotide
gagtaatcgagaaaacaaatgaaaagtttcatcagattgaaaaggaattttccgaagtgg

SEQ ID NO: 70988 - DNA, 60 bp, Artificial
  Synthetic oligonucleotide
tatacagggatgaagcactaaacaatcgattccagatcaagggtgtggaactgaaatctg

SEQ ID NO: 70989 - DNA, 60 bp, Artificial
  Synthetic oligonucleotide
ccctcgaggttattttaagatgcgcactgggaaaagctcgataatgagatcagacgcacc

SEQ ID NO: 70990 - DNA, 61 bp, Artificial
  Synthetic oligonucleotide
cgagtaatcgagaaaacaaatgaaaagtttcatcagattgagaaggaattttcagaagtgg

SEQ ID NO: 70991 - DNA, 60 bp, Artificial
  Synthetic oligonucleotide
ggacaggagtcacacaaaatggagggagtggtgcttgcaaaagagggcccgctaatggtt

SEQ ID NO: 70992 - DNA, 60 bp, Artificial
  Synthetic oligonucleotide
tggacaggagtcacacaaaatggagggagtggtgcttgcaaaagagggcccgctaatggt

SEQ ID NO: 70993 - DNA, 60 bp, Artificial
  Synthetic oligonucleotide
ctgctacccatatgacgtgccagactatgcatctctcagatctctagttgcctcatcagg

SEQ ID NO: 70994 - DNA, 60 bp, Artificial
  Synthetic oligonucleotide
cttcagcaactgctacccatatgacgtgccagactatgcatctctcagatctctagttgc

SEQ ID NO: 70995 - DNA, 60 bp, Artificial
  Synthetic oligonucleotide
gtgcttgggacatcatgcagtaccaaatggaacaatagtgaaaacaataacggatgatca

SEQ ID NO: 70996 - DNA, 60 bp, Artificial
  Synthetic oligonucleotide
ataattctattaatcatgaagaccattattgttctgagttgttttttctgtctggctttc

SEQ ID NO: 70997 - DNA, 60 bp, Artificial
  Synthetic oligonucleotide
gccagctgcatgggcctcatatacaacaggatgggggctgtaaccactgaagtggccttt

SEQ ID NO: 70998 - DNA, 60 bp, Artificial
  Synthetic oligonucleotide
gccagttgcatgggcctcatatacaacaggatgggggctgtaaccactgaagtggccttt

SEQ ID NO: 70999 - DNA, 60 bp, Artificial
  Synthetic oligonucleotide
ggaagaacacagatcttgaggcactcatggaatggctaaagacaagaccaatcctgtcac

SEQ ID NO: 71000 - DNA, 60 bp, Artificial
  Synthetic oligonucleotide
aaaattggcaacagggatgcggaatgtaccagagaaacaaactagaggcatattcggcgc

SEQ ID NO: 71001 - DNA, 60 bp, Artificial
  Synthetic oligonucleotide
gaagttggcaacagggatgcggaatgtaccagagaaacaaactagaggcatattcggcgc

SEQ ID NO: 71002 - DNA, 60 bp, Artificial
  Synthetic oligonucleotide
tccagatcaaaggtgttgagctgaagtcaggatacaaagattggatcctatggatttcct

SEQ ID NO: 71003 - DNA, 60 bp, Artificial
  Synthetic oligonucleotide
ctctctatcgtcccgtcaggccccctcaaagccgagatcgcacagagacttgaagatgtc

SEQ ID NO: 71004 - DNA, 60 bp, Artificial
  Synthetic oligonucleotide
ggagtcagaatgtgtttgcatcaatggaacttgtacagtagtaatgactgatggaagtgc

SEQ ID NO: 71005 - DNA, 60 bp, Artificial
  Synthetic oligonucleotide
gaactcaggagtcagaatgtgtttgcatcaatggaacttgtacagtagtaatgactgatg

SEQ ID NO: 71006 - DNA, 60 bp, Artificial
  Synthetic oligonucleotide
gagtcaggaagactaatagatttcctcaaggatgtgatggaatcaatggataaagaggaa

SEQ ID NO: 71007 - DNA, 60 bp, Artificial
  Synthetic oligonucleotide
tagagtaatcgagaagacgaacgagaaattccatcaaatcgaaaaggagttctcagaagt

SEQ ID NO: 71008 - DNA, 60 bp, Artificial
  Synthetic oligonucleotide
tgtgcatggcatggtccagctcaagttgtcacgatggaaaagcatggctgcatgtttgtg

SEQ ID NO: 71009 - DNA, 60 bp, Artificial
  Synthetic oligonucleotide
gcatagcatggtccagctcaagttgtcacgatggaaaagcatggctgcatgtttgtgtaa

SEQ ID NO: 71010 - DNA, 60 bp, Artificial
  Synthetic oligonucleotide
aatgggaaactgaataggttaatcgagaaaacgaacgagaaattccatcaaatcgaaaaa

SEQ ID NO: 71011 - DNA, 60 bp, Artificial
  Synthetic oligonucleotide
taggcccgttatagatataaatatggcagattacagcattgattccagttatatatgttc

SEQ ID NO: 71012 - DNA, 60 bp, Artificial
  Synthetic oligonucleotide
atatatgttcagggcttgttggcgacacaccaaggaacgatgatagctctagcagcagca

SEQ ID NO: 71013 - DNA, 60 bp, Artificial
  Synthetic oligonucleotide
caggacttgttggagacacaccaaggaacgatgatagctctagcagcagcaactgcagag

SEQ ID NO: 71014 - DNA, 60 bp, Artificial
  Synthetic oligonucleotide
cagggcttgttggcgacacaccaaggaacgatgatagctctagcagcagcaactgcaggg

SEQ ID NO: 71015 - DNA, 60 bp, Artificial
  Synthetic oligonucleotide
tgttggagacacaccaaggaacgatgatagctctagcagcagcaactgcagggatcctaa

SEQ ID NO: 71016 - DNA, 60 bp, Artificial
  Synthetic oligonucleotide
ccaaggaacgatgatagctctagcagcagcaactgcagggatcctaataatgagagggga

SEQ ID NO: 71017 - DNA, 60 bp, Artificial
  Synthetic oligonucleotide
acgaaaacgggactctagcagacttactgacagccagacagcgaccaaaagaattcggat

SEQ ID NO: 71018 - DNA, 60 bp, Artificial
  Synthetic oligonucleotide
acgaaaatgggactctagcatacttactgacagccagacagcgaccaaaagaattcggat

SEQ ID NO: 71019 - DNA, 60 bp, Artificial
  Synthetic oligonucleotide
gtcggaatcgatcctttccgtctgctccaaaacagtcaagtcttcagtcttatcagacca

SEQ ID NO: 71020 - DNA, 60 bp, Artificial
  Synthetic oligonucleotide
tagtcggaatcgatcctttccgtctgctccaaaacagtcaagtcttcagtcttatcagac

SEQ ID NO: 71021 - DNA, 60 bp, Artificial
  Synthetic oligonucleotide
atctggaagagcatcccagtgctgggaaagaccctaagaagactggaggtccaatctaca

SEQ ID NO: 71022 - DNA, 60 bp, Artificial
  Synthetic oligonucleotide
gagcatcccagtgctgggaaagaccctaagaagactgggggtccaatctacaggaggaga

SEQ ID NO: 71023 - DNA, 60 bp, Artificial
  Synthetic oligonucleotide
cctggaatgatgatgggcatgtttaacatgctaagtacggttttaggagtctcgatactg

SEQ ID NO: 71024 - DNA, 60 bp, Artificial
  Synthetic oligonucleotide
atcctcaggacccaggagtcggaatgcgtttgtatcaatggaacttgtacagtagtaatg

SEQ ID NO: 71025 - DNA, 60 bp, Artificial
  Synthetic oligonucleotide
gaggtgacctgaatttcgttaacagggcaaatcagcggttgaaccccatgcatcagcttt

SEQ ID NO: 71026 - DNA, 60 bp, Artificial
  Synthetic oligonucleotide
taaactttgtgagcatggagttttctctcactgacccgaggctagagccacataaatggg

SEQ ID NO: 71027 - DNA, 60 bp, Artificial
  Synthetic oligonucleotide
taaactttgtgagcatggagttttctctcactgacccaaggcttgagccacataaatggg

SEQ ID NO: 71028 - DNA, 60 bp, Artificial
  Synthetic oligonucleotide
gacagcgataatagatcaggttattctggtattttctctgttgagggcaagggctgcatc

SEQ ID NO: 71029 - DNA, 60 bp, Artificial
  Synthetic oligonucleotide
ctcagggcttgttggcgacacacccagaaacaacgattggtctagtaatagcaattgccg

SEQ ID NO: 71030 - DNA, 60 bp, Artificial
  Synthetic oligonucleotide
ggctcataacatcctccgaacccaggaatcagagtgtgtttgtatcaatggtacctgcac

SEQ ID NO: 71031 - DNA, 60 bp, Artificial
  Synthetic oligonucleotide
tttgggaaccagacaagtatgtatagcatggtccagttcaagttgtcacgatggaaaagc

SEQ ID NO: 71032 - DNA, 60 bp, Artificial
  Synthetic oligonucleotide
agaaccttatgtgtcatgcgaccctagaaagtgttatcagtttgcactaggacaggggac

SEQ ID NO: 71033 - DNA, 60 bp, Artificial
  Synthetic oligonucleotide
gaaatgtcaagagactggttcatgctcatgcccaagcagaaagtagcaggttccctctgc

SEQ ID NO: 71034 - DNA, 60 bp, Artificial
  Synthetic oligonucleotide
caagagactggttcatgctcatgcccaagcagaaagtggcaggttccctttgcatcagag

SEQ ID NO: 71035 - DNA, 60 bp, Artificial
  Synthetic oligonucleotide
acatgactcttgaagaaatgtcaagagactggttcatgctcatgcccaagcagaaagtag

SEQ ID NO: 71036 - DNA, 60 bp, Artificial
  Synthetic oligonucleotide
tcttgaagaaatgtcaagagactggttcatgctcatgcccaagcagaaagtggcaggttc

SEQ ID NO: 71037 - DNA, 60 bp, Artificial
  Synthetic oligonucleotide
cctggaatgatgatgggcatgttcaacatgctaagtacagttttgggagtctcgatactg

SEQ ID NO: 71038 - DNA, 60 bp, Artificial
  Synthetic oligonucleotide
ctcacttaaggaatgacacagatgtggtaaactttgtgagcatggagttttctctcactg

SEQ ID NO: 71039 - DNA, 60 bp, Artificial
  Synthetic oligonucleotide
tcatttaaggaatgacacagatgtggtaaactttgtgagcatggagttttctctcactga

SEQ ID NO: 71040 - DNA, 60 bp, Artificial
  Synthetic oligonucleotide
acacagatgtggtaaactttgtgagcatggagttttctctcactgacccgaggcttgagc

SEQ ID NO: 71041 - DNA, 60 bp, Artificial
  Synthetic oligonucleotide
taaattttgtgagcatggagttttctctcactgacccgaggcttgagccacataaatggg

SEQ ID NO: 71042 - DNA, 60 bp, Artificial
  Synthetic oligonucleotide
ctttctgctggtggggacatttgggtaacaagagaaccttatgtgtcatgtgacaccagt

SEQ ID NO: 71043 - DNA, 60 bp, Artificial
  Synthetic oligonucleotide
gggatcctaataatgagaggggaaacccaggagtgaaagggtgggcctttgacaatggag

SEQ ID NO: 71044 - DNA, 60 bp, Artificial
  Synthetic oligonucleotide
gactcgcgctcaggctatgagacctttagggtcattggtggttgggtcactgccaattcc

SEQ ID NO: 71045 - DNA, 60 bp, Artificial
  Synthetic oligonucleotide
atggtggacctcaaacagtattgtcgtattttgtggcacttcaggcacctatggaacagg

SEQ ID NO: 71046 - DNA, 60 bp, Artificial
  Synthetic oligonucleotide
tgacaccagtaaatgttaccaatttgcacttgggcaggggacaacgctggacaacaaaca

SEQ ID NO: 71047 - DNA, 60 bp, Artificial
  Synthetic oligonucleotide
gtttggatgggaagaacaatcagtaaagattcgcgctcaggctatgagacctttagggtc

SEQ ID NO: 71048 - DNA, 56 bp, Artificial
  Synthetic oligonucleotide
agtgaaaatgaatccaaatcagaagataataacaattggctccgtctctctaacca

SEQ ID NO: 71049 - DNA, 60 bp, Artificial
  Synthetic oligonucleotide
cccgcaaacaaccaagcagtgccatgtgagccaatcataatagagaggaacataacagag

SEQ ID NO: 71050 - DNA, 60 bp, Artificial
  Synthetic oligonucleotide
ggttcatggtctcaaaatattctcagaactcaggagtcagagtgcgtttgcatcaatgga

SEQ ID NO: 71051 - DNA, 60 bp, Artificial
  Synthetic oligonucleotide
acattagcccattgtcgggaagtgctcagcatatagaggaatgttcctgttatcctcgat

SEQ ID NO: 71052 - DNA, 60 bp, Artificial
  Synthetic oligonucleotide
ccacaggagactagagtatggtggacctcaaacagtattgtcgtattttgtggcacttca

SEQ ID NO: 71053 - DNA, 60 bp, Artificial
  Synthetic oligonucleotide
acaacaaacattcaaatggcacaatacatgatagaatccctcatcggacccttttgatga

SEQ ID NO: 71054 - DNA, 60 bp, Artificial
  Synthetic oligonucleotide
gcccgttatagatataaatatggcagattatagtgttgattccaattatgtgtgctcagg

SEQ ID NO: 71055 - DNA, 60 bp, Artificial
  Synthetic oligonucleotide
aatccaaaacagcatcacaatagagagaatggttctctcagcatttgatgagaggagaaa

SEQ ID NO: 71056 - DNA, 60 bp, Artificial
  Synthetic oligonucleotide
cagtggctcataagtcttgcctgcctgcttgtgtgtatgggcttgctgtggccagtggat

SEQ ID NO: 71057 - DNA, 60 bp, Artificial
  Synthetic oligonucleotide
cacaatagagagaatggttctctcagcatttgatgagaggagaaacaaatatctggaaga

SEQ ID NO: 71058 - DNA, 60 bp, Artificial
  Synthetic oligonucleotide
catttgatgagaggagaaacaaatatctggaagagcatcccagtgctgggaaagacccta

SEQ ID NO: 71059 - DNA, 60 bp, Artificial
  Synthetic oligonucleotide
gaagactggaggtccaatctacaggaggagagatgggaaatggatgagagaattgatcct

SEQ ID NO: 71060 - DNA, 60 bp, Artificial
  Synthetic oligonucleotide
aagaagactggaggtccaatctacaggaggagagatgggaaatggatgagagaattgatc

SEQ ID NO: 71061 - DNA, 60 bp, Artificial
  Synthetic oligonucleotide
cggtctgctctcattctgaggggatcagtggctcataagtcttgcctgcctgcttgtgtg

SEQ ID NO: 71062 - DNA, 60 bp, Artificial
  Synthetic oligonucleotide
cacggtctgctctcattctgaggggatcagtggctcataagtcttgcctgcctgcttgtg

SEQ ID NO: 71063 - DNA, 60 bp, Artificial
  Synthetic oligonucleotide
gaaacaaatatctggaagagcatcccagtgctgggaaagaccctaagaagactggaggcc

SEQ ID NO: 71064 - DNA, 60 bp, Artificial
  Synthetic oligonucleotide
agaggagaaacaaatatctggaagagcatcccagtgctgggaaagaccctaagaagactg

SEQ ID NO: 71065 - DNA, 60 bp, Artificial
  Synthetic oligonucleotide
gaccctaagaagactggaggcccaatatacaggaggagagatgggaaatggatgagagaa

SEQ ID NO: 71066 - DNA, 60 bp, Artificial
  Synthetic oligonucleotide
aaagaccctaagaagactggaggcccaatatacaggaggagagatgggaaatggatgaga

SEQ ID NO: 71067 - DNA, 60 bp, Artificial
  Synthetic oligonucleotide
cctttgatcttgaggggctatatgaagcaattgaggagtgcctgattaatgatccctggg

SEQ ID NO: 71068 - DNA, 60 bp, Artificial
  Synthetic oligonucleotide
ggaaccttcgaccttggagggctatatgaagcaattgaggagtgcctgattaatgatccc

SEQ ID NO: 71069 - DNA, 60 bp, Artificial
  Synthetic oligonucleotide
gaacgggagacctccattccctccaaaacagaaacgaaaaatggcgagaacaattgggcc

SEQ ID NO: 71070 - DNA, 60 bp, Artificial
  Synthetic oligonucleotide
cgctacctaactgacatgactcttgaagaaatgtcaagagactggttcatgctcatgccc

SEQ ID NO: 71071 - DNA, 60 bp, Artificial
  Synthetic oligonucleotide
catcgcttctgtgcctgtttcacgctatctaactgacatgactcttgaagaaatgtcaag

SEQ ID NO: 71072 - DNA, 60 bp, Artificial
  Synthetic oligonucleotide
tctgtgcctgcttcacgctatctaactgacatgactcttgaagaaatgtcaagagactgg

SEQ ID NO: 71073 - DNA, 60 bp, Artificial
  Synthetic oligonucleotide
tatcgtttctatgcctgcttcacactatctaactgacatgactcttgaagaaatgtcaag

SEQ ID NO: 71074 - DNA, 60 bp, Artificial
  Synthetic oligonucleotide
taagacaagagatggccagcagaggtctatgggattcctttcgtcagtccgaaagaggcg

SEQ ID NO: 71075 - DNA, 60 bp, Artificial
  Synthetic oligonucleotide
cagaagtagaagggagaattcaggacctcgagaaatatgttgaagacactaaaatagatc

SEQ ID NO: 71076 - DNA, 60 bp, Artificial
  Synthetic oligonucleotide
tcagaagtagaagggagaattcaggacctcgagaaatatgttgaagacactaaaatagat

SEQ ID NO: 71077 - DNA, 60 bp, Artificial
  Synthetic oligonucleotide
ctcagaagtggaagggagaattcaggacctcgagaaatatgttgaagacactaaaataga

SEQ ID NO: 71078 - DNA, 60 bp, Artificial
  Synthetic oligonucleotide
cccaagcagctatcaaccaaatcaatgggaaactgaatagagtaatcgagaagacgaacg

SEQ ID NO: 71079 - DNA, 60 bp, Artificial
  Synthetic oligonucleotide
agggtaatcgagaagacgaacgagaaattccatcaaatcgaaaaggaattctcagaagta

SEQ ID NO: 71080 - DNA, 60 bp, Artificial
  Synthetic oligonucleotide
taaggggtctgtctagtagaataagcatctactggacaatagttaaaccaggggacatac

SEQ ID NO: 71081 - DNA, 60 bp, Artificial
  Synthetic oligonucleotide
taaggggtctgtctagtagaataagcatctactggacaatagttaaaccaggggacatcc

SEQ ID NO: 71082 - DNA, 60 bp, Artificial
  Synthetic oligonucleotide
gttgaagatactaaaatagatctctggtcttacaacgcggaacttcttgtcgctctggag

SEQ ID NO: 71083 - DNA, 60 bp, Artificial
  Synthetic oligonucleotide
tctctgtggaaggcaaaagctgcatcaatcggtgcttttatgtggagttgataaggggaa

SEQ ID NO: 71084 - DNA, 60 bp, Artificial
  Synthetic oligonucleotide
tttctgttgaaggcaaaagctgcatcaatcggtgcttttatgtggagttgataaggggaa

SEQ ID NO: 71085 - DNA, 60 bp, Artificial
  Synthetic oligonucleotide
gagaagtcaacaaaccataatcccgaatatcgggtctagaccctgggtaaggggtctgtc

SEQ ID NO: 71086 - DNA, 60 bp, Artificial
  Synthetic oligonucleotide
cacttcaggcacttatggaacaggctcatggcctgatggggcgaacatcaatttcatgcc

SEQ ID NO: 71087 - DNA, 60 bp, Artificial
  Synthetic oligonucleotide
ctgtggaaggcaaaagctgcatcaatcggtgcttttatgtggagttgataaggggaagga

SEQ ID NO: 71088 - DNA, 60 bp, Artificial
  Synthetic oligonucleotide
ttactgacagccagacagcgaccaaaagaattcggttggccatcaattagtgtcgaattg

SEQ ID NO: 71089 - DNA, 60 bp, Artificial
  Synthetic oligonucleotide
cttgttgccctggagaatcaacatacaattgatctaactgactcagaaatgaacaaactg

SEQ ID NO: 71090 - DNA, 60 bp, Artificial
  Synthetic oligonucleotide
gagactagggaaaggatacatgttcgaaagtaagagcatgaagctccgaacacaaatacc

SEQ ID NO: 71091 - DNA, 60 bp, Artificial
  Synthetic oligonucleotide
ttaggaaaaggatacatgttcgaaagtaagagcatgaagctacggacacaaataccagca

SEQ ID NO: 71092 - DNA, 60 bp, Artificial
  Synthetic oligonucleotide
ggatgtcaatccgactttacttttcctaaaggttccagcgcaaaatgccataagcaccac

SEQ ID NO: 71093 - DNA, 60 bp, Artificial
  Synthetic oligonucleotide
ggatgtcaaaccgactctacttttcctaaaggttccagcgcaaaatgccataagcaccac

SEQ ID NO: 71094 - DNA, 60 bp, Artificial
  Synthetic oligonucleotide
ggatgtcaatccgactctacttttcttaaaggttccagcgcaaaatgccataagcaccac

SEQ ID NO: 71095 - DNA, 60 bp, Artificial
  Synthetic oligonucleotide
aaacggtttgcagactgggggcttggcgatgccccatttctcgataggcttcgccgagac

SEQ ID NO: 71096 - DNA, 58 bp, Artificial
  Synthetic oligonucleotide
ggggcttggcgatgccccatttctcgataggcttcgccgagaccagaagtccctaaga

SEQ ID NO: 71097 - DNA, 50 bp, Artificial
  Synthetic oligonucleotide
ttttggtcgactggaaactctgatactccttagagctttcacggaagaag

SEQ ID NO: 71098 - DNA, 60 bp, Artificial
  Synthetic oligonucleotide
caattgggccagaagtttgaagaaatgagatggctaattgaagaagtgcgacacagatta

SEQ ID NO: 71099 - DNA, 51 bp, Artificial
  Synthetic oligonucleotide
ggggcttggtgatgccccatttctcgataggcttcgccgagaccaaaagtc

SEQ ID NO: 71100 - DNA, 60 bp, Artificial
  Synthetic oligonucleotide
cattgaaagcaaacttcagtgtgatttttggtcgactggaaactctgatactccttagag

SEQ ID NO: 71101 - DNA, 60 bp, Artificial
  Synthetic oligonucleotide
gctaattgaagaagtgcgacacagattaaaattaacagagaatagctttgagcagataac

SEQ ID NO: 71102 - DNA, 60 bp, Artificial
  Synthetic oligonucleotide
gttcatgctaatgcccaagcagaaagtggaaggacctctttgcatcagaatggaccgggc

SEQ ID NO: 71103 - DNA, 60 bp, Artificial
  Synthetic oligonucleotide
gttcatgctaatgcccaagcagaaagtggaaggaccctttagcatcagaatggaccaggc

SEQ ID NO: 71104 - DNA, 60 bp, Artificial
  Synthetic oligonucleotide
gttcatgctaatgcccaagcagaaagtggaaggaccccttagcatcagaatggaccaggc

SEQ ID NO: 71105 - DNA, 60 bp, Artificial
  Synthetic oligonucleotide
caatccgactttacttttcttaaaagttccagcgcaaaatgccataagcaccacattccc

SEQ ID NO: 71106 - DNA, 60 bp, Artificial
  Synthetic oligonucleotide
caatccgactctacttttcttaaaggttccagcgcaaaatgccataagcaccacattccc

SEQ ID NO: 71107 - DNA, 60 bp, Artificial
  Synthetic oligonucleotide
caatccgactcgactgttcctagaggttccagcgcaaaatgccataagcaccacattccc

SEQ ID NO: 71108 - DNA, 56 bp, Artificial
  Synthetic oligonucleotide
acaagtggatcatctgttaaaagggaagaagaagtgcttacaggcaatctccaaac

SEQ ID NO: 71109 - DNA, 60 bp, Artificial
  Synthetic oligonucleotide
tggaacttatgaccatgatgtatacagagacgaagcattaaacaaccggttccagatcaa

SEQ ID NO: 71110 - DNA, 60 bp, Artificial
  Synthetic oligonucleotide
atggaacttatgaccatgatgtatacagagacgaagcattaaacaaccggttccagatca

SEQ ID NO: 71111 - DNA, 60 bp, Artificial
  Synthetic oligonucleotide
aagggggtatacataaatacagccttactcaatgcatcttgtgcagccatggatgatttc

SEQ ID NO: 71112 - DNA, 60 bp, Artificial
  Synthetic oligonucleotide
gagtgtacatgaacacagccttactcaatgcatcttgtgcagccatggatgacttccaat

SEQ ID NO: 71113 - DNA, 56 bp, Artificial
  Synthetic oligonucleotide
gttgccttctccaatctcttcaacagattgagagcatgatcgaggcggaatcctct

SEQ ID NO: 71114 - DNA, 60 bp, Artificial
  Synthetic oligonucleotide
cactaatgagaacgggagacctccattccctccaaaacagaaacggaaaatggcgagaac

SEQ ID NO: 71115 - DNA, 60 bp, Artificial
  Synthetic oligonucleotide
ttatcggaccttattgatgaatgagttgggtgttccatttcatctggggaccaagcaagt

SEQ ID NO: 71116 - DNA, 60 bp, Artificial
  Synthetic oligonucleotide
ttatcggaccctattgatgaatgagttgggtgttccatttcatctggggaccaagcaagt

SEQ ID NO: 71117 - DNA, 53 bp, Artificial
  Synthetic oligonucleotide
gctcaccgtgcccagtgagcggggactgcagcgtagacgctttgtccaaaatg

SEQ ID NO: 71118 - DNA, 60 bp, Artificial
  Synthetic oligonucleotide
accgtgcccagtgagcgaggactgcagcgtagacgctttgtccaaaatgccctcaatggg

SEQ ID NO: 71119 - DNA, 60 bp, Artificial
  Synthetic oligonucleotide
ggaaaaacacagatcttgaggctctcatggaatggctaaagacaagaccaattctgtcgc

SEQ ID NO: 71120 - DNA, 60 bp, Artificial
  Synthetic oligonucleotide
ggacaagcagcagatcttaaaagtacccaagcagctatcaaccaaatcaatgggaaactg

SEQ ID NO: 71121 - DNA, 60 bp, Artificial
  Synthetic oligonucleotide
taggacaagcagcagatcttaaaagtacccaagcagctatcaaccaaatcaatgggaaac

SEQ ID NO: 71122 - DNA, 60 bp, Artificial
  Synthetic oligonucleotide
gaggtctgtctagtagaataagcatctactggacaatagttaaaccaggggacatcctga

SEQ ID NO: 71123 - DNA, 60 bp, Artificial
  Synthetic oligonucleotide
ggggtctgtctagtagaataagcatctactggacaatagttaaaccaggggacatactga

SEQ ID NO: 71124 - DNA, 60 bp, Artificial
  Synthetic oligonucleotide
gcacaggacaagcagcagatcttaaaagtacccaagcggctatcaatcaaatcaatggga

SEQ ID NO: 71125 - DNA, 60 bp, Artificial
  Synthetic oligonucleotide
gtctgtctagtagaataagcatctactggacaatagttaaaccaggggacatcctgatga

SEQ ID NO: 71126 - DNA, 57 bp, Artificial
  Synthetic oligonucleotide
gacgaatacagagacgaagcagtaaacaaccgatttcagatcaaaagtgttgagctg

SEQ ID NO: 71127 - DNA, 60 bp, Artificial
  Synthetic oligonucleotide
atttcagatcaaaagtgttgagctgaagtcaggatacaaagactggatcctgtggatttc

SEQ ID NO: 71128 - DNA, 60 bp, Artificial
  Synthetic oligonucleotide
aacgaatacagagacgaagcagtaaacaaccgatttcagatcaaaagtgttgagctgaag

SEQ ID NO: 71129 - DNA, 60 bp, Artificial
  Synthetic oligonucleotide
gacgaatacagagacgaagcagtaaacaaccgatttcagatcaaaagtgttgagctgaag

SEQ ID NO: 71130 - DNA, 60 bp, Artificial
  Synthetic oligonucleotide
atcaatgggaaactgaataggataatcgagaagacgaacgagaaattccatcaaatcgaa

SEQ ID NO: 71131 - DNA, 60 bp, Artificial
  Synthetic oligonucleotide
ggacgattttcaactaattcccatgataagcaagtgcagaactaaagagggaaggcgaaa

SEQ ID NO: 71132 - DNA, 60 bp, Artificial
  Synthetic oligonucleotide
gcttcttcatgcaaattgccattctgataactactgtaacattgcatttcaagcaatatg

SEQ ID NO: 71133 - DNA, 60 bp, Artificial
  Synthetic oligonucleotide
gcaaattgccatcctgataactactgtaacattgcatttcaagcaatatgaattcaactc

SEQ ID NO: 71134 - DNA, 60 bp, Artificial
  Synthetic oligonucleotide
cattgtttccagttatgtgtgctcaggacttgttggagacacacccagaaaaaacgacag

SEQ ID NO: 71135 - DNA, 60 bp, Artificial
  Synthetic oligonucleotide
tatagcattgtttccagttatgtgtgctcaggacttgttggagacacacccagaaaaaac

SEQ ID NO: 71136 - DNA, 60 bp, Artificial
  Synthetic oligonucleotide
aagtgccagcgcaaaatgctataagcactacattcccttatactggagatccgccataca

SEQ ID NO: 71137 - DNA, 60 bp, Artificial
  Synthetic oligonucleotide
aagtgccagcacaaaatgctataagcactacattcccttatactggagatccgccataca

SEQ ID NO: 71138 - DNA, 60 bp, Artificial
  Synthetic oligonucleotide
cgccatacagtcacggaacggggacaggatacaccatggacacggtcaacaggacacatc

SEQ ID NO: 71139 - DNA, 60 bp, Artificial
  Synthetic oligonucleotide
ccgccatacagtcacggaacggggacaggatacaccatggacacggtcaacaggacacat

SEQ ID NO: 71140 - DNA, 60 bp, Artificial
  Synthetic oligonucleotide
ttcatacaggaggccagttggaatttccagcatggtggaggccatggtttctagggccag

SEQ ID NO: 71141 - DNA, 60 bp, Artificial
  Synthetic oligonucleotide
ctgatgacttcgccctcatagtgaatgcacctaattatgaaggaatacaagcaggagtgg

SEQ ID NO: 71142 - DNA, 60 bp, Artificial
  Synthetic oligonucleotide
ttcatacaggaggccagttggaatttccagcatggtggaggcaatggtatctagggccag

SEQ ID NO: 71143 - DNA, 60 bp, Artificial
  Synthetic oligonucleotide
ctggagcaaaacaaacgatgccggctcagaccgagtgatggtatcacctctggctgtgac

SEQ ID NO: 71144 - DNA, 60 bp, Artificial
  Synthetic oligonucleotide
ctatattgaggtgctgcatttaacccaggggacatgctgggagcagatgtacactccagg

SEQ ID NO: 71145 - DNA, 60 bp, Artificial
  Synthetic oligonucleotide
ggacaaaccctctggagtaaaacaaatgatgccggctcagaccgagtgatggtatcacct

SEQ ID NO: 71146 - DNA, 60 bp, Artificial
  Synthetic oligonucleotide
cctctggagcaaaacaaacgatgccggctcagaccgagtgatggtatcacctctggctgt

SEQ ID NO: 71147 - DNA, 60 bp, Artificial
  Synthetic oligonucleotide
gataagagaataatggaaatgatccctgaaaggaatgaacaaggacaaaccctctggagc

SEQ ID NO: 71148 - DNA, 60 bp, Artificial
  Synthetic oligonucleotide
gatgtgggagatcaatggtcctgaatcggtgttggtcaatacttatcagtggatcatcag

SEQ ID NO: 71149 - DNA, 60 bp, Artificial
  Synthetic oligonucleotide
ccgagatcaaaagtccctaaggggaagaggcagcactcttggtctggaaatcgaaccggc

SEQ ID NO: 71150 - DNA, 60 bp, Artificial
  Synthetic oligonucleotide
taggagacatgcttctacgaacttcaattggccaagtgtcgagaccaatgtttctgtatg

SEQ ID NO: 71151 - DNA, 55 bp, Artificial
  Synthetic oligonucleotide
ctcagccgaagtgtcccattgcagggccactgagtacataatgaagggagtgtac

SEQ ID NO: 71152 - DNA, 60 bp, Artificial
  Synthetic oligonucleotide
ggagacatgcttctacgaacttcaattggccaagtgtcgagaccaatgtttctgtatgtg

SEQ ID NO: 71153 - DNA, 60 bp, Artificial
  Synthetic oligonucleotide
cactggggaagaaatggccactaaggcagattacactcttgacgaggagagcagagcaag

SEQ ID NO: 71154 - DNA, 56 bp, Artificial
  Synthetic oligonucleotide
cgaacagggtgaatcaatagttgtagaatctggtgatccaaattcactcctaaagc

SEQ ID NO: 71155 - DNA, 60 bp, Artificial
  Synthetic oligonucleotide
gaaacaggtgctagcagagatacaggacattgaaaatgaggagaaaatcccaaagacaaa

SEQ ID NO: 71156 - DNA, 60 bp, Artificial
  Synthetic oligonucleotide
ggacccgagtcatgaaggggaggggataccgctatatgatgcaatcaagtgcatgaagac

SEQ ID NO: 71157 - DNA, 60 bp, Artificial
  Synthetic oligonucleotide
ttgacgaaaggggtgaatcaatagttgtagaatctggtgatccaaatgcactcctaaaac

SEQ ID NO: 71158 - DNA, 60 bp, Artificial
  Synthetic oligonucleotide
gcagattatagcattgattccagttatgtgtgctcaggacttgttggagacacaccaagg

SEQ ID NO: 71159 - DNA, 60 bp, Artificial
  Synthetic oligonucleotide
tatgcatagcatggtccagttcaagttgtcacgatggaaaagcatggctgcatgtttgtg

SEQ ID NO: 71160 - DNA, 60 bp, Artificial
  Synthetic oligonucleotide
aaagagaagtcaacaaaccataatcccgaatatcgggtctagaccctgggtaaggggtct

SEQ ID NO: 71161 - DNA, 60 bp, Artificial
  Synthetic oligonucleotide
cgtggccatggtgttttcacaagaggatcgcatgataaaagcagttagaggtgacctgaa

SEQ ID NO: 71162 - DNA, 60 bp, Artificial
  Synthetic oligonucleotide
cgtagccatggtgttttcacaagaggattgtatgataaaagcagttagaggtgacctgaa

SEQ ID NO: 71163 - DNA, 60 bp, Artificial
  Synthetic oligonucleotide
agtggccatggtgttttcacaagaggattgcatgataaaagcagttagaggtgacctgaa

SEQ ID NO: 71164 - DNA, 53 bp, Artificial
  Synthetic oligonucleotide
taaaagcagttagaggtgacctgaatttcgtcaacagagcaaatcagcggttg

SEQ ID NO: 71165 - DNA, 60 bp, Artificial
  Synthetic oligonucleotide
atggtgttttcacaagaggattgcatgataaaagcagttagaggtgacctgaatttcgtt

SEQ ID NO: 71166 - DNA, 60 bp, Artificial
  Synthetic oligonucleotide
ctttaattgaagacccagatgaaagcacatccggagtggagtccgccgtattgagagggt

SEQ ID NO: 71167 - DNA, 60 bp, Artificial
  Synthetic oligonucleotide
gggaagtgctcagcatgtggaagagtgttcctgttaccctcgataccctgatgtcaggtg

SEQ ID NO: 71168 - DNA, 60 bp, Artificial
  Synthetic oligonucleotide
ggggtgaaaggctgggcctttgacgatggaaatgacatatggatgggaagaactatcagc

SEQ ID NO: 71169 - DNA, 60 bp, Artificial
  Synthetic oligonucleotide
ccgaaatcctaacaatgagagagggaatcacggggtgaaaggctgggcctttgatgatgg

SEQ ID NO: 71170 - DNA, 60 bp, Artificial
  Synthetic oligonucleotide
cagaaacaacgatgggtctagtaatagcaattgccgaaatcctaacaatgagagagggaa

SEQ ID NO: 71171 - DNA, 60 bp, Artificial
  Synthetic oligonucleotide
gatgggtctagtaatagcaattgccgaaatcctaacaatgagagagggaatcacggggtg

SEQ ID NO: 71172 - DNA, 60 bp, Artificial
  Synthetic oligonucleotide
gggtgttccatttcatttgggaaccagacaagtgtgtatagcatggtccagttcaagttg

SEQ ID NO: 71173 - DNA, 60 bp, Artificial
  Synthetic oligonucleotide
tatagcattggttccagttatatgtgctcagggcttgttggcgacacacccagaaacaac

SEQ ID NO: 71174 - DNA, 60 bp, Artificial
  Synthetic oligonucleotide
ggttccagttatatgtgctcagggcttgttggcgacacacccagaaacaacgatgggtct

SEQ ID NO: 71175 - DNA, 60 bp, Artificial
  Synthetic oligonucleotide
attgccgaaatcctaacaatgagagagggaatcacggggtgaaaggctgggcctttgatg

SEQ ID NO: 71176 - DNA, 60 bp, Artificial
  Synthetic oligonucleotide
gaaagattatagcattggttccagttatatgtgctcagggcttgttggcgacacacccag

SEQ ID NO: 71177 - DNA, 60 bp, Artificial
  Synthetic oligonucleotide
tagtattagttcatggtctcaaaacatactccggactcaggaatcagagtgtgtttgtat

SEQ ID NO: 71178 - DNA, 60 bp, Artificial
  Synthetic oligonucleotide
tttgggaaccagacaagtgtgtatagcatggtccagttcaagttgtcacgatggaaaagc

SEQ ID NO: 71179 - DNA, 60 bp, Artificial
  Synthetic oligonucleotide
ccagttatatgtgctcagggcttgttggcgacacacccagaaacaacgattggtctagta

SEQ ID NO: 71180 - DNA, 60 bp, Artificial
  Synthetic oligonucleotide
agagagggaatcacggggtgaaaggctgggcctttgatgatggaaatgacatatggatgg

SEQ ID NO: 71181 - DNA, 60 bp, Artificial
  Synthetic oligonucleotide
ggaaatgacatatggatgggaagaactatcagcaaggactcacgcttaggttacgaaacc

SEQ ID NO: 71182 - DNA, 60 bp, Artificial
  Synthetic oligonucleotide
gcctttgatgatggaaatgacatatggatgggaagaactatcagcaaggactcacgctta

SEQ ID NO: 71183 - DNA, 60 bp, Artificial
  Synthetic oligonucleotide
agataacagggggtctgatggtgaaaatggaccaggccattatggacaagaggataacac

SEQ ID NO: 71184 - DNA, 60 bp, Artificial
  Synthetic oligonucleotide
tggcacataagaaagctgctcagcatgagagacatgtgtgatgctccctttaatgataga

SEQ ID NO: 71185 - DNA, 60 bp, Artificial
  Synthetic oligonucleotide
gctgctcagcatgagagacatgtgtgatgctccctttaatgatagactcaggagagatca

SEQ ID NO: 71186 - DNA, 60 bp, Artificial
  Synthetic oligonucleotide
taatgatagactcaggagagatcaaaaggcattaaagggaagaggcagcacacttgggct

SEQ ID NO: 71187 - DNA, 60 bp, Artificial
  Synthetic oligonucleotide
cacttgggctcgacctgcgagtggctacaatggaaggcaaaaagattgttgaggacatcc

SEQ ID NO: 71188 - DNA, 60 bp, Artificial
  Synthetic oligonucleotide
ctcaagattgcaattgcatccagccctgctcctcggtatattactgatatgagcatagag

SEQ ID NO: 71189 - DNA, 60 bp, Artificial
  Synthetic oligonucleotide
gcatccagccctgctcctcggtatattactgatatgagcatagaggaaataagcagggaa

SEQ ID NO: 71190 - DNA, 57 bp, Artificial
  Synthetic oligonucleotide
ttactcgaggttgaaagtgagataaggacattctcttttcagcttatttagtactaa

SEQ ID NO: 71191 - DNA, 60 bp, Artificial
  Synthetic oligonucleotide
aaactgagaacagtttcgagcagataacgttcttgcaagcattgcaactcttactcgagg

SEQ ID NO: 71192 - DNA, 60 bp, Artificial
  Synthetic oligonucleotide
ctgagaacagtttcgagcagataacgttcttgcaagcattgcaactcttactcgaggttg

SEQ ID NO: 71193 - DNA, 60 bp, Artificial
  Synthetic oligonucleotide
cactccctccaaagcagaaacgctacatggcgagaagagttgagtcagaggtttgaagaa

SEQ ID NO: 71194 - DNA, 60 bp, Artificial
  Synthetic oligonucleotide
ggctttcacagatgatggcgccattgtagctgaaatatctcccattccctctatgccagg

SEQ ID NO: 71195 - DNA, 60 bp, Artificial
  Synthetic oligonucleotide
attagtctcactgagggctttcacagatgatggcgccattgtagctgaaatatctcccat

SEQ ID NO: 71196 - DNA, 60 bp, Artificial
  Synthetic oligonucleotide
gcaaatttctctgtcctattcgatcaactggaaacattagtctcactgagggctttcaca

SEQ ID NO: 71197 - DNA, 60 bp, Artificial
  Synthetic oligonucleotide
aggataacactcaaagcaaatttctctgtcctattcgatcaactggaaacattagtctca

SEQ ID NO: 71198 - DNA, 60 bp, Artificial
  Synthetic oligonucleotide
ggggtctgatggtgaaaatggaccaggccattatggacaagaggataacactcaaagcaa

SEQ ID NO: 71199 - DNA, 60 bp, Artificial
  Synthetic oligonucleotide
acataatggactccaacacgataacctcgtttcaggtagattgctatctatggcacataa

SEQ ID NO: 71200 - DNA, 60 bp, Artificial
  Synthetic oligonucleotide
acacgataacctcgtttcaggtagattgctatctatggcacataagaaagctgctcagca

SEQ ID NO: 71201 - DNA, 60 bp, Artificial
  Synthetic oligonucleotide
atcagagtggaccaggcaatcatggagaaaaacatcatgttgaaagcgaatttcagtgtg

SEQ ID NO: 71202 - DNA, 60 bp, Artificial
  Synthetic oligonucleotide
ctctttgcatcagaatggaccaggcaatcatggagaaaaacatcatattgaaagcgaatt

SEQ ID NO: 71203 - DNA, 60 bp, Artificial
  Synthetic oligonucleotide
atcagaatggaccaggcaatcatggagaaaaaaatcatgttgaaagcgaatttcagtgtg

SEQ ID NO: 71204 - DNA, 60 bp, Artificial
  Synthetic oligonucleotide
ctaatgtcgcagtctcgcactcgcgagatactcactaagaccactgtggaccatatggcc

SEQ ID NO: 71205 - DNA, 60 bp, Artificial
  Synthetic oligonucleotide
atcagaatggaccgggcaatcatggagaaaaacatcatgttgaaagcgaatttcagtgtg

SEQ ID NO: 71206 - DNA, 60 bp, Artificial
  Synthetic oligonucleotide
gacacagtacatgagaggaccccttatcggaccctattgatgaatgagttgggtgttcca

SEQ ID NO: 71207 - DNA, 60 bp, Artificial
  Synthetic oligonucleotide
tgacacagtacatgagaggaccccttatcggaccctattgatgaatgagttgggtgttcc

SEQ ID NO: 71208 - DNA, 60 bp, Artificial
  Synthetic oligonucleotide
ggatgctctactaggggaccctcattgtgatgtatttcaggatgaaacatgggatcttta

SEQ ID NO: 71209 - DNA, 60 bp, Artificial
  Synthetic oligonucleotide
atgggagagactgcacactaatagatgctctactaggggaccctcattgtgatgtattcc

SEQ ID NO: 71210 - DNA, 60 bp, Artificial
  Synthetic oligonucleotide
ctcatcaggaaccctagagttcatcactgagggctttacgtggacaggagtcacacaaaa

SEQ ID NO: 71211 - DNA, 60 bp, Artificial
  Synthetic oligonucleotide
tgctacccatatgacgtgccagactatgcatctctcaggtctctagtggcctcatcagga

SEQ ID NO: 71212 - DNA, 60 bp, Artificial
  Synthetic oligonucleotide
cagacgcacctattgacacatgtatctctgagtgcatcactcctaatggtagcatcccca

SEQ ID NO: 71213 - DNA, 60 bp, Artificial
  Synthetic oligonucleotide
gggatctttatgtagagcgcagcaatgcattcagcaactgctacccatatgacgtgccag

SEQ ID NO: 71214 - DNA, 60 bp, Artificial
  Synthetic oligonucleotide
agagttcatcactgagggctttacgtggacaggagtcacacaaaatggagggagtggtgc

SEQ ID NO: 71215 - DNA, 60 bp, Artificial
  Synthetic oligonucleotide
ctgggaaaagctcaataatgagatcagatgcacctattgacacatgtatctctgagtgca

SEQ ID NO: 71216 - DNA, 50 bp, Artificial
  Synthetic oligonucleotide
cagaacagcttgacaatagagaaaatggtgctctctgcttttgatgagag

SEQ ID NO: 71217 - DNA, 57 bp, Artificial
  Synthetic oligonucleotide
tgcagtcaaaggaatcgggacaatggtgatggagctgatcagaatggtcaaacgggg

SEQ ID NO: 71218 - DNA, 60 bp, Artificial
  Synthetic oligonucleotide
tgcagtcaaaggaatcgggacaatggtgatggagctgatcagaatggtcaaacgggggat

SEQ ID NO: 71219 - DNA, 60 bp, Artificial
  Synthetic oligonucleotide
gtcaaaggaatcgggacaatggtgatggagctgatcagaatggtcaaacgggggatcaac

SEQ ID NO: 71220 - DNA, 60 bp, Artificial
  Synthetic oligonucleotide
gattatgaaggacggttgatccagaacagcttgacaatagagaaaatggtgctctctgct

SEQ ID NO: 71221 - DNA, 60 bp, Artificial
  Synthetic oligonucleotide
atgaaggacggttgatccagaacagcttgacaatagagaaaatggtgctctctgcttttg

SEQ ID NO: 71222 - DNA, 60 bp, Artificial
  Synthetic oligonucleotide
atgaagggcggttgatccagaacagcttgacaatagagaaaatggtgctctctgcttttg

SEQ ID NO: 71223 - DNA, 60 bp, Artificial
  Synthetic oligonucleotide
gtcaagggaatcgggacaatggtgatggagctgatcagaatggtcaaacgggggatcaac

SEQ ID NO: 71224 - DNA, 60 bp, Artificial
  Synthetic oligonucleotide
gtcaaaggaatcgggacaatggtgatggagctgatcagaatggtcaaacgggggatcaat

SEQ ID NO: 71225 - DNA, 60 bp, Artificial
  Synthetic oligonucleotide
ggggatcaacgatcgaaatttctggagaggtgagaatgggcggaaaacaaggagtgctta

SEQ ID NO: 71226 - DNA, 60 bp, Artificial
  Synthetic oligonucleotide
ggggatcaacgatcgaaatttctggagaggtgagaatggacggaaaacaaggagtgctta

SEQ ID NO: 71227 - DNA, 60 bp, Artificial
  Synthetic oligonucleotide
cctcttttgatatgagtaatgaaggttcttatttcttcggagacaatgcagaagagtacg

SEQ ID NO: 71228 - DNA, 60 bp, Artificial
  Synthetic oligonucleotide
ggataatatgggatcaagtactcttgaactgagaagcgggtactgggccataaggaccag

SEQ ID NO: 71229 - DNA, 60 bp, Artificial
  Synthetic oligonucleotide
ttcaaatgagaacatggataatatgggatcaagcactcttgaactgagaagcgggtactg

SEQ ID NO: 71230 - DNA, 60 bp, Artificial
  Synthetic oligonucleotide
cctcttttgacatgagtaatgaagggtcttatttcttcggagacaatgcagaagagtacg

SEQ ID NO: 71231 - DNA, 60 bp, Artificial
  Synthetic oligonucleotide
gcactgaacttaaactcagtgattatgaagggcggttgatccagaacagcttgacaatag

SEQ ID NO: 71232 - DNA, 60 bp, Artificial
  Synthetic oligonucleotide
actcagtgattatgaggggcggttgatccagaacagcttgacaatagagaaaatggtgct

SEQ ID NO: 71233 - DNA, 60 bp, Artificial
  Synthetic oligonucleotide
actcagtgattatgaagggcggttaatccagaacagcttgacaatagagaaaatggtgct

SEQ ID NO: 71234 - DNA, 60 bp, Artificial
  Synthetic oligonucleotide
actcagtgattatgaaggacggttgatccagaacagcttgacaatagagaaaatggtgct

SEQ ID NO: 71235 - DNA, 60 bp, Artificial
  Synthetic oligonucleotide
cccatatactggagatcctccatacagccatgggacaggaacaggatacaccatggacac

SEQ ID NO: 71236 - DNA, 60 bp, Artificial
  Synthetic oligonucleotide
cccttatactggagatcctccatacagccatggaacaggaacggggtacaccatggacac

SEQ ID NO: 71237 - DNA, 60 bp, Artificial
  Synthetic oligonucleotide
cccatatactggagatcctccatacagccatggaacgggaacagggtacaccatggacac

SEQ ID NO: 71238 - DNA, 60 bp, Artificial
  Synthetic oligonucleotide
atcatggcgtctcaaggcaccaaacgatcttatgaacagatggaaactagtggagaacgc

SEQ ID NO: 71239 - DNA, 54 bp, Artificial
  Synthetic oligonucleotide
tatacataaatacagctttgctcaatgcatcttgtgcagccatggatgacttcc

SEQ ID NO: 71240 - DNA, 50 bp, Artificial
  Synthetic oligonucleotide
cataaatacagctctgctcaatgcatcttgtgcagccatggatgacttcc

SEQ ID NO: 71241 - DNA, 60 bp, Artificial
  Synthetic oligonucleotide
gcaattggggtcctcaccggaggacttgaatggaatgataacacagttcgagtctctaaa

SEQ ID NO: 71242 - DNA, 60 bp, Artificial
  Synthetic oligonucleotide
gcaattggggtcctcatcggaggtcttgaatggaatgataacacagttcgagtctctaaa

SEQ ID NO: 71243 - DNA, 60 bp, Artificial
  Synthetic oligonucleotide
gcaatagcaattgccgaaatcctaacaacgagagagggaatcacggggtgaaaggctggg

SEQ ID NO: 71244 - DNA, 60 bp, Artificial
  Synthetic oligonucleotide
aacaggtgcttttatgtggagctaataagaggaaggagacaggaaactagagtatggtgg

SEQ ID NO: 71245 - DNA, 60 bp, Artificial
  Synthetic oligonucleotide
gttacgagagaaccttatgtgtcatgcgatcctagcaagtgttatcagtttgcactagga

SEQ ID NO: 71246 - DNA, 55 bp, Artificial
  Synthetic oligonucleotide
aataggtgcttttatgtggagctaataagaggaaggagacaggaaactagagtat

SEQ ID NO: 71247 - DNA, 60 bp, Artificial
  Synthetic oligonucleotide
caggtgcttttatgtggagctaataagaggaaggagacaggaaactagagtatggtggac

SEQ ID NO: 71248 - DNA, 60 bp, Artificial
  Synthetic oligonucleotide
ccaacactgtgtcaagttttcaggtagattgctttctttggcatatccggaaacaagttg

SEQ ID NO: 71249 - DNA, 55 bp, Artificial
  Synthetic oligonucleotide
acaagaaatggccaacagaggcctctgggattcctttcgtcagtccgaaagaggc

SEQ ID NO: 71250 - DNA, 60 bp, Artificial
  Synthetic oligonucleotide
gctctacagagattcgcttggagaagcactaatgagaacgggagacctccattacctcca

SEQ ID NO: 71251 - DNA, 60 bp, Artificial
  Synthetic oligonucleotide
gctctacagagattcgcttggagaagcactaatgagaacgggagacctccattccctcca

SEQ ID NO: 71252 - DNA, 58 bp, Artificial
  Synthetic oligonucleotide
ctactgcttgaagtggagcaagagataaggactttctcgtttcagtttatttaatgat

SEQ ID NO: 71253 - DNA, 60 bp, Artificial
  Synthetic oligonucleotide
gcttggagaagcactaatgagaacgggagacctccattccctccaaaacagaaacggaaa

SEQ ID NO: 71254 - DNA, 60 bp, Artificial
  Synthetic oligonucleotide
cgcagcaaggctttcagcaactgttacccttatgatgtgccggagtatacctcactcagg

SEQ ID NO: 71255 - DNA, 60 bp, Artificial
  Synthetic oligonucleotide
ctatatgatgcaattgaggagtgcctgattaatgatccctgggttttgcttaacgcgtct

SEQ ID NO: 71256 - DNA, 60 bp, Artificial
  Synthetic oligonucleotide
gaaactggttcatgctaatgcccaagcagaaagtggaaggaccccttagcatcagaatgg

SEQ ID NO: 71257 - DNA, 60 bp, Artificial
  Synthetic oligonucleotide
gaaactggttcatgctaatgcccaagcagaaagtggaaggaccctttagcatcagaatgg

SEQ ID NO: 71258 - DNA, 60 bp, Artificial
  Synthetic oligonucleotide
gtacagagagggtggtggttagcattgatcggtttttgagagttagagaccaacgcggga

SEQ ID NO: 71259 - DNA, 60 bp, Artificial
  Synthetic oligonucleotide
agataggggggtggttagcattgatcggtttttgagagttcgagaccaccgcgggaatgt

SEQ ID NO: 71260 - DNA, 56 bp, Artificial
  Synthetic oligonucleotide
gtaatgaaggatcttatttcttcggagacaatgcagaagagtacgacaattaagga

SEQ ID NO: 71261 - DNA, 60 bp, Artificial
  Synthetic oligonucleotide
atggaacaggctcatggcctgatggggcgaatatcaacttcatgcctatataagctttcg

SEQ ID NO: 71262 - DNA, 60 bp, Artificial
  Synthetic oligonucleotide
gagtcaggaaggctaatagatttcctcaaggatgtgatggaatcaatagataaagaggaa

SEQ ID NO: 71263 - DNA, 60 bp, Artificial
  Synthetic oligonucleotide
tataaatatggcagattacagcattgattccagttatatatgttcagggcttgttggcga

SEQ ID NO: 71264 - DNA, 60 bp, Artificial
  Synthetic oligonucleotide
agaatacaggaactggtcgaaaccgcagtgtcagattacagggtttgctcctttctccaa

SEQ ID NO: 71265 - DNA, 60 bp, Artificial
  Synthetic oligonucleotide
ggtccagctcaagttgtcatgatgggaaagcatggttgcatgtctgtgtcactggagatg

SEQ ID NO: 71266 - DNA, 60 bp, Artificial
  Synthetic oligonucleotide
gagaaccttatgtgtcatgcggccccggtaaatgttatcagtttgcacttgggcagggga

SEQ ID NO: 71267 - DNA, 60 bp, Artificial
  Synthetic oligonucleotide
agtgaaaatgaatccaaaccagaagataataacaattggctctgtctctctgaccattgc

SEQ ID NO: 71268 - DNA, 60 bp, Artificial
  Synthetic oligonucleotide
atgatgactaattcacaagacacagagctttctttcacaatcactggggacaacactaaa

SEQ ID NO: 71269 - DNA, 60 bp, Artificial
  Synthetic oligonucleotide
gagtcaggaaggctaatagatttcctaaaggatgtgatggaatcaatggataaagaggaa

SEQ ID NO: 71270 - DNA, 60 bp, Artificial
  Synthetic oligonucleotide
gagtcaggaaggctaatagatttcttaaaggatgtgatggaatcaatggataaagaggaa

SEQ ID NO: 71271 - DNA, 60 bp, Artificial
  Synthetic oligonucleotide
gagtcaggaagactaatagatttcctaaaggatgtgatggaatcaatggataaagaggaa

SEQ ID NO: 71272 - DNA, 60 bp, Artificial
  Synthetic oligonucleotide
gcatctccacaactcgagggattttcagctgaatcgaggaaattgcttctcattgttcag

SEQ ID NO: 71273 - DNA, 60 bp, Artificial
  Synthetic oligonucleotide
attggagtaacagtgataaagaacaacatgataaacaatgaccttggaccagcaacagct

SEQ ID NO: 71274 - DNA, 60 bp, Artificial
  Synthetic oligonucleotide
gcattggagtaacagtgataaagaacaacatgataaacaatgaccttgggccagcaacag

SEQ ID NO: 71275 - DNA, 60 bp, Artificial
  Synthetic oligonucleotide
cagtgataaagaacaacatgataaacaatgaccttggaccagcaacagcccagatggccc

SEQ ID NO: 71276 - DNA, 60 bp, Artificial
  Synthetic oligonucleotide
gaatcagctgatatgagcattggagtaacagtgataaagaacaacatgataaacaatgac

SEQ ID NO: 71277 - DNA, 60 bp, Artificial
  Synthetic oligonucleotide
ggtctggttattctggtattttctctgttgaaaacaaaagctgcatcaataggtgttttt

SEQ ID NO: 71278 - DNA, 60 bp, Artificial
  Synthetic oligonucleotide
acgtttgtgtcactggggatgatagaaatgcgactgctagtttcatttatgatgggatgc

SEQ ID NO: 71279 - DNA, 60 bp, Artificial
  Synthetic oligonucleotide
catgtctgtgtcactggagatgatagaaatgcgactgctagtttcatttatgatggggtg

SEQ ID NO: 71280 - DNA, 60 bp, Artificial
  Synthetic oligonucleotide
tgaccattgcaacagtatgtttcctcatgcagattgccatcttagcaacgactgtgacac

SEQ ID NO: 71281 - DNA, 60 bp, Artificial
  Synthetic oligonucleotide
gaagataataacaattggctccgtctctctaaccattgcaacagtatgtttcctcatgca

SEQ ID NO: 71282 - DNA, 60 bp, Artificial
  Synthetic oligonucleotide
ggaacaggctcatggcctgatggggcgaatatcaacttcatgcctatataagctttcgca

SEQ ID NO: 71283 - DNA, 54 bp, Artificial
  Synthetic oligonucleotide
ttgcaacagtatgtttcctcatgcagattgccatcctagcaacgactgtgacac

SEQ ID NO: 71284 - DNA, 59 bp, Artificial
  Synthetic oligonucleotide
ggtctggttattctggtattttctctgttgaaaacaaaagctgcatcaataggtgtttt

SEQ ID NO: 71285 - DNA, 60 bp, Artificial
  Synthetic oligonucleotide
acatttgggtaacaagagaaccttatgtgtcatgcggccccggtaaatgttatcagtttg

SEQ ID NO: 71286 - DNA, 60 bp, Artificial
  Synthetic oligonucleotide
cactggagatgatagaaatgcgactgctagtttcatttatgatggggtgcttgttgacag

SEQ ID NO: 71287 - DNA, 60 bp, Artificial
  Synthetic oligonucleotide
cactggggatgatagaaatgcgactgctagtttcatttatgatgggatgcttgttgacag

SEQ ID NO: 71288 - DNA, 60 bp, Artificial
  Synthetic oligonucleotide
cgaggagttcacaatggtggggaaaagagcaacagctatactcagaaaagcaaccaggag

SEQ ID NO: 71289 - DNA, 60 bp, Artificial
  Synthetic oligonucleotide
gaggaagggggtcatggagtgaaaggctgggcctttgatgatggaaatgacgtgtggatg

SEQ ID NO: 71290 - DNA, 60 bp, Artificial
  Synthetic oligonucleotide
aatgaggaaggtggtcatggagtgaaaggctgggcctttgatgatggaaatgacgtgtgg

SEQ ID NO: 71291 - DNA, 60 bp, Artificial
  Synthetic oligonucleotide
ccaatcctgtcacctctgactaaggggattttgggatttgtattcacgctcaccgtgccc

SEQ ID NO: 71292 - DNA, 60 bp, Artificial
  Synthetic oligonucleotide
acggggtacaccatggacacagtcaacagaacacaccaatattcagagaaggggaagtgg

SEQ ID NO: 71293 - DNA, 60 bp, Artificial
  Synthetic oligonucleotide
acggggtacaccatggacacagtcaacagaacacaccaatattcagaaaaggggaagtgg

SEQ ID NO: 71294 - DNA, 60 bp, Artificial
  Synthetic oligonucleotide
ccaacactgtgtcaagctttcaggtagactgctttatttggcatgtccgcaaacgatttg

SEQ ID NO: 71295 - DNA, 55 bp, Artificial
  Synthetic oligonucleotide
aaaatgcaattgggatcctcatcgaaggacttgaatggaatgataacacagttcg

SEQ ID NO: 71296 - DNA, 60 bp, Artificial
  Synthetic oligonucleotide
ccaaacattgaaaataagagtacatgaggggtacgaggagttcacaatggtggggaaaag

SEQ ID NO: 71297 - DNA, 60 bp, Artificial
  Synthetic oligonucleotide
tcatattagtccattgtcgggaagtgctcagcatgtggaggagtgttcctgttaccctcg

SEQ ID NO: 71298 - DNA, 60 bp, Artificial
  Synthetic oligonucleotide
ataactattggttctgtttttctcactattgcaacaatgtgctttataatgcagattgcc

SEQ ID NO: 71299 - DNA, 60 bp, Artificial
  Synthetic oligonucleotide
ggctctaataggcccgtcgtagacataagtgtgaaagattatagtgttgattccagttat

SEQ ID NO: 71300 - DNA, 60 bp, Artificial
  Synthetic oligonucleotide
gggcaagggctgcatcaataggtgcttttatgttgagctaataagaggaaggagacagga

SEQ ID NO: 71301 - DNA, 60 bp, Artificial
  Synthetic oligonucleotide
gtcgggaagtgctcagcatgtggaggagtgttcctgttaccctcgatacccagatgtcag

SEQ ID NO: 71302 - DNA, 60 bp, Artificial
  Synthetic oligonucleotide
agtgcaatccccctgcaaacaaccaagtaatgccgtgtgaaccaataatagaaaagaaca

SEQ ID NO: 71303 - DNA, 56 bp, Artificial
  Synthetic oligonucleotide
agcatggtccagttcaagttgtcatgatggaaaagcatggctgcatatttgtgtca

SEQ ID NO: 71304 - DNA, 60 bp, Artificial
  Synthetic oligonucleotide
atgaatctagcaatagcaattgccgaaatcctaacaacgagagagggaatcacggggtga

SEQ ID NO: 71305 - DNA, 60 bp, Artificial
  Synthetic oligonucleotide
aagttgtcggtggttggtccaaacccaattacaaatttcagacaaataggcaagtcatag

SEQ ID NO: 71306 - DNA, 60 bp, Artificial
  Synthetic oligonucleotide
atgaatgagttgggtgtaccatttcatttggggaccaggcaagtatgtatagcatggtcc

SEQ ID NO: 71307 - DNA, 60 bp, Artificial
  Synthetic oligonucleotide
ttccagttatgtgtgctcaggccttgttggcgacacacccagaaacaacgatgaatctag

SEQ ID NO: 71308 - DNA, 60 bp, Artificial
  Synthetic oligonucleotide
gttaccctcgatacccagatgtcagatgtatttgtagagacaactggagaggctctaata

SEQ ID NO: 71309 - DNA, 60 bp, Artificial
  Synthetic oligonucleotide
agattgccatcttaataactactgtggcattgcatttcaagcaatatgagtgcaatcccc

SEQ ID NO: 71310 - DNA, 60 bp, Artificial
  Synthetic oligonucleotide
gaaaagaacataacagaaatagtgtacttgaccaataccaccgtagaaaaagatgtatgc

SEQ ID NO: 71311 - DNA, 60 bp, Artificial
  Synthetic oligonucleotide
gtcaagggactggttcatgctaatgcccaagcagaaagtggaaggacctctttgcatcag

SEQ ID NO: 71312 - DNA, 60 bp, Artificial
  Synthetic oligonucleotide
cttgaggctctcatggaatggctaaagacaagaccaattctgtcgcctctgactaagggg

SEQ ID NO: 71313 - DNA, 60 bp, Artificial
  Synthetic oligonucleotide
cgtggtaaattttgtgagtatggagttttcacttactgacccgaggctggagccacacaa

SEQ ID NO: 71314 - DNA, 60 bp, Artificial
  Synthetic oligonucleotide
atactacagaggttgaaaagcccaagtttcttccggatctatatgactataaggagaacc

SEQ ID NO: 71315 - DNA, 60 bp, Artificial
  Synthetic oligonucleotide
gaagtgtcccattgcagggccactgagtacataatgaagggagtgtacatgaacacagcc

SEQ ID NO: 71316 - DNA, 60 bp, Artificial
  Synthetic oligonucleotide
ggggtatacataaatacagccttactcaatgcatcttgtgcagccatggatgatttccaa

SEQ ID NO: 71317 - DNA, 60 bp, Artificial
  Synthetic oligonucleotide
taggagacatgcttctgcgaacttcaattggccaagtgtcgagaccaatgtttctgtatg

SEQ ID NO: 71318 - DNA, 60 bp, Artificial
  Synthetic oligonucleotide
ggagacatgcttctgcgaacttcaattggccaagtgtcgagaccaatgtttctgtatgtg

SEQ ID NO: 71319 - DNA, 60 bp, Artificial
  Synthetic oligonucleotide
ctacggacttcaattggccaagtgtcgagaccaatgtttctgtatgtgagaaccaatgga

SEQ ID NO: 71320 - DNA, 60 bp, Artificial
  Synthetic oligonucleotide
tgactgattctagttggatagaacttgacgaaataggggaagatgtcgccccaatcgagc

SEQ ID NO: 71321 - DNA, 60 bp, Artificial
  Synthetic oligonucleotide
aaacaggtgctaacagagatacaggacattgaaaatgaggagaaaatcccaaagacaaaa

SEQ ID NO: 71322 - DNA, 60 bp, Artificial
  Synthetic oligonucleotide
gatgtggtaaattttgtgagtatggagttttcacttactgacccgatgctggagccacac

SEQ ID NO: 71323 - DNA, 60 bp, Artificial
  Synthetic oligonucleotide
cattgacgaaaggggtgaatcaatagttgtagaatctggtgatccaaatgcactcctaaa

SEQ ID NO: 71324 - DNA, 60 bp, Artificial
  Synthetic oligonucleotide
gacttccaattaatcccaatgataagcaagtgcaggacgagagaaggaaggcggaagaca

SEQ ID NO: 71325 - DNA, 60 bp, Artificial
  Synthetic oligonucleotide
cggacttcaattggccaagtgtcgagaccaatgtttctgtatgtgagaaccaatggaacc

SEQ ID NO: 71326 - DNA, 60 bp, Artificial
  Synthetic oligonucleotide
ctatatgatgcaattgaggagtgcctgattaacgacccctgggttttgcttaatgcgtct

SEQ ID NO: 71327 - DNA, 60 bp, Artificial
  Synthetic oligonucleotide
ggatgatttccaattaatcccaatgataagcaagtgtaggacgaaagaagggaggcggaa

SEQ ID NO: 71328 - DNA, 60 bp, Artificial
  Synthetic oligonucleotide
catgaacacagccttactcaatgcatcttgtgcagccatggatgacttccaattaatccc

SEQ ID NO: 71329 - DNA, 60 bp, Artificial
  Synthetic oligonucleotide
gccagcgcaaaacgctataagcactacattcccttatactggagatcctccatacagcca

SEQ ID NO: 71330 - DNA, 60 bp, Artificial
  Synthetic oligonucleotide
cccttagcatcagaatggaccaggcaatcatggagaaaaacatcatgttgaaagcgaatt

SEQ ID NO: 71331 - DNA, 60 bp, Artificial
  Synthetic oligonucleotide
atcagaatggaccaggcaatcatggagaaaaacatcatgttgaaagcgaacttcagtgtg

SEQ ID NO: 71332 - DNA, 60 bp, Artificial
  Synthetic oligonucleotide
gtttacaggcaatctccaaacattgaaaataagagtacatgaggggtatgaggagttcac

SEQ ID NO: 71333 - DNA, 60 bp, Artificial
  Synthetic oligonucleotide
aaaagcaggactattggtttcagatggaggaccaaatctatacaatatccggaacctcca

SEQ ID NO: 71334 - DNA, 60 bp, Artificial
  Synthetic oligonucleotide
actggtgggatggactccaatcttctgatgacttcgccctaatagtgaatgcacctaatc

SEQ ID NO: 71335 - DNA, 60 bp, Artificial
  Synthetic oligonucleotide
ctggaatgatgatgggcatgtttaacatgctgagcacagtcctaggagtctcgatcttaa

SEQ ID NO: 71336 - DNA, 60 bp, Artificial
  Synthetic oligonucleotide
ggtttcagatggaggaccaaatctatacaatatccggaacctccacatcccggaagtttg

SEQ ID NO: 71337 - DNA, 60 bp, Artificial
  Synthetic oligonucleotide
ggtggaggccatggtatctagggccaggattgatgcacggattgatttcgagtctggaag

SEQ ID NO: 71338 - DNA, 60 bp, Artificial
  Synthetic oligonucleotide
ggcaggactactggtttcagatggaggaccaaatctatacaatatccggaatctccacat

SEQ ID NO: 71339 - DNA, 60 bp, Artificial
  Synthetic oligonucleotide
gttgaatagtttaacagctaatgaatcagggaggctaatagatttccttaaggatgtgat

SEQ ID NO: 71340 - DNA, 60 bp, Artificial
  Synthetic oligonucleotide
aaaccaattcaaaggcaggactactggtttcagatggaggaccaaatctatacaatatcc

SEQ ID NO: 71341 - DNA, 60 bp, Artificial
  Synthetic oligonucleotide
ttgagtcctggaatgatgatgggcatgtttaacatgctgagcacagtcctaggagtctcg

SEQ ID NO: 71342 - DNA, 60 bp, Artificial
  Synthetic oligonucleotide
ggatggactccaatcttctgatgacttcgccctaatagtgaatgcacctaatcatgaggg

SEQ ID NO: 71343 - DNA, 60 bp, Artificial
  Synthetic oligonucleotide
tgttgaccaaagtctgatcatcgctgctagaaacatagtaagaagagcaacggtatcagc

SEQ ID NO: 71344 - DNA, 60 bp, Artificial
  Synthetic oligonucleotide
ggtcactcagacctcagtgccaaggaagcgcaggatgtgatcatggaagttgttttccca

SEQ ID NO: 71345 - DNA, 60 bp, Artificial
  Synthetic oligonucleotide
gcccagcattaagcatcaatgaactgagcaatcttgcaaaaggagagaaggctaatgtgc

SEQ ID NO: 71346 - DNA, 60 bp, Artificial
  Synthetic oligonucleotide
ccccgcactcagaatgaagtggatgatggcaatgaaatacccaattacagcagacaagag

SEQ ID NO: 71347 - DNA, 60 bp, Artificial
  Synthetic oligonucleotide
cgaaccatttcagtctcttgtccctaaggcagccagaagtcaatacagcggattcgtgag

SEQ ID NO: 71348 - DNA, 60 bp, Artificial
  Synthetic oligonucleotide
ccaggaggagaagtgagaaatgatgatgttgaccagagtttgattatcgctgccaggaac

SEQ ID NO: 71349 - DNA, 60 bp, Artificial
  Synthetic oligonucleotide
tgtgatcatggaagttgttttcccaaatgaagtgggggctagaatactaacatcggagtc

SEQ ID NO: 71350 - DNA, 60 bp, Artificial
  Synthetic oligonucleotide
gagatctaatgtcacagtcccgcacccgcgagatactcactaagaccactgtggaccaca

SEQ ID NO: 71351 - DNA, 60 bp, Artificial
  Synthetic oligonucleotide
ggcagaatccaacagaggaacaagccgtggacatatgcaaggcagcaatgggattgagga

SEQ ID NO: 71352 - DNA, 60 bp, Artificial
  Synthetic oligonucleotide
tagtaagaagagcaacggtatcagcagacccattagcatctctcttggaaatgtgccaca

SEQ ID NO: 71353 - DNA, 60 bp, Artificial
  Synthetic oligonucleotide
acaatgtgatgggaatgatcggaatattgcccgacatgaccccaagtactgagatgtcgc

SEQ ID NO: 71354 - DNA, 60 bp, Artificial
  Synthetic oligonucleotide
gagatgtcgctaagggggataagagtcagcaaaatgggagtagatgaatactccagcaca

SEQ ID NO: 71355 - DNA, 60 bp, Artificial
  Synthetic oligonucleotide
agcacggagagggtggtggtgagcattgaccgatttttgagggttcgggatcaacggggg

SEQ ID NO: 71356 - DNA, 60 bp, Artificial
  Synthetic oligonucleotide
cgggactctagcagacttactgacagccagacagcgaccaaaagaattcggatggccatc

SEQ ID NO: 71357 - DNA, 60 bp, Artificial
  Synthetic oligonucleotide
atacttactgacagccagacagcgaccaaaagaattcggatggccattaattaatgttga

SEQ ID NO: 71358 - DNA, 60 bp, Artificial
  Synthetic oligonucleotide
cactaaaatagatctctggtcttacaacgcggagcttcttattgccctggagaaccaaca

SEQ ID NO: 71359 - DNA, 60 bp, Artificial
  Synthetic oligonucleotide
ataagcgatttgaagcaatatgatagtgacgaacctgaattgaggtcactttcaagctgg

SEQ ID NO: 71360 - DNA, 60 bp, Artificial
  Synthetic oligonucleotide
agaggcataagcgatttgaagcaatatgatagtgacgaacctgaattgaggtcactttca

SEQ ID NO: 71361 - DNA, 60 bp, Artificial
  Synthetic oligonucleotide
gacctcccaggaaagggcaacaacacagcaacgctgtgcctgggacatcatgcagtgcca

SEQ ID NO: 71362 - DNA, 60 bp, Artificial
  Synthetic oligonucleotide
gaccttccaggaaagggcaacaacacagcaacgctgtgcctgggacatcatgcagtgcca

SEQ ID NO: 71363 - DNA, 51 bp, Artificial
  Synthetic oligonucleotide
ctatcatcccgtcaggccccctcaaagccgagatcgcacagagactggaag

SEQ ID NO: 71364 - DNA, 60 bp, Artificial
  Synthetic oligonucleotide
gcctgcataggttcaatcagaaatggaacttatgaccatgatgtatacagagacgaagca

SEQ ID NO: 71365 - DNA, 60 bp, Artificial
  Synthetic oligonucleotide
aaactctgatactcctcagagctttcacggaagaaggggcaattgtaggtgaaatctcac

SEQ ID NO: 71366 - DNA, 60 bp, Artificial
  Synthetic oligonucleotide
ggcgagaacaattgggccagaagtttgaagaaataagatggctaattgaagaagtgcgac

SEQ ID NO: 71367 - DNA, 60 bp, Artificial
  Synthetic oligonucleotide
ggcgagaacaattgggccagaagtttgaagaaataagatggctaattgaagaggtgcggc

SEQ ID NO: 71368 - DNA, 60 bp, Artificial
  Synthetic oligonucleotide
caattgggccagaagtttgaagaaataagatggctaattgaagaagtgcgacacagatta

SEQ ID NO: 71369 - DNA, 60 bp, Artificial
  Synthetic oligonucleotide
gggccagaagtttgaagaaataagatggctaattgaagaagtgcgacacagattaaaatc

SEQ ID NO: 71370 - DNA, 57 bp, Artificial
  Synthetic oligonucleotide
tcgccgagaccagaagtccctaagaggaagaggcagcactcttggtctggaaatcga

SEQ ID NO: 71371 - DNA, 60 bp, Artificial
  Synthetic oligonucleotide
ggcttcgccgagaccaaaagtccctaaggggaagaggcagcactcttggtctggaaatcg

SEQ ID NO: 71372 - DNA, 60 bp, Artificial
  Synthetic oligonucleotide
gaaacggaaaatggcgagaacaattgggccagaagtttgaagaaataagatggctaattg

SEQ ID NO: 71373 - DNA, 60 bp, Artificial
  Synthetic oligonucleotide
aacggaaaatggcgagaacaattgggccagaagtttgaagaaataagatggctaattgaa

SEQ ID NO: 71374 - DNA, 51 bp, Artificial
  Synthetic oligonucleotide
ctccttagagctttcacggaagaaggggcaattgtaggtgaaatctcaccg

SEQ ID NO: 71375 - DNA, 60 bp, Artificial
  Synthetic oligonucleotide
gttcgagtctctgaagctctacagagattcgcttggagaagcactaatgagaacgggaga

SEQ ID NO: 71376 - DNA, 50 bp, Artificial
  Synthetic oligonucleotide
agtctctgaagctctacagagattcgcttggagaagcactaatgagaacg

SEQ ID NO: 71377 - DNA, 60 bp, Artificial
  Synthetic oligonucleotide
agtctctgaagctctacagagattcgcttggagaagcactaatgagaacgggagacctcc

SEQ ID NO: 71378 - DNA, 60 bp, Artificial
  Synthetic oligonucleotide
atggatccaaatactgtgtcaagctttcaggtagactgctttctttggcatgtccgcaaa

SEQ ID NO: 71379 - DNA, 60 bp, Artificial
  Synthetic oligonucleotide
actctgatactcctcagagctttcacggaagaaggggcaattgtaggtgaaatctcacca

SEQ ID NO: 71380 - DNA, 54 bp, Artificial
  Synthetic oligonucleotide
atactccttagagctttcacggaagaaggggcaattgtaggtgaaatctcaccg

SEQ ID NO: 71381 - DNA, 52 bp, Artificial
  Synthetic oligonucleotide
actccttagagctttcatggaagaaggggcaattgtaggtgaaatctcaccg

SEQ ID NO: 71382 - DNA, 60 bp, Artificial
  Synthetic oligonucleotide
acatttgggtgacaagagaaccttatgtgtcatgcgattctggcaagtgttatcaatttg

SEQ ID NO: 71383 - DNA, 54 bp, Artificial
  Synthetic oligonucleotide
acatttgggtgacaagagaaccttatgtgtcatgtgatcctgacaagtgttatc

SEQ ID NO: 71384 - DNA, 60 bp, Artificial
  Synthetic oligonucleotide
ggacccaggagtcggaatgcgtttgtatcaatggaacttgtacagtagtaatgactgacg

SEQ ID NO: 71385 - DNA, 55 bp, Artificial
  Synthetic oligonucleotide
tcctggtgtcagatgtgtctgcagagacaactggaaaggctccaataggcccatc

SEQ ID NO: 71386 - DNA, 60 bp, Artificial
  Synthetic oligonucleotide
tatcctcgatattctggtgtcagatgtgtctgcagagacaactggaaaggctccaatagg

SEQ ID NO: 71387 - DNA, 60 bp, Artificial
  Synthetic oligonucleotide
cagcatgtcgaggagtgctcctgttatcctcgatatcctggtgtcagatgtgtctgcaga

SEQ ID NO: 71388 - DNA, 55 bp, Artificial
  Synthetic oligonucleotide
accctggtgtcagatgtgtctgcagagacaactggaaaggctccaataggcccat

SEQ ID NO: 71389 - DNA, 53 bp, Artificial
  Synthetic oligonucleotide
tcagaagtagaagggagaattcaggacctcgagaaatatgtcgaggacactaa

SEQ ID NO: 71390 - DNA, 60 bp, Artificial
  Synthetic oligonucleotide
gagagcatctgcagggcaaattagcgtacagcccacattctctgtgcagagaaacctccc

SEQ ID NO: 71391 - DNA, 60 bp, Artificial
  Synthetic oligonucleotide
tgaaaggagttggaacaatggtgatggaattgattcggatgatcaaacgagggatcaatg

SEQ ID NO: 71392 - DNA, 60 bp, Artificial
  Synthetic oligonucleotide
cagcccacattctctgtgcagagaaacctcccatttgagagagcaaccattatggcggca

SEQ ID NO: 71393 - DNA, 60 bp, Artificial
  Synthetic oligonucleotide
cctgagtctatgagggaagaatatcgaaaggaacagcagagtgctgtggatgctgacgac

SEQ ID NO: 71394 - DNA, 60 bp, Artificial
  Synthetic oligonucleotide
cgggtccagaccctgggtaaggggtctgtctagtagaataagcatctattggacaatagt

SEQ ID NO: 71395 - DNA, 60 bp, Artificial
  Synthetic oligonucleotide
gtggtaaactttgtgagcatggagttttctctcactgacccgaggcttgagccacataaa

SEQ ID NO: 71396 - DNA, 59 bp, Artificial
  Synthetic oligonucleotide
aacaggaacagcagagtgctgtggatgttgacgatggtcattttgtcaacatagagctg

SEQ ID NO: 71397 - DNA, 60 bp, Artificial
  Synthetic oligonucleotide
tgaatcagctgatatgagcattggagtgacagtgataaagaacaacatgataaacaatga

SEQ ID NO: 71398 - DNA, 60 bp, Artificial
  Synthetic oligonucleotide
ggattcatcatgtgggcctgccagagaggcaacattaggtgcaacatttgcatttgagta

SEQ ID NO: 71399 - DNA, 60 bp, Artificial
  Synthetic oligonucleotide
gaataaatgaatcagctgatatgagcattggagtaacagtgataaagaacaacatgataa

SEQ ID NO: 71400 - DNA, 60 bp, Artificial
  Synthetic oligonucleotide
gagtaaatgaatcagctgatatgagcattggagtaacagtgataaagaacaacatgataa

SEQ ID NO: 71401 - DNA, 60 bp, Artificial
  Synthetic oligonucleotide
gagcattggagtaacagtgataaagaacaacatgataaacaatgaccttggaccggcaac

SEQ ID NO: 71402 - DNA, 60 bp, Artificial
  Synthetic oligonucleotide
cagatggaaactgatggggaacgccagaatgcaactgagattagggcatccgtcgggagg

SEQ ID NO: 71403 - DNA, 60 bp, Artificial
  Synthetic oligonucleotide
gtacatgttcgagagtaaaagaatgaagctccgaacacaaataccggcagaaatgctagc

SEQ ID NO: 71404 - DNA, 60 bp, Artificial
  Synthetic oligonucleotide
cggctgcattgaaggcaagctttctcaaatgtccaaagaagtgaatgccaaaattgaacc

SEQ ID NO: 71405 - DNA, 60 bp, Artificial
  Synthetic oligonucleotide
gaacggctgcattgaaggcaagctttctcaaatgtccaaagaagtgaatgccaaaattga

SEQ ID NO: 71406 - DNA, 60 bp, Artificial
  Synthetic oligonucleotide
gattatagcattgtttccagttatgtgtgctcaggacttgttggagacacacctagaaaa

SEQ ID NO: 71407 - DNA, 60 bp, Artificial
  Synthetic oligonucleotide
aagattatagcattgtttccagttatgtgtgctcaggacttgttggagacacacctagaa

SEQ ID NO: 71408 - DNA, 60 bp, Artificial
  Synthetic oligonucleotide
ctgagtgacatccatatcatggcgtctcaaggcaccaaacgatcttatgaacagatggaa

SEQ ID NO: 71409 - DNA, 60 bp, Artificial
  Synthetic oligonucleotide
cactgagtgacattcacatcatggcgtctcaaggcaccaaacgatcttatgaacaaatgg

SEQ ID NO: 71410 - DNA, 60 bp, Artificial
  Synthetic oligonucleotide
gcaaaacgctataagcactacattcccttatactggagatcctccatacagccatggaac

SEQ ID NO: 71411 - DNA, 60 bp, Artificial
  Synthetic oligonucleotide
agtgtgtgccacttgtgagcagattgctgattcacagcatagatctcacaggcaaatggc

SEQ ID NO: 71412 - DNA, 60 bp, Artificial
  Synthetic oligonucleotide
atggaaatggggacccgaataacatggatagagcagtcaaattatacaagaagctaaaaa

SEQ ID NO: 71413 - DNA, 60 bp, Artificial
  Synthetic oligonucleotide
ataacgttccatggggccaaggaggtgtcactaagctactcaactggtgcacttgccagt

SEQ ID NO: 71414 - DNA, 60 bp, Artificial
  Synthetic oligonucleotide
aagctcaaaagggaaataacgttccatggggccaaggaggtgtcactaagctactcaact

SEQ ID NO: 71415 - DNA, 60 bp, Artificial
  Synthetic oligonucleotide
gagagggaatcacggggtgaaaggctgggcctttgatgatggaaatgacatatggatggg

SEQ ID NO: 71416 - DNA, 54 bp, Artificial
  Synthetic oligonucleotide
gaagagttctctgagatcacgaagatctgttccaccattgaagagctcagacgg

SEQ ID NO: 71417 - DNA, 60 bp, Artificial
  Synthetic oligonucleotide
gaaagaagagttcgccgagatcatgaagatctgttccaccattgaagagctcagacggca

SEQ ID NO: 71418 - DNA, 60 bp, Artificial
  Synthetic oligonucleotide
aaagaagaatttactgagatcatgaagatctgttccaccattgaagagctcagacggcaa

SEQ ID NO: 71419 - DNA, 60 bp, Artificial
  Synthetic oligonucleotide
gaaggaggagttcgctgagatcatgaagatctgttccaccattgaagagctcagacggca

SEQ ID NO: 71420 - DNA, 60 bp, Artificial
  Synthetic oligonucleotide
tgatggggtgcttgttgacagtattggttcatggtctcaaaatatcctcagaactcagga

SEQ ID NO: 71421 - DNA, 60 bp, Artificial
  Synthetic oligonucleotide
gatgggatgcttgttgacagtattggttcatggtctcaaaatatcctcagaactcaggag

SEQ ID NO: 71422 - DNA, 60 bp, Artificial
  Synthetic oligonucleotide
gggtgcttgttgacagtattggttcatggtctcaaaatatcctcagaactcaggagtcag

SEQ ID NO: 71423 - DNA, 58 bp, Artificial
  Synthetic oligonucleotide
aaaacttcccggaaatgacaacagcacagcaacgctgtgcctgggacatcatgcagtg

SEQ ID NO: 71424 - DNA, 59 bp, Artificial
  Synthetic oligonucleotide
agcgggaaactgaataggttaatcgagaaaacgaacgagaaattccatcaaatcgaaaa

SEQ ID NO: 71425 - DNA, 60 bp, Artificial
  Synthetic oligonucleotide
agcgggaaactgaataggttaatcgagaaaacgaacgagaaattccatcaaatcgaaaaa

SEQ ID NO: 71426 - DNA, 60 bp, Artificial
  Synthetic oligonucleotide
aacggaaaactgaataggttaatcgagaaaacgaacgagaaattccatcaaatcgaaaaa

SEQ ID NO: 71427 - DNA, 57 bp, Artificial
  Synthetic oligonucleotide
aagaggtgtcactaagctactcaactggtgcacttgccagttgcatgggcctcatat

SEQ ID NO: 71428 - DNA, 60 bp, Artificial
  Synthetic oligonucleotide
ctgaagtcaggatacaaagattggatcctatggatttcctttgccatatcatgctttctg

SEQ ID NO: 71429 - DNA, 60 bp, Artificial
  Synthetic oligonucleotide
ataagacagggacatttgaattcacaagctttttttatcgctatggatttgtggctaatt

SEQ ID NO: 71430 - DNA, 60 bp, Artificial
  Synthetic oligonucleotide
ccagttggaatttccagcatggtggaggccatggtatctagggccaggattgatgcaagg

SEQ ID NO: 71431 - DNA, 60 bp, Artificial
  Synthetic oligonucleotide
tgacaaaggtaataggtccggttattctggtattttctctgttgaaggcaaaagctgcac

SEQ ID NO: 71432 - DNA, 60 bp, Artificial
  Synthetic oligonucleotide
gttgacaaaggtaataggtccggttattctggtattttctctgttgaaggcaaaagctgc

SEQ ID NO: 71433 - DNA, 51 bp, Artificial
  Synthetic oligonucleotide
catgttcaacatgctaagtacagttttgggagtctcgatactgaatcttgg

SEQ ID NO: 71434 - DNA, 60 bp, Artificial
  Synthetic oligonucleotide
cctttgacatgagtaaagaaggatcttatttcttcggagacaatgcagaggaatatgaca

SEQ ID NO: 71435 - DNA, 60 bp, Artificial
  Synthetic oligonucleotide
ttcacgctacctaactgacatgactcttgaagaaatgtcaagagactggttcatgctcat

SEQ ID NO: 71436 - DNA, 60 bp, Artificial
  Synthetic oligonucleotide
tgtcgcctctgactaaggggattttggggtttgtgttcacgctcaccgtgcccagtgagc

SEQ ID NO: 71437 - DNA, 60 bp, Artificial
  Synthetic oligonucleotide
tgtgcatagcatggtccagctcaagttgtcatgatgggaaagcatggttgcatgtctgtg

SEQ ID NO: 71438 - DNA, 60 bp, Artificial
  Synthetic oligonucleotide
gggttacttcaaaatacgaagtgggaaaagctcaataatgaggtcagatgcacccattgg

SEQ ID NO: 71439 - DNA, 60 bp, Artificial
  Synthetic oligonucleotide
atgatgtgccggattatgcctcccttaggtcactagttgcctcatccggcaccctggagt

SEQ ID NO: 71440 - DNA, 60 bp, Artificial
  Synthetic oligonucleotide
gtgccggattatgcctcccttaggtcactagttgcctcatccggcaccctggagtttacc

SEQ ID NO: 71441 - DNA, 60 bp, Artificial
  Synthetic oligonucleotide
gaggagtgcctgattaacgacccctgggttttgcttaatgcgtcttggttcaactccttc

SEQ ID NO: 71442 - DNA, 60 bp, Artificial
  Synthetic oligonucleotide
ctttgtgcggcaatgcttcaatccaatgatcgtcgagcttgcggaaaaagcaatgaagga

SEQ ID NO: 71443 - DNA, 60 bp, Artificial
  Synthetic oligonucleotide
attgggaaagtatgcaggaccttactggcaaagtctgtattcaatagcctatacgcatcc

SEQ ID NO: 71444 - DNA, 60 bp, Artificial
  Synthetic oligonucleotide
caatgaaggaacatggagaagacccgaaaattgaaacaaacaaatttgctgcaatatgca

SEQ ID NO: 71445 - DNA, 60 bp, Artificial
  Synthetic oligonucleotide
gcggaaaaagcaatgaaagaacatggggaagacccgaaaattgaaacaaacaaatttgct

SEQ ID NO: 71446 - DNA, 60 bp, Artificial
  Synthetic oligonucleotide
ggccactaaggcagattacactcttgacgaggagagcagagcaagaatcaagaccagact

SEQ ID NO: 71447 - DNA, 60 bp, Artificial
  Synthetic oligonucleotide
tccattgggaaagtatgcaggaccttactggcaaagtcagtattcaatagcctgtacgca

SEQ ID NO: 71448 - DNA, 60 bp, Artificial
  Synthetic oligonucleotide
aaagaacatggggaagacccgaaaattgaaacaaacaaatttgctgcaatatgtacacac

SEQ ID NO: 71449 - DNA, 60 bp, Artificial
  Synthetic oligonucleotide
ggagaagacccgaaaattgaaacaaacaaatttgctgcaatatgcacacatctggaagtc

SEQ ID NO: 71450 - DNA, 60 bp, Artificial
  Synthetic oligonucleotide
aaggagaaccgattcattgaaattggtgtaacaagaagagaagtccacatatactaccta

SEQ ID NO: 71451 - DNA, 60 bp, Artificial
  Synthetic oligonucleotide
aggagaatcgattcattgaaattggtgtaacaagaagagaagtccacatatactacctag

SEQ ID NO: 71452 - DNA, 60 bp, Artificial
  Synthetic oligonucleotide
aggagaaccgattcattgaaattggtgtaacaagaagagaagtccacatatactacctag

SEQ ID NO: 71453 - DNA, 60 bp, Artificial
  Synthetic oligonucleotide
ggagaaccgattcattgaaattggtgtaacaagaagagaagtccacatatactacctaga

SEQ ID NO: 71454 - DNA, 60 bp, Artificial
  Synthetic oligonucleotide
tggggaagaaatggccactaaggcagattacactcttgacgaggagagcagagcaagaat

SEQ ID NO: 71455 - DNA, 60 bp, Artificial
  Synthetic oligonucleotide
ggggaagaaatggccactaaggcagattacactcttgacgaggagagcagagcaagaatt

SEQ ID NO: 71456 - DNA, 60 bp, Artificial
  Synthetic oligonucleotide
gtgcactgaacttaaactcagtgattatgaggggcggttgatccagaacagcttgacaat

SEQ ID NO: 71457 - DNA, 60 bp, Artificial
  Synthetic oligonucleotide
cttgcatagagtcaatcaggaatgggacctatgatcatgacatatacagggatgaagcac

SEQ ID NO: 71458 - DNA, 60 bp, Artificial
  Synthetic oligonucleotide
ataattctattaatcatgaagactattattgttctgagttgttttttctgtctggctttc

SEQ ID NO: 71459 - DNA, 60 bp, Artificial
  Synthetic oligonucleotide
tcaacagggaaaatatgcaacaatcctcacagaattctcgatggaagagactgcacatta

SEQ ID NO: 71460 - DNA, 60 bp, Artificial
  Synthetic oligonucleotide
gaaaactgaaccgagtaatcgagaaaacaaatgaaaagtttcatcagattgagaaggaat

SEQ ID NO: 71461 - DNA, 60 bp, Artificial
  Synthetic oligonucleotide
gacgtgccagactatgcatctctcaggtctctagtggcctcatcaggaaccctagagttc

SEQ ID NO: 71462 - DNA, 60 bp, Artificial
  Synthetic oligonucleotide
ccaaaatagatctatggtcttacaatgcggaacttcttgtggcgctggaaaaccagcata

SEQ ID NO: 71463 - DNA, 60 bp, Artificial
  Synthetic oligonucleotide
ggtcttacaatgcggaacttcttgtggcgctggaaaaccagcatacaattgatctgactg

SEQ ID NO: 71464 - DNA, 60 bp, Artificial
  Synthetic oligonucleotide
tgcaacaatcctcacagaattctcgatggaagagactgcacattaatggatgctctacta

SEQ ID NO: 71465 - DNA, 60 bp, Artificial
  Synthetic oligonucleotide
tgacaatgcttgcatagagtcaatcaggaatgggacctatgatcatgacatatacaggga

SEQ ID NO: 71466 - DNA, 60 bp, Artificial
  Synthetic oligonucleotide
gatctgactgattcagaaatgaacaaactatttgagaaaacaagaagacagctaagggag

SEQ ID NO: 71467 - DNA, 60 bp, Artificial
  Synthetic oligonucleotide
cagggaaaatatgcaacaatcctcacagaattctcgatggaagagactgcacattaatgg

SEQ ID NO: 71468 - DNA, 60 bp, Artificial
  Synthetic oligonucleotide
cctatgatcatgacatatacagggatgaagcactaaacaatcgattccagattaagggag

SEQ ID NO: 71469 - DNA, 60 bp, Artificial
  Synthetic oligonucleotide
catgacatatacagggatgaagcactaaacaatcgattccagattaagggagtggaactg

SEQ ID NO: 71470 - DNA, 60 bp, Artificial
  Synthetic oligonucleotide
tcgagaaattcttccctagcagttcatacaggaggccagttggaatttccagcatggtgg

SEQ ID NO: 71471 - DNA, 60 bp, Artificial
  Synthetic oligonucleotide
ctcacttgaggaatgacacagatgtggtaaactttgtgagcatggagttttctctcactg

SEQ ID NO: 71472 - DNA, 60 bp, Artificial
  Synthetic oligonucleotide
ctcattgttcaggcacttagggacaacctggaacctgggaccttcgaccttggagggcta

SEQ ID NO: 71473 - DNA, 60 bp, Artificial
  Synthetic oligonucleotide
cgctagcaagctggatccagagtgaattcaacaaggcatgtgagttgaccgattcgagct

SEQ ID NO: 71474 - DNA, 60 bp, Artificial
  Synthetic oligonucleotide
ccgaacaatggcctggacagtggtgaatagcatctgcaacaccacaggggtcgagaagcc

SEQ ID NO: 71475 - DNA, 50 bp, Artificial
  Synthetic oligonucleotide
atgatggaccaggtgagggaaagccggaatcctgggaatgctgaaattga

SEQ ID NO: 71476 - DNA, 50 bp, Artificial
  Synthetic oligonucleotide
atgatggaccaagtgagggaaagccggaatcctgggaatgctgaaattga

SEQ ID NO: 71477 - DNA, 60 bp, Artificial
  Synthetic oligonucleotide
gggaggggtactccttagtcggaattgatcctttccgtctgctccaaaacagtcaagtct

SEQ ID NO: 71478 - DNA, 53 bp, Artificial
  Synthetic oligonucleotide
agtcaagtcttcagtcttatcagaccaaacgaaaatccagcacataaaagtca

SEQ ID NO: 71479 - DNA, 51 bp, Artificial
  Synthetic oligonucleotide
gtcaagtcttcagtcttatcagaccaaacgaaaatccagcacataaaagtc

SEQ ID NO: 71480 - DNA, 52 bp, Artificial
  Synthetic oligonucleotide
gtcaagtcttcagtcttatcagaccaaacgaaaacccagcacataaaagtca

SEQ ID NO: 71481 - DNA, 60 bp, Artificial
  Synthetic oligonucleotide
gagaacagaaatcataaggatgatggaaaatgccagacctgaagatgtgtctttccaggg

SEQ ID NO: 71482 - DNA, 60 bp, Artificial
  Synthetic oligonucleotide
tcaaggggaaattccaaacagcagcacaacgagcaatgatggaccaagtgagggaaagcc

SEQ ID NO: 71483 - DNA, 60 bp, Artificial
  Synthetic oligonucleotide
ggcgtcaagcaaataatggagaagacgcaactgctggtctcactcatttgatgatctggc

SEQ ID NO: 71484 - DNA, 60 bp, Artificial
  Synthetic oligonucleotide
gatgtgcactgaactcaaactcagtgactatgaagggagactaatccaaaacagcatcac

SEQ ID NO: 71485 - DNA, 60 bp, Artificial
  Synthetic oligonucleotide
gcgtacagcccacgttctctgtacagagaaacctcccattcgagagagcaaccattatgg

SEQ ID NO: 71486 - DNA, 60 bp, Artificial
  Synthetic oligonucleotide
acactgaaggcagaacttcagacatgagaactgagatcataagaatgatggaaaatgcca

SEQ ID NO: 71487 - DNA, 60 bp, Artificial
  Synthetic oligonucleotide
attatagcattgtttccagttatgtgtgctcaggacttgttggagacacacccagaaaaa

SEQ ID NO: 71488 - DNA, 59 bp, Artificial
  Synthetic oligonucleotide
attatagcattgtttccagttatgtgtgctcaggacttgttggagacacacccagaaaa

SEQ ID NO: 71489 - DNA, 57 bp, Artificial
  Synthetic oligonucleotide
tatagcattgtttccagttatgtgtgctcaggacttgttggagacacacccagaaaa

SEQ ID NO: 71490 - DNA, 52 bp, Artificial
  Synthetic oligonucleotide
cattgtttccagttatgtgtgctcaggacttgttggagacacacccagaaaa

SEQ ID NO: 71491 - DNA, 60 bp, Artificial
  Synthetic oligonucleotide
aagattatagcattgtttccagttatgtgtgctcaggacttgttggagacacacccagga

SEQ ID NO: 71492 - DNA, 60 bp, Artificial
  Synthetic oligonucleotide
gattatagcattgtttccagttatgtgtgctcaggacttgttggagacacacccaggaaa

SEQ ID NO: 71493 - DNA, 60 bp, Artificial
  Synthetic oligonucleotide
gcttacaggcaatatccaaacattgaaaataagagtacatgaggggtatgaggagttcac

SEQ ID NO: 71494 - DNA, 60 bp, Artificial
  Synthetic oligonucleotide
gggagaattcaggacctcgagaaatatgttgaagacactaaaatagatctctggtcgtac

SEQ ID NO: 71495 - DNA, 60 bp, Artificial
  Synthetic oligonucleotide
gcgtcttggttcaactccttccttgtgcatgcactgaaatagttgtggcaatgctactac

SEQ ID NO: 71496 - DNA, 60 bp, Artificial
  Synthetic oligonucleotide
ttccagcgcaaaatgccataagcacaacattcccttatactggagatcctccatacagcc

SEQ ID NO: 71497 - DNA, 60 bp, Artificial
  Synthetic oligonucleotide
gagatctaatgtcgcagtctcgcactcgcgagatactcactaagaccactgtggaccata

SEQ ID NO: 71498 - DNA, 53 bp, Artificial
  Synthetic oligonucleotide
agtctctaaaactctacagagattcgcttggagaagcagtaatgagaatgggg

SEQ ID NO: 71499 - DNA, 60 bp, Artificial
  Synthetic oligonucleotide
atacgcatccccacaactcgagggattttcagctgaatcaagaaagttgcttctaattgt

SEQ ID NO: 71500 - DNA, 60 bp, Artificial
  Synthetic oligonucleotide
tgaacaaataacctttatgcaagccttacaactactacttgaagtggagcaagagataag

SEQ ID NO: 71501 - DNA, 60 bp, Artificial
  Synthetic oligonucleotide
cacagagaatagttttgaacaaataacctttatgcaagccttacaactactacttgaagt

SEQ ID NO: 71502 - DNA, 60 bp, Artificial
  Synthetic oligonucleotide
gatcttcgatcggctggagacactaatactactcagagctttcactgaagaaggagcaat

SEQ ID NO: 71503 - DNA, 51 bp, Artificial
  Synthetic oligonucleotide
gaccaggcgattatggataagaacatcatactgaaagcaaatttcagtgtg

SEQ ID NO: 71504 - DNA, 60 bp, Artificial
  Synthetic oligonucleotide
gaccaggcgattatggataagaacatcatactgaaagcaaatttcagtgtgatcttcgat

SEQ ID NO: 71505 - DNA, 60 bp, Artificial
  Synthetic oligonucleotide
cgctacctaactgacatgactcttgaagagatgtcaagagactggtttatgctcatgcca

SEQ ID NO: 71506 - DNA, 60 bp, Artificial
  Synthetic oligonucleotide
gttcatcatgtgggcctgccaaaaaggcaacattaggtgcaacatttgcatttgagtgca

SEQ ID NO: 71507 - DNA, 60 bp, Artificial
  Synthetic oligonucleotide
ggttcatcatgtgggcctgccaaaaaggcaacattaggtgcaacatttgcatttgagtgc

SEQ ID NO: 71508 - DNA, 60 bp, Artificial
  Synthetic oligonucleotide
tatacagagacgaagcattaaacaaccggttccagatcaaaggtgttgagctgaagtcgg

SEQ ID NO: 71509 - DNA, 60 bp, Artificial
  Synthetic oligonucleotide
catgatgtatacagagacgaagcattaaacaaccggttccagatcaaaggtgttgagctg

SEQ ID NO: 71510 - DNA, 60 bp, Artificial
  Synthetic oligonucleotide
ttcactggaaatacggagggaagaacttcagacatgagggcagaaatcataagaatgatg

SEQ ID NO: 71511 - DNA, 60 bp, Artificial
  Synthetic oligonucleotide
ggataatatgggatcgagcactcttgaactgagaagcgggtactgggccataaggaccag

SEQ ID NO: 71512 - DNA, 60 bp, Artificial
  Synthetic oligonucleotide
atacggagggaagaacctcagacatgagggcagaaatcataagaatgatggaaggtgcaa

SEQ ID NO: 71513 - DNA, 60 bp, Artificial
  Synthetic oligonucleotide
tggtctaactcacatgatgatctggcattccaatttgaatgatacaacataccagagaac

SEQ ID NO: 71514 - DNA, 60 bp, Artificial
  Synthetic oligonucleotide
caaaatcatggcgtcccaaggcaccaaacggtcatatgaacagatggagactgatgggga

SEQ ID NO: 71515 - DNA, 60 bp, Artificial
  Synthetic oligonucleotide
cggtctaactcacatgatgatctggcattccaatttgaatgatacaacataccagaggac

SEQ ID NO: 71516 - DNA, 60 bp, Artificial
  Synthetic oligonucleotide
aaaatcatggcgtcccaaggcaccaaacggtcatatgaacagatggagactgatggggaa

SEQ ID NO: 71517 - DNA, 60 bp, Artificial
  Synthetic oligonucleotide
tggtctaactcacatgatgatctggcattccaatttgaatgacacaacataccagaggac

SEQ ID NO: 71518 - DNA, 60 bp, Artificial
  Synthetic oligonucleotide
tggcctaactcacatgatgatctggcattccaatttgaatgatacaacataccagaggac

SEQ ID NO: 71519 - DNA, 58 bp, Artificial
  Synthetic oligonucleotide
cagttattctgctggtgcacttgccagttgcatgggcctcatatacaataggatgggg

SEQ ID NO: 71520 - DNA, 58 bp, Artificial
  Synthetic oligonucleotide
cagttattctgctggtgcacttgccagttgcatgggcctcatatacaatagaatgggg

SEQ ID NO: 71521 - DNA, 60 bp, Artificial
  Synthetic oligonucleotide
ctggtgcacttgccagttgcatgggcctcatatacaacaggatgggaacagtgaccacag

SEQ ID NO: 71522 - DNA, 60 bp, Artificial
  Synthetic oligonucleotide
ctggtgcacttgccagttgcatgggcctcatatacaacagaatggggacagtgaccacag

SEQ ID NO: 71523 - DNA, 60 bp, Artificial
  Synthetic oligonucleotide
tggtgcacttgccagttgcatgggcctcatatacaaccggatggggactgtgaccactga

SEQ ID NO: 71524 - DNA, 60 bp, Artificial
  Synthetic oligonucleotide
gacacaatacatgatagaaccccttatcgaaccctgttgatgaatgagttgggtgttcca

SEQ ID NO: 71525 - DNA, 60 bp, Artificial
  Synthetic oligonucleotide
tgggctcataacatcctccgaacccaggaatcagagtgtgtttgtatcaatggtacctgc

SEQ ID NO: 71526 - DNA, 60 bp, Artificial
  Synthetic oligonucleotide
caactgctagtttcatttacgacggaaagcttgtagacagtattagctcgtgggctcata

SEQ ID NO: 71527 - DNA, 60 bp, Artificial
  Synthetic oligonucleotide
gggtgtaccatttcatttggggaccaggcaagtatgtatagcatggtccagttcaagttg

SEQ ID NO: 71528 - DNA, 60 bp, Artificial
  Synthetic oligonucleotide
taccaaaagaagccaacaaactgtaatcccgaatatcgggtctagaccctgggtaagggg

SEQ ID NO: 71529 - DNA, 60 bp, Artificial
  Synthetic oligonucleotide
caggatacaaagattggatcctatggatttcctttgccatatcatgctttctgctttgtg

SEQ ID NO: 71530 - DNA, 60 bp, Artificial
  Synthetic oligonucleotide
catttgggtcacgagggaaccttatgtgtcatgcgatcctagcaagtgttatcagtttgc

SEQ ID NO: 71531 - DNA, 54 bp, Artificial
  Synthetic oligonucleotide
gaaagaggcaacactctcggtctagacatcaaagcagccacccatgttggaaag

SEQ ID NO: 71532 - DNA, 60 bp, Artificial
  Synthetic oligonucleotide
tactgacagccagacagcgaccaaaagaattcggttggccatcaattagtgtcggattgt

SEQ ID NO: 71533 - DNA, 60 bp, Artificial
  Synthetic oligonucleotide
caccgaagagggagcagttgttggcgaaatctcaccattgccttcttttccaggacatac

SEQ ID NO: 71534 - DNA, 60 bp, Artificial
  Synthetic oligonucleotide
tcaccgaagagggagcagttgttggcgaaatctcaccattgccttcttttccaggacata

SEQ ID NO: 71535 - DNA, 60 bp, Artificial
  Synthetic oligonucleotide
ggaaaagagcaacagctatactcagaaaagcaaccaggagattggttcagctcatagtga

SEQ ID NO: 71536 - DNA, 60 bp, Artificial
  Synthetic oligonucleotide
ggaaccgttccattctcaataccagccaaaggggaattcttgaggatgaacaaatgtacc

SEQ ID NO: 71537 - DNA, 60 bp, Artificial
  Synthetic oligonucleotide
ttaataatcactcactgagtgacattcacatcatggcgtctcaaggcaccaaacgatctt

SEQ ID NO: 71538 - DNA, 60 bp, Artificial
  Synthetic oligonucleotide
aatcactcaccgagtgacatccacatcatggcgtctcaaggcaccaaacgatcttatgag

SEQ ID NO: 71539 - DNA, 60 bp, Artificial
  Synthetic oligonucleotide
tatcactcactgagtgacattcacatcatggcgtctcaaggcaccaaacgatcttatgaa

SEQ ID NO: 71540 - DNA, 60 bp, Artificial
  Synthetic oligonucleotide
tgatgggcatgttcaacatgctaagtacagttttgggagtctcgattctcaatctagggc

SEQ ID NO: 71541 - DNA, 60 bp, Artificial
  Synthetic oligonucleotide
atgaaaagaaggccaaactggcaaatgttgtgagaaaaatgatgactaattcacaagaca

SEQ ID NO: 71542 - DNA, 60 bp, Artificial
  Synthetic oligonucleotide
acgagaaattccatcaaatcgaaaaggaattctcagaagtagaagggagaatccaagacc

SEQ ID NO: 71543 - DNA, 60 bp, Artificial
  Synthetic oligonucleotide
acaaggagacgtagtgttggtaatgaaacggaaacgggactctagcatacttactgacag

SEQ ID NO: 71544 - DNA, 60 bp, Artificial
  Synthetic oligonucleotide
gaaatgagacgctgccttctccaatcccttcaacagattgagagcatgatcgaggccgag

SEQ ID NO: 71545 - DNA, 60 bp, Artificial
  Synthetic oligonucleotide
tgaaatggggtatggaaatgagacgctgccttctccaatctcttcaacagattgagagca

SEQ ID NO: 71546 - DNA, 60 bp, Artificial
  Synthetic oligonucleotide
ttactaagggctttcaccgaagagggagcaattgttggcgaaatctcaccattgccttct

SEQ ID NO: 71547 - DNA, 60 bp, Artificial
  Synthetic oligonucleotide
ctggttggaatcaatatgagcaagaagaaatcttacataaataggacaggaacatttgaa

SEQ ID NO: 71548 - DNA, 51 bp, Artificial
  Synthetic oligonucleotide
ctagggccaggattgatgcacggattgatttcgagtctggaaggattaaga

SEQ ID NO: 71549 - DNA, 54 bp, Artificial
  Synthetic oligonucleotide
gaaacactggcgaggagcatctgtgagaaacttgagcagtctgggcttccagta

SEQ ID NO: 71550 - DNA, 60 bp, Artificial
  Synthetic oligonucleotide
gaattcttgaggatgaacaaatgtaccagaagtgttgcaacctattcgagaaattcttcc

SEQ ID NO: 71551 - DNA, 65 bp, Artificial
  Synthetic oligonucleotide
ctggttggaatcaatatgagcaagaagaaatcttacataaataggacaggaacatttgaattcac

SEQ ID NO: 71552 - DNA, 60 bp, Artificial
  Synthetic oligonucleotide
caggaggccagttggaatttccagcatggtggaggccatggtttctagggccaggattga

SEQ ID NO: 71553 - DNA, 54 bp, Artificial
  Synthetic oligonucleotide
ggaagaggcaatactctcggtctagacatcaaagcagccacccatgttggaaag

SEQ ID NO: 71554 - DNA, 56 bp, Artificial
  Synthetic oligonucleotide
actacttcacagcagaagtgtcccattgcagggccactgagtacataatgaagggg

SEQ ID NO: 71555 - DNA, 60 bp, Artificial
  Synthetic oligonucleotide
cttcacagcagaagtgtcccattgcagggccactgagtacataatgaagggagtgtacat

SEQ ID NO: 71556 - DNA, 60 bp, Artificial
  Synthetic oligonucleotide
actacttcacagcagaagtgtcccattgcagggccactgagtacataatgaagggggtat

SEQ ID NO: 71557 - DNA, 60 bp, Artificial
  Synthetic oligonucleotide
cttcacagcagaagtgtcccattgcagggccactgagtacataatgaaaggagtgtacat

SEQ ID NO: 71558 - DNA, 60 bp, Artificial
  Synthetic oligonucleotide
cgagaagacgaacgagaaattccatcaaatcgaaaaggagttctcagaagtagaaggaag

SEQ ID NO: 71559 - DNA, 60 bp, Artificial
  Synthetic oligonucleotide
gagaagacgaacgagaaattccatcaaatcgaaaaggaattctcagaagtagaagggaga

SEQ ID NO: 71560 - DNA, 60 bp, Artificial
  Synthetic oligonucleotide
ctatcatcccatcaggccccctcaaagccgagatcgcgcagagactggaaggtgtctttg

SEQ ID NO: 71561 - DNA, 60 bp, Artificial
  Synthetic oligonucleotide
aggccccctcaaagccgagatcgcgcagagacttgaagatgtgtttgcagggaagaacac

SEQ ID NO: 71562 - DNA, 60 bp, Artificial
  Synthetic oligonucleotide
tactgacagccagacagcgaccaaaagaattcggttggccatcaattagtgtcgaattgt

SEQ ID NO: 71563 - DNA, 60 bp, Artificial
  Synthetic oligonucleotide
gagcatccgcagggcaaatcagtgtacaacctactttctcagtacagagaaatcttcctt

SEQ ID NO: 71564 - DNA, 60 bp, Artificial
  Synthetic oligonucleotide
ctgggctataagaaccaggagcggaggaaacaccaatcaacagagagcatccgcagggca

SEQ ID NO: 71565 - DNA, 60 bp, Artificial
  Synthetic oligonucleotide
atcttatgaacaaatggaaactggtggagaacgccaaaatgctactgaaatcagagcatc

SEQ ID NO: 71566 - DNA, 60 bp, Artificial
  Synthetic oligonucleotide
atccgcagggcaaatcagtgtacaacctactttctcagtacagagaaatcttcctttcga

SEQ ID NO: 71567 - DNA, 60 bp, Artificial
  Synthetic oligonucleotide
taaatactgggctataagaaccaggagcggaggaaacaccaatcagcagagagcatccgc

SEQ ID NO: 71568 - DNA, 60 bp, Artificial
  Synthetic oligonucleotide
atgaacaaatggaaactagtggagaacgccaaaatgctactgaaatcagagcatctgttg

SEQ ID NO: 71569 - DNA, 60 bp, Artificial
  Synthetic oligonucleotide
tactgggctataagaaccaggagcggaggaaacaccaatcaacagagagcatccgcaggg

SEQ ID NO: 71570 - DNA, 60 bp, Artificial
  Synthetic oligonucleotide
gaaagagcgaccatcatggcagcatttactggaaacactgaaggcagaacatctgacatg

SEQ ID NO: 71571 - DNA, 60 bp, Artificial
  Synthetic oligonucleotide
tcactcacctgatgatttggcattccaacctgaatgatgccacgtatcagagaacaagag

SEQ ID NO: 71572 - DNA, 60 bp, Artificial
  Synthetic oligonucleotide
aaacgatcttatgaacaaatggaaactagtggagaacgccaaaatgctactgaaatcaga

SEQ ID NO: 71573 - DNA, 60 bp, Artificial
  Synthetic oligonucleotide
tttggcattccaatctgaatgatgccacgtatcagagaacaagagctttagtgcgtactg

SEQ ID NO: 71574 - DNA, 59 bp, Artificial
  Synthetic oligonucleotide
gactatgaagggaggctgatccaaaacagtataacaatagagagaatggtcctctctgc

SEQ ID NO: 71575 - DNA, 60 bp, Artificial
  Synthetic oligonucleotide
cgccaaaatgctactgaaatcagagcatctgtcgggagaatggttggaggaattggaaga

SEQ ID NO: 71576 - DNA, 60 bp, Artificial
  Synthetic oligonucleotide
agaacgccaaaatgctactgaaatcagagcatctgtcgggagaatggttggaggaattgg

SEQ ID NO: 71577 - DNA, 60 bp, Artificial
  Synthetic oligonucleotide
ggtcccaagaggacaattgtccaccagaggggttcaaattgcttcaaatgaaaacatgga

SEQ ID NO: 71578 - DNA, 60 bp, Artificial
  Synthetic oligonucleotide
gagaaacaaatacctggaagaacatcccagtgcggggaaagatccaaagaaaacaggagg

SEQ ID NO: 71579 - DNA, 59 bp, Artificial
  Synthetic oligonucleotide
gaaacaaatacctggaggaacatcccagtgcggggaaagatccaaagaaaacgggaggt

SEQ ID NO: 71580 - DNA, 60 bp, Artificial
  Synthetic oligonucleotide
cccaagaggacaattgtccaccagaggggttcaaattgcttcaaatgaaaacatggaaac

SEQ ID NO: 71581 - DNA, 60 bp, Artificial
  Synthetic oligonucleotide
ttgaatggaatgataacacagttcgagtctctgaagctctacagagattcgcttggagaa

SEQ ID NO: 71582 - DNA, 60 bp, Artificial
  Synthetic oligonucleotide
tcaaatcgaaaaggagttctcagaagtagaagggagaatccaagacctcgagaaatacgt

SEQ ID NO: 71583 - DNA, 60 bp, Artificial
  Synthetic oligonucleotide
gatatgttgaagatactaagatagatctttggtcttacaacgcggaacttcttgtcgctc

SEQ ID NO: 71584 - DNA, 60 bp, Artificial
  Synthetic oligonucleotide
cataacgaatacaggaacgaagcattaagcaaccgatttcagatcaaaagtgttgagctg

SEQ ID NO: 71585 - DNA, 60 bp, Artificial
  Synthetic oligonucleotide
acaaattgtacatttggggggttcatcatccgagcaccgacagagaacagaccaacctat

SEQ ID NO: 71586 - DNA, 60 bp, Artificial
  Synthetic oligonucleotide
taatgctactgaactggtccagaatttctcaatgggtaaaatatgcaacaatcctcaccg

SEQ ID NO: 71587 - DNA, 60 bp, Artificial
  Synthetic oligonucleotide
tcagatcgaagtaaccaatgctactgaactggtccagaatttctcaatgggtaaaatatg

SEQ ID NO: 71588 - DNA, 60 bp, Artificial
  Synthetic oligonucleotide
ttggccaagaccttccaggaaagggcaacaacacagcaacgctgtgcctgggacatcatg

SEQ ID NO: 71589 - DNA, 60 bp, Artificial
  Synthetic oligonucleotide
acattgaaaataagagtacatgaggggtatgaggagttcactatggtggggaaaagagca

SEQ ID NO: 71590 - DNA, 60 bp, Artificial
  Synthetic oligonucleotide
aacccaattgatggaccactacctgaggataatgagccaagtggatatgcacaaacagac

SEQ ID NO: 71591 - DNA, 60 bp, Artificial
  Synthetic oligonucleotide
cccgaggataatgagccaagtggatatgcacaaacagactgtgtcctggaggctatggcc

SEQ ID NO: 71592 - DNA, 60 bp, Artificial
  Synthetic oligonucleotide
gaccactacccgaggataatgagccaagtggatatgcacaaacagactgtgtcctggagg

SEQ ID NO: 71593 - DNA, 60 bp, Artificial
  Synthetic oligonucleotide
cctgaggataatgagccaagtggatatgcacaaacagactgtgtcctggaggctatggct

SEQ ID NO: 71594 - DNA, 60 bp, Artificial
  Synthetic oligonucleotide
ctgaaatcagagcatctgttgggagaatggttggtggaatcgggagattctacatacaga

SEQ ID NO: 71595 - DNA, 60 bp, Artificial
  Synthetic oligonucleotide
taaaggttccagcgcaaaatgccataagcaccacgttcccatatactggagatcctccat

SEQ ID NO: 71596 - DNA, 60 bp, Artificial
  Synthetic oligonucleotide
taaaggttccagcgcaaaatgccataagcaccacgttcccctatactggagatcctccat

SEQ ID NO: 71597 - DNA, 60 bp, Artificial
  Synthetic oligonucleotide
gtgcttggggcatcatgcagtaccaaacggaacaatagtgaaaacaataacggatgatca

SEQ ID NO: 71598 - DNA, 60 bp, Artificial
  Synthetic oligonucleotide
gtgcttgggacatcatgcagtaccaaacggaacaatagtgaaaacaataacggatgatca

SEQ ID NO: 71599 - DNA, 60 bp, Artificial
  Synthetic oligonucleotide
gtcccacccaggaatctttgaaaactcgtgtcttgaaacaatggaagttgttcaacaaac

SEQ ID NO: 71600 - DNA, 60 bp, Artificial
  Synthetic oligonucleotide
atggcccagcattgagcatcaatgagttgagcaatcttgcaaaaggagagaaggctaacg

SEQ ID NO: 71601 - DNA, 60 bp, Artificial
  Synthetic oligonucleotide
gtgcttttccagaattggggaattgaacccattgacaatgtgatgggaatgatcggaata

SEQ ID NO: 71602 - DNA, 60 bp, Artificial
  Synthetic oligonucleotide
caaaactggggaattgaacccattgacaatgtgatgggaatgatcgggatattgcctgat

SEQ ID NO: 71603 - DNA, 60 bp, Artificial
  Synthetic oligonucleotide
gacaaaccctctggagcaaaacaaacgatgctggatcagaccgcgtgatggtatcacctc

SEQ ID NO: 71604 - DNA, 60 bp, Artificial
  Synthetic oligonucleotide
caaaagtgctttttcaaaactggggaattgaacccattgacaatgtgatgggaatgatcg

SEQ ID NO: 71605 - DNA, 60 bp, Artificial
  Synthetic oligonucleotide
gcaactgctagtttcatttacgacggaaagcttgtagatagtattagttcatggtctcaa

SEQ ID NO: 71606 - DNA, 60 bp, Artificial
  Synthetic oligonucleotide
catttgggtcacgagagaaccttatgtgtcatgcgatcctatcaagtgttatcagtttgc

SEQ ID NO: 71607 - DNA, 59 bp, Artificial
  Synthetic oligonucleotide
gaaacaagttgtagaccaagaactgagtgatgccccattccttgatcggcttcgccgag

SEQ ID NO: 71608 - DNA, 60 bp, Artificial
  Synthetic oligonucleotide
catggtccagctcaagttgtcacgatggaaaagcatggctgcatgtttgtgtaactgggc

SEQ ID NO: 71609 - DNA, 60 bp, Artificial
  Synthetic oligonucleotide
cagtctctaccaaaagaagccaacaaactgtaatcccgaatatcgggtccagaccctggg

SEQ ID NO: 71610 - DNA, 60 bp, Artificial
  Synthetic oligonucleotide
gccaaagaaatagcactcagttattctgctggtgcacttgccagttgcatgggcctcata

SEQ ID NO: 71611 - DNA, 60 bp, Artificial
  Synthetic oligonucleotide
gttcaagttgtcacgatggaaaagcatggctgcatgtttgtgtcactgggcatgacaaaa

SEQ ID NO: 71612 - DNA, 60 bp, Artificial
  Synthetic oligonucleotide
agtctctaaaactctacagagattcgcttggagaagcagtaatgagaatgggggacctcc

SEQ ID NO: 71613 - DNA, 60 bp, Artificial
  Synthetic oligonucleotide
ggctaaagacaagaccaatcctgtcacctctgactaaggggattttgggatttgtattca

SEQ ID NO: 71614 - DNA, 60 bp, Artificial
  Synthetic oligonucleotide
ggaccacatggccataattaagaagtacacatcagggagacaggaaaagaacccgtcact

SEQ ID NO: 71615 - DNA, 60 bp, Artificial
  Synthetic oligonucleotide
ggaccgtatggccataattaagaagtacacatcagggagacaggaaaagaacccgtcact

SEQ ID NO: 71616 - DNA, 60 bp, Artificial
  Synthetic oligonucleotide
caggtcaagatacgccgaagagtagacataaaccctggtcatgcagacctcagtgccaag

SEQ ID NO: 71617 - DNA, 60 bp, Artificial
  Synthetic oligonucleotide
aagtgccagcgcaaaacgctataagcactacattcccttatactggagatcctccataca

SEQ ID NO: 71618 - DNA, 60 bp, Artificial
  Synthetic oligonucleotide
gagcatctgttgggagaatggttggaggaattggaaggttctacatacagatgtgcactg

SEQ ID NO: 71619 - DNA, 60 bp, Artificial
  Synthetic oligonucleotide
gggagaatggttggaggaattggaaggttctacatacagatgtgcactgaactccaactc

SEQ ID NO: 71620 - DNA, 60 bp, Artificial
  Synthetic oligonucleotide
tcagagcatctgttgggagaatggttggaggaattggaagattctacatacagatgtgca

SEQ ID NO: 71621 - DNA, 60 bp, Artificial
  Synthetic oligonucleotide
ggaaacaatggactccattactcttgaactgagaagcaaatactgggctataagaacaag

SEQ ID NO: 71622 - DNA, 60 bp, Artificial
  Synthetic oligonucleotide
aagagaagggtactctctagtcggaatagatcctttccgtctgcttcagaacagccaggt

SEQ ID NO: 71623 - DNA, 50 bp, Artificial
  Synthetic oligonucleotide
cttcctttgacatgagtaatgagggatcttatttcttcggagacaatgca

SEQ ID NO: 71624 - DNA, 60 bp, Artificial
  Synthetic oligonucleotide
caatggactccattactcttgaactgagaagcaaatactgggctataagaaccaggagcg

SEQ ID NO: 71625 - DNA, 60 bp, Artificial
  Synthetic oligonucleotide
cttcctttgacatgagtaaagaaggatcttatttcttcggagacaatgcagaggaatatg

SEQ ID NO: 71626 - DNA, 60 bp, Artificial
  Synthetic oligonucleotide
aattgccatcctgataactactgtaacattgcatttcaagcaatatgaatgcaactcccc

SEQ ID NO: 71627 - DNA, 60 bp, Artificial
  Synthetic oligonucleotide
gggtcaggctcatggcctgatggggcggacatcaatctcatgcctatataagcttccgca

SEQ ID NO: 71628 - DNA, 60 bp, Artificial
  Synthetic oligonucleotide
gggtcaggctcatggcctgatggggcggacatcaatctcatgcctgtataagctttcgca

SEQ ID NO: 71629 - DNA, 60 bp, Artificial
  Synthetic oligonucleotide
tgtggatttcctttgccatatcatgctttctgctttgtgttatttggctgggattcatca

SEQ ID NO: 71630 - DNA, 52 bp, Artificial
  Synthetic oligonucleotide
gaagggtactctctagtcggaatagatcctttccgtttgcttcagaacagcc

SEQ ID NO: 71631 - DNA, 60 bp, Artificial
  Synthetic oligonucleotide
cagacagcagcgcaacgagcaatgatggaccaagtgcgagaaagcagaaatccaggaaat

SEQ ID NO: 71632 - DNA, 52 bp, Artificial
  Synthetic oligonucleotide
gaagggtactctctagtcggaatagatcctttccgtctgcttcagaatagcc

SEQ ID NO: 71633 - DNA, 52 bp, Artificial
  Synthetic oligonucleotide
gaagggtactctctagtcggaatagatcctttccgtctacttcaaaacagcc

SEQ ID NO: 71634 - DNA, 60 bp, Artificial
  Synthetic oligonucleotide
tcaaatgaaaacatggaaacaatggactccattactcttgaactaagaagtaaatactgg

SEQ ID NO: 71635 - DNA, 60 bp, Artificial
  Synthetic oligonucleotide
ttcaaatgaaaacatggaaacaatggactccattactcttgaactgagaagcaaatactg

SEQ ID NO: 71636 - DNA, 60 bp, Artificial
  Synthetic oligonucleotide
atgaaaacatggaaacaatggactccattactcttgaactgagaagcaaatactgggcta

SEQ ID NO: 71637 - DNA, 60 bp, Artificial
  Synthetic oligonucleotide
gatgtgcactgaactccaactcagtgactatgaagggaggctgatccaaaacagtataac

SEQ ID NO: 71638 - DNA, 60 bp, Artificial
  Synthetic oligonucleotide
atgtgcactgaactccaactcagtgactatgaagggaggctgatccaaaacagcataaca

SEQ ID NO: 71639 - DNA, 60 bp, Artificial
  Synthetic oligonucleotide
gcactgaactccaactcagtgactatgaagggaggctgatccaaaacagcataacaatag

SEQ ID NO: 71640 - DNA, 60 bp, Artificial
  Synthetic oligonucleotide
gatcaggagaatttggcgccaagcaaacaatggtgaagatgctactgctggtctcactca

SEQ ID NO: 71641 - DNA, 60 bp, Artificial
  Synthetic oligonucleotide
gattctatatacagatgtgtactgaactccaactcagtgactatgaagggaggctgatcc

SEQ ID NO: 71642 - DNA, 60 bp, Artificial
  Synthetic oligonucleotide
acatacagatgtgcactgaactccaactcagtgactatgaagggaggctgatccaaaaca

SEQ ID NO: 71643 - DNA, 60 bp, Artificial
  Synthetic oligonucleotide
catacagatgtgcactgaactccaactcagtgactatgaagggaggctgatccaaaacag

SEQ ID NO: 71644 - DNA, 60 bp, Artificial
  Synthetic oligonucleotide
cagatgtgcactgaactccaactcagtgactatgaagggaggctgatccaaaacagtata

SEQ ID NO: 71645 - DNA, 60 bp, Artificial
  Synthetic oligonucleotide
caggagaatttggcgccaggcaaacaatggtgaagatgctactgctggtctcactcatct

SEQ ID NO: 71646 - DNA, 60 bp, Artificial
  Synthetic oligonucleotide
atgctataagcactacattcccttatactggagatccgccatacagtcacggaacgggga

SEQ ID NO: 71647 - DNA, 60 bp, Artificial
  Synthetic oligonucleotide
atgctataagcactacattcccttatactggagatccgccatacagtcacggaacaggga

SEQ ID NO: 71648 - DNA, 60 bp, Artificial
  Synthetic oligonucleotide
ggtgggatggactccaatcttctgatgacttcgccctcatagtgaatgcacctaatcatg

SEQ ID NO: 71649 - DNA, 60 bp, Artificial
  Synthetic oligonucleotide
cgccatacagtcacggaacagggacaggatacaccatggacacggtcaacaggacacatc

SEQ ID NO: 71650 - DNA, 60 bp, Artificial
  Synthetic oligonucleotide
ctccatacagccatggaacagggacaggatacaccatggacacggtcaacaggacacatc

SEQ ID NO: 71651 - DNA, 60 bp, Artificial
  Synthetic oligonucleotide
cctccatacagccatggaacagggacaggatacaccatggacacggtcaacaggacacat

SEQ ID NO: 71652 - DNA, 60 bp, Artificial
  Synthetic oligonucleotide
ccgccatacagtcacggaacagggacaggatacaccatggacacggtcaacaggacacat

SEQ ID NO: 71653 - DNA, 60 bp, Artificial
  Synthetic oligonucleotide
agctaatgaatcagggaggctaatagatttccttaaggatgtgatggaatcaatggatag

SEQ ID NO: 71654 - DNA, 60 bp, Artificial
  Synthetic oligonucleotide
cacatactggtgggatggactccaatcttctgatgacttcgccctcatagtgaatgcacc

SEQ ID NO: 71655 - DNA, 60 bp, Artificial
  Synthetic oligonucleotide
gccatggaacagggacaggatacaccatggacacggtcaacagaacacatcaatattcag

SEQ ID NO: 71656 - DNA, 60 bp, Artificial
  Synthetic oligonucleotide
cggtctaacagctaatgaatcagggaggttaatagatttccttaaggatgtgatggaatc

SEQ ID NO: 71657 - DNA, 60 bp, Artificial
  Synthetic oligonucleotide
ttggttggaatcaatatgagcaaaaagaaatcttacataaataggacaggaacatttgaa

SEQ ID NO: 71658 - DNA, 60 bp, Artificial
  Synthetic oligonucleotide
ctggttggaatcaatatgagcaaaaagaaatcttacataaataggacaggaacatttgaa

SEQ ID NO: 71659 - DNA, 60 bp, Artificial
  Synthetic oligonucleotide
ccgaatatcgggtctagaccctgggtaaggggggtctccagcagaataagcatctattgg

SEQ ID NO: 71660 - DNA, 60 bp, Artificial
  Synthetic oligonucleotide
ccgaatatcgggtctagaccctgggtaaggggggtctccagcataataagcatctattgg

SEQ ID NO: 71661 - DNA, 60 bp, Artificial
  Synthetic oligonucleotide
ccgaatatcgggtctagaccctgggtaaggggtatctccagtagaataagcatctattgg

SEQ ID NO: 71662 - DNA, 60 bp, Artificial
  Synthetic oligonucleotide
agttgacaataataactggtctggttattctggtatcttctccgttgaaaacaaaaactg

SEQ ID NO: 71663 - DNA, 60 bp, Artificial
  Synthetic oligonucleotide
tcaatagacaagtcatagttgacaataataactggtctggttattctggtattttctctg

SEQ ID NO: 71664 - DNA, 60 bp, Artificial
  Synthetic oligonucleotide
gcagattgccatcctaataactactgtaacattgcatttcaagcaatatgaatgcgattc

SEQ ID NO: 71665 - DNA, 60 bp, Artificial
  Synthetic oligonucleotide
aattgccatcctgataactactgtaacattgcatttcaagcaatatgaattcaactcccc

SEQ ID NO: 71666 - DNA, 60 bp, Artificial
  Synthetic oligonucleotide
gcaaattgccatcctgataactactgtaacattgcatttcaagcaatatgaatgcaactc

SEQ ID NO: 71667 - DNA, 60 bp, Artificial
  Synthetic oligonucleotide
gccatcctaataactactgtaacattgcatttcaagcaatatgaatgcgattcccctgca

SEQ ID NO: 71668 - DNA, 60 bp, Artificial
  Synthetic oligonucleotide
tgccatcctaataactactgtaacattgcatttcaagcaatatgaatgcgattcccctgc

SEQ ID NO: 71669 - DNA, 60 bp, Artificial
  Synthetic oligonucleotide
gttgacagaggcaataggtccggttattctggtattttctctgttgaaggcaaaagctgc

SEQ ID NO: 71670 - DNA, 60 bp, Artificial
  Synthetic oligonucleotide
gttgacagaggtaatagttccggttattctggtattttctctgttgaaggcaaaagctgc

SEQ ID NO: 71671 - DNA, 60 bp, Artificial
  Synthetic oligonucleotide
tgacacagtacatgataggaccccttatcggaccctattgatgaatgagttgggtgttcc

SEQ ID NO: 71672 - DNA, 60 bp, Artificial
  Synthetic oligonucleotide
gacacagtacatgataggaccccttatcggaccctattgatgaatgagttgggtgttcca

SEQ ID NO: 71673 - DNA, 60 bp, Artificial
  Synthetic oligonucleotide
gaacctgggacctttgatcttggggggctatatgaagcaattgaggagtgcctgattaat

SEQ ID NO: 71674 - DNA, 60 bp, Artificial
  Synthetic oligonucleotide
tttacgacggaaagcttgtagacagtattagctcgtgggctcataacatcctccgaaccc

SEQ ID NO: 71675 - DNA, 60 bp, Artificial
  Synthetic oligonucleotide
gcaactgctattttcatatacgacggaaagcttgtagacagtattagctcgtggtctcaa

SEQ ID NO: 71676 - DNA, 60 bp, Artificial
  Synthetic oligonucleotide
cttgtcgctctggagaatcaacatacaattgatctaactgattcggaaatgaacaaacta

SEQ ID NO: 71677 - DNA, 60 bp, Artificial
  Synthetic oligonucleotide
caatccgactctactgttcctaaaggttccagcgcaaaatgccataagcaccacattccc

SEQ ID NO: 71678 - DNA, 60 bp, Artificial
  Synthetic oligonucleotide
cggatgatcaaattgaagtgactaatgctactgaactggttcagagctcctcaacaggga

SEQ ID NO: 71679 - DNA, 60 bp, Artificial
  Synthetic oligonucleotide
cataagtacaacattcccttatactggagatcctccatacagccatggaacaggaacagg

SEQ ID NO: 71680 - DNA, 60 bp, Artificial
  Synthetic oligonucleotide
cactacattcccttatactggagatcctccatacagccatggaacagggacaggatacac

SEQ ID NO: 71681 - DNA, 60 bp, Artificial
  Synthetic oligonucleotide
cataagcaccacattcccttatactggagatcctccatacagccgtggaacaggaacagg

SEQ ID NO: 71682 - DNA, 60 bp, Artificial
  Synthetic oligonucleotide
cataagcacaacattcccttatactggagatcctccatacagccatggaacaggaacagg

SEQ ID NO: 71683 - DNA, 60 bp, Artificial
  Synthetic oligonucleotide
cataagcaccacattcccttatactggagatcctccatacagccatggaacaggaacggg

SEQ ID NO: 71684 - DNA, 60 bp, Artificial
  Synthetic oligonucleotide
cagctgcattgagggcaagctttctcaaatgtccaaagaggtgaatgccaggattgaccc

SEQ ID NO: 71685 - DNA, 60 bp, Artificial
  Synthetic oligonucleotide
gaacagctgcattgagggcaagctttctcaaatgtccaaagaggtgaatgccaggattga

SEQ ID NO: 71686 - DNA, 60 bp, Artificial
  Synthetic oligonucleotide
agtgcctgattaatgatccctgggttttgctcaatgcgtcttggttcaactccttcctga

SEQ ID NO: 71687 - DNA, 60 bp, Artificial
  Synthetic oligonucleotide
tgcttacgggcaaccttcaaacattgaaaataagagtacatgaggggtatgaagagttca

SEQ ID NO: 71688 - DNA, 60 bp, Artificial
  Synthetic oligonucleotide
aagattatagcattgtttccaattatgtgtgctcaggacttgttggagacacacccagaa

SEQ ID NO: 71689 - DNA, 60 bp, Artificial
  Synthetic oligonucleotide
gattatagcattgtttccaattatgtgtgctcaggacttgttggagacacacccagaaaa

SEQ ID NO: 71690 - DNA, 60 bp, Artificial
  Synthetic oligonucleotide
tactgacagtcagacagcgaccaaaagaattcggatggccattaattaatgttgaatagt

SEQ ID NO: 71691 - DNA, 60 bp, Artificial
  Synthetic oligonucleotide
tatcctcgatatcctggtgtcagatgtgtctgcagagacaactggaaaggctctaatagg

SEQ ID NO: 71692 - DNA, 53 bp, Artificial
  Synthetic oligonucleotide
caaatgagaacatggaaacaatggactccagcactcttgaattgaggagcaga

SEQ ID NO: 71693 - DNA, 60 bp, Artificial
  Synthetic oligonucleotide
tcctgggaatgctgaaattgaagatctcatcttccttgcacggtctgctctcattctgag

SEQ ID NO: 71694 - DNA, 60 bp, Artificial
  Synthetic oligonucleotide
cagaagcggagggaacactaaccaacagagagcatctgcaggacaaatcagcgtacagcc

SEQ ID NO: 71695 - DNA, 60 bp, Artificial
  Synthetic oligonucleotide
ctggcattccaatctgaatgatgccacatatcagaggacaagggcacttgtgcgtactgg

SEQ ID NO: 71696 - DNA, 60 bp, Artificial
  Synthetic oligonucleotide
tcagagcatctgttgggaggatggttggtggaattgggagattctacatacagatgtgca

SEQ ID NO: 71697 - DNA, 60 bp, Artificial
  Synthetic oligonucleotide
gaaggatttggcgtcaagcgaataacggagaagacgcaaccgctggtctaacccatatga

SEQ ID NO: 71698 - DNA, 60 bp, Artificial
  Synthetic oligonucleotide
ggcgtcaagcgaataacggagaagacgcaaccgctggtctaacccatatgatgatctggc

SEQ ID NO: 71699 - DNA, 60 bp, Artificial
  Synthetic oligonucleotide
gacaagggcacttgtgcgtactggaatggatcctaggatgtgctctctgatgcaaggatc

SEQ ID NO: 71700 - DNA, 60 bp, Artificial
  Synthetic oligonucleotide
ggagttggaacaatggtgatggaattgattcggatgatcaaacgagggatcaatgatcgg

SEQ ID NO: 71701 - DNA, 60 bp, Artificial
  Synthetic oligonucleotide
gcgtactggaatggatcctaggatgtgctctctgatgcaaggatcaactctcccgagaag

SEQ ID NO: 71702 - DNA, 60 bp, Artificial
  Synthetic oligonucleotide
cagcagcacaacgagcaatgatggatcaggtgagagaaagccggaatcctgggaatgctg

SEQ ID NO: 71703 - DNA, 60 bp, Artificial
  Synthetic oligonucleotide
gcggagggaacactaaccaacagagagcatctgcaggacaaatcagcgtacagcccacat

SEQ ID NO: 71704 - DNA, 60 bp, Artificial
  Synthetic oligonucleotide
aagagtggtcccaagagggcaactgtccaccagaggagtacagattgcttcaaatgagaa

SEQ ID NO: 71705 - DNA, 60 bp, Artificial
  Synthetic oligonucleotide
cataaacaggacagggacatttgaattcacaagctttttctatcgctatggatttgtagc

SEQ ID NO: 71706 - DNA, 60 bp, Artificial
  Synthetic oligonucleotide
tgattgatggaattgggcgattctacatccaaatgtgcactgaacttaaactcagtgatt

SEQ ID NO: 71707 - DNA, 60 bp, Artificial
  Synthetic oligonucleotide
attagggcatccgtcgggaagatgattgatggaattgggcgattctacatccaaatgtgc

SEQ ID NO: 71708 - DNA, 60 bp, Artificial
  Synthetic oligonucleotide
gaggattgcatgataaaagcagttagaggtgacctgaatttcgttaacagggcaaatcag

SEQ ID NO: 71709 - DNA, 60 bp, Artificial
  Synthetic oligonucleotide
gattgtatgataaaagcagttagaggtgacctgaatttcgttaacagggcaaatcagcgg

SEQ ID NO: 71710 - DNA, 60 bp, Artificial
  Synthetic oligonucleotide
gaacgggagacctccattacctccaaaatagaaacggaaaatggcgagaacaattgggcc

SEQ ID NO: 71711 - DNA, 60 bp, Artificial
  Synthetic oligonucleotide
gcaatggtggatcaagtgagagaaagtaggaacccaggaaatgctgagatcgaagatctc

SEQ ID NO: 71712 - DNA, 59 bp, Artificial
  Synthetic oligonucleotide
aacgggaaactgaacaggttaatcgagaaaacgaacgagaaattccatcaaatcgaaaa

SEQ ID NO: 71713 - DNA, 60 bp, Artificial
  Synthetic oligonucleotide
aacgggaaactgaacaggttaatcgagaaaacgaacgagaaattccatcaaatcgaaaaa

SEQ ID NO: 71714 - DNA, 60 bp, Artificial
  Synthetic oligonucleotide
aatgggaaactgaatagagtaatcgagaagacgaacgagaaattccatcaaatcgaaaag

SEQ ID NO: 71715 - DNA, 60 bp, Artificial
  Synthetic oligonucleotide
gggaaactgaatagagtaatcgagaagacgaacgagaaattccatcaaatcgaaaaggag

SEQ ID NO: 71716 - DNA, 60 bp, Artificial
  Synthetic oligonucleotide
gggaaactgaataggataatcgagaagacgaacgagaaattccatcaaatcgaaaaggag

SEQ ID NO: 71717 - DNA, 60 bp, Artificial
  Synthetic oligonucleotide
acatgctgggagcagatgtacactccaggaggggaagtgagaaatgatgacgttgaccaa

SEQ ID NO: 71718 - DNA, 60 bp, Artificial
  Synthetic oligonucleotide
atcgctgccaggaacatagtaagaagagcaacggtatcagcagacccattagcatctctg

SEQ ID NO: 71719 - DNA, 60 bp, Artificial
  Synthetic oligonucleotide
gctgcatttaacccaggggacatgctgggagcagatgtacactccaggaggagaagtgag

SEQ ID NO: 71720 - DNA, 60 bp, Artificial
  Synthetic oligonucleotide
catttaacccaggggacatgctgggagcagatgtacactccaggaggagaagtgagaaat

SEQ ID NO: 71721 - DNA, 60 bp, Artificial
  Synthetic oligonucleotide
cccaggggacatgctgggagcagatgtacactccaggaggagaagtgagaaatgatgatg

SEQ ID NO: 71722 - DNA, 60 bp, Artificial
  Synthetic oligonucleotide
attcgtcatcaatgatgtgggagatcaatggtcctgagtcagtgctggtcaacacttatc

SEQ ID NO: 71723 - DNA, 60 bp, Artificial
  Synthetic oligonucleotide
cgggaacagggtacaccatggacacagtcaacagaacacatcaatattcagaaaagggga

SEQ ID NO: 71724 - DNA, 60 bp, Artificial
  Synthetic oligonucleotide
caggaacagggtacaccatggacacagtcaacagaacacaccaatattcagagaagggga

SEQ ID NO: 71725 - DNA, 60 bp, Artificial
  Synthetic oligonucleotide
caggaacggggtacaccatggacacagtcaacagaacacaccaatattcagaaaagggga

SEQ ID NO: 71726 - DNA, 60 bp, Artificial
  Synthetic oligonucleotide
gttaatcgagaaaacgaacgagaaattccatcaaatcgaaaaagaattctcagaagtaga

SEQ ID NO: 71727 - DNA, 60 bp, Artificial
  Synthetic oligonucleotide
tgaccgactagaaaccctagtgttactaagggctttcaccgaagagggagcaattgttgg

SEQ ID NO: 71728 - DNA, 60 bp, Artificial
  Synthetic oligonucleotide
tggccgactagagaccctagtgttactaagggctttcaccgaagagggagcaattgttgg

SEQ ID NO: 71729 - DNA, 60 bp, Artificial
  Synthetic oligonucleotide
tgaccgactagagaccctagtgttactaagggctttcaccgaagagggagcaattgttgg

SEQ ID NO: 71730 - DNA, 60 bp, Artificial
  Synthetic oligonucleotide
gtgatctttgaccgactagagaccctagtgttactaagggctttcaccgaagagggagca

SEQ ID NO: 71731 - DNA, 60 bp, Artificial
  Synthetic oligonucleotide
tcaccgaagagggagcaattgttggcgaaatctcaccattgcctttttttccaggacata

SEQ ID NO: 71732 - DNA, 60 bp, Artificial
  Synthetic oligonucleotide
ggctttcaccgaagagggagcaattgttggcgaaatctcaccattgccttctcttccagg

SEQ ID NO: 71733 - DNA, 60 bp, Artificial
  Synthetic oligonucleotide
cccctcggggttacttcaaaatacgaagtgggaaaagctcaataatgaggtcagatgcac

SEQ ID NO: 71734 - DNA, 60 bp, Artificial
  Synthetic oligonucleotide
ccgaatatcgggtctagaccctgggtaaggggtatctccagcagaataagcatctattgg

SEQ ID NO: 71735 - DNA, 60 bp, Artificial
  Synthetic oligonucleotide
cccgaatatcgggtctagaccctgggtaaggggtatctccagcagaataagcatctattg

SEQ ID NO: 71736 - DNA, 60 bp, Artificial
  Synthetic oligonucleotide
gacattcgaacgacacaatacatgatagaaccccttatcgaaccctattgatgaatgagt

SEQ ID NO: 71737 - DNA, 60 bp, Artificial
  Synthetic oligonucleotide
cgacacaatacatgatagaaccccttatcgaaccctattgatgaatgagttgggtgtacc

SEQ ID NO: 71738 - DNA, 60 bp, Artificial
  Synthetic oligonucleotide
cagccatactcagaaaagcaaccaggagattggttcagctcatagtgagtggaagggacg

SEQ ID NO: 71739 - DNA, 60 bp, Artificial
  Synthetic oligonucleotide
cagcgatactcagaaaagcaaccaggagattggttcagctcatagtgagtggaagggacg

SEQ ID NO: 71740 - DNA, 60 bp, Artificial
  Synthetic oligonucleotide
cagctatactcagaaaagcaaccaggagattggttcagctcatagtgagtggaagggacg

SEQ ID NO: 71741 - DNA, 60 bp, Artificial
  Synthetic oligonucleotide
cagagagcatctgcagggcaaatcagtgtgcaacccactttctcggtacagagaaatctt

SEQ ID NO: 71742 - DNA, 60 bp, Artificial
  Synthetic oligonucleotide
ggccagtggatacgactttgagagagaggggtactctctggtcggaatagatcctttccg

SEQ ID NO: 71743 - DNA, 60 bp, Artificial
  Synthetic oligonucleotide
cattagaccaaatgagaatccggcacataagagtcaactggtatggatggcatgccattc

SEQ ID NO: 71744 - DNA, 60 bp, Artificial
  Synthetic oligonucleotide
atacagatgtgcactgaactcaaactcagcgactatgaaggaaggctgatccaaaacagc

SEQ ID NO: 71745 - DNA, 60 bp, Artificial
  Synthetic oligonucleotide
gagatcagagcatctgttgggagaatggtcggtggaattggaagattctacatacagatg

SEQ ID NO: 71746 - DNA, 60 bp, Artificial
  Synthetic oligonucleotide
attggaagattctacatacagatgtgcactgaactcaaactcagcgactatgaaggaagg

SEQ ID NO: 71747 - DNA, 60 bp, Artificial
  Synthetic oligonucleotide
tcctgggaatgctgagattgaagaccttatctttctggctcggtctgcactcattctgag

SEQ ID NO: 71748 - DNA, 60 bp, Artificial
  Synthetic oligonucleotide
gattgaagaccttatctttctggctcggtctgcactcattctgagaggatcagtggctca

SEQ ID NO: 71749 - DNA, 60 bp, Artificial
  Synthetic oligonucleotide
tcattctgagaggatcagtggctcataagtcctgcttgcctgcttgtgtatatggacttg

SEQ ID NO: 71750 - DNA, 60 bp, Artificial
  Synthetic oligonucleotide
cagtggctcataagtcctgcttgcctgcttgtgtatatggacttgctgtggccagtggat

SEQ ID NO: 71751 - DNA, 60 bp, Artificial
  Synthetic oligonucleotide
tatggacttgctgtggccagtggatacgactttgagagagaggggtactctctggtcgga

SEQ ID NO: 71752 - DNA, 60 bp, Artificial
  Synthetic oligonucleotide
cccgaggagatctggagctgcgggtgcagcggtaaagggagttggaacgatggtaatgga

SEQ ID NO: 71753 - DNA, 60 bp, Artificial
  Synthetic oligonucleotide
gggaaggacccgaagaaaactggaggtccaatctacagaaggagggacggaaaatggatg

SEQ ID NO: 71754 - DNA, 60 bp, Artificial
  Synthetic oligonucleotide
ggaggaacaaatacctggaagaacatcccagcgcggggaaggacccgaagaaaactggag

SEQ ID NO: 71755 - DNA, 60 bp, Artificial
  Synthetic oligonucleotide
caaacagcagcacagcgagcaatgatggaccaggtgagagaaagcaggaatcctgggaat

SEQ ID NO: 71756 - DNA, 60 bp, Artificial
  Synthetic oligonucleotide
gccagaatgctactgagatcagagcatctgttgggagaatggtcggtggaattggaagat

SEQ ID NO: 71757 - DNA, 55 bp, Artificial
  Synthetic oligonucleotide
cagagagcatctgcagggcaaatcagtgtgcaacccactttctcggtacagagaa

SEQ ID NO: 71758 - DNA, 60 bp, Artificial
  Synthetic oligonucleotide
ctgggctataaggactaggagtggaggaaacaccaaccaacagagagcatctgcagggca

SEQ ID NO: 71759 - DNA, 60 bp, Artificial
  Synthetic oligonucleotide
ctggcattccaacttgaatgatgccacatatcagagaacaagagctctcgtgcgtactgg

SEQ ID NO: 71760 - DNA, 60 bp, Artificial
  Synthetic oligonucleotide
catctgatgatctggcattccaacttgaatgatgccacatatcagagaacaagagctctc

SEQ ID NO: 71761 - DNA, 60 bp, Artificial
  Synthetic oligonucleotide
catttgaagacctgagagtatcaagcttcatcagagggacaagagtgatcccaagaggac

SEQ ID NO: 71762 - DNA, 60 bp, Artificial
  Synthetic oligonucleotide
catgccattctgcagcatttgaagacctgagagtatcaagcttcatcagagggacaagag

SEQ ID NO: 71763 - DNA, 60 bp, Artificial
  Synthetic oligonucleotide
ccaaatgagaatccggcacataagagtcaactggtatggatggcatgccattctgcagca

SEQ ID NO: 71764 - DNA, 60 bp, Artificial
  Synthetic oligonucleotide
gaagcagatactgggctataaggactaggagtggaggaaacaccaaccaacagagagcat

SEQ ID NO: 71765 - DNA, 60 bp, Artificial
  Synthetic oligonucleotide
catggaaacaatggactccagtactcttgaactgagaagcagatactgggctataaggac

SEQ ID NO: 71766 - DNA, 60 bp, Artificial
  Synthetic oligonucleotide
agcttctaatgagaacatggaaacaatggactccagtactcttgaactgagaagcagata

SEQ ID NO: 71767 - DNA, 60 bp, Artificial
  Synthetic oligonucleotide
aaggatcaactctcccgaggagatctggagctgcgggtgcagcggtaaagggagttggaa

SEQ ID NO: 71768 - DNA, 60 bp, Artificial
  Synthetic oligonucleotide
aagagctctcgtgcgtactggaatggaccccagaatgtgctctctgatgcaaggatcaac

SEQ ID NO: 71769 - DNA, 60 bp, Artificial
  Synthetic oligonucleotide
gcagcacagcgagcaatgatggaccaggtgagagaaagcaggaatcctgggaatgctgag

SEQ ID NO: 71770 - DNA, 60 bp, Artificial
  Synthetic oligonucleotide
aggcatgtgaattgaccgattcaagctggatagaacttgatgagataggagaagatgttg

SEQ ID NO: 71771 - DNA, 60 bp, Artificial
  Synthetic oligonucleotide
gaagggagtgtacataaatacggctttgcttaatgcatcttgtgcagccatggatgactt

SEQ ID NO: 71772 - DNA, 60 bp, Artificial
  Synthetic oligonucleotide
ggcatgtgaattgaccgattcaagctggatagaacttgatgagataggagaagatgttgc

SEQ ID NO: 71773 - DNA, 60 bp, Artificial
  Synthetic oligonucleotide
ggagaagattcgaaaatcgaaaccaacaaattcgctgcaatatgcacacacttggaagtc

SEQ ID NO: 71774 - DNA, 60 bp, Artificial
  Synthetic oligonucleotide
gaggcccatgttcctatatgtgagaaccaatggaacctccaagatcaagatgaaatgggg

SEQ ID NO: 71775 - DNA, 51 bp, Artificial
  Synthetic oligonucleotide
ttgcttaatgcatcttggttcaactccttcctcacacatgcactgaaatag

SEQ ID NO: 71776 - DNA, 60 bp, Artificial
  Synthetic oligonucleotide
tatggagaagatttgaaaatcgaaaccaacaaattcgctgcaatatgcacacacttggaa

SEQ ID NO: 71777 - DNA, 60 bp, Artificial
  Synthetic oligonucleotide
gaaccttcgatctcggagggctatatgaagcaatcgaggagtgcctgattaatgatccct

SEQ ID NO: 71778 - DNA, 60 bp, Artificial
  Synthetic oligonucleotide
aaggcccatgttcctgtatgtgagaaccaacggaacctccaagatcaagatgaaatgggg

SEQ ID NO: 71779 - DNA, 60 bp, Artificial
  Synthetic oligonucleotide
ggcccatgttcctatatgtgagaaccaatggaacctccaagatcaagatgaaatggggca

SEQ ID NO: 71780 - DNA, 60 bp, Artificial
  Synthetic oligonucleotide
aggcatgtgaattaaccgattcaagctggatagaacttgatgagataggagaagatgttg

SEQ ID NO: 71781 - DNA, 60 bp, Artificial
  Synthetic oligonucleotide
tggaaatgacgtgtggatgggaagaacgatcagcgaggagtcacgctcaggttatgaaac

SEQ ID NO: 71782 - DNA, 53 bp, Artificial
  Synthetic oligonucleotide
atgagccttctaaccgaggtcgaaacgtatgttctctctatcgttccgtcagg

SEQ ID NO: 71783 - DNA, 54 bp, Artificial
  Synthetic oligonucleotide
gatgagccttctaaccgaggtcgaaacgtatgttctctctatcgttccatcagg

SEQ ID NO: 71784 - DNA, 55 bp, Artificial
  Synthetic oligonucleotide
agatgagccttctaaccgaggtcgaaacgtatgttctctctatcgttccatcagg

SEQ ID NO: 71785 - DNA, 60 bp, Artificial
  Synthetic oligonucleotide
tctcatggaatggctaaagacaagaccaatcctgtcgcctctgactaaggggattttggg

SEQ ID NO: 71786 - DNA, 60 bp, Artificial
  Synthetic oligonucleotide
tctcatggaatggctaaagacaagaccaatcctgtctcctctgactaaggggattttggg

SEQ ID NO: 71787 - DNA, 60 bp, Artificial
  Synthetic oligonucleotide
tctcatggaatggctaaagacaagaccaatcctgtcacctctgaccaaggggattttggg

SEQ ID NO: 71788 - DNA, 60 bp, Artificial
  Synthetic oligonucleotide
ggggccaaagaaatagcgctcagttactctgctggtgcacttgccagttgcatgggcctc

SEQ ID NO: 71789 - DNA, 60 bp, Artificial
  Synthetic oligonucleotide
cgtgcccagtgagcgaggactgcagcgtagacgttttgtccagaatgccctcaatgggaa

SEQ ID NO: 71790 - DNA, 60 bp, Artificial
  Synthetic oligonucleotide
tagctctcagctattctgctggtgcacttgccagttgcatgggcctcatatacaacagaa

SEQ ID NO: 71791 - DNA, 60 bp, Artificial
  Synthetic oligonucleotide
tagcgctcagttattctgctggtgcacttgccagttgcatgggcctcatatacaacagga

SEQ ID NO: 71792 - DNA, 60 bp, Artificial
  Synthetic oligonucleotide
ctcagttattctgctggtgcacttgccagttgcatgggcctcatatacaacaggatggga

SEQ ID NO: 71793 - DNA, 57 bp, Artificial
  Synthetic oligonucleotide
atgagccttctaaccgaggtcgaaacgtatgttctctctatcgttccatcaggcccc

SEQ ID NO: 71794 - DNA, 60 bp, Artificial
  Synthetic oligonucleotide
ctcatggaatggctaaagacaagaccaatcctgtctcctctgactaaggggattttgggg

SEQ ID NO: 71795 - DNA, 60 bp, Artificial
  Synthetic oligonucleotide
ctcatggaatggctaaagacaagaccaatcctgtcacctctgaccaaggggattttgggg

SEQ ID NO: 71796 - DNA, 60 bp, Artificial
  Synthetic oligonucleotide
ctcatggaatggctaaagacaagaccaatcctgtcgcctctgactaaggggattttgggg

SEQ ID NO: 71797 - DNA, 60 bp, Artificial
  Synthetic oligonucleotide
ttggcatatccgcaaacggtttgcggataatggattgggtgatgccccattccttgatcg

SEQ ID NO: 71798 - DNA, 60 bp, Artificial
  Synthetic oligonucleotide
tgtccagtagaataactatctattggacaatagtaaaaccgggagacatacttttgatta

SEQ ID NO: 71799 - DNA, 60 bp, Artificial
  Synthetic oligonucleotide
gtccggaaacaagttgtagaccaagaactgagtgatgccccattccttgatcggcttcgc

SEQ ID NO: 71800 - DNA, 60 bp, Artificial
  Synthetic oligonucleotide
ccggaaacaagttgtagaccaagaactgagtgatgccccattccttgatcggcttcgcag

SEQ ID NO: 71801 - DNA, 60 bp, Artificial
  Synthetic oligonucleotide
ggctgcattgagggcaagctttctcaaatgtccaaagaagtgaatgccaaaattgaacct

SEQ ID NO: 71802 - DNA, 60 bp, Artificial
  Synthetic oligonucleotide
cggttgcattgagggcaagctttctcaaatgtccaaagaagtgaatgccaaaattgaacc

SEQ ID NO: 71803 - DNA, 60 bp, Artificial
  Synthetic oligonucleotide
gaacggctgcattgagggcaagctttctcaaatgtcaaaagaagtgaatgcaaaaattga

SEQ ID NO: 71804 - DNA, 60 bp, Artificial
  Synthetic oligonucleotide
caaacggctgcattgagggcaagctttctcaaatgtcaaaagaagtgagtgcccaaattg

SEQ ID NO: 71805 - DNA, 60 bp, Artificial
  Synthetic oligonucleotide
gaatggctgcattgagggcaagctttctcaaatgtccaaagaagtgaatgccaaaattga

SEQ ID NO: 71806 - DNA, 60 bp, Artificial
  Synthetic oligonucleotide
gaacggttgcattgagggcaagctttctcaaatgtccaaagaagtgaatgccaaaattga

SEQ ID NO: 71807 - DNA, 60 bp, Artificial
  Synthetic oligonucleotide
ccaaacggctgcattgagggcaagctttctcaaatgtcaaaagaagtgagtgcccaaatt

SEQ ID NO: 71808 - DNA, 60 bp, Artificial
  Synthetic oligonucleotide
agccgaacggctgcattgagggcaagctttctcaaatgtccaaagaagtgaatgccaaaa

SEQ ID NO: 71809 - DNA, 60 bp, Artificial
  Synthetic oligonucleotide
gccgaacggctgcattgagggcaagctttctcaaatgtccaaagaagtgaatgccaaaat

SEQ ID NO: 71810 - DNA, 56 bp, Artificial
  Synthetic oligonucleotide
gaacggctgcattgagggcaagctttctcaaatgtccaaagaagtgaatgccaaaa

SEQ ID NO: 71811 - DNA, 55 bp, Artificial
  Synthetic oligonucleotide
gaacggctgcattgagggcaagctttctcaaatgtcaaaagaagtgaatgcaaaa

SEQ ID NO: 71812 - DNA, 60 bp, Artificial
  Synthetic oligonucleotide
cctcggggttacttcaaaatacgaaatgggaaaagctcaataatgaggtcagatgcaccc

SEQ ID NO: 71813 - DNA, 60 bp, Artificial
  Synthetic oligonucleotide
ccaggcttttcaccataagacaagagatggccagtaggggtctatgggattcctttcgtc

SEQ ID NO: 71814 - DNA, 60 bp, Artificial
  Synthetic oligonucleotide
gcctatgttcttgtatgtgaggacaaatggaacatcaaagatcaaaatgaaatggggaat

SEQ ID NO: 71815 - DNA, 50 bp, Artificial
  Synthetic oligonucleotide
atggaacatcaaagatcaaaatgaaatggggaatggagatgagacgttgc

SEQ ID NO: 71816 - DNA, 60 bp, Artificial
  Synthetic oligonucleotide
ccttgaacctggaacttttgatcttggggggctatatgaagcaattgaggagtgcctgat

SEQ ID NO: 71817 - DNA, 60 bp, Artificial
  Synthetic oligonucleotide
cacagatgtggtaaactttgtgagcatggagttttctctcactgacccgagacttgagcc

SEQ ID NO: 71818 - DNA, 60 bp, Artificial
  Synthetic oligonucleotide
ggatacagaatgagttcaacaaggcatgcgagctaactgattcaatctggatagagctcg

SEQ ID NO: 71819 - DNA, 60 bp, Artificial
  Synthetic oligonucleotide
gctggatacagaatgagttcaacaaggcatgcgagctaactgattcaatctggatagagc

SEQ ID NO: 71820 - DNA, 54 bp, Artificial
  Synthetic oligonucleotide
acaaacggaacatcaaagatcaaaatgaaatggggaatggagatgagacgttgc

SEQ ID NO: 71821 - DNA, 60 bp, Artificial
  Synthetic oligonucleotide
gtgaggacaaatggaacatcaaagatcaaaatgaaatggggaatggagatgagacgttgc

SEQ ID NO: 71822 - DNA, 60 bp, Artificial
  Synthetic oligonucleotide
tgagaaaccgaagtttctgccagatttgtatgattacaaggagaacagattcatcgaaat

SEQ ID NO: 71823 - DNA, 60 bp, Artificial
  Synthetic oligonucleotide
tcttgtatgtgaggacaaatggaacatcaaagatcaaaatgaaatggggaatggagatga

SEQ ID NO: 71824 - DNA, 60 bp, Artificial
  Synthetic oligonucleotide
ctgcagagacataagcgatttgaagcaatatgatagtgacgaacctgaattgaggtcact

SEQ ID NO: 71825 - DNA, 60 bp, Artificial
  Synthetic oligonucleotide
ctctcactgacccgagacttgagccacataaatgggagaaatactgtgtccttgagatag

SEQ ID NO: 71826 - DNA, 60 bp, Artificial
  Synthetic oligonucleotide
tgtgaggacaaatggaacatcaaagatcaaaatgaaatggggaatggagatgagacgttg

SEQ ID NO: 71827 - DNA, 60 bp, Artificial
  Synthetic oligonucleotide
actaaacaacaggcattcaaatgacacagtacatgataggaccccttatcgaaccctatt

SEQ ID NO: 71828 - DNA, 60 bp, Artificial
  Synthetic oligonucleotide
ggaaggctccatcgggaaagtgtgcagaaccttgctcgcaaaatctgtattcaacagtct

SEQ ID NO: 71829 - DNA, 60 bp, Artificial
  Synthetic oligonucleotide
agtattactaagggctttcaccgaagagggagcagttgttggcgaaatctcaccattgcc

SEQ ID NO: 71830 - DNA, 60 bp, Artificial
  Synthetic oligonucleotide
ggagttggaacaatagcaatggaattgatcagaatgatcaaacgtgggatcaatgaccga

SEQ ID NO: 71831 - DNA, 53 bp, Artificial
  Synthetic oligonucleotide
tttggcattccaatctgaatgatgccacgtaccagagaacaagagcacttgtt

SEQ ID NO: 71832 - DNA, 50 bp, Artificial
  Synthetic oligonucleotide
acccatatatagaagagtagacggaaagtggatgagagaactcattcttt

SEQ ID NO: 71833 - DNA, 60 bp, Artificial
  Synthetic oligonucleotide
tttggcattccaatctgaatgatgccacgtaccagagaacaagagcgcttgttcgcaccg

SEQ ID NO: 71834 - DNA, 60 bp, Artificial
  Synthetic oligonucleotide
tttggcattccaatctgaatgatgccacgtaccagagaacaagagcacttgttcgcaccg

SEQ ID NO: 71835 - DNA, 53 bp, Artificial
  Synthetic oligonucleotide
tttggcattccaatctgaatgatgccacgtaccagagaacaagagcgcttgtt

SEQ ID NO: 71836 - DNA, 60 bp, Artificial
  Synthetic oligonucleotide
taagaccaaatgaaaacccagctcacaagagtcaattagtgtggatggcatgccactctg

SEQ ID NO: 71837 - DNA, 60 bp, Artificial
  Synthetic oligonucleotide
cgggatagacccgtttaaattactccaaaacagtcaagtgttcagcctgataagaccaaa

SEQ ID NO: 71838 - DNA, 60 bp, Artificial
  Synthetic oligonucleotide
gcagtggcaagtgggcatgactttgaaagggaagggtattcactggtcgggatagacccg

SEQ ID NO: 71839 - DNA, 60 bp, Artificial
  Synthetic oligonucleotide
caagaggaaagctttccacaagaggagttcagattgcctcaaatgagaatgtggaagcca

SEQ ID NO: 71840 - DNA, 60 bp, Artificial
  Synthetic oligonucleotide
taagaccaaatgaaaacccagctcacaagagccaattagtgtggatggcatgccactctg

SEQ ID NO: 71841 - DNA, 60 bp, Artificial
  Synthetic oligonucleotide
taagaccaaatgaaaacccagctcacaagagtcaattagtgtggatggcatgtcactctg

SEQ ID NO: 71842 - DNA, 60 bp, Artificial
  Synthetic oligonucleotide
tccgctggccagatcagtgtgcaacctacattctcagtgcaacggaatctcccttttgaa

SEQ ID NO: 71843 - DNA, 60 bp, Artificial
  Synthetic oligonucleotide
cgctggccagatcagtgtgcaacctacattctcagtgcaacggaatctcccttttgaaag

SEQ ID NO: 71844 - DNA, 60 bp, Artificial
  Synthetic oligonucleotide
gtggaagccatggattccaataccttagagctgagaagcagatactgggccataaggacc

SEQ ID NO: 71845 - DNA, 60 bp, Artificial
  Synthetic oligonucleotide
ggattccaataccttagagctgagaagcagatactgggccataaggaccagaagtggagg

SEQ ID NO: 71846 - DNA, 60 bp, Artificial
  Synthetic oligonucleotide
gacggacatccgatatgcgaacagaagttataaagatgatggaaagtgcaaagccagaag

SEQ ID NO: 71847 - DNA, 60 bp, Artificial
  Synthetic oligonucleotide
ctcggacgaaaaggcaacgagcccgatcgtgccttcctttgacatgagtaatgaaggatc

SEQ ID NO: 71848 - DNA, 60 bp, Artificial
  Synthetic oligonucleotide
cccttttgaaagagcaaccgttatggcagccttcagcgggaacaatgaaggacggacatc

SEQ ID NO: 71849 - DNA, 60 bp, Artificial
  Synthetic oligonucleotide
caaccgttatggcagccttcagcgggaacaatgaaggacggacatccgatatgcgaacag

SEQ ID NO: 71850 - DNA, 60 bp, Artificial
  Synthetic oligonucleotide
cttgcagtggcaagtgggcatgactttgaaagggaagggtattcactggtcgggatagac

SEQ ID NO: 71851 - DNA, 60 bp, Artificial
  Synthetic oligonucleotide
cgggaaattctacatccaaatgtgcactgaactcaaactcagtgactatgagggacgact

SEQ ID NO: 71852 - DNA, 60 bp, Artificial
  Synthetic oligonucleotide
cagtgactatgagggacgactaatccaaaatagcataacaatagagagaatggtgctctc

SEQ ID NO: 71853 - DNA, 60 bp, Artificial
  Synthetic oligonucleotide
gtggggaacgccaggatgccacagaaatcagagcatctgtcggaaaaatgattggcggaa

SEQ ID NO: 71854 - DNA, 60 bp, Artificial
  Synthetic oligonucleotide
attggcggaatcgggaaattctacatccaaatgtgcactgaactcaaactcagtgactat

SEQ ID NO: 71855 - DNA, 60 bp, Artificial
  Synthetic oligonucleotide
gggttgcatatgaaagaatgtgcaatattctcaaaggaaaatttcagacagctgcccaga

SEQ ID NO: 71856 - DNA, 60 bp, Artificial
  Synthetic oligonucleotide
aaacgctgagattgaagatctcattttcctggcacggtcagcacttattctaaggggatc

SEQ ID NO: 71857 - DNA, 60 bp, Artificial
  Synthetic oligonucleotide
gaggaaagctttccacaagaggagttcagattgcctcaaatgagaatgtggaagccatgg

SEQ ID NO: 71858 - DNA, 60 bp, Artificial
  Synthetic oligonucleotide
gaggaaagctttccacaagaggagttcagattgcttcaaatgagaatgtggaagccatgg

SEQ ID NO: 71859 - DNA, 51 bp, Artificial
  Synthetic oligonucleotide
attatgtgggcctgccaaaaaggcaacattaggtgcaacatttgcatttga

SEQ ID NO: 71860 - DNA, 60 bp, Artificial
  Synthetic oligonucleotide
caccgaagagggagcaattgttggcgaaatctcactattgccttcttttccaggacatac

SEQ ID NO: 71861 - DNA, 60 bp, Artificial
  Synthetic oligonucleotide
tcaccgaagagggagcaattgttggcgaaatctcactattgccttcttttccaggacata

SEQ ID NO: 71862 - DNA, 60 bp, Artificial
  Synthetic oligonucleotide
tgaccgactagagaccctagtattattaagggctttcaccgaagagggagcaattgttgg

SEQ ID NO: 71863 - DNA, 60 bp, Artificial
  Synthetic oligonucleotide
tgaccgactagagaccctagtattactaaaggctttcaccgaagagggagcaattgttgg

SEQ ID NO: 71864 - DNA, 60 bp, Artificial
  Synthetic oligonucleotide
caatggtcgggagaagagcaacagctattctcagaaaagcaaccaggagattgatccagt

SEQ ID NO: 71865 - DNA, 60 bp, Artificial
  Synthetic oligonucleotide
gttaatagtaagtgggagagacgagcagtcaattgctgaggcaataattgtggccatggt

SEQ ID NO: 71866 - DNA, 60 bp, Artificial
  Synthetic oligonucleotide
aggcaataattgtggccatggtattttcacaagaggattgcatgatcaaggcagttaggg

SEQ ID NO: 71867 - DNA, 60 bp, Artificial
  Synthetic oligonucleotide
ctttgtcaatagggcaaaccagcgactgaatcccatgcaccaactcttgaggcatttcca

SEQ ID NO: 71868 - DNA, 60 bp, Artificial
  Synthetic oligonucleotide
tcccatgcaccaactcttgaggcatttccaaaaagatgcaaaagtgcttttccagaactg

SEQ ID NO: 71869 - DNA, 60 bp, Artificial
  Synthetic oligonucleotide
cagttctcctcactgactgtgaatgtgagaggatcagggttgaggatactggtaagaggc

SEQ ID NO: 71870 - DNA, 60 bp, Artificial
  Synthetic oligonucleotide
aataataaaacttctcccctttgctgctgctccaccggaacagagtaggatgcagttctc

SEQ ID NO: 71871 - DNA, 60 bp, Artificial
  Synthetic oligonucleotide
atgtgcttggaacatttgacactgtccaaataataaaacttctcccctttgctgctgctc

SEQ ID NO: 71872 - DNA, 60 bp, Artificial
  Synthetic oligonucleotide
cagcaaatgcgggatgtgcttggaacatttgacactgtccaaataataaaacttctcccc

SEQ ID NO: 71873 - DNA, 60 bp, Artificial
  Synthetic oligonucleotide
gtggaccatatggccataatcaaaaagtacacatcaggaaggcaagagaagaaccccgca

SEQ ID NO: 71874 - DNA, 60 bp, Artificial
  Synthetic oligonucleotide
ttgacactgtccaaataataaaacttctcccctttgctgctgctccaccggaacagagta

SEQ ID NO: 71875 - DNA, 60 bp, Artificial
  Synthetic oligonucleotide
ccctctggagcaaaacaaacgatgctggatcggaccgcgtgatggtatcacctctggccg

SEQ ID NO: 71876 - DNA, 60 bp, Artificial
  Synthetic oligonucleotide
agtctcttgtccctaaggcaaccagaagtcgttacagtggattcgtgaggacactgttcc

SEQ ID NO: 71877 - DNA, 60 bp, Artificial
  Synthetic oligonucleotide
cagaagtcgttacagtggattcgtgaggacactgttccagcaaatgcgggatgtgcttgg

SEQ ID NO: 71878 - DNA, 60 bp, Artificial
  Synthetic oligonucleotide
acccattagcatctctcttggaaatgtgccacagcactcagattggaggaataaggatgg

SEQ ID NO: 71879 - DNA, 60 bp, Artificial
  Synthetic oligonucleotide
cctctggccgtaacatggtggaataggaatggcccaacaacaagcacagttcactaccct

SEQ ID NO: 71880 - DNA, 60 bp, Artificial
  Synthetic oligonucleotide
agacatatgcaaggcagcaatggggctgaggattagctcctctttcagctttggtgggtt

SEQ ID NO: 71881 - DNA, 60 bp, Artificial
  Synthetic oligonucleotide
ctcccctttgctgctgctccaccggaacagagtaggatgcagttctcctcactgactgtg

SEQ ID NO: 71882 - DNA, 60 bp, Artificial
  Synthetic oligonucleotide
gtgctgcacttaactcagggaacatgctgggagcaaatgtacactccaggaggagaagtg

SEQ ID NO: 71883 - DNA, 60 bp, Artificial
  Synthetic oligonucleotide
ctgggaaagtttgaaaattcaatggtcacaagatcccacgatgttatacaacaaaatgga

SEQ ID NO: 71884 - DNA, 60 bp, Artificial
  Synthetic oligonucleotide
aacacttatcaatggatcatcaggaactgggaaagtttgaaaattcaatggtcacaagat

SEQ ID NO: 71885 - DNA, 53 bp, Artificial
  Synthetic oligonucleotide
aaaagtacacatcaggaaggcaagagaagaaccccgcactcagaatgaagtgg

SEQ ID NO: 71886 - DNA, 60 bp, Artificial
  Synthetic oligonucleotide
attgctcccttgatggtggcatacatgctagaaagagagttggttcgtaagacgaggttt

SEQ ID NO: 71887 - DNA, 60 bp, Artificial
  Synthetic oligonucleotide
gggatcaacgagggaacgtactattgtctcccgaagaggtcagcgagacacaagggacgg

SEQ ID NO: 71888 - DNA, 60 bp, Artificial
  Synthetic oligonucleotide
ttccagcacggagagagtggtagtgagcattgaccgatttttgagggttcgggatcaacg

SEQ ID NO: 71889 - DNA, 60 bp, Artificial
  Synthetic oligonucleotide
cgctgagagggataagagtcagcaaaatgggagtagatgaatattccagcacggagagag

SEQ ID NO: 71890 - DNA, 60 bp, Artificial
  Synthetic oligonucleotide
tacaacaaaatggaatttgaaccattccagtctcttgtccctaaggcaaccagaagtcgt

SEQ ID NO: 71891 - DNA, 60 bp, Artificial
  Synthetic oligonucleotide
gggaatgatcgggatattgcctgatatgaccccaagcacggaaatgtcgctgagagggat

SEQ ID NO: 71892 - DNA, 60 bp, Artificial
  Synthetic oligonucleotide
tccagatgaaggcacagctggagtggagtctgctgtcctgaggggatttctcattttggg

SEQ ID NO: 71893 - DNA, 60 bp, Artificial
  Synthetic oligonucleotide
ccaccggaacagagtaggatgcagttctcctcactgactgtgaatgtgagaggatcaggg

SEQ ID NO: 71894 - DNA, 60 bp, Artificial
  Synthetic oligonucleotide
gacgaggtttctcccggtggctggtgggacaggcagtgtttatattgaagtgctgcactt

SEQ ID NO: 71895 - DNA, 60 bp, Artificial
  Synthetic oligonucleotide
tgtgggagatcaatggtcctgagtcagtgctggtcaacacttatcaatggatcatcagga

SEQ ID NO: 71896 - DNA, 60 bp, Artificial
  Synthetic oligonucleotide
gcattgactgaagatccagatgaaggcacagctggagtggagtctgctgtcctgagggga

SEQ ID NO: 71897 - DNA, 60 bp, Artificial
  Synthetic oligonucleotide
agagttggttcgtaagacgaggtttctcccggtggctggtgggacaggcagtgtttatat

SEQ ID NO: 71898 - DNA, 60 bp, Artificial
  Synthetic oligonucleotide
aagcaaccaaaaggcttacaattcttggaaaggatgcaggtgcattgactgaagatccag

SEQ ID NO: 71899 - DNA, 60 bp, Artificial
  Synthetic oligonucleotide
ctccaggattgtaaaattgctcccttgatggtggcatacatgctagaaagagagttggtt

SEQ ID NO: 71900 - DNA, 60 bp, Artificial
  Synthetic oligonucleotide
tttgaaccattccagtctcttgtccctaaggcaaccagaagtcgttacagtggattcgtg

SEQ ID NO: 71901 - DNA, 60 bp, Artificial
  Synthetic oligonucleotide
gccaaggaggcacaggatgtgatcatggaagttgttttcccaaatgaagtgggggcaaga

SEQ ID NO: 71902 - DNA, 60 bp, Artificial
  Synthetic oligonucleotide
gagatctaatgtcgcagtcccgcactcgcgagatactcactaagaccactgtggaccata

SEQ ID NO: 71903 - DNA, 60 bp, Artificial
  Synthetic oligonucleotide
ttaaaataagaaggagggttgacacaaaccctggtcacgcagatctcagtgccaaggagg

SEQ ID NO: 71904 - DNA, 60 bp, Artificial
  Synthetic oligonucleotide
tggtacctttggccctgtccacttcagaaatcaagttaaaataagaaggagggttgacac

SEQ ID NO: 71905 - DNA, 60 bp, Artificial
  Synthetic oligonucleotide
caaataccagcagaaatgctagcaagcattgacctgaagtatttcaatgaatcaacaaga

SEQ ID NO: 71906 - DNA, 60 bp, Artificial
  Synthetic oligonucleotide
cagataccagcagaaatgctagcaagcattgacctgaagtatttcaatgaatcaacaagg

SEQ ID NO: 71907 - DNA, 60 bp, Artificial
  Synthetic oligonucleotide
acaaataccagcagaaatgctagcaagcattgacctgaagtatttcaatgaatcaacaag

SEQ ID NO: 71908 - DNA, 60 bp, Artificial
  Synthetic oligonucleotide
atcgaaaaagaattctcagaagtagaagggagaattcaggacctcgagaaatatgttgaa

SEQ ID NO: 71909 - DNA, 60 bp, Artificial
  Synthetic oligonucleotide
gaaaaggaattctcagaagtagaagggagaattcaggacctcgagaaatatgttgaagac

SEQ ID NO: 71910 - DNA, 60 bp, Artificial
  Synthetic oligonucleotide
gatcgaaaaagaattctcagaagtagaagggagaattcaggacctcgagaaatatgttga

SEQ ID NO: 71911 - DNA, 60 bp, Artificial
  Synthetic oligonucleotide
cgaatggtctaacagctaatgagtcaggaaggctaatagatttcctcaaggatgtgatgg

SEQ ID NO: 71912 - DNA, 60 bp, Artificial
  Synthetic oligonucleotide
atgatgccgttgcaactacacactcctggattcccaagaggaaccgctccattctcaaca

SEQ ID NO: 71913 - DNA, 60 bp, Artificial
  Synthetic oligonucleotide
aggaagagctgatactaaaatactattcattgaagaggggaaaatcgttcatattagccc

SEQ ID NO: 71914 - DNA, 60 bp, Artificial
  Synthetic oligonucleotide
aggaagagctgatactaaaatactattcattgaagaggggaaaattgttcatactagccc

SEQ ID NO: 71915 - DNA, 60 bp, Artificial
  Synthetic oligonucleotide
agaaagagctgatactaaaatactattcattgaagaggggaaaatcgttcacattagccc

SEQ ID NO: 71916 - DNA, 60 bp, Artificial
  Synthetic oligonucleotide
agaaagagctgatactaaaatactattcattgaagaggggaaaatcgttcatattagccc

SEQ ID NO: 71917 - DNA, 60 bp, Artificial
  Synthetic oligonucleotide
agacagagctgatactaaaatactattcattgaagaggggaaaatcgttcatattagccc

SEQ ID NO: 71918 - DNA, 60 bp, Artificial
  Synthetic oligonucleotide
agacagagctgatactaaaatactattcattgaagaggggaagatcgttcatattagccc

SEQ ID NO: 71919 - DNA, 56 bp, Artificial
  Synthetic oligonucleotide
atgacgtgtggatgggaagaacgatcagcgaggagttacgctcaggttatgaaacc

SEQ ID NO: 71920 - DNA, 60 bp, Artificial
  Synthetic oligonucleotide
atgacgtgtggatgggaagaacgatcagcgaggagttacgctcaggttatgaaaccttca

SEQ ID NO: 71921 - DNA, 60 bp, Artificial
  Synthetic oligonucleotide
agcttttaaggcattttcagaaagatgcgaaagtgctttttcagaattggggaattgaac

SEQ ID NO: 71922 - DNA, 60 bp, Artificial
  Synthetic oligonucleotide
aatcagcggttgaatcccatgcatcagcttttaaggcattttcagaaagatgcgaaagtg

SEQ ID NO: 71923 - DNA, 60 bp, Artificial
  Synthetic oligonucleotide
ttgaatcccatgcatcagcttttaaggcattttcagaaagatgcgaaagtgctttttcag

SEQ ID NO: 71924 - DNA, 60 bp, Artificial
  Synthetic oligonucleotide
gaatcccatgcatcagcttttaaggcattttcagaaagatgcgaaagtgctttttcagaa

SEQ ID NO: 71925 - DNA, 60 bp, Artificial
  Synthetic oligonucleotide
cagcggttgaatcccatgcatcagcttttaaggcattttcagaaagatgcgaaagtgctt

SEQ ID NO: 71926 - DNA, 56 bp, Artificial
  Synthetic oligonucleotide
ttgaatcccatgcatcagcttttaaggcattttcagaaagatgcgaaagtgctttt

SEQ ID NO: 71927 - DNA, 60 bp, Artificial
  Synthetic oligonucleotide
catgcatcagcttttaaggcattttcagaaagatgcgaaagtgctttttcagaattgggg

SEQ ID NO: 71928 - DNA, 60 bp, Artificial
  Synthetic oligonucleotide
catcagcttttaaggcattttcagaaagatgcgaaagtgctttttcagaattggggaatt

SEQ ID NO: 71929 - DNA, 60 bp, Artificial
  Synthetic oligonucleotide
accccatgcatcagcttttaaggcattttcagaaagatgcgaaagtgctttttcagaatt

SEQ ID NO: 71930 - DNA, 60 bp, Artificial
  Synthetic oligonucleotide
atcccatgcatcagcttttaaggcattttcagaaagatgcgaaagtgctttttcagaatt

SEQ ID NO: 71931 - DNA, 60 bp, Artificial
  Synthetic oligonucleotide
gagaaccttatgtgtcgtgcgatcctggcaagtgttatcaatttgcacttgggcagggaa

SEQ ID NO: 71932 - DNA, 54 bp, Artificial
  Synthetic oligonucleotide
ggtgtcagatgtgtctgcagagacaactggaaaggctccaataggcccatcgta

SEQ ID NO: 71933 - DNA, 60 bp, Artificial
  Synthetic oligonucleotide
aatccctttgtcagccataaagaggttgaatccgtaaacaatgctgtggtgatgccagcc

SEQ ID NO: 71934 - DNA, 60 bp, Artificial
  Synthetic oligonucleotide
gaaattgagtccgtaaacaatgctgtggtgatgccagcccatggcccagccaagagcatg

SEQ ID NO: 71935 - DNA, 60 bp, Artificial
  Synthetic oligonucleotide
atcaaaatggaccaggcaatcatggagaaaaacatcatgttgaaagcgaatttcagtgtg

SEQ ID NO: 71936 - DNA, 60 bp, Artificial
  Synthetic oligonucleotide
gggtctgtccagtagaataagcatctattggacaatagtaaaaccgggagacatactttt

SEQ ID NO: 71937 - DNA, 60 bp, Artificial
  Synthetic oligonucleotide
ggtctgtccagtagaataagcatctattggacaatagtaaaaccgggagacatacttttg

SEQ ID NO: 71938 - DNA, 60 bp, Artificial
  Synthetic oligonucleotide
gttcgagcatcagggagagtcacagtctctaccaaaagaagccaacaaactgtaatcccg

SEQ ID NO: 71939 - DNA, 60 bp, Artificial
  Synthetic oligonucleotide
tatcctcagaacccaggagtcggaatgcgtttgtatcaatggaacttgtacagtagtaat

SEQ ID NO: 71940 - DNA, 60 bp, Artificial
  Synthetic oligonucleotide
atcctcagaacccaggagtcggaatgcgtttgtatcaatggaacttgtacagtagtaatg

SEQ ID NO: 71941 - DNA, 60 bp, Artificial
  Synthetic oligonucleotide
tacaccatggacacagtcaacagaacacaccaatattcagaaaaagggaggtggacgaca

SEQ ID NO: 71942 - DNA, 60 bp, Artificial
  Synthetic oligonucleotide
tacaccatggacacagtcaacagaacacaccaatattcagaaaaagggaaatggacgaca

SEQ ID NO: 71943 - DNA, 60 bp, Artificial
  Synthetic oligonucleotide
tgaggcacttaacatgaccatggcctccacacctgcttcgcgatacataactgacatgac

SEQ ID NO: 71944 - DNA, 60 bp, Artificial
  Synthetic oligonucleotide
atgaggcacttaacatgaccatggcctccacacctgcttcgcgatacataactgacatga

SEQ ID NO: 71945 - DNA, 60 bp, Artificial
  Synthetic oligonucleotide
gaaactggttcatgctaatgcccaagcagaaagtggacggacctctttgcatcagaatgg

SEQ ID NO: 71946 - DNA, 60 bp, Artificial
  Synthetic oligonucleotide
gaaacaatggaagtcattcaacaaacaagggtggacaaactgacccaaggtcgccagacc

SEQ ID NO: 71947 - DNA, 60 bp, Artificial
  Synthetic oligonucleotide
ttgttcaacaaacaagagtggacaaactgacccaaggtcgccagacctatgactggacat

SEQ ID NO: 71948 - DNA, 60 bp, Artificial
  Synthetic oligonucleotide
gagtggacaaactgacccaaggtcgccagacctatgactggacattgaatagaaaccagc

SEQ ID NO: 71949 - DNA, 60 bp, Artificial
  Synthetic oligonucleotide
aatgctactgaactggttcagagttcctcaacaggtagaatatgcgacagtcctcaccga

SEQ ID NO: 71950 - DNA, 60 bp, Artificial
  Synthetic oligonucleotide
gatcgaaaaagaattctcagaagtagaagggagaattcaggacctagagaaatacgttga

SEQ ID NO: 71951 - DNA, 60 bp, Artificial
  Synthetic oligonucleotide
gactatagcattgtttccagttatgtgtgctcaggacttgttggagacacacccagaaaa

SEQ ID NO: 71952 - DNA, 60 bp, Artificial
  Synthetic oligonucleotide
aattatagcattgtttccagttatgtgtgctcaggacttgttggagacacacccagaaaa

SEQ ID NO: 71953 - DNA, 60 bp, Artificial
  Synthetic oligonucleotide
gattatgcctcccttaggtcactagttgcctcatccggcaccctggaatttacccaagaa

SEQ ID NO: 71954 - DNA, 60 bp, Artificial
  Synthetic oligonucleotide
taatgctactgagctggttcagagttcctcaacaggtagaatatgcgacagtcctcaccg

SEQ ID NO: 71955 - DNA, 60 bp, Artificial
  Synthetic oligonucleotide
aatcgaaaaggaattctcagaagtagaagggagaattcaggacctcgagaagtatgttga

SEQ ID NO: 71956 - DNA, 60 bp, Artificial
  Synthetic oligonucleotide
aatcgaaaaagaattctcagaagtagaagggagaattcaggaccttgagaaatatgttga

SEQ ID NO: 71957 - DNA, 60 bp, Artificial
  Synthetic oligonucleotide
ggagctatgcgcaggcttgccgaccaaagtctcccgccgaacttctcctgccttgagaat

SEQ ID NO: 71958 - DNA, 60 bp, Artificial
  Synthetic oligonucleotide
ggaaccatgcgcaggcttgccgaccaaagtctcccgccgaacttctcctgccttgagaat

SEQ ID NO: 71959 - DNA, 60 bp, Artificial
  Synthetic oligonucleotide
gggactatgcgcaggcttgccgaccaaagtctcccgccgaacttctcctgccttgagaat

SEQ ID NO: 71960 - DNA, 60 bp, Artificial
  Synthetic oligonucleotide
ggccatggctttccttgaagaatcccacccagggatctttgagaactcatgccttgaaac

SEQ ID NO: 71961 - DNA, 60 bp, Artificial
  Synthetic oligonucleotide
cctgcatagggtcaatcagaaatggaacttatgaccatgatgtatacagagacgaagcat

SEQ ID NO: 71962 - DNA, 60 bp, Artificial
  Synthetic oligonucleotide
ggtcaatcagaaatggaacttatgaccatgatgtatacagagacgaagcattaaacaacc

SEQ ID NO: 71963 - DNA, 60 bp, Artificial
  Synthetic oligonucleotide
gaacttatgaccatgatgtatacagagacgaagcattaaacaaccggttccagatcaaag

SEQ ID NO: 71964 - DNA, 60 bp, Artificial
  Synthetic oligonucleotide
gcctgattaatgatccctgggttttgcttaatgcgtcttggttcaactccttcctaacac

SEQ ID NO: 71965 - DNA, 60 bp, Artificial
  Synthetic oligonucleotide
agtgcctgattaatgatccctgggttttgcttaatgcgtcttggttcaactccttcctaa

SEQ ID NO: 71966 - DNA, 60 bp, Artificial
  Synthetic oligonucleotide
gatagatgctctattgggagaccctcattgtgatggctttcaaaataaggaatgggacct

SEQ ID NO: 71967 - DNA, 60 bp, Artificial
  Synthetic oligonucleotide
agatgctctattgggagaccctcattgtgatggcttccaaaatgagaaatgggacctttt

SEQ ID NO: 71968 - DNA, 60 bp, Artificial
  Synthetic oligonucleotide
agatgctctattgggagaccctcattgtgatggcttccaaaatgaggaatgggacctttt

SEQ ID NO: 71969 - DNA, 60 bp, Artificial
  Synthetic oligonucleotide
cactgatagatgctctattgggagaccctcattgtgatggcttccaaaataaggaatggg

SEQ ID NO: 71970 - DNA, 60 bp, Artificial
  Synthetic oligonucleotide
gatagatgctctattgggagaccctcattgtgatggcttccaaaataaggaatgggacct

SEQ ID NO: 71971 - DNA, 60 bp, Artificial
  Synthetic oligonucleotide
tagatgctctattgggagaccctcattgtgatggcttccaaaataaggaatgggaccttt

SEQ ID NO: 71972 - DNA, 60 bp, Artificial
  Synthetic oligonucleotide
ctgatagatgctctattgggagaccctcattgtgatggcttccaaaataaggaatgggac

SEQ ID NO: 71973 - DNA, 60 bp, Artificial
  Synthetic oligonucleotide
gggtaaggggtctgtctagtagaataagcatctattggacaatagtaaaaccgggagaca

SEQ ID NO: 71974 - DNA, 60 bp, Artificial
  Synthetic oligonucleotide
tatcctcgatatcctggtgttagatgtgtctgcagagacaactggaaaggctccaatagg

SEQ ID NO: 71975 - DNA, 60 bp, Artificial
  Synthetic oligonucleotide
gagagaaccttatgtgtcatgcgatcctggcaagtgttatcaatttgcactcgggcaagg

SEQ ID NO: 71976 - DNA, 60 bp, Artificial
  Synthetic oligonucleotide
catgaggggatacaagcaggagtggataggttctacaggacctgcaaattagttggaatc

SEQ ID NO: 71977 - DNA, 60 bp, Artificial
  Synthetic oligonucleotide
caaggactacaggtacacatatcggtgccacaggggtgacacgcaaatccaaacgaggag

SEQ ID NO: 71978 - DNA, 60 bp, Artificial
  Synthetic oligonucleotide
agaaaccagccggctgcaactgctttggccaacactatagaggtcttcaggtcgaacggt

SEQ ID NO: 71979 - DNA, 60 bp, Artificial
  Synthetic oligonucleotide
tgccagcgcaaaatgccataagtactacattcccttacactggagatcctccatacagcc

SEQ ID NO: 71980 - DNA, 60 bp, Artificial
  Synthetic oligonucleotide
gcaacacccggaatgcagattagggggtttgtgtacttcgtcgaaacactggcgagaagc

SEQ ID NO: 71981 - DNA, 60 bp, Artificial
  Synthetic oligonucleotide
gcccctataatgttctccaacaaaatggcaagattaggaaaaggatacatgttcgaaagt

SEQ ID NO: 71982 - DNA, 60 bp, Artificial
  Synthetic oligonucleotide
gtgcatagcgtggtccagctcaagttgtcacgatggaaaagcatggctgcatgtttgtgt

SEQ ID NO: 71983 - DNA, 60 bp, Artificial
  Synthetic oligonucleotide
tgtgcatagcgtggtccagctcaagttgtcacgatggaaaagcatggctgcatgtttgtg

SEQ ID NO: 71984 - DNA, 60 bp, Artificial
  Synthetic oligonucleotide
cgtggtccagctcaagttgtcacgatggaaaagcatggctgcatgtttgtgtaactgggc

SEQ ID NO: 71985 - DNA, 60 bp, Artificial
  Synthetic oligonucleotide
gcaattgttacccttatgatgtgccggattatgcctcccttaggtcactagttgcctcat

SEQ ID NO: 71986 - DNA, 60 bp, Artificial
  Synthetic oligonucleotide
cagcaactgttacccttatgatgtgccggattatgcctcccttaggtcactagttgcctc

SEQ ID NO: 71987 - DNA, 60 bp, Artificial
  Synthetic oligonucleotide
ttatgcctcccttaggtcactagttgcctcatcaggcaccctggagtttatcaatgaaga

SEQ ID NO: 71988 - DNA, 60 bp, Artificial
  Synthetic oligonucleotide
gaatctgatgaggcacttaaaatgaccatggcctccacacctgcttcacgatacataact

SEQ ID NO: 71989 - DNA, 60 bp, Artificial
  Synthetic oligonucleotide
gactatgagggacgactaatccaaaatagcataacaatagagagaatggtgctctctgct

SEQ ID NO: 71990 - DNA, 60 bp, Artificial
  Synthetic oligonucleotide
tatcctcgatatcctggtgtcagatgtgtctgcagagacaactggaaaggctcaaatagg

SEQ ID NO: 71991 - DNA, 60 bp, Artificial
  Synthetic oligonucleotide
gaaagattatagcattgtttccagttatgtgtgctcaggacttgttggagacacacccag

SEQ ID NO: 71992 - DNA, 60 bp, Artificial
  Synthetic oligonucleotide
caatgaactgagcaaccttgcaaaaggggaaaaggctaatgtgctaattgggcaaggaga

SEQ ID NO: 71993 - DNA, 60 bp, Artificial
  Synthetic oligonucleotide
tgacaaattgtacatttggggggttcaccacccgagcacggacagtgaccaaaccagcct

SEQ ID NO: 71994 - DNA, 60 bp, Artificial
  Synthetic oligonucleotide
cggtgcttttatgtggagttgataaggggaaggaaagaggaaactaaagtctggtggacc

SEQ ID NO: 71995 - DNA, 60 bp, Artificial
  Synthetic oligonucleotide
atcggtgcttttatgtggagttgataaggggaaggaaagaggaaactaaagtctggtgga

SEQ ID NO: 71996 - DNA, 60 bp, Artificial
  Synthetic oligonucleotide
tcatgcgatcctggcaagtgttatcaatttgcacttggacagggaacaacactaaacaac

SEQ ID NO: 71997 - DNA, 60 bp, Artificial
  Synthetic oligonucleotide
ttcaggacctcgagaaatacgttgaagacactaaaatagatctctggtcttacaatgcgg

SEQ ID NO: 71998 - DNA, 60 bp, Artificial
  Synthetic oligonucleotide
gggagaattcaggacctagagaaatacgttgaagacactaaaatagatctctggtcttac

SEQ ID NO: 71999 - DNA, 60 bp, Artificial
  Synthetic oligonucleotide
ccagacctatgattggacattaaacagaaatcaaccggcagcaactgcattagccaacac

SEQ ID NO: 72000 - DNA, 60 bp, Artificial
  Synthetic oligonucleotide
cagacctatgattggacattaaacagaaatcaaccggcagcaactgcattagccaacacc

SEQ ID NO: 72001 - DNA, 60 bp, Artificial
  Synthetic oligonucleotide
gtccagccaagagcatggaatatgatgccgttgcaactacacactcctggattcccaaga

SEQ ID NO: 72002 - DNA, 60 bp, Artificial
  Synthetic oligonucleotide
cagacttatgattggacattaaacagaaatcaaccggcagcaactgcattagccaacacc

SEQ ID NO: 72003 - DNA, 60 bp, Artificial
  Synthetic oligonucleotide
gtccagccaaaagcatggaatatgatgccgttgcaactacacactcctggattcccaaga

SEQ ID NO: 72004 - DNA, 60 bp, Artificial
  Synthetic oligonucleotide
ccagccaaaagcatggaatatgatgccgttgcaactacacactcctggattcccaagagg

SEQ ID NO: 72005 - DNA, 60 bp, Artificial
  Synthetic oligonucleotide
ttgaattcacaagctttttttatcgctatggatttgtggctaattttagcatggagctgc

SEQ ID NO: 72006 - DNA, 60 bp, Artificial
  Synthetic oligonucleotide
gagcatggaatatgatgccgttgcaactacacactcctggattcccaagaggaaccgctc

SEQ ID NO: 72007 - DNA, 60 bp, Artificial
  Synthetic oligonucleotide
ccagacttatgattggacattaaacagaaatcaaccggcagcaactgcattagccaacac

SEQ ID NO: 72008 - DNA, 60 bp, Artificial
  Synthetic oligonucleotide
tggaatatgatgccgttgcaactacacactcctggattcccaagaggaaccgctctatcc

SEQ ID NO: 72009 - DNA, 60 bp, Artificial
  Synthetic oligonucleotide
gagcatagaatatgatgccgttgcaactacacactcctggattcccaagaggaaccgctc

SEQ ID NO: 72010 - DNA, 60 bp, Artificial
  Synthetic oligonucleotide
gcatggaatatgatgccgttgcaactacacactcctggattcccaagaggaaccgctcta

SEQ ID NO: 72011 - DNA, 60 bp, Artificial
  Synthetic oligonucleotide
catctattggacaatagtaaaaccgggagacatacttttgattaacagcacagggaatct

SEQ ID NO: 72012 - DNA, 60 bp, Artificial
  Synthetic oligonucleotide
gcctgcatagggtcaatcagaaatgggacttatgaccatgatgtatacagagacgaagca

SEQ ID NO: 72013 - DNA, 60 bp, Artificial
  Synthetic oligonucleotide
ggaatccagtgatacacttaagatgaccattgcatctgtacctacttcgcgctacctagc

SEQ ID NO: 72014 - DNA, 60 bp, Artificial
  Synthetic oligonucleotide
ggaatccagcgatacacttaagatgaccattgcatctgtacctacttcgcgctacctagc

SEQ ID NO: 72015 - DNA, 60 bp, Artificial
  Synthetic oligonucleotide
tcaggacattgaaaatgaggagaagattccaaaaacaaagaacatgaagaaaacaagcca

SEQ ID NO: 72016 - DNA, 60 bp, Artificial
  Synthetic oligonucleotide
gggggctatatgaagcaatcgaggagtgcctgattaatgatccctgggttttgcttaatg

SEQ ID NO: 72017 - DNA, 60 bp, Artificial
  Synthetic oligonucleotide
ggggctatatgaagcaatcgaggagtgcctgattaatgatccctgggttttgcttaatgc

SEQ ID NO: 72018 - DNA, 60 bp, Artificial
  Synthetic oligonucleotide
ggaaatgacgtgtggatgggaagaacgatcagcgaggagtcacgctcaggttatgaaacc

SEQ ID NO: 72019 - DNA, 60 bp, Artificial
  Synthetic oligonucleotide
gaataagcatctattggacaatagtaaaaccgggagacatacttttgattaatagcacag

SEQ ID NO: 72020 - DNA, 60 bp, Artificial
  Synthetic oligonucleotide
tagaataagcatctattggacaatagtaaaaccgggagacatacttttgattaatagcac

SEQ ID NO: 72021 - DNA, 60 bp, Artificial
  Synthetic oligonucleotide
ctatctattggacaatagtaaaaccgggagacatacttttgattaatagcacagggaatc

SEQ ID NO: 72022 - DNA, 60 bp, Artificial
  Synthetic oligonucleotide
gacacagtgcatgataggaccccttatcgaaccctattgatgaatgagttgggtgttcca

SEQ ID NO: 72023 - DNA, 60 bp, Artificial
  Synthetic oligonucleotide
tgacacaatacatgataggaccccttatcgaaccctattgatgaatgagttgggtgttcc

SEQ ID NO: 72024 - DNA, 60 bp, Artificial
  Synthetic oligonucleotide
tgacacagtgcatgataggaccccttatcgaaccctattgatgaatgagttgggtgttcc

SEQ ID NO: 72025 - DNA, 60 bp, Artificial
  Synthetic oligonucleotide
gacacaatacatgataggaccccttatcgaaccctattgatgaatgagttgggtgttcca

SEQ ID NO: 72026 - DNA, 60 bp, Artificial
  Synthetic oligonucleotide
acaatggaagtcgttcaacaaacaagggtggacaaactgacccaaggtcgccagacctat

SEQ ID NO: 72027 - DNA, 60 bp, Artificial
  Synthetic oligonucleotide
ctgaaggaagaatctgatgaggcacttaaaatgaccatggcctccacacctgcttcgcga

SEQ ID NO: 72028 - DNA, 52 bp, Artificial
  Synthetic oligonucleotide
ttggaatctctagcatggtggaggccatggtgtctagggcccggattgatgt

SEQ ID NO: 72029 - DNA, 52 bp, Artificial
  Synthetic oligonucleotide
ttggaatctctagcatggtggaggccatggtgtctagggcccggattgatgc

SEQ ID NO: 72030 - DNA, 60 bp, Artificial
  Synthetic oligonucleotide
tgcagtcaaaggaatcgggacaatggtgatggagctgatcagaatgatcaaacgggggat

SEQ ID NO: 72031 - DNA, 60 bp, Artificial
  Synthetic oligonucleotide
tgtgcactgaacttaaactcagtgattatgaagggcggttgatccagaacagcttgacaa

SEQ ID NO: 72032 - DNA, 57 bp, Artificial
  Synthetic oligonucleotide
tgcagtcaaaggaatcgggacaatggtgatggagctgatcagaatgatcaaacgggg

SEQ ID NO: 72033 - DNA, 60 bp, Artificial
  Synthetic oligonucleotide
tgctgcagtcaaaggaatcgggacaatggtgatggagctgatcagaatgatcaaacgggg

SEQ ID NO: 72034 - DNA, 60 bp, Artificial
  Synthetic oligonucleotide
gatgattgatggaattgggcgattctacatccaaatgtgcactgaacttaaactcagtga

SEQ ID NO: 72035 - DNA, 60 bp, Artificial
  Synthetic oligonucleotide
gtcgggaagatgattgatggaattgggcgattctacatccaaatgtgcactgaacttaaa

SEQ ID NO: 72036 - DNA, 60 bp, Artificial
  Synthetic oligonucleotide
gtcggaaagatgattgatggaattgggcgattctacatccaaatgtgcactgaacttaaa

SEQ ID NO: 72037 - DNA, 60 bp, Artificial
  Synthetic oligonucleotide
tcagggcatccgtcgggaagatgattgatggaattgggcgattctacatccaaatgtgca

SEQ ID NO: 72038 - DNA, 60 bp, Artificial
  Synthetic oligonucleotide
agggcatccgtcgggaagatgattgatggaattgggcgattctacatccaaatgtgcact

SEQ ID NO: 72039 - DNA, 60 bp, Artificial
  Synthetic oligonucleotide
caggtgctgcagtcaaaggaatcgggacaatggtgatggagctgatcagaatgatcaaac

SEQ ID NO: 72040 - DNA, 60 bp, Artificial
  Synthetic oligonucleotide
tcaaaatcatggcgtcccaaggcaccaaacggtcttatgaacagatggagactgatgggg

SEQ ID NO: 72041 - DNA, 60 bp, Artificial
  Synthetic oligonucleotide
tgcacaaagagcaatggtggatcaagtgagagaaagccggaacccaggaaatgctgagat

SEQ ID NO: 72042 - DNA, 53 bp, Artificial
  Synthetic oligonucleotide
gtcaaaggaatcgggacaatggtgatggagctgatcagaatggtcaaacgggg

SEQ ID NO: 72043 - DNA, 60 bp, Artificial
  Synthetic oligonucleotide
caggaaatgctgagatcgaagatctcatatttttggcaagatctgcattaatattgagag

SEQ ID NO: 72044 - DNA, 60 bp, Artificial
  Synthetic oligonucleotide
cggaacccaggaaatgctgagatcgaagatctcatattttcggcaagatctgcactaata

SEQ ID NO: 72045 - DNA, 60 bp, Artificial
  Synthetic oligonucleotide
tgatggaattgggcgattctacatccaaatgtgcactgaacttaaactcagtgattatga

SEQ ID NO: 72046 - DNA, 60 bp, Artificial
  Synthetic oligonucleotide
cagatggaaactgatggggaacgccagaatgcaactgagattagggcatccgtcgggaag

SEQ ID NO: 72047 - DNA, 60 bp, Artificial
  Synthetic oligonucleotide
cagatggaaactgatggggaacgccagaatgcaactgagattagggcatccgtcggaaag

SEQ ID NO: 72048 - DNA, 60 bp, Artificial
  Synthetic oligonucleotide
cagatggagactgatggggaacgccagaatgcaactgagattagggcatccgtcggaaag

SEQ ID NO: 72049 - DNA, 60 bp, Artificial
  Synthetic oligonucleotide
ggcgtcccaaggcaccaaacggtcttatgaacagatggagactgatggggaacgccagaa

SEQ ID NO: 72050 - DNA, 60 bp, Artificial
  Synthetic oligonucleotide
atggcgtcccaaggcaccaaacggtcttatgaacagatggagactgatggggaacgccag

SEQ ID NO: 72051 - DNA, 60 bp, Artificial
  Synthetic oligonucleotide
catggcgtcccaaggcaccaaacggtcttatgaacagatggagactgatggggaacgcca

SEQ ID NO: 72052 - DNA, 60 bp, Artificial
  Synthetic oligonucleotide
aaaatcatggcgtcccaaggcaccaaacggtcttatgaacagatggagactgatggggaa

SEQ ID NO: 72053 - DNA, 60 bp, Artificial
  Synthetic oligonucleotide
gaaactggttcatgctgatgcccaagcagaaagtggaaggacctctttgcatcagaatgg

SEQ ID NO: 72054 - DNA, 60 bp, Artificial
  Synthetic oligonucleotide
gttcatgctaatgcccaagcagaaagtggaaggacctctttgcatcaaaatggaccaggc

SEQ ID NO: 72055 - DNA, 60 bp, Artificial
  Synthetic oligonucleotide
ctttccttgaagaatcccacccagggatctttgagaactcatgccttgaaacaatggaag

SEQ ID NO: 72056 - DNA, 60 bp, Artificial
  Synthetic oligonucleotide
ctttccttgaagaatcccacccagggatctttgagaactcatgccttgaaacaatggaaa

SEQ ID NO: 72057 - DNA, 50 bp, Artificial
  Synthetic oligonucleotide
aaaatccctaaaaggaagaggtagcacccttggtcttaacatagagacag

SEQ ID NO: 72058 - DNA, 60 bp, Artificial
  Synthetic oligonucleotide
tccttgatcggctccgccgagatcaaaaatccctaaaaggaagaggtagcacccttggtc

SEQ ID NO: 72059 - DNA, 60 bp, Artificial
  Synthetic oligonucleotide
aagaatccaacgagacacttaaaatgaccattgcatctgtaccttcttcgcgctacctag

SEQ ID NO: 72060 - DNA, 60 bp, Artificial
  Synthetic oligonucleotide
agtggattctgaaagaagaatccaacgagacacttaaaatgaccattgcatctgtacctt

SEQ ID NO: 72061 - DNA, 60 bp, Artificial
  Synthetic oligonucleotide
taattgaagaagtgcggcacaaattgaagatgacagagaatagtttcgagcaaataacat

SEQ ID NO: 72062 - DNA, 60 bp, Artificial
  Synthetic oligonucleotide
caaataacatttatgcaagccttacaattattgcttgaagtggaacaagagatgagaact

SEQ ID NO: 72063 - DNA, 60 bp, Artificial
  Synthetic oligonucleotide
tgcaagccttacaattattgcttgaagtggaacaagagatgagaactttctcgtttcagc

SEQ ID NO: 72064 - DNA, 60 bp, Artificial
  Synthetic oligonucleotide
catcggagggcttgaatggaatggtaacacagttcgagtctctgaaaatctacagagatt

SEQ ID NO: 72065 - DNA, 60 bp, Artificial
  Synthetic oligonucleotide
tcatcggagggcttgaatggaatggtaacacagttcgagtctctgaaaatctacagagat

SEQ ID NO: 72066 - DNA, 60 bp, Artificial
  Synthetic oligonucleotide
tttcactgaagagggagcaattgttggagaaatttcaccattaatttctcttccaggaca

SEQ ID NO: 72067 - DNA, 60 bp, Artificial
  Synthetic oligonucleotide
tttgaccggttggagactttgatactactgagggctttcactgaagagggagcaattgtt

SEQ ID NO: 72068 - DNA, 60 bp, Artificial
  Synthetic oligonucleotide
aacttcagtgtgatttttgaccggttggagactttgatactactgagggctttcactgaa

SEQ ID NO: 72069 - DNA, 60 bp, Artificial
  Synthetic oligonucleotide
gtgtgcgaatggaccaggcgatcatggaaaagaacatcatactgaaagcgaacttcagtg

SEQ ID NO: 72070 - DNA, 60 bp, Artificial
  Synthetic oligonucleotide
gctcatgcctaggcaaacggtggcaggctctctttgtgtgcgaatggaccaggcgatcat

SEQ ID NO: 72071 - DNA, 60 bp, Artificial
  Synthetic oligonucleotide
aagagattggttcatgctcatgcctaggcaaacggtggcaggctctctttgtgtgcgaat

SEQ ID NO: 72072 - DNA, 60 bp, Artificial
  Synthetic oligonucleotide
ggcgggagcaattgggtcagaaatttgaggaaataagatggctaattgaagaagtgcggc

SEQ ID NO: 72073 - DNA, 60 bp, Artificial
  Synthetic oligonucleotide
tgaaaagtggcgggagcaattgggtcagaaatttgaggaaataagatggctaattgaaga

SEQ ID NO: 72074 - DNA, 60 bp, Artificial
  Synthetic oligonucleotide
gctggttcagagttcctcaacaggtagaatatgcgacagtcctcaccgaatccttgatgg

SEQ ID NO: 72075 - DNA, 60 bp, Artificial
  Synthetic oligonucleotide
gctactgagctggttcagagttcctcaacaggtagaatatgcgacagtcctcaccgaatc

SEQ ID NO: 72076 - DNA, 60 bp, Artificial
  Synthetic oligonucleotide
tgctactgagctggttcagagttcctcaacaggtagaatatgcgacagtcctcaccgaat

SEQ ID NO: 72077 - DNA, 60 bp, Artificial
  Synthetic oligonucleotide
gattgagtctgtaaacaatgctgtggtgatgccagcccatggtccagccaaaagcatgga

SEQ ID NO: 72078 - DNA, 60 bp, Artificial
  Synthetic oligonucleotide
gcaaatttgacaaattgtacatttggggggttcaccacccgagcacggacagagaccaaa

SEQ ID NO: 72079 - DNA, 60 bp, Artificial
  Synthetic oligonucleotide
cacagtggaccatatggccataattaagaagtatacatcagggagacaggaaaagaaccc

SEQ ID NO: 72080 - DNA, 60 bp, Artificial
  Synthetic oligonucleotide
tttaattgaagacccagatgaaagcacatccggagtggagtccgctgtcttgagaggatt

SEQ ID NO: 72081 - DNA, 60 bp, Artificial
  Synthetic oligonucleotide
tctaattgaagacccagatgaaagcacatccggagtggagtccgctgtcttgagaggatt

SEQ ID NO: 72082 - DNA, 60 bp, Artificial
  Synthetic oligonucleotide
ctggcactttaattgaagacccagatgaaagcacatccggagtggagtccgctgtcttga

SEQ ID NO: 72083 - DNA, 60 bp, Artificial
  Synthetic oligonucleotide
aacactatggagtaaaatgagtgatgctgggtcagatcgagtgatggtatcacctttggc

SEQ ID NO: 72084 - DNA, 60 bp, Artificial
  Synthetic oligonucleotide
ataaaccctggtcatgcagacctcagtgccaaggaggcacaagatgtaattatggaagtt

SEQ ID NO: 72085 - DNA, 60 bp, Artificial
  Synthetic oligonucleotide
taaaagcagttagaggtgacctgaatttcgttaacagagcaaatcagcggttgaacccca

SEQ ID NO: 72086 - DNA, 60 bp, Artificial
  Synthetic oligonucleotide
taaaagcagttagaggtgacctgaatttcgttaacagggcaaatcagcgattgaacccca

SEQ ID NO: 72087 - DNA, 60 bp, Artificial
  Synthetic oligonucleotide
gataaaagcagttagaggtgacctgaatttcgttaacagggcaaatcagcggttgaatcc

SEQ ID NO: 72088 - DNA, 60 bp, Artificial
  Synthetic oligonucleotide
aagaggattgcatgataaaagcagttagaggtgacctgaatttcgttaacagggcaaatc

SEQ ID NO: 72089 - DNA, 60 bp, Artificial
  Synthetic oligonucleotide
attgcatgataaaagcagttagaggtgacctgaatttcgttaacagggcaaatcagcggt

SEQ ID NO: 72090 - DNA, 60 bp, Artificial
  Synthetic oligonucleotide
cgaagagataagatggctgattgaagaagtgagacacagactgaaaacaactgagaatag

SEQ ID NO: 72091 - DNA, 60 bp, Artificial
  Synthetic oligonucleotide
gcgatcctggcaagtgttatcaatttgcacttggacagggaacaacactaaacaacaggc

SEQ ID NO: 72092 - DNA, 60 bp, Artificial
  Synthetic oligonucleotide
ctagtagaataagcatctattggacaatagtaaaaccgggagacatacttttgattaata

SEQ ID NO: 72093 - DNA, 60 bp, Artificial
  Synthetic oligonucleotide
ccttatgatgtgccggattatgcctcccttaggtcactagttgcctcatcaggcaccctg

SEQ ID NO: 72094 - DNA, 60 bp, Artificial
  Synthetic oligonucleotide
cttatgatgtgccggattatgcctcccttaggtcactagttgcctcatcaggcaccctgg

SEQ ID NO: 72095 - DNA, 60 bp, Artificial
  Synthetic oligonucleotide
cccttatgatgtgccggattatgcctcccttaggtcactagttgcctcatcaggcaccct

SEQ ID NO: 72096 - DNA, 60 bp, Artificial
  Synthetic oligonucleotide
ctttccttgaagaatcccacccagggatctttgagaactcatgtcttgaaacaatggaag

SEQ ID NO: 72097 - DNA, 60 bp, Artificial
  Synthetic oligonucleotide
cctggaagcaatggctttccttgaagaatcccacccagggatctttgaaaactcgtgcct

SEQ ID NO: 72098 - DNA, 60 bp, Artificial
  Synthetic oligonucleotide
gtcctggaagcaatggctttccttgaagaatcccacccagggatctttgaaaactcgtgc

SEQ ID NO: 72099 - DNA, 60 bp, Artificial
  Synthetic oligonucleotide
tcatttgggaaccaggcaagtgtgcatagcatggtccagctcaagttgtcacgatggaaa

SEQ ID NO: 72100 - DNA, 60 bp, Artificial
  Synthetic oligonucleotide
taggaccccttatcgaaccctattgatgaatgagttgggtgttccatttcatttgggaac

SEQ ID NO: 72101 - DNA, 60 bp, Artificial
  Synthetic oligonucleotide
ggggtaatgaaaagaaggccaaactggcaaatgttgtgagaaagatgatgactaattcac

SEQ ID NO: 72102 - DNA, 60 bp, Artificial
  Synthetic oligonucleotide
gtgagaaagatgatgactaattcacaagacacagagctttctttcacaatcactggagac

SEQ ID NO: 72103 - DNA, 60 bp, Artificial
  Synthetic oligonucleotide
ggccaaactggcaaatgttgtgagaaagatgatgactaattcacaagatacagagctttc

SEQ ID NO: 72104 - DNA, 60 bp, Artificial
  Synthetic oligonucleotide
ggctaaactggcaaatgttgtgagaaagatgatgactaattcacaagacacagaactttc

SEQ ID NO: 72105 - DNA, 60 bp, Artificial
  Synthetic oligonucleotide
aatcatgagggaatacaagcaggagtggatagattctacaggacctgcaagttagtaggg

SEQ ID NO: 72106 - DNA, 60 bp, Artificial
  Synthetic oligonucleotide
atgaaaagaaggccaaactggcaaatgttgtgagaaagatgatgactaattcacaagata

SEQ ID NO: 72107 - DNA, 60 bp, Artificial
  Synthetic oligonucleotide
gattatgaagggcggttgatccagaacagcttaacaatagagagaatggtgctctctgct

SEQ ID NO: 72108 - DNA, 60 bp, Artificial
  Synthetic oligonucleotide
tgaagggcggttgatccagaacagcttaacaatagagagaatggtgctctctgcttttga

SEQ ID NO: 72109 - DNA, 60 bp, Artificial
  Synthetic oligonucleotide
ccaaaaatatcctcaggacccaggagtcggaatgcgtttgtgtcaatggaacttgtacag

SEQ ID NO: 72110 - DNA, 60 bp, Artificial
  Synthetic oligonucleotide
ccaaaaatatcctcaggacccaggagtcggaatgcgtctgtatcaatggaacttgtacag

SEQ ID NO: 72111 - DNA, 60 bp, Artificial
  Synthetic oligonucleotide
cctcaggacccaggagtcggaatgcgtttgtatcaatggtacttgcacagtagtaatgac

SEQ ID NO: 72112 - DNA, 60 bp, Artificial
  Synthetic oligonucleotide
tatcctcaggacccaggagtcggaatgcgtttgtatcaatggtacttgcacagtagtaat

SEQ ID NO: 72113 - DNA, 60 bp, Artificial
  Synthetic oligonucleotide
tccctagtagttcatacaggagaccggttggaatttccagcatggtggaggccatggtgt

SEQ ID NO: 72114 - DNA, 60 bp, Artificial
  Synthetic oligonucleotide
tgaggcacttaaaatgaccatggcctccacacctgcttcacgatacataactgacatgac

SEQ ID NO: 72115 - DNA, 60 bp, Artificial
  Synthetic oligonucleotide
caaactaactcaaggtcgccagacttatgattggacattaaacagaaatcaaccggcagc

SEQ ID NO: 72116 - DNA, 53 bp, Artificial
  Synthetic oligonucleotide
ttaaacagaaatcaaccggcagcaactgcattagccaacaccatagaagtttt

SEQ ID NO: 72117 - DNA, 60 bp, Artificial
  Synthetic oligonucleotide
tagccaacactatagaagtttttagatcgaatggtctaacagctaatgagtcaggaaggc

SEQ ID NO: 72118 - DNA, 60 bp, Artificial
  Synthetic oligonucleotide
ttaaacagaaatcaaccggcagcaactgcattagccaacaccatagaagtttttagatcg

SEQ ID NO: 72119 - DNA, 60 bp, Artificial
  Synthetic oligonucleotide
caaggtcgccagacttatgattggacattaaacagaaatcaaccggcagcaactgcatta

SEQ ID NO: 72120 - DNA, 60 bp, Artificial
  Synthetic oligonucleotide
agctaactcaaggtcgccagacttatgattggacattaaacagaaatcaaccggcagcaa

SEQ ID NO: 72121 - DNA, 60 bp, Artificial
  Synthetic oligonucleotide
tagccaacaccatagaagtttttagatcgaatggtctaacagctaatgagtcaggaaggc

SEQ ID NO: 72122 - DNA, 60 bp, Artificial
  Synthetic oligonucleotide
aactaacccaaggtcgccagacttatgattggacattaaacagaaatcaaccggcagcaa

SEQ ID NO: 72123 - DNA, 60 bp, Artificial
  Synthetic oligonucleotide
aactcaaggtcgccagacttatgattggacattaaacagaaatcaaccggcagcaactgc

SEQ ID NO: 72124 - DNA, 60 bp, Artificial
  Synthetic oligonucleotide
aaatttgaaatctcaggaaccatgcgcaggcttgccgaccaaagtctcccgccgaacttc

SEQ ID NO: 72125 - DNA, 60 bp, Artificial
  Synthetic oligonucleotide
gggcctttgacgatggaaatgacgtgtggatgggaagaacgattggcgaggagttacgct

SEQ ID NO: 72126 - DNA, 60 bp, Artificial
  Synthetic oligonucleotide
gcgtactggaatggaccccagaatgtgctctctgatgcaaggatcaactctcccgaggag

SEQ ID NO: 72127 - DNA, 60 bp, Artificial
  Synthetic oligonucleotide
gccgaagagttgacataaaccctggtcatgcagacctcagtgccaaggaggcacaggatg

SEQ ID NO: 72128 - DNA, 60 bp, Artificial
  Synthetic oligonucleotide
gccgaagagtggacataaaccctggtcatgcagacctcagtgccaaggaggcacaagatg

SEQ ID NO: 72129 - DNA, 60 bp, Artificial
  Synthetic oligonucleotide
caaaatacgccgaagagtggacataaaccctggtcatgcagacctcagtgccaaggaggc

SEQ ID NO: 72130 - DNA, 60 bp, Artificial
  Synthetic oligonucleotide
caaaatacgccgaagagtagatataaaccctggtcatgcagacctcagtgccaaggaggc

SEQ ID NO: 72131 - DNA, 60 bp, Artificial
  Synthetic oligonucleotide
ctgatgtcgcagtctcgcactcgcgagatactaacaaaaaccacagtggaccatatggcc

SEQ ID NO: 72132 - DNA, 60 bp, Artificial
  Synthetic oligonucleotide
aacgtgaggggatcagggatgagaatacttgtaaggggcaattctcctgtattcaactac

SEQ ID NO: 72133 - DNA, 60 bp, Artificial
  Synthetic oligonucleotide
taaggggtaattctcctgtattcaactacaacaagaccactaaaagactaacaattctcg

SEQ ID NO: 72134 - DNA, 60 bp, Artificial
  Synthetic oligonucleotide
gaaattggttcatgctaatgcccaagcagaaagtggaaggacctctttgcatcagaatgg

SEQ ID NO: 72135 - DNA, 60 bp, Artificial
  Synthetic oligonucleotide
gaaactggttcatgctaatgcccaagcagaaagtggaaggacctctttgcatcaaaatgg

SEQ ID NO: 72136 - DNA, 60 bp, Artificial
  Synthetic oligonucleotide
acaggagaccggttggaatttctagcatggtggaggccatggtgtctagggcccgaattg

SEQ ID NO: 72137 - DNA, 60 bp, Artificial
  Synthetic oligonucleotide
gaccactaaaagactaacaattctcggaaaagatgctggcactctaaccgaagacccaga

SEQ ID NO: 72138 - DNA, 60 bp, Artificial
  Synthetic oligonucleotide
ccactaaaagactaacaattctcggaaaagatgctggcactctaattgaagacccagatg

SEQ ID NO: 72139 - DNA, 60 bp, Artificial
  Synthetic oligonucleotide
tacaacaagaccactaaaagactaacaattctcggaaaagatgctggcactttaattgaa

SEQ ID NO: 72140 - DNA, 60 bp, Artificial
  Synthetic oligonucleotide
tacaacaagaccactaaaagactaacaattctcggaaaagatgctggcactctaattgaa

SEQ ID NO: 72141 - DNA, 60 bp, Artificial
  Synthetic oligonucleotide
ccactaaaagactaacaattctcggaaaagatgctggcactctaaccgaagacccagatg

SEQ ID NO: 72142 - DNA, 60 bp, Artificial
  Synthetic oligonucleotide
accactaaaagactaacaattctcggaaaagatgctggcactttaattgaagacccagat

SEQ ID NO: 72143 - DNA, 60 bp, Artificial
  Synthetic oligonucleotide
atcctcaggacccaggagtcggaatgcgtttgtgtcaatggaacttgtacagtagtaatg

SEQ ID NO: 72144 - DNA, 60 bp, Artificial
  Synthetic oligonucleotide
gatgaggattatcaggggagactttgtaatcccctgaatccatttgtcagccataaagag

SEQ ID NO: 72145 - DNA, 60 bp, Artificial
  Synthetic oligonucleotide
atcagaatggaccaggcaatcatggagaaaaacatcatgttgaaagcgaatttcagtatg

SEQ ID NO: 72146 - DNA, 60 bp, Artificial
  Synthetic oligonucleotide
atcagaatggaccaggcaatcatggagaaaaacatcatattgaaagcgaacttcagtgtg

SEQ ID NO: 72147 - DNA, 60 bp, Artificial
  Synthetic oligonucleotide
atcagaatggaccaggcaatcatggagaaaaacatcatgttgaaagcaaatttcagtgtg

SEQ ID NO: 72148 - DNA, 60 bp, Artificial
  Synthetic oligonucleotide
gactaaaaacaactgagaatagttttgagcaaataacatttatgcaagccttacagctgc

SEQ ID NO: 72149 - DNA, 60 bp, Artificial
  Synthetic oligonucleotide
ctctttgcatcagaatggaccaggcaatcatggagaaaaacatcatgctgaaagcgaatt

SEQ ID NO: 72150 - DNA, 60 bp, Artificial
  Synthetic oligonucleotide
atcagaatggaccaggcaatcatggagaaaaacatcatgttgaaagcgaatttcaatgtg

SEQ ID NO: 72151 - DNA, 60 bp, Artificial
  Synthetic oligonucleotide
gggcatggggtgaaaggctgggcctttgatgatggaaatgacgtgtggatgggaagaacg

SEQ ID NO: 72152 - DNA, 60 bp, Artificial
  Synthetic oligonucleotide
gggcatggagtgaaaggctgggcctttgatgatggaaatgacgtgtggatgggaagaacg

SEQ ID NO: 72153 - DNA, 60 bp, Artificial
  Synthetic oligonucleotide
ccggaagcaagttgtagaccaagaactgagtgatgccccattccttgatcggcttcgccg

SEQ ID NO: 72154 - DNA, 60 bp, Artificial
  Synthetic oligonucleotide
atgatgtgccggattatgcctcccttaggtcactagttgcctcattaggcaccctggagt

SEQ ID NO: 72155 - DNA, 60 bp, Artificial
  Synthetic oligonucleotide
atgatgtgccggattatgcctcccttaggtcactagttgcctcatcaggcactctggagt

SEQ ID NO: 72156 - DNA, 60 bp, Artificial
  Synthetic oligonucleotide
atgatgtgccggattatgcctcccttaggtcactagttgcctcatcaggcacactggagt

SEQ ID NO: 72157 - DNA, 60 bp, Artificial
  Synthetic oligonucleotide
aaggcctcttctaatagatggcacagcgtcattgagtcctggaatgatgatgggcatgtt

SEQ ID NO: 72158 - DNA, 60 bp, Artificial
  Synthetic oligonucleotide
gggttacttcaaaatacgaaatgggaaaagctcaataatgaggtcagatgcacccattgg

SEQ ID NO: 72159 - DNA, 60 bp, Artificial
  Synthetic oligonucleotide
ttctcaatactagccaaaggggaatacttgaggatgaacagatgtatcagaagtgttgca

SEQ ID NO: 72160 - DNA, 60 bp, Artificial
  Synthetic oligonucleotide
aaagcagagagtgaataagagaagctatctaataagagcattgacattgaacacaatgac

SEQ ID NO: 72161 - DNA, 60 bp, Artificial
  Synthetic oligonucleotide
gtcgttcaacaaacaagggtggacaaactgacccaaggtcgccagacctatgattggaca

SEQ ID NO: 72162 - DNA, 60 bp, Artificial
  Synthetic oligonucleotide
ttctccgttgaaggcaaaagctgcatcaatcggtgcttttatgtggagttgataagggga

SEQ ID NO: 72163 - DNA, 60 bp, Artificial
  Synthetic oligonucleotide
tctctgttgaaggcaagagctgcatcaatcggtgcttttatgtggagttgataaggggaa

SEQ ID NO: 72164 - DNA, 60 bp, Artificial
  Synthetic oligonucleotide
gactaggaaaaggatacatgttcgaaagtaagagaatgaagctccgaacacaaataccag

SEQ ID NO: 72165 - DNA, 60 bp, Artificial
  Synthetic oligonucleotide
agaatcccacccagggatctttgaaaactcgtgtcttgaaacgatggaagttgttcaaca

SEQ ID NO: 72166 - DNA, 60 bp, Artificial
  Synthetic oligonucleotide
agcattacagctgctgtttgaagtggaacaggagataagaactttctcatttcagcttat

SEQ ID NO: 72167 - DNA, 60 bp, Artificial
  Synthetic oligonucleotide
gcattacagctgctgtttgaagtggaacaggagataagaactttctcatttcagcttatt

SEQ ID NO: 72168 - DNA, 60 bp, Artificial
  Synthetic oligonucleotide
cacagactaaaaacaactgagaatagttttgagcaaataacattcatgcaagcattacag

SEQ ID NO: 72169 - DNA, 60 bp, Artificial
  Synthetic oligonucleotide
gactgaaaacaactgagaatagttttgagcaaataacattcatgcaagccttacagctgc

SEQ ID NO: 72170 - DNA, 60 bp, Artificial
  Synthetic oligonucleotide
gactaaaaacaactgagaatagttttgagcaaataacattcatgcaagccttacagctgc

SEQ ID NO: 72171 - DNA, 60 bp, Artificial
  Synthetic oligonucleotide
gttcatgctgatgcccaagcagaaagtggaaggacctctttgcatcagaatggaccaggc

SEQ ID NO: 72172 - DNA, 60 bp, Artificial
  Synthetic oligonucleotide
aagacagggacatttgaattcacaagctttttttatcgctatggatttgtggctaatttt

SEQ ID NO: 72173 - DNA, 60 bp, Artificial
  Synthetic oligonucleotide
tatataaataagacagggacatttgaattcacaagctttttttatcgctatggatttgtg

SEQ ID NO: 72174 - DNA, 60 bp, Artificial
  Synthetic oligonucleotide
atataaataagactgggacatttgaattcacaagctttttttatcgctatgggtttgtag

SEQ ID NO: 72175 - DNA, 60 bp, Artificial
  Synthetic oligonucleotide
ttttagatcgaatggtctaacagctaatgagtcaggaaggctaatagatttcctcaagga

SEQ ID NO: 72176 - DNA, 60 bp, Artificial
  Synthetic oligonucleotide
acatttgggtgacaagagaaccttatgtgtcgtgcgatcctggcaagtgttatcaatttg

SEQ ID NO: 72177 - DNA, 60 bp, Artificial
  Synthetic oligonucleotide
ggctaattttagcatggagctgcccagttttggagtgtctggaataaatgaatcagctga

SEQ ID NO: 72178 - DNA, 60 bp, Artificial
  Synthetic oligonucleotide
gtggctaattttagcatggagctgcccagttttggagtgtctggaataaatgaatcagct

SEQ ID NO: 72179 - DNA, 58 bp, Artificial
  Synthetic oligonucleotide
ttttatcgctatggatttgtggctaattttagcatggagctgcccagttttggagtgt

SEQ ID NO: 72180 - DNA, 60 bp, Artificial
  Synthetic oligonucleotide
cgttccatggggccaaagaaatagcgctcagttattctgctggtgcacttgccagttgca

SEQ ID NO: 72181 - DNA, 60 bp, Artificial
  Synthetic oligonucleotide
cgaacctgaattaagatcactttcaagctggatacagaatgagttcaacaaggcctgcga

SEQ ID NO: 72182 - DNA, 60 bp, Artificial
  Synthetic oligonucleotide
gtcactttcaagctggatacagaatgagttcaacaaggcatgcgagctgactgattcaat

SEQ ID NO: 72183 - DNA, 60 bp, Artificial
  Synthetic oligonucleotide
gatcactttcaagctggatacagaatgagttcaacaaggcctgcgagctaactgattcaa

SEQ ID NO: 72184 - DNA, 60 bp, Artificial
  Synthetic oligonucleotide
tctcttcattgactgtaaatgtgaggggatcagggatgagaatacttgtaaggggcaatt

SEQ ID NO: 72185 - DNA, 60 bp, Artificial
  Synthetic oligonucleotide
gccgaagagtagacataaaccctggtcatgcagacctcagtgccaaggaggctcaagatg

SEQ ID NO: 72186 - DNA, 60 bp, Artificial
  Synthetic oligonucleotide
gttgctggcggaacaagcagtatatacattgaagttttacatttgacccaaggaacgtgt

SEQ ID NO: 72187 - DNA, 60 bp, Artificial
  Synthetic oligonucleotide
gacgaacagtcaatagccgaagcaataatcgtggccatggtgttttcacaagaggattgc

SEQ ID NO: 72188 - DNA, 60 bp, Artificial
  Synthetic oligonucleotide
gagtggaaaggacgaacagtcaatagccgaagcaataatcgtggccatggtgttttcaca

SEQ ID NO: 72189 - DNA, 60 bp, Artificial
  Synthetic oligonucleotide
ctcatagtgagtggaaaggacgaacagtcaatagccgaagcaataatcgtggccatggtg

SEQ ID NO: 72190 - DNA, 60 bp, Artificial
  Synthetic oligonucleotide
aggggcaattctcctgtattcaactacaacaagaccactaaaagactaacagttctcgga

SEQ ID NO: 72191 - DNA, 60 bp, Artificial
  Synthetic oligonucleotide
agttctcggaaaagatgccggcactttaattgaagacccagatgaaagcacatccggagt

SEQ ID NO: 72192 - DNA, 60 bp, Artificial
  Synthetic oligonucleotide
gctttttcagaattggggaattgaacacatcgacagtgtgatgggaatggttggagtatt

SEQ ID NO: 72193 - DNA, 60 bp, Artificial
  Synthetic oligonucleotide
gcattttcagaaagatgcgaaagtgctttttcagaattggggaattgaacacatcgacag

SEQ ID NO: 72194 - DNA, 60 bp, Artificial
  Synthetic oligonucleotide
ggtggttagcattgatcggtttttgagagttcgagaccaacgtgggaatgtattattatc

SEQ ID NO: 72195 - DNA, 60 bp, Artificial
  Synthetic oligonucleotide
cagccgctccaccaaagcaaagcagaatgcagttctcttcactgactgtaaatgtgaggg

SEQ ID NO: 72196 - DNA, 60 bp, Artificial
  Synthetic oligonucleotide
catgcatcagcttttaaggcattttcagaaagatgcgaaagtgcttttccagaattgggg

SEQ ID NO: 72197 - DNA, 60 bp, Artificial
  Synthetic oligonucleotide
ctttattggagatgtgccacagcacacaaattggcgggacaaggatggtggacattctca

SEQ ID NO: 72198 - DNA, 60 bp, Artificial
  Synthetic oligonucleotide
ctggcggaacaagcagtatatacattgaagttttacatttgacccaaggaacgtgttggg

SEQ ID NO: 72199 - DNA, 60 bp, Artificial
  Synthetic oligonucleotide
acattgagaataagagtacatgaggggtatgaggagttcacaatggtggggaaaagagca

SEQ ID NO: 72200 - DNA, 60 bp, Artificial
  Synthetic oligonucleotide
cttttaaggcattttcagaaagatgcgaaagtgctttttcagaattggggaattgaacac

SEQ ID NO: 72201 - DNA, 60 bp, Artificial
  Synthetic oligonucleotide
ttgaaccccatgcatcagcttttaaggcattttcagaaagatgcgaaagtgcttttccag

SEQ ID NO: 72202 - DNA, 54 bp, Artificial
  Synthetic oligonucleotide
aaaataagagtacatgaggggtatgaggagttcacaatggtggggaaaagagca

SEQ ID NO: 72203 - DNA, 60 bp, Artificial
  Synthetic oligonucleotide
aaataagagtacatgaggggtatgaggagttcacaatggtggggaaaagagcaacagcta

SEQ ID NO: 72204 - DNA, 60 bp, Artificial
  Synthetic oligonucleotide
gcagtctcgcactcgcgagatactaacaaaaaccacagtggaccatatggccataatcaa

SEQ ID NO: 72205 - DNA, 60 bp, Artificial
  Synthetic oligonucleotide
ccaaaaaaacactcagaacccaggagtcggaatgcgtttgtatcaatggaacttgtacag

SEQ ID NO: 72206 - DNA, 60 bp, Artificial
  Synthetic oligonucleotide
ccaaaaatattctcaggacccaggagtcggaatgcgtttgtatcaatggaacttgtacag

SEQ ID NO: 72207 - DNA, 60 bp, Artificial
  Synthetic oligonucleotide
attctcaggacccaggagtcggaatgcgtttgtatcaatggaacttgtacagtagtaatg

SEQ ID NO: 72208 - DNA, 60 bp, Artificial
  Synthetic oligonucleotide
aatactcagaacccaggagtcggaatgcgtttgtatcaatggaacttgtacagtagtaat

SEQ ID NO: 72209 - DNA, 60 bp, Artificial
  Synthetic oligonucleotide
ccaaaaaaatcctcaggacccaggagtcagaatgcgtttgtatcaatggaacttgtacag

SEQ ID NO: 72210 - DNA, 60 bp, Artificial
  Synthetic oligonucleotide
gcaaataacattcatgcaagcattacagctgctgcttgaagtggaacaggagataagaac

SEQ ID NO: 72211 - DNA, 60 bp, Artificial
  Synthetic oligonucleotide
aaaatcatggcgtcccaaggcaccaaacggtcttatgaacagatggaaactgatggggat

SEQ ID NO: 72212 - DNA, 60 bp, Artificial
  Synthetic oligonucleotide
aaatcatggcgtcccaaggcaccaaacggtcttatgaacagatggaaactgatggggaac

SEQ ID NO: 72213 - DNA, 60 bp, Artificial
  Synthetic oligonucleotide
tcagtgattatgaagggcggttgatccagaacagcttgacaatagagaaaatggtgctct

SEQ ID NO: 72214 - DNA, 60 bp, Artificial
  Synthetic oligonucleotide
gattgatggaattgggcgattctacatccaaatgtgcactgaacttaaactcagtgatta

SEQ ID NO: 72215 - DNA, 60 bp, Artificial
  Synthetic oligonucleotide
aacgggggatcaacgatcgaaatttctggagaggtgagaatgggcggaaaacaaggagtg

SEQ ID NO: 72216 - DNA, 60 bp, Artificial
  Synthetic oligonucleotide
gcaatgatggatcaagtgagagagagccggaacccaggaaatgctgagatcgaagatctc

SEQ ID NO: 72217 - DNA, 60 bp, Artificial
  Synthetic oligonucleotide
aactcagtgattatgaagggcggttgatccagaacagcttgacaatagagaaaatggtgc

SEQ ID NO: 72218 - DNA, 60 bp, Artificial
  Synthetic oligonucleotide
ggggatcaacgatcgaaatttctggagaggtgagaatgggcgaaaaacaagaagtgctta

SEQ ID NO: 72219 - DNA, 60 bp, Artificial
  Synthetic oligonucleotide
aatcatggcgtcccaaggcaccaaacggtcttatgaacagatggaaactgatggggaacg

SEQ ID NO: 72220 - DNA, 60 bp, Artificial
  Synthetic oligonucleotide
cagtgattatgaagggcggttgatccagaacagcttgacaatagagaaaatggtgctctc

SEQ ID NO: 72221 - DNA, 60 bp, Artificial
  Synthetic oligonucleotide
cttatgaacagatggaaactgatggggatcgccagaatgcaactgagattagggcatccg

SEQ ID NO: 72222 - DNA, 60 bp, Artificial
  Synthetic oligonucleotide
tgatggggatcgccagaatgcaactgagattagggcatccgtcgggaggatgattgatgg

SEQ ID NO: 72223 - DNA, 60 bp, Artificial
  Synthetic oligonucleotide
atgaacagatggaaactgatggggatcgccagaatgcaactgagattagggcatccgtcg

SEQ ID NO: 72224 - DNA, 60 bp, Artificial
  Synthetic oligonucleotide
gatcaaacgggggatcaacgatcgaaatttctggagaggtgagaatgggcggaaaacaag

SEQ ID NO: 72225 - DNA, 60 bp, Artificial
  Synthetic oligonucleotide
atgatcaaacgggggatcaacgatcgaaatttctggagaggtgagaatgggcggaaaaca

SEQ ID NO: 72226 - DNA, 60 bp, Artificial
  Synthetic oligonucleotide
atggcatgccattctgctgcatttgaagatttgagattgttaagcttcatcagagggacc

SEQ ID NO: 72227 - DNA, 60 bp, Artificial
  Synthetic oligonucleotide
ggcatgccattctgctgcatttgaagatttaagattgttaagcttcatcagagggaccaa

SEQ ID NO: 72228 - DNA, 60 bp, Artificial
  Synthetic oligonucleotide
atctgatgaggcacttaaaatgaccatggcctccacacctgcttcgcgatacataactga

SEQ ID NO: 72229 - DNA, 60 bp, Artificial
  Synthetic oligonucleotide
aatggaccaggcaatcatggagaaaaacatcatgttgaaagcgaatttcagtgtgatctt

SEQ ID NO: 72230 - DNA, 51 bp, Artificial
  Synthetic oligonucleotide
aaacatcatgttgaaagcgaatttcagtgtgatctttgaccgactagagac

SEQ ID NO: 72231 - DNA, 60 bp, Artificial
  Synthetic oligonucleotide
caccgaagagggagcaattgttggcgaaatctcaccactgccttcttttccaggacatac

SEQ ID NO: 72232 - DNA, 60 bp, Artificial
  Synthetic oligonucleotide
caccgaagagggagcaattgttggcgaaatctcaccattgccttcttttccaggacatat

SEQ ID NO: 72233 - DNA, 58 bp, Artificial
  Synthetic oligonucleotide
gaagagggagcaattgttggcgaaatctcaccattgccttcttttccaggacatacta

SEQ ID NO: 72234 - DNA, 60 bp, Artificial
  Synthetic oligonucleotide
tcaccgaagagggagcaattgttggcgaaatctcaccactgccttcttttccaggacata

SEQ ID NO: 72235 - DNA, 60 bp, Artificial
  Synthetic oligonucleotide
cggcctgaaaagagggccttctacggaaggagtacctgagtctatgagggaagagtatcg

SEQ ID NO: 72236 - DNA, 58 bp, Artificial
  Synthetic oligonucleotide
tgagtctatgagggaagaatatcgagaggaacagcagaatgctgtggatgctgacgac

SEQ ID NO: 72237 - DNA, 60 bp, Artificial
  Synthetic oligonucleotide
ctcatggaatggctaaagacaagaccaatactgtcacctctgactaaggggattttgggg

SEQ ID NO: 72238 - DNA, 60 bp, Artificial
  Synthetic oligonucleotide
tctcatggaatggctaaagacaagaccaatactgtcacctctgactaaggggattttggg

SEQ ID NO: 72239 - DNA, 60 bp, Artificial
  Synthetic oligonucleotide
gtgtgatctttgaccgactagagaccctagtattactaagggctttcaccgaagagggag

SEQ ID NO: 72240 - DNA, 53 bp, Artificial
  Synthetic oligonucleotide
gaccctagtattactaagggctttcaccgaagagggagcaattgttggcgaaa

SEQ ID NO: 72241 - DNA, 60 bp, Artificial
  Synthetic oligonucleotide
ggcatatccggaaacaagttgtagaccaagaactgagtgatgccccattccttgatcggc

SEQ ID NO: 72242 - DNA, 60 bp, Artificial
  Synthetic oligonucleotide
cattccatggggccaaagaaatagcactcagttattctgctggtgcacttgctagttgca

SEQ ID NO: 72243 - DNA, 60 bp, Artificial
  Synthetic oligonucleotide
ggggccaaagaaatagcactcagttattctgctggtgcacttgctagttgcatgggcctc

SEQ ID NO: 72244 - DNA, 55 bp, Artificial
  Synthetic oligonucleotide
agatgagccttctgaccgaggtcgaaacgtatgttctctctatcgttccatcagg

SEQ ID NO: 72245 - DNA, 55 bp, Artificial
  Synthetic oligonucleotide
agatgagccttctgacagaggtcgaaacgtatgttctctctatcgttccatcagg

SEQ ID NO: 72246 - DNA, 56 bp, Artificial
  Synthetic oligonucleotide
aagatgagccttctaacagaggtcgaaacgtatgttctctctatcgttccatcagg

SEQ ID NO: 72247 - DNA, 60 bp, Artificial
  Synthetic oligonucleotide
caacactaaacaacgggcattcaaatgacacagtacatgataggaccccttatcggacct

SEQ ID NO: 72248 - DNA, 60 bp, Artificial
  Synthetic oligonucleotide
cagaaagtgctcagcatgtcgaggagtgctcctgttatcctcgatatcctggtgtcagat

SEQ ID NO: 72249 - DNA, 60 bp, Artificial
  Synthetic oligonucleotide
gtcagggagtgctcagcatgtcgaggagtgctcctgttatcctcgatatcctggtgtcag

SEQ ID NO: 72250 - DNA, 60 bp, Artificial
  Synthetic oligonucleotide
gtcaggaagtgctcagcatgtcgaggagtgctcctgttatcctcgatatcctggtgtcag

SEQ ID NO: 72251 - DNA, 60 bp, Artificial
  Synthetic oligonucleotide
cctcgatatcctggtgtcagatgtgcctgcagagacaactggaaaggctccaataggccc

SEQ ID NO: 72252 - DNA, 60 bp, Artificial
  Synthetic oligonucleotide
aagattatagcattgtttccagttatgtatgctcaggacttgttggagacacacccagaa

SEQ ID NO: 72253 - DNA, 60 bp, Artificial
  Synthetic oligonucleotide
gattatagcattgtttccagttatgtatgctcaggacttgttggagacacacccagaaaa

SEQ ID NO: 72254 - DNA, 60 bp, Artificial
  Synthetic oligonucleotide
tatcctcgatatcctggtgtcagatgtgcctgcagagacaactggaaaggctccaatagg

SEQ ID NO: 72255 - DNA, 60 bp, Artificial
  Synthetic oligonucleotide
tatccccgatatcctggtgtcagatgtgtctgcagagacaactggaaaggctccaatagg

SEQ ID NO: 72256 - DNA, 54 bp, Artificial
  Synthetic oligonucleotide
ggaagaggcaacactctcggtctagacatcagagcagccacccatgttggaaag

SEQ ID NO: 72257 - DNA, 58 bp, Artificial
  Synthetic oligonucleotide
tgagtctatgagggaagagtatcgaaaggaacagcagaatgctgtggatgctgacgac

SEQ ID NO: 72258 - DNA, 60 bp, Artificial
  Synthetic oligonucleotide
ctcatggaatggctaaagacaagaccaatcctgtcacctcttactaaggggattttgggg

SEQ ID NO: 72259 - DNA, 60 bp, Artificial
  Synthetic oligonucleotide
tctcatggaatggctaaagacaagaccaatcctgtcacctcttactaaggggattttggg

SEQ ID NO: 72260 - DNA, 60 bp, Artificial
  Synthetic oligonucleotide
cattccatggagccaaagaaatagcactcagttattctgctggtgcacttgccagttgca

SEQ ID NO: 72261 - DNA, 58 bp, Artificial
  Synthetic oligonucleotide
caacgtagacgctttgtccaaaatgccctcaatgggaatggggatccaaataacatgg

SEQ ID NO: 72262 - DNA, 60 bp, Artificial
  Synthetic oligonucleotide
agtggcatttggcctggtatgtgcaacatgtgaacagattgctgactcccagcacagatc

SEQ ID NO: 72263 - DNA, 60 bp, Artificial
  Synthetic oligonucleotide
ggagccaaagaaatagcactcagttattctgctggtgcacttgccagttgcatgggcctc

SEQ ID NO: 72264 - DNA, 60 bp, Artificial
  Synthetic oligonucleotide
agtggcatttggcctggtatgtgcaacatgtgaacagattgctgactcccagcaccggtc

SEQ ID NO: 72265 - DNA, 60 bp, Artificial
  Synthetic oligonucleotide
aagaccaatcctgtcacctctgactaaggggattttggggtttgtgttcacgctcaccgt

SEQ ID NO: 72266 - DNA, 60 bp, Artificial
  Synthetic oligonucleotide
actgatagatgctctattgggagaccctcattgtgatggcttccaaaataaggaatggga

SEQ ID NO: 72267 - DNA, 60 bp, Artificial
  Synthetic oligonucleotide
cacactaatagatgctctattgggagaccctcattgtgatggcttccaaaataaggaatg

SEQ ID NO: 72268 - DNA, 60 bp, Artificial
  Synthetic oligonucleotide
actaatagatgctctattgggagaccctcattgtgatggcttccaaaataaggaatggga

SEQ ID NO: 72269 - DNA, 60 bp, Artificial
  Synthetic oligonucleotide
actaatagatgctctattgggagacccccattgtgatggcttccaaaataaggaatggga

SEQ ID NO: 72270 - DNA, 60 bp, Artificial
  Synthetic oligonucleotide
ctactgagctggttcagagttcctcaacaggtagaatatgcgacagtcctcaccaaatcc

SEQ ID NO: 72271 - DNA, 60 bp, Artificial
  Synthetic oligonucleotide
aaccatgaagactatcattgctttgagctacattttatgcctggttttcgctcaaaaact

SEQ ID NO: 72272 - DNA, 60 bp, Artificial
  Synthetic oligonucleotide
attgggagaccctcattgtgatggcttccaaaataaggaatgggacctttttgttgaacg

SEQ ID NO: 72273 - DNA, 51 bp, Artificial
  Synthetic oligonucleotide
attgggagaccctcattgtgatggcttccaaaataaggaatgggacctttt

SEQ ID NO: 72274 - DNA, 50 bp, Artificial
  Synthetic oligonucleotide
ttgggagaccctcattgtgatggcttccaaaataaggaatgggacctttt

SEQ ID NO: 72275 - DNA, 60 bp, Artificial
  Synthetic oligonucleotide
ttgggagaccctcattgtgatggcttccaaaataaggaatgggacctttttgttgaacgc

SEQ ID NO: 72276 - DNA, 60 bp, Artificial
  Synthetic oligonucleotide
tgatagatgctctattgggagaccctcattgtgatggcttccaaaataaggaatgggacc

SEQ ID NO: 72277 - DNA, 60 bp, Artificial
  Synthetic oligonucleotide
ctaatagatgctctattgggagaccctcattgtgatggcttccaaaataaggaatgggac

SEQ ID NO: 72278 - DNA, 50 bp, Artificial
  Synthetic oligonucleotide
aaaactgcacactaatagatgctctattgggagaccctcattgtgatggc

SEQ ID NO: 72279 - DNA, 60 bp, Artificial
  Synthetic oligonucleotide
gaagtgactaatgctactgagctggttcagagttcctcaacaggtagaatatgcgacagt

SEQ ID NO: 72280 - DNA, 60 bp, Artificial
  Synthetic oligonucleotide
gtgactaatgctactgagctggttcagagttcctcaacaggtagaatatgcgacagtcct

SEQ ID NO: 72281 - DNA, 60 bp, Artificial
  Synthetic oligonucleotide
accatgaagactatcattgctttgagctacattttatgcctggttttcgctcaaaaactt

SEQ ID NO: 72282 - DNA, 60 bp, Artificial
  Synthetic oligonucleotide
gaagtaactaatgctactgagctggttcagagttcctcaacaggtagaatatgcgacagt

SEQ ID NO: 72283 - DNA, 60 bp, Artificial
  Synthetic oligonucleotide
taatgctactgagctggttcagagttcctcaacaggtagaatatgcgacagtcctcacca

SEQ ID NO: 72284 - DNA, 60 bp, Artificial
  Synthetic oligonucleotide
tgctactgagctggttcagagttcctcaacaggtagaatatgcgacagtcctcaccaaat

SEQ ID NO: 72285 - DNA, 60 bp, Artificial
  Synthetic oligonucleotide
actaatgctactgagctggttcagagttcctcaacaggtagaatatgcgacagtcctcac

SEQ ID NO: 72286 - DNA, 60 bp, Artificial
  Synthetic oligonucleotide
ccgggagacatacttttgattaacagcacagggaatctaattgctcctcggggttacttt

SEQ ID NO: 72287 - DNA, 60 bp, Artificial
  Synthetic oligonucleotide
tgctactgagctggttcagagttcctcaacaggtagaatatgcgacagtcctcaccaagt

SEQ ID NO: 72288 - DNA, 60 bp, Artificial
  Synthetic oligonucleotide
gctactgagctggttcagagttcctcaacaggtagaatatgcgacagtcctcaccaaatc

SEQ ID NO: 72289 - DNA, 60 bp, Artificial
  Synthetic oligonucleotide
atgctctattgggagaccctcattgtgatggcttccaaaataaggaatgggacctttttg

SEQ ID NO: 72290 - DNA, 57 bp, Artificial
  Synthetic oligonucleotide
tattgggagaccctcattgtgatggcttccaaaataaggaatgggacctttttgttg

SEQ ID NO: 72291 - DNA, 58 bp, Artificial
  Synthetic oligonucleotide
atgctctattgggagaccctcattgtgatggcttccaaaataaggaatgggacctttt

SEQ ID NO: 72292 - DNA, 60 bp, Artificial
  Synthetic oligonucleotide
gggcaagcagcagatcttaaaagcactcaagcagcaatcaaccaaatcaacgggaaactg

SEQ ID NO: 72293 - DNA, 52 bp, Artificial
  Synthetic oligonucleotide
tattgggagaccctcattgtgatggcttccaaaataaggaatgggacctttt

SEQ ID NO: 72294 - DNA, 56 bp, Artificial
  Synthetic oligonucleotide
attgggagaccctcattgtgatggcttccaaaataaggaatgggacctttttgttg

SEQ ID NO: 72295 - DNA, 60 bp, Artificial
  Synthetic oligonucleotide
gaagttggcaacggggatgcggaatgtaccagagaaacaaactagaggcatattcggcgc

SEQ ID NO: 72296 - DNA, 60 bp, Artificial
  Synthetic oligonucleotide
cagggcaagcagcagatcttaaaagcactcaagcagcaatcaaccaaatcaacgggaaac

SEQ ID NO: 72297 - DNA, 60 bp, Artificial
  Synthetic oligonucleotide
caggacaagcagcagatcttaaaagcactcaagcagcaatcaaccaaatcaacgggaaac

SEQ ID NO: 72298 - DNA, 60 bp, Artificial
  Synthetic oligonucleotide
cagggcaagcagcagatcttaaaagcactcaagcagcaatcaaccaaatcaacgggaagc

SEQ ID NO: 72299 - DNA, 60 bp, Artificial
  Synthetic oligonucleotide
gggcaagcagcagatcttaaaagcactcaagcagcaatcaaccaaatcaacgggaagctg

SEQ ID NO: 72300 - DNA, 60 bp, Artificial
  Synthetic oligonucleotide
atagatgctctattgggagaccctcattgtgatggcttccaaaataaggaatgggacctt

SEQ ID NO: 72301 - DNA, 60 bp, Artificial
  Synthetic oligonucleotide
taatagatgctctattgggagaccctcattgtgatggcttccaaaataaggaatgggacc

SEQ ID NO: 72302 - DNA, 60 bp, Artificial
  Synthetic oligonucleotide
ggacaagcagcagatcttaaaagcactcaagcagcaatcaaccaaatcaacgggaaactg

SEQ ID NO: 72303 - DNA, 60 bp, Artificial
  Synthetic oligonucleotide
aaacaaatttgcagcaatatgcactcacttggaggtatgtttcatgtattcagattttca

SEQ ID NO: 72304 - DNA, 53 bp, Artificial
  Synthetic oligonucleotide
agagacataagcgatttgaagcaatatgatagtgacgaacctgaattgaggtc

SEQ ID NO: 72305 - DNA, 60 bp, Artificial
  Synthetic oligonucleotide
aacaaacaaatttgcagcaatatgcactcacttggaggtatgtttcatgtattcagattt

SEQ ID NO: 72306 - DNA, 60 bp, Artificial
  Synthetic oligonucleotide
aggaagatctcatttaagaaatgacacagatgtggtaaactttgtgagcatggagttttc

SEQ ID NO: 72307 - DNA, 60 bp, Artificial
  Synthetic oligonucleotide
taaagagggaaggcgaaaaaccaatttatatggattcatcataaaaggaagatctcactt

SEQ ID NO: 72308 - DNA, 60 bp, Artificial
  Synthetic oligonucleotide
gggtatacattaatactgccttgctcaatgcatcctgtgcagcaatggacgattttcaac

SEQ ID NO: 72309 - DNA, 60 bp, Artificial
  Synthetic oligonucleotide
aggaagatctcacttaagaaatgacacagatgtggtaaactttgtgagcatggagttttc

SEQ ID NO: 72310 - DNA, 60 bp, Artificial
  Synthetic oligonucleotide
agagggaaggcgaaaaaccaatttatatggattcatcataaaaggaagatctcatttaag

SEQ ID NO: 72311 - DNA, 60 bp, Artificial
  Synthetic oligonucleotide
aaaaaccaatttatatggattcatcataaaaggaagatctcatttaaggaatgacacaga

SEQ ID NO: 72312 - DNA, 60 bp, Artificial
  Synthetic oligonucleotide
gaggaggaattatttcacagcagaggtgtcccattgcagagccactgagtacataatgaa

SEQ ID NO: 72313 - DNA, 60 bp, Artificial
  Synthetic oligonucleotide
ctgattcaatctggatagagctcgatgaaattggagaggacgtggccccaattgagtaca

SEQ ID NO: 72314 - DNA, 60 bp, Artificial
  Synthetic oligonucleotide
ctgattcaatctggatagagctcgatgaaattggagaggatgtggccccaattgagtaca

SEQ ID NO: 72315 - DNA, 54 bp, Artificial
  Synthetic oligonucleotide
ctgattcaatctggatagagctcgatgaaattggagaggacgtggccccaattg

SEQ ID NO: 72316 - DNA, 60 bp, Artificial
  Synthetic oligonucleotide
gaggaattatttcacagcagaggtgtcccattgtagagccactgagtacataatgaaggg

SEQ ID NO: 72317 - DNA, 60 bp, Artificial
  Synthetic oligonucleotide
acataatgaagggggtatacattaatactgccttgctcaatgcatcctgtgcagcaatgg

SEQ ID NO: 72318 - DNA, 60 bp, Artificial
  Synthetic oligonucleotide
gatctcacttaaggaatgacacagatgtggtaaactttgtgagcatggagttttctctca

SEQ ID NO: 72319 - DNA, 60 bp, Artificial
  Synthetic oligonucleotide
ggaatgacacagatgtggtaaactttgtgagcatggagttttctctcactgacccgaggc

SEQ ID NO: 72320 - DNA, 60 bp, Artificial
  Synthetic oligonucleotide
taaactttgtgagcatggagttttctctcactgacccgagacttgagccgcataaatggg

SEQ ID NO: 72321 - DNA, 60 bp, Artificial
  Synthetic oligonucleotide
cagatgtggtaaactttgtgagcatggagttttctctcactgacccgagacttgagccac

SEQ ID NO: 72322 - DNA, 60 bp, Artificial
  Synthetic oligonucleotide
gcagcaatggacgattttcaactaattcccatgataagcaagtgcagaactaaagaggga

SEQ ID NO: 72323 - DNA, 60 bp, Artificial
  Synthetic oligonucleotide
tatacattaatactgccttgctcaatgcatcctgtgcagcaatggacgattttcaactaa

SEQ ID NO: 72324 - DNA, 60 bp, Artificial
  Synthetic oligonucleotide
gcatcctgtgcagcaatggacgattttcaactaattcccatgataagcaagtgcagaacc

SEQ ID NO: 72325 - DNA, 60 bp, Artificial
  Synthetic oligonucleotide
gtttccagttatgtgtgctcaggacttgttggagacacacccagaagaaacgacagctcc

SEQ ID NO: 72326 - DNA, 60 bp, Artificial
  Synthetic oligonucleotide
caacactaaacaacgggcattcaaatgacacagtacatgataggaccccttaccgaaccc

SEQ ID NO: 72327 - DNA, 60 bp, Artificial
  Synthetic oligonucleotide
gctcagagacttgaagatgtctttgctgggaaaaacacagatcttgaggctctcatggaa

SEQ ID NO: 72328 - DNA, 60 bp, Artificial
  Synthetic oligonucleotide
gggagattacattccatggggccaaagaaatagcactcagttattctgctggtgcacttg

SEQ ID NO: 72329 - DNA, 60 bp, Artificial
  Synthetic oligonucleotide
caaataacattcatgcaagcattacagctgctgtttgaagtggaacaggagataagaacc

SEQ ID NO: 72330 - DNA, 60 bp, Artificial
  Synthetic oligonucleotide
gatgatggaaatgacgtgtggatgggaagaacgatcagcgagaagttacgctcaggttat

SEQ ID NO: 72331 - DNA, 60 bp, Artificial
  Synthetic oligonucleotide
gggagtcatggagtgaaaggctgggcctttgatgatggaaatgacgtgtggatgggaaga

SEQ ID NO: 72332 - DNA, 60 bp, Artificial
  Synthetic oligonucleotide
aggaaggtggtcatggagtgaaaggctgggcctttgatgatggaaatgacgtgtggatgg

SEQ ID NO: 72333 - DNA, 60 bp, Artificial
  Synthetic oligonucleotide
ggaaacaagttgtagaccaagaactgagtgatgccccattccttgatcggcttcgccggg

SEQ ID NO: 72334 - DNA, 60 bp, Artificial
  Synthetic oligonucleotide
cataatggattccaacactgtgtcaagtttccaggtagattgctttctttggcatatccg

SEQ ID NO: 72335 - DNA, 60 bp, Artificial
  Synthetic oligonucleotide
acataatggattccaacactgtgtcaagtttccaggtagattgctttctttggcatatac

SEQ ID NO: 72336 - DNA, 60 bp, Artificial
  Synthetic oligonucleotide
acactgtgtcaagtttccaggtagattgctttctttggcatatccggaaacaagttgtgg

SEQ ID NO: 72337 - DNA, 60 bp, Artificial
  Synthetic oligonucleotide
tctttggcatatccggaaacaagttgtagaccaagaactgagtgatgccccattccttga

SEQ ID NO: 72338 - DNA, 60 bp, Artificial
  Synthetic oligonucleotide
aagacataatggattccaacactgtgtcaagtttccaggtagattgctttctttggcata

SEQ ID NO: 72339 - DNA, 60 bp, Artificial
  Synthetic oligonucleotide
agacataatggattccaacactgtgtcaagtttccaggtagattgctttctttggcatat

SEQ ID NO: 72340 - DNA, 60 bp, Artificial
  Synthetic oligonucleotide
aaagacataatggattccaacactgtgtcaagtttccaggtagattgctttctttggcat

SEQ ID NO: 72341 - DNA, 60 bp, Artificial
  Synthetic oligonucleotide
tggattccaacactgtgtcaagtttccaggtagattgctttctttggcatatccgaaaac

SEQ ID NO: 72342 - DNA, 60 bp, Artificial
  Synthetic oligonucleotide
ctttggcatatccggaaacaagttgtagaccaagaactgagtgatgccccattccttgat

SEQ ID NO: 72343 - DNA, 60 bp, Artificial
  Synthetic oligonucleotide
ccaacactgtgtcaagtttccaggtagattgctttctttggcatatacggaaacaagttg

SEQ ID NO: 72344 - DNA, 60 bp, Artificial
  Synthetic oligonucleotide
ggcttgaaaagagggccttctacggaaggagtacctgagtctatgagggaagaatatcgg

SEQ ID NO: 72345 - DNA, 60 bp, Artificial
  Synthetic oligonucleotide
agaagaaggccaaactggcaaatgttgtgagaaagatgatgactaattcacaagacacag

SEQ ID NO: 72346 - DNA, 58 bp, Artificial
  Synthetic oligonucleotide
attcccaggaggaaccgctctattctcaacacaagccaaaggggaattcttgaggatg

SEQ ID NO: 72347 - DNA, 60 bp, Artificial
  Synthetic oligonucleotide
catataggtgccatagaggagacacacaaattcagacgagaagatcattcgagctaaaga

SEQ ID NO: 72348 - DNA, 53 bp, Artificial
  Synthetic oligonucleotide
gaacaacatgataaacaatgaccttggaccagcaacagcccagatggctcttc

SEQ ID NO: 72349 - DNA, 60 bp, Artificial
  Synthetic oligonucleotide
tacaggtatacatataggtgccatagaggagacacacaaattcagacgagaagatcattc

SEQ ID NO: 72350 - DNA, 60 bp, Artificial
  Synthetic oligonucleotide
atatacatataggtgccatagaggagacacacaaattcagacgagaagatcattcgagct

SEQ ID NO: 72351 - DNA, 60 bp, Artificial
  Synthetic oligonucleotide
cagacttatgattggacattaaacagaaatcaaccggcagcaactgcgttagccaacacc

SEQ ID NO: 72352 - DNA, 60 bp, Artificial
  Synthetic oligonucleotide
cttatgattggacattaaacagaaatcaaccggcagcaactgcattagccaacaccatag

SEQ ID NO: 72353 - DNA, 60 bp, Artificial
  Synthetic oligonucleotide
ccggcagcaactgcattagccaacaccatagaagtttttagatcgaatggtctaacagct

SEQ ID NO: 72354 - DNA, 60 bp, Artificial
  Synthetic oligonucleotide
ccagacttatgattggacattaaacagaaatcaaccggcagcaactgcgttagccaacac

SEQ ID NO: 72355 - DNA, 60 bp, Artificial
  Synthetic oligonucleotide
taaaggttccagcgcaaaatgccataagcaccacattcccttatactggagatcctccgt

SEQ ID NO: 72356 - DNA, 60 bp, Artificial
  Synthetic oligonucleotide
gcggcaactgcattagccaacaccatagaagtttttagatcgaatggtctaacagctaat

SEQ ID NO: 72357 - DNA, 60 bp, Artificial
  Synthetic oligonucleotide
tagccaacaccatagaagtttttagatcgaatggtctaacagctaatgaatcgggaaggc

SEQ ID NO: 72358 - DNA, 60 bp, Artificial
  Synthetic oligonucleotide
ggtatacatataggtgccatagaggagacacacaaattcagacgagaagatcattcgagc

SEQ ID NO: 72359 - DNA, 60 bp, Artificial
  Synthetic oligonucleotide
aatgcggtagtgatgccagcccatggtccagccaaaagtatggaatatgatgccgttgca

SEQ ID NO: 72360 - DNA, 60 bp, Artificial
  Synthetic oligonucleotide
tataggtgccatagaggagacacacaaattcagacgagaagatcattcgagctaaagatg

SEQ ID NO: 72361 - DNA, 60 bp, Artificial
  Synthetic oligonucleotide
gttgcaactacacactcctggattcccaagaggaaccgctctattctcaacacaagccaa

SEQ ID NO: 72362 - DNA, 60 bp, Artificial
  Synthetic oligonucleotide
tagccaacaccatagaagtttttagatcgaatggtctaacagctaatgaatcaggaaggc

SEQ ID NO: 72363 - DNA, 60 bp, Artificial
  Synthetic oligonucleotide
tccagttgggggtaatgaaaagaaggccaaactggcaaatgttgtgagaaagatgatgac

SEQ ID NO: 72364 - DNA, 60 bp, Artificial
  Synthetic oligonucleotide
ggacaaactaactcaaggtcgccagacttatgattggacattaaacagaaatcaaccggc

SEQ ID NO: 72365 - DNA, 60 bp, Artificial
  Synthetic oligonucleotide
aaacaagggtggacaaactaactcaaggtcgccagacttatgattggacattaaacagaa

SEQ ID NO: 72366 - DNA, 60 bp, Artificial
  Synthetic oligonucleotide
tacaccatggacacagtcaacagaacacaccaatattcagaaaaggggaaatggacgaca

SEQ ID NO: 72367 - DNA, 60 bp, Artificial
  Synthetic oligonucleotide
tgcagacctatcagaaacgaatgggggtgcagatgcaacgattcaagtgacccgcttgtt

SEQ ID NO: 72368 - DNA, 55 bp, Artificial
  Synthetic oligonucleotide
agaatgggggacctccacttactccaaaacagaaacagaaaatggcgagaacagc

SEQ ID NO: 72369 - DNA, 60 bp, Artificial
  Synthetic oligonucleotide
ccaagcaagtgtgcatagcatggtccagctcaagttgtcacgatggaaaagcatggatgc

SEQ ID NO: 72370 - DNA, 60 bp, Artificial
  Synthetic oligonucleotide
atttgggaaccaggcaagtgtgcatagcatggtccagctcaagttgtcacgacggaaaag

SEQ ID NO: 72371 - DNA, 60 bp, Artificial
  Synthetic oligonucleotide
gaccaagcaagtgtgcatagcatggtccagctcaagttgtcacgatggaaaagcatggat

SEQ ID NO: 72372 - DNA, 60 bp, Artificial
  Synthetic oligonucleotide
acaatgaggaaggtggtcatggagtgaaaggctgggcctttgatgatggaaatgacgtgt

SEQ ID NO: 72373 - DNA, 60 bp, Artificial
  Synthetic oligonucleotide
ggattatagcattgtttccggttatgtgtgctcaggacttgttggagacacacccagaaa

SEQ ID NO: 72374 - DNA, 60 bp, Artificial
  Synthetic oligonucleotide
ggattatagcattgtttccagttatgtatgctcaggacttgttggagacacacccagaaa

SEQ ID NO: 72375 - DNA, 60 bp, Artificial
  Synthetic oligonucleotide
ggattatagcgttgtttccagttatgtgtgctcaggacttgttggagacacacccagaaa

SEQ ID NO: 72376 - DNA, 60 bp, Artificial
  Synthetic oligonucleotide
caccaccatagagaaggaaatatgccccaaactagcagaatacaggaattggtcaaagcc

SEQ ID NO: 72377 - DNA, 54 bp, Artificial
  Synthetic oligonucleotide
acatctgggtgacaagagaaccttatgtgtcatgcgaccctgacaagtgttatc

SEQ ID NO: 72378 - DNA, 60 bp, Artificial
  Synthetic oligonucleotide
ggattatagcattgtttccagctatgtgtgctcaggacttgttggagacacacccagaaa

SEQ ID NO: 72379 - DNA, 60 bp, Artificial
  Synthetic oligonucleotide
acaacactaaacaacgtgcattcaaatgacacagtacatgataggaccccctatcggacc

SEQ ID NO: 72380 - DNA, 60 bp, Artificial
  Synthetic oligonucleotide
gttccatttcatttggggaccaagcaagtgtgcatagcatggtccagctcaagttgtcac

SEQ ID NO: 72381 - DNA, 50 bp, Artificial
  Synthetic oligonucleotide
acaacactaaacaacgtgcattcaaatgacacagtacatgataggacccc

SEQ ID NO: 72382 - DNA, 53 bp, Artificial
  Synthetic oligonucleotide
gtgtcagatgtgtctgcagagacaactggaaaggctccaataggcccattgta

SEQ ID NO: 72383 - DNA, 60 bp, Artificial
  Synthetic oligonucleotide
aaaggattatagcattgtttccggttatgtgtgctcaggacttgttggagacacacccag

SEQ ID NO: 72384 - DNA, 60 bp, Artificial
  Synthetic oligonucleotide
ggtgcttttatgtggagttgataaggggaagaaaagaggaaactgaagtcttgtggacct

SEQ ID NO: 72385 - DNA, 60 bp, Artificial
  Synthetic oligonucleotide
tcggtgcttttatgtggagttgataaggggaaggaaagaggaaactgaagtctggtggac

SEQ ID NO: 72386 - DNA, 60 bp, Artificial
  Synthetic oligonucleotide
ggtggtcatggagtgaaaggctgggcctttgatgatggaaatgacgtgtggatgggaaga

SEQ ID NO: 72387 - DNA, 60 bp, Artificial
  Synthetic oligonucleotide
ctattaaccatgaagactatcattgctttgagctacattctatgtctggttttcgctcaa

SEQ ID NO: 72388 - DNA, 60 bp, Artificial
  Synthetic oligonucleotide
tcctcatcagatccttgatggagaaaactgcacactaatagatgctctattgggagaccc

SEQ ID NO: 72389 - DNA, 60 bp, Artificial
  Synthetic oligonucleotide
caatgaaaaatttgacaaattgtacatttggggggttcaccacccgggtacggacaatga

SEQ ID NO: 72390 - DNA, 60 bp, Artificial
  Synthetic oligonucleotide
gcgacagtcctcatcagatccttgatggagaaaactgcacactaatagatgctctattgg

SEQ ID NO: 72391 - DNA, 60 bp, Artificial
  Synthetic oligonucleotide
caaaacactctgaaattggcaacagggatgcgaaatgtaccagagaaacaaactagaggc

SEQ ID NO: 72392 - DNA, 60 bp, Artificial
  Synthetic oligonucleotide
cttgttgccctggagaaccaacatacaattgatctaactgactcaaaaatgaacaaactg

SEQ ID NO: 72393 - DNA, 60 bp, Artificial
  Synthetic oligonucleotide
cccagatatgtcaagcaaaacactctgaaattggcaacagggatgcgaaatgtaccagag

SEQ ID NO: 72394 - DNA, 60 bp, Artificial
  Synthetic oligonucleotide
ttttgttgaacgcagcaaagcctacagcaactgttacccttatgatgtgccggattatgc

SEQ ID NO: 72395 - DNA, 60 bp, Artificial
  Synthetic oligonucleotide
acctttttgttgaacgcagcaaagcctacagcaactgttacccttatgatgtgccggatt

SEQ ID NO: 72396 - DNA, 60 bp, Artificial
  Synthetic oligonucleotide
cccagcattgaacgtgactatgccaaacaatgaaaaatttgacaaattgtacatttgggg

SEQ ID NO: 72397 - DNA, 60 bp, Artificial
  Synthetic oligonucleotide
tgaacgtgactatgccaaacaatgaaaaatttgacaaattgtacatttggggggttcacc

SEQ ID NO: 72398 - DNA, 60 bp, Artificial
  Synthetic oligonucleotide
tgggacctttttgttgaacgcagcaaagcctacagcaactgttacccttatgatgtgccg

SEQ ID NO: 72399 - DNA, 60 bp, Artificial
  Synthetic oligonucleotide
tcaggaaggatcacagtctctaccaaaagaagccaacaaactgtaatcccgaatatcgga

SEQ ID NO: 72400 - DNA, 60 bp, Artificial
  Synthetic oligonucleotide
gtctctaccaaaagaagccaacaaactgtaatcccgaatatcggatctagacccagggta

SEQ ID NO: 72401 - DNA, 60 bp, Artificial
  Synthetic oligonucleotide
cttgatggagaaaactgcacactaatagatgctctattgggagaccctcagtgtgatggc

SEQ ID NO: 72402 - DNA, 60 bp, Artificial
  Synthetic oligonucleotide
gaatatgcgacagtcctcatcagatccttgatggagaaaactgcacactaatagatgctc

SEQ ID NO: 72403 - DNA, 60 bp, Artificial
  Synthetic oligonucleotide
caggtggaatatgcgacagtcctcatcagatccttgatggagaaaactgcacactaatag

SEQ ID NO: 72404 - DNA, 60 bp, Artificial
  Synthetic oligonucleotide
catgaagactatcattgctttgagctacattctatgtctggttttcgctcaaaaacttcc

SEQ ID NO: 72405 - DNA, 60 bp, Artificial
  Synthetic oligonucleotide
attaacagcacagggaatctaattgctcctcggggttacttcaaaatacgaagtgggaaa

SEQ ID NO: 72406 - DNA, 60 bp, Artificial
  Synthetic oligonucleotide
ctatgccaaacaatgaaaaatttgacaaattgtacatttggggggttcaccacccgggta

SEQ ID NO: 72407 - DNA, 60 bp, Artificial
  Synthetic oligonucleotide
cagatccttgatggagaaaactgcacactaatagatgctctattgggagaccctcagtgt

SEQ ID NO: 72408 - DNA, 60 bp, Artificial
  Synthetic oligonucleotide
gggatgaagcattaaacaaccggttccagatcaaaggtgttgagctgaagtcaggataca

SEQ ID NO: 72409 - DNA, 60 bp, Artificial
  Synthetic oligonucleotide
aagcatcaggaagaatcacagtctctaccaaaagaagccaacaaactgtaatcccgaata

SEQ ID NO: 72410 - DNA, 60 bp, Artificial
  Synthetic oligonucleotide
aagaatcacagtctctaccaaaagaagccaacaaactgtaatcccgaatatcggatctag

SEQ ID NO: 72411 - DNA, 60 bp, Artificial
  Synthetic oligonucleotide
agaaaactgcacactaatagatgctctattgggagaccctcagtgtgatggcttccaaaa

SEQ ID NO: 72412 - DNA, 60 bp, Artificial
  Synthetic oligonucleotide
cactaatagatgctctattgggagaccctcagtgtgatggcttccaaaataagaaatggg

SEQ ID NO: 72413 - DNA, 60 bp, Artificial
  Synthetic oligonucleotide
gcttccaaaataagaaatgggacctttttgttgaacgcagcaaagcctacagcaactgtt

SEQ ID NO: 72414 - DNA, 60 bp, Artificial
  Synthetic oligonucleotide
aagcttcaattggactggagtcactcaaaatggaacaagctctgcttgcaaaaggagatc

SEQ ID NO: 72415 - DNA, 60 bp, Artificial
  Synthetic oligonucleotide
tatacagggatgaagcattaaacaaccggttccagatcaaaggtgttgagctgaagtcag

SEQ ID NO: 72416 - DNA, 60 bp, Artificial
  Synthetic oligonucleotide
caccaaacggtcttatgaacagatggaaactgatggggatcgccagaatgcaactgagat

SEQ ID NO: 72417 - DNA, 60 bp, Artificial
  Synthetic oligonucleotide
aacggtcttatgaacagatggaaactgatggggatcgccagaatgcaactgagattaggg

SEQ ID NO: 72418 - DNA, 60 bp, Artificial
  Synthetic oligonucleotide
aactgatggggatcgccagaatgcaactgagattagggcatccgtcgggaagatgattga

SEQ ID NO: 72419 - DNA, 60 bp, Artificial
  Synthetic oligonucleotide
ccaaatgtgcactgaacttaaactcagtgatcatgaagggcgattgatccagaacagctt

SEQ ID NO: 72420 - DNA, 60 bp, Artificial
  Synthetic oligonucleotide
gagattaggtcatccgtcgggaagatgattgatggaattgggcgattctacatccaaatg

SEQ ID NO: 72421 - DNA, 60 bp, Artificial
  Synthetic oligonucleotide
ttctacatccaaatgtgcactgaacttaaactcagtgatcatgaagggcgattgatccag

SEQ ID NO: 72422 - DNA, 60 bp, Artificial
  Synthetic oligonucleotide
catccaaatgtgcactgaacttaaactcagtgatcatgaagggcgattgatccagaacag

SEQ ID NO: 72423 - DNA, 60 bp, Artificial
  Synthetic oligonucleotide
cggtcttatgaacagatggaaactgatggggatcgccagaatgcaactgagattaggtca

SEQ ID NO: 72424 - DNA, 60 bp, Artificial
  Synthetic oligonucleotide
gctcagtgatcatgaagggcgattgatccagaacagcttgacaatagagaaaatggtgct

SEQ ID NO: 72425 - DNA, 60 bp, Artificial
  Synthetic oligonucleotide
gatgcagggctcgacccttcctagaaggtccggagctgcaggtgctgcagtcaaaggaat

SEQ ID NO: 72426 - DNA, 60 bp, Artificial
  Synthetic oligonucleotide
agatgattgatggaattgggagattctacatccaaatgtgcactgaacttaaactcagtg

SEQ ID NO: 72427 - DNA, 60 bp, Artificial
  Synthetic oligonucleotide
gccattctgctgcatttgaagatttaagattgttaagcttcatcagagggacaaaagtat

SEQ ID NO: 72428 - DNA, 60 bp, Artificial
  Synthetic oligonucleotide
ctgcatttgaagatttaagattgttaagcttcatcagagggacaaaagtatctccgcgag

SEQ ID NO: 72429 - DNA, 60 bp, Artificial
  Synthetic oligonucleotide
tgcatttgaagatttaagattgttaagcttcatcagagggacaaaagtatctcctcgggg

SEQ ID NO: 72430 - DNA, 60 bp, Artificial
  Synthetic oligonucleotide
atgctgagatcgaagatctcatatttttggcaagatctgcattgatattgagagggtcag

SEQ ID NO: 72431 - DNA, 60 bp, Artificial
  Synthetic oligonucleotide
ggcatgccattccgctgcatttgaagatttaagattgttaagcttcatcagagggaccaa

SEQ ID NO: 72432 - DNA, 60 bp, Artificial
  Synthetic oligonucleotide
gatggaaactgatggggatcgccagaatgcaactgagattaggtcatccgtcgggaagat

SEQ ID NO: 72433 - DNA, 60 bp, Artificial
  Synthetic oligonucleotide
aggtcatccgtcgggaagatgattgatggaattgggcgattctacatccaaatgtgcact

SEQ ID NO: 72434 - DNA, 60 bp, Artificial
  Synthetic oligonucleotide
gattaggtcatccgtcgggaagatgattgatggaattgggcgattctacatccaaatgtg

SEQ ID NO: 72435 - DNA, 60 bp, Artificial
  Synthetic oligonucleotide
atggaattgggagattctacatccaaatgtgcactgaacttaaactcagtgatcatgaag

SEQ ID NO: 72436 - DNA, 60 bp, Artificial
  Synthetic oligonucleotide
tgcacaaagggcaatggtggatcaagtgagagaaagtcggaacccaggaaatgctgagat

SEQ ID NO: 72437 - DNA, 60 bp, Artificial
  Synthetic oligonucleotide
ggctcaactctccctagaaggtccggagctgcaggtgctgcagtcaaaggaatcgggaca

SEQ ID NO: 72438 - DNA, 60 bp, Artificial
  Synthetic oligonucleotide
gggctcgactctccctagaaggtccggagctgcaggtgctgcagtcaaaggaattggaac

SEQ ID NO: 72439 - DNA, 60 bp, Artificial
  Synthetic oligonucleotide
gaacagatggaaactgatggggatcgccagaatgcaactgagattagggcatccgtcggg

SEQ ID NO: 72440 - DNA, 60 bp, Artificial
  Synthetic oligonucleotide
tcttatgaacagatggaaactgatggggatcgccagaatgcaactgagattagggcatcc

SEQ ID NO: 72441 - DNA, 60 bp, Artificial
  Synthetic oligonucleotide
gtcttatgaacagatggaaactgatggggatcgccagaatgcaactgagattagggcatc

SEQ ID NO: 72442 - DNA, 60 bp, Artificial
  Synthetic oligonucleotide
ggtcttatgaacagatggaaactgatggggatcgccagaatgcaactgagattagggcat

SEQ ID NO: 72443 - DNA, 60 bp, Artificial
  Synthetic oligonucleotide
atcaaaatcatggcgtcccaaggcaccaaacggtcttatgaacagatggaaactgatggg

SEQ ID NO: 72444 - DNA, 60 bp, Artificial
  Synthetic oligonucleotide
tggggaggaaatggccacaaaggcagactacactctcgacgaggaaagcagagctaggat

SEQ ID NO: 72445 - DNA, 60 bp, Artificial
  Synthetic oligonucleotide
ctattgtagagccactgagtacataatgaagggggtatacattaatactgccctgctcaa

SEQ ID NO: 72446 - DNA, 60 bp, Artificial
  Synthetic oligonucleotide
aagtgccataggccaaatttcaaggcctatgttcttgtatgtgaggacaaacggtacatc

SEQ ID NO: 72447 - DNA, 60 bp, Artificial
  Synthetic oligonucleotide
acacagatgtggtaaactttgtgagcatggagttttctctcactgacccgaaacttgagc

SEQ ID NO: 72448 - DNA, 60 bp, Artificial
  Synthetic oligonucleotide
aggcagactacactctcgacgaggaaagcagggctaggattaaaaccaggctatttacca

SEQ ID NO: 72449 - DNA, 60 bp, Artificial
  Synthetic oligonucleotide
agctggatacagaatgagttcaacaaggcctgcgagctaactgactcagtctggatagag

SEQ ID NO: 72450 - DNA, 60 bp, Artificial
  Synthetic oligonucleotide
taaggtcactttcaagctggatacagaatgagttcaacaaggcctgcgagctaactgact

SEQ ID NO: 72451 - DNA, 60 bp, Artificial
  Synthetic oligonucleotide
gaacggctgcattgagggcaagctttctcaaatgtccaaagaagtgaatgccaaaatcga

SEQ ID NO: 72452 - DNA, 60 bp, Artificial
  Synthetic oligonucleotide
gcttgatgatccaaatgcactgttaaagcacagatttgaaataatcgaggggagagacag

SEQ ID NO: 72453 - DNA, 60 bp, Artificial
  Synthetic oligonucleotide
tttgcagcaatatgcacccacttggaggtatgtttcatgtattcagattttcatttcatc

SEQ ID NO: 72454 - DNA, 60 bp, Artificial
  Synthetic oligonucleotide
tgatgatccaaatgcactgttgaagcacagatttgaaataatcgaggggagagacagaac

SEQ ID NO: 72455 - DNA, 60 bp, Artificial
  Synthetic oligonucleotide
gacgatccaaatgcactgttaaagcacagatttgaaataatcgaggggagagacagaaca

SEQ ID NO: 72456 - DNA, 51 bp, Artificial
  Synthetic oligonucleotide
tgccataggccaaatttcaaggcctatgttcttgtatgtgaggacaaacgg

SEQ ID NO: 72457 - DNA, 60 bp, Artificial
  Synthetic oligonucleotide
gccacaaaggcagactacactctcgacgaggaaagcagagctaggattaagaccaggctg

SEQ ID NO: 72458 - DNA, 60 bp, Artificial
  Synthetic oligonucleotide
ggggaggaaatggccacaaaggcagactacactctcgacgaggaaagcagggctaggatc

SEQ ID NO: 72459 - DNA, 60 bp, Artificial
  Synthetic oligonucleotide
gcactgttaaagcacagatttgaaataatcgaggggagagacagaacaatggcctggaca

SEQ ID NO: 72460 - DNA, 60 bp, Artificial
  Synthetic oligonucleotide
ccattgtagagccactgagtacataatgaagggggtgtacattaatactgccttgctcaa

SEQ ID NO: 72461 - DNA, 60 bp, Artificial
  Synthetic oligonucleotide
cggctgcattgagggcaagctttctcaaatgtccaaagaagtgaatgccaaaatcgaacc

SEQ ID NO: 72462 - DNA, 60 bp, Artificial
  Synthetic oligonucleotide
atatccggaaacaagttgtagaccaagaactgagtgatgccccattccttgatcggcttc

SEQ ID NO: 72463 - DNA, 60 bp, Artificial
  Synthetic oligonucleotide
gcatatccggaaacaagttgtagaccaagaactgagtgatgccccattccttgatcggct

SEQ ID NO: 72464 - DNA, 60 bp, Artificial
  Synthetic oligonucleotide
tggattccaacactgtgtcaagtttccaggtagattgctttctttggcatatccggagac

SEQ ID NO: 72465 - DNA, 60 bp, Artificial
  Synthetic oligonucleotide
ggactccaacactgtgtcaagtttccaggtagattgctttctttggcatatccggaaaca

SEQ ID NO: 72466 - DNA, 60 bp, Artificial
  Synthetic oligonucleotide
ccaacactgtgtcaagtttccaggtagattgctttctttggcatatccggaaacaagctg

SEQ ID NO: 72467 - DNA, 60 bp, Artificial
  Synthetic oligonucleotide
ccaacactgtgttaagtttccaggtagattgctttctttggcatatccggaaacaagttg

SEQ ID NO: 72468 - DNA, 60 bp, Artificial
  Synthetic oligonucleotide
acactgtgtcaagtttccaggtagattgctttctttggcatatacggaaacaagttgtag

SEQ ID NO: 72469 - DNA, 60 bp, Artificial
  Synthetic oligonucleotide
ggtagattgctttctttggcatatccggaaacaagttgtagaccaagaactgagtgatgc

SEQ ID NO: 72470 - DNA, 60 bp, Artificial
  Synthetic oligonucleotide
tttggcatatccggaaacaagttgtagaccaagaactgagtgatgccccattccttgatc

SEQ ID NO: 72471 - DNA, 60 bp, Artificial
  Synthetic oligonucleotide
tggcatatacggaaacaagttgtagaccaagaactgagtgatgccccattccttgatcgg

SEQ ID NO: 72472 - DNA, 60 bp, Artificial
  Synthetic oligonucleotide
tggcatatccggaaacaagctgtagaccaagaactgagtgatgccccattccttgatcgg

SEQ ID NO: 72473 - DNA, 60 bp, Artificial
  Synthetic oligonucleotide
acataatggattccaacactgtgttaagtttccaggtagattgctttctttggcatatcc

SEQ ID NO: 72474 - DNA, 60 bp, Artificial
  Synthetic oligonucleotide
acataatggactccaacactgtgtcaagtttccaggtagattgctttctttggcatatcc

SEQ ID NO: 72475 - DNA, 60 bp, Artificial
  Synthetic oligonucleotide
ataatggattccaacactgtgtcaagtttccaggtagattgctttctttggcatatccgg

SEQ ID NO: 72476 - DNA, 60 bp, Artificial
  Synthetic oligonucleotide
ggtctctaaaaatctacagagattcgcttggagaagcagtaatgagaatgggggacctcc

SEQ ID NO: 72477 - DNA, 60 bp, Artificial
  Synthetic oligonucleotide
acataatggattctaacactgtgtcaagtttccaggtagattgctttctttggcatatac

SEQ ID NO: 72478 - DNA, 60 bp, Artificial
  Synthetic oligonucleotide
acataatggattctaacactgtgtcaagtttccaggtagattgctttctttggcatatcc

SEQ ID NO: 72479 - DNA, 60 bp, Artificial
  Synthetic oligonucleotide
tttcagtgtgatttttgaccgactagagagcatagtattactaagggctttcaccgaaga

SEQ ID NO: 72480 - DNA, 60 bp, Artificial
  Synthetic oligonucleotide
tttcagtgtgatttttgaccgactagaggccatagtattactaagggctttcaccgaaga

SEQ ID NO: 72481 - DNA, 60 bp, Artificial
  Synthetic oligonucleotide
gaatctgatgaggcacttaaaatgaccatggtctccacacctgcttcgcgatacataatt

SEQ ID NO: 72482 - DNA, 60 bp, Artificial
  Synthetic oligonucleotide
caccgaagagggagcaattgttggcgaaatctcaccattgccctcttttccaggacatac

SEQ ID NO: 72483 - DNA, 60 bp, Artificial
  Synthetic oligonucleotide
tcaccgaagagggagcaattgttggcgaaatctcaccattgccctcttttccaggacata

SEQ ID NO: 72484 - DNA, 60 bp, Artificial
  Synthetic oligonucleotide
gttgtagaccaagaactgagtgatgccccattccttgatcggcttcgccgagatcagagg

SEQ ID NO: 72485 - DNA, 60 bp, Artificial
  Synthetic oligonucleotide
tctacggagggagtacctgagtctatgagggaagaatatcgaaaggaacagcagaatgct

SEQ ID NO: 72486 - DNA, 60 bp, Artificial
  Synthetic oligonucleotide
gggactcaccctagctccagtactggtctaagagatgatcttcttgaaaatttgcagacc

SEQ ID NO: 72487 - DNA, 60 bp, Artificial
  Synthetic oligonucleotide
tagctccagtactggtctaagagatgatcttcttgaaaatttgcagacctatcagaaacg

SEQ ID NO: 72488 - DNA, 60 bp, Artificial
  Synthetic oligonucleotide
tgcaacatgtgaacagattgctgactcccagcacaggtctcataggcaaatggtggcaac

SEQ ID NO: 72489 - DNA, 60 bp, Artificial
  Synthetic oligonucleotide
tagctctcagttattctgctggtgcacttgccagttgcatgggcctcatatacaatagaa

SEQ ID NO: 72490 - DNA, 60 bp, Artificial
  Synthetic oligonucleotide
ctctcagttattctgctggtgcacttgccagttgcatgggcctcatatacaatagaatgg

SEQ ID NO: 72491 - DNA, 60 bp, Artificial
  Synthetic oligonucleotide
ctggtatgtgcaacatgtgaacagattgctgactcccagcacaggtctcataggcaaatg

SEQ ID NO: 72492 - DNA, 60 bp, Artificial
  Synthetic oligonucleotide
accactgaagtggcatttggcctggtatgtgcaacatgtgaacagattgctgactcccag

SEQ ID NO: 72493 - DNA, 60 bp, Artificial
  Synthetic oligonucleotide
atacaatagaatgggggctgtaaccactgaagtggcatttggcctggtatgtgcaacatg

SEQ ID NO: 72494 - DNA, 60 bp, Artificial
  Synthetic oligonucleotide
tttgctgggaaaaacacagatcttgaggctctcatggaatggctaaagacaagaccaatt

SEQ ID NO: 72495 - DNA, 60 bp, Artificial
  Synthetic oligonucleotide
acatgtgaacagattgctgactcccagcacaggtctcataggcaaatggtggcaacaacc

SEQ ID NO: 72496 - DNA, 60 bp, Artificial
  Synthetic oligonucleotide
aaatgccctcaatgggaatggggatccaaataacatggacaaagcagttaaactgtatag

SEQ ID NO: 72497 - DNA, 60 bp, Artificial
  Synthetic oligonucleotide
gctgggaaaaacacagatcttgaggctctcatggaatggctaaagacaagaccaattctg

SEQ ID NO: 72498 - DNA, 60 bp, Artificial
  Synthetic oligonucleotide
gggctgtaaccactgaagtggcatttggcctggtatgtgcaacatgtgaacagattgctg

SEQ ID NO: 72499 - DNA, 60 bp, Artificial
  Synthetic oligonucleotide
cggagggagtacctgagtctatgagggaagaatatcgaaaggaacagcagaatgctgtgg

SEQ ID NO: 72500 - DNA, 60 bp, Artificial
  Synthetic oligonucleotide
cctgagtctatgagggaagaatatcgaaaggaacagcagaatgctggggatgctgacgac

SEQ ID NO: 72501 - DNA, 60 bp, Artificial
  Synthetic oligonucleotide
aatagaatgggggctgtaaccactgaagtggcatttggcctggtatgtgcaacatgtgaa

SEQ ID NO: 72502 - DNA, 60 bp, Artificial
  Synthetic oligonucleotide
taggatgggggctgtaaccactgaagtggcatttggcctggtatgtgcaacatgtgagca

SEQ ID NO: 72503 - DNA, 60 bp, Artificial
  Synthetic oligonucleotide
gcaatgagaaccgttgggactcaccctagctccagtactggtctaagagatgatcttctt

SEQ ID NO: 72504 - DNA, 60 bp, Artificial
  Synthetic oligonucleotide
gtgaacagattgctgactcccagcacaggtctcataggcaaatggtggcaacaaccaatc

SEQ ID NO: 72505 - DNA, 60 bp, Artificial
  Synthetic oligonucleotide
atgtgaacagattgctgactcccagcacaggtctcataggcaaatggtggcaacaaccaa

SEQ ID NO: 72506 - DNA, 60 bp, Artificial
  Synthetic oligonucleotide
ccctcaatgggaatggggatccaaataacatggacaaagcagttaaactgtataggaaac

SEQ ID NO: 72507 - DNA, 60 bp, Artificial
  Synthetic oligonucleotide
ggaatggagatccaaataacatggacaaagcagttaaactgtatagaaaacttaagaggg

SEQ ID NO: 72508 - DNA, 60 bp, Artificial
  Synthetic oligonucleotide
tcaccgtgcccagtgagcgaggactgcagcgtagacgctttgtccaaaatgccctcaatg

SEQ ID NO: 72509 - DNA, 60 bp, Artificial
  Synthetic oligonucleotide
ggaaaaacacagatcttgaggctctcatggaatggctaaagacaagaccaattctgtcac

SEQ ID NO: 72510 - DNA, 60 bp, Artificial
  Synthetic oligonucleotide
agaatcccacccaggtatctttgagaactcatgccttgaaacaatggaagccgttcaaca

SEQ ID NO: 72511 - DNA, 60 bp, Artificial
  Synthetic oligonucleotide
agaatcccactcaggtatctttgagaactcatgccttgaaacaatggaagtcgttcaaca

SEQ ID NO: 72512 - DNA, 60 bp, Artificial
  Synthetic oligonucleotide
agaatcccacccaggtatctttgagaactcatgccttgaaacaatggaagtcattcaaca

SEQ ID NO: 72513 - DNA, 60 bp, Artificial
  Synthetic oligonucleotide
ggggcaccccaactcaacccaattgatggaccactacctgaagataatgagccaagtgga

SEQ ID NO: 72514 - DNA, 60 bp, Artificial
  Synthetic oligonucleotide
agaatcccacccaggtatctttgagaactcatgccttgaaacaatggaagtcgttcaaca

SEQ ID NO: 72515 - DNA, 60 bp, Artificial
  Synthetic oligonucleotide
cacctcaactcaacccaattgatggaccactacctgaggataatgagccaagtggatatg

SEQ ID NO: 72516 - DNA, 60 bp, Artificial
  Synthetic oligonucleotide
caccccaactcaacccaattgatggaccactacctgaggataatgaaccaagtggatatg

SEQ ID NO: 72517 - DNA, 60 bp, Artificial
  Synthetic oligonucleotide
gggatctttgagaactcatgccttgaaacaatggaagtcattcaacaaacaagggtggac

SEQ ID NO: 72518 - DNA, 60 bp, Artificial
  Synthetic oligonucleotide
gtgaatgcaccaaatcatgagggaatacaagcaggagtggatagattctacaggacctgc

SEQ ID NO: 72519 - DNA, 60 bp, Artificial
  Synthetic oligonucleotide
ccttgaagaatcccacccaggtatctttgagaactcatgccttgaaacaatggaagtcgt

SEQ ID NO: 72520 - DNA, 60 bp, Artificial
  Synthetic oligonucleotide
cccaattgatggaccactacctgaggataatgagccaagtggatatgcacaaacagactg

SEQ ID NO: 72521 - DNA, 60 bp, Artificial
  Synthetic oligonucleotide
gagggaatacaagcaggagtggatagattctacaggacctgcaagttagtgggaatcagc

SEQ ID NO: 72522 - DNA, 60 bp, Artificial
  Synthetic oligonucleotide
agaatcccacccaggtatctttgagaactcatgccttgaaacaatggaaatcgttcaaca

SEQ ID NO: 72523 - DNA, 60 bp, Artificial
  Synthetic oligonucleotide
ggtatctttgagaactcatgccttgaaacaatggaagccgttcaacagacaagggtggac

SEQ ID NO: 72524 - DNA, 60 bp, Artificial
  Synthetic oligonucleotide
ggtatctttgagaactcatgccttgaaacaatggaaatcgttcaacaaacaagggtggac

SEQ ID NO: 72525 - DNA, 60 bp, Artificial
  Synthetic oligonucleotide
cctagtagttcatataggagaccgattggaatttctagcatggtggaggccatggtgtct

SEQ ID NO: 72526 - DNA, 60 bp, Artificial
  Synthetic oligonucleotide
ccttccttgaagaatcccacccaggtatctttgagaactcatgccttgaaacaatggaag

SEQ ID NO: 72527 - DNA, 60 bp, Artificial
  Synthetic oligonucleotide
cttccttgaagaatcccacccagggatctttgagaactcatgccttgaaacaatggaagt

SEQ ID NO: 72528 - DNA, 60 bp, Artificial
  Synthetic oligonucleotide
atcagaatggaccaggcaatcatggagaaaaacatcatgttgagagcgaatttcagtgtg

SEQ ID NO: 72529 - DNA, 60 bp, Artificial
  Synthetic oligonucleotide
ccctttgcatcagaatggaccaggcaatcatggagaaaaacatcatattgaaagcgaatt

SEQ ID NO: 72530 - DNA, 60 bp, Artificial
  Synthetic oligonucleotide
ccctttgcatcagaatggaccaggcaatcatggagaaaaacataatgttgaaagcgaatt

SEQ ID NO: 72531 - DNA, 52 bp, Artificial
  Synthetic oligonucleotide
acataatggattctaacactgtgtcaagtttccaggtagattgctttctttg

SEQ ID NO: 72532 - DNA, 60 bp, Artificial
  Synthetic oligonucleotide
gaccaacaccaccatagagaaggaaatatgccccaaattagcagaatacagaaattggtc

SEQ ID NO: 72533 - DNA, 60 bp, Artificial
  Synthetic oligonucleotide
gtgtatctgaccaacaccaccatagagaaggaaatatgccccaaactagcggaatacaga

SEQ ID NO: 72534 - DNA, 51 bp, Artificial
  Synthetic oligonucleotide
ttgtagaccaagaactgagtgatgccccattccttgatcggcttcgccgag

SEQ ID NO: 72535 - DNA, 60 bp, Artificial
  Synthetic oligonucleotide
gcaattggggtcctcatcgggggacttgaatggaatgataacacagttcgagtctctaaa

SEQ ID NO: 72536 - DNA, 60 bp, Artificial
  Synthetic oligonucleotide
ggatcagggatgagaatacttgtaaggggcaattctcctgtattcaactataacaagacc

SEQ ID NO: 72537 - DNA, 60 bp, Artificial
  Synthetic oligonucleotide
ggggatcagggatgagaatacttgtaaggggcaattctcctgtattcaactataacaaga

SEQ ID NO: 72538 - DNA, 60 bp, Artificial
  Synthetic oligonucleotide
cagaatcctgcaatgttgtacaacaaaatggaatttgaaccatttcaatctttagtcccc

SEQ ID NO: 72539 - DNA, 60 bp, Artificial
  Synthetic oligonucleotide
cgtggcaagtacggtccattacccaaaagtatacaagacttattttgacaaagtcgaaag

SEQ ID NO: 72540 - DNA, 60 bp, Artificial
  Synthetic oligonucleotide
gtacagagagggtggtggttagcattgatcggttcttgagagttcgagaccaacgtggga

SEQ ID NO: 72541 - DNA, 60 bp, Artificial
  Synthetic oligonucleotide
gtggcaagtacggtccattacccaaaagtatacaagacttattttgacaaagtcgaaagg

SEQ ID NO: 72542 - DNA, 60 bp, Artificial
  Synthetic oligonucleotide
gcttacaggcaatctccaaacattgaagataagagtacatgaggggtatgaggagttcac

SEQ ID NO: 72543 - DNA, 60 bp, Artificial
  Synthetic oligonucleotide
ccaaacattgaagataagagtacatgaggggtatgaggagttcacaatggtggggaaaag

SEQ ID NO: 72544 - DNA, 60 bp, Artificial
  Synthetic oligonucleotide
taaaagcagttagaggtgacctgaatttcgtcaacagagcaaatcagcgattgaacccca

SEQ ID NO: 72545 - DNA, 60 bp, Artificial
  Synthetic oligonucleotide
gaacccgactgaagaacaagctgtggatatatgcaaggctgcaatgggattgagaatcag

SEQ ID NO: 72546 - DNA, 60 bp, Artificial
  Synthetic oligonucleotide
aacccgactgaagaacaagctgtggatatatgcaaggctgcaatgggattgagaatcagc

SEQ ID NO: 72547 - DNA, 60 bp, Artificial
  Synthetic oligonucleotide
cccgactgaagaacaagctgtggatatatgcaaggctgcaatgggattgagaatcagctc

SEQ ID NO: 72548 - DNA, 60 bp, Artificial
  Synthetic oligonucleotide
gtacagagagggtggtggttagcattgatcggtttctgagagttcgagaccaacgtggga

SEQ ID NO: 72549 - DNA, 60 bp, Artificial
  Synthetic oligonucleotide
gcagtctcgaactcgcgagatactgacaaaaaccacagtggaccatatggccataattaa

SEQ ID NO: 72550 - DNA, 60 bp, Artificial
  Synthetic oligonucleotide
tataacaagaccactaaaagactaacagttctcggaaaagatgccggcactttaattgaa

SEQ ID NO: 72551 - DNA, 60 bp, Artificial
  Synthetic oligonucleotide
gtacagagagggtggtggttagcattgatcgatttttgagagttcgagaccaacgtggga

SEQ ID NO: 72552 - DNA, 60 bp, Artificial
  Synthetic oligonucleotide
ccggcactttaattgaagacccagatgaaagcacgtccggagtggagtccgccgtcttga

SEQ ID NO: 72553 - DNA, 60 bp, Artificial
  Synthetic oligonucleotide
cccaggtggagaagtgaggaatgacgatgttgaccaaagcctaattattgcggccaggaa

SEQ ID NO: 72554 - DNA, 60 bp, Artificial
  Synthetic oligonucleotide
gtagaagagtagacataaaccctggtcatgcagacctcagtgccaaagaggcacaagatg

SEQ ID NO: 72555 - DNA, 60 bp, Artificial
  Synthetic oligonucleotide
ccactaaaagactaacagttctcggaaaagatgccggcactttaattgaagacccagatg

SEQ ID NO: 72556 - DNA, 60 bp, Artificial
  Synthetic oligonucleotide
ccggcactttaattgaagacccagatgaaagcacatccggagtggaatccgccgtcttga

SEQ ID NO: 72557 - DNA, 60 bp, Artificial
  Synthetic oligonucleotide
atcaccgaagccttcacgtggacaggagtcacacaaaatggagggagtggtgcttgcaaa

SEQ ID NO: 72558 - DNA, 57 bp, Artificial
  Synthetic oligonucleotide
aaaccaagagcaaaccaatctgtacgttcaggcatcgggaagggtcacagtttcaac

SEQ ID NO: 72559 - DNA, 60 bp, Artificial
  Synthetic oligonucleotide
ggggaccctcattgtgatgtattccaagatgaaacatgggacctttatgtagagcgcagc

SEQ ID NO: 72560 - DNA, 60 bp, Artificial
  Synthetic oligonucleotide
gatggttggtatggtttcaggcatcagaactcggaaggcacaggacaagcagcagacctt

SEQ ID NO: 72561 - DNA, 60 bp, Artificial
  Synthetic oligonucleotide
catgacatatacagagatgaagcactaaacaatcgatttcagatcaaagggtgtggagtg

SEQ ID NO: 72562 - DNA, 60 bp, Artificial
  Synthetic oligonucleotide
aaagacaaggagacagctgagggagaatgctgaagacatgggcaatggctgcttcaagat

SEQ ID NO: 72563 - DNA, 60 bp, Artificial
  Synthetic oligonucleotide
gccttgggtcagaggccaatctaggagaataagtatctactggacaatagttaagccggg

SEQ ID NO: 72564 - DNA, 60 bp, Artificial
  Synthetic oligonucleotide
ggagcatgtcccaaatatatcaaacaaagcaccctaaagttggcaacagggatgcggaat

SEQ ID NO: 72565 - DNA, 60 bp, Artificial
  Synthetic oligonucleotide
gacacatgtatctctgagtgcatcactccaaacgggagcatccctaatgacaagcccttt

SEQ ID NO: 72566 - DNA, 60 bp, Artificial
  Synthetic oligonucleotide
ctaaaatagatctatggtcttacaatgcggacgttcttgtggccctggaaaaccagcata

SEQ ID NO: 72567 - DNA, 60 bp, Artificial
  Synthetic oligonucleotide
gtgcctggggcatcatgcagtaccaaatgggacaatagtgaaaacaataacggatgatca

SEQ ID NO: 72568 - DNA, 60 bp, Artificial
  Synthetic oligonucleotide
ccggaaacaaattgtagaccaagaactgagtgatgccccattccttgatcggcttcgccg

SEQ ID NO: 72569 - DNA, 60 bp, Artificial
  Synthetic oligonucleotide
ccggaaacaagttgtagaccaagagctgagtgatgccccattccttgatcggcttcgccg

SEQ ID NO: 72570 - DNA, 60 bp, Artificial
  Synthetic oligonucleotide
ccggaaacaagctgtagaccaagaactgagtgatgccccattccttgatcggcttcgccg

SEQ ID NO: 72571 - DNA, 60 bp, Artificial
  Synthetic oligonucleotide
ttgctcctcggggttacttcaaaatacgaagtgggaaaagctcaataatgagatcagatg

SEQ ID NO: 72572 - DNA, 60 bp, Artificial
  Synthetic oligonucleotide
tgatcttcttgaaaatttgcagacctatcagaagcgaatgggggtgcagatgcaacgatt

SEQ ID NO: 72573 - DNA, 60 bp, Artificial
  Synthetic oligonucleotide
tgatcttcttgaaaatttgcagacctatcagaaacggatgggggtgcagatgcaacgatt

SEQ ID NO: 72574 - DNA, 60 bp, Artificial
  Synthetic oligonucleotide
ccaaatgcactgttaaagcacagatttgaaataatagagggaagagaccgcacaatggcc

SEQ ID NO: 72575 - DNA, 60 bp, Artificial
  Synthetic oligonucleotide
aatgctactgaactggttcagagttcctcaacgggtaaaatatgcgacaatcctcatcga

SEQ ID NO: 72576 - DNA, 60 bp, Artificial
  Synthetic oligonucleotide
gggaatggtggacggttggtacggtttcagacatcaaaattctgagggcacaggacaagc

SEQ ID NO: 72577 - DNA, 60 bp, Artificial
  Synthetic oligonucleotide
ttcgaaatggaagattttgtgcgacaatgcttcaacccgatgattgtcgaacttgcagaa

SEQ ID NO: 72578 - DNA, 60 bp, Artificial
  Synthetic oligonucleotide
attcgaaatggaagattttgtgcgacaatgcttcaacccgatgattgtcgaacttgcaga

SEQ ID NO: 72579 - DNA, 60 bp, Artificial
  Synthetic oligonucleotide
aaaaccaatttatatggattcatcataaaaggaagatctcatttaaggaatgacacagat

SEQ ID NO: 72580 - DNA, 60 bp, Artificial
  Synthetic oligonucleotide
atccaaatgcactgttaaagcacagatttgaaataatagaggggagagacagaacaatgg

SEQ ID NO: 72581 - DNA, 60 bp, Artificial
  Synthetic oligonucleotide
attgaatacattgcaagcatgaggaggaattatttcacagcagaggtgtcccattgcaga

SEQ ID NO: 72582 - DNA, 60 bp, Artificial
  Synthetic oligonucleotide
ggcaaaagctgcatcaaccggtgcttttatgtggagttgataaggggaaggaaacaggaa

SEQ ID NO: 72583 - DNA, 50 bp, Artificial
  Synthetic oligonucleotide
tcaccgaagagggagcaattgttggcgaaatctcaccattgccttctttt

SEQ ID NO: 72584 - DNA, 60 bp, Artificial
  Synthetic oligonucleotide
tcaccgaagagggagcaattgttggcgaaatctcaccattgccttctttttcaggacata

SEQ ID NO: 72585 - DNA, 60 bp, Artificial
  Synthetic oligonucleotide
ctggcatctttattggagatgtgccacagcacacaaattggcgggacaaggatggtggac

SEQ ID NO: 72586 - DNA, 60 bp, Artificial
  Synthetic oligonucleotide
ggtggggaagagagcaacagctatactcagaaaagcaaccaggagattggttcagctcat

SEQ ID NO: 72587 - DNA, 60 bp, Artificial
  Synthetic oligonucleotide
aaagacaagaccaatcctgtcacctctgactaaggggattttgggatttgtattcacgct

SEQ ID NO: 72588 - DNA, 60 bp, Artificial
  Synthetic oligonucleotide
aaatttgaaatctcaggaactatgcgtaggtttgccgaccaaagtctcccaccgaacttc

SEQ ID NO: 72589 - DNA, 55 bp, Artificial
  Synthetic oligonucleotide
gcaaaagcaggggataattctattaatcatgaagaccatcattgctttgagctac

SEQ ID NO: 72590 - DNA, 53 bp, Artificial
  Synthetic oligonucleotide
agcaaaagcaggggataattctattaatcatgaagactctcattgctttgagc

SEQ ID NO: 72591 - DNA, 60 bp, Artificial
  Synthetic oligonucleotide
ccaaatgcactgttaaagcacagatttgaaataatagaaggaagagaccgcacaatggcc

SEQ ID NO: 72592 - DNA, 60 bp, Artificial
  Synthetic oligonucleotide
gcttgatgatccaaatgcactgttaaagcacagatttgaaataatagaggggagagacag

SEQ ID NO: 72593 - DNA, 60 bp, Artificial
  Synthetic oligonucleotide
tgatgatccaaatgcactgttaaagcacagatttgaaataatcgaggggagagacagaac

SEQ ID NO: 72594 - DNA, 59 bp, Artificial
  Synthetic oligonucleotide
caagtaacccgcttgttgttgctgcgagtatcattgggatcttgcacttgatattgtgg

SEQ ID NO: 72595 - DNA, 60 bp, Artificial
  Synthetic oligonucleotide
aagatgagccttctaaccgaggtcgaaacgtatgttctctctatcgtcccatcaggcccc

SEQ ID NO: 72596 - DNA, 60 bp, Artificial
  Synthetic oligonucleotide
aaagatgagccttctaaccgaggtcgaaacgtatgttctctctatcgtcccatcaggccc

SEQ ID NO: 72597 - DNA, 60 bp, Artificial
  Synthetic oligonucleotide
tacccacattatgatttggcactccaatctgaatgatgccacctaccagagaacaagagc

SEQ ID NO: 72598 - DNA, 60 bp, Artificial
  Synthetic oligonucleotide
ggcgagtttggcgccaagcgaacaatggtgaagatgcaacagctggccttacccacatta

SEQ ID NO: 72599 - DNA, 60 bp, Artificial
  Synthetic oligonucleotide
caagaggggttcagattgcttcaaatgagaatgtggaaaccatggactctagtaccctgg

SEQ ID NO: 72600 - DNA, 60 bp, Artificial
  Synthetic oligonucleotide
aaaccatggactctagtaccctggaactaaggagcaggtactgggccataagaaccagaa

SEQ ID NO: 72601 - DNA, 60 bp, Artificial
  Synthetic oligonucleotide
gaggatctgagagtgtcaggcttcatcagagggaaaaaagtaattccaagaggaaagctt

SEQ ID NO: 72602 - DNA, 60 bp, Artificial
  Synthetic oligonucleotide
aggaaagctttccacaagaggggttcagattgcttcaaatgagaatgtggaaaccatgga

SEQ ID NO: 72603 - DNA, 60 bp, Artificial
  Synthetic oligonucleotide
ggaatctaccttttgagagagcgactgttatggcagctttcattgggaacaatgagggac

SEQ ID NO: 72604 - DNA, 60 bp, Artificial
  Synthetic oligonucleotide
agagagcgactgttatggcagctttcattgggaacaatgagggacggacatcagatatgc

SEQ ID NO: 72605 - DNA, 60 bp, Artificial
  Synthetic oligonucleotide
atggactctagtaccctggaactaaggagcaggtactgggccataagaaccagaagcggg

SEQ ID NO: 72606 - DNA, 60 bp, Artificial
  Synthetic oligonucleotide
gaaggcatccgcgggccaaatcagtgtgcagcctacattctcagtacaaaggaatctacc

SEQ ID NO: 72607 - DNA, 60 bp, Artificial
  Synthetic oligonucleotide
tttgacgagagaaggaacaaatacttagaagagcaccccagtgtgggaaaggaccctaag

SEQ ID NO: 72608 - DNA, 60 bp, Artificial
  Synthetic oligonucleotide
aaagaatgtgcaacatcctcaaagggaaatttcagacagctgcacagaaggcaatgatgg

SEQ ID NO: 72609 - DNA, 60 bp, Artificial
  Synthetic oligonucleotide
cgaggattgcatatgaaagaatgtgcaacatcctcaaagggaaatttcagacagctgcac

SEQ ID NO: 72610 - DNA, 60 bp, Artificial
  Synthetic oligonucleotide
ataagtcttgcctgcctgcttgtgtgtatgggcttgcagtagcgagtgggcacgactttg

SEQ ID NO: 72611 - DNA, 60 bp, Artificial
  Synthetic oligonucleotide
tcttattttcctggctcggtctgcactcattttgagggggtcagttgcacataagtcttg

SEQ ID NO: 72612 - DNA, 60 bp, Artificial
  Synthetic oligonucleotide
cacgactttgaaagagaaggatattctttggtcggaatagaccccttcaaactacttcaa

SEQ ID NO: 72613 - DNA, 60 bp, Artificial
  Synthetic oligonucleotide
ggaacaaatacttagaagagcaccccagtgtgggaaaggaccctaagaaaactggaggac

SEQ ID NO: 72614 - DNA, 60 bp, Artificial
  Synthetic oligonucleotide
tcaagtattcagcctaattagaccaaatgaaaacccagctcacaagagtcaactagtgtg

SEQ ID NO: 72615 - DNA, 60 bp, Artificial
  Synthetic oligonucleotide
actacttcaaaacagtcaagtattcagcctaattagaccaaatgaaaacccagctcacaa

SEQ ID NO: 72616 - DNA, 60 bp, Artificial
  Synthetic oligonucleotide
caactagtgtggatggcatgccactctgccgcatttgaggatctgagagtgtcaggcttc

SEQ ID NO: 72617 - DNA, 60 bp, Artificial
  Synthetic oligonucleotide
cagctcacaagagtcaactagtgtggatggcatgccactctgccgcatttgaggatctga

SEQ ID NO: 72618 - DNA, 60 bp, Artificial
  Synthetic oligonucleotide
acgcgggatcaatgaccgaaacttctggaggggggaaaatggacgaaggacgaggattgc

SEQ ID NO: 72619 - DNA, 60 bp, Artificial
  Synthetic oligonucleotide
gcaaggttcaacacttcccagaaggtctggagctgcaggtgctgcagtaaaaggagttgg

SEQ ID NO: 72620 - DNA, 60 bp, Artificial
  Synthetic oligonucleotide
gaacaagagctcttgttcgcactgggatggatcccagaatgtgctccttaatgcaaggtt

SEQ ID NO: 72621 - DNA, 60 bp, Artificial
  Synthetic oligonucleotide
cccacattatgatttggcactccaatctgaatgatgccacctaccagagaacaagagctc

SEQ ID NO: 72622 - DNA, 60 bp, Artificial
  Synthetic oligonucleotide
atgcaaggttcaacacttcccagaaggtctggagctgcaggtgctgcagtaaaaggagtt

SEQ ID NO: 72623 - DNA, 60 bp, Artificial
  Synthetic oligonucleotide
aggcgagtttggcgccaagcgaacaatggtgaagatgcaacagctggccttacccacatt

SEQ ID NO: 72624 - DNA, 60 bp, Artificial
  Synthetic oligonucleotide
cctgcctgcttgtgtgtatgggcttgcagtagcgagtgggcacgactttgaaagagaagg

SEQ ID NO: 72625 - DNA, 60 bp, Artificial
  Synthetic oligonucleotide
ggtgcttttatgtggagttgataaggggaaggaaagaggaaactgaagtctggtggacct

SEQ ID NO: 72626 - DNA, 60 bp, Artificial
  Synthetic oligonucleotide
taaactttgtgagcatggagttttctctcactgacccgaaacttgagccacataaatggg

SEQ ID NO: 72627 - DNA, 60 bp, Artificial
  Synthetic oligonucleotide
aaggaagatctcacttaaggaatgacaccgatgtggtaaactttgtgagcatggagtttt

SEQ ID NO: 72628 - DNA, 60 bp, Artificial
  Synthetic oligonucleotide
gcgagggatcaatgatcggaatttctggagaggtgaaaatggacggagaacaagaattgc

SEQ ID NO: 72629 - DNA, 60 bp, Artificial
  Synthetic oligonucleotide
ggatgatcaagcgagggatcaatgatcggaatttctggagaggtgaaaatggacggagaa

SEQ ID NO: 72630 - DNA, 54 bp, Artificial
  Synthetic oligonucleotide
atcaaacgtgggatcaatgatcggaatttctggagaggtgaaaatggacgaaaa

SEQ ID NO: 72631 - DNA, 60 bp, Artificial
  Synthetic oligonucleotide
tgctttgtgtagttttgctggggttcatcatgtgggcctgccagagaggcaacattaggt

SEQ ID NO: 72632 - DNA, 60 bp, Artificial
  Synthetic oligonucleotide
atggtagcatacatgctagaaagagagttggtccgcaaaacgaggttcctcccagtggct

SEQ ID NO: 72633 - DNA, 60 bp, Artificial
  Synthetic oligonucleotide
agataagaaggagggttgacataaaccctggccatgcagacctcagtgccaaagaggcac

SEQ ID NO: 72634 - DNA, 60 bp, Artificial
  Synthetic oligonucleotide
gggagctagaatactaacgtcggagtcacaactgacaataacaaaagagaagaaggaaga

SEQ ID NO: 72635 - DNA, 60 bp, Artificial
  Synthetic oligonucleotide
taacaaaagagaagaaggaagaactccaggactgtaaaattgcccccttgatggtagcat

SEQ ID NO: 72636 - DNA, 60 bp, Artificial
  Synthetic oligonucleotide
caaaagtgcttttccaaaactggggaattgaacccattgacaatgtgatgggaatgatcg

SEQ ID NO: 72637 - DNA, 60 bp, Artificial
  Synthetic oligonucleotide
agagggtggtggtgagcattgaccgatttttaagggttcgggatcaacggggaaacgtac

SEQ ID NO: 72638 - DNA, 60 bp, Artificial
  Synthetic oligonucleotide
gagggggataagagtcagtaaaatgggagtagatgaatactccagcacagagagggtggt

SEQ ID NO: 72639 - DNA, 60 bp, Artificial
  Synthetic oligonucleotide
gatggaatttgagccatttcagtctctggtccctaaggcagccagaggtcaatacagcgg

SEQ ID NO: 72640 - DNA, 60 bp, Artificial
  Synthetic oligonucleotide
ggtcctgagtcggtgttggtcaatacttatcagtggatcatcaggaactgggagactgtg

SEQ ID NO: 72641 - DNA, 60 bp, Artificial
  Synthetic oligonucleotide
gacaataacttattcgtcatcaatgatgtgggagatcaatggtcctgagtcggtgttggt

SEQ ID NO: 72642 - DNA, 60 bp, Artificial
  Synthetic oligonucleotide
ttacgggcaaccttcaaacattgaaaatgagagtacatgaggggtatgaagagttcacaa

SEQ ID NO: 72643 - DNA, 60 bp, Artificial
  Synthetic oligonucleotide
caagcgggtcgtcagttaagagagaagaagaagtgcttacgggcaaccttcaaacattga

SEQ ID NO: 72644 - DNA, 60 bp, Artificial
  Synthetic oligonucleotide
cccagtggctggtggaacaagcagtgtctatattgaggtgttgcatttaacccaggggac

SEQ ID NO: 72645 - DNA, 60 bp, Artificial
  Synthetic oligonucleotide
ccaaagcttgattatcgctgccaggaacatagtaagaagagcaacggtatcagcagaccc

SEQ ID NO: 72646 - DNA, 60 bp, Artificial
  Synthetic oligonucleotide
aatgatgatgttgaccaaagcttgattatcgctgccaggaacatagtaagaagagcaacg

SEQ ID NO: 72647 - DNA, 60 bp, Artificial
  Synthetic oligonucleotide
cactttcaaaagaacaagcgggtcgtcagttaagagagaagaagaagtgcttacgggcaa

SEQ ID NO: 72648 - DNA, 60 bp, Artificial
  Synthetic oligonucleotide
catccttcggcaaaatccaacagaggaacaagccgtggacatatgcaaggcagcaatggg

SEQ ID NO: 72649 - DNA, 60 bp, Artificial
  Synthetic oligonucleotide
ttttgaaaaagtcgaaaggttgaaacacgggacctttggccccgtccacttcagaaatca

SEQ ID NO: 72650 - DNA, 60 bp, Artificial
  Synthetic oligonucleotide
ctaatgtcacagtcccgcacccgcgagatactcaccaaaaccactgtggaccacatggcc

SEQ ID NO: 72651 - DNA, 60 bp, Artificial
  Synthetic oligonucleotide
gttcagaccgagtgatggtatcacctctggccgtaacatggtggaataggaatggaccaa

SEQ ID NO: 72652 - DNA, 60 bp, Artificial
  Synthetic oligonucleotide
aggacaaaccctctggagcaaaacaaacgatgccggttcagaccgagtgatggtatcacc

SEQ ID NO: 72653 - DNA, 60 bp, Artificial
  Synthetic oligonucleotide
tgaaaggaatgaacaaggacaaaccctctggagcaaaacaaacgatgccggttcagaccg

SEQ ID NO: 72654 - DNA, 60 bp, Artificial
  Synthetic oligonucleotide
ggaaggcaagagaagaaccccgcactcaggatgaagtggatgatggcaatgaaataccca

SEQ ID NO: 72655 - DNA, 60 bp, Artificial
  Synthetic oligonucleotide
agagtaggatgcagttctcctccctgactgtgaatgtgagaggatcaggaatgaggatac

SEQ ID NO: 72656 - DNA, 60 bp, Artificial
  Synthetic oligonucleotide
tgatcaaggcagttcggggtgatctgaactttgtcaatagggcaaaccagcgactgaacc

SEQ ID NO: 72657 - DNA, 60 bp, Artificial
  Synthetic oligonucleotide
gcccagcattaagcatcaatgagctgagcaatcttgcaaaaggagagaaggctaatgtgc

SEQ ID NO: 72658 - DNA, 60 bp, Artificial
  Synthetic oligonucleotide
gagttcacaatggttgggagaagagcaacagctattctcagaaaggcaaccaggagattg

SEQ ID NO: 72659 - DNA, 60 bp, Artificial
  Synthetic oligonucleotide
ggaatgatcggaatattgcccgacatgaccccaagtactgagatgtcactgagggggata

SEQ ID NO: 72660 - DNA, 60 bp, Artificial
  Synthetic oligonucleotide
ggggataattctattaatcatgaagaccattattgctttgagccacattttctgtctggt

SEQ ID NO: 72661 - DNA, 60 bp, Artificial
  Synthetic oligonucleotide
cgaccaaatcaatgggaaactgaatagggtaatcgagaaaacgaacgagaaattccatca

SEQ ID NO: 72662 - DNA, 60 bp, Artificial
  Synthetic oligonucleotide
gatgggaatggttggagtattaccagacatgactccaagcacagagatgtcaatgagagg

SEQ ID NO: 72663 - DNA, 60 bp, Artificial
  Synthetic oligonucleotide
gattctacatccaaatgtgcactgaactcaaactcagtgactatgagggaagactgattc

SEQ ID NO: 72664 - DNA, 60 bp, Artificial
  Synthetic oligonucleotide
aagattctacatccaaatgtgcactgaactcaaactcagtgactatgagggaagactgat

SEQ ID NO: 72665 - DNA, 60 bp, Artificial
  Synthetic oligonucleotide
gaacctgaattaaggtcactttcaagctggatacagaatgagttcaacaaggcctgcgag

SEQ ID NO: 72666 - DNA, 60 bp, Artificial
  Synthetic oligonucleotide
cagcagatccactagcatctttattggagatgtgctacagcacacaaattggcgggacaa

SEQ ID NO: 72667 - DNA, 50 bp, Artificial
  Synthetic oligonucleotide
cagaacagcttaacaatagagagaatggtgctctctgcttttgacgagag

SEQ ID NO: 72668 - DNA, 60 bp, Artificial
  Synthetic oligonucleotide
atgataagcaagtgcagaactaaagagggaaggagaaaaaccaatttatatggattcatc

SEQ ID NO: 72669 - DNA, 60 bp, Artificial
  Synthetic oligonucleotide
ggccaggcagatggtgcaggcaatgagagccattgggactcatcctagttccagtactgg

SEQ ID NO: 72670 - DNA, 60 bp, Artificial
  Synthetic oligonucleotide
ggccaggcagatggtgcaggcaatgagagccattgggactcatcctagttccagcactgg

SEQ ID NO: 72671 - DNA, 60 bp, Artificial
  Synthetic oligonucleotide
tagtcaggccaggcagatggtgcaggcaatgagagccattgggactcatcctagttccag

SEQ ID NO: 72672 - DNA, 60 bp, Artificial
  Synthetic oligonucleotide
caaatttgcagcaatatgcactcacttggaagtatgtttcatgtattcagattttcattt

SEQ ID NO: 72673 - DNA, 60 bp, Artificial
  Synthetic oligonucleotide
taatgcccaagcagaaagtggaaggacctctttgcatcagaatggaccaggcaaccatgg

SEQ ID NO: 72674 - DNA, 60 bp, Artificial
  Synthetic oligonucleotide
gaaaatttgcagacctatcagaaacgaatgggggtgcagatgcaacgattcaagtaaccc

SEQ ID NO: 72675 - DNA, 60 bp, Artificial
  Synthetic oligonucleotide
ggaaaaaacacagatcttgaggctctcatggaatggctaaagacaagaccaattctgtca

SEQ ID NO: 72676 - DNA, 60 bp, Artificial
  Synthetic oligonucleotide
cacagatcttgaggctctcatggaatggctaaagacaagaccaattctgtcacctctgac

SEQ ID NO: 72677 - DNA, 60 bp, Artificial
  Synthetic oligonucleotide
cagagacttgaagatgtctttgctgggaagaacacagatcttgaggctctcatggaatgg

SEQ ID NO: 72678 - DNA, 61 bp, Artificial
  Synthetic oligonucleotide
gcagcaatatgcactcacttggaagtatgtttcatgtattcagattttcatttcatcaatg

SEQ ID NO: 72679 - DNA, 60 bp, Artificial
  Synthetic oligonucleotide
tctctgttgagagcaaaagctgcatcaataggtgcttttatgtggagttgataaggggaa

SEQ ID NO: 72680 - DNA, 60 bp, Artificial
  Synthetic oligonucleotide
tctctgttgaaggcaaaagctgcatcaaccggtgcttttatgtggagttgataaggggaa

SEQ ID NO: 72681 - DNA, 60 bp, Artificial
  Synthetic oligonucleotide
tctctgttgaaagcaaaagctgcatcaataggtgcttttatgtggagttgataaggggaa

SEQ ID NO: 72682 - DNA, 57 bp, Artificial
  Synthetic oligonucleotide
gaaattggcaacagggatgcggaatgtaccagagaaacaaactagaggcatattcgg

SEQ ID NO: 72683 - DNA, 59 bp, Artificial
  Synthetic oligonucleotide
gggttcatcatgtgggcctgccaaaaaggcaacattaggtgcaacatttgcatttgagt

SEQ ID NO: 72684 - DNA, 58 bp, Artificial
  Synthetic oligonucleotide
gggttcatcatgtgggcctgccaaaaaggcaacattaggtgcaacatttgcatttgag

SEQ ID NO: 72685 - DNA, 60 bp, Artificial
  Synthetic oligonucleotide
ggggataattctattaatcatgaagaccatcattgctttgagctacattttctgtctggc

SEQ ID NO: 72686 - DNA, 60 bp, Artificial
  Synthetic oligonucleotide
catacaggagaccggttggaatttctagcatggtggaggccatggtgtctagggcccgga

SEQ ID NO: 72687 - DNA, 60 bp, Artificial
  Synthetic oligonucleotide
cttgaaagttccagcgcaaaatgccataagcaccacattcccttatactggagatcctcc

SEQ ID NO: 72688 - DNA, 60 bp, Artificial
  Synthetic oligonucleotide
ctgattcaaaatagcataacaatagagagaatggtgctctctgcttttgacgagagaagg

SEQ ID NO: 72689 - DNA, 60 bp, Artificial
  Synthetic oligonucleotide
gggatctttgagaactcatgccttgaaacaatggaagttgttcaacaaacaagggtggac

SEQ ID NO: 72690 - DNA, 60 bp, Artificial
  Synthetic oligonucleotide
cgcttgcatagagtcaatcagaaatggtacttatgaccatgatgtatacagagacgaagc

SEQ ID NO: 72691 - DNA, 60 bp, Artificial
  Synthetic oligonucleotide
gagcaaaagctgcatcaataggtgcttttatgtggagttgataaggggaaggaaacagga

SEQ ID NO: 72692 - DNA, 60 bp, Artificial
  Synthetic oligonucleotide
cctcgaggttactttaagatgcgcactgggaaaagctcaataatgagatcagatgcacct

SEQ ID NO: 72693 - DNA, 60 bp, Artificial
  Synthetic oligonucleotide
ctcctcgaggttactttaagatgcgcactgggaaaagctcaataatgagatcagatgcac

SEQ ID NO: 72694 - DNA, 60 bp, Artificial
  Synthetic oligonucleotide
agcaaaagcagggtagataatcactcactgagtgacatcaaaatcatggcctcccaaggc

SEQ ID NO: 72695 - DNA, 60 bp, Artificial
  Synthetic oligonucleotide
agcaaaagcagggtagataatcactcactgagtgacatcaaaatcatggcgtcacaaggc

SEQ ID NO: 72696 - DNA, 60 bp, Artificial
  Synthetic oligonucleotide
aatgattctgaaggaagaatttgatgaggcacttaaaatgaccatggcctccacacctgc

SEQ ID NO: 72697 - DNA, 60 bp, Artificial
  Synthetic oligonucleotide
attctgaaggaagaatctgatgaggcacttaaaatgaccatggcctccacacctgcttcg

SEQ ID NO: 72698 - DNA, 60 bp, Artificial
  Synthetic oligonucleotide
aaagattctgaaggaagaatctgatgaggcacttaaaatgaccatggcctccacacctgc

SEQ ID NO: 72699 - DNA, 60 bp, Artificial
  Synthetic oligonucleotide
gaagattctgaaggaagaatctgatgaggcacttaaaatgaccatggcctccacacctgc

SEQ ID NO: 72700 - DNA, 60 bp, Artificial
  Synthetic oligonucleotide
gactggaggtccaatatacagaaggagagatggaaaatggatgagagaactgatcctgta

SEQ ID NO: 72701 - DNA, 60 bp, Artificial
  Synthetic oligonucleotide
gaaggatttggcgtcaagcgaataatggagaagacgcaaccgctggtctcacccatttga

SEQ ID NO: 72702 - DNA, 60 bp, Artificial
  Synthetic oligonucleotide
gggaggctgatccaaaacagcataacaatagagagaatggttctctcggcatttgatgag

SEQ ID NO: 72703 - DNA, 60 bp, Artificial
  Synthetic oligonucleotide
aaagaccctaagaagactggaggtccaatatacagaaggagagatggaaaatggatgaga

SEQ ID NO: 72704 - DNA, 60 bp, Artificial
  Synthetic oligonucleotide
agaatgccactgaaatccgagcatctgttgggagaatggttggtggaatcgggagattct

SEQ ID NO: 72705 - DNA, 60 bp, Artificial
  Synthetic oligonucleotide
tccgagcatctgttgggagaatggttggtggaatcgggagattctacatacagatgtgca

SEQ ID NO: 72706 - DNA, 60 bp, Artificial
  Synthetic oligonucleotide
agggaggctgatccaaaacagcataacaatagagagaatggttctctcggcatttgatga

SEQ ID NO: 72707 - DNA, 60 bp, Artificial
  Synthetic oligonucleotide
gtatggacttgctgtggccagtggatacgactttgagagggagggatactccctagtcgg

SEQ ID NO: 72708 - DNA, 60 bp, Artificial
  Synthetic oligonucleotide
cctgcttgtgtgtatggacttgctgtggccagtggatacgactttgagagggagggatac

SEQ ID NO: 72709 - DNA, 60 bp, Artificial
  Synthetic oligonucleotide
attgcatacgaaagaatgtgcaacattctcaaggggaaattccaaacagcagcacaacga

SEQ ID NO: 72710 - DNA, 60 bp, Artificial
  Synthetic oligonucleotide
ggacggagaacaagaattgcatacgaaagaatgtgcaacattctcaaggggaaattccaa

SEQ ID NO: 72711 - DNA, 60 bp, Artificial
  Synthetic oligonucleotide
gcagcggtgaaaggagttggaacaatggtgatggaattgattcggatgatcaagcgaggg

SEQ ID NO: 72712 - DNA, 60 bp, Artificial
  Synthetic oligonucleotide
tgctggagcagcggtgaaaggagttggaacaatggtgatggaattgattcggatgatcaa

SEQ ID NO: 72713 - DNA, 60 bp, Artificial
  Synthetic oligonucleotide
gggcacttgtgcgtactgggatggatcccaggatgtgctctctgatgcagggatcaactc

SEQ ID NO: 72714 - DNA, 60 bp, Artificial
  Synthetic oligonucleotide
aacaagggcacttgtgcgtactgggatggatcccaggatgtgctctctgatgcagggatc

SEQ ID NO: 72715 - DNA, 60 bp, Artificial
  Synthetic oligonucleotide
ggcgtcaagcgaataatggagaagacgcaaccgctggtctcacccatttgatgatctggc

SEQ ID NO: 72716 - DNA, 60 bp, Artificial
  Synthetic oligonucleotide
cccacattttctgtgcagagaaacctcccattcgagagagcaaccattatggcggcattt

SEQ ID NO: 72717 - DNA, 55 bp, Artificial
  Synthetic oligonucleotide
tgaggagcagatactgggctataaggactagaagcggagggaacactaaccagca

SEQ ID NO: 72718 - DNA, 60 bp, Artificial
  Synthetic oligonucleotide
gcagagaaacctcccattcgagagagcaaccattatggcggcatttacgggaaacactga

SEQ ID NO: 72719 - DNA, 60 bp, Artificial
  Synthetic oligonucleotide
aaatgtgcactgaacttaaactcagtgattatgaagggcggttgatccagaacagcttga

SEQ ID NO: 72720 - DNA, 60 bp, Artificial
  Synthetic oligonucleotide
gtctacaagacttattttgacaaagtcgaaaggttaaaacatggaacctttggccctgtc

SEQ ID NO: 72721 - DNA, 60 bp, Artificial
  Synthetic oligonucleotide
aacaagagataagaactttctcatttcagcttatttaatgataaaaaacacccttgtttc

SEQ ID NO: 72722 - DNA, 60 bp, Artificial
  Synthetic oligonucleotide
gcagatccactagcatctttattggagatgtgccacagcacacaaattggtgggacaagg

SEQ ID NO: 72723 - DNA, 60 bp, Artificial
  Synthetic oligonucleotide
cgcatgtatagagtcaatcaggaacgggacttatgatcatgacatatacagagatgaagc

SEQ ID NO: 72724 - DNA, 60 bp, Artificial
  Synthetic oligonucleotide
aatgggacttatgatcatgacatatacagagatgaagcactaaacaatcgatttcagatc

SEQ ID NO: 72725 - DNA, 60 bp, Artificial
  Synthetic oligonucleotide
ggtcttacaatgcggacgttcttgtggccctggaaaaccagcatacaattgatctgactg

SEQ ID NO: 72726 - DNA, 60 bp, Artificial
  Synthetic oligonucleotide
tgacaacgcatgtatagagtcaatcaggaacgggacttatgatcatgacatatacagaga

SEQ ID NO: 72727 - DNA, 60 bp, Artificial
  Synthetic oligonucleotide
agcaaaagcaggggataattctattaatcatgaagaccattattgttctaagctgttttt

SEQ ID NO: 72728 - DNA, 60 bp, Artificial
  Synthetic oligonucleotide
tggtctgacaatgcagagcttcttgtcgccttggaaaaccagcatacaattgatctgact

SEQ ID NO: 72729 - DNA, 60 bp, Artificial
  Synthetic oligonucleotide
acgcttgcatagagtcaatcagaaatgggacttatgaccatgatgtatacagagacgaag

SEQ ID NO: 72730 - DNA, 54 bp, Artificial
  Synthetic oligonucleotide
aaaacaaggaggcaactgagggaaaatgctgaagagatgggcaatggttgcttc

SEQ ID NO: 72731 - DNA, 54 bp, Artificial
  Synthetic oligonucleotide
aaaacaaggaggcaactgagggaaaatgctgaagtgatgggcaacggttgcttc

SEQ ID NO: 72732 - DNA, 60 bp, Artificial
  Synthetic oligonucleotide
ctgtttgaaaaaacaaggaggcaactgagggaaaatgctgaagagatgggcaatggttgc

SEQ ID NO: 72733 - DNA, 55 bp, Artificial
  Synthetic oligonucleotide
aaaacaaggaggcaactgagggaaaatgctgaagacatgggcaatggttgcttca

SEQ ID NO: 72734 - DNA, 60 bp, Artificial
  Synthetic oligonucleotide
tattcgaaaaaacaaggaggcaactgagggaaaatgctgaagtgatgggcaacggttgct

SEQ ID NO: 72735 - DNA, 60 bp, Artificial
  Synthetic oligonucleotide
gccacagcacacaaattggcgggacaaggatggtggacattcttaggcaaaaccctactg

SEQ ID NO: 72736 - DNA, 60 bp, Artificial
  Synthetic oligonucleotide
ctttattggagatgtgccacagcacacaagttggcgggacaaggatggtggacattctta

SEQ ID NO: 72737 - DNA, 60 bp, Artificial
  Synthetic oligonucleotide
aatgacgtgtggatgggaagaacgatcagcgagaagttacgctcaggttatgaaaccttc

SEQ ID NO: 72738 - DNA, 60 bp, Artificial
  Synthetic oligonucleotide
atgacgtgtggatgggaagaacgatcagcgaggagtcacgatcaggttatgaaaccttca

SEQ ID NO: 72739 - DNA, 60 bp, Artificial
  Synthetic oligonucleotide
attgcatgataaaagcagttagaggtgacctgaatttcgtcaacagggcaaaccaacgat

SEQ ID NO: 72740 - DNA, 60 bp, Artificial
  Synthetic oligonucleotide
cgatttttgagagttcgagaccaacgtgggaatgtattattatctcctgaggaggtcagt

SEQ ID NO: 72741 - DNA, 60 bp, Artificial
  Synthetic oligonucleotide
ccattgcagagccactgaatacataatgaagggggtatacattaatactgccttgctcaa

SEQ ID NO: 72742 - DNA, 54 bp, Artificial
  Synthetic oligonucleotide
aaaacaaggaggcaactgagggaaaatgctgaggacatgggcaatggttgcttc

SEQ ID NO: 72743 - DNA, 60 bp, Artificial
  Synthetic oligonucleotide
gtgtggatgggaagaacgatcagcgagaagttacgctcaggttatgaaaccttcaaagtc

SEQ ID NO: 72744 - DNA, 54 bp, Artificial
  Synthetic oligonucleotide
gggttacttcaaaatacgaagtgggaaaagctcaataatgaggtcagatgcacc

SEQ ID NO: 72745 - DNA, 60 bp, Artificial
  Synthetic oligonucleotide
gctccacggggttacttcaaaatacgaagtgggaaaagctcaataatgaggtcagatgca

SEQ ID NO: 72746 - DNA, 60 bp, Artificial
  Synthetic oligonucleotide
gttttcgctcaaaaacttcccggaaatgacaacagcacagcaacgctgtgcctgggacat

SEQ ID NO: 72747 - DNA, 60 bp, Artificial
  Synthetic oligonucleotide
tggagttttctctcactgacccgaaacttgagccacataaatgggagaaatactgtgtcc

SEQ ID NO: 72748 - DNA, 60 bp, Artificial
  Synthetic oligonucleotide
tggagttttctctcactgacccgaggcttgagccacataaatgggagaaatactgtgtcc

SEQ ID NO: 72749 - DNA, 56 bp, Artificial
  Synthetic oligonucleotide
gctcaccgtgcccagtgagcgaggactgcagcgtagacgctttgttcaaaatgccc

SEQ ID NO: 72750 - DNA, 60 bp, Artificial
  Synthetic oligonucleotide
gggtcctcatcggaggacttgaatggaatgacaacacagttcgagtctctaaaactctac

SEQ ID NO: 72751 - DNA, 60 bp, Artificial
  Synthetic oligonucleotide
ggattaatgagtccgctgatatgagcattggagtaacagtgataaagaacaacatgataa

SEQ ID NO: 72752 - DNA, 60 bp, Artificial
  Synthetic oligonucleotide
ggattaatgaatcagctgatatgagcatcggagtaacagtgataaagaacaacatgataa

SEQ ID NO: 72753 - DNA, 60 bp, Artificial
  Synthetic oligonucleotide
aatgtgaggggaacagggatgagaatacttgtaaggggcaattctcctgtattcaactac

SEQ ID NO: 72754 - DNA, 60 bp, Artificial
  Synthetic oligonucleotide
gtgaggggaacagggatgagaatacttgtaaggggcaattctcctgtattcaactacaac

SEQ ID NO: 72755 - DNA, 60 bp, Artificial
  Synthetic oligonucleotide
cactactggtgctgagaaaccgaagtttctgccagatttgtatgattacaaggagaacag

SEQ ID NO: 72756 - DNA, 60 bp, Artificial
  Synthetic oligonucleotide
cactactggagctgagaaaccgaagtttctgccagatttgtatgattacaaggagaacag

SEQ ID NO: 72757 - DNA, 60 bp, Artificial
  Synthetic oligonucleotide
aatcgaaaaggaattctcaggagtagaagggagaattcaggacctcgagaaatacgttga

SEQ ID NO: 72758 - DNA, 60 bp, Artificial
  Synthetic oligonucleotide
gcaatgagaaccgttgggactcatcctagctccagtactggcctaagagatgatcttctt

SEQ ID NO: 72759 - DNA, 52 bp, Artificial
  Synthetic oligonucleotide
gcaatgagaaccgttgggactcatcctagctccagtactggtctaagagatg

SEQ ID NO: 72760 - DNA, 60 bp, Artificial
  Synthetic oligonucleotide
gcaatgagaaccgttgggactcatcctagctccagtaccggtctaagagatgatcttctt

SEQ ID NO: 72761 - DNA, 60 bp, Artificial
  Synthetic oligonucleotide
caatgagaaccgttgggactcatcctagctccagtaccggtctaagagatgatcttcttg

SEQ ID NO: 72762 - DNA, 52 bp, Artificial
  Synthetic oligonucleotide
gcaatgagaaccgttgggactcatcctagctccagtactggcctaagagatg

SEQ ID NO: 72763 - DNA, 60 bp, Artificial
  Synthetic oligonucleotide
cccaaatatatcaaacaaagcaccctaaagttggcaacagggatgcggaatgtacctgag

SEQ ID NO: 72764 - DNA, 54 bp, Artificial
  Synthetic oligonucleotide
acatttgggtaacaagagaaccttatgtgtcatgcgatcctggcaagtgttatc

SEQ ID NO: 72765 - DNA, 60 bp, Artificial
  Synthetic oligonucleotide
ctggaaccttcgatcttggagggctatatgaagcaatcgaggagtgcctgattaacgatc

SEQ ID NO: 72766 - DNA, 60 bp, Artificial
  Synthetic oligonucleotide
tctcattgttcaggcacttagggacaatctggaacctggaaccttcgatcttggagggct

SEQ ID NO: 72767 - DNA, 60 bp, Artificial
  Synthetic oligonucleotide
tatggggaagatccgaaaatcgaaactaacaaattcgctgcaatatgcacacacttggaa

SEQ ID NO: 72768 - DNA, 60 bp, Artificial
  Synthetic oligonucleotide
ctacggactgcaataggccaagtgtcaaggcccatgttcctgtatgtgagaaccaatgga

SEQ ID NO: 72769 - DNA, 60 bp, Artificial
  Synthetic oligonucleotide
tgaaaacaagtcggaaacatggccaattggagagtcacccaagggagtggaggaaggctc

SEQ ID NO: 72770 - DNA, 55 bp, Artificial
  Synthetic oligonucleotide
aaccaatggaacctccaagatcaagatgaaatggggtatggaaatgaggcgctgc

SEQ ID NO: 72771 - DNA, 60 bp, Artificial
  Synthetic oligonucleotide
ccgaacaatggcctggacagtggtgaatagtatctgcaacaccacaggagtcgagaagcc

SEQ ID NO: 72772 - DNA, 60 bp, Artificial
  Synthetic oligonucleotide
cggaaacatggccaattggagagtcacccaagggagtggaggaaggctccatcgggaaag

SEQ ID NO: 72773 - DNA, 60 bp, Artificial
  Synthetic oligonucleotide
atcgagaaaattgcttctcattgttcaggcacttagggacaatctggaacctggaacctt

SEQ ID NO: 72774 - DNA, 60 bp, Artificial
  Synthetic oligonucleotide
caagccaattgaagtgggcactcggtgagaacatggcaccagagaaagtagactttgagg

SEQ ID NO: 72775 - DNA, 60 bp, Artificial
  Synthetic oligonucleotide
tgaggagaaaattccaaggacaaagaacatgaagaaaacaagccaattgaagtgggcact

SEQ ID NO: 72776 - DNA, 60 bp, Artificial
  Synthetic oligonucleotide
ccaggacattgaaaatgaggagaaaattccaaggacaaagaacatgaagaaaacaagcca

SEQ ID NO: 72777 - DNA, 60 bp, Artificial
  Synthetic oligonucleotide
tgatgagccagagtctagatcgctagcaagctggatccagagtgaattcaacaaggcatg

SEQ ID NO: 72778 - DNA, 60 bp, Artificial
  Synthetic oligonucleotide
tgcaaagatgttagtgatctaaaacagtatgacagtgatgagccagagtctagatcgcta

SEQ ID NO: 72779 - DNA, 60 bp, Artificial
  Synthetic oligonucleotide
gtagactttgaggattgcaaagatgttagtgatctaaaacagtatgacagtgatgagcca

SEQ ID NO: 72780 - DNA, 60 bp, Artificial
  Synthetic oligonucleotide
tgaccgattcaagctggatagaacttgatgagataggggaagatattgccccaattgaac

SEQ ID NO: 72781 - DNA, 60 bp, Artificial
  Synthetic oligonucleotide
acaaggcatgtgaattgaccgattcaagctggatagaacttgatgagataggggaagata

SEQ ID NO: 72782 - DNA, 60 bp, Artificial
  Synthetic oligonucleotide
aaggagaaccgattcattgaaattggagtgacacggagggaagtccacatatactaccta

SEQ ID NO: 72783 - DNA, 60 bp, Artificial
  Synthetic oligonucleotide
caccacaggagtcgagaagcctaaattacttccggatctgtatgattacaaggagaaccg

SEQ ID NO: 72784 - DNA, 60 bp, Artificial
  Synthetic oligonucleotide
ttgaagacaacaccacgccctctcagattacctgatgggcctctctgctctcagcggtca

SEQ ID NO: 72785 - DNA, 60 bp, Artificial
  Synthetic oligonucleotide
tgccctgaaactaagcattgaggacccgagtcatgagggggaggggataccgctatatga

SEQ ID NO: 72786 - DNA, 60 bp, Artificial
  Synthetic oligonucleotide
ccaggctgttcaccataagacaagaaatggccagtaggggtctatgggattcctttcgtc

SEQ ID NO: 72787 - DNA, 60 bp, Artificial
  Synthetic oligonucleotide
gtattcaacagtctatatgcatctccacaactcgaggggttttcagctgaatcgagaaaa

SEQ ID NO: 72788 - DNA, 60 bp, Artificial
  Synthetic oligonucleotide
tttcggctggaaagagcccaacattgtcaaaccacatgagaaaggcataaaccccaatta

SEQ ID NO: 72789 - DNA, 60 bp, Artificial
  Synthetic oligonucleotide
gagcccaacattgtcaaaccacatgagaaaggcataaaccccaattacctcctggcttgg

SEQ ID NO: 72790 - DNA, 60 bp, Artificial
  Synthetic oligonucleotide
tgaaggaagagaccgaacaatggcctggacagtggtgaatagtatctgcaacaccacagg

SEQ ID NO: 72791 - DNA, 60 bp, Artificial
  Synthetic oligonucleotide
ggggaagatattgccccaattgaacacattgcaagtattaggaggaactatttcacagcg

SEQ ID NO: 72792 - DNA, 60 bp, Artificial
  Synthetic oligonucleotide
gccccaattgaacacattgcaagtattaggaggaactatttcacagcggaagtgtcccat

SEQ ID NO: 72793 - DNA, 60 bp, Artificial
  Synthetic oligonucleotide
tttcacagcggaagtgtcccattgcagggctactgagtacataatgaagggagtgtacat

SEQ ID NO: 72794 - DNA, 60 bp, Artificial
  Synthetic oligonucleotide
caaatgcagaaccaaagaagggagacggaaaacaaatctgtatggattcattataaaagg

SEQ ID NO: 72795 - DNA, 60 bp, Artificial
  Synthetic oligonucleotide
cgtggtaaactttgtgagtatggagttttctctcactgacccgaggctggagccacacaa

SEQ ID NO: 72796 - DNA, 60 bp, Artificial
  Synthetic oligonucleotide
gccacacaagtgggaaaagtactgtgttcttgaaataggagatatgctcctacggactgc

SEQ ID NO: 72797 - DNA, 57 bp, Artificial
  Synthetic oligonucleotide
gagtgtacataaatacagctttgctcaatgcatcttgtgcagcaatggatgacttcc

SEQ ID NO: 72798 - DNA, 60 bp, Artificial
  Synthetic oligonucleotide
atgcccaaacaaaaaagagcaggctccctctgtatcagaatggaccaggcgatcatggat

SEQ ID NO: 72799 - DNA, 60 bp, Artificial
  Synthetic oligonucleotide
cctaactgacatgactcttgaggagatgtcaagggattggttcatgctcatgcccaaaca

SEQ ID NO: 72800 - DNA, 60 bp, Artificial
  Synthetic oligonucleotide
gtccgggaccggcttcgccgagatcagaaatctctaagaggaagaggcagcactcttggt

SEQ ID NO: 72801 - DNA, 55 bp, Artificial
  Synthetic oligonucleotide
cactcttggtctggacatcgaaacagccactcgtgctggaaagcagatagtggag

SEQ ID NO: 72802 - DNA, 60 bp, Artificial
  Synthetic oligonucleotide
ccgacgaggcactcaaaatgactattgcctctgtacctgcttcacgctacctaactgaca

SEQ ID NO: 72803 - DNA, 60 bp, Artificial
  Synthetic oligonucleotide
tttggcatgtccgcaaacaatttgcagaccaagaactgggtgatgccccggtccgggacc

SEQ ID NO: 72804 - DNA, 60 bp, Artificial
  Synthetic oligonucleotide
gatcatggataagaacatcatactgaaagcgaacttcagtgtgatcttcgaccggctgga

SEQ ID NO: 72805 - DNA, 60 bp, Artificial
  Synthetic oligonucleotide
ccggctggagacactgatactactcagggctttcactgaagaaggggcaattgtcggcga

SEQ ID NO: 72806 - DNA, 60 bp, Artificial
  Synthetic oligonucleotide
ggtggctgatcgaagaagtgcggcatagactaaagattacagagaatagttttgagcaaa

SEQ ID NO: 72807 - DNA, 60 bp, Artificial
  Synthetic oligonucleotide
gatcatagcattgtttccagttatgtgtgctcaggacttgttggagacacacccagaaaa

SEQ ID NO: 72808 - DNA, 60 bp, Artificial
  Synthetic oligonucleotide
aaaattatagcattgtttccagttatgtgtgctcaggacttgttggagacacacccagaa

SEQ ID NO: 72809 - DNA, 60 bp, Artificial
  Synthetic oligonucleotide
aagatcatagcattgtttccagttatgtgtgctcaggacttgttggagacacacccagaa

SEQ ID NO: 72810 - DNA, 60 bp, Artificial
  Synthetic oligonucleotide
ccaaaaaaatactcagaacccaggagtcggaatgcgtttgtatcaatggaacttgtgcag

SEQ ID NO: 72811 - DNA, 57 bp, Artificial
  Synthetic oligonucleotide
aacaagttgtagaccaagaactgagtgatgccccattccttgatcggcttcgccgag

SEQ ID NO: 72812 - DNA, 60 bp, Artificial
  Synthetic oligonucleotide
aatgaactgagtaaccttacaaaaggagaaaaggctaatgtgctaattgggcaaggagac

SEQ ID NO: 72813 - DNA, 60 bp, Artificial
  Synthetic oligonucleotide
gactactaaaagactaacaattctcggaaaagatgccggcactttaattgaagacccaga

SEQ ID NO: 72814 - DNA, 60 bp, Artificial
  Synthetic oligonucleotide
tctgaaggaagaatctgatgaggcacttaaaatgaccatggcctccacacctgcttcgcg

SEQ ID NO: 72815 - DNA, 60 bp, Artificial
  Synthetic oligonucleotide
ctgaaggaagaatctgatgaggcgcttacaatgaccatggcctccacacctgcttcgcga

SEQ ID NO: 72816 - DNA, 60 bp, Artificial
  Synthetic oligonucleotide
caccgagtgacatcaaaatcatggcgtcccaaggcaccaaacggtcttatgaacagatgg

SEQ ID NO: 72817 - DNA, 60 bp, Artificial
  Synthetic oligonucleotide
cgagtatcattgggatcttgcacttgatattgtggattcttgatcggctttttttcaaat

SEQ ID NO: 72818 - DNA, 52 bp, Artificial
  Synthetic oligonucleotide
cgagtatcattgggatcttgcacttgatattgtggattcttgatcggctttt

SEQ ID NO: 72819 - DNA, 60 bp, Artificial
  Synthetic oligonucleotide
tgggcgtagatgaatactccagcacagagagggtggtggttagcattgatcggtttttga

SEQ ID NO: 72820 - DNA, 57 bp, Artificial
  Synthetic oligonucleotide
tgggcgtagatgaatactccagcacagagagggtggtggttagcattgatcggtttt

SEQ ID NO: 72821 - DNA, 60 bp, Artificial
  Synthetic oligonucleotide
tgcaacgattcaagtgacccgcttgttgttgccgcgaatatcattgggatcttgcacttg

SEQ ID NO: 72822 - DNA, 60 bp, Artificial
  Synthetic oligonucleotide
gggtgcagatgcaacgattcaagtgacccgcttgttgttgccgcgagtatcattgggatc

SEQ ID NO: 72823 - DNA, 60 bp, Artificial
  Synthetic oligonucleotide
gcaacgattcaagtgacccgcttgttgttgccgcgagtatcattgggatcttgcacttga

SEQ ID NO: 72824 - DNA, 60 bp, Artificial
  Synthetic oligonucleotide
tgcaacgattcaagtgacccgcttgttgttgccgcgagtatcattgggatcttgcacttg

SEQ ID NO: 72825 - DNA, 52 bp, Artificial
  Synthetic oligonucleotide
ggggtgcagatgcaacgattcaagtgacccgcttgttgttgctgcgagtatc

SEQ ID NO: 72826 - DNA, 60 bp, Artificial
  Synthetic oligonucleotide
ggggtgcagatgcaacgattcaagtgacccgcttgttgttgcagcgaatatcattgggat

SEQ ID NO: 72827 - DNA, 60 bp, Artificial
  Synthetic oligonucleotide
ggggtgcagatgcaacgattcaagtgacccgcttgttgttgccgcggatatcattgggat

SEQ ID NO: 72828 - DNA, 60 bp, Artificial
  Synthetic oligonucleotide
ggggtgcagatgcaacgattcaagtgacccgcttgttgttgccgcgaatatcattgggat

SEQ ID NO: 72829 - DNA, 60 bp, Artificial
  Synthetic oligonucleotide
gggtgcagatgcaacgattcaagtgacccgcttgttgttgccgcgaatatcattgggatc

SEQ ID NO: 72830 - DNA, 60 bp, Artificial
  Synthetic oligonucleotide
gcaacgattcaagtgacccgcttgttgttgccgcgaatatcattgggatcttgcacttga

SEQ ID NO: 72831 - DNA, 53 bp, Artificial
  Synthetic oligonucleotide
gaacaacatgataaacaatgaccttggaccagcaacagcccagatggcccttc

SEQ ID NO: 72832 - DNA, 60 bp, Artificial
  Synthetic oligonucleotide
gtactggtctaagagatgatcttcttgaaaatttgcagacctatcagaaacgaatggggg

SEQ ID NO: 72833 - DNA, 60 bp, Artificial
  Synthetic oligonucleotide
agtactggactaagagatgatcttcttgaaaatttgcagacctatcagaaacgaatgggg

SEQ ID NO: 72834 - DNA, 59 bp, Artificial
  Synthetic oligonucleotide
gtactggtctaagagatgatcttcttgaaaatttgcagacctatcagaaacgaatgggg

SEQ ID NO: 72835 - DNA, 60 bp, Artificial
  Synthetic oligonucleotide
agcactggtctaagagatgatcttcttgaaaatttgcagacctatcagaaacgaatgggg

SEQ ID NO: 72836 - DNA, 60 bp, Artificial
  Synthetic oligonucleotide
ttccagtactggtctaagagatgatcttcttgaaaatttgcagacctatcagaaacgaat

SEQ ID NO: 72837 - DNA, 60 bp, Artificial
  Synthetic oligonucleotide
ctagttccagtactggtctaagagatgatcttcttgaaaatttgcagacctatcagaaac

SEQ ID NO: 72838 - DNA, 60 bp, Artificial
  Synthetic oligonucleotide
ccgcctgccagaaaggcaacattaggtgcaacatttgcatttgagtgtattagtaattaa

SEQ ID NO: 72839 - DNA, 60 bp, Artificial
  Synthetic oligonucleotide
gctttctttggcatatccgaaaacaagttgtagaccaagaactgggtgatgccccattcc

SEQ ID NO: 72840 - DNA, 60 bp, Artificial
  Synthetic oligonucleotide
gcctgcatagagtcaatcagaaatggaacttatgaccatgatgtatacagagacgaagca

SEQ ID NO: 72841 - DNA, 60 bp, Artificial
  Synthetic oligonucleotide
gtgacaatgcctgcatagagtcaatcagaaatggaacttatgaccatgatgtatacagag

SEQ ID NO: 72842 - DNA, 60 bp, Artificial
  Synthetic oligonucleotide
gatcgaatggtctaacagctaatgaatcgggaaggctaatagatttcctcaaggatgtaa

SEQ ID NO: 72843 - DNA, 60 bp, Artificial
  Synthetic oligonucleotide
gatcgaatggactaacagctaatgaatcgggaaggctaatagatttcctcaaggatgtga

SEQ ID NO: 72844 - DNA, 60 bp, Artificial
  Synthetic oligonucleotide
atcgaatggtctaacagctaatgagtcaggaaggctaatagatttcctcaaggatgtgat

SEQ ID NO: 72845 - DNA, 60 bp, Artificial
  Synthetic oligonucleotide
gcctgcatagggtcaatcagaaatggaacttatgaccatgatgtatacagagacgaagcg

SEQ ID NO: 72846 - DNA, 60 bp, Artificial
  Synthetic oligonucleotide
cctgcatagggtcaatcagaaatggaacttatgaccatgatgtatacagagacgaagcac

SEQ ID NO: 72847 - DNA, 52 bp, Artificial
  Synthetic oligonucleotide
cccgcttgttgttgctgcgagtatcattgggatcttgcacttgatattgtgg

SEQ ID NO: 72848 - DNA, 60 bp, Artificial
  Synthetic oligonucleotide
ctcagttattctgctggtgcacttgccagttgcatgggcctcatatacaaccgaatgggg

SEQ ID NO: 72849 - DNA, 60 bp, Artificial
  Synthetic oligonucleotide
actctacagagattcgcttggagaagcagtaatgagggtgggagacctccactccctcca

SEQ ID NO: 72850 - DNA, 50 bp, Artificial
  Synthetic oligonucleotide
cttcctttgacatgagtaatgaaggatcttatttcttcggagacaatgca

SEQ ID NO: 72851 - DNA, 60 bp, Artificial
  Synthetic oligonucleotide
ccaggctatttaccataaggcaagaaatggccaacagaggcctctgggattcctttcgtc

SEQ ID NO: 72852 - DNA, 60 bp, Artificial
  Synthetic oligonucleotide
ccaggttatttaccataaggcaagaaatggccaacagaggcctctgggattcctttcgtc

SEQ ID NO: 72853 - DNA, 60 bp, Artificial
  Synthetic oligonucleotide
aatcgaaaaagaagtctcagaagtagaagggagaattcaggacctcgagaaatatgttga

SEQ ID NO: 72854 - DNA, 60 bp, Artificial
  Synthetic oligonucleotide
cctgcataggatcaatcagaaatggaacttatgaccatgatgtatacagagacgaagcat

SEQ ID NO: 72855 - DNA, 60 bp, Artificial
  Synthetic oligonucleotide
tgaagaggggaaaatcgttcatattagcccattgtcaggaagtgctcagcatgtcgagga

SEQ ID NO: 72856 - DNA, 60 bp, Artificial
  Synthetic oligonucleotide
tccttgatggaagggactgtacactgatagatgccctactgggggacccccactgtgatg

SEQ ID NO: 72857 - DNA, 60 bp, Artificial
  Synthetic oligonucleotide
cagcgccttcagcaactgctacccatatgatgtaccagactatgactcactcaggtctct

SEQ ID NO: 72858 - DNA, 60 bp, Artificial
  Synthetic oligonucleotide
gatcacttacggagcatgtcctaagtatgtcaaacagggcactttgaaattggcaacagg

SEQ ID NO: 72859 - DNA, 60 bp, Artificial
  Synthetic oligonucleotide
gccgggagatgtactagtaattaacagtaatggtaacctgatcgctcctcgaggatactt

SEQ ID NO: 72860 - DNA, 60 bp, Artificial
  Synthetic oligonucleotide
gcattaaacaaccgatttcaaatcaagggtgtagagctaaaatctgggtacaaagactgg

SEQ ID NO: 72861 - DNA, 60 bp, Artificial
  Synthetic oligonucleotide
tgggtcaggggccaatcaggacggataagcatctattggacaatagtgaagccgggagat

SEQ ID NO: 72862 - DNA, 60 bp, Artificial
  Synthetic oligonucleotide
caagcagcagacctaaaaagcactcaggcagccatcgaccagattaatgggaagttgaac

SEQ ID NO: 72863 - DNA, 60 bp, Artificial
  Synthetic oligonucleotide
ggcaacaggaatgaggaacgtgcctgagaaacagactaggggtctgttcggtgcaatagc

SEQ ID NO: 72864 - DNA, 60 bp, Artificial
  Synthetic oligonucleotide
tgatagacggttggtatggtttcagacaccagaactctgagggtacaggacaagcagcag

SEQ ID NO: 72865 - DNA, 60 bp, Artificial
  Synthetic oligonucleotide
gaggatacttcaagatgcgcactggaaaaagctcaataatgagatcagatgcgcctattg

SEQ ID NO: 72866 - DNA, 60 bp, Artificial
  Synthetic oligonucleotide
gatagatctatggtctgacaatgcagagcttcttgtcgccttggaaaaccagcatacaat

SEQ ID NO: 72867 - DNA, 60 bp, Artificial
  Synthetic oligonucleotide
gaagactgattcaaaatagcataacaatagagagaatggtgctctctgcttttgacgaga

SEQ ID NO: 72868 - DNA, 60 bp, Artificial
  Synthetic oligonucleotide
caacattaggtgcaacatttgcatttgagtgtattagtaattaaaaacacccttgtttct

SEQ ID NO: 72869 - DNA, 60 bp, Artificial
  Synthetic oligonucleotide
aacattaggtgcaacatttgcatttgagtgtattagtaattaaaaacacccttgtttcta

SEQ ID NO: 72870 - DNA, 60 bp, Artificial
  Synthetic oligonucleotide
gctgggattcatcatgtgggcctgccagaaaggcaacattaggtgcaacatttgcatctg

SEQ ID NO: 72871 - DNA, 60 bp, Artificial
  Synthetic oligonucleotide
tgctgggattcatcatgtgggcctgccagaaaggcaacattaggtgcaacatttgcatct

SEQ ID NO: 72872 - DNA, 60 bp, Artificial
  Synthetic oligonucleotide
tgaccgactggagaccctaatattactaagggctttcaccgaagagggagcaattgttgg

SEQ ID NO: 72873 - DNA, 60 bp, Artificial
  Synthetic oligonucleotide
gagtatggagttttctctcactgacccgaggctggagccacacaagtgggaaaagtactg

SEQ ID NO: 72874 - DNA, 60 bp, Artificial
  Synthetic oligonucleotide
cagatccactggcatctttattggagatgtgccacagcacacaaattggcgggacaagga

SEQ ID NO: 72875 - DNA, 60 bp, Artificial
  Synthetic oligonucleotide
ctcatggaatggctaaagactagacctatcctgtcacctctgactaaggggattttggga

SEQ ID NO: 72876 - DNA, 60 bp, Artificial
  Synthetic oligonucleotide
tctcatggaatggctaaagactagacctatcctgtcacctctgactaaggggattttggg

SEQ ID NO: 72877 - DNA, 60 bp, Artificial
  Synthetic oligonucleotide
aagacataatggattctaacactgtgtcaagtttccaggtagattgctttctttggcata

SEQ ID NO: 72878 - DNA, 60 bp, Artificial
  Synthetic oligonucleotide
tgacatcaaaatcatggcgtcccaaggcaccaaacggtcttatgaacagatggaaactga

SEQ ID NO: 72879 - DNA, 60 bp, Artificial
  Synthetic oligonucleotide
acactcctggattcccaagaggaaccgctctattctcaacacaagccaaaggggaattct

SEQ ID NO: 72880 - DNA, 60 bp, Artificial
  Synthetic oligonucleotide
ggggcaccccaactcaacccgattgatggaccactacctgaggataatgagccaagtgga

SEQ ID NO: 72881 - DNA, 60 bp, Artificial
  Synthetic oligonucleotide
aatacgttgaagacactaaaatagatctctggtcttacaatgcggaggttcttgtcgctc

SEQ ID NO: 72882 - DNA, 60 bp, Artificial
  Synthetic oligonucleotide
ggacctcgagaaatacgttgaagacactaaaatagatctctggtcttacaatgcggaact

SEQ ID NO: 72883 - DNA, 60 bp, Artificial
  Synthetic oligonucleotide
gttcgagcatcagggagagtcacagtctctaccaaaagaagccaacaaactgtaaccccg

SEQ ID NO: 72884 - DNA, 60 bp, Artificial
  Synthetic oligonucleotide
tcaccgaagagggagcaattgttggcgagatctcaccattgccttcttttccaggacata

SEQ ID NO: 72885 - DNA, 60 bp, Artificial
  Synthetic oligonucleotide
tcaccgaagagggagcaattgttggcggaatctcaccattgccttcttttccaggacata

SEQ ID NO: 72886 - DNA, 60 bp, Artificial
  Synthetic oligonucleotide
caccgaagagggagcaattgttggcggaatctcaccattgccttcttttccaggacatac

SEQ ID NO: 72887 - DNA, 60 bp, Artificial
  Synthetic oligonucleotide
caccgaagagggagcaattgttggcgagatctcaccattgccttcttttccaggacatac

SEQ ID NO: 72888 - DNA, 60 bp, Artificial
  Synthetic oligonucleotide
gaagggagaattcaggacctcgagaaatatgttgaagacactaaaatagatctctggtct

SEQ ID NO: 72889 - DNA, 60 bp, Artificial
  Synthetic oligonucleotide
gaattctcagaagtagaagggagaattcaggacctcgagaaatatgttgaagacactaaa

SEQ ID NO: 72890 - DNA, 60 bp, Artificial
  Synthetic oligonucleotide
gaagtctcagaagtagaagggagaattcaggacctcgagaaatatgttgaagacactaaa

SEQ ID NO: 72891 - DNA, 60 bp, Artificial
  Synthetic oligonucleotide
ttctacatccaaatgtgcactgaacttaaactcagtgattatgaagggcggttgatccag

SEQ ID NO: 72892 - DNA, 60 bp, Artificial
  Synthetic oligonucleotide
ctgatatgagcatcggagtaacagtgataaagaacaacatgataaacaatgaccttggac

SEQ ID NO: 72893 - DNA, 60 bp, Artificial
  Synthetic oligonucleotide
gagcattggagtaactgtgataaagaacaacatgataaacaatgaccttggaccagcaac

SEQ ID NO: 72894 - DNA, 60 bp, Artificial
  Synthetic oligonucleotide
ctgtgataaagaacaacatgataaacaatgaccttggaccagcaacagcccagatggctc

SEQ ID NO: 72895 - DNA, 60 bp, Artificial
  Synthetic oligonucleotide
cgctgatatgagcattggagtaacagtgataaagaacaacatgataaacaatgaccttgg

SEQ ID NO: 72896 - DNA, 60 bp, Artificial
  Synthetic oligonucleotide
cagctgatatgagcattggagtaacagtgataaagaacaacatgataaacaatgaccttg

SEQ ID NO: 72897 - DNA, 60 bp, Artificial
  Synthetic oligonucleotide
ctagttccagtactggactaagagatgatcttcttgaaaatttgcagacctatcagaaac

SEQ ID NO: 72898 - DNA, 60 bp, Artificial
  Synthetic oligonucleotide
ctagttccagcactggtctaagagatgatcttcttgaaaatttgcagacctatcagaaac

SEQ ID NO: 72899 - DNA, 60 bp, Artificial
  Synthetic oligonucleotide
gccacagcacacaaattggcgggacaaggatggtggacattcttaggcagaaccctactg

SEQ ID NO: 72900 - DNA, 60 bp, Artificial
  Synthetic oligonucleotide
aggagttcacaatggtggggaaaagggcaacagctatactcagaaaagcaaccaggaggt

SEQ ID NO: 72901 - DNA, 60 bp, Artificial
  Synthetic oligonucleotide
gacataaaccctggtcatgcagacctcagtgccaaggaggcacaagatgtaattatggaa

SEQ ID NO: 72902 - DNA, 60 bp, Artificial
  Synthetic oligonucleotide
gatgtgccacagcacacaaattggcgggacaaggatggtggacattcttaggcagaaccc

SEQ ID NO: 72903 - DNA, 60 bp, Artificial
  Synthetic oligonucleotide
tgacacagatgtggtaaactttgtgagcatggagttttctctcactgacccgagacttga

SEQ ID NO: 72904 - DNA, 60 bp, Artificial
  Synthetic oligonucleotide
tggattcatcataaaaggaagatctcacttaaggaatgacacagatgtggtaaactttgt

SEQ ID NO: 72905 - DNA, 60 bp, Artificial
  Synthetic oligonucleotide
ccaggtggagaagtgaggaatgacgatgttgaccaaagcctagttattgcagccaggaac

SEQ ID NO: 72906 - DNA, 60 bp, Artificial
  Synthetic oligonucleotide
atcagaatagaccaagcaatcatggataagaacatcatgttgaaagcgaatttcagtgtg

SEQ ID NO: 72907 - DNA, 60 bp, Artificial
  Synthetic oligonucleotide
cagaatagaccaagcaatcatggataagaacatcatgttgaaagcgaatttcagtgtgat

SEQ ID NO: 72908 - DNA, 60 bp, Artificial
  Synthetic oligonucleotide
ggtagacggttggtacggtttcaggcatcagaattctgagggcacaggacaagcagcaga

SEQ ID NO: 72909 - DNA, 60 bp, Artificial
  Synthetic oligonucleotide
aaaattctgagggcacaggacaagcagcagatcttaaaagcacccaagcagctatcgacc

SEQ ID NO: 72910 - DNA, 60 bp, Artificial
  Synthetic oligonucleotide
ggtggacggttggtacggtttcagacatcaaaattctgagggcacaggacaagcagcaga

SEQ ID NO: 72911 - DNA, 59 bp, Artificial
  Synthetic oligonucleotide
tgaaagatgagccttctaaccgaggtcgaaacgtatgttctctctatcgttccatcagg

SEQ ID NO: 72912 - DNA, 59 bp, Artificial
  Synthetic oligonucleotide
agatgagccttctaaccgaggtcgaaacgtatgttctctctatcgttccatcaggcccc

SEQ ID NO: 72913 - DNA, 60 bp, Artificial
  Synthetic oligonucleotide
ggggccaaggaaatagcactcagttattctgctggtgcacttgccagttgcatgggcctc

SEQ ID NO: 72914 - DNA, 57 bp, Artificial
  Synthetic oligonucleotide
tgggcgtggatgaatactccagcacagagagggtggtggttagcattgatcgatttt

SEQ ID NO: 72915 - DNA, 57 bp, Artificial
  Synthetic oligonucleotide
tgggcgtggatgaatactccagcacagagagggtggtggtcagcattgatcggtttt

SEQ ID NO: 72916 - DNA, 57 bp, Artificial
  Synthetic oligonucleotide
tgggcgtggatgaatactccagcacagagagggtggtggttagcattgatcggtttt

SEQ ID NO: 72917 - DNA, 57 bp, Artificial
  Synthetic oligonucleotide
tgggagtggatgaatactccagcacagagagggtggtggttagcattgatcggtttt

SEQ ID NO: 72918 - DNA, 60 bp, Artificial
  Synthetic oligonucleotide
tgggcgtggatgaatactccagcacagagagggtggtggttagcattgatcggtttttga

SEQ ID NO: 72919 - DNA, 60 bp, Artificial
  Synthetic oligonucleotide
tgggagtggatgaatactccagcacagagagggtggtggttagcattgatcggtttttga

SEQ ID NO: 72920 - DNA, 60 bp, Artificial
  Synthetic oligonucleotide
tgggcgtggatgaatactccagcacagagagggtggtggttagcattgatcgatttttga

SEQ ID NO: 72921 - DNA, 60 bp, Artificial
  Synthetic oligonucleotide
tgggcgtggatgaatactccagcacagagagggtggtggtcagcattgatcggtttttga

SEQ ID NO: 72922 - DNA, 52 bp, Artificial
  Synthetic oligonucleotide
ggttttcgctcaaaaacttcccggaaatgacaacagcacagcaacgctgtgc

SEQ ID NO: 72923 - DNA, 60 bp, Artificial
  Synthetic oligonucleotide
ctcaggtacatatggaacaggctcatggcctgatggggcggacatcgatctcatgcctat

SEQ ID NO: 72924 - DNA, 60 bp, Artificial
  Synthetic oligonucleotide
attgggcgattctacatccaaatgtgcactgaacttaaactcagtgattatgagggacgg

SEQ ID NO: 72925 - DNA, 60 bp, Artificial
  Synthetic oligonucleotide
gggcgattctacatccaaatgtgcactgaacttaaactcagtgattatgagggacggttg

SEQ ID NO: 72926 - DNA, 60 bp, Artificial
  Synthetic oligonucleotide
agcaaaagcaggggataattctattaatcatgaagaccattattgctttgagccacattt

SEQ ID NO: 72927 - DNA, 60 bp, Artificial
  Synthetic oligonucleotide
gggcaatgatggatcaagtgagagaaagccggaacccaggaaatgctgagatcgaagatc

SEQ ID NO: 72928 - DNA, 60 bp, Artificial
  Synthetic oligonucleotide
gcgcttatccagtgctgaacgtgactatgccaaacaacgataactttgacaagttgtacg

SEQ ID NO: 72929 - DNA, 60 bp, Artificial
  Synthetic oligonucleotide
agaaacgaatgggggtgcagatgcaacgattcaagtgacccgcttgttgttgccgcgaat

SEQ ID NO: 72930 - DNA, 60 bp, Artificial
  Synthetic oligonucleotide
gaaaatttgcaggcctatcagaaacgaatgggggtgcagatgcaacgattcaagtgaccc

SEQ ID NO: 72931 - DNA, 60 bp, Artificial
  Synthetic oligonucleotide
tatcagaaacgaatgggggtgcagatgcaacgattcaagtgacccgcttgttgttgcagc

SEQ ID NO: 72932 - DNA, 60 bp, Artificial
  Synthetic oligonucleotide
aaagacaagaccaatcctgtcacctctgactaaagggattttgggatttgtattcacgct

SEQ ID NO: 72933 - DNA, 60 bp, Artificial
  Synthetic oligonucleotide
ccggttccagatcaaaggtgttgagctgaagtcaggatacaaagactggatcttatggat

SEQ ID NO: 72934 - DNA, 60 bp, Artificial
  Synthetic oligonucleotide
gagacgaagcactaaacaaccggttccagatcaaaggtgttgagctgaagtcaggataca

SEQ ID NO: 72935 - DNA, 60 bp, Artificial
  Synthetic oligonucleotide
gagacgaagcgttaaacaaccggttccagatcaaaggtgttgagctgaagtcaggataca

SEQ ID NO: 72936 - DNA, 60 bp, Artificial
  Synthetic oligonucleotide
tgatcttcttgaaaatttgcagacctatcaaaaacgaatgggggtgcagatgcaacgatt

SEQ ID NO: 72937 - DNA, 60 bp, Artificial
  Synthetic oligonucleotide
ttgaaagatgagccttctaaccgaggtcgaaacgtatgttctctctatcgttccgtcagg

SEQ ID NO: 72938 - DNA, 60 bp, Artificial
  Synthetic oligonucleotide
cgggaaggctaatagatttcctcaaggatgtgatggaatcaatggataaagaggaaatag

SEQ ID NO: 72939 - DNA, 60 bp, Artificial
  Synthetic oligonucleotide
ctgtgtgttgttctactgggattcatcatgtgggcctgccagagaggcaacattaggtgc

SEQ ID NO: 72940 - DNA, 60 bp, Artificial
  Synthetic oligonucleotide
tgctgtgtgttgttctactgggattcatcatgtgggcctgccagagaggcaacattaggt

SEQ ID NO: 72941 - DNA, 60 bp, Artificial
  Synthetic oligonucleotide
tgctactgaactggttcagagttcctcaacaggtagaatatgcgacagtcctcaccaaat

SEQ ID NO: 72942 - DNA, 60 bp, Artificial
  Synthetic oligonucleotide
gcaattggggtcctcatcggaggacttgaatggaatgacaacacagttcgagtctctaaa

SEQ ID NO: 72943 - DNA, 60 bp, Artificial
  Synthetic oligonucleotide
cgctagtgaaaacaatcacgaatgaccaaattgaagtgactaatgctactgaactggttc

SEQ ID NO: 72944 - DNA, 60 bp, Artificial
  Synthetic oligonucleotide
aacattaggtgcaacatttgcatttgagtatattagtaattaaaaacacccttgtttcta

SEQ ID NO: 72945 - DNA, 57 bp, Artificial
  Synthetic oligonucleotide
agcaaatggctggatcaagtgagcaggcagcagaggccatggaggttgctagtcagg

SEQ ID NO: 72946 - DNA, 60 bp, Artificial
  Synthetic oligonucleotide
cggatgatcaaattgaagtgactaatgctactgaactggttcagagttcctcaacaggga

SEQ ID NO: 72947 - DNA, 60 bp, Artificial
  Synthetic oligonucleotide
atcaaacgtgggatcaatgatcggaatttctggagaggtgaaaatggacgaaaaacaagg

SEQ ID NO: 72948 - DNA, 60 bp, Artificial
  Synthetic oligonucleotide
ggattccaacactgtgtcaagctttcaggtagactgctttctttggcatgtccgcaaaca

SEQ ID NO: 72949 - DNA, 60 bp, Artificial
  Synthetic oligonucleotide
gcttcacgctacctaactgacatgactcttgaagaaatgtcaagggactggtttatgctc

SEQ ID NO: 72950 - DNA, 60 bp, Artificial
  Synthetic oligonucleotide
gaagtcactaagaggaagaggcagcactcttggtctggacatcgaaacagccacccgtgc

SEQ ID NO: 72951 - DNA, 60 bp, Artificial
  Synthetic oligonucleotide
cttcgccgagatcagaagtcactaagaggaagaggcagcactcttggtctggacatcgaa

SEQ ID NO: 72952 - DNA, 60 bp, Artificial
  Synthetic oligonucleotide
gggaccggcttcgccgagatcagaaatctctaagaggaagaggcagcactcttggtctgg

SEQ ID NO: 72953 - DNA, 60 bp, Artificial
  Synthetic oligonucleotide
attacatttatgcaagccttacaactactgctcgaagtggagcaagagataagaactttc

SEQ ID NO: 72954 - DNA, 60 bp, Artificial
  Synthetic oligonucleotide
gcaagccttacaactactgctcgaagtggagcaagagataagaactttctcgtttcagct

SEQ ID NO: 72955 - DNA, 60 bp, Artificial
  Synthetic oligonucleotide
caccaaacggtcttatgaacagatggaaactgatggggaacgccagaatgcaactgagat

SEQ ID NO: 72956 - DNA, 60 bp, Artificial
  Synthetic oligonucleotide
aacggtcttatgaacagatggaaactgatggggatcgccagaatgcaactgagattaggt

SEQ ID NO: 72957 - DNA, 60 bp, Artificial
  Synthetic oligonucleotide
aacggtcttatgaacagatggaaactgatggggaacgccagaatgcaactgagattcggg

SEQ ID NO: 72958 - DNA, 60 bp, Artificial
  Synthetic oligonucleotide
ctcccaaggcaccaaacggtcttatgaacagatggaaactgatggggaacgccagaatgc

SEQ ID NO: 72959 - DNA, 60 bp, Artificial
  Synthetic oligonucleotide
gcaccaaacggtcttatgaacagatggaaactgatggggaacgccagaatgcaactgaga

SEQ ID NO: 72960 - DNA, 60 bp, Artificial
  Synthetic oligonucleotide
acggtcttatgaacagatggaaactgatggggaacgccagaatgccactgagatcagggc

SEQ ID NO: 72961 - DNA, 60 bp, Artificial
  Synthetic oligonucleotide
gtcacaaggcaccaaacggtcttatgaacagatggaaactgatggggaacgccagaatgc

SEQ ID NO: 72962 - DNA, 60 bp, Artificial
  Synthetic oligonucleotide
cggtcttatgaacagatggaaactgatggggaacgccagaatgcaactgagatcagagca

SEQ ID NO: 72963 - DNA, 60 bp, Artificial
  Synthetic oligonucleotide
cggtcttatgaacagatggaaactgatggggaacgccagaatgcaactgagatcagggca

SEQ ID NO: 72964 - DNA, 60 bp, Artificial
  Synthetic oligonucleotide
cgatcttatgaacagatggaaactgatggggaacgccagaatgcaactgagattagggca

SEQ ID NO: 72965 - DNA, 50 bp, Artificial
  Synthetic oligonucleotide
cctcttttgacatgagtaatgaaggatcttatttcttcggagacaatgca

SEQ ID NO: 72966 - DNA, 60 bp, Artificial
  Synthetic oligonucleotide
gattctacatccaaatgtgcactgaacttaaactcagtgattatgaagggcggttgatcc

SEQ ID NO: 72967 - DNA, 60 bp, Artificial
  Synthetic oligonucleotide
ttttgagcaaataacatttatgcaagccttacagctactatttgaagtggaacaggagat

SEQ ID NO: 72968 - DNA, 60 bp, Artificial
  Synthetic oligonucleotide
aataaatgaatcagctgatatgagcattggagtaacagtgataaagaacaacatgataaa

SEQ ID NO: 72969 - DNA, 60 bp, Artificial
  Synthetic oligonucleotide
agagacataagcgatttgaagcaatatgatagtgacgaacctgaattaaggtcactgtca

SEQ ID NO: 72970 - DNA, 60 bp, Artificial
  Synthetic oligonucleotide
gcgatttgaagcaatatgatagtgacgaacctgaattaaggtcactgtcaagctggatac

SEQ ID NO: 72971 - DNA, 60 bp, Artificial
  Synthetic oligonucleotide
aatgcaccaaatcatgagggaatacaagcaggagtgaatagattctacaggatctgcaag

SEQ ID NO: 72972 - DNA, 60 bp, Artificial
  Synthetic oligonucleotide
gcgcaaaatgccataagcaccacattcccttacactggagatcctccatacagccatgga

SEQ ID NO: 72973 - DNA, 60 bp, Artificial
  Synthetic oligonucleotide
ttccagctcaaaatgccataagcaccacattcccttatactggagatcctccatacagcc

SEQ ID NO: 72974 - DNA, 60 bp, Artificial
  Synthetic oligonucleotide
ttccccagtagttcatacaggagaccggttggaatttctagcatggtggaggccatggtg

SEQ ID NO: 72975 - DNA, 60 bp, Artificial
  Synthetic oligonucleotide
aatgcaccaaatcatgagggaatacaagcaggagtgaatagattctacaggacctgcaag

SEQ ID NO: 72976 - DNA, 60 bp, Artificial
  Synthetic oligonucleotide
aatgcaccaaatcatgagggaatacaagcaggagtggatagattctacagaatctgcaag

SEQ ID NO: 72977 - DNA, 60 bp, Artificial
  Synthetic oligonucleotide
atgatcaaattgaagtgactaatgctactgagctggttcagagttcctcaacaggtagaa

SEQ ID NO: 72978 - DNA, 60 bp, Artificial
  Synthetic oligonucleotide
cagctaaggctatggagcaaatggctggatcaagtgagcaggcagcggaggccatggaaa

SEQ ID NO: 72979 - DNA, 60 bp, Artificial
  Synthetic oligonucleotide
ctacagctaaagctatggagcaaatggctggatcaagtgagcaggcagcggaggccatgg

SEQ ID NO: 72980 - DNA, 60 bp, Artificial
  Synthetic oligonucleotide
ctgaactggttgaccaaatcaggaagcacatatccagtgctgaacgtgactatgccaaac

SEQ ID NO: 72981 - DNA, 60 bp, Artificial
  Synthetic oligonucleotide
actgaactggttgaccaaatcaggaagcacatatccagtgctgaacgtgactatgccaaa

SEQ ID NO: 72982 - DNA, 60 bp, Artificial
  Synthetic oligonucleotide
ggggtctgtccagtagaataagcatctattggacaatagtaaaaccgggagacatacttt

SEQ ID NO: 72983 - DNA, 60 bp, Artificial
  Synthetic oligonucleotide
caggaagcgcatatccagtgctgaacgtgactatgccaaacaatgacaattttgacaaac

SEQ ID NO: 72984 - DNA, 60 bp, Artificial
  Synthetic oligonucleotide
gcaatgatggatccagtgagagaaagccggaacccaggaaatgctgagatcgaagatctc

SEQ ID NO: 72985 - DNA, 60 bp, Artificial
  Synthetic oligonucleotide
atcctcaggacccaggagtcggaatgcgtttgtatcaatggtacttgtacagtggtaatg

SEQ ID NO: 72986 - DNA, 60 bp, Artificial
  Synthetic oligonucleotide
atcctcaggacccaggagtcggaatgcgtttgtatcaatggaacttgtacagtggtaatg

SEQ ID NO: 72987 - DNA, 60 bp, Artificial
  Synthetic oligonucleotide
cctggaatgatgatgggcatgttcaacatgctaagtacggttttgggagtctcaatactg

SEQ ID NO: 72988 - DNA, 50 bp, Artificial
  Synthetic oligonucleotide
cagaacagcttaacaatagagagaatggtgctctctgcttttgatgagag

SEQ ID NO: 72989 - DNA, 60 bp, Artificial
  Synthetic oligonucleotide
ctgggattaatgaatcggctgacatgagcattggagtaacagtgataaagaacaacatga

SEQ ID NO: 72990 - DNA, 60 bp, Artificial
  Synthetic oligonucleotide
tctgggattaatgaatcggctgacatgagcattggagtaacagtgataaagaacaacatg

SEQ ID NO: 72991 - DNA, 60 bp, Artificial
  Synthetic oligonucleotide
tggagcaaatggctggatcaagtgagcaggcagcggaggccatggaaattgctagtcagg

SEQ ID NO: 72992 - DNA, 57 bp, Artificial
  Synthetic oligonucleotide
agcaaatggctggatcaagtgagcaggcagcggaggccatggaaattgctagtcagg

SEQ ID NO: 72993 - DNA, 60 bp, Artificial
  Synthetic oligonucleotide
cgaatgggggtgcagatgcaacgattcaagtgacccgcttgttgttgccgcgagtatcat

SEQ ID NO: 72994 - DNA, 60 bp, Artificial
  Synthetic oligonucleotide
gacacagtacatgataggaccccttaccggaccctattgatgaatgagttgggtgttcca

SEQ ID NO: 72995 - DNA, 60 bp, Artificial
  Synthetic oligonucleotide
tgacacagtacatgataggaccccttaccggaccctattgatgaatgagttgggtgttcc

SEQ ID NO: 72996 - DNA, 60 bp, Artificial
  Synthetic oligonucleotide
atattagcccattgtcaggaagtgctcagcatgtcgaggagtgctcctgttatcctcgat

SEQ ID NO: 72997 - DNA, 60 bp, Artificial
  Synthetic oligonucleotide
atattagcccattgtcaggaagtgctcagcatgtcgaggagtgctcctgttatcctcggt

SEQ ID NO: 72998 - DNA, 60 bp, Artificial
  Synthetic oligonucleotide
catccaaatgtgcactgaactcaaactcagtgattatgaagggcggttgatccaaaacag

SEQ ID NO: 72999 - DNA, 60 bp, Artificial
  Synthetic oligonucleotide
aggctgggcctttgacgatggaaatgacgtgtggatgggaagaacgatcagcgaggagtt

SEQ ID NO: 73000 - DNA, 60 bp, Artificial
  Synthetic oligonucleotide
ggcctttgacgatggaaatgacgtgtggatgggaagaacgatcagcgaggagttacgctc

SEQ ID NO: 73001 - DNA, 60 bp, Artificial
  Synthetic oligonucleotide
caggagaccggttggaatttccagcatggtggaggccatggtgtctagggcccggattga

SEQ ID NO: 73002 - DNA, 60 bp, Artificial
  Synthetic oligonucleotide
gtgcttttatgtggagttgataaggggaaggaaagaggaaactgaagtctggtggacctc

SEQ ID NO: 73003 - DNA, 60 bp, Artificial
  Synthetic oligonucleotide
ttcctaacacatgcattaaaatagttgtggcaatgctactatttgctatccatactgtcc

SEQ ID NO: 73004 - DNA, 60 bp, Artificial
  Synthetic oligonucleotide
gtgcggcatagattgaagattacagagaatagctttgaacagattacatttatgcaagcc

SEQ ID NO: 73005 - DNA, 60 bp, Artificial
  Synthetic oligonucleotide
cagaccaagaactgggtgatgccccattcctcgaccggcttcgccgagatcagaagtcac

SEQ ID NO: 73006 - DNA, 60 bp, Artificial
  Synthetic oligonucleotide
cgactggaaactctgatactacttagagctttcactgaagaaggagcaattgtgggcgaa

SEQ ID NO: 73007 - DNA, 60 bp, Artificial
  Synthetic oligonucleotide
tggaccaggcaattatggataaaaacatcatattgaaagcaaacttcagtgtgatttttg

SEQ ID NO: 73008 - DNA, 60 bp, Artificial
  Synthetic oligonucleotide
gtgatttttgaacgactggaaactctgatactacttagagctttcactgaagaaggagca

SEQ ID NO: 73009 - DNA, 60 bp, Artificial
  Synthetic oligonucleotide
cgctacctaactgacatgactcttgaagaaatgtcaagggactggtttatgctcatgccc

SEQ ID NO: 73010 - DNA, 60 bp, Artificial
  Synthetic oligonucleotide
gtttatgctcatgcccaagcagaaagtggctggttccctttgcatcagaatggaccaggc

SEQ ID NO: 73011 - DNA, 60 bp, Artificial
  Synthetic oligonucleotide
tggaagaagaatccgatgaggcacttaaaatgactattgcttctgtgcctgcttcacgct

SEQ ID NO: 73012 - DNA, 60 bp, Artificial
  Synthetic oligonucleotide
ccgatgaggcacttaaaatgactattgcttctgtgcctgcttcacgctacctaactgaca

SEQ ID NO: 73013 - DNA, 60 bp, Artificial
  Synthetic oligonucleotide
ggacatcgaaacagccacccgtgcaggaaagcagatagtggagcggattctggaagaaga

SEQ ID NO: 73014 - DNA, 60 bp, Artificial
  Synthetic oligonucleotide
ccacccgtgcaggaaagcagatagtggagcggattctggaagaagaatccgatgaggcac

SEQ ID NO: 73015 - DNA, 60 bp, Artificial
  Synthetic oligonucleotide
gtttgaagagatcagatggctaattgcagaatgcagaaacatattaaccaagactgagaa

SEQ ID NO: 73016 - DNA, 60 bp, Artificial
  Synthetic oligonucleotide
cctccaaagcagaaacgctacatggcgagaagagttgagtcagaagtttgaagagatcag

SEQ ID NO: 73017 - DNA, 60 bp, Artificial
  Synthetic oligonucleotide
cattccctccaaagcagaaacgctacatggcgagaagagttgagtcagaagtttgaagag

SEQ ID NO: 73018 - DNA, 60 bp, Artificial
  Synthetic oligonucleotide
aagtatacagagattcgcttggggagtccgtgatgagaatgggggaccttcattccctcc

SEQ ID NO: 73019 - DNA, 60 bp, Artificial
  Synthetic oligonucleotide
gcatccagccctactcctcgatacattaccgatatgagcatagaggaaataagcagggaa

SEQ ID NO: 73020 - DNA, 60 bp, Artificial
  Synthetic oligonucleotide
ctcaaaattgcaattgcatccagccctactcctcgatacattaccgatatgagcatagag

SEQ ID NO: 73021 - DNA, 60 bp, Artificial
  Synthetic oligonucleotide
agactgagaacagtttcgagcagataacgttcttgcaggcattgcaactcttacttgaag

SEQ ID NO: 73022 - DNA, 60 bp, Artificial
  Synthetic oligonucleotide
gatggctaattgcagaatgcagaaacatattaaccaagactgagaacagtttcgagcaga

SEQ ID NO: 73023 - DNA, 60 bp, Artificial
  Synthetic oligonucleotide
agacatgtgtgatgctccctttgatgatagactcagaagagatcagaaggcattaaaggg

SEQ ID NO: 73024 - DNA, 57 bp, Artificial
  Synthetic oligonucleotide
cattaaagggaagaggcagcacacttggactcgatctgcgagtggccacaatggaag

SEQ ID NO: 73025 - DNA, 60 bp, Artificial
  Synthetic oligonucleotide
ctccctttgatgatagactcagaagagatcagaaggcattaaagggaagaggcagcacac

SEQ ID NO: 73026 - DNA, 60 bp, Artificial
  Synthetic oligonucleotide
gtttcgagcagataacgttcttgcaggcattgcaactcttacttgaagttgagagtgaga

SEQ ID NO: 73027 - DNA, 60 bp, Artificial
  Synthetic oligonucleotide
atcctcatcggtggacttgaatggaatgataactcaattcgagcgtctgaaagtatacag

SEQ ID NO: 73028 - DNA, 60 bp, Artificial
  Synthetic oligonucleotide
cggtggacttgaatggaatgataactcaattcgagcgtctgaaagtatacagagattcgc

SEQ ID NO: 73029 - DNA, 60 bp, Artificial
  Synthetic oligonucleotide
cctatttaatcaactggaaacattagtctcactgagggctttcacagacgatggcgccat

SEQ ID NO: 73030 - DNA, 60 bp, Artificial
  Synthetic oligonucleotide
aaataacagggggtctgatggtgaaaatggatcaggccattatggacaagaggataatac

SEQ ID NO: 73031 - DNA, 52 bp, Artificial
  Synthetic oligonucleotide
ggggtctgatggtgaaaatggatcaggccattatggacaagaggataatact

SEQ ID NO: 73032 - DNA, 60 bp, Artificial
  Synthetic oligonucleotide
gacggttggtacggtttcaggcatcaaaattctgagggcacaggacaaccagcagatctt

SEQ ID NO: 73033 - DNA, 60 bp, Artificial
  Synthetic oligonucleotide
tgtgcatagcatggtccagctcaagttgtcacgatggaaaagcatggctgcatgtgtgtg

SEQ ID NO: 73034 - DNA, 54 bp, Artificial
  Synthetic oligonucleotide
tgtgtatagcatggtccagctcaagttgtcacgatggaaaagcatggctgcatg

SEQ ID NO: 73035 - DNA, 54 bp, Artificial
  Synthetic oligonucleotide
cactcactgagtgacatccacatcatggcgtctcaaggcaccaaacgatcatat

SEQ ID NO: 73036 - DNA, 60 bp, Artificial
  Synthetic oligonucleotide
ggtccagctcaagttgtcacgatggaaaagcatggctgcatgtgtgtgtaactgggcatg

SEQ ID NO: 73037 - DNA, 60 bp, Artificial
  Synthetic oligonucleotide
ggtccagctcaagttgtcacgatggaaaagcatggttgcatgtttgtgtaactgggcatg

SEQ ID NO: 73038 - DNA, 60 bp, Artificial
  Synthetic oligonucleotide
gccaaacggaacgctagtgaaaacaatcacgaatgatcaaattgaagtgactaatgctac

SEQ ID NO: 73039 - DNA, 60 bp, Artificial
  Synthetic oligonucleotide
agagacataagcgatttgaagcaatatgatagtgacgaacctgaattgaggtcaatttca

SEQ ID NO: 73040 - DNA, 60 bp, Artificial
  Synthetic oligonucleotide
gcgatttgaagcaatatgatagtgacgaacctgaattgaggtcaatttcaagctggatac

SEQ ID NO: 73041 - DNA, 60 bp, Artificial
  Synthetic oligonucleotide
cagagacttgaagatgtctttgctggaaagaacacagatcttgaggctctcatggaatgg

SEQ ID NO: 73042 - DNA, 60 bp, Artificial
  Synthetic oligonucleotide
gcctccgcacttgcttcgcggtacctaactgacatgactgttgaagaaatgtcaagggac

SEQ ID NO: 73043 - DNA, 60 bp, Artificial
  Synthetic oligonucleotide
ggcacaaattgaagacgacagagaatagttttgagcaaataacatttatgcaagcattac

SEQ ID NO: 73044 - DNA, 60 bp, Artificial
  Synthetic oligonucleotide
gaaatgaggcacaaattgaagacgacagagaatagttttgagcaaataacatttatgcaa

SEQ ID NO: 73045 - DNA, 60 bp, Artificial
  Synthetic oligonucleotide
gcaagcattacagctattatttgaagtggaacaagagattagaacgttttcgtttcagct

SEQ ID NO: 73046 - DNA, 60 bp, Artificial
  Synthetic oligonucleotide
ggcgggaacaactaggtcagaagtttgaagaaataagatggctgatagaagaaatgaggc

SEQ ID NO: 73047 - DNA, 60 bp, Artificial
  Synthetic oligonucleotide
atttatgcaagcattacagctattatttgaagtggaacaagagattagaacgttttcgtt

SEQ ID NO: 73048 - DNA, 60 bp, Artificial
  Synthetic oligonucleotide
tggcaaagacataatggattcccacactgtgtcaagctttcaggtagattgcttcctttg

SEQ ID NO: 73049 - DNA, 60 bp, Artificial
  Synthetic oligonucleotide
tctcggggggctatatgaagcaattgaggagtgcctgattaatgatccctgggttttgct

SEQ ID NO: 73050 - DNA, 60 bp, Artificial
  Synthetic oligonucleotide
tgcagcaatatgcacccacctggaggtatgtttcatgtattcagattttcatttcatcaa

SEQ ID NO: 73051 - DNA, 60 bp, Artificial
  Synthetic oligonucleotide
agagacataagcgatttgaagcaatatgatagtgacgaacctgaattaagatcactttca

SEQ ID NO: 73052 - DNA, 60 bp, Artificial
  Synthetic oligonucleotide
gaagatctcatttaaggaatgacacagatgtggtaaactttgtgagcatggagttttctc

SEQ ID NO: 73053 - DNA, 60 bp, Artificial
  Synthetic oligonucleotide
gatgtaagcgatttgaagcaatatgatagtgacgaacctgaattaaggtcattttcaagt

SEQ ID NO: 73054 - DNA, 60 bp, Artificial
  Synthetic oligonucleotide
ctgcagagacataagcgatttgaagcaatatgatagtgacgaacctgaattaaggtcact

SEQ ID NO: 73055 - DNA, 60 bp, Artificial
  Synthetic oligonucleotide
gcgatttgaagcaatatgatagtgacgaacctgaattaaggtcactttcaagctgggtac

SEQ ID NO: 73056 - DNA, 60 bp, Artificial
  Synthetic oligonucleotide
gcgatttgaagcaatatgatagtgacgaacctgaattaaggtcactttcaatctggatac

SEQ ID NO: 73057 - DNA, 60 bp, Artificial
  Synthetic oligonucleotide
gcgatttgaagcaatatgatagtgacgaacctgaattaagatcactttcaagctggatac

SEQ ID NO: 73058 - DNA, 60 bp, Artificial
  Synthetic oligonucleotide
caccccagcgcggggaaagatcctaagaaaactggagggcccatatacaaaagagtagat

SEQ ID NO: 73059 - DNA, 60 bp, Artificial
  Synthetic oligonucleotide
ccccagcgcggggaaagatcctaagaaaactggagggcccatatacaaaagagtggatgg

SEQ ID NO: 73060 - DNA, 60 bp, Artificial
  Synthetic oligonucleotide
ggaacttatgaccatgatgtatacagagacgaagcattaaacaaccggttccagatcaaa

SEQ ID NO: 73061 - DNA, 60 bp, Artificial
  Synthetic oligonucleotide
tctatggagtaaaatgagtgatgctggatcagatcgagtgatggtatcacctttggctgt

SEQ ID NO: 73062 - DNA, 60 bp, Artificial
  Synthetic oligonucleotide
gaaatggttccggagagaaatgaacaaggacaaactctatggagtaaaatgagtgatgct

SEQ ID NO: 73063 - DNA, 60 bp, Artificial
  Synthetic oligonucleotide
ggtcccggagagaaatgaacaaggacaaactctatggagtaaaatgagtgatgctggatc

SEQ ID NO: 73064 - DNA, 60 bp, Artificial
  Synthetic oligonucleotide
gtggccatggtgttttcacaagaggattgcatggtaaaagcagttagaggtgacctgaat

SEQ ID NO: 73065 - DNA, 60 bp, Artificial
  Synthetic oligonucleotide
ggtggggaaaagagcaacagctatactcagaaaagcaaccagaagattggtccagctcat

SEQ ID NO: 73066 - DNA, 60 bp, Artificial
  Synthetic oligonucleotide
agatacgccgaagagtagacataaaccctggtcatgcagacctcagtgccaaggaggcac

SEQ ID NO: 73067 - DNA, 60 bp, Artificial
  Synthetic oligonucleotide
aaaataagagtacatgaggggtatgaggagttcacaatggtggggaaaagagcaacagct

SEQ ID NO: 73068 - DNA, 60 bp, Artificial
  Synthetic oligonucleotide
gataacagaaacggttccggagagaaatgaacaaggacaaactctatggagtaaaatgag

SEQ ID NO: 73069 - DNA, 60 bp, Artificial
  Synthetic oligonucleotide
ctttattggagatgtgccacagcacacaaattggcgggacaagaatggtggacattctta

SEQ ID NO: 73070 - DNA, 60 bp, Artificial
  Synthetic oligonucleotide
aagagttcacaatggtggggaaaagagcaacagctatactcagaaaagcaaccagaagat

SEQ ID NO: 73071 - DNA, 60 bp, Artificial
  Synthetic oligonucleotide
gcaaagcagaatgcagttctcttcattgactgtaaatgtgaggggatcagggatgagaat

SEQ ID NO: 73072 - DNA, 60 bp, Artificial
  Synthetic oligonucleotide
aatgtgaggggatcagggatgagaatacttgtaaggggcaattctcccgtattcaactac

SEQ ID NO: 73073 - DNA, 60 bp, Artificial
  Synthetic oligonucleotide
cagttctcttcattgactgtaaatgtgaggggatcagggatgagaatacttgtaaggggc

SEQ ID NO: 73074 - DNA, 60 bp, Artificial
  Synthetic oligonucleotide
atgcaattctcgtcattaactgtgaatgtgaggggatcaggaatgagaatacttgtgagg

SEQ ID NO: 73075 - DNA, 60 bp, Artificial
  Synthetic oligonucleotide
tgaacaaggacaaacactatggagtaaagtgaacgatgccggatcagaccgagtgatgat

SEQ ID NO: 73076 - DNA, 60 bp, Artificial
  Synthetic oligonucleotide
taagaggacaagtggatcatcagtcaaaagggaggaagaagtgctcacgggcaatctgca

SEQ ID NO: 73077 - DNA, 60 bp, Artificial
  Synthetic oligonucleotide
ccggaaacaagttgtagaccaagaactgagtgatgccccattccttgatcggctccgccg

SEQ ID NO: 73078 - DNA, 60 bp, Artificial
  Synthetic oligonucleotide
gactgatgggagtgcttcaggaaaagctgatactaaaatactattcattgaggaggggaa

SEQ ID NO: 73079 - DNA, 60 bp, Artificial
  Synthetic oligonucleotide
atgactgatgggagtgcttcaggaaaagctgatactaaaatactattcattgaggagggg

SEQ ID NO: 73080 - DNA, 60 bp, Artificial
  Synthetic oligonucleotide
ggattctaacactgtgtcaagtttccaggtagattgctttctttggcatatccggaaaca

SEQ ID NO: 73081 - DNA, 60 bp, Artificial
  Synthetic oligonucleotide
aaaatgaaaggactttggacttccatgactccaacgtgaagaatctgtatgagaaagtaa

SEQ ID NO: 73082 - DNA, 60 bp, Artificial
  Synthetic oligonucleotide
aatgaaaggactttggacttccatgactccaacgtgaagaatctgtatgagaaagtaaaa

SEQ ID NO: 73083 - DNA, 60 bp, Artificial
  Synthetic oligonucleotide
caaacaaggtgaattctgtaattgagaaaatgaacactcaattcacagctgtgggcaaag

SEQ ID NO: 73084 - DNA, 50 bp, Artificial
  Synthetic oligonucleotide
cacagctgtgggcaaagaattcaacaaattggaaagaaggatggaaaact

SEQ ID NO: 73085 - DNA, 60 bp, Artificial
  Synthetic oligonucleotide
gtgttttgaattctatcacaagtgtaacgatgaatgcatggagagtgtgaaaaatggaac

SEQ ID NO: 73086 - DNA, 60 bp, Artificial
  Synthetic oligonucleotide
gcagaagattcaccccagaaatagccaaaagacccaaggtaagagatcaggaaggaagga

SEQ ID NO: 73087 - DNA, 60 bp, Artificial
  Synthetic oligonucleotide
aaaactatgtctactaaaaggaatagccccactacaattgggtaattgcagcgttgccgg

SEQ ID NO: 73088 - DNA, 60 bp, Artificial
  Synthetic oligonucleotide
gaaaagcagtttttacagaaatttactatggctgacggggaagaatggtttgtatccaaa

SEQ ID NO: 73089 - DNA, 60 bp, Artificial
  Synthetic oligonucleotide
cagaaatttactatggctgacggggaagaatggtttgtatccaaatctgagcaagtccta

SEQ ID NO: 73090 - DNA, 60 bp, Artificial
  Synthetic oligonucleotide
tgtatccaaatctgagcaagtcctatgcaaacaacaaagagaaagaagtccttgtactgt

SEQ ID NO: 73091 - DNA, 60 bp, Artificial
  Synthetic oligonucleotide
gcaagtcctatgcaaacaacaaagagaaagaagtccttgtactgtggggtgttcatcacc

SEQ ID NO: 73092 - DNA, 60 bp, Artificial
  Synthetic oligonucleotide
gctaccatgccaacaactcgaccgacactgttgacacagtacttgagaagaatgtgacag

SEQ ID NO: 73093 - DNA, 60 bp, Artificial
  Synthetic oligonucleotide
gccaacaactcgaccgacactgttgacacagtacttgagaagaatgtgacagtgacacac

SEQ ID NO: 73094 - DNA, 60 bp, Artificial
  Synthetic oligonucleotide
cttgtactgtggggtgttcatcacccgcctaacataggggaccaaagggccctctatcat

SEQ ID NO: 73095 - DNA, 60 bp, Artificial
  Synthetic oligonucleotide
ctgtggggtgttcatcacccgcctaacataggggaccaaagggccctctatcatacagaa

SEQ ID NO: 73096 - DNA, 60 bp, Artificial
  Synthetic oligonucleotide
agtagaggctttggatcaggaatcatcacctcaaatgcaccaatggatgaatgtgatgcg

SEQ ID NO: 73097 - DNA, 60 bp, Artificial
  Synthetic oligonucleotide
ggaaggatcaactactactggactctgctggaacccggggatacaataatatttgaggca

SEQ ID NO: 73098 - DNA, 60 bp, Artificial
  Synthetic oligonucleotide
cgaagtgtcaaacacctcagggagctataaacagcagtcttcctttccagaatgtacacc

SEQ ID NO: 73099 - DNA, 60 bp, Artificial
  Synthetic oligonucleotide
atgtgatgcgaagtgtcaaacacctcagggagctataaacagcagtcttcctttccagaa

SEQ ID NO: 73100 - DNA, 60 bp, Artificial
  Synthetic oligonucleotide
ggcccaaccacaccgtaaccggagtatcagcatcatgctcccataacgggaaaagcagtt

SEQ ID NO: 73101 - DNA, 60 bp, Artificial
  Synthetic oligonucleotide
tggcccaaccacaccgtaaccggagtatcagcatcatgctcccataacgggaaaagcagt

SEQ ID NO: 73102 - DNA, 58 bp, Artificial
  Synthetic oligonucleotide
ttaggaaacccagaatgcgaattactgatttccaaggaatcatggtcctacattgtag

SEQ ID NO: 73103 - DNA, 60 bp, Artificial
  Synthetic oligonucleotide
gttcagtatcttcatttgagaggttcgaaatattccccaaagagagctcatggcccaacc

SEQ ID NO: 73104 - DNA, 60 bp, Artificial
  Synthetic oligonucleotide
cccagggtatttcgccgactatgaggagctgagggagcaattgagttcagtatcttcatt

SEQ ID NO: 73105 - DNA, 60 bp, Artificial
  Synthetic oligonucleotide
atgttacccagggtatttcgccgactatgaggagctgagggagcaattgagttcagtatc

SEQ ID NO: 73106 - DNA, 60 bp, Artificial
  Synthetic oligonucleotide
gaaggaaggatcaactactactggactctgctggaacccggggatacaataatatttgag

SEQ ID NO: 73107 - DNA, 60 bp, Artificial
  Synthetic oligonucleotide
ccaatgacaaaccatttcaaaatgtaaacaggatcacatatgggctctgtcccagatatg

SEQ ID NO: 73108 - DNA, 60 bp, Artificial
  Synthetic oligonucleotide
caatcacgaatgaccaaattgaagttactaatgctactgagctggttcagagttcctcaa

SEQ ID NO: 73109 - DNA, 60 bp, Artificial
  Synthetic oligonucleotide
ttgttgaacgcagcacagcctacagcaactgttacccttatgatgtgccggattatgcct

SEQ ID NO: 73110 - DNA, 60 bp, Artificial
  Synthetic oligonucleotide
tgaacgcagcagagcctacagcaactgttacccttatgatgtgccggattatgcctccct

SEQ ID NO: 73111 - DNA, 60 bp, Artificial
  Synthetic oligonucleotide
ttggacaatagtaaaaccgggagacatacttttgattaacagcacagggaatctaattgc

SEQ ID NO: 73112 - DNA, 60 bp, Artificial
  Synthetic oligonucleotide
ccggcacactggagtttaacaatgaaagcttcaattggactggagtcactcaaaatggaa

SEQ ID NO: 73113 - DNA, 60 bp, Artificial
  Synthetic oligonucleotide
agtcctcaccaaatccttgatggagaaaactgcacactaatagatgctctattgggagac

SEQ ID NO: 73114 - DNA, 60 bp, Artificial
  Synthetic oligonucleotide
ggcgttgagctgaagtcaggatacaaagattggatcctatggatttcctttgccatatca

SEQ ID NO: 73115 - DNA, 60 bp, Artificial
  Synthetic oligonucleotide
ctctatcgtcccgtcaggccccctcaaagccgagatcgcgcagagacttgaggatgtctt

SEQ ID NO: 73116 - DNA, 57 bp, Artificial
  Synthetic oligonucleotide
gcaattgaggagtgcctgattaatgatccctgggttttgctcaatgcatcttggttc

SEQ ID NO: 73117 - DNA, 60 bp, Artificial
  Synthetic oligonucleotide
gcagggaagaatacagaccttgaggctctcatggaatggctaaagacaagaccaatcctg

SEQ ID NO: 73118 - DNA, 60 bp, Artificial
  Synthetic oligonucleotide
aggatgtctttgcagggaagaatacagaccttgaggctctcatggaatggctaaagacaa

SEQ ID NO: 73119 - DNA, 60 bp, Artificial
  Synthetic oligonucleotide
ccggaaacaagttgtagaccaagaactgaatgatgccccattccttgatcggcttcgccg

SEQ ID NO: 73120 - DNA, 60 bp, Artificial
  Synthetic oligonucleotide
ggatgggggctgtaaccactgaagtggcatttggcctggtatgtgcaacatgtgagcaga

SEQ ID NO: 73121 - DNA, 60 bp, Artificial
  Synthetic oligonucleotide
cagcgtagacgctttgtccaaaatgccctcaatggaaatggggatccaaataacatggac

SEQ ID NO: 73122 - DNA, 60 bp, Artificial
  Synthetic oligonucleotide
agttgcatgggcctcatatacaataggatgggggctgtaaccactgaagtggcatttggc

SEQ ID NO: 73123 - DNA, 60 bp, Artificial
  Synthetic oligonucleotide
ggaatggagatccaaataacatggacaaagcagttaaactgtataggaaacttaagaggg

SEQ ID NO: 73124 - DNA, 60 bp, Artificial
  Synthetic oligonucleotide
ctcatatacaataggatgggggctgtaaccactgaagtggcatttggcctggtatgtgca

SEQ ID NO: 73125 - DNA, 60 bp, Artificial
  Synthetic oligonucleotide
cgctcaccgtgcccagtgaacgaggactgcagcgtagacgctttgtccaaaatgccctca

SEQ ID NO: 73126 - DNA, 60 bp, Artificial
  Synthetic oligonucleotide
tgggaaaaacacagatcttgaggctctcatggaatggttaaagacaagaccaattctgtc

SEQ ID NO: 73127 - DNA, 60 bp, Artificial
  Synthetic oligonucleotide
gggccttctacggaaggagtacctgagtctatgagggaagaatatcgaaaggaacagcag

SEQ ID NO: 73128 - DNA, 60 bp, Artificial
  Synthetic oligonucleotide
atacttaccgacagccagacagcgaccaaaagaattcggatggccatcaattaatgttga

SEQ ID NO: 73129 - DNA, 60 bp, Artificial
  Synthetic oligonucleotide
tctagcatacttactgacagccagacagcgaccaaaagaattcggatggccatcaattaa

SEQ ID NO: 73130 - DNA, 60 bp, Artificial
  Synthetic oligonucleotide
catacttactgacagccagacagcgaccaaaagaattcggatggccatcaattaatgttg

SEQ ID NO: 73131 - DNA, 60 bp, Artificial
  Synthetic oligonucleotide
gggttacttcaaaatacgaagtgggaaaagctcaataatgaggtcagatgcacccattga

SEQ ID NO: 73132 - DNA, 60 bp, Artificial
  Synthetic oligonucleotide
ttgctgggaaaaacacagatcttgaggctctcatggaatggctaaagacaagaccaattc

SEQ ID NO: 73133 - DNA, 60 bp, Artificial
  Synthetic oligonucleotide
ctgggaaaaacacagatcttgaggctctcatggaatggctaaagacaagaccaattctgt

SEQ ID NO: 73134 - DNA, 60 bp, Artificial
  Synthetic oligonucleotide
gggaaaaacacagatcttgaggctctcatggaatggctaaagacaagaccaattctgtca

SEQ ID NO: 73135 - DNA, 60 bp, Artificial
  Synthetic oligonucleotide
agaccaattctgtcacctctgactaaggggattttggggtttgtgttcacgctcaccgtg

SEQ ID NO: 73136 - DNA, 60 bp, Artificial
  Synthetic oligonucleotide
cttggagaagcagtaatgagaatgggggacctccacttactccaaaacagaaacggaaaa

SEQ ID NO: 73137 - DNA, 60 bp, Artificial
  Synthetic oligonucleotide
ggtctcacagctaatgaatcgggaaggctaatagatttcctcaaggatgtgatggaatca

SEQ ID NO: 73138 - DNA, 60 bp, Artificial
  Synthetic oligonucleotide
acatatatcacaaaaaatcaacctgagtggttcagaaacatcctgagcatcgcaccaata

SEQ ID NO: 73139 - DNA, 60 bp, Artificial
  Synthetic oligonucleotide
caccccaactcaacccaattgatggaccactacctgaggataatgagccaagcggatatg

SEQ ID NO: 73140 - DNA, 60 bp, Artificial
  Synthetic oligonucleotide
caccccaactcaacccaattgatggaccactacctgaggataatgagccaaatggatatg

SEQ ID NO: 73141 - DNA, 60 bp, Artificial
  Synthetic oligonucleotide
atgatgccgttgcaactacacactcctggattcccaagaggaaccgatctattctcaaca

SEQ ID NO: 73142 - DNA, 60 bp, Artificial
  Synthetic oligonucleotide
gcacaaaatgccataagcaccacattcccttatactggagatcctccatacagccatgga

SEQ ID NO: 73143 - DNA, 60 bp, Artificial
  Synthetic oligonucleotide
caccccaactcaacccaattgatggaccactacctgaggataatgagccaagtggatacg

SEQ ID NO: 73144 - DNA, 60 bp, Artificial
  Synthetic oligonucleotide
ccgttgcaactacacactcctggattcccaagaggaaccgatctattctcaacacaagcc

SEQ ID NO: 73145 - DNA, 60 bp, Artificial
  Synthetic oligonucleotide
ctgcaacttgttcgagaaatttttccctagtagttcatataggagaccgattggaatttc

SEQ ID NO: 73146 - DNA, 60 bp, Artificial
  Synthetic oligonucleotide
gatgccaacccatggtccagccaaaagtatggaatatgatgccgttgcaactacacactc

SEQ ID NO: 73147 - DNA, 60 bp, Artificial
  Synthetic oligonucleotide
cccaactcaacccaattgatggaccactacctgaggataatgagccaagtggatacgcac

SEQ ID NO: 73148 - DNA, 60 bp, Artificial
  Synthetic oligonucleotide
cccaactcaacccaattgatggaccactacctgaggataatgagccaaatggatatgcac

SEQ ID NO: 73149 - DNA, 60 bp, Artificial
  Synthetic oligonucleotide
cccaactcaacccaattgatggaccactacctgaggataatgagccaagcggatatgcac

SEQ ID NO: 73150 - DNA, 60 bp, Artificial
  Synthetic oligonucleotide
ggggcaccccaactcaacccaattgatggaccactacctgaggataatgagccaagtgga

SEQ ID NO: 73151 - DNA, 60 bp, Artificial
  Synthetic oligonucleotide
ggggccaaagagatagcactcagttattctgctggtgcacttgccagttgcatgggcctc

SEQ ID NO: 73152 - DNA, 60 bp, Artificial
  Synthetic oligonucleotide
ctctcagttattctgctggtgcacttgccagttgcatgggcctcatatacaataggatgg

SEQ ID NO: 73153 - DNA, 60 bp, Artificial
  Synthetic oligonucleotide
agctctcagttattctgctggtgcacttgccagttgcatgggcctcatatacaatagaat

SEQ ID NO: 73154 - DNA, 59 bp, Artificial
  Synthetic oligonucleotide
tcagttattctgctggtgcacttgccagttgcatgggcctcatatacaataggatgggg

SEQ ID NO: 73155 - DNA, 60 bp, Artificial
  Synthetic oligonucleotide
tcagttattctgctggtgcacttgccagttgcatgggcctcatatacaataggatggggg

SEQ ID NO: 73156 - DNA, 60 bp, Artificial
  Synthetic oligonucleotide
tctcagttattctgctggtgcacttgccagttgcatgggcctcatatacaataggatggg

SEQ ID NO: 73157 - DNA, 60 bp, Artificial
  Synthetic oligonucleotide
acgaagagccgcagtatcagcagatccactagcatctttattggagatgtgccatagcac

SEQ ID NO: 73158 - DNA, 60 bp, Artificial
  Synthetic oligonucleotide
agccgcagtatcagcagatccactagcatctttattggagatgtgccacagcacacaaat

SEQ ID NO: 73159 - DNA, 60 bp, Artificial
  Synthetic oligonucleotide
tatagcattgtttccagttatgtgtgctcaggacttgttggagacacacccagaaaaaat

SEQ ID NO: 73160 - DNA, 60 bp, Artificial
  Synthetic oligonucleotide
gaggagtgctcctgttatcctcgatatcctggtgtcagatgtgtctgcagagacaattgg

SEQ ID NO: 73161 - DNA, 60 bp, Artificial
  Synthetic oligonucleotide
gagaaggaaatatgccccaaactagcagaatacagaaattggtcaaagccgcaatgtaac

SEQ ID NO: 73162 - DNA, 60 bp, Artificial
  Synthetic oligonucleotide
tagagaaggaaatatgccccaaactagcagaatacagaaattggtcaaagccgcaatgta

SEQ ID NO: 73163 - DNA, 60 bp, Artificial
  Synthetic oligonucleotide
gcatgtcgaggagtgctcctgctatcctcgatatcctggtgtcagatgtgtctgcagaga

SEQ ID NO: 73164 - DNA, 60 bp, Artificial
  Synthetic oligonucleotide
agtgcctgattaatgatccctgggttttgctcaatgcatcttggttcaactccttcctta

SEQ ID NO: 73165 - DNA, 60 bp, Artificial
  Synthetic oligonucleotide
catttcatggggccaaagaaatagcactcagttattctgctggtgcacttgccagttgca

SEQ ID NO: 73166 - DNA, 60 bp, Artificial
  Synthetic oligonucleotide
cgttccatggggccaaagaaatagcactcagttattctgctggtgcacttgccagttgca

SEQ ID NO: 73167 - DNA, 60 bp, Artificial
  Synthetic oligonucleotide
cattccatggggccaaagagatagcactcagttattctgctggtgcacttgccagttgca

SEQ ID NO: 73168 - DNA, 60 bp, Artificial
  Synthetic oligonucleotide
cattccatggggccaaggaaatagcactcagttattctgctggtgcacttgccagttgca

SEQ ID NO: 73169 - DNA, 60 bp, Artificial
  Synthetic oligonucleotide
ggagacgtggtgttggtgatgaaacgaaaacgggactctagcatacttactgacagccag

SEQ ID NO: 73170 - DNA, 60 bp, Artificial
  Synthetic oligonucleotide
tctacggaaggagtgcctgagtctatgagggaagaatatcgaaaggaacagcagaatgct

SEQ ID NO: 73171 - DNA, 60 bp, Artificial
  Synthetic oligonucleotide
ctgggatttgtgttcacgctcaccgtgcccagtgagcgaggactgcagcgtagacgcttt

SEQ ID NO: 73172 - DNA, 60 bp, Artificial
  Synthetic oligonucleotide
aaaagaacccgtcacttaggatgaaatggatgatggcaatgaaatacccaatcactgctg

SEQ ID NO: 73173 - DNA, 50 bp, Artificial
  Synthetic oligonucleotide
gaccatagtattactaagggctttcaccgaagagggagcaattgttggcg

SEQ ID NO: 73174 - DNA, 60 bp, Artificial
  Synthetic oligonucleotide
aagtcgaaaggttaaaacatggaacctttggccctgttcattttagaaaccaagtcaaga

SEQ ID NO: 73175 - DNA, 60 bp, Artificial
  Synthetic oligonucleotide
gacggttggtacggtttcaggcatcaaaattccgagggcacaggacaagcagcagatctt

SEQ ID NO: 73176 - DNA, 60 bp, Artificial
  Synthetic oligonucleotide
ggaggtcatggagtgaaaggctgggcctttgatgatggaaatgacgtgtggatgggaaga

SEQ ID NO: 73177 - DNA, 60 bp, Artificial
  Synthetic oligonucleotide
aaggaggtcatggagtgaaaggctgggcctttgatgatggaaatgacgtgtggatgggaa

SEQ ID NO: 73178 - DNA, 60 bp, Artificial
  Synthetic oligonucleotide
aaggtggtcatggagtgaaaggctgggcctttgatgatggaaatgacgcgtggatgggaa

SEQ ID NO: 73179 - DNA, 60 bp, Artificial
  Synthetic oligonucleotide
gaggaaggtggtcatggagtgaaaggctgggcctttgatgatggaaatgacgtgtggatg

SEQ ID NO: 73180 - DNA, 60 bp, Artificial
  Synthetic oligonucleotide
atgaatggatgtcaatccgacattacttttcttaaaagtgccagcacaaaatgctataag

SEQ ID NO: 73181 - DNA, 60 bp, Artificial
  Synthetic oligonucleotide
cgtctccattctgaatctcgggcaaaagagatacaccaagactacatactggtgggatgg

SEQ ID NO: 73182 - DNA, 60 bp, Artificial
  Synthetic oligonucleotide
ggcgtctccattctgaatctcgggcaaaagagatacaccaagactacatactggtgggat

SEQ ID NO: 73183 - DNA, 52 bp, Artificial
  Synthetic oligonucleotide
aaaataccgaaactggagcaccgcaactcaacccaattgatgggccactacc

SEQ ID NO: 73184 - DNA, 60 bp, Artificial
  Synthetic oligonucleotide
tcaacccaattgatgggccactaccagaagacaatgaaccaagtggctatgcccaaacag

SEQ ID NO: 73185 - DNA, 60 bp, Artificial
  Synthetic oligonucleotide
gacaggaacagggtacaccatggatacagtcaacaggacacaccagtactcagaaagagg

SEQ ID NO: 73186 - DNA, 52 bp, Artificial
  Synthetic oligonucleotide
agcaagagtatgaaactgagaactcaaatacctgcagagatgctagccaaca

SEQ ID NO: 73187 - DNA, 60 bp, Artificial
  Synthetic oligonucleotide
cctgaatggttcagaaatattctaagtattgctccaataatgttttcaaacaagatggcg

SEQ ID NO: 73188 - DNA, 60 bp, Artificial
  Synthetic oligonucleotide
gcccaaacagattgtgtactagaagcaatggctttccttgaagaatcccatcctggtatc

SEQ ID NO: 73189 - DNA, 60 bp, Artificial
  Synthetic oligonucleotide
tcctggtatctttgaaaactcttgtattgaaacaatggaggttgttcagcaaacaagggt

SEQ ID NO: 73190 - DNA, 52 bp, Artificial
  Synthetic oligonucleotide
ttgtaaggaagatgatgaccaactcccaggacactgaaatttctttcaccat

SEQ ID NO: 73191 - DNA, 60 bp, Artificial
  Synthetic oligonucleotide
gacacacaaatacaaacccggagatcatttgagataaagaaactatgggaccaaacccgc

SEQ ID NO: 73192 - DNA, 55 bp, Artificial
  Synthetic oligonucleotide
accaggggcgtttatgcaacccattaaacccgtttgtcagccataaagagattga

SEQ ID NO: 73193 - DNA, 60 bp, Artificial
  Synthetic oligonucleotide
gcaacaacacactcctgggtccccaaaagaaatcgatccattttgaacacgagccaaagg

SEQ ID NO: 73194 - DNA, 60 bp, Artificial
  Synthetic oligonucleotide
aacaacacactcctgggtccccaaaagaaatcgatccattttgaacacgagccaaagggg

SEQ ID NO: 73195 - DNA, 60 bp, Artificial
  Synthetic oligonucleotide
aaccaaaaatcagcctgaatggttcagaaatattctaagtattgctccaataatgttttc

SEQ ID NO: 73196 - DNA, 60 bp, Artificial
  Synthetic oligonucleotide
atcaggattgccagttggaggaaatgagaagaaagcaaagttagcaaatgttgtaaggaa

SEQ ID NO: 73197 - DNA, 60 bp, Artificial
  Synthetic oligonucleotide
agttacctaattagggcattaaccctgaacacaatgaccaaagatgctgagagggggaaa

SEQ ID NO: 73198 - DNA, 52 bp, Artificial
  Synthetic oligonucleotide
attcagatcaaacggcctcatagcaaatgaatctgggaggctaatagacttc

SEQ ID NO: 73199 - DNA, 60 bp, Artificial
  Synthetic oligonucleotide
aaacaagggtggacaaactgacacaaggcagacagacctatgactggactctaaatagga

SEQ ID NO: 73200 - DNA, 60 bp, Artificial
  Synthetic oligonucleotide
aaactcttgtattgaaacaatggaggttgttcagcaaacaagggtggacaaactgacaca

SEQ ID NO: 73201 - DNA, 60 bp, Artificial
  Synthetic oligonucleotide
ctaaataggaaccagcctgctgccacagcattggcaaacactatagaagtattcagatca

SEQ ID NO: 73202 - DNA, 60 bp, Artificial
  Synthetic oligonucleotide
aacagctgcacaaagagcaatggtggatcaagtgagagaaagtcggaacccaggaaatgc

SEQ ID NO: 73203 - DNA, 60 bp, Artificial
  Synthetic oligonucleotide
caaatggaaactgatggggatcgccagaatgcaactgagattaggtcatccgtcgggaag

SEQ ID NO: 73204 - DNA, 60 bp, Artificial
  Synthetic oligonucleotide
cggaatttctggagaggtgaaaatgggcggaaaacaagaagtgcttatgagagaatgtgc

SEQ ID NO: 73205 - DNA, 60 bp, Artificial
  Synthetic oligonucleotide
cttatgaacagatggaaactgatggggatcgccagaatgcaactgagattaggtcatccg

SEQ ID NO: 73206 - DNA, 60 bp, Artificial
  Synthetic oligonucleotide
atgaacagatggaaactgatggggatcgccagaatgcaactgagattaggtcatccgtcg

SEQ ID NO: 73207 - DNA, 60 bp, Artificial
  Synthetic oligonucleotide
aatttctggagaggtgaaaatgggcggaaaacaagaagtgcttatgagagaatgtgcaac

SEQ ID NO: 73208 - DNA, 60 bp, Artificial
  Synthetic oligonucleotide
tgcacaaagagcaatggtggatcaagtgagagaaagtcggaacccagggaatgctgagat

SEQ ID NO: 73209 - DNA, 60 bp, Artificial
  Synthetic oligonucleotide
ggggaatctgatgaggcacttaaaatgaccatggcctccacacctgcttcgcgatacata

SEQ ID NO: 73210 - DNA, 56 bp, Artificial
  Synthetic oligonucleotide
gggcctgccaaaaaggcaacattaggtgcaacatttgcatttgattgcattaatta

SEQ ID NO: 73211 - DNA, 60 bp, Artificial
  Synthetic oligonucleotide
gttgttttgctggggttcatcatgtgggcctgccaaaaaggcaacattaggtgcaacatt

SEQ ID NO: 73212 - DNA, 60 bp, Artificial
  Synthetic oligonucleotide
taatgcccaagcagaaagtggaaggacctctttgcatcagaatggaccaggcagtcatgg

SEQ ID NO: 73213 - DNA, 60 bp, Artificial
  Synthetic oligonucleotide
atgcccaagcagaaagtggaaggacctctttgcatcagaatggaccaggcaatcatggag

SEQ ID NO: 73214 - DNA, 60 bp, Artificial
  Synthetic oligonucleotide
aactggttcatgctaatgcccaagcagaaagtggaaggacctctttgcatcagaatggac

SEQ ID NO: 73215 - DNA, 60 bp, Artificial
  Synthetic oligonucleotide
actctgaaattggcaacagggatgcgaaatgtaccagagaaacaaactagaggcatattt

SEQ ID NO: 73216 - DNA, 60 bp, Artificial
  Synthetic oligonucleotide
gcaattggggtcctcatcggaggacttgaatggagtgataacacagttcgagtctctaag

SEQ ID NO: 73217 - DNA, 60 bp, Artificial
  Synthetic oligonucleotide
aaatatctggaagaacaccccagcgcggggaaagatcctaagaaaactggagggcccata

SEQ ID NO: 73218 - DNA, 60 bp, Artificial
  Synthetic oligonucleotide
agatatctagaagaacaccccagcgcggggaaagatcctaagaaaactggagggcccata

SEQ ID NO: 73219 - DNA, 60 bp, Artificial
  Synthetic oligonucleotide
ctggaagaacaccccagcgcggggaaagatcctaagaaaactggagggcccatatacaaa

SEQ ID NO: 73220 - DNA, 60 bp, Artificial
  Synthetic oligonucleotide
ggaagaacaccccagcgcggggaaagatcctaagaaaactggagggcccatatacaaaag

SEQ ID NO: 73221 - DNA, 60 bp, Artificial
  Synthetic oligonucleotide
aagaacatcccagcgcggggaaagatcctaagaaaactggagggcccatatacaagagag

SEQ ID NO: 73222 - DNA, 60 bp, Artificial
  Synthetic oligonucleotide
atatccggaaacaagttgtagaccaagaactgagtgatgctccattccttgatcggcttc

SEQ ID NO: 73223 - DNA, 60 bp, Artificial
  Synthetic oligonucleotide
ccgaagagggagcaattgttggcgaaatctcaccattgccttcttttccaggacatacta

SEQ ID NO: 73224 - DNA, 60 bp, Artificial
  Synthetic oligonucleotide
accgaagagggagcaattgttggcgaaatctcaccattgccttcttttccaggacatact

SEQ ID NO: 73225 - DNA, 51 bp, Artificial
  Synthetic oligonucleotide
tgtgtttacgctcaccgtgcccagtgagcgaggactgcagcgtagacgctt

SEQ ID NO: 73226 - DNA, 56 bp, Artificial
  Synthetic oligonucleotide
acaagttgtagaccaagaactgagtgatgccccattccttgatcggcttcgccgag

SEQ ID NO: 73227 - DNA, 58 bp, Artificial
  Synthetic oligonucleotide
taagtctatgagggaagaatatcgaaaggaacagcagaatgctgtggatgctgacgac

SEQ ID NO: 73228 - DNA, 60 bp, Artificial
  Synthetic oligonucleotide
tctcatggaatggctaaagacaagaccaattctgtcacctctgactaaggggattttggg

SEQ ID NO: 73229 - DNA, 60 bp, Artificial
  Synthetic oligonucleotide
ctcatggaatggctaaagacaagatcaatcctgtcacctctgactaaggggattttgggg

SEQ ID NO: 73230 - DNA, 60 bp, Artificial
  Synthetic oligonucleotide
tctgaagggggaatctgatgaggcacttaaaatgaccatggcctccacacctgcttcgcg

SEQ ID NO: 73231 - DNA, 60 bp, Artificial
  Synthetic oligonucleotide
aagaagaatccgatgaggcacttaaaatgaccatggcctccgcacttgcttcgcggtacc

SEQ ID NO: 73232 - DNA, 60 bp, Artificial
  Synthetic oligonucleotide
gatatgagtaatgaaggatcttatttcttcggagacaatgcagaagagtacgacaattaa

SEQ ID NO: 73233 - DNA, 59 bp, Artificial
  Synthetic oligonucleotide
catgagtaatgaaggatcttatttcttcggagacaatgcagaagagtacgacaattaag

SEQ ID NO: 73234 - DNA, 60 bp, Artificial
  Synthetic oligonucleotide
tggaaatacggagggaagaacctcagacatgagggcagaaatcataagaatgatggaaag

SEQ ID NO: 73235 - DNA, 60 bp, Artificial
  Synthetic oligonucleotide
tggaaacacggagggaagaacctcagacatgagggcagaaatcataagaatgatggaagg

SEQ ID NO: 73236 - DNA, 60 bp, Artificial
  Synthetic oligonucleotide
ggagggaagaacctcagacatgagggcagaaatcataagaatgatggaaagtgcaaaacc

SEQ ID NO: 73237 - DNA, 60 bp, Artificial
  Synthetic oligonucleotide
atgttttttgctttgtgttgtcttgctggggttcatcatgtgggcctgccaaaaaggcaa

SEQ ID NO: 73238 - DNA, 60 bp, Artificial
  Synthetic oligonucleotide
atgttttttgctttgtgttgttttgttggggttcatcatgtgggcctgccaaaaaggcaa

SEQ ID NO: 73239 - DNA, 60 bp, Artificial
  Synthetic oligonucleotide
atgttttttgctttgtgttgctttgctggggttcatcatgtgggcctgccaaaaaggcaa

SEQ ID NO: 73240 - DNA, 60 bp, Artificial
  Synthetic oligonucleotide
ctatcgttccatcaggccccctcaaagccgagatcgcgcagagacttgaagatgtctttg

SEQ ID NO: 73241 - DNA, 56 bp, Artificial
  Synthetic oligonucleotide
cccctcaaagccgagatcgcgcagagacttgaggatgtctttgcagggaagaatac

SEQ ID NO: 73242 - DNA, 52 bp, Artificial
  Synthetic oligonucleotide
cccctcaaagccgagatcgcgcagagacttgaagatgtctttgctgggaaaa

SEQ ID NO: 73243 - DNA, 60 bp, Artificial
  Synthetic oligonucleotide
aggccccctcaaagccgagatcgcgcagagacttgaagatgtctttgctgggaaaaacac

SEQ ID NO: 73244 - DNA, 60 bp, Artificial
  Synthetic oligonucleotide
caggccccctcaaagccgagatcgcgcagagacttgaagatgtctttgctgggaaaaaca

SEQ ID NO: 73245 - DNA, 60 bp, Artificial
  Synthetic oligonucleotide
tcaggccccctcaaagccgagatcgcgcagagacttgaagatgtctttgctgggaaaaac

SEQ ID NO: 73246 - DNA, 60 bp, Artificial
  Synthetic oligonucleotide
atcaggccccctcaaagccgagatcgcgcagagacttgaagatgtctttgctgggaaaaa

SEQ ID NO: 73247 - DNA, 60 bp, Artificial
  Synthetic oligonucleotide
catcaggccccctcaaagccgagatcgcgcagagacttgaagatgtctttgctgggaaaa

SEQ ID NO: 73248 - DNA, 60 bp, Artificial
  Synthetic oligonucleotide
tccatcaggccccctcaaagccgagatcgcgcagagacttgaagatgtctttgctgggaa

SEQ ID NO: 73249 - DNA, 60 bp, Artificial
  Synthetic oligonucleotide
gagcaaggcgaatcaataatagtagagcctgaggacccaaatgcactcttaaaacacaga

SEQ ID NO: 73250 - DNA, 60 bp, Artificial
  Synthetic oligonucleotide
agaaattacttcacagctgaggtgtcccattgcagagccactgaatatataatgaagggg

SEQ ID NO: 73251 - DNA, 60 bp, Artificial
  Synthetic oligonucleotide
ttccattgggaaagtatgcaggacactattggctaagtcagtattcaatagtctgtatgc

SEQ ID NO: 73252 - DNA, 60 bp, Artificial
  Synthetic oligonucleotide
atgcgaactgaccgattcaatctggatagagctcgatgagattggagaagatgtggcccc

SEQ ID NO: 73253 - DNA, 60 bp, Artificial
  Synthetic oligonucleotide
tctggaacctgggacctttgatcttgggggattatatgaagcaattgaggagtgcctgat

SEQ ID NO: 73254 - DNA, 60 bp, Artificial
  Synthetic oligonucleotide
ggatccaaatcatgaaggggaaggaataccactatatgatgcaatcaagtgtatgagaac

SEQ ID NO: 73255 - DNA, 58 bp, Artificial
  Synthetic oligonucleotide
ctgtcatggaagcaggtattggaagagctgcaggacattgagagtgaggagaagattc

SEQ ID NO: 73256 - DNA, 60 bp, Artificial
  Synthetic oligonucleotide
cagctaaagtgggcacttggtgagaacatggcaccagagaaggtggattttgatgattgt

SEQ ID NO: 73257 - DNA, 60 bp, Artificial
  Synthetic oligonucleotide
ttgatgattgtaaagatgtaagcgatttgaagcaatatgatagtgacgaacctgaattaa

SEQ ID NO: 73258 - DNA, 60 bp, Artificial
  Synthetic oligonucleotide
cctgaattaaggtcattttcaagttggatccagaatgagttcaacaaggcatgcgaactg

SEQ ID NO: 73259 - DNA, 60 bp, Artificial
  Synthetic oligonucleotide
tgaagggcggttgatccagaacagcttaacaatagagagaatggtgctctctgcctttga

SEQ ID NO: 73260 - DNA, 60 bp, Artificial
  Synthetic oligonucleotide
gggcggttgatccagaacagcttaacaatagagagaatggtgctctctgcctttgatgag

SEQ ID NO: 73261 - DNA, 60 bp, Artificial
  Synthetic oligonucleotide
acaacatatcagaggacaagagctcttgttcgcaccggaatggatcccaggatgtgctct

SEQ ID NO: 73262 - DNA, 60 bp, Artificial
  Synthetic oligonucleotide
attaggtcatccgtcgggaagatgattgatggaattgggcgattctacatccaaatgtgc

SEQ ID NO: 73263 - DNA, 60 bp, Artificial
  Synthetic oligonucleotide
gctcagcatgttgaggagtgctcctgctatcctcgatatcctggtgtcagatgtgtctgc

SEQ ID NO: 73264 - DNA, 60 bp, Artificial
  Synthetic oligonucleotide
tgcccagcatgtcgaggagtgctcctgctatcctcgatatcctggtgtcagatgtgtctg

SEQ ID NO: 73265 - DNA, 60 bp, Artificial
  Synthetic oligonucleotide
tgctcagcatgtcgaggagtgctcctgctatcctcgatatcctggtgtcagatgtgtctg

SEQ ID NO: 73266 - DNA, 60 bp, Artificial
  Synthetic oligonucleotide
gctcagcatgttgaggagtgctcctgttatcctcgatatcctggtgtcagatgtgtctgc

SEQ ID NO: 73267 - DNA, 60 bp, Artificial
  Synthetic oligonucleotide
tgctcagcatgttgaggagtgctcctgctatcctcgatatcctggtgtcagatgtgtctg

SEQ ID NO: 73268 - DNA, 60 bp, Artificial
  Synthetic oligonucleotide
gctcagcacgtcgaggagtgctcctgttatcctcgatatcctggtgtcagatgtgtctgc

SEQ ID NO: 73269 - DNA, 60 bp, Artificial
  Synthetic oligonucleotide
ccaatcctgtcacctctgactaaggggattttgggatttgtgtttacgctcaccgtgccc

SEQ ID NO: 73270 - DNA, 60 bp, Artificial
  Synthetic oligonucleotide
tctcatggaatggctaaagacaagatcaatcctgtcacctctgactaaggggattttggg

SEQ ID NO: 73271 - DNA, 60 bp, Artificial
  Synthetic oligonucleotide
gcctaattattgcagccaggaacatagtaagaagagctgcagtatcagcagatccactag

SEQ ID NO: 73272 - DNA, 60 bp, Artificial
  Synthetic oligonucleotide
cagaatggaccaggcaatcatggagaaaaacatcatgttgaaagcgaatttcagtgtgat

SEQ ID NO: 73273 - DNA, 60 bp, Artificial
  Synthetic oligonucleotide
gatgaggcatttaaaatgaccatggtctccacacctgcttcgcgatacataactgacatg

SEQ ID NO: 73274 - DNA, 60 bp, Artificial
  Synthetic oligonucleotide
agaagaatctgatgaggcacttaaaatgaccatggtctccacacctgcttcgcgatacat

SEQ ID NO: 73275 - DNA, 60 bp, Artificial
  Synthetic oligonucleotide
gtggtgttagtaatgaaacgaaaacgggactctagcatacttaccgacagccagacagcg

SEQ ID NO: 73276 - DNA, 60 bp, Artificial
  Synthetic oligonucleotide
ttgggcaaggagacgtggtgttagtaatgaaacgaaaacgggactctagcatacttaccg

SEQ ID NO: 73277 - DNA, 60 bp, Artificial
  Synthetic oligonucleotide
tgaatggaatgataacacagttcgagtctctaaaaatctacagagattcgcttggagaag

SEQ ID NO: 73278 - DNA, 60 bp, Artificial
  Synthetic oligonucleotide
aatggattctaacactgtgtcaagtttccaggtagattgctttctttggcatatccggaa

SEQ ID NO: 73279 - DNA, 60 bp, Artificial
  Synthetic oligonucleotide
gcatccgtcgggaggatgattgatggaattgggcgattctacatccaaatgtgcactgaa

SEQ ID NO: 73280 - DNA, 60 bp, Artificial
  Synthetic oligonucleotide
gggcatccgtcgggaggatgattgatggaattgggcgattctacatccaaatgtgcactg

SEQ ID NO: 73281 - DNA, 60 bp, Artificial
  Synthetic oligonucleotide
agggcatccgtcgggaggatgattgatggaattgggcgattctacatccaaatgtgcact

SEQ ID NO: 73282 - DNA, 60 bp, Artificial
  Synthetic oligonucleotide
catccgtcgggaggatgattgatggaattgggcgattctacatccaaatgtgcactgaac

SEQ ID NO: 73283 - DNA, 60 bp, Artificial
  Synthetic oligonucleotide
gaggcacttaaaatgaccatggtctccacacctgcttcgcgatacataactgacatgact

SEQ ID NO: 73284 - DNA, 60 bp, Artificial
  Synthetic oligonucleotide
gcaatgagagccattgggactcatcctagctccagtactggtctaagagatgatcttctt

SEQ ID NO: 73285 - DNA, 60 bp, Artificial
  Synthetic oligonucleotide
tagagaggattctgaaagaagaatccgatgaggcacttaaaatgaccatggcctccgcac

SEQ ID NO: 73286 - DNA, 60 bp, Artificial
  Synthetic oligonucleotide
aagaagagccgcagtatcagcagatccactagcatctttattggaaatgtgccacagcac

SEQ ID NO: 73287 - DNA, 60 bp, Artificial
  Synthetic oligonucleotide
gtgcatagcatggtccagttcaagttgtcacgatggaaaagcatggctgcatgtttgtgt

SEQ ID NO: 73288 - DNA, 60 bp, Artificial
  Synthetic oligonucleotide
tgtgcatagcatggtccagttcaagttgtcacgatggaaaagcatggctgcatgtttgtg

SEQ ID NO: 73289 - DNA, 60 bp, Artificial
  Synthetic oligonucleotide
aaaatcttcaagatcgaaaaggggaaggttactaaatcaatagagttaaatgcacccaat

SEQ ID NO: 73290 - DNA, 60 bp, Artificial
  Synthetic oligonucleotide
gacagaagtccttatagggccctaatgagctgtcctctaggtgaagctccgtccccatac

SEQ ID NO: 73291 - DNA, 60 bp, Artificial
  Synthetic oligonucleotide
ggaaccgttaaggacagaagtccttatagggccctaatgagctgtcctctaggtgaagct

SEQ ID NO: 73292 - DNA, 50 bp, Artificial
  Synthetic oligonucleotide
ttcaaagtttgaatcagttgcatggtcagcaagcgcatgccatgatggca

SEQ ID NO: 73293 - DNA, 60 bp, Artificial
  Synthetic oligonucleotide
aggtgaagctccgtccccatacaattcaaagtttgaatcagttgcatggtcagcaagcgc

SEQ ID NO: 73294 - DNA, 50 bp, Artificial
  Synthetic oligonucleotide
ttttgtggcgttgatagtgatactgcaaactggtcttggccagacggtgc

SEQ ID NO: 73295 - DNA, 60 bp, Artificial
  Synthetic oligonucleotide
cgttcaacatcctgagttaacaggattggactgtataagaccttgcttctgggttgagtt

SEQ ID NO: 73296 - DNA, 60 bp, Artificial
  Synthetic oligonucleotide
acagtggaagtttcgttcaacatcctgagttaacaggattggactgtataagaccttgct

SEQ ID NO: 73297 - DNA, 59 bp, Artificial
  Synthetic oligonucleotide
aatcaaaaaataataaccattgggtcaatcagtatagcaatcggaataattagtctaat

SEQ ID NO: 73298 - DNA, 60 bp, Artificial
  Synthetic oligonucleotide
tgatttctcagtgaaacaggatgttgtggcaataactgattggtcagggtacagtggaag

SEQ ID NO: 73299 - DNA, 60 bp, Artificial
  Synthetic oligonucleotide
acaggatgttgtggcaataactgattggtcagggtacagtggaagtttcgttcaacatcc

SEQ ID NO: 73300 - DNA, 60 bp, Artificial
  Synthetic oligonucleotide
catctgcagtggagtgttcggtgacaatccgcgtcccaaagatggaaagggcagctgtaa

SEQ ID NO: 73301 - DNA, 60 bp, Artificial
  Synthetic oligonucleotide
cacagggaatctaattgctcctcggggttacttcaaaatacgaagtgggaaaagctcaat

SEQ ID NO: 73302 - DNA, 60 bp, Artificial
  Synthetic oligonucleotide
accaattctgtcacctctgactaaggggattttggggtttgtgttcacgctcaccgtgcc

SEQ ID NO: 73303 - DNA, 60 bp, Artificial
  Synthetic oligonucleotide
caattctgtcacctctgactaaggggattttggggtttgtgttcacgctcaccgtgccca

SEQ ID NO: 73304 - DNA, 60 bp, Artificial
  Synthetic oligonucleotide
aattctgtcacctctgactaaggggattttggggtttgtgttcacgctcaccgtgcccag

SEQ ID NO: 73305 - DNA, 60 bp, Artificial
  Synthetic oligonucleotide
aagtttctaccagatttgtatgattacaaggagaacagattcatcgaaattggggtgaca

SEQ ID NO: 73306 - DNA, 60 bp, Artificial
  Synthetic oligonucleotide
ccagatttgtatgattacaaggagaacagattcatcgaaattggagtgacaaggagagaa

SEQ ID NO: 73307 - DNA, 60 bp, Artificial
  Synthetic oligonucleotide
cgcattgttaaagcacagatttgaaataatcgaggggagagacagaacaatggcctggac

SEQ ID NO: 73308 - DNA, 60 bp, Artificial
  Synthetic oligonucleotide
gggaagatctcatttaaggaatgacacagatgtggtaaactttgtgagcatggaattttc

SEQ ID NO: 73309 - DNA, 60 bp, Artificial
  Synthetic oligonucleotide
aaaccgaagtttctaccagatttgtatgattacaaggagaacagattcatcgaaattgga

SEQ ID NO: 73310 - DNA, 60 bp, Artificial
  Synthetic oligonucleotide
gattcaccgaaattggagtgacaaggagagaagtccacatatattaccttgaaaaggcca

SEQ ID NO: 73311 - DNA, 60 bp, Artificial
  Synthetic oligonucleotide
tggggaggaaatggccacaaaggcagactacactctcgacgaggaaagcagggctagggt

SEQ ID NO: 73312 - DNA, 60 bp, Artificial
  Synthetic oligonucleotide
caccataaggcaagaaatggccaacagaggcctctgggattcctttcgtcagtccgaaag

SEQ ID NO: 73313 - DNA, 60 bp, Artificial
  Synthetic oligonucleotide
agctggatacagaatgagttcaacaaggcctgcgagctaactgattcaatctggatagag

SEQ ID NO: 73314 - DNA, 60 bp, Artificial
  Synthetic oligonucleotide
tgggttcatcataaagggaagatcccatttaaggaatgacacagatgtggtaaactttgt

SEQ ID NO: 73315 - DNA, 60 bp, Artificial
  Synthetic oligonucleotide
atatgttactaagaagtgccataggccaaatttcaaggcctatgttcttgtatgtgagga

SEQ ID NO: 73316 - DNA, 60 bp, Artificial
  Synthetic oligonucleotide
taagcatctattggacaatagtaaaaccgggagacatactgttaattaatagcaacggga

SEQ ID NO: 73317 - DNA, 60 bp, Artificial
  Synthetic oligonucleotide
agcatctattggacaatagtaaaaccgggagacatacttttgattaacagcacagggaat

SEQ ID NO: 73318 - DNA, 60 bp, Artificial
  Synthetic oligonucleotide
gcatctattggacaatagtaaaaccgggagacatacttttgattaactgcacagggaatc

SEQ ID NO: 73319 - DNA, 60 bp, Artificial
  Synthetic oligonucleotide
atctattggacaatagtaaaaccgggagacatacttttgattaacagcacagggaatcta

SEQ ID NO: 73320 - DNA, 60 bp, Artificial
  Synthetic oligonucleotide
agaataagcatctattggacaatagtaaaaccgggagacatacttttgattaacagcaca

SEQ ID NO: 73321 - DNA, 60 bp, Artificial
  Synthetic oligonucleotide
attaaacaaccggttccagatcaaaggtgttgagctgaagtcaggatacaaagattggat

SEQ ID NO: 73322 - DNA, 60 bp, Artificial
  Synthetic oligonucleotide
ccggttccagatcaaaggtgttgagctgaagtcaggatacaaagattggatcctatggat

SEQ ID NO: 73323 - DNA, 60 bp, Artificial
  Synthetic oligonucleotide
gggtcaatcagaaatggaacttatgaccatgatgtatacagagacgaagcattaaacaac

SEQ ID NO: 73324 - DNA, 60 bp, Artificial
  Synthetic oligonucleotide
cagaagtagaagggagaattcaggacctcgagaaatatgttgaggacactaaaatagatc

SEQ ID NO: 73325 - DNA, 60 bp, Artificial
  Synthetic oligonucleotide
gagttctcagaagtagaagggagaattcaggacctcgagaaatatgttgaggacactaaa

SEQ ID NO: 73326 - DNA, 53 bp, Artificial
  Synthetic oligonucleotide
atgagccttctaacagaggtcgaaacgtatgttctctctatcgttccatcagg

SEQ ID NO: 73327 - DNA, 60 bp, Artificial
  Synthetic oligonucleotide
cgtcacttagaatgaaatggatgatggcaatgaaatacccaatcactgctgaaaaaagga

SEQ ID NO: 73328 - DNA, 55 bp, Artificial
  Synthetic oligonucleotide
cgtcacttagaatgaaatggatgatggcaatgaaatacccaatcactgctgaaaa

SEQ ID NO: 73329 - DNA, 60 bp, Artificial
  Synthetic oligonucleotide
cgtcacttagaatgaaatggatgatggcaatgaaatacccaatcactgctgacaaaagga

SEQ ID NO: 73330 - DNA, 60 bp, Artificial
  Synthetic oligonucleotide
ccgtcacttaggatgaaatggatgatggcaatgaaatacccaatcactgctgacaaaagg

SEQ ID NO: 73331 - DNA, 60 bp, Artificial
  Synthetic oligonucleotide
aggatgaaatggatgatggcaatgaaatacccaattactgctgacaaaaggataacagaa

SEQ ID NO: 73332 - DNA, 60 bp, Artificial
  Synthetic oligonucleotide
tttagtccctaaggccattagaggccaatacagtgggtttgtcagaactctattccaaca

SEQ ID NO: 73333 - DNA, 60 bp, Artificial
  Synthetic oligonucleotide
ccctaaggccattagaggccaatacagtgggtttgtcagaactctattccaacaaatgag

SEQ ID NO: 73334 - DNA, 60 bp, Artificial
  Synthetic oligonucleotide
ctaaagacaagaccaatcctgtcacctctgactaaggggattttgggatttgtgtttacg

SEQ ID NO: 73335 - DNA, 60 bp, Artificial
  Synthetic oligonucleotide
agtctctaaaaatctacagagattcgcttggagaaacagtaatgagaatgggggacctcc

SEQ ID NO: 73336 - DNA, 60 bp, Artificial
  Synthetic oligonucleotide
cggaaggagtgcctgagtctatgagggaagaatatcgaaaggaacagcagaatgctgtgg

SEQ ID NO: 73337 - DNA, 60 bp, Artificial
  Synthetic oligonucleotide
gatgtgctctttgatgcaaggttcaactctccctagaagatctggagcagcaggcgctgc

SEQ ID NO: 73338 - DNA, 59 bp, Artificial
  Synthetic oligonucleotide
taagagtgtcaagcttcatcagagggacaagagtacttccaagggggaagctctccact

SEQ ID NO: 73339 - DNA, 60 bp, Artificial
  Synthetic oligonucleotide
agggcctctgcgggccaaatcagcacacaacctacgttttcggtgcagagaaacctccca

SEQ ID NO: 73340 - DNA, 60 bp, Artificial
  Synthetic oligonucleotide
aagaccagaagaagtgtccttccaggggcggggagtctttgagctctcggacgaaagggc

SEQ ID NO: 73341 - DNA, 60 bp, Artificial
  Synthetic oligonucleotide
catccaaatgtgcactgaacttaaactcagtgatcatgaagggcggttgatccagaacag

SEQ ID NO: 73342 - DNA, 60 bp, Artificial
  Synthetic oligonucleotide
aaaggtcttatgaacagatggaaactgatggggatcgccagaatgcaactgagattaggt

SEQ ID NO: 73343 - DNA, 60 bp, Artificial
  Synthetic oligonucleotide
gtggatggcatgccattctgctgcatttgaagatttaagattgttaagcttcatcagggg

SEQ ID NO: 73344 - DNA, 60 bp, Artificial
  Synthetic oligonucleotide
ctggagaggtgaaaatgggcggaaaacaagaagtgcttatgagagaatgtgcaacattct

SEQ ID NO: 73345 - DNA, 60 bp, Artificial
  Synthetic oligonucleotide
gtgattatgaagggcggttgatccagaacagcttgacaatagagaaaatggtgctctctg

SEQ ID NO: 73346 - DNA, 60 bp, Artificial
  Synthetic oligonucleotide
ggtcttatgaacagatggaaactgatggggatcgccagaatgcaactgagattaggtcat

SEQ ID NO: 73347 - DNA, 60 bp, Artificial
  Synthetic oligonucleotide
attggacgattctacatccaaatgtgcactgaacttaaactcagtgattatgaagggcgg

SEQ ID NO: 73348 - DNA, 60 bp, Artificial
  Synthetic oligonucleotide
cgtcgggaagatgattgatggaattgggagattctacatccaaatgtgcactgaacttaa

SEQ ID NO: 73349 - DNA, 60 bp, Artificial
  Synthetic oligonucleotide
catccaaatgtgcactgaacttaaactcagtgattatgaagggcggttgatccaaaacag

SEQ ID NO: 73350 - DNA, 60 bp, Artificial
  Synthetic oligonucleotide
catccaaatgtgcactgaacttaaactcagtgatcatgaagggcgattaatccagaacag

SEQ ID NO: 73351 - DNA, 60 bp, Artificial
  Synthetic oligonucleotide
tccaaatgtgcactgaacttaaactcagtgatcatgaagggcgattgatccagaacagct

SEQ ID NO: 73352 - DNA, 60 bp, Artificial
  Synthetic oligonucleotide
tccaaatgtgcactgaacttaaactcagtgattatgaagggcggttgattcagaacagct

SEQ ID NO: 73353 - DNA, 60 bp, Artificial
  Synthetic oligonucleotide
ccaaatgtgcactgaacttaaactcagtgattatgaagggcggttgatccaaaacagctt

SEQ ID NO: 73354 - DNA, 60 bp, Artificial
  Synthetic oligonucleotide
ccaaatgtgcactgaacttaaactcagtgatcatgaagggcggttgatccagaacagctt

SEQ ID NO: 73355 - DNA, 60 bp, Artificial
  Synthetic oligonucleotide
taatgctactgagctggttcagagttcctcaacaggtggaatatgcgacagtcctcatca

SEQ ID NO: 73356 - DNA, 60 bp, Artificial
  Synthetic oligonucleotide
tactaatgctactgagctggttcagagttcctcaacaggtggaatatgcgacagtcctca

SEQ ID NO: 73357 - DNA, 60 bp, Artificial
  Synthetic oligonucleotide
atgactgatggaagtgcatcaggaagggccgatactagaatactattcattagagagggg

SEQ ID NO: 73358 - DNA, 60 bp, Artificial
  Synthetic oligonucleotide
ggtccagctcaagttgtcatgatgggaaagcatggttgcatgtttgtgtcactggggatg

SEQ ID NO: 73359 - DNA, 60 bp, Artificial
  Synthetic oligonucleotide
gttaataagaggaaggccacaggagactagagtatggtggacttcaaatagtatcgtcgt

SEQ ID NO: 73360 - DNA, 60 bp, Artificial
  Synthetic oligonucleotide
cagggcttgttggcgacacaccaagaaacgatgatagctctagcagcagcaactgcaggg

SEQ ID NO: 73361 - DNA, 60 bp, Artificial
  Synthetic oligonucleotide
ggtcgaaaccgcagtgtcagattacagggtttgctcctttctccaaggacaactcaattc

SEQ ID NO: 73362 - DNA, 60 bp, Artificial
  Synthetic oligonucleotide
acatttgggtaacaagagaaccttatgtgtcatgcggccccggtaaatgttatcaatttg

SEQ ID NO: 73363 - DNA, 60 bp, Artificial
  Synthetic oligonucleotide
ggaaggccacaggagactagagtatggtggacttcaaatagtatcgtcgtattttgtggc

SEQ ID NO: 73364 - DNA, 60 bp, Artificial
  Synthetic oligonucleotide
gcaccacattcccatatactggagaccctccatacagccatggaacgggaacaggataca

SEQ ID NO: 73365 - DNA, 60 bp, Artificial
  Synthetic oligonucleotide
tagcgaggagcatttgtgagaaacttgaacaatctggactcccagtcgggggcaatgaaa

SEQ ID NO: 73366 - DNA, 60 bp, Artificial
  Synthetic oligonucleotide
ctgttgctactacgcactcctggatccccaagaggaaccgctccatccttaacacgagtc

SEQ ID NO: 73367 - DNA, 60 bp, Artificial
  Synthetic oligonucleotide
accggtgcttttatgtggagttgataaggggaaggaaagaggaaactgaagtctggtgga

SEQ ID NO: 73368 - DNA, 60 bp, Artificial
  Synthetic oligonucleotide
aggcaaaagctgcatcaatcggtgcttttatgtggagttgataaggggaaggaaagagga

SEQ ID NO: 73369 - DNA, 60 bp, Artificial
  Synthetic oligonucleotide
caatcggtgcttttatgtggagttgataaggggaaggaaagaggaaactgaagtctggtg

SEQ ID NO: 73370 - DNA, 60 bp, Artificial
  Synthetic oligonucleotide
tctgttgaaagcaaaagctgcatcaataggtgcttttatgtggagttgataaggggaagg

SEQ ID NO: 73371 - DNA, 60 bp, Artificial
  Synthetic oligonucleotide
attcctaagaggaaccgctctatcctcaacacaagccaaaggggaattcttgaggatgaa

SEQ ID NO: 73372 - DNA, 60 bp, Artificial
  Synthetic oligonucleotide
tagctctcagttattctgctggtgcacttgccagttgcatgggcctcatatacaatagga

SEQ ID NO: 73373 - DNA, 60 bp, Artificial
  Synthetic oligonucleotide
ggggccaaagaaatagcactcagctattctgctggtgcacttgccagttgcatgggcctc

SEQ ID NO: 73374 - DNA, 60 bp, Artificial
  Synthetic oligonucleotide
tggtgcacttgccagttgcatgggcctcatatacaacaggatgggaactgtgaccactga

SEQ ID NO: 73375 - DNA, 60 bp, Artificial
  Synthetic oligonucleotide
tggtgcacttgccagttgcatgggcctcatatataacaggatgggaactgtgaccactga

SEQ ID NO: 73376 - DNA, 60 bp, Artificial
  Synthetic oligonucleotide
ctggtgcacttgccagttgcatgggcctcatatacaatagaatggggactgtaaccactg

SEQ ID NO: 73377 - DNA, 60 bp, Artificial
  Synthetic oligonucleotide
tcagttattctgctggtgcacttgccagttgcatgggcctcatatacaatagaatggggg

SEQ ID NO: 73378 - DNA, 59 bp, Artificial
  Synthetic oligonucleotide
tcagttattctgctggtgcacttgccagttgcatgggcctcatatacaatagaatgggg

SEQ ID NO: 73379 - DNA, 60 bp, Artificial
  Synthetic oligonucleotide
gggactctagcatacttactgacagccagacagcgaccaaaagaattcgaatggccatca

SEQ ID NO: 73380 - DNA, 60 bp, Artificial
  Synthetic oligonucleotide
acgaaaaagggactctagcatacttactgacagccagacagcgaccaaaagaattcgaat

SEQ ID NO: 73381 - DNA, 60 bp, Artificial
  Synthetic oligonucleotide
taggcccgttatagatataaatatggcagattatagcattgattccagttatgtgtgttc

SEQ ID NO: 73382 - DNA, 60 bp, Artificial
  Synthetic oligonucleotide
atattagcccattgtcaggaagtgctcagcatgtagaagagtgttcctgttatcctagat

SEQ ID NO: 73383 - DNA, 60 bp, Artificial
  Synthetic oligonucleotide
tgatgggatgcttgttgacagtattggttcatggtctcaaaatatcctcaggactcagga

SEQ ID NO: 73384 - DNA, 60 bp, Artificial
  Synthetic oligonucleotide
atattagcccattgtcaggaagtgctcagcatatagaggaatgttcctgttaccctcgat

SEQ ID NO: 73385 - DNA, 60 bp, Artificial
  Synthetic oligonucleotide
tgtccatattagcccattgtcaggaagtgctcagcatatagaggaatgttcctgttatcc

SEQ ID NO: 73386 - DNA, 60 bp, Artificial
  Synthetic oligonucleotide
ggatgcttgttgacagtattggttcatggtctcaaaatatcctcaggactcaggagtcag

SEQ ID NO: 73387 - DNA, 60 bp, Artificial
  Synthetic oligonucleotide
cagtctggacttccggttggaggtaatgagaagaaggccaaactggcaaatgttgtgaga

SEQ ID NO: 73388 - DNA, 60 bp, Artificial
  Synthetic oligonucleotide
cggatgatcaaattgaagtaactaatgcgactgaactggttcagagttcctcaacaggga

SEQ ID NO: 73389 - DNA, 60 bp, Artificial
  Synthetic oligonucleotide
ggggatggtggacggttggtacggtttcaggcatcaaaattctgagggcacaggacaagc

SEQ ID NO: 73390 - DNA, 60 bp, Artificial
  Synthetic oligonucleotide
caatccgactctactgttcttaagggttccagcgcaaaatgccataagcaccacattccc

SEQ ID NO: 73391 - DNA, 60 bp, Artificial
  Synthetic oligonucleotide
caatccgactctactgttcttaaaggttccagcgcaaaatgccataagcaccacattccc

SEQ ID NO: 73392 - DNA, 60 bp, Artificial
  Synthetic oligonucleotide
ccagccaaaagtatggaatatgatgccgttgcaactacacactcctggattcccaggagg

SEQ ID NO: 73393 - DNA, 60 bp, Artificial
  Synthetic oligonucleotide
ccagcccatggtccggccaaaagtatggaatatgatgccgttgcaactacacactcctgg

SEQ ID NO: 73394 - DNA, 60 bp, Artificial
  Synthetic oligonucleotide
agaatcccacccagggatctttgagaactcatgccttgaaacaatggaagttgttcaaca

SEQ ID NO: 73395 - DNA, 58 bp, Artificial
  Synthetic oligonucleotide
tcacaaaaaatcaacctgagtggttcagaaacatcctgagcatcgcaccaataatgtt

SEQ ID NO: 73396 - DNA, 60 bp, Artificial
  Synthetic oligonucleotide
aatgctgtagtgatgccagcccatggtccggccaaaagtatggaatatgatgccgttgca

SEQ ID NO: 73397 - DNA, 60 bp, Artificial
  Synthetic oligonucleotide
catcccaactcaacccaattgatggaccactacctgaggataatgagccaagtggatatg

SEQ ID NO: 73398 - DNA, 60 bp, Artificial
  Synthetic oligonucleotide
aatttttccctagtagttcatataggagaccggttggaatttctagcatggtggaggcca

SEQ ID NO: 73399 - DNA, 60 bp, Artificial
  Synthetic oligonucleotide
gcagtctcgcactcgcgagatactaacaagaaccacagtggaccatatggccataattaa

SEQ ID NO: 73400 - DNA, 60 bp, Artificial
  Synthetic oligonucleotide
ctttattggagatgtgccacagcacacaaattggcgggacaagtatggtggacattctta

SEQ ID NO: 73401 - DNA, 60 bp, Artificial
  Synthetic oligonucleotide
gtgacaagtacggtccactacccaaaagtatacaagacttattttgacaaagtcgaaagg

SEQ ID NO: 73402 - DNA, 60 bp, Artificial
  Synthetic oligonucleotide
ggttccggagagaaatgaacaaggacagactctatggagtaaaatgagtgatgctggatc

SEQ ID NO: 73403 - DNA, 60 bp, Artificial
  Synthetic oligonucleotide
tcgtggccatggtgttttcacaagaggattgcatgataaaagcagttagaggtgacctga

SEQ ID NO: 73404 - DNA, 60 bp, Artificial
  Synthetic oligonucleotide
gtacagagagggtggtggttagcattgatcggtttttgagagttcgagaccagcgcggga

SEQ ID NO: 73405 - DNA, 60 bp, Artificial
  Synthetic oligonucleotide
cagttagaggtgacctgaatttcgtcaacagggcaaaccagcgattgaaccccatgcatc

SEQ ID NO: 73406 - DNA, 60 bp, Artificial
  Synthetic oligonucleotide
ggtgacctgaatttcgtcaacagggcaaaccagcggttgaaccccatgcatcagctttta

SEQ ID NO: 73407 - DNA, 60 bp, Artificial
  Synthetic oligonucleotide
agtaaaatgagtgatgctggatcagatcgagtgatggtatcacctgtggctgtgacatgg

SEQ ID NO: 73408 - DNA, 60 bp, Artificial
  Synthetic oligonucleotide
ggatgagaatacttgtaaggggcaattctcctgtattcaactacaacaagacaactaaaa

SEQ ID NO: 73409 - DNA, 60 bp, Artificial
  Synthetic oligonucleotide
ggccattagaagccaatacagtgggtttgtcagaactctattccaacaaatgagagacgt

SEQ ID NO: 73410 - DNA, 60 bp, Artificial
  Synthetic oligonucleotide
gataacagaaatggttccggagagaaatgaacaaggacaaactctatggagtaaaatgag

SEQ ID NO: 73411 - DNA, 60 bp, Artificial
  Synthetic oligonucleotide
caccgaagagggagcaattgtgggcgaaatctcaccattgccttcttttccaggacatac

SEQ ID NO: 73412 - DNA, 60 bp, Artificial
  Synthetic oligonucleotide
gattatgcctcccttaggtcactagttgcctcatctggcacactggagtttaacaatgaa

SEQ ID NO: 73413 - DNA, 60 bp, Artificial
  Synthetic oligonucleotide
gtgccacagcacacaaattggcgggacaaggatggtggacattcttaggcagaacccgac

SEQ ID NO: 73414 - DNA, 60 bp, Artificial
  Synthetic oligonucleotide
agtatctaaaaatctacagagattcgcttggagaagcagtaatgagaatgggggacctcc

SEQ ID NO: 73415 - DNA, 60 bp, Artificial
  Synthetic oligonucleotide
aatctctaaaaatctacagagattcgcttggagaagcagtaatgagaatgggggacctcc

SEQ ID NO: 73416 - DNA, 60 bp, Artificial
  Synthetic oligonucleotide
cgcctgcgtagagtcaatcagaaatgggacttatgaccatgatgtatacagagacgaatc

SEQ ID NO: 73417 - DNA, 60 bp, Artificial
  Synthetic oligonucleotide
gttgtagaccaagaactgagtgatgctccattccttgatcggcttcgccgagatcagagg

SEQ ID NO: 73418 - DNA, 60 bp, Artificial
  Synthetic oligonucleotide
tgctggggttcatcatgtgggcctgccaaaaaggcaacattaggtgcaacatttgcattt

SEQ ID NO: 73419 - DNA, 60 bp, Artificial
  Synthetic oligonucleotide
gagggaatacaagcaggagtggatagattctacaggacctgcaagttagtgggagtcaac

SEQ ID NO: 73420 - DNA, 60 bp, Artificial
  Synthetic oligonucleotide
atatccggaagcaagttgtagaccaagaactgagtgatgccccattccttgatcggcttc

SEQ ID NO: 73421 - DNA, 60 bp, Artificial
  Synthetic oligonucleotide
aagggctttcaccgaagagggagcaattgttggcgaaatctcaccattgccttcttttct

SEQ ID NO: 73422 - DNA, 60 bp, Artificial
  Synthetic oligonucleotide
ggctttcaccgaagagggagcaattgttggcgaaatctcaccattgccttcttttctagg

SEQ ID NO: 73423 - DNA, 60 bp, Artificial
  Synthetic oligonucleotide
cggtctgacggccaatgaatcaggaaggctaatagatttcctcaaggatgtgacggaatc

SEQ ID NO: 73424 - DNA, 60 bp, Artificial
  Synthetic oligonucleotide
gttgcaggctccctctgtatcagaatggaccaggcgattatggataagaacatcatactg

SEQ ID NO: 73425 - DNA, 60 bp, Artificial
  Synthetic oligonucleotide
aagcaaaaagttgcaggctccctctgtatcagaatggaccaggcgattatggataagaac

SEQ ID NO: 73426 - DNA, 60 bp, Artificial
  Synthetic oligonucleotide
ctgacatgactcttgaagagatgtcaagagactggttcatgctcatgcccaagcaaaaag

SEQ ID NO: 73427 - DNA, 58 bp, Artificial
  Synthetic oligonucleotide
ctgacatgactcttgaagagatgtcaagagactggttcatgctcatgcccaagcaaaa

SEQ ID NO: 73428 - DNA, 60 bp, Artificial
  Synthetic oligonucleotide
gactattgcttctgtgcctgcttcacgctacctaactgacatgactcttgaagagatgtc

SEQ ID NO: 73429 - DNA, 60 bp, Artificial
  Synthetic oligonucleotide
tgaggcactcaaaatgactattgcttctgtgcctgcttcacgctacctaactgacatgac

SEQ ID NO: 73430 - DNA, 60 bp, Artificial
  Synthetic oligonucleotide
ctcgtgctggaaagcagatagtggagaggattctggaggaggaatccgatgaggcactca

SEQ ID NO: 73431 - DNA, 60 bp, Artificial
  Synthetic oligonucleotide
actcgtgctggaaagcagatagtggagaggattctggaggaggaatccgatgaggcactc

SEQ ID NO: 73432 - DNA, 60 bp, Artificial
  Synthetic oligonucleotide
gaggcagcactcttggtctggacatcgaaacagccactcgtgctggaaagcagatagtgg

SEQ ID NO: 73433 - DNA, 60 bp, Artificial
  Synthetic oligonucleotide
tgccccattccttgaccggcttcgccgagatcagaaatctctaagaggaagaggcagcac

SEQ ID NO: 73434 - DNA, 60 bp, Artificial
  Synthetic oligonucleotide
ccaagaactgggtgatgccccattccttgaccggcttcgccgagatcagaaatctctaag

SEQ ID NO: 73435 - DNA, 60 bp, Artificial
  Synthetic oligonucleotide
ggataagaacatcatactgaaagcaaatttcagtgtgatctttgatcggctggagacact

SEQ ID NO: 73436 - DNA, 60 bp, Artificial
  Synthetic oligonucleotide
actgaaagcaaatttcagtgtgatctttgatcggctggagacactaatactactcagagc

SEQ ID NO: 73437 - DNA, 60 bp, Artificial
  Synthetic oligonucleotide
tggagacactaatactactcagagctttcactgaagaaggagcaattgtcggcgaaattt

SEQ ID NO: 73438 - DNA, 60 bp, Artificial
  Synthetic oligonucleotide
tactcagagctttcactgaagaaggagcaattgtcggcgaaatttcaccattgccttctc

SEQ ID NO: 73439 - DNA, 60 bp, Artificial
  Synthetic oligonucleotide
gatcgaatggtctcacagctaatgaatcgggaaggctaatagatttcctcaaggatgtga

SEQ ID NO: 73440 - DNA, 60 bp, Artificial
  Synthetic oligonucleotide
ccaaaaagatactcagaacccaggagtcggaatgcgtttgtatcaatggaacttgtacag

SEQ ID NO: 73441 - DNA, 60 bp, Artificial
  Synthetic oligonucleotide
ggactcaggagtcagaatgcgtttgcatcaatggaacttgtacagtagtaatgactgatg

SEQ ID NO: 73442 - DNA, 60 bp, Artificial
  Synthetic oligonucleotide
gcctgtatgctcaagcatcagggagagtcacagtctctaccaaaagaagccaacaaactg

SEQ ID NO: 73443 - DNA, 60 bp, Artificial
  Synthetic oligonucleotide
cctcaggacccaggagtcagaatgtgtttgtatcaatggaacttgtacagtagtaatgac

SEQ ID NO: 73444 - DNA, 60 bp, Artificial
  Synthetic oligonucleotide
acagaaattggtcaaagccgcaatgtcaaattacaggatttgcacctttttctaaggaca

SEQ ID NO: 73445 - DNA, 60 bp, Artificial
  Synthetic oligonucleotide
caagatacgccgaagagtaggcataaaccctggtcatgcagacctcagtgccaaggaggc

SEQ ID NO: 73446 - DNA, 60 bp, Artificial
  Synthetic oligonucleotide
gccgaagagtaggcataaaccctggtcatgcagacctcagtgccaaggaggcacaagatg

SEQ ID NO: 73447 - DNA, 60 bp, Artificial
  Synthetic oligonucleotide
ctggcattccaatctgaatgatgccacatatcagagaacaagggcacttgtgcgtactgg

SEQ ID NO: 73448 - DNA, 60 bp, Artificial
  Synthetic oligonucleotide
acccatatgatgatctggcattccaatctgaatgatgccacatatcagagaacaagggca

SEQ ID NO: 73449 - DNA, 60 bp, Artificial
  Synthetic oligonucleotide
aacaagggcacttgtgcgtactggaatggatcctaggatgtgctctctgatgcaaggatc

SEQ ID NO: 73450 - DNA, 60 bp, Artificial
  Synthetic oligonucleotide
cagcccacattctctgtgcaaagaaacctcccattcgagagaacaaccattatggcagca

SEQ ID NO: 73451 - DNA, 60 bp, Artificial
  Synthetic oligonucleotide
cagcccacattctctgtgcaaagaaacctcccattcgagagagcaaccattatggcagca

SEQ ID NO: 73452 - DNA, 60 bp, Artificial
  Synthetic oligonucleotide
gcgtacagcccacattctctgtgcaaagaaacctcccattcgagagagcaaccattatgg

SEQ ID NO: 73453 - DNA, 60 bp, Artificial
  Synthetic oligonucleotide
ggggttggaacaatggtgatggaactgattcggatgatcaaacgagggatcaatgatcgg

SEQ ID NO: 73454 - DNA, 60 bp, Artificial
  Synthetic oligonucleotide
tgaaaggggttggaacaatggtgatggaactgattcggatgatcaaacgagggatcaatg

SEQ ID NO: 73455 - DNA, 60 bp, Artificial
  Synthetic oligonucleotide
aattgaagatctcatcttccttgcacggtctgctctcattctgagaggatcagtggctca

SEQ ID NO: 73456 - DNA, 60 bp, Artificial
  Synthetic oligonucleotide
caaacagcagcacaacgagcaatgatggatcaagtgagagaaagccggaatcctgggaat

SEQ ID NO: 73457 - DNA, 60 bp, Artificial
  Synthetic oligonucleotide
cagcagcacaacgagcaatgatggatcaagtgagagaaagccggaatcctgggaatgctg

SEQ ID NO: 73458 - DNA, 60 bp, Artificial
  Synthetic oligonucleotide
tcattctgagaggatcagtggctcataagtcctgcctgcctgcttgtgtgtatgggcttg

SEQ ID NO: 73459 - DNA, 60 bp, Artificial
  Synthetic oligonucleotide
cagtggctcataagtcctgcctgcctgcttgtgtgtatgggcttgctgtggccagtggat

SEQ ID NO: 73460 - DNA, 60 bp, Artificial
  Synthetic oligonucleotide
gcgtacagcccacattctctgtgcaaagaaacctcccattcgagagaacaaccattatgg

SEQ ID NO: 73461 - DNA, 60 bp, Artificial
  Synthetic oligonucleotide
aagagtggtcccaagaggacaactgtccaccagaggagtacagattgcttcaaatgagaa

SEQ ID NO: 73462 - DNA, 60 bp, Artificial
  Synthetic oligonucleotide
ggtcccaagaggacaactgtccaccagaggagtacagattgcttcaaatgagaacatgga

SEQ ID NO: 73463 - DNA, 60 bp, Artificial
  Synthetic oligonucleotide
tcagagcatctgttggaaggatggttggtggaattgggagattctacatacagatgtgca

SEQ ID NO: 73464 - DNA, 60 bp, Artificial
  Synthetic oligonucleotide
gtagataatcactcactgagtgacatccacatcatggcgtctcaaggcaccaaacgatct

SEQ ID NO: 73465 - DNA, 60 bp, Artificial
  Synthetic oligonucleotide
gaaacaaatatctggaagagcatcccagtgctggaaaagaccctaagaagactggaggcc

SEQ ID NO: 73466 - DNA, 60 bp, Artificial
  Synthetic oligonucleotide
catttgatgagaggagaaacaaatatctggaagagcatcccagtgctggaaaagacccta

SEQ ID NO: 73467 - DNA, 60 bp, Artificial
  Synthetic oligonucleotide
ggccccttctaatagatggcacagcctccttgagtcctggaatgatgatgggcatgttca

SEQ ID NO: 73468 - DNA, 60 bp, Artificial
  Synthetic oligonucleotide
ggcctcttctaatagatggcacagcttcattgagtcctggaatgatgatgggcatgttca

SEQ ID NO: 73469 - DNA, 60 bp, Artificial
  Synthetic oligonucleotide
aaggcctcttctaatagatggcacagcttcattgagtcctggaatgatgatgggcatgtt

SEQ ID NO: 73470 - DNA, 60 bp, Artificial
  Synthetic oligonucleotide
gcacaaacagactgtgtcctggaagcaatggctttccttgaagagtcccatccaggaatc

SEQ ID NO: 73471 - DNA, 60 bp, Artificial
  Synthetic oligonucleotide
cataaacaggacaggaacatttgaattcacaagctttttctaccgctatggattcgtggc

SEQ ID NO: 73472 - DNA, 60 bp, Artificial
  Synthetic oligonucleotide
tgcacaaagagcgatggtggatcaagtgagagaaagtcggaacccaggaaatgctgagat

SEQ ID NO: 73473 - DNA, 60 bp, Artificial
  Synthetic oligonucleotide
tgcacaaagagctatggtggatcaagtgagagaaagtcggaacccaggaaatgctgagat

SEQ ID NO: 73474 - DNA, 60 bp, Artificial
  Synthetic oligonucleotide
tcaccgaagagggagcaattgtgggcgaaatctcaccattgccttcttttccaggacata

SEQ ID NO: 73475 - DNA, 56 bp, Artificial
  Synthetic oligonucleotide
tacttgaagtggagcaagagataaggactttctcgtttcagcttatttaatgataa

SEQ ID NO: 73476 - DNA, 60 bp, Artificial
  Synthetic oligonucleotide
ctccgttgaaggcaaaagctgcatcaatcggtgcttttatgtggagttgataaggggaag

SEQ ID NO: 73477 - DNA, 60 bp, Artificial
  Synthetic oligonucleotide
gttgaaagaggtaataggtccggttattctggtattttctctgttgaaggcaaaagctgc

SEQ ID NO: 73478 - DNA, 60 bp, Artificial
  Synthetic oligonucleotide
gggaagatgattgacggaattgggcgattctacatccaaatgtgcactgaacttaaactc

SEQ ID NO: 73479 - DNA, 60 bp, Artificial
  Synthetic oligonucleotide
cgggaagatgattgatggaattgggcgattctacatccaaatgtgcactgaacttaaact

SEQ ID NO: 73480 - DNA, 60 bp, Artificial
  Synthetic oligonucleotide
tcgggaagatgattgacggaattgggcgattctacatccaaatgtgcactgaacttaaac

SEQ ID NO: 73481 - DNA, 60 bp, Artificial
  Synthetic oligonucleotide
ctgcacattaatggatgctctactaggggaccctcattgtgatgtgtttcaggatgaaac

SEQ ID NO: 73482 - DNA, 60 bp, Artificial
  Synthetic oligonucleotide
gagcatgtcccaaatatgtcaagcagagcactctaaaattggcaactggaatgcggaatg

SEQ ID NO: 73483 - DNA, 60 bp, Artificial
  Synthetic oligonucleotide
cccaaatatgtcaagcagagcactctaaaattggcaactggaatgcggaatgtacctgag

SEQ ID NO: 73484 - DNA, 60 bp, Artificial
  Synthetic oligonucleotide
tcagacgcacctattgacacatgtatctctgagtgcatcactcctaatggtagcatcccc

SEQ ID NO: 73485 - DNA, 60 bp, Artificial
  Synthetic oligonucleotide
cccaacatcggatccaggccttgggtcagaggccaatcaggaagagtaagtatctactgg

SEQ ID NO: 73486 - DNA, 60 bp, Artificial
  Synthetic oligonucleotide
catgacatgtacagggatgaagcactaaacaatcggttccagattaagggagtggaactg

SEQ ID NO: 73487 - DNA, 54 bp, Artificial
  Synthetic oligonucleotide
ggaagagtaagtatctactggacaatagtaaagccaggagacatactggtgatc

SEQ ID NO: 73488 - DNA, 60 bp, Artificial
  Synthetic oligonucleotide
ctgcacattaatggatgctctactaggggaccctcattgtgatgtatttcaggatgaaac

SEQ ID NO: 73489 - DNA, 60 bp, Artificial
  Synthetic oligonucleotide
cctatgatcatgacatgtacagggatgaagcactaaacaatcggttccagattaagggag

SEQ ID NO: 73490 - DNA, 60 bp, Artificial
  Synthetic oligonucleotide
gtgataatgcctgcatagagtcaattaggaatgggacctatgatcatgacatgtacaggg

SEQ ID NO: 73491 - DNA, 60 bp, Artificial
  Synthetic oligonucleotide
cctatgatcatgacatgtacagggatgaagcattaaacaatcggttccagattaagggag

SEQ ID NO: 73492 - DNA, 60 bp, Artificial
  Synthetic oligonucleotide
aggatgaaacatgggatctttatgtagagcgcagcaatgcattcagcaactgctacccat

SEQ ID NO: 73493 - DNA, 60 bp, Artificial
  Synthetic oligonucleotide
gatataccacaaatgtgataatgcctgcatagagtcaattaggaatgggacctatgatca

SEQ ID NO: 73494 - DNA, 60 bp, Artificial
  Synthetic oligonucleotide
catgacatgtacagggatgaagcattaaacaatcggttccagattaagggagtggaactg

SEQ ID NO: 73495 - DNA, 60 bp, Artificial
  Synthetic oligonucleotide
aaccagcatacaattgatctgactgattcagaaatgaacaaactatttgagaaaacaaga

SEQ ID NO: 73496 - DNA, 53 bp, Artificial
  Synthetic oligonucleotide
tcatcagattgaaaaagagttttcagaggtggaaggaagaattcaggaccttg

SEQ ID NO: 73497 - DNA, 60 bp, Artificial
  Synthetic oligonucleotide
caaatcaatggaaaactgaatcgggtaatcgagaaaacaaatgaaaagtttcatcagatt

SEQ ID NO: 73498 - DNA, 60 bp, Artificial
  Synthetic oligonucleotide
ggtacaggacaagcagcagaccttaaaagcactcaagccgccattgaccaaatcaatgga

SEQ ID NO: 73499 - DNA, 60 bp, Artificial
  Synthetic oligonucleotide
aaggtacaggacaagcagcagaccttaaaagcactcaagccgccattgaccaaatcaatg

SEQ ID NO: 73500 - DNA, 60 bp, Artificial
  Synthetic oligonucleotide
ggtcttacaatgcggaacttcttgtggcactggaaaaccagcatacaattgatctgactg

SEQ ID NO: 73501 - DNA, 60 bp, Artificial
  Synthetic oligonucleotide
ggtcttacaatgcggagcttcttgtggcactggaaaaccagcatacaattgatctgactg

SEQ ID NO: 73502 - DNA, 60 bp, Artificial
  Synthetic oligonucleotide
ccaaaatagatctatggtcttacaatgcggaacttcttgtggcactggaaaaccagcata

SEQ ID NO: 73503 - DNA, 60 bp, Artificial
  Synthetic oligonucleotide
ccaaaatagatctatggtcttacaatgcggagcttcttgtggcactggaaaaccagcata

SEQ ID NO: 73504 - DNA, 60 bp, Artificial
  Synthetic oligonucleotide
tacgtgtggggagttcatcacccaagcacaaaccaagagcaaaccagtttgtatgttcag

SEQ ID NO: 73505 - DNA, 60 bp, Artificial
  Synthetic oligonucleotide
catcacccaagcacaaaccaagagcaaaccagtttgtatgttcaggcatcgggaagggtc

SEQ ID NO: 73506 - DNA, 60 bp, Artificial
  Synthetic oligonucleotide
ctcatcaggaaccctagagttcatcactgagggttttacgtggacaggagtcacacaaaa

SEQ ID NO: 73507 - DNA, 60 bp, Artificial
  Synthetic oligonucleotide
ggaaccctagagttcatcactgagggttttacgtggacaggagtcacacaaaatggaggg

SEQ ID NO: 73508 - DNA, 54 bp, Artificial
  Synthetic oligonucleotide
tcacacaaaatggagggagtagtgcttgtaaaagagggcctgccaatggctttt

SEQ ID NO: 73509 - DNA, 60 bp, Artificial
  Synthetic oligonucleotide
tcacacaaaatggagggagtagtgcttgtaaaagagggcctgccaatggctttttcagta

SEQ ID NO: 73510 - DNA, 60 bp, Artificial
  Synthetic oligonucleotide
aaaccataattcccaacatcggatccaggccttgggtcagaggccaatcaggaagaataa

SEQ ID NO: 73511 - DNA, 60 bp, Artificial
  Synthetic oligonucleotide
aaaccataattcccaacatcggatccaggccttgggtcagaggccaatcaggaagagtaa

SEQ ID NO: 73512 - DNA, 60 bp, Artificial
  Synthetic oligonucleotide
ctcaggacccaggagtcagaatgcgtttgtatcaatggaacttgtacagtagtaatgact

SEQ ID NO: 73513 - DNA, 60 bp, Artificial
  Synthetic oligonucleotide
gattgaaaaagaattctcagaagtagaagggagaattcaggacctcgagaaatacgttga

SEQ ID NO: 73514 - DNA, 60 bp, Artificial
  Synthetic oligonucleotide
caggaacagggtacaccatggacacggtcaacagaacacaccaatattcagagaagggga

SEQ ID NO: 73515 - DNA, 60 bp, Artificial
  Synthetic oligonucleotide
acagggtacaccatggacacggtcaacagaacacaccaatattcagagaaggggaagtgg

SEQ ID NO: 73516 - DNA, 60 bp, Artificial
  Synthetic oligonucleotide
aatgagccaagtggatatgcacaaacagactgtgtcctggaggctatggccttccttgaa

SEQ ID NO: 73517 - DNA, 60 bp, Artificial
  Synthetic oligonucleotide
agtggatatgcacaaacagactgtgtcctggaggctatggctttccttgaagaatcccac

SEQ ID NO: 73518 - DNA, 60 bp, Artificial
  Synthetic oligonucleotide
accatcatagagaaggaaatatgccccaaactagcagaatacagaaattggtcaaagccg

SEQ ID NO: 73519 - DNA, 60 bp, Artificial
  Synthetic oligonucleotide
cttgaggctctcatggaatggctaaagacaagaccaattctgtcacctctgactaaggga

SEQ ID NO: 73520 - DNA, 60 bp, Artificial
  Synthetic oligonucleotide
tcttgaggctctcatggaatggctaaagacaagaccaatcctgtcacctctgactaaggg

SEQ ID NO: 73521 - DNA, 60 bp, Artificial
  Synthetic oligonucleotide
cttgaagctctcatggaatggctaaagacaagaccaattctgtcacctctgactaagggg

SEQ ID NO: 73522 - DNA, 60 bp, Artificial
  Synthetic oligonucleotide
cctgaagttggcaacaggaatgcggaatgtaccagagaaacaaactagaggcctatttgg

SEQ ID NO: 73523 - DNA, 60 bp, Artificial
  Synthetic oligonucleotide
cctgaagttggcaacagggatgcggaatgtaccagagaaacaaactagaggcctattcgg

SEQ ID NO: 73524 - DNA, 60 bp, Artificial
  Synthetic oligonucleotide
accctgaagttggcaacaggaatgcggaatgtaccagagaaacaaactagaggcctattt

SEQ ID NO: 73525 - DNA, 60 bp, Artificial
  Synthetic oligonucleotide
gttcatgctaatgcccaagcagaaagtggaagggcctctttgcatcagaatggaccaggc

SEQ ID NO: 73526 - DNA, 54 bp, Artificial
  Synthetic oligonucleotide
acatctgggtgacaagagaaccttatgtgtcatgcgatcctgacaaatgctatc

SEQ ID NO: 73527 - DNA, 60 bp, Artificial
  Synthetic oligonucleotide
acatctgggtgacaagagaaccttatgtgtcatgcgatcctgaaaagtgttatcaatttg

SEQ ID NO: 73528 - DNA, 60 bp, Artificial
  Synthetic oligonucleotide
tgatgcagggctcgacccttcctagaaggtccggagctgcaggtgctgcagtcaaaggag

SEQ ID NO: 73529 - DNA, 60 bp, Artificial
  Synthetic oligonucleotide
atgccgagatcgaagatctcatatttttggcaagatctgcattgatattgagagggtcag

SEQ ID NO: 73530 - DNA, 60 bp, Artificial
  Synthetic oligonucleotide
tgatgcagggctcgaccctccctagaaggtccggagctgcaggtgctgcagtcaaaggaa

SEQ ID NO: 73531 - DNA, 60 bp, Artificial
  Synthetic oligonucleotide
agaatgatcaaacgggggatcaacgatcgaaatttctggagaggtgagaatgggcggaaa

SEQ ID NO: 73532 - DNA, 60 bp, Artificial
  Synthetic oligonucleotide
gcaatggtggatcaagtgagagaaagtcggaatccaggaaatgctgagatcgaagatctc

SEQ ID NO: 73533 - DNA, 60 bp, Artificial
  Synthetic oligonucleotide
tgatgcagggctcgacccttcctagaaggtccggagctgcaggtgctgcagtcaaaggaa

SEQ ID NO: 73534 - DNA, 60 bp, Artificial
  Synthetic oligonucleotide
ggctcgacccttcctagaaggtccggagctgcaggtgctgcagtcaaaggaatcggaaca

SEQ ID NO: 73535 - DNA, 60 bp, Artificial
  Synthetic oligonucleotide
ggctcgactctccctagaaggtccggagctgcaggtgctgcagtcaaaggaatcggaaca

SEQ ID NO: 73536 - DNA, 60 bp, Artificial
  Synthetic oligonucleotide
cccttcctagaaggtccggagctgcaggtgctgcagtcaaaggagtcgggacaatggtga

SEQ ID NO: 73537 - DNA, 60 bp, Artificial
  Synthetic oligonucleotide
agggcctccgcaggccaaaccagtgtgcaacctacgttttctgtacaaagaaacctccca

SEQ ID NO: 73538 - DNA, 60 bp, Artificial
  Synthetic oligonucleotide
gagggcctccgcaggccaaaccagtgtgcaacctacgttttctgtacaaagaaacctccc

SEQ ID NO: 73539 - DNA, 60 bp, Artificial
  Synthetic oligonucleotide
gggcctccgcaggccaaaccagtgtgcaacctacgttttctgtacaaagaaacctcccat

SEQ ID NO: 73540 - DNA, 60 bp, Artificial
  Synthetic oligonucleotide
gtaaggggcaattctccagtgttcaattacaataaggccactaagaggcttacagttctc

SEQ ID NO: 73541 - DNA, 60 bp, Artificial
  Synthetic oligonucleotide
aaaataagagtacatgaagggtatgaagagttcacaatggttgggagaagagcaacagcc

SEQ ID NO: 73542 - DNA, 60 bp, Artificial
  Synthetic oligonucleotide
cttcggcaaaatccaacagaggaacaagctgtggacatatgcaaagcagcaatgggctta

SEQ ID NO: 73543 - DNA, 60 bp, Artificial
  Synthetic oligonucleotide
ggattagttcatctttcagctttggcggattcactttcaaaagaacaagcgggtcgtcag

SEQ ID NO: 73544 - DNA, 60 bp, Artificial
  Synthetic oligonucleotide
caagcgggtcgtcagttaagagagaagaagaagtgcttacaggcaaccttcaaacattga

SEQ ID NO: 73545 - DNA, 60 bp, Artificial
  Synthetic oligonucleotide
gattcgtgaggacactgtttcagcagatgcgggatgtgcttggaacttttgacactgttc

SEQ ID NO: 73546 - DNA, 60 bp, Artificial
  Synthetic oligonucleotide
tctggtccctaaggcagccagaggtcagtacagtggattcgtgaggacactgtttcagca

SEQ ID NO: 73547 - DNA, 60 bp, Artificial
  Synthetic oligonucleotide
cgagccatttcagtctctggtccctaaggcagccagaggtcagtacagtggattcgtgag

SEQ ID NO: 73548 - DNA, 60 bp, Artificial
  Synthetic oligonucleotide
aatgggcttaaggattagttcatctttcagctttggcggattcactttcaaaagaacaag

SEQ ID NO: 73549 - DNA, 60 bp, Artificial
  Synthetic oligonucleotide
caattctcctccttgactgtgaatgtaaggggatcaggaatgagaatactggtaaggggc

SEQ ID NO: 73550 - DNA, 60 bp, Artificial
  Synthetic oligonucleotide
tgaaagaaatgaacagggacaaaccctttggagcaaaacaaatgatgccggctcagaccg

SEQ ID NO: 73551 - DNA, 60 bp, Artificial
  Synthetic oligonucleotide
gggacaaaccctttggagcaaaacaaatgatgccggctcagaccgagtgatggtatcacc

SEQ ID NO: 73552 - DNA, 60 bp, Artificial
  Synthetic oligonucleotide
aaaaagtacacatcaggaaggcaagagaagaaccctgcactcaggatgaagtggatgatg

SEQ ID NO: 73553 - DNA, 60 bp, Artificial
  Synthetic oligonucleotide
acacatcaggaaggcaagagaagaaccctgcactcaggatgaagtggatgatggcaatga

SEQ ID NO: 73554 - DNA, 60 bp, Artificial
  Synthetic oligonucleotide
cgaaaggttgaaacacgggacctttggccctgttcacttcagaaatcaagttaaaataag

SEQ ID NO: 73555 - DNA, 60 bp, Artificial
  Synthetic oligonucleotide
cacgggacctttggccctgttcacttcagaaatcaagttaaaataagacggagggttgac

SEQ ID NO: 73556 - DNA, 60 bp, Artificial
  Synthetic oligonucleotide
tccagatgaaggcacagctggagtagagtccgctgttttgagaggattcctcatcttggg

SEQ ID NO: 73557 - DNA, 55 bp, Artificial
  Synthetic oligonucleotide
tgaactttgtcaatagggcaaaccagcggctaaacccaatgcatcaactcttgag

SEQ ID NO: 73558 - DNA, 60 bp, Artificial
  Synthetic oligonucleotide
ttaaaataagacggagggttgacataaaccctggtcacgcagacctcagtgccaaagagg

SEQ ID NO: 73559 - DNA, 57 bp, Artificial
  Synthetic oligonucleotide
aataacttattcgtcatcaatgatgtgggagatcaatggtcctgaatcggttttggt

SEQ ID NO: 73560 - DNA, 60 bp, Artificial
  Synthetic oligonucleotide
catggtattttcacaagaggattgcatgatcaaggcagttcgaggtgatttgaactttgt

SEQ ID NO: 73561 - DNA, 60 bp, Artificial
  Synthetic oligonucleotide
agaggattgcatgatcaaggcagttcgaggtgatttgaactttgtcaatagggcaaacca

SEQ ID NO: 73562 - DNA, 59 bp, Artificial
  Synthetic oligonucleotide
gaatgatcggaatactacctgacatgaccccaagtactgagatgtcgctgagggggata

SEQ ID NO: 73563 - DNA, 60 bp, Artificial
  Synthetic oligonucleotide
gtagatgaatactccagcacagagagagtggtagtgagcattgaccgatttttaagagtc

SEQ ID NO: 73564 - DNA, 60 bp, Artificial
  Synthetic oligonucleotide
agaagagcaacagtatcagcagacccactagcatctctattggagatgtgccacagcaca

SEQ ID NO: 73565 - DNA, 60 bp, Artificial
  Synthetic oligonucleotide
gccaggaacatagtaagaagagcaacagtatcagcagacccactagcatctctattggag

SEQ ID NO: 73566 - DNA, 60 bp, Artificial
  Synthetic oligonucleotide
atagtaagtgggagagacgagcagtcaattgctgaagcaataattgtggccatggtattt

SEQ ID NO: 73567 - DNA, 60 bp, Artificial
  Synthetic oligonucleotide
ctcccagtggccggtggaacaagcagtgtttacattgaggtgctgcatttaactcagggg

SEQ ID NO: 73568 - DNA, 60 bp, Artificial
  Synthetic oligonucleotide
caggaggggaagtgagaaatgatgatgttgaccaaagcttgattatcgctgccaggaaca

SEQ ID NO: 73569 - DNA, 60 bp, Artificial
  Synthetic oligonucleotide
gctgcatttaactcaggggacatgctgggagcaaatgtacaccccaggaggggaagtgag

SEQ ID NO: 73570 - DNA, 60 bp, Artificial
  Synthetic oligonucleotide
gcaagattgcccctttgatggttgcatacatgctagaaagggagctggtccgtaaaacga

SEQ ID NO: 73571 - DNA, 60 bp, Artificial
  Synthetic oligonucleotide
gccaaagaggcacaggatgtaatcatggaggtcgttttcccaaatgaagtgggagcaaga

SEQ ID NO: 73572 - DNA, 60 bp, Artificial
  Synthetic oligonucleotide
cgtaaaacgaggttcctcccagtggccggtggaacaagcagtgtttacattgaggtgctg

SEQ ID NO: 73573 - DNA, 60 bp, Artificial
  Synthetic oligonucleotide
tgatggttgcatacatgctagaaagggagctggtccgtaaaacgaggttcctcccagtgg

SEQ ID NO: 73574 - DNA, 60 bp, Artificial
  Synthetic oligonucleotide
gcactcgcgagatactcaccaaaaccactgtggaccacatggccataatcaaaaagtaca

SEQ ID NO: 73575 - DNA, 60 bp, Artificial
  Synthetic oligonucleotide
tgattaatgatccctgggttttgcttaatgcgtcttggttcaactccttcctcacacatg

SEQ ID NO: 73576 - DNA, 60 bp, Artificial
  Synthetic oligonucleotide
ccagactattcaccataagacaagagatggccagtagaggtctctgggattcctttcgtc

SEQ ID NO: 73577 - DNA, 60 bp, Artificial
  Synthetic oligonucleotide
gcagggctaggatcaaaaccagactattcaccataagacaagagatggccaacagaggcc

SEQ ID NO: 73578 - DNA, 60 bp, Artificial
  Synthetic oligonucleotide
aaagcagggctaggatcaaaaccagactattcaccataagacaagagatggccaacagag

SEQ ID NO: 73579 - DNA, 52 bp, Artificial
  Synthetic oligonucleotide
tgctgtgtgttgttctactgggattcatcatgtgggcctgccagagaggcaa

SEQ ID NO: 73580 - DNA, 60 bp, Artificial
  Synthetic oligonucleotide
gttgacagaggtaatagatccggttattctggtattttctctgttgaaggcaaaagctgc

SEQ ID NO: 73581 - DNA, 60 bp, Artificial
  Synthetic oligonucleotide
gttgacagaggtaataggaccggttattctggtattttctctgttgaaggcaaaagctgc

SEQ ID NO: 73582 - DNA, 60 bp, Artificial
  Synthetic oligonucleotide
agtggatatgcacaaacagactgtgtcctggaggctatggcctcccttgaagaatcccac

SEQ ID NO: 73583 - DNA, 60 bp, Artificial
  Synthetic oligonucleotide
gtattactaagggctttcaccgaagagggagcaattgttggcgaaatctcaccattgcct

SEQ ID NO: 73584 - DNA, 60 bp, Artificial
  Synthetic oligonucleotide
aagtttttagatcgaatggactaacagctaatgaatcaggaaggctaatagatttcctca

SEQ ID NO: 73585 - DNA, 60 bp, Artificial
  Synthetic oligonucleotide
caatccgactctattgttcctaaaggttccagcgcaaaatgccataagcaccacattccc

SEQ ID NO: 73586 - DNA, 60 bp, Artificial
  Synthetic oligonucleotide
atgtattactatctcctgaggaggtcagtgaaacacaggggacagagaaactgacaataa

SEQ ID NO: 73587 - DNA, 60 bp, Artificial
  Synthetic oligonucleotide
atgattgatggaattgggagattctacatccaaatgtgcactgaacttaaactcagtgat

SEQ ID NO: 73588 - DNA, 60 bp, Artificial
  Synthetic oligonucleotide
gatgattgatggaattgggagattctacatccaaatgtgcactgaacttaaactcagtga

SEQ ID NO: 73589 - DNA, 60 bp, Artificial
  Synthetic oligonucleotide
tggcgtctcaaggcaccaaacggtcttatgaacagatggaaactgatggggatcgccaga

SEQ ID NO: 73590 - DNA, 60 bp, Artificial
  Synthetic oligonucleotide
aacggtcttatgaacagatggaaactgatggggatcgccagaatgcaactgaaattaggg

SEQ ID NO: 73591 - DNA, 60 bp, Artificial
  Synthetic oligonucleotide
ggtcttatgaacagatggaaactgatggggatcgccagaatgcaactgagattagagcat

SEQ ID NO: 73592 - DNA, 60 bp, Artificial
  Synthetic oligonucleotide
gctcctcggggttacttcaaaatacgaaatgggaaaagctcaataatgagatcagatgca

SEQ ID NO: 73593 - DNA, 60 bp, Artificial
  Synthetic oligonucleotide
ccactacctgaggataatgagccaagtggatatgcacaaacagactgtgtcctggaagca

SEQ ID NO: 73594 - DNA, 60 bp, Artificial
  Synthetic oligonucleotide
gaatgtgtttgcatcaatggaacttgtacagtagtaatgactgatggaagtgcgtcagga

SEQ ID NO: 73595 - DNA, 60 bp, Artificial
  Synthetic oligonucleotide
gaatgttcctggcgatgattacatatatcacaaaaaatcaacctgaatggttcagaaacg

SEQ ID NO: 73596 - DNA, 60 bp, Artificial
  Synthetic oligonucleotide
agtggcatttggcctggtatgtgcaacatgtgaacagattgctgactcccagcataggtc

SEQ ID NO: 73597 - DNA, 60 bp, Artificial
  Synthetic oligonucleotide
gacgctttgtccaaaatgccctcaatgggaatggagatccaaataacatggacaaggcag

SEQ ID NO: 73598 - DNA, 60 bp, Artificial
  Synthetic oligonucleotide
aaagatgagccttctaaccgaggtcgaaacgtatgttctctctatcgttccatcaggccc

SEQ ID NO: 73599 - DNA, 60 bp, Artificial
  Synthetic oligonucleotide
atggaacaggaacagggtacaccatggacacggtcaacagaacacaccaatattcagaga

SEQ ID NO: 73600 - DNA, 60 bp, Artificial
  Synthetic oligonucleotide
tcagaagtagaagggagaattcaggacctcgagaaatatgtggaggacactaaaatagat

SEQ ID NO: 73601 - DNA, 58 bp, Artificial
  Synthetic oligonucleotide
catgttcaacatgctaagtacagttttaggagtctcgatactgaatcttgggcaaaag

SEQ ID NO: 73602 - DNA, 60 bp, Artificial
  Synthetic oligonucleotide
ggagtcggaatgcgtttgtatcaatggaacttgtacagtagtaatgactgatgggagcgc

SEQ ID NO: 73603 - DNA, 60 bp, Artificial
  Synthetic oligonucleotide
aataacatacatgcaagcattacaactgctgtttgaagtggaacaggagataagaacttt

SEQ ID NO: 73604 - DNA, 60 bp, Artificial
  Synthetic oligonucleotide
ccggaaacaatttgtagaccaagaactgagtgatgccccattccttgatcggcttcgccg

SEQ ID NO: 73605 - DNA, 60 bp, Artificial
  Synthetic oligonucleotide
aggaattcacaatggtggggaaaagagcaacagctatactcagaaaagcaaccagaagat

SEQ ID NO: 73606 - DNA, 60 bp, Artificial
  Synthetic oligonucleotide
aggagttcacaatggtggggaaaagagcaacagctatactcagaaaagcaaccagaaggt

SEQ ID NO: 73607 - DNA, 60 bp, Artificial
  Synthetic oligonucleotide
aagagttcacaatggtggggaaaagagcaacagctatactcagaaaagcaaccaggagat

SEQ ID NO: 73608 - DNA, 55 bp, Artificial
  Synthetic oligonucleotide
gcccgaattgatgcgcgaattgacttcgaatctggacggattaagaaggaggagt

SEQ ID NO: 73609 - DNA, 60 bp, Artificial
  Synthetic oligonucleotide
ggtggacggttggtacggtttcaggcatcagaattctgagggcacaggacaagcagcaga

SEQ ID NO: 73610 - DNA, 60 bp, Artificial
  Synthetic oligonucleotide
gcaattggggtactcatcggagggcttgaatggaatgataacacagttcgagtctctaaa

SEQ ID NO: 73611 - DNA, 60 bp, Artificial
  Synthetic oligonucleotide
cactgttaaagcacagatttgaaataatcgaggggagagacagaacaatggcctggacgg

SEQ ID NO: 73612 - DNA, 60 bp, Artificial
  Synthetic oligonucleotide
tggagttttctctgactgacccgagacttgagccacataaatgggagaaatactgtgtcc

SEQ ID NO: 73613 - DNA, 60 bp, Artificial
  Synthetic oligonucleotide
ttcggaaatggaagattttgtgcgacaatgcttcaacccgatgattgtcgaacttgcaga

SEQ ID NO: 73614 - DNA, 60 bp, Artificial
  Synthetic oligonucleotide
gcgacaatgcttcaacccgatgattgtcgaacttgcagagaaagcaatgaaagagtatgg

SEQ ID NO: 73615 - DNA, 60 bp, Artificial
  Synthetic oligonucleotide
aatgaaagaatatggggaagatccaaaaatcgagacaaacaaattcgctgcaatatgcac

SEQ ID NO: 73616 - DNA, 60 bp, Artificial
  Synthetic oligonucleotide
gctcctcattgttcaggcacttagggacaacctggaacctggtacattcgatcttggagg

SEQ ID NO: 73617 - DNA, 60 bp, Artificial
  Synthetic oligonucleotide
cacttggaagtgtgtttcatgtattcagatttccatttcattgatgaacgaggtgagtcg

SEQ ID NO: 73618 - DNA, 60 bp, Artificial
  Synthetic oligonucleotide
cgaaatttctgctgatggatgctctgaagcttagcattgaagacccgagtcatgagggcg

SEQ ID NO: 73619 - DNA, 60 bp, Artificial
  Synthetic oligonucleotide
acataaatgggaaaaatactgtgtccttgaaataggggacatgctcctgcgaactgcaat

SEQ ID NO: 73620 - DNA, 60 bp, Artificial
  Synthetic oligonucleotide
aatgcatgaagacctttttcggctggaaagagcccaacattgtcaagccacatgaaaagg

SEQ ID NO: 73621 - DNA, 60 bp, Artificial
  Synthetic oligonucleotide
cagttgatcccaatgataagcaaatgcagaaccaaagaagggcggcggaagacaaatctg

SEQ ID NO: 73622 - DNA, 60 bp, Artificial
  Synthetic oligonucleotide
catttctgaagacaaccccacgccccctgagattaccggaagggcctccttgctctcagc

SEQ ID NO: 73623 - DNA, 60 bp, Artificial
  Synthetic oligonucleotide
aggaattactttacagctgaagtgtctcactgcagggcaacagaatatataatgaagggg

SEQ ID NO: 73624 - DNA, 60 bp, Artificial
  Synthetic oligonucleotide
catgaaaagggcataaaccccaattatctcctggcttggaagcaagtgctaacagagcta

SEQ ID NO: 73625 - DNA, 60 bp, Artificial
  Synthetic oligonucleotide
gacccgagtcatgagggcgaagggataccgctgtatgatgcaatcaaatgcatgaagacc

SEQ ID NO: 73626 - DNA, 60 bp, Artificial
  Synthetic oligonucleotide
gagtcgagaaagctgctcctcattgttcaggcacttagggacaacctggaacctggtaca

SEQ ID NO: 73627 - DNA, 60 bp, Artificial
  Synthetic oligonucleotide
ggaaccatgcgcaggctcgccgatcaaagtctcccaccgaacttctccagccttgaaaac

SEQ ID NO: 73628 - DNA, 60 bp, Artificial
  Synthetic oligonucleotide
aacatggcccattggggaatcacccaaaggagtagaagaaggttccatcggaaaagtgtg

SEQ ID NO: 73629 - DNA, 60 bp, Artificial
  Synthetic oligonucleotide
agtagaagaaggttccatcggaaaagtgtgcaggactctgctggcaaaatctgtattcaa

SEQ ID NO: 73630 - DNA, 60 bp, Artificial
  Synthetic oligonucleotide
ttcaacagtttgtatgcatctccacaacttgaggggttctcagctgagtcgagaaagctg

SEQ ID NO: 73631 - DNA, 60 bp, Artificial
  Synthetic oligonucleotide
aacagagctacaggatattgaaaatgaggagaagattccaaaaacaaagaacatgaagaa

SEQ ID NO: 73632 - DNA, 60 bp, Artificial
  Synthetic oligonucleotide
gacacacatccacatcttttcattcactggggaagaaatggctactaaagcagactacac

SEQ ID NO: 73633 - DNA, 60 bp, Artificial
  Synthetic oligonucleotide
cagcgatgagcctgaacaaagatcactggcaagttggattcaaagtgagttcaacaaggc

SEQ ID NO: 73634 - DNA, 60 bp, Artificial
  Synthetic oligonucleotide
cctggacagtagtgaacagcatctgcaacaccacaggagttgaaaaacccaagttcctcc

SEQ ID NO: 73635 - DNA, 60 bp, Artificial
  Synthetic oligonucleotide
acatgaagaaaacaagccaattgaagtgggcacttggtgaaaatatggcaccagagaaag

SEQ ID NO: 73636 - DNA, 60 bp, Artificial
  Synthetic oligonucleotide
gaacgaggtgagtcgataattgtggagtctggcgatccaaatgcactcctaaaacaccga

SEQ ID NO: 73637 - DNA, 60 bp, Artificial
  Synthetic oligonucleotide
cttgtgaattgactgactctagttggatagaactcgatgaaataggggaggatgttgccc

SEQ ID NO: 73638 - DNA, 60 bp, Artificial
  Synthetic oligonucleotide
atttgaaattacaggaaccatgcgcaggctcgccgatcaaagtctcccaccgaacttctc

SEQ ID NO: 73639 - DNA, 60 bp, Artificial
  Synthetic oligonucleotide
ggctactaaagcagactacactcttgatgaagaaagtagagcaaggatcaaaaccagact

SEQ ID NO: 73640 - DNA, 60 bp, Artificial
  Synthetic oligonucleotide
aatggatgactttcagttgatcccaatgataagcaaatgcagaaccaaagaagggcggcg

SEQ ID NO: 73641 - DNA, 60 bp, Artificial
  Synthetic oligonucleotide
ctgtgtcaagttcccaggtagattgctttctttggcatatccggaaacaagttgtagacc

SEQ ID NO: 73642 - DNA, 60 bp, Artificial
  Synthetic oligonucleotide
tcagatccttgatggagaaaactgcacactaatagatgctctattgggagaccctcagtg

SEQ ID NO: 73643 - DNA, 60 bp, Artificial
  Synthetic oligonucleotide
gttgaacgcagcaaagcctacagcaactgttacccttatgatgtgccggattatgcctcc

SEQ ID NO: 73644 - DNA, 60 bp, Artificial
  Synthetic oligonucleotide
acaggtggaatatgcgacagtcctcatcagatccttgatggagaaaactgcacactaata

SEQ ID NO: 73645 - DNA, 60 bp, Artificial
  Synthetic oligonucleotide
attgaacgtgactatgccaaacaatgaaaaatttgacaaattgtacatttggggggttca

SEQ ID NO: 73646 - DNA, 60 bp, Artificial
  Synthetic oligonucleotide
ctcatccggcacactggagtttaacaatgaaagcttcaattggactggagtcactcagaa

SEQ ID NO: 73647 - DNA, 60 bp, Artificial
  Synthetic oligonucleotide
gcttcaggaagaatcacagtctctaccaaaagaagccaacaaactgtaatcccgaatatc

SEQ ID NO: 73648 - DNA, 57 bp, Artificial
  Synthetic oligonucleotide
ctgaagtcaggatacaaagattgggtcctatggatttcctttgccatatcatgtttt

SEQ ID NO: 73649 - DNA, 60 bp, Artificial
  Synthetic oligonucleotide
cccagatatgttaagcaaaacactctgaaattggcaacagggatgcggaatgtgccagag

SEQ ID NO: 73650 - DNA, 60 bp, Artificial
  Synthetic oligonucleotide
tcacatatggggcctgtcccagatatgttaagcaaaacactctgaaattggcaataggga

SEQ ID NO: 73651 - DNA, 60 bp, Artificial
  Synthetic oligonucleotide
agaatcacagtctctaccaaaagaagccaacaaactgtaatcccgaatatcggatctaga

SEQ ID NO: 73652 - DNA, 60 bp, Artificial
  Synthetic oligonucleotide
ccgggagacacacttttgattaacagcacagggaatctaattgctcctcggggttacttc

SEQ ID NO: 73653 - DNA, 60 bp, Artificial
  Synthetic oligonucleotide
atatgcgacagtcctcatcagatccttgatggagaaaactgcacactaatagatgctcta

SEQ ID NO: 73654 - DNA, 60 bp, Artificial
  Synthetic oligonucleotide
caagcaccaggaagaatcacagtctctaccaaaagaagccaacaaactgtaatcccgaat

SEQ ID NO: 73655 - DNA, 60 bp, Artificial
  Synthetic oligonucleotide
tatgccaaacaatgaaaaatttgacaaattgtacatttggggggttcaccacccgggcac

SEQ ID NO: 73656 - DNA, 60 bp, Artificial
  Synthetic oligonucleotide
ctaccaaaagaagccaacaaactgtaatcccgaatatcggatctagacccagggtaaggg

SEQ ID NO: 73657 - DNA, 60 bp, Artificial
  Synthetic oligonucleotide
gcatcaggaagaatcacagtctctaccaaaagaagccaacaaactgtaatcccgaatatc

SEQ ID NO: 73658 - DNA, 60 bp, Artificial
  Synthetic oligonucleotide
cagcagatccactagcatctttattggagatgtgccacagcacacaaattggcggaacaa

SEQ ID NO: 73659 - DNA, 60 bp, Artificial
  Synthetic oligonucleotide
ctagcatctttattggagatgtgccacagcacacaaattggcggaacaaggatggtggac

SEQ ID NO: 73660 - DNA, 60 bp, Artificial
  Synthetic oligonucleotide
gaggattgcatgataaaagcagttagaggtgacctgaatttcgtcaacagggcaaaccaa

SEQ ID NO: 73661 - DNA, 60 bp, Artificial
  Synthetic oligonucleotide
ttattggagatgtgccacagcacacaaattggcgggacaaggatggtggacattcttagg

SEQ ID NO: 73662 - DNA, 52 bp, Artificial
  Synthetic oligonucleotide
ttgggatttctagcatggtggaggccatggtgtctagggcccggattgatgc

SEQ ID NO: 73663 - DNA, 60 bp, Artificial
  Synthetic oligonucleotide
cctcgaacctgggacctttgatcttgggggactatatgaagcaattgaggagtgcctgat

SEQ ID NO: 73664 - DNA, 60 bp, Artificial
  Synthetic oligonucleotide
acctggtacattcgatcttggaggactatatgaagcaattgaggagtgcctgattaatga

SEQ ID NO: 73665 - DNA, 60 bp, Artificial
  Synthetic oligonucleotide
cattcgatcttggaggactatatgaagcaattgaggagtgcctgattaatgatccctggg

SEQ ID NO: 73666 - DNA, 60 bp, Artificial
  Synthetic oligonucleotide
gtacattcgatcttggaggactatatgaagcaattgaggagtgcctgattaatgatccct

SEQ ID NO: 73667 - DNA, 60 bp, Artificial
  Synthetic oligonucleotide
cgggaacaggatacaccatggacacggtcaacagaacacaccaatactcagaaaagggga

SEQ ID NO: 73668 - DNA, 60 bp, Artificial
  Synthetic oligonucleotide
agccatggaacgggaacaggatacaccatggacacggtcaacagaacacaccaatactca

SEQ ID NO: 73669 - DNA, 60 bp, Artificial
  Synthetic oligonucleotide
atggaacgggaacaggatacaccatggacacggtcaacagaacacaccaatactcagaaa

SEQ ID NO: 73670 - DNA, 60 bp, Artificial
  Synthetic oligonucleotide
gccatggaacgggaacaggatacaccatggacacggtcaacagaacacaccaatactcag

SEQ ID NO: 73671 - DNA, 60 bp, Artificial
  Synthetic oligonucleotide
caagatacgtagaagagtagacataaaccctggtcatgcagacctcagtgccaaagaggc

SEQ ID NO: 73672 - DNA, 59 bp, Artificial
  Synthetic oligonucleotide
ggtctggttattctggtattttctctgttgaaggcaaaagctgcatcaataggtgtttt

SEQ ID NO: 73673 - DNA, 60 bp, Artificial
  Synthetic oligonucleotide
attttctctgttgaaggcaaaagctgcatcaataggtgtttttatgtggagttaataaga

SEQ ID NO: 73674 - DNA, 60 bp, Artificial
  Synthetic oligonucleotide
ggtctggttattctggtattttctctgttgaaggcaaaagctgcatcaataggtgttttt

SEQ ID NO: 73675 - DNA, 60 bp, Artificial
  Synthetic oligonucleotide
ccctttgcatcagaatggaccaggcaataatggagaaaaacatcatgttgaaagcgaatt

SEQ ID NO: 73676 - DNA, 60 bp, Artificial
  Synthetic oligonucleotide
ccgtcgggaagatgattgatggaattgggagattctacatccaaatgtgcactgaactta

SEQ ID NO: 73677 - DNA, 60 bp, Artificial
  Synthetic oligonucleotide
tcaaaatcatggcgtctcaaggcaccaaacggtcttatgaacagatggaaactgatgggg

SEQ ID NO: 73678 - DNA, 60 bp, Artificial
  Synthetic oligonucleotide
agtcggaacccaggaaatgctgagatcgaagatctcatatttttggcaagatctgcatta

SEQ ID NO: 73679 - DNA, 60 bp, Artificial
  Synthetic oligonucleotide
tccgtcgggaagatgattgatggaattgggagattctacatccaaatgtgcactgaactt

SEQ ID NO: 73680 - DNA, 60 bp, Artificial
  Synthetic oligonucleotide
gcaatggtggatcaagtgagagaaagtcggaacccaggaaatgctgagatagaagatctc

SEQ ID NO: 73681 - DNA, 60 bp, Artificial
  Synthetic oligonucleotide
gcaatggtggatcaagtgagagaaagtcggaacccaggaaatgccgagatcgaagatctc

SEQ ID NO: 73682 - DNA, 60 bp, Artificial
  Synthetic oligonucleotide
tgcacaaagagcaatggtggatcaagtgagagaaagtcggaacccaggaaatgccgagat

SEQ ID NO: 73683 - DNA, 60 bp, Artificial
  Synthetic oligonucleotide
tccaaatgtgcactgaacttaaactcagtgattatgaagggcggttgatccaaaacagct

SEQ ID NO: 73684 - DNA, 60 bp, Artificial
  Synthetic oligonucleotide
taatggattctaacactgtgtcaagtttccaggtagattgctttctttggcatatccgga

SEQ ID NO: 73685 - DNA, 60 bp, Artificial
  Synthetic oligonucleotide
cataatggattctaacactgtgtcaagtttccaggtagattgctttctttggcatatccg

SEQ ID NO: 73686 - DNA, 60 bp, Artificial
  Synthetic oligonucleotide
aatggatcccaacactgtgtcaagtttccaggtagattgctttctttggcatatccggaa

SEQ ID NO: 73687 - DNA, 60 bp, Artificial
  Synthetic oligonucleotide
atggattcaaacactgtgtcaagttcccaggtagattgctttctttggcatatccggaaa

SEQ ID NO: 73688 - DNA, 60 bp, Artificial
  Synthetic oligonucleotide
ggatcccaacactgtgtcaagtttccaggtagattgctttctttggcatatccggaagca

SEQ ID NO: 73689 - DNA, 60 bp, Artificial
  Synthetic oligonucleotide
caatcctgtcacctctgactaaggggattttgggatttgtattcacgctcaccgtgccca

SEQ ID NO: 73690 - DNA, 60 bp, Artificial
  Synthetic oligonucleotide
cagcagcaactgcagggatcctaacaatgagagagggaacccaggggtgaaagggtgggc

SEQ ID NO: 73691 - DNA, 51 bp, Artificial
  Synthetic oligonucleotide
ttcgcgctcaggttatgagactttcagggtcattggtggttggaccacggc

SEQ ID NO: 73692 - DNA, 56 bp, Artificial
  Synthetic oligonucleotide
aatgcagcattccctcgaacagtcaagtggtgccatgtgaaccaatcataatagaa

SEQ ID NO: 73693 - DNA, 60 bp, Artificial
  Synthetic oligonucleotide
gtgaaaatgaatccaaaccagaagataataacaattggctctgtctctctgaccattgca

SEQ ID NO: 73694 - DNA, 60 bp, Artificial
  Synthetic oligonucleotide
aggtgtttttatgtggagttaataagagggaggccacaggaaaccagggtatggtggact

SEQ ID NO: 73695 - DNA, 60 bp, Artificial
  Synthetic oligonucleotide
atatatgttcagggcttgttggcgacacaccaagaaacgatgatagctctagcagcagca

SEQ ID NO: 73696 - DNA, 60 bp, Artificial
  Synthetic oligonucleotide
gcccattgtcaggaagtgctcagcatatagaggaatgttcctgttaccctcgatatccag

SEQ ID NO: 73697 - DNA, 60 bp, Artificial
  Synthetic oligonucleotide
catgtctgtgtcactggagatgatagaaatgcaactgctagtttcatttatgatgggatg

SEQ ID NO: 73698 - DNA, 60 bp, Artificial
  Synthetic oligonucleotide
gagaaccttatgtgtcatgcggtcccagtaaatgttatcagtttgcactcgggcagggga

SEQ ID NO: 73699 - DNA, 60 bp, Artificial
  Synthetic oligonucleotide
agaatacaggaattggtcgaaaccgcagtgtcagattacagggtttgctcctttctccaa

SEQ ID NO: 73700 - DNA, 60 bp, Artificial
  Synthetic oligonucleotide
gtgaggggatcagggatgagaatacttgtaaggggcaattctcccgtattcaactacaac

SEQ ID NO: 73701 - DNA, 60 bp, Artificial
  Synthetic oligonucleotide
gcacaaacagactgtgtcctggaggctatggctttccttgaagaatcccacccagggatc

SEQ ID NO: 73702 - DNA, 60 bp, Artificial
  Synthetic oligonucleotide
gcgatttgaagcaatatgatagtgatgaacctgaattaaggtcactttcaagctggatac

SEQ ID NO: 73703 - DNA, 60 bp, Artificial
  Synthetic oligonucleotide
gggagaattcaggacctcgagaaatacgttgaagacactaaaatagatctctggtcttac

SEQ ID NO: 73704 - DNA, 60 bp, Artificial
  Synthetic oligonucleotide
gctcctcggggttacttcaaaatgcgaagtgggaaaagctcaataatgaggtcagatgca

SEQ ID NO: 73705 - DNA, 60 bp, Artificial
  Synthetic oligonucleotide
atcatgtgggcctgccaaaaaggcaacattaggtgcaacatttgcatttgagtgcagtaa

SEQ ID NO: 73706 - DNA, 60 bp, Artificial
  Synthetic oligonucleotide
gggttcatcatgtgggcctgccaaaaaggcaacattaggtgcaacatttgcatttgaatg

SEQ ID NO: 73707 - DNA, 60 bp, Artificial
  Synthetic oligonucleotide
ctgctttgtgttgttttgctggggttcatcatgtgggcctgccagagaggcaacattagg

SEQ ID NO: 73708 - DNA, 52 bp, Artificial
  Synthetic oligonucleotide
cctgatggggcgaatatcaatttcatgcctatataagctttcgcaattttag

SEQ ID NO: 73709 - DNA, 60 bp, Artificial
  Synthetic oligonucleotide
tgatgtgccggattatgcctcccttaggtcactagttgcctcatccggcacactggagtt

SEQ ID NO: 73710 - DNA, 60 bp, Artificial
  Synthetic oligonucleotide
aaaggattatagcattgtttcaagttatgtgtgctcaggacttgttggagacacacccag

SEQ ID NO: 73711 - DNA, 60 bp, Artificial
  Synthetic oligonucleotide
ggattatagcattgtttccagttatctgtgctcaggacttgttggagacacacccagaaa

SEQ ID NO: 73712 - DNA, 60 bp, Artificial
  Synthetic oligonucleotide
ggattatagcattgtttctagttatgtgtgctcaggacttgttggagacacacccagaaa

SEQ ID NO: 73713 - DNA, 60 bp, Artificial
  Synthetic oligonucleotide
gggaaaatcgttcatactagcacattgtcaggaagtgctcagcatgtcgaggagtgctcc

SEQ ID NO: 73714 - DNA, 60 bp, Artificial
  Synthetic oligonucleotide
aatgaagaaggtggtcatggagtgaaaggctgggcctttgatgatggaaatgacgtgtgg

SEQ ID NO: 73715 - DNA, 60 bp, Artificial
  Synthetic oligonucleotide
aaggtggtcatggagtgaaaggctgggcctttgatgatggaaatgacgtgtggatgggga

SEQ ID NO: 73716 - DNA, 60 bp, Artificial
  Synthetic oligonucleotide
ggattttgggatttgtgttcacgctcaccgtgcccagtgagcggggactgcagcgtagac

SEQ ID NO: 73717 - DNA, 60 bp, Artificial
  Synthetic oligonucleotide
cctgtcacctctgactaaggggattttggggtttgtgttcacgctcaccgtgcccagtga

SEQ ID NO: 73718 - DNA, 60 bp, Artificial
  Synthetic oligonucleotide
tgtcacctctgactaagggaattttggggtttgtgttcacgctcaccgtgcccagtgagc

SEQ ID NO: 73719 - DNA, 60 bp, Artificial
  Synthetic oligonucleotide
cctcggggttacttcaaaatacgaagtgggaaaagctcaataatgagatcagatgcaccc

SEQ ID NO: 73720 - DNA, 60 bp, Artificial
  Synthetic oligonucleotide
gctcctaggggttacttcaaaatacgaagtgggaaaagctcaataatgagatcagatgca

SEQ ID NO: 73721 - DNA, 60 bp, Artificial
  Synthetic oligonucleotide
cccaactcaacccaattgatggaccactacctgaggataatgaaccaagtggatatgcac

SEQ ID NO: 73722 - DNA, 60 bp, Artificial
  Synthetic oligonucleotide
ttcttggcgatgattacatatatcacaaaaaatcaacctgagtggttcagaaacatcctg

SEQ ID NO: 73723 - DNA, 60 bp, Artificial
  Synthetic oligonucleotide
aatgcaccaaatcatgagggaatacaagcaggggtggatagattctacagggtctgcaag

SEQ ID NO: 73724 - DNA, 60 bp, Artificial
  Synthetic oligonucleotide
aatgcaccaaatcatgagggaatacaagcaggggtggatagattctacaggacctgcaag

SEQ ID NO: 73725 - DNA, 60 bp, Artificial
  Synthetic oligonucleotide
ggggactgtaaccactgaagtggcatttggcctggtatgtgcaacatgtgaacagattgc

SEQ ID NO: 73726 - DNA, 60 bp, Artificial
  Synthetic oligonucleotide
ggcctggtatgtgcaacatgtgaacagattgctgactcccagcacaggtctcataggcag

SEQ ID NO: 73727 - DNA, 60 bp, Artificial
  Synthetic oligonucleotide
ggtctaagagatgatcttcttgaaaatttgcagacctatcagaaacgaatgggagtgcag

SEQ ID NO: 73728 - DNA, 60 bp, Artificial
  Synthetic oligonucleotide
ctagctccagtactggtctaagagatgatcttcttgaaaatttgcagacctaccagaaac

SEQ ID NO: 73729 - DNA, 60 bp, Artificial
  Synthetic oligonucleotide
tatacaataggatgggggctgtaaccaccgaagtggcatttggcctggtatgtgcaacat

SEQ ID NO: 73730 - DNA, 60 bp, Artificial
  Synthetic oligonucleotide
gaaactggttcatgctaatgcccaagcagaaagtagaaggacctctttgcatcagaatgg

SEQ ID NO: 73731 - DNA, 60 bp, Artificial
  Synthetic oligonucleotide
gaaactggttcatgctaatgcccaagcagaaagtggaagggcctctttgcatcagaatgg

SEQ ID NO: 73732 - DNA, 60 bp, Artificial
  Synthetic oligonucleotide
aagagcaacagctatactcagaaaagcaaccagaagattggttcagctcatagtgagtgg

SEQ ID NO: 73733 - DNA, 60 bp, Artificial
  Synthetic oligonucleotide
aaagaacaagcgggtcgtcagttaagagagaagaagaagtgcttacaggcaatcttcaaa

SEQ ID NO: 73734 - DNA, 60 bp, Artificial
  Synthetic oligonucleotide
aattgaaaaggaattctcagaagtagaagggagaattcaggacctcgagaaatatgttga

SEQ ID NO: 73735 - DNA, 60 bp, Artificial
  Synthetic oligonucleotide
gcctgcatagggtcaatcagaaatgggacttatgaccatggtgtatacagagacgaagca

SEQ ID NO: 73736 - DNA, 60 bp, Artificial
  Synthetic oligonucleotide
ggaattctcagaagtagaagggagaattcaggacctcgagaaatatgttgaggacactaa

SEQ ID NO: 73737 - DNA, 60 bp, Artificial
  Synthetic oligonucleotide
tgggaagaacacagatcttgaggctctcatggaatggctaaagacaagaccaatcctgtc

SEQ ID NO: 73738 - DNA, 60 bp, Artificial
  Synthetic oligonucleotide
ccaggctatttaccataagacaggaaatggccaacagaggcctctgggattcctttcgtc

SEQ ID NO: 73739 - DNA, 60 bp, Artificial
  Synthetic oligonucleotide
ccaggctattcaccataaggcaggaaatggccaacagaggcctctgggattcctttcgtc

SEQ ID NO: 73740 - DNA, 60 bp, Artificial
  Synthetic oligonucleotide
ccagactattcaccataaggcaagaaatggccaacagaggcctctgggattcctttcgtc

SEQ ID NO: 73741 - DNA, 60 bp, Artificial
  Synthetic oligonucleotide
gcgatttgacgcaatatgatagtgacgaacctgaattaaggtcactttcaagctggatac

SEQ ID NO: 73742 - DNA, 60 bp, Artificial
  Synthetic oligonucleotide
cgagacataagcgatttgaagcaatatgatagtgacgaacctgaattaaggtcactttca

SEQ ID NO: 73743 - DNA, 60 bp, Artificial
  Synthetic oligonucleotide
gcgacttgaagcaatatgatagtgacgaacctgaattaaggtcactttcaagctggatac

SEQ ID NO: 73744 - DNA, 60 bp, Artificial
  Synthetic oligonucleotide
ccaggctattcactataaggcaagaaatggccaacagaggcctctgggattcctttcgtc

SEQ ID NO: 73745 - DNA, 60 bp, Artificial
  Synthetic oligonucleotide
gttgacagaagtaataggtccggttattctggtattttctctgttgaaggcaaaagctgc

SEQ ID NO: 73746 - DNA, 60 bp, Artificial
  Synthetic oligonucleotide
gttgatagaggtaataggtccggttattctggtattttctctgttgaaggcaaaagctgc

SEQ ID NO: 73747 - DNA, 60 bp, Artificial
  Synthetic oligonucleotide
gtgccggattatgcctcccttaggtcactagttgcctcatccggcacactggaatttaac

SEQ ID NO: 73748 - DNA, 60 bp, Artificial
  Synthetic oligonucleotide
gagcattggagtaacagtgataaagaacaacatgataaacaatgaccttgggccagcaac

SEQ ID NO: 73749 - DNA, 60 bp, Artificial
  Synthetic oligonucleotide
cgagtcagctgatatgagcattggagtaacagtgataaagaacaacatgataaacaatga

SEQ ID NO: 73750 - DNA, 60 bp, Artificial
  Synthetic oligonucleotide
ctaatgctactgaactggttcagagttcctcaacaggtagaatatgcgacagtcctcacc

SEQ ID NO: 73751 - DNA, 60 bp, Artificial
  Synthetic oligonucleotide
ggcagcactctcggtctaaacatcgaagcagccacccgtgttggaaagcagatagtagag

SEQ ID NO: 73752 - DNA, 60 bp, Artificial
  Synthetic oligonucleotide
ggagacctccactcactccaaaacagaaacggaaaatggcgagaacagttaggtcaaaag

SEQ ID NO: 73753 - DNA, 60 bp, Artificial
  Synthetic oligonucleotide
tgacaacgcctgcgtagagtcaatcagaaatgggacttatgaccatgatgtatacagaga

SEQ ID NO: 73754 - DNA, 60 bp, Artificial
  Synthetic oligonucleotide
tgacaacgcttgcatagagtcaatcagaaatgggacttatgaccatgatgtatacagaga

SEQ ID NO: 73755 - DNA, 50 bp, Artificial
  Synthetic oligonucleotide
aattgatgcgcgaattgacttcgaatctggacggattaagaaagaggaat

SEQ ID NO: 73756 - DNA, 60 bp, Artificial
  Synthetic oligonucleotide
gatgtatttgctgggaaaaacacagatcttgaggctctcatggaatggctaaagacaaga

SEQ ID NO: 73757 - DNA, 60 bp, Artificial
  Synthetic oligonucleotide
caaaccatttgaatggatgtcaatccgactttacttttcttgaaagttccagcgcaaaat

SEQ ID NO: 73758 - DNA, 60 bp, Artificial
  Synthetic oligonucleotide
gctcctaggggttacttcaaaatacgaagtgggaaaagctcaataatgaggtcagatgca

SEQ ID NO: 73759 - DNA, 60 bp, Artificial
  Synthetic oligonucleotide
caaattgtagaccaagaactaggtgatgccccattccttgatcggcttcgccgagatcag

SEQ ID NO: 73760 - DNA, 60 bp, Artificial
  Synthetic oligonucleotide
atattagcccattgtcaggaagtgctcagcatgtggaagagtgttcctgttatcctagat

SEQ ID NO: 73761 - DNA, 60 bp, Artificial
  Synthetic oligonucleotide
taccgacagccagacagcgaccaaaagaattcggatggccatcaattaatgttgaatagt

SEQ ID NO: 73762 - DNA, 60 bp, Artificial
  Synthetic oligonucleotide
actctacagagattcgcttggagaagcagtaatgaggatgggagacctccactccctaca

SEQ ID NO: 73763 - DNA, 60 bp, Artificial
  Synthetic oligonucleotide
acagagattcgcttggagaagcagtaatgagaatgggagacatccactcactccaaaaca

SEQ ID NO: 73764 - DNA, 60 bp, Artificial
  Synthetic oligonucleotide
ctctgaagtagaagggagaattcaggacctcgagaaatacgttgaagacactaaaataga

SEQ ID NO: 73765 - DNA, 60 bp, Artificial
  Synthetic oligonucleotide
cctggacagtagtgaacagcatttgcaacaccacaggagttgaaaaacccaagtttctcc

SEQ ID NO: 73766 - DNA, 60 bp, Artificial
  Synthetic oligonucleotide
tgtgaattgactgactcaagttggatagaactcgatgaaataggggaagatgttgcccca

SEQ ID NO: 73767 - DNA, 60 bp, Artificial
  Synthetic oligonucleotide
cgaaatttctgctgatggatgctctgaagcttagcattgaagacccgagccatgagggcg

SEQ ID NO: 73768 - DNA, 60 bp, Artificial
  Synthetic oligonucleotide
acacacatccacatcttttcattcactggggaagaaatggctactaaagcagactacact

SEQ ID NO: 73769 - DNA, 60 bp, Artificial
  Synthetic oligonucleotide
ttgaaaatgaggagaagattccaaaaacgaagaacatgaagaaaacaagccaactgaagt

SEQ ID NO: 73770 - DNA, 60 bp, Artificial
  Synthetic oligonucleotide
ttttcggctggaaagagcctaacattgtcaaaccacatgaaaagggcataaaccccaatt

SEQ ID NO: 73771 - DNA, 60 bp, Artificial
  Synthetic oligonucleotide
catttttgaagacaacgccacgccccctgaggttaccggaagggcctccatgctctcagc

SEQ ID NO: 73772 - DNA, 60 bp, Artificial
  Synthetic oligonucleotide
ttgcaaggatgtcagcgatttgagacagtatgacagcgatgagcctgagcaaaaatcact

SEQ ID NO: 73773 - DNA, 60 bp, Artificial
  Synthetic oligonucleotide
gaggaattacttcacagctgaagtgtcccactgcagggcaacagaatacataatgaaggg

SEQ ID NO: 73774 - DNA, 60 bp, Artificial
  Synthetic oligonucleotide
gcatctccacaacttgagggattttcagctgaatcgagaaagctgctcctcattgttcag

SEQ ID NO: 73775 - DNA, 60 bp, Artificial
  Synthetic oligonucleotide
actcctaaaacaccgatttgaaataatcgaagggagagaccgtactatggcctggacagt

SEQ ID NO: 73776 - DNA, 60 bp, Artificial
  Synthetic oligonucleotide
gaacgaggtgagtcgataatcgtggagtctggcgatccaaatgcactcctaaaacaccga

SEQ ID NO: 73777 - DNA, 60 bp, Artificial
  Synthetic oligonucleotide
atcccaatgataagcaaatgcagaaccaaagaggggcggaggaagacaaatctgtatggg

SEQ ID NO: 73778 - DNA, 60 bp, Artificial
  Synthetic oligonucleotide
aatgaaagaatatgggggagatccaaaaatcgagacaaacaaattcgctgcaatatgcac

SEQ ID NO: 73779 - DNA, 57 bp, Artificial
  Synthetic oligonucleotide
ttcaccataagacaagagatggctagtagaggtctctgggattcctttcgtcagtcc

SEQ ID NO: 73780 - DNA, 60 bp, Artificial
  Synthetic oligonucleotide
aagaaggttccatcggaaaggtgtgcaggactctgttggctaaatctgtgttcaacagtt

SEQ ID NO: 73781 - DNA, 60 bp, Artificial
  Synthetic oligonucleotide
ggactgcaataggacaagtatcgagacccatgtttctatatgtgaggaccaatggaactt

SEQ ID NO: 73782 - DNA, 60 bp, Artificial
  Synthetic oligonucleotide
tttatgacgggaagcttgtggacagtattggttcatggtctcaaaatatcctcaggaccc

SEQ ID NO: 73783 - DNA, 60 bp, Artificial
  Synthetic oligonucleotide
gagaagaagaagtgcttacaggcaatctccaaacattgaaaataagagtacatgaggggt

SEQ ID NO: 73784 - DNA, 60 bp, Artificial
  Synthetic oligonucleotide
taaaatactattcattgaggaggggaaaatcgttcatactagcccattgtcaggaagtgc

SEQ ID NO: 73785 - DNA, 60 bp, Artificial
  Synthetic oligonucleotide
caaggaggagatcagaaggatttggcgtcaagcaaataatggagaagacgcaactgctgg

SEQ ID NO: 73786 - DNA, 60 bp, Artificial
  Synthetic oligonucleotide
gatgtgttctctgatgcaaggttcaactcttccaaggaggtcaggggctgctggagcggc

SEQ ID NO: 73787 - DNA, 60 bp, Artificial
  Synthetic oligonucleotide
gactccagtactctcgaactgaggagcagatactgggctataagaaccagaagcggaggg

SEQ ID NO: 73788 - DNA, 60 bp, Artificial
  Synthetic oligonucleotide
accagaagcggagggaacactaaccagcagagagcatctgcaggacaaatcagcgtacag

SEQ ID NO: 73789 - DNA, 60 bp, Artificial
  Synthetic oligonucleotide
caactgctggtctcacccatttgatgatctggcattccaatctgaatgatgccacatatc

SEQ ID NO: 73790 - DNA, 60 bp, Artificial
  Synthetic oligonucleotide
gatctgagggtgtcaagcttcatcagagggacaagagtggtcccaagaggacaactgtcc

SEQ ID NO: 73791 - DNA, 60 bp, Artificial
  Synthetic oligonucleotide
caggaggagagatgggaaatggacgagagaattgatcctgtatgacaaggaggagatcag

SEQ ID NO: 73792 - DNA, 60 bp, Artificial
  Synthetic oligonucleotide
cggaacttctggagaggcgaaaatggacggaggacaagaattgcatacgaaagaatgtgc

SEQ ID NO: 73793 - DNA, 60 bp, Artificial
  Synthetic oligonucleotide
aacattctcaaggggaaattccaaacagcagcacaacgagcaatgatggaccaagtgagg

SEQ ID NO: 73794 - DNA, 60 bp, Artificial
  Synthetic oligonucleotide
cctttgacatgagtaacgaggggtcttatttcttcggagacaatgcagaggaatatgaca

SEQ ID NO: 73795 - DNA, 60 bp, Artificial
  Synthetic oligonucleotide
cagcgtacagcccacattctctgtgcagagaaatctcccattcgagagagcaaccattat

SEQ ID NO: 73796 - DNA, 60 bp, Artificial
  Synthetic oligonucleotide
ggtcctgagtcagtgttggtcaacacctatcagtggatcatcagaaattgggagactgtg

SEQ ID NO: 73797 - DNA, 60 bp, Artificial
  Synthetic oligonucleotide
gatgtgccacagcacacagattggtggaataagaatggtagacatccttaggcagaatcc

SEQ ID NO: 73798 - DNA, 60 bp, Artificial
  Synthetic oligonucleotide
cccagatgaaggcacagctggagtggagtctgctgttctgagaggattcctcattttggg

SEQ ID NO: 73799 - DNA, 60 bp, Artificial
  Synthetic oligonucleotide
ggcagcaatgggcctgagaattagctcatctttcagcttcggtggattcacctttaaaag

SEQ ID NO: 73800 - DNA, 60 bp, Artificial
  Synthetic oligonucleotide
gaggaatgaacaaggacaaaccctctggagcaaaacaaatgatgccggttcagaccgagt

SEQ ID NO: 73801 - DNA, 60 bp, Artificial
  Synthetic oligonucleotide
ggccaccaagaggcttacagtcctcgggaaagatgcgggtgcattaactgaagacccaga

SEQ ID NO: 73802 - DNA, 60 bp, Artificial
  Synthetic oligonucleotide
agcacagagagagtggtggtgagcattgaccgttttttaagggttcgggaccaacggggg

SEQ ID NO: 73803 - DNA, 60 bp, Artificial
  Synthetic oligonucleotide
tgtcactgcgagggataagagtcagcaaaatgggagtagatgaatactccagcacagaga

SEQ ID NO: 73804 - DNA, 60 bp, Artificial
  Synthetic oligonucleotide
ccaccggaacagagtaggatgcagttctcctctttaactgtgaatgtaagaggatcagga

SEQ ID NO: 73805 - DNA, 60 bp, Artificial
  Synthetic oligonucleotide
gagccatttcagtctctggttcctaaggcagctagaggtcaatacagtggattcgtgagg

SEQ ID NO: 73806 - DNA, 60 bp, Artificial
  Synthetic oligonucleotide
ggggaacgtactattgtcacccgaagaagttagcgagacacaagggacagaaaagttgac

SEQ ID NO: 73807 - DNA, 60 bp, Artificial
  Synthetic oligonucleotide
cgctgccagaaatatagtaagaagagcaacggtatcagcagacccattagcgtctctatt

SEQ ID NO: 73808 - DNA, 60 bp, Artificial
  Synthetic oligonucleotide
tggaagagatgagcagtcgattgctgaagcaataatcgtagccatggtattttcacaaga

SEQ ID NO: 73809 - DNA, 60 bp, Artificial
  Synthetic oligonucleotide
ctcagaaaggcaaccaggaggctaattcaattaatagtaagtggaagagatgagcagtcg

SEQ ID NO: 73810 - DNA, 60 bp, Artificial
  Synthetic oligonucleotide
aaaacatgggacctttggccccgttcactttaggaaccaagtcaaaataagacgaagagt

SEQ ID NO: 73811 - DNA, 60 bp, Artificial
  Synthetic oligonucleotide
tcacctttaaaagaacaagtggatcatcagtcaaaagagaagaagaagtgcttacgggca

SEQ ID NO: 73812 - DNA, 60 bp, Artificial
  Synthetic oligonucleotide
acggcggataagagaataatggagatgatccctgagaggaatgaacaaggacaaaccctc

SEQ ID NO: 73813 - DNA, 60 bp, Artificial
  Synthetic oligonucleotide
ggcagaatccaacagaggaacaagctgtggatatatgcaaggcagcaatgggcctgagaa

SEQ ID NO: 73814 - DNA, 60 bp, Artificial
  Synthetic oligonucleotide
cggaatactgcccgacatgaccccaagcactgagatgtcactgcgagggataagagtcag

SEQ ID NO: 73815 - DNA, 60 bp, Artificial
  Synthetic oligonucleotide
gaagaaccctgcactcagaatgaaatggatgatggcaatgaaatatccaattacggcgga

SEQ ID NO: 73816 - DNA, 60 bp, Artificial
  Synthetic oligonucleotide
cattgttcaggcacttagggacaacctggaacctggaacctttgatcttggagggctata

SEQ ID NO: 73817 - DNA, 60 bp, Artificial
  Synthetic oligonucleotide
ggaaccatgcggaggctcgccgaccaaagtctcccaccgaacttctccagccttgaaaac

SEQ ID NO: 73818 - DNA, 60 bp, Artificial
  Synthetic oligonucleotide
gaaccatgcggaggctcgccgaccaaagtctcccaccgaacttctccagcctcgaaaact

SEQ ID NO: 73819 - DNA, 60 bp, Artificial
  Synthetic oligonucleotide
gagaaagctgctcctcattgttcaggcacttagggacaacctggaacctggcaccttcga

SEQ ID NO: 73820 - DNA, 60 bp, Artificial
  Synthetic oligonucleotide
gctcctcattgttcaggcacttagggacaacctggaacctggcaccttcgatcttggagg

SEQ ID NO: 73821 - DNA, 60 bp, Artificial
  Synthetic oligonucleotide
ccctgggttttgcttaatgcatcttggtttaactccttcctcacacatgcactgaaatag

SEQ ID NO: 73822 - DNA, 53 bp, Artificial
  Synthetic oligonucleotide
gggttcatcatgtgggcctgccaaaaaggcaacattaggtgcaacatttgcat

SEQ ID NO: 73823 - DNA, 57 bp, Artificial
  Synthetic oligonucleotide
actggggttcatcatgtgggcctgccaaaaaggcaacattaggtgcaacatttgcat

SEQ ID NO: 73824 - DNA, 60 bp, Artificial
  Synthetic oligonucleotide
ggtggacggttggtacggtttcaggcatcaaaattccgagggcacaggacaagcagcaga

SEQ ID NO: 73825 - DNA, 60 bp, Artificial
  Synthetic oligonucleotide
gcaatggtggatcaagtgagagaaagtcggaacccaggaaatgctgagatcgaagacctc

SEQ ID NO: 73826 - DNA, 60 bp, Artificial
  Synthetic oligonucleotide
tcccacccaggaatctttgaaaactcgtgtcttgaaacgatggaagttgttcaacaaaca

SEQ ID NO: 73827 - DNA, 55 bp, Artificial
  Synthetic oligonucleotide
aaaagctcgataatgagatcagatgcacctattgacacatgtatctctgagtgca

SEQ ID NO: 73828 - DNA, 60 bp, Artificial
  Synthetic oligonucleotide
ggccaaactggcaaatgttgtgagaaagatgatgactaattcacaagacacagaactttc

SEQ ID NO: 73829 - DNA, 60 bp, Artificial
  Synthetic oligonucleotide
cgggtacctatggaacaggctcatggcctgatggggcggacatcaatctcatgcctatat

SEQ ID NO: 73830 - DNA, 60 bp, Artificial
  Synthetic oligonucleotide
ttcgggtacctatggaacaggctcatggcctgatggggcggacatcaatctcatgcctat

SEQ ID NO: 73831 - DNA, 60 bp, Artificial
  Synthetic oligonucleotide
ggggaaaagggcaacagctatactcagaaaagcaaccagaagattggttcagctgatagt

SEQ ID NO: 73832 - DNA, 60 bp, Artificial
  Synthetic oligonucleotide
gcattaaacaaccggttccagatcaaaggcgttgagctgaagtcaggatacaaagattgg

SEQ ID NO: 73833 - DNA, 60 bp, Artificial
  Synthetic oligonucleotide
tgaacgcagcacagcctacagcaactgttacccttatgatgtgccggattatgcctccct

SEQ ID NO: 73834 - DNA, 60 bp, Artificial
  Synthetic oligonucleotide
caagcatcaggaagaatcacagtctctaccaaaagaagccaacaaactgtaatcccgaat

SEQ ID NO: 73835 - DNA, 60 bp, Artificial
  Synthetic oligonucleotide
aacggtcttatgaacagatggaaactgatggggatcgccagaatgcaactgagattagag

SEQ ID NO: 73836 - DNA, 60 bp, Artificial
  Synthetic oligonucleotide
aagtgctgcaatctgttcgagaaattcttccctagcagttcatacaggagaccggttggg

SEQ ID NO: 73837 - DNA, 60 bp, Artificial
  Synthetic oligonucleotide
atacacgtatcggtgtcacagaggggacacacaaattcagacgaggaggtcattcgaact

SEQ ID NO: 73838 - DNA, 60 bp, Artificial
  Synthetic oligonucleotide
gacaaaagacgccgaaagaggcaaattaaagagaagagcaattgcaacacccggaatgca

SEQ ID NO: 73839 - DNA, 54 bp, Artificial
  Synthetic oligonucleotide
cgcaaaatgccataagcaccacattcccatatactggagatcctccatacagcc

SEQ ID NO: 73840 - DNA, 60 bp, Artificial
  Synthetic oligonucleotide
catccaaatgtgcactgaacttaaactcagtgattatgaggggcggctgatccagaacag

SEQ ID NO: 73841 - DNA, 60 bp, Artificial
  Synthetic oligonucleotide
catccaaatgtgcactgaacttaaactcagtgattatgaagggcgattgatccagaacag

SEQ ID NO: 73842 - DNA, 60 bp, Artificial
  Synthetic oligonucleotide
catccaaatgtgcactgaacttaaactcagtgattatgaggggcgactgatccagaacag

SEQ ID NO: 73843 - DNA, 60 bp, Artificial
  Synthetic oligonucleotide
ccaaatgtgcactgaacttaaactcagtgattatgaggggcggctgatccagaacagctt

SEQ ID NO: 73844 - DNA, 60 bp, Artificial
  Synthetic oligonucleotide
ccaaatgtgcactgaacttaaactcagtgattatgaggggcgactgatccagaacagctt

SEQ ID NO: 73845 - DNA, 60 bp, Artificial
  Synthetic oligonucleotide
ccaaatgtgcactgaacttaaactcagtgattatgaagggcgattgatccagaacagctt

SEQ ID NO: 73846 - DNA, 60 bp, Artificial
  Synthetic oligonucleotide
attcctaagagaaaccgctctatcctcaacacaagccaaaggggaattcttgaggatgaa

SEQ ID NO: 73847 - DNA, 60 bp, Artificial
  Synthetic oligonucleotide
tgaggcacttaaaatgaccatggtctccacacctgcttcgcgatacataactgatatgac

SEQ ID NO: 73848 - DNA, 60 bp, Artificial
  Synthetic oligonucleotide
ggagtgaaaggctgggcctttgacgatggaaatgacgtgtggatgggaagaacgatcagc

SEQ ID NO: 73849 - DNA, 60 bp, Artificial
  Synthetic oligonucleotide
tattagcccattgtcaggaagtgctcagcatatagaggaatgttcctgttaccctcgata

SEQ ID NO: 73850 - DNA, 60 bp, Artificial
  Synthetic oligonucleotide
ccctcaatgggaatggggatccaaataacatggacaaagcagttaaactgtatagaaagc

SEQ ID NO: 73851 - DNA, 60 bp, Artificial
  Synthetic oligonucleotide
aaccgaacggctgcattgagggcaagctttctcaaatgtccaaagaagtgaatgcaagaa

SEQ ID NO: 73852 - DNA, 60 bp, Artificial
  Synthetic oligonucleotide
gaacggctgcattgagggcaagctttctcaaatgtccaaagaagtgaatgccaagattga

SEQ ID NO: 73853 - DNA, 60 bp, Artificial
  Synthetic oligonucleotide
cggctgcattgagggcaagctttctcaaatgtccaaagaagtgaatgccaagattgaacc

SEQ ID NO: 73854 - DNA, 60 bp, Artificial
  Synthetic oligonucleotide
gtcctattgggattcatcatgtgggcctgccagagaggcaacattaggtgcaacatttgc

SEQ ID NO: 73855 - DNA, 60 bp, Artificial
  Synthetic oligonucleotide
tgttgtgtgttgtcctattgggattcatcatgtgggcctgccagagaggcaacattaggt

SEQ ID NO: 73856 - DNA, 60 bp, Artificial
  Synthetic oligonucleotide
tgctttgtgttgttttgctgggattcatcatgtgggcctgccagagaggcaacattaggt

SEQ ID NO: 73857 - DNA, 60 bp, Artificial
  Synthetic oligonucleotide
cgctcaccgtgccaagtgagcgaggactgcagcgtagacgctttgtccaaaatgccctca

SEQ ID NO: 73858 - DNA, 60 bp, Artificial
  Synthetic oligonucleotide
aatgtgaggggatctgggatgagaatacttgtaaggggcaattctcctgtattcaactac

SEQ ID NO: 73859 - DNA, 60 bp, Artificial
  Synthetic oligonucleotide
gatgctggcactttaattgaagacccagatgaaagcacatccggagtggagtccgctgtt

SEQ ID NO: 73860 - DNA, 60 bp, Artificial
  Synthetic oligonucleotide
atggaccaggcaatcatggataagaacatcatactgaaagcaaacttcagtgtgatattc

SEQ ID NO: 73861 - DNA, 58 bp, Artificial
  Synthetic oligonucleotide
atggaccaggcaatcatggataagaacatcatactgaaagcaaacttcagtgtgatat

SEQ ID NO: 73862 - DNA, 52 bp, Artificial
  Synthetic oligonucleotide
aggaaggagcaattgtcggcgaaatttcaccattgccttctcttccaggaca

SEQ ID NO: 73863 - DNA, 51 bp, Artificial
  Synthetic oligonucleotide
ggaaggagcaattgtcggcgaaatttcaccattgccttctcttccaggaca

SEQ ID NO: 73864 - DNA, 60 bp, Artificial
  Synthetic oligonucleotide
aagtgtgtatagcatggtccagctcaagttgtcacgatggaaaagcatggctgcatgttt

SEQ ID NO: 73865 - DNA, 60 bp, Artificial
  Synthetic oligonucleotide
gtcccaaatacgtcaaacagagcaccctaaagttggcaactgggatgcggaatgtacctg

SEQ ID NO: 73866 - DNA, 60 bp, Artificial
  Synthetic oligonucleotide
cccaaatatgtcaagcagagcaccctaaagttggcaactgggatgcggaatgtacccgag

SEQ ID NO: 73867 - DNA, 60 bp, Artificial
  Synthetic oligonucleotide
tgatagatggttggtatggtttcaggcatcagaactcggaaggcacaggacaagcagcag

SEQ ID NO: 73868 - DNA, 60 bp, Artificial
  Synthetic oligonucleotide
atggtttcaggcatcagaactcggaaggcacaggacaagcagcagaccttaaaagcaccc

SEQ ID NO: 73869 - DNA, 60 bp, Artificial
  Synthetic oligonucleotide
cggaaggtacaggacaagcagcagaccttaaaagcactcaagccgccatcgaccagatca

SEQ ID NO: 73870 - DNA, 60 bp, Artificial
  Synthetic oligonucleotide
ggtcttacaacgcggagcttcttgtggccctggaaaaccagcatacaattgatctgactg

SEQ ID NO: 73871 - DNA, 60 bp, Artificial
  Synthetic oligonucleotide
gggcatgtcccaaatatgtcaagcagagcaccctaaagttggcaactgggatgcggaatg

SEQ ID NO: 73872 - DNA, 60 bp, Artificial
  Synthetic oligonucleotide
ggagcatgtcccaaatacgtcaaacagagcaccctaaagttggcaactgggatgcggaat

SEQ ID NO: 73873 - DNA, 60 bp, Artificial
  Synthetic oligonucleotide
tgctacccatatgacgtgccagactatgcatctctcagatctctagtggcctcatcagga

SEQ ID NO: 73874 - DNA, 60 bp, Artificial
  Synthetic oligonucleotide
cccatatgacgtgccagactatgcatctctcagatctctagtggcctcatcaggaactct

SEQ ID NO: 73875 - DNA, 60 bp, Artificial
  Synthetic oligonucleotide
cctctatgtagagcgcagcaatgccttcagcaactgctacccgtatgacgtgccagacta

SEQ ID NO: 73876 - DNA, 60 bp, Artificial
  Synthetic oligonucleotide
gcgcagcaatgccttcagcaactgctacccgtatgacgtgccagactatgcatctctcag

SEQ ID NO: 73877 - DNA, 60 bp, Artificial
  Synthetic oligonucleotide
gggacctttatgtagagcgcagcaatgccttcagcaactgctacccatatgacgtgccag

SEQ ID NO: 73878 - DNA, 60 bp, Artificial
  Synthetic oligonucleotide
cctttatgtagagcgcagcaatgccttcagcaactgctacccgtatgacgtgccagacta

SEQ ID NO: 73879 - DNA, 60 bp, Artificial
  Synthetic oligonucleotide
aagatgaaacatgggacctttatgtagagcgcagcaatgccttcagcaactgctacccat

SEQ ID NO: 73880 - DNA, 60 bp, Artificial
  Synthetic oligonucleotide
gctctactaggggaccctcattgtgatgtatttcaagatgaaacatgggacctttatgta

SEQ ID NO: 73881 - DNA, 60 bp, Artificial
  Synthetic oligonucleotide
gctctactaggggaccctcattgtgatgtatttcaagatgaaacatgggacctctatgta

SEQ ID NO: 73882 - DNA, 60 bp, Artificial
  Synthetic oligonucleotide
ggggaccctcattgtgatgtatttcaagatgaaacatgggacctttatgtagagcgcagc

SEQ ID NO: 73883 - DNA, 55 bp, Artificial
  Synthetic oligonucleotide
tgccagactatgcatctctcagatctctagtggcctcatcaggaaccctagagtt

SEQ ID NO: 73884 - DNA, 60 bp, Artificial
  Synthetic oligonucleotide
tgccagactatgcatctctcagatctctagtggcctcatcaggaaccctagagttcatca

SEQ ID NO: 73885 - DNA, 60 bp, Artificial
  Synthetic oligonucleotide
ggcttcacgtggacaggagtcacacaaaatggagggagtggtgcttgcaaaagagggccc

SEQ ID NO: 73886 - DNA, 60 bp, Artificial
  Synthetic oligonucleotide
ggattcacgtggacaggagtcacacaaaatggagggagtggtgcttgcaaaagagggccc

SEQ ID NO: 73887 - DNA, 60 bp, Artificial
  Synthetic oligonucleotide
ttcttcagtagactgaattggctgactaaatctggtagcgcttatccggtgctgaacgta

SEQ ID NO: 73888 - DNA, 60 bp, Artificial
  Synthetic oligonucleotide
tcacacaaaacggagggagtggtgcttgcaaaagagggcccgctaatggtttcttcagta

SEQ ID NO: 73889 - DNA, 60 bp, Artificial
  Synthetic oligonucleotide
ctggaaaaagctcgataatgagatcagatgcacctattgacacatgtatctctgagtgca

SEQ ID NO: 73890 - DNA, 60 bp, Artificial
  Synthetic oligonucleotide
cctcgaggttattttaagatgcgcactgggaaaagctcgataatgagatcagatgcaccc

SEQ ID NO: 73891 - DNA, 60 bp, Artificial
  Synthetic oligonucleotide
tgctctactaggggaccctcattgtgatgtattccaagatgaaacatgggacctttatgt

SEQ ID NO: 73892 - DNA, 60 bp, Artificial
  Synthetic oligonucleotide
ctgcacactaatagatgctctactaggggaccctcattgtgatgtattccaagatgaaac

SEQ ID NO: 73893 - DNA, 60 bp, Artificial
  Synthetic oligonucleotide
cacggagtgaaaggctgggcctttgacgatggaaatgacgtgtggatgggaagaacgatc

SEQ ID NO: 73894 - DNA, 60 bp, Artificial
  Synthetic oligonucleotide
caggaagacaagagaagaaccctgcactcagaatgaaatggatgatggcaatgaaatatc

SEQ ID NO: 73895 - DNA, 60 bp, Artificial
  Synthetic oligonucleotide
ctaatgctactgagctggttcagagttcctcaacaggtgaaatatgcgacagccctcatc

SEQ ID NO: 73896 - DNA, 60 bp, Artificial
  Synthetic oligonucleotide
ctaatgctactgagctggttcagagttcctcaacaggtgaaatatgcgacagtcctcatc

SEQ ID NO: 73897 - DNA, 60 bp, Artificial
  Synthetic oligonucleotide
aatgctactgagctggttcagagttcctcaacaggtgaaatatgcgacagtcctcatcag

SEQ ID NO: 73898 - DNA, 60 bp, Artificial
  Synthetic oligonucleotide
gacgaagagttgacataaaccctggccatgcagacctcagtgccaaagaggcacaggatg

SEQ ID NO: 73899 - DNA, 60 bp, Artificial
  Synthetic oligonucleotide
cagctactagttgaagtggaacaggagataagaactttctcgtttcagcttatttaatga

SEQ ID NO: 73900 - DNA, 60 bp, Artificial
  Synthetic oligonucleotide
gggaatcatggagtgaaaggctgggcctttgatgatggaaatgacgtgtggatgggaaga

SEQ ID NO: 73901 - DNA, 60 bp, Artificial
  Synthetic oligonucleotide
cagggatctttgaaaactcgtgtcttgaaacgatggaagttgttcaacaaacaagggtgg

SEQ ID NO: 73902 - DNA, 60 bp, Artificial
  Synthetic oligonucleotide
cagggatctttgaaacctcgtgtcttgaaacgatggaagttgttcaacaaacaagggtgg

SEQ ID NO: 73903 - DNA, 60 bp, Artificial
  Synthetic oligonucleotide
aatcgaaaaggaattctcagaagtagaagggagaattcaggacctcgagaaatacattga

SEQ ID NO: 73904 - DNA, 60 bp, Artificial
  Synthetic oligonucleotide
aatcgaaaaggagttctcagaagtagaagggagaattcaggacctcgagaaatacgttga

SEQ ID NO: 73905 - DNA, 60 bp, Artificial
  Synthetic oligonucleotide
atcgaaaaggaattctctgaagtagaagggagaattcaggacctcgagaaatacgttgaa

SEQ ID NO: 73906 - DNA, 60 bp, Artificial
  Synthetic oligonucleotide
ggaattctctgaagtagaagggagaattcaggacctcgagaaatacgttgaagacactaa

SEQ ID NO: 73907 - DNA, 60 bp, Artificial
  Synthetic oligonucleotide
ggaattctcagaagtagaagggagaattcaggacctcgagaaatacattgaagacactaa

SEQ ID NO: 73908 - DNA, 60 bp, Artificial
  Synthetic oligonucleotide
aacgatcttatgaacagatggaaactgatggggaacgccagaatgcaactgagatcagag

SEQ ID NO: 73909 - DNA, 60 bp, Artificial
  Synthetic oligonucleotide
atccggagacaagttgtagaccaagaactgagtgatgccccattccttgatcggcttcgc

SEQ ID NO: 73910 - DNA, 60 bp, Artificial
  Synthetic oligonucleotide
gcctgcatagggtcaattagaaatggaacttatgaccatgatgtatacagagacgaagca

SEQ ID NO: 73911 - DNA, 60 bp, Artificial
  Synthetic oligonucleotide
ggattatagcattgtttccagttatgtgtgctcaggacttgttggagacacgcccagaaa

SEQ ID NO: 73912 - DNA, 60 bp, Artificial
  Synthetic oligonucleotide
aacggtcttatgaacagatggaaactgatggagaacgccagaatgcaactgagatcaggg

SEQ ID NO: 73913 - DNA, 59 bp, Artificial
  Synthetic oligonucleotide
ggtctggttattctggtattttctctgttgaaagcaaaagctgcatcaataggtgtttt

SEQ ID NO: 73914 - DNA, 60 bp, Artificial
  Synthetic oligonucleotide
ggtctggttattctggtattttctctgttgaaagcaaaagctgcatcaataggtgttttt

SEQ ID NO: 73915 - DNA, 54 bp, Artificial
  Synthetic oligonucleotide
gattggaatttctagcatggtggaggccatggtgtctagggcccgaattgatgc

SEQ ID NO: 73916 - DNA, 60 bp, Artificial
  Synthetic oligonucleotide
ctagcatctttattggagatgtgccacagcacacagattggcggaacaaggatggtggac

SEQ ID NO: 73917 - DNA, 60 bp, Artificial
  Synthetic oligonucleotide
ggtggatggttggtacggtttcaggcatcaaaattcggaaggaataggacaagcagcaga

SEQ ID NO: 73918 - DNA, 60 bp, Artificial
  Synthetic oligonucleotide
cgtctctattggagatgtgccacagcacacagattggtggaataagaatggtagacatcc

SEQ ID NO: 73919 - DNA, 60 bp, Artificial
  Synthetic oligonucleotide
gttgcacgtttgtgtcactggggatgatagaaatgcgactgctagtttcatttacgatgg

SEQ ID NO: 73920 - DNA, 60 bp, Artificial
  Synthetic oligonucleotide
cactggggatgatagaaatgcgactgctagtttcatttacgatgggatgcttgttgacag

SEQ ID NO: 73921 - DNA, 60 bp, Artificial
  Synthetic oligonucleotide
taactattgcaacagtatgtttcctcatgcagattgccatcctagcaacgactgtgacac

SEQ ID NO: 73922 - DNA, 60 bp, Artificial
  Synthetic oligonucleotide
caaatcagaagataataacaattggctccgtctctctaactattgcaacagtatgtttcc

SEQ ID NO: 73923 - DNA, 60 bp, Artificial
  Synthetic oligonucleotide
agtgaaaatgaatccaaatcagaagataataacaattggctccgtctctctaactattgc

SEQ ID NO: 73924 - DNA, 60 bp, Artificial
  Synthetic oligonucleotide
gtgtctgcagagacaactggaagggctctaataggcccgttatagatataaatatggcag

SEQ ID NO: 73925 - DNA, 60 bp, Artificial
  Synthetic oligonucleotide
gtcagatgtgtctgcagagacaactggaagggctctaataggcccgttatagatataaat

SEQ ID NO: 73926 - DNA, 60 bp, Artificial
  Synthetic oligonucleotide
gctcagcatatagaggaatgttcctgttatccccgatatccaaatgtcagatgtgtctgc

SEQ ID NO: 73927 - DNA, 60 bp, Artificial
  Synthetic oligonucleotide
gaagtgctcagcatatagaggaatgttcctgttatccccgatatccaaatgtcagatgtg

SEQ ID NO: 73928 - DNA, 60 bp, Artificial
  Synthetic oligonucleotide
agaggggaaaattgttcacattagtccattgtcaggaagtgctcagcatatagaggaatg

SEQ ID NO: 73929 - DNA, 60 bp, Artificial
  Synthetic oligonucleotide
aatactattcattagagaggggaaaattgttcacattagtccattgtcaggaagtgctca

SEQ ID NO: 73930 - DNA, 60 bp, Artificial
  Synthetic oligonucleotide
ctcagaactcaggagtcagaatgcgtttgcatcaatgggacttgcacagtagtaatgact

SEQ ID NO: 73931 - DNA, 60 bp, Artificial
  Synthetic oligonucleotide
cttgttggagacacgccaaggaacgatgatagctctagtagtagcaactgcaaggatcct

SEQ ID NO: 73932 - DNA, 60 bp, Artificial
  Synthetic oligonucleotide
gacttgttggagacacgccaaggaacgatgatagctctagtagtagcaactgcaaggatc

SEQ ID NO: 73933 - DNA, 60 bp, Artificial
  Synthetic oligonucleotide
caagtagtgccatgtgaaccaatcataatagagaggaacataacagagatagtgtatttg

SEQ ID NO: 73934 - DNA, 60 bp, Artificial
  Synthetic oligonucleotide
tagtgtatttgaataatactaccatagaaaaagagatttgtcctgaagtagtagaataca

SEQ ID NO: 73935 - DNA, 60 bp, Artificial
  Synthetic oligonucleotide
gagaaccttatgtgtcatgcgaccccagtaaatgttatcaatttgcacttggacagggaa

SEQ ID NO: 73936 - DNA, 52 bp, Artificial
  Synthetic oligonucleotide
atagaatccctcatcggacccttttgatgaatgagttgggtgttccgtttca

SEQ ID NO: 73937 - DNA, 60 bp, Artificial
  Synthetic oligonucleotide
gcaacagtatgtttcctcatgcagattgccatcctagcaacgactgtgacactgcatttc

SEQ ID NO: 73938 - DNA, 60 bp, Artificial
  Synthetic oligonucleotide
actgtgacactgcatttcaaacaaaatgaatgcagcatccccacaaacaaccaagtagtg

SEQ ID NO: 73939 - DNA, 60 bp, Artificial
  Synthetic oligonucleotide
gcatttcaaacaaaatgaatgcagcatccccacaaacaaccaagtagtgccatgtgaacc

SEQ ID NO: 73940 - DNA, 60 bp, Artificial
  Synthetic oligonucleotide
ccaagtagtgccatgtgaaccaatcataatagagaggaacataacagagatagtgtattt

SEQ ID NO: 73941 - DNA, 57 bp, Artificial
  Synthetic oligonucleotide
aggtgtttttatgtggagttgataagaggaaggccgcaggagactagagtatggtgg

SEQ ID NO: 73942 - DNA, 51 bp, Artificial
  Synthetic oligonucleotide
ttttatgtggagttgataagaggaaggccgcaggagactagagtatggtgg

SEQ ID NO: 73943 - DNA, 58 bp, Artificial
  Synthetic oligonucleotide
ctttgacaatgggaatgatgtttggatgggaagaacaatcagtaaagattcgcgctca

SEQ ID NO: 73944 - DNA, 51 bp, Artificial
  Synthetic oligonucleotide
tggtggttgggctactgctaattccaagtcacagaccaatagacaagtcat

SEQ ID NO: 73945 - DNA, 60 bp, Artificial
  Synthetic oligonucleotide
tgcaaggatcctaataatgagagagggaacccaggagtgaaagggtgggcctttgacaat

SEQ ID NO: 73946 - DNA, 60 bp, Artificial
  Synthetic oligonucleotide
aatgagagagggaacccaggagtgaaagggtgggcctttgacaatgggaatgatgtttgg

SEQ ID NO: 73947 - DNA, 60 bp, Artificial
  Synthetic oligonucleotide
aatgaaagaatatggggaagatccaaaaatcgaaactaacaaattcgctgcaatatgcac

SEQ ID NO: 73948 - DNA, 60 bp, Artificial
  Synthetic oligonucleotide
gattcgcttggggaagcagtaatgagaatgggggacctccacttactccaaaacagaaac

SEQ ID NO: 73949 - DNA, 60 bp, Artificial
  Synthetic oligonucleotide
tctggtccctaaggcacccagaggtcagtacagtggatttgtgaggacactgttccagca

SEQ ID NO: 73950 - DNA, 60 bp, Artificial
  Synthetic oligonucleotide
cgtcagttaagagagaagaagaagtgcttacaggcaaccttcaaacattgaaaataagag

SEQ ID NO: 73951 - DNA, 60 bp, Artificial
  Synthetic oligonucleotide
tgaaagaaatgaacagggacaaaccctttggagtaaaacaaatgatgccggctcagaccg

SEQ ID NO: 73952 - DNA, 60 bp, Artificial
  Synthetic oligonucleotide
tgattaaggcagttcgaggtgatttgaactttgtcaatagggcaaaccagcggctaaacc

SEQ ID NO: 73953 - DNA, 59 bp, Artificial
  Synthetic oligonucleotide
gaatgatcgggatattacctgacatgaccccaagtactgagatgtcgctgagggggata

SEQ ID NO: 73954 - DNA, 60 bp, Artificial
  Synthetic oligonucleotide
gacaataacttattcgtcatcaatgatgtgggaaatcaacggtcctgaatcggttttggt

SEQ ID NO: 73955 - DNA, 60 bp, Artificial
  Synthetic oligonucleotide
cgaaaaggtcgaaaggttgaagcacgggacctttggccctgttcacttcagaaatcaagt

SEQ ID NO: 73956 - DNA, 60 bp, Artificial
  Synthetic oligonucleotide
aggggcaattctccagtgttcaattacaataaggccactaagaggctcacagttctcggg

SEQ ID NO: 73957 - DNA, 57 bp, Artificial
  Synthetic oligonucleotide
acaatggttgggagaagagcaacagccattctcaggaaggcaaccagaagattgatc

SEQ ID NO: 73958 - DNA, 60 bp, Artificial
  Synthetic oligonucleotide
gagagatgagcagtcaattgctgaagcaataattgtggccatggtattttcacaagagga

SEQ ID NO: 73959 - DNA, 60 bp, Artificial
  Synthetic oligonucleotide
cattcttcggcaaaatccaacagaggaacaagctgtggacatatgcaaagcagcaatggg

SEQ ID NO: 73960 - DNA, 60 bp, Artificial
  Synthetic oligonucleotide
ccaaagcttgattatcgctgccaggaacatagtaaggagagcaacagtatcagcagaccc

SEQ ID NO: 73961 - DNA, 60 bp, Artificial
  Synthetic oligonucleotide
gccagagaggcacaggatgtaatcatggaagtcgttttcccaaatgaagtgggagcgaga

SEQ ID NO: 73962 - DNA, 60 bp, Artificial
  Synthetic oligonucleotide
aaagtaggatgcaattctcctccttgactgtgaatgtgaggggatcaggaatgagaatac

SEQ ID NO: 73963 - DNA, 60 bp, Artificial
  Synthetic oligonucleotide
gggagcgagaatactaacattggagtcacaactgacgataacaaaagagaagaaggaaga

SEQ ID NO: 73964 - DNA, 60 bp, Artificial
  Synthetic oligonucleotide
ctcaggggacatgctgggagcaaatgtacaccccaggaggggaagtgaggaatgatgatg

SEQ ID NO: 73965 - DNA, 60 bp, Artificial
  Synthetic oligonucleotide
cccagtggccggtggaacaagcagtgtttacattgaggtgctgcatttaactcaggggac

SEQ ID NO: 73966 - DNA, 60 bp, Artificial
  Synthetic oligonucleotide
gctcagaccgagtgatggtatcacctctggctgtgacatggtggaacaggaatggaccaa

SEQ ID NO: 73967 - DNA, 60 bp, Artificial
  Synthetic oligonucleotide
taacaaaagagaagaaggaagaactccaggactgcaagattgcccctttgatggttgcat

SEQ ID NO: 73968 - DNA, 60 bp, Artificial
  Synthetic oligonucleotide
atggttgcatacatgctagaaagggagttggtccgcaaaacgaggttcctcccagtggcc

SEQ ID NO: 73969 - DNA, 60 bp, Artificial
  Synthetic oligonucleotide
ccccccgaggttattttaagatgcgcactggaaaaagctcgataatgagatcagatgcac

SEQ ID NO: 73970 - DNA, 60 bp, Artificial
  Synthetic oligonucleotide
cagacttatgattggacattaaacagaaatcaaccagcagcaactgcattagccaacacc

SEQ ID NO: 73971 - DNA, 60 bp, Artificial
  Synthetic oligonucleotide
aggagttcacaatggtagggaaaagggcaacagctatactcagaaaagcaaccaggagat

SEQ ID NO: 73972 - DNA, 60 bp, Artificial
  Synthetic oligonucleotide
ggtccagctcaagttgtcacgatggaaaagcatggctgcatgtttgtatcactggggatg

SEQ ID NO: 73973 - DNA, 60 bp, Artificial
  Synthetic oligonucleotide
gttgacagaggtaataggtccggttattctggtattttctctgttgaaggcaaaatctgc

SEQ ID NO: 73974 - DNA, 60 bp, Artificial
  Synthetic oligonucleotide
acgaaaacggaactctagcatacttactgacagccagacagcgaccaaaagaattcggat

SEQ ID NO: 73975 - DNA, 60 bp, Artificial
  Synthetic oligonucleotide
tatatgaagcaattgaggagtgcctgattaatgatccctgggttttgcttaatgcgtcgt

SEQ ID NO: 73976 - DNA, 60 bp, Artificial
  Synthetic oligonucleotide
cggctggagacactaatactactcagggctttcactgaagaaggggcaattgtcggcgaa

SEQ ID NO: 73977 - DNA, 60 bp, Artificial
  Synthetic oligonucleotide
gatcttcgatcggctggagacactaatactactcagggctttcactgaagaaggggcaat

SEQ ID NO: 73978 - DNA, 60 bp, Artificial
  Synthetic oligonucleotide
catgctcatgcccaagcacaaagtagcaggctccctctgtatcagaatggaccaggcgat

SEQ ID NO: 73979 - DNA, 60 bp, Artificial
  Synthetic oligonucleotide
tcatgctcatgcccaagcacaaagtagcaggctccctctgtatcagaatggaccaggcga

SEQ ID NO: 73980 - DNA, 60 bp, Artificial
  Synthetic oligonucleotide
gtgaaacacatgggacagagagactgacaataacttactcatcatcaatgatgtgggaga

SEQ ID NO: 73981 - DNA, 53 bp, Artificial
  Synthetic oligonucleotide
gcattgtttccagttatgtgtgctcaggacttgttggagacacacccagaaaa

SEQ ID NO: 73982 - DNA, 60 bp, Artificial
  Synthetic oligonucleotide
tttgatcttggggggctatatgaagcaattgaggagtgcctgattaatgatccctgggtt

SEQ ID NO: 73983 - DNA, 60 bp, Artificial
  Synthetic oligonucleotide
gcaccttcgatcttggaggattatatgaagcaattgaggagtgcctgattaatgattcct

SEQ ID NO: 73984 - DNA, 60 bp, Artificial
  Synthetic oligonucleotide
ccttcgatcttggaggattatatgaagcaattgaggagtgcctgattaatgatccctggg

SEQ ID NO: 73985 - DNA, 60 bp, Artificial
  Synthetic oligonucleotide
ccttcgatcttggaggattatatgaagcaattgaggagtgcctgattaatgattcctggg

SEQ ID NO: 73986 - DNA, 60 bp, Artificial
  Synthetic oligonucleotide
gcaccttcgatcttggaggattatatgaagcaattgaggagtgcctgattaatgatccct

SEQ ID NO: 73987 - DNA, 60 bp, Artificial
  Synthetic oligonucleotide
caactgaagtgggcacttggtgaaaacatggcaccagagaaagtggactttgaagattgc

SEQ ID NO: 73988 - DNA, 60 bp, Artificial
  Synthetic oligonucleotide
gtgggcacttggtgaaaacatggcaccagagaaagtggactttgaagattgcaaggatgt

SEQ ID NO: 73989 - DNA, 60 bp, Artificial
  Synthetic oligonucleotide
atgagtaatgaaggatcttatttcttcggagacaatgcagaggagtacgacaattaaggg

SEQ ID NO: 73990 - DNA, 60 bp, Artificial
  Synthetic oligonucleotide
acatttgggtaacaagagaaccttatgtgtcatgcgaccccagtaaatgttatcaatttg

SEQ ID NO: 73991 - DNA, 60 bp, Artificial
  Synthetic oligonucleotide
acatctgggtaacaagagaaccttatgtgtcatgcggccccagtaaatgttatcaatttg

SEQ ID NO: 73992 - DNA, 60 bp, Artificial
  Synthetic oligonucleotide
ggatgcttgttgacagtattggttcctggtctcaaaatatcctcagaactcaggagtcag

SEQ ID NO: 73993 - DNA, 60 bp, Artificial
  Synthetic oligonucleotide
tttacgatgggatgcttgttgacagtattggttcctggtctcaaaatatcctcagaactc

SEQ ID NO: 73994 - DNA, 60 bp, Artificial
  Synthetic oligonucleotide
acatctgggtaacaagagaaccttatgtgtcatgcggccccagtaaatgttatcagtttg

SEQ ID NO: 73995 - DNA, 60 bp, Artificial
  Synthetic oligonucleotide
caaaccatttgaatggatgtcaatccgactttactttttttgaaagttccggcgcaaaat

SEQ ID NO: 73996 - DNA, 60 bp, Artificial
  Synthetic oligonucleotide
gaatgttcctggcgatgattacatatatcacaaaaaatcagcctgaatggttcagaaaca

SEQ ID NO: 73997 - DNA, 60 bp, Artificial
  Synthetic oligonucleotide
gttgacagcaataataggtccggttattctggtattttctctgttgagggcaaaagctgc

SEQ ID NO: 73998 - DNA, 60 bp, Artificial
  Synthetic oligonucleotide
ccctcgaatgtttttggcgatgattacatatatcacaaaaaatcaacctgaatggttcag

SEQ ID NO: 73999 - DNA, 60 bp, Artificial
  Synthetic oligonucleotide
gagaagaagaagtgcttacaggcaaccttcaaacattgaaaataagagtacatgaggggt

SEQ ID NO: 74000 - DNA, 60 bp, Artificial
  Synthetic oligonucleotide
gtgaggggatctgggatgagaatacttgtaaggggcaattctcctgtattcaactacaac

SEQ ID NO: 74001 - DNA, 60 bp, Artificial
  Synthetic oligonucleotide
atgataagcaagtgcagaactaaagagggaaggcgaaagaccaatttatatggcttcatc

SEQ ID NO: 74002 - DNA, 60 bp, Artificial
  Synthetic oligonucleotide
gcaatctcgcactcgcgagatactaacaaaaaccacagtggaccatatggccataattaa

SEQ ID NO: 74003 - DNA, 60 bp, Artificial
  Synthetic oligonucleotide
gtctcgcactcgcgagatactaacaaaaaccacagtggaccatatggccataattaagaa

SEQ ID NO: 74004 - DNA, 60 bp, Artificial
  Synthetic oligonucleotide
cagacccactagcatctttattggagatgtgccacagcacacaaattggcgggacaagga

SEQ ID NO: 74005 - DNA, 60 bp, Artificial
  Synthetic oligonucleotide
gatccactagcatctttattggagatgtgccacagcacacaaattggcgggacaaggatg

SEQ ID NO: 74006 - DNA, 60 bp, Artificial
  Synthetic oligonucleotide
ctgatccactagcatctttattggagatgtgccacagcacacaaattggcgggacaagga

SEQ ID NO: 74007 - DNA, 60 bp, Artificial
  Synthetic oligonucleotide
taagggtgcatgaggggtatgaagaattcacaatggttgggagaagagcaacagctattc

SEQ ID NO: 74008 - DNA, 60 bp, Artificial
  Synthetic oligonucleotide
aaaataagagtacatgaggggtatgaagagttcacaatggttgggagaagagcaacagcc

SEQ ID NO: 74009 - DNA, 60 bp, Artificial
  Synthetic oligonucleotide
gagaccatagtattactaagggctttcaccgaagagggagcaattgttggcgaaatctca

SEQ ID NO: 74010 - DNA, 60 bp, Artificial
  Synthetic oligonucleotide
gactaggaaaaggatacatgttcgaaagtaagagcatgaaacttcgaacacagataccag

SEQ ID NO: 74011 - DNA, 60 bp, Artificial
  Synthetic oligonucleotide
gaacagttttgagcaaataacattcatgcaagccttacagctactatttgaagtggaaca

SEQ ID NO: 74012 - DNA, 60 bp, Artificial
  Synthetic oligonucleotide
aacggtcttatgaacagatggaaactgatggggaacgccagaatgcaactgaaatcaggg

SEQ ID NO: 74013 - DNA, 60 bp, Artificial
  Synthetic oligonucleotide
aacggtcttatgaacagatggaaactgatggggaacgccagaatgcaactgagatcagag

SEQ ID NO: 74014 - DNA, 60 bp, Artificial
  Synthetic oligonucleotide
ccatttgaatggatgtcaatccgactttacttttcttgaaagttccagcgcaaaatgcca

SEQ ID NO: 74015 - DNA, 60 bp, Artificial
  Synthetic oligonucleotide
atttgaatggatgtcaatccgactttacttttcttgaaagttccagcacaaaatgccata

SEQ ID NO: 74016 - DNA, 60 bp, Artificial
  Synthetic oligonucleotide
ggtgccaaggaggtagcactcagttattccactggtgcacttgccagttgcatgggcctc

SEQ ID NO: 74017 - DNA, 57 bp, Artificial
  Synthetic oligonucleotide
caatatgcacccacttggaggtatgtttcatgtattcagattttcatttcatcaatg

SEQ ID NO: 74018 - DNA, 60 bp, Artificial
  Synthetic oligonucleotide
aagcgatttgaagcaatatgatagtgacgaacctgaattaaggtcactttcaagctggat

SEQ ID NO: 74019 - DNA, 60 bp, Artificial
  Synthetic oligonucleotide
ttcaggtacctatggggcaggctcatggcctgatggggcggacatcaatctcatgcctat

SEQ ID NO: 74020 - DNA, 60 bp, Artificial
  Synthetic oligonucleotide
ctctgttgaaggcaaaatctgcatcaatcggtgcttttatgtggagttgataaggggaag

SEQ ID NO: 74021 - DNA, 60 bp, Artificial
  Synthetic oligonucleotide
tctctgttgaaggcaaaatctgcatcaatcggtgcttttatgtggagttgataaggggaa

SEQ ID NO: 74022 - DNA, 60 bp, Artificial
  Synthetic oligonucleotide
taatcactcactgagtgacatcaaaatcatggcgtcccaaggcaccaaacggtcttatga

SEQ ID NO: 74023 - DNA, 60 bp, Artificial
  Synthetic oligonucleotide
ataatcactcactgagtgacatcaaaatcatggcgtcccaaggcaccaaacggtcttatg

SEQ ID NO: 74024 - DNA, 60 bp, Artificial
  Synthetic oligonucleotide
gagtgacatcaaaatcatggcgtcccaaggcaccaaacggtcttatgaacagatggaaac

SEQ ID NO: 74025 - DNA, 60 bp, Artificial
  Synthetic oligonucleotide
aatcactcactgagtgacatcaaaatcatggcgtcccaaggcaccaaacggtcttatgaa

SEQ ID NO: 74026 - DNA, 60 bp, Artificial
  Synthetic oligonucleotide
tcactcactgagtgacatcaaaatcatggcgtcccaaggcaccaaacggtcttatgaaca

SEQ ID NO: 74027 - DNA, 60 bp, Artificial
  Synthetic oligonucleotide
taacagtgataaagaacaacatgataaacaatgaccttggaccagcaacagcccagatgg

SEQ ID NO: 74028 - DNA, 60 bp, Artificial
  Synthetic oligonucleotide
cagtgataaagaacaacatgataaacaatgaccttggaccagcaacagcccagatggcta

SEQ ID NO: 74029 - DNA, 60 bp, Artificial
  Synthetic oligonucleotide
gtccaaccaagagcatggaatatgacgctgttgcaactacacactcctggattcccaaga

SEQ ID NO: 74030 - DNA, 60 bp, Artificial
  Synthetic oligonucleotide
atgaatccaaaccaaaagataataacaattagctctgtctctctgaccattgcaacagta

SEQ ID NO: 74031 - DNA, 60 bp, Artificial
  Synthetic oligonucleotide
tgaccattgcaacagtatgtttcctcatgcaaattgccatcttagcaacgactgtgacac

SEQ ID NO: 74032 - DNA, 60 bp, Artificial
  Synthetic oligonucleotide
ggaacaggctcatggcctgatggggcaaatatcaacttcatgcctatataagctttcgca

SEQ ID NO: 74033 - DNA, 53 bp, Artificial
  Synthetic oligonucleotide
atgactgatggaagtgcgtcaggaagggccgacactagaatactattcattaa

SEQ ID NO: 74034 - DNA, 56 bp, Artificial
  Synthetic oligonucleotide
agcagcagcaactgcagggatccaaacaatgagagagggaacccaggggtgaaagg

SEQ ID NO: 74035 - DNA, 60 bp, Artificial
  Synthetic oligonucleotide
attttctctgttgaaggcaaaagctgcataaataggtgtttttatgtggagttaataaga

SEQ ID NO: 74036 - DNA, 60 bp, Artificial
  Synthetic oligonucleotide
acggcacaatacatgatagaatcccacatcgaacccttttaatgaatgaattgggtgttc

SEQ ID NO: 74037 - DNA, 60 bp, Artificial
  Synthetic oligonucleotide
gagaaccttatgtgtcatgcggccccagtaaatgttatcagtttgcactcgggcagggta

SEQ ID NO: 74038 - DNA, 60 bp, Artificial
  Synthetic oligonucleotide
gtgcatttgaatagtactaccatagaaaaagaaatttgtcctgaactaccagaatacagg

SEQ ID NO: 74039 - DNA, 57 bp, Artificial
  Synthetic oligonucleotide
gaatgcagcattccctcgaacaatcaagtggtgccatgtgaaccaatcataatagaa

SEQ ID NO: 74040 - DNA, 60 bp, Artificial
  Synthetic oligonucleotide
ggatgtcaatccgactctactgttcctaaaggttccagcgcaaaatgccataagcaccac

SEQ ID NO: 74041 - DNA, 60 bp, Artificial
  Synthetic oligonucleotide
cagttttggagtgtccgggattaatgagtcagctgatatgagcattggagtaacagtgat

SEQ ID NO: 74042 - DNA, 60 bp, Artificial
  Synthetic oligonucleotide
ggagtgtccgggattaatgagtcagctgatatgagcattggagtaacagtgataaagaac

SEQ ID NO: 74043 - DNA, 60 bp, Artificial
  Synthetic oligonucleotide
ggagttctcagaagtagaagggagaattcaggacctcgagaaatacgttgaagacactaa

SEQ ID NO: 74044 - DNA, 60 bp, Artificial
  Synthetic oligonucleotide
aatgcaccaaatcaggagggaatacaagcaggagtggatagattctacaggatctgcaag

SEQ ID NO: 74045 - DNA, 60 bp, Artificial
  Synthetic oligonucleotide
cactcagttattctgctggtgcacttgccagttgcatgggcctcatatacaacaggatgg

SEQ ID NO: 74046 - DNA, 60 bp, Artificial
  Synthetic oligonucleotide
gggaagaacacagatcttgaggctctcatggaatggctaaagacaagaccaatcctgtca

SEQ ID NO: 74047 - DNA, 55 bp, Artificial
  Synthetic oligonucleotide
ttattctgctggtgcacttgccagttgcatgggcctcatatacaacaggatgggg

SEQ ID NO: 74048 - DNA, 60 bp, Artificial
  Synthetic oligonucleotide
ttattctgctggtgcacttgccagttgcatgggcctcatatacaacaggatgggggctgt

SEQ ID NO: 74049 - DNA, 59 bp, Artificial
  Synthetic oligonucleotide
tcagttattctgctggtgcacttgccagttgcatgggcctcatatacaacaggatgggg

SEQ ID NO: 74050 - DNA, 60 bp, Artificial
  Synthetic oligonucleotide
tcagttattctgctggtgcacttgccagttgcatgggcctcatatacaacaggatggggg

SEQ ID NO: 74051 - DNA, 60 bp, Artificial
  Synthetic oligonucleotide
gcaaaagctgcatcaataggtgcttttatgtggagttgataaggggaaggaaacaggaaa

SEQ ID NO: 74052 - DNA, 60 bp, Artificial
  Synthetic oligonucleotide
acgatcttatgagcagatggaaactggtggagaacgccagaatgccactgaaatcagagc

SEQ ID NO: 74053 - DNA, 60 bp, Artificial
  Synthetic oligonucleotide
gggcacttgtgcgtactggaatggatcccaggatgtgttctctgatgcaaggctcgactc

SEQ ID NO: 74054 - DNA, 60 bp, Artificial
  Synthetic oligonucleotide
cctgcagggcaaatcagcgtacagcccacgttctctgtacaaaggaacctcccattcgag

SEQ ID NO: 74055 - DNA, 60 bp, Artificial
  Synthetic oligonucleotide
gcgatttgaagcaatatgatagtgacgaaccagaattaaggtcactttcaagctggatcc

SEQ ID NO: 74056 - DNA, 60 bp, Artificial
  Synthetic oligonucleotide
gaagaatccgatgaggcacttaaaatgaccatggcctccgcacctgcttcgcgataccta

SEQ ID NO: 74057 - DNA, 60 bp, Artificial
  Synthetic oligonucleotide
tgtgatattcgatcggctggagacactgatactactcagagctttcacggaggaaggagc

SEQ ID NO: 74058 - DNA, 60 bp, Artificial
  Synthetic oligonucleotide
cggctggagacactgatactactcagagctttcacggaggaaggagcaattgtcggcgaa

SEQ ID NO: 74059 - DNA, 60 bp, Artificial
  Synthetic oligonucleotide
gcagaagagtagacataaaccctggtcatgcagacctcagtgccaaagaggcacaggatg

SEQ ID NO: 74060 - DNA, 60 bp, Artificial
  Synthetic oligonucleotide
gtaatgaaaagaaggccaaactggcaaatgttgtgagaaaaatgatgactaattcacaag

SEQ ID NO: 74061 - DNA, 60 bp, Artificial
  Synthetic oligonucleotide
caggagggaatacaagcaggagtggatagattctacaggatctgcaagttggtgggaatc

SEQ ID NO: 74062 - DNA, 60 bp, Artificial
  Synthetic oligonucleotide
gtcagacctatgattggacattaaacagaaatcaaccggccgcaactgcattagccaaca

SEQ ID NO: 74063 - DNA, 60 bp, Artificial
  Synthetic oligonucleotide
cagacctatgattggacattaaacagaaatcaaccggccgcaactgcattagccaacact

SEQ ID NO: 74064 - DNA, 60 bp, Artificial
  Synthetic oligonucleotide
ggccactcgtgctggaaagcagatagtggagaggattctggaggaggaatccgacgaggc

SEQ ID NO: 74065 - DNA, 60 bp, Artificial
  Synthetic oligonucleotide
ggagtgaaaggctgggcctttgacaatggaaatgacgtgtggatgggaagaacgatcagc

SEQ ID NO: 74066 - DNA, 60 bp, Artificial
  Synthetic oligonucleotide
gcggagggaacactaaccagcagagagcatctgcaggacaaatcagcgtacagcccacat

SEQ ID NO: 74067 - DNA, 60 bp, Artificial
  Synthetic oligonucleotide
ttggaggcaatgaaaagaaggctaaactggcaaatgttgtgagaaaaatgatgactaatt

SEQ ID NO: 74068 - DNA, 60 bp, Artificial
  Synthetic oligonucleotide
tggcaaatgttgtgagaaaaatgatgactaattcacaagacactgagctttctttcacaa

SEQ ID NO: 74069 - DNA, 54 bp, Artificial
  Synthetic oligonucleotide
cttgaagtggagcaagagataagaactttctcgtttcagcttatttaatgataa

SEQ ID NO: 74070 - DNA, 60 bp, Artificial
  Synthetic oligonucleotide
caattgtagagacataagcgatttgaagcaatatgatagtgacgaacctgaattaaggtc

SEQ ID NO: 74071 - DNA, 60 bp, Artificial
  Synthetic oligonucleotide
tagagacgtaagcgatttgaagcaatatgatagtgacgaaccagaattaaggtcactttc

SEQ ID NO: 74072 - DNA, 60 bp, Artificial
  Synthetic oligonucleotide
agagacataagcgatttgaagcaatatgatagtgacggacctgaattaaggtcactttca

SEQ ID NO: 74073 - DNA, 60 bp, Artificial
  Synthetic oligonucleotide
aaactcgtgtcttgaaacgatggaagttgttcaacaaacaagggtggacagactgaccca

SEQ ID NO: 74074 - DNA, 60 bp, Artificial
  Synthetic oligonucleotide
actcgtgtcttgaaacgatggaagttgttcaacaaacaagggtggacagactgacccaag

SEQ ID NO: 74075 - DNA, 60 bp, Artificial
  Synthetic oligonucleotide
cctcgtgtcttgaaacgatggaagttgttcaacaaacaagggtggacagactgacccaag

SEQ ID NO: 74076 - DNA, 60 bp, Artificial
  Synthetic oligonucleotide
aatgtaaggggatcagggatgagaatacttgtaaggggcaattctcctgtattcaactac

SEQ ID NO: 74077 - DNA, 60 bp, Artificial
  Synthetic oligonucleotide
tgaggaggggaaaatcgttcatactagcccattgtcaggaagtgctcagcatgtcgagga

SEQ ID NO: 74078 - DNA, 60 bp, Artificial
  Synthetic oligonucleotide
aatgattcctgggttttgcttaatgcatcttggttcaactccttcctcacacatgcactg

SEQ ID NO: 74079 - DNA, 60 bp, Artificial
  Synthetic oligonucleotide
ggcgagactagggaaaggatacatgttcgaaagtaagagaatgaaacttcgaacacaaat

SEQ ID NO: 74080 - DNA, 60 bp, Artificial
  Synthetic oligonucleotide
ggcgagactagggaaaggatacatgttcgaaagtaagagcatgaagctccgaacacaaat

SEQ ID NO: 74081 - DNA, 60 bp, Artificial
  Synthetic oligonucleotide
tataatgttctcgaataaaatggcaagactagggaaaggatacatgttcgaaagtaagag

SEQ ID NO: 74082 - DNA, 60 bp, Artificial
  Synthetic oligonucleotide
tctcaaacaaaatggcgagactagggaaaggatacatgttcgaaagtaagagcatgaagc

SEQ ID NO: 74083 - DNA, 60 bp, Artificial
  Synthetic oligonucleotide
tataatgttctcaaataaaatggcaagactagggaaaggatacatgttcgaaagtaagag

SEQ ID NO: 74084 - DNA, 60 bp, Artificial
  Synthetic oligonucleotide
atggcgagactagggaaaggatacatgttcgaaagtaagagaatgaaacttcgaacacaa

SEQ ID NO: 74085 - DNA, 60 bp, Artificial
  Synthetic oligonucleotide
taaaatggcaagactagggaaaggatacatgttcgaaagtaagagcatgaaacttcgaac

SEQ ID NO: 74086 - DNA, 60 bp, Artificial
  Synthetic oligonucleotide
aatgagtaatgaaggatcttatttcttcggagacaatgcagaagagtacgacaattaagg

SEQ ID NO: 74087 - DNA, 60 bp, Artificial
  Synthetic oligonucleotide
ccaagcacaaaccaagagcaaaccaatctgtatgttcaggcatcaggaagggtcacagtc

SEQ ID NO: 74088 - DNA, 60 bp, Artificial
  Synthetic oligonucleotide
taacagcaatggaaatttaattgcccctcgaggttattttaagatgcgcactggaaaaag

SEQ ID NO: 74089 - DNA, 60 bp, Artificial
  Synthetic oligonucleotide
agagttcatcaccgaaggctttacatggacaggagtcacacaaaacggagggagtggtgc

SEQ ID NO: 74090 - DNA, 60 bp, Artificial
  Synthetic oligonucleotide
tatacagagatgaagcactaaacaatcgattccagatcaagggtgtggagctgaaatctg

SEQ ID NO: 74091 - DNA, 60 bp, Artificial
  Synthetic oligonucleotide
ctaaaatagatctatggtcttacaacgcggagcttcttgtggccctggaaaaccagcata

SEQ ID NO: 74092 - DNA, 60 bp, Artificial
  Synthetic oligonucleotide
tcaacagggaaaatatgcaacaatccccacaaaattctcgatgggagagactgcacacta

SEQ ID NO: 74093 - DNA, 60 bp, Artificial
  Synthetic oligonucleotide
gactgaattggctgactaaatctggtagcgcttatccggtgctgaacgtaaccatgccga

SEQ ID NO: 74094 - DNA, 60 bp, Artificial
  Synthetic oligonucleotide
gggactggttcatgctaatgcccaagcagaaagtggaaggccctcttcgcatcagaatag

SEQ ID NO: 74095 - DNA, 60 bp, Artificial
  Synthetic oligonucleotide
gttcatgctaatgcccaagcagaaagtggaaggccctcttcgcatcagaatagaccaggc

SEQ ID NO: 74096 - DNA, 60 bp, Artificial
  Synthetic oligonucleotide
cttgaggctctcatggaatggctaaagacaagaccaatactgtcacctctgactaaaggg

SEQ ID NO: 74097 - DNA, 60 bp, Artificial
  Synthetic oligonucleotide
gtttgcagggaagaacaccgatcttgaggcactcatggaatggctaaagacaagaccaat

SEQ ID NO: 74098 - DNA, 60 bp, Artificial
  Synthetic oligonucleotide
agatataaatatggcagattatagcattgactccagttatgtgtgctcaggacttgttgg

SEQ ID NO: 74099 - DNA, 60 bp, Artificial
  Synthetic oligonucleotide
gccaaagaggcacaggatgtaatcatggaagtcgttttcccaaatgaagtgggagcgaga

SEQ ID NO: 74100 - DNA, 52 bp, Artificial
  Synthetic oligonucleotide
gtagatgaatactccagcacagagagagtggtagtgagcattgaccgatttt

SEQ ID NO: 74101 - DNA, 60 bp, Artificial
  Synthetic oligonucleotide
gtagatgaatactccagcacagagagagtggtagtgagcattgaccgatttttaagagtt

SEQ ID NO: 74102 - DNA, 60 bp, Artificial
  Synthetic oligonucleotide
atggcccagcattgagtatcaatgagctgagcaatcttgcaaaaggagagaaggctaatg

SEQ ID NO: 74103 - DNA, 60 bp, Artificial
  Synthetic oligonucleotide
atggcccagcgttgagcatcaacgaactaagcaatcttgcaaaaggagagaaggctaatg

SEQ ID NO: 74104 - DNA, 60 bp, Artificial
  Synthetic oligonucleotide
gcccagcgttgagcatcaacgaactaagcaatcttgcaaaaggagagaaggctaatgtgc

SEQ ID NO: 74105 - DNA, 60 bp, Artificial
  Synthetic oligonucleotide
gcagacctcagtgccaaagaggcacaggatgtaatcatggaagtcgttttcccaaatgaa

SEQ ID NO: 74106 - DNA, 60 bp, Artificial
  Synthetic oligonucleotide
aatggtcctgagtcagtgttggtcaacacctatcagtggatcatcagaaattgggagact

SEQ ID NO: 74107 - DNA, 60 bp, Artificial
  Synthetic oligonucleotide
gcagattatagcattgactccagttatgtgtgctcaggacttgttggagacacgccaagg

SEQ ID NO: 74108 - DNA, 60 bp, Artificial
  Synthetic oligonucleotide
tgttcacgctcaccgtgccaagtgagcgaggactgcagcgtagacgctttgtccaaaatg

SEQ ID NO: 74109 - DNA, 60 bp, Artificial
  Synthetic oligonucleotide
aaaggctgggcctttgatgatggaaatgacgtgtggatgggaagaacgatcagcgaggag

SEQ ID NO: 74110 - DNA, 60 bp, Artificial
  Synthetic oligonucleotide
caacaaggatttacgctcaggttatgaaaccttcaaagtcattggtggttggtccacacc

SEQ ID NO: 74111 - DNA, 60 bp, Artificial
  Synthetic oligonucleotide
gtgaaaggctgggcctttgatgatgggaatgacgtgtggatgggaagaacgatcagcgag

SEQ ID NO: 74112 - DNA, 60 bp, Artificial
  Synthetic oligonucleotide
ggggtgaaaggctgggcctttgacaatggagatgacgtgtggatgggaagaacgatcagc

SEQ ID NO: 74113 - DNA, 60 bp, Artificial
  Synthetic oligonucleotide
atttgaaattacaggaaccatgcggaggctcgccgaccaaagtctcccaccgaacttctc

SEQ ID NO: 74114 - DNA, 60 bp, Artificial
  Synthetic oligonucleotide
ttacagctactagttgaagtggaacaggagataagaactttctcgtttcagcttatttaa

SEQ ID NO: 74115 - DNA, 60 bp, Artificial
  Synthetic oligonucleotide
aaggtggtcatggagtgaaaggctgggcctttgatgatgggaatgacgtgtggatgggaa

SEQ ID NO: 74116 - DNA, 60 bp, Artificial
  Synthetic oligonucleotide
aggacttgaatggaatgataacacagttcgagtctctaaaactctacagagattcgcttg

SEQ ID NO: 74117 - DNA, 60 bp, Artificial
  Synthetic oligonucleotide
cgatttgcagaccaagaactgagtgatgccccattccttgaccggcttcgccgagatcag

SEQ ID NO: 74118 - DNA, 60 bp, Artificial
  Synthetic oligonucleotide
catggagttttctctcactgacccgagacttgagccacataaatgggagaaatactgtgt

SEQ ID NO: 74119 - DNA, 58 bp, Artificial
  Synthetic oligonucleotide
attcccaagagaaaccgctctattctcaacacaagccaaaggggaattcttgaggatg

SEQ ID NO: 74120 - DNA, 60 bp, Artificial
  Synthetic oligonucleotide
cagatccactagcatctttattggagatgtgccacagcacacagattggcggaacaagga

SEQ ID NO: 74121 - DNA, 60 bp, Artificial
  Synthetic oligonucleotide
atttgcagcaatatgcactcacttggaagtatgtttcatgtattcagattttcatttcat

SEQ ID NO: 74122 - DNA, 60 bp, Artificial
  Synthetic oligonucleotide
ataaatataaaggattatagcattgtttccagttatgtgtgctcaggacttgttggagac

SEQ ID NO: 74123 - DNA, 60 bp, Artificial
  Synthetic oligonucleotide
gcagacctcagtgccaaagaggcacaggatgtaatcatggaaatcgttttcccaaatgaa

SEQ ID NO: 74124 - DNA, 60 bp, Artificial
  Synthetic oligonucleotide
acagaaattggtcaaagccacaatgtcaaattacaggatttgcacctttttctaaggaca

SEQ ID NO: 74125 - DNA, 60 bp, Artificial
  Synthetic oligonucleotide
gataatcactcaccgagtgacatccgcatcatggcgtctcaaggcaccaaacgatcttat

SEQ ID NO: 74126 - DNA, 57 bp, Artificial
  Synthetic oligonucleotide
acgagcaatgatggaccaagtgagggaaagccggaatcctgggaatgctgaaattga

SEQ ID NO: 74127 - DNA, 60 bp, Artificial
  Synthetic oligonucleotide
cagcagcacagcgagcaatgatggaccaggtgagggaaagccggaatcctgggaatgctg

SEQ ID NO: 74128 - DNA, 60 bp, Artificial
  Synthetic oligonucleotide
acagcagcacaacgagcaatgatggaccaggtgagggaaagccggaatcctgggaatgct

SEQ ID NO: 74129 - DNA, 60 bp, Artificial
  Synthetic oligonucleotide
acagcagcacagcgagcaatgatggaccaggtgagggaaagccggaatcctgggaatgct

SEQ ID NO: 74130 - DNA, 60 bp, Artificial
  Synthetic oligonucleotide
gagaacaagggcacttgtgcgcactgggatggatcccaggatgtgttctctgatgcaagg

SEQ ID NO: 74131 - DNA, 60 bp, Artificial
  Synthetic oligonucleotide
gactggaggtccaatctacaggaggagagatgggaaatggatgagagaattgatcctata

SEQ ID NO: 74132 - DNA, 60 bp, Artificial
  Synthetic oligonucleotide
aagactggaggtccaatctacaggaggagagatgggaaatggatgagagaattgatccta

SEQ ID NO: 74133 - DNA, 60 bp, Artificial
  Synthetic oligonucleotide
gataatcactcaccgaatgacatccacatcatggcgtctcaaggcaccaaacgatcttat

SEQ ID NO: 74134 - DNA, 60 bp, Artificial
  Synthetic oligonucleotide
ggagggatactccctagtcggaattgatcctttccgtttgctccaaaacagtcaagtctt

SEQ ID NO: 74135 - DNA, 60 bp, Artificial
  Synthetic oligonucleotide
gtccaccagaggagttcagattgcttcaaatgagaacatggagacaatggactccagtac

SEQ ID NO: 74136 - DNA, 60 bp, Artificial
  Synthetic oligonucleotide
ctgggctataaggaccagaagtggaggaaacactaaccagcagagagcatctgcagggca

SEQ ID NO: 74137 - DNA, 60 bp, Artificial
  Synthetic oligonucleotide
gggatactccctagtcggaattgatcctttccgtttgctccaaaacagtcaagtcttcag

SEQ ID NO: 74138 - DNA, 52 bp, Artificial
  Synthetic oligonucleotide
gtcaagtcttcagtcttatcagaccaaacgaaaatccagcacataaaagtca

SEQ ID NO: 74139 - DNA, 60 bp, Artificial
  Synthetic oligonucleotide
ggtgtcaagcttcatcagagggacaagagtggtcccaagaggacaactgtccaccagagg

SEQ ID NO: 74140 - DNA, 60 bp, Artificial
  Synthetic oligonucleotide
acaagagtagtcccaagaggacaactgtccaccagaggagttcagattgcttcaaatgag

SEQ ID NO: 74141 - DNA, 60 bp, Artificial
  Synthetic oligonucleotide
cccaagaggacaactgtccaccagaggagttcagattgcttcaaatgagaatatggagac

SEQ ID NO: 74142 - DNA, 60 bp, Artificial
  Synthetic oligonucleotide
caccgaatgacatccacatcatggcgtctcaaggcaccaaacgatcttatgagcagatgg

SEQ ID NO: 74143 - DNA, 60 bp, Artificial
  Synthetic oligonucleotide
aaatcagagcatctgttgggagaatggttggtggaatcggaagattctacatacagatgt

SEQ ID NO: 74144 - DNA, 60 bp, Artificial
  Synthetic oligonucleotide
ctggaagagcatcccagtgctgggaaagaccctaagaagactggaggtccaatctacagg

SEQ ID NO: 74145 - DNA, 60 bp, Artificial
  Synthetic oligonucleotide
tggaagagcatcccagtgctgggaaagaccctaagaagactgggggtccaatctacagga

SEQ ID NO: 74146 - DNA, 60 bp, Artificial
  Synthetic oligonucleotide
aggagtgcctgattaatgatccctgggttttgcttaatgcgtcgtggttcaactccttcc

SEQ ID NO: 74147 - DNA, 60 bp, Artificial
  Synthetic oligonucleotide
agtgcctgattaatgatccctgggttttgctcaatgcgtcttggttcaactccttcctta

SEQ ID NO: 74148 - DNA, 60 bp, Artificial
  Synthetic oligonucleotide
gtttcatcagattgagaaggagttttcagaagtggaaggaagaattcaggaccttgagaa

SEQ ID NO: 74149 - DNA, 53 bp, Artificial
  Synthetic oligonucleotide
attggctgactaaatctggtagtgcttatccattgctgaacgtgaccatgccg

SEQ ID NO: 74150 - DNA, 55 bp, Artificial
  Synthetic oligonucleotide
aaaaacaagaaggcagctgagggagaatgctgaagacatggggaatggctgcttc

SEQ ID NO: 74151 - DNA, 60 bp, Artificial
  Synthetic oligonucleotide
ggggaccctcattgtgatgtatttcaagatgaaacatgggacctctatgtagagcgcagc

SEQ ID NO: 74152 - DNA, 60 bp, Artificial
  Synthetic oligonucleotide
gcaacaatcctcacagaattctcgatggaagagactgcacattagtagatgctctactag

SEQ ID NO: 74153 - DNA, 60 bp, Artificial
  Synthetic oligonucleotide
ccataattcccaacattggatccaggccttgggtcagaggccaatcaggaagaataagta

SEQ ID NO: 74154 - DNA, 60 bp, Artificial
  Synthetic oligonucleotide
gagttcatcactgaaggcttcacgtggacaggagtcacacaaaatggagggagtggtgct

SEQ ID NO: 74155 - DNA, 53 bp, Artificial
  Synthetic oligonucleotide
gtgcttggggcatcatgcagtaccaaacggaacaatagtgaaaacaataacgg

SEQ ID NO: 74156 - DNA, 60 bp, Artificial
  Synthetic oligonucleotide
gacacatgcatctctgagtgcatcactcccaatggtagcatccccaatgacaagcccttt

SEQ ID NO: 74157 - DNA, 60 bp, Artificial
  Synthetic oligonucleotide
gggatgaagcactaaataatcgattccagatcaagggtgtggaactgaaatccggataca

SEQ ID NO: 74158 - DNA, 60 bp, Artificial
  Synthetic oligonucleotide
ctgtggtcttacaatgcggaacttcttgtggcgctggaaaaccagcatacaattgatctg

SEQ ID NO: 74159 - DNA, 60 bp, Artificial
  Synthetic oligonucleotide
tgacaatgcttgcatagaatcaatcaggaatgggacctatgatcatgacatatacaggga

SEQ ID NO: 74160 - DNA, 60 bp, Artificial
  Synthetic oligonucleotide
catcatccaagcacagaccaagagcaaaccaatttgtatgtccaggcatcgggaagggtc

SEQ ID NO: 74161 - DNA, 60 bp, Artificial
  Synthetic oligonucleotide
aatcatgaagaccattattgttctgagttgttttttctgtctggctttcagccaacatcc

SEQ ID NO: 74162 - DNA, 60 bp, Artificial
  Synthetic oligonucleotide
tcaggcatcaaaactcggaaggtacaggacaagcagcagaccttaaaagcactcaagccg

SEQ ID NO: 74163 - DNA, 60 bp, Artificial
  Synthetic oligonucleotide
actcaagccgccatcgaccagatcaatggaaaactgaaccgagtaatcgagaaaacaaat

SEQ ID NO: 74164 - DNA, 60 bp, Artificial
  Synthetic oligonucleotide
gagtggtgcttgcaaaagagggcccaccaatggctttttcagtagactgaattggctgac

SEQ ID NO: 74165 - DNA, 60 bp, Artificial
  Synthetic oligonucleotide
ctaacactgtgtcaagtttccaggtagattgctttctttggcatatccggaaacaagttg

SEQ ID NO: 74166 - DNA, 60 bp, Artificial
  Synthetic oligonucleotide
gcaagcattacaactgctgtttgaagtagaacaggagataagaactttctcatttcagct

SEQ ID NO: 74167 - DNA, 60 bp, Artificial
  Synthetic oligonucleotide
tcaccgaagagggagcaattattggcgaaatctcaccattgccttcttttccaggacata

SEQ ID NO: 74168 - DNA, 60 bp, Artificial
  Synthetic oligonucleotide
agtctctaaaaatctacagagattcgcttggagaatcagtaatgagaatgggggacctcc

SEQ ID NO: 74169 - DNA, 60 bp, Artificial
  Synthetic oligonucleotide
caccgaagagggagcaattattggcgaaatctcaccattgccttcttttccaggacatac

SEQ ID NO: 74170 - DNA, 60 bp, Artificial
  Synthetic oligonucleotide
tgcaagcattacaactgctgtttgaagtagaacaggagataagaactttctcatttcagc

SEQ ID NO: 74171 - DNA, 60 bp, Artificial
  Synthetic oligonucleotide
cactgatgtaattaattcctgggccggagatattctaagaactcaggaatcatcatgcac

SEQ ID NO: 74172 - DNA, 60 bp, Artificial
  Synthetic oligonucleotide
gatgtaattaattcctgggccggagatattctaagaactcaggaatcatcatgcacttgc

SEQ ID NO: 74173 - DNA, 60 bp, Artificial
  Synthetic oligonucleotide
atgtaatcaattcctgggcaggggacattctaagaactcaggaatcatcatgcacttgca

SEQ ID NO: 74174 - DNA, 60 bp, Artificial
  Synthetic oligonucleotide
aatgcgcactgggaaaagctcaataatgagatcagatgcacctattgacacatgcatctc

SEQ ID NO: 74175 - DNA, 60 bp, Artificial
  Synthetic oligonucleotide
cagagtcggatacttatgtgcaggtctccccagtgacactccaagaggagaagatagtca

SEQ ID NO: 74176 - DNA, 60 bp, Artificial
  Synthetic oligonucleotide
tggagtagaccatgagattgccgactggtcatggcacgatggagctattcttccctttgc

SEQ ID NO: 74177 - DNA, 60 bp, Artificial
  Synthetic oligonucleotide
cccagcattgagcatcaatgaactgagcaatcttgcaaaaggagagaaggctaatgtgct

SEQ ID NO: 74178 - DNA, 60 bp, Artificial
  Synthetic oligonucleotide
caagatgcaacctgggacctttatgtggaacgtagcagcgccttcagcaactgctatccc

SEQ ID NO: 74179 - DNA, 60 bp, Artificial
  Synthetic oligonucleotide
gaaagaccggagcccctatagaactctaatgagtgtagaaatagggcaatcacccaacgt

SEQ ID NO: 74180 - DNA, 55 bp, Artificial
  Synthetic oligonucleotide
aaaatgcaattggggtcctcatcggaggacttaaatggaatgataatacggttag

SEQ ID NO: 74181 - DNA, 59 bp, Artificial
  Synthetic oligonucleotide
gatcagtggctcataagtcctgcctgcctgcttgtgtgtatggacttgctgtggccagt

SEQ ID NO: 74182 - DNA, 60 bp, Artificial
  Synthetic oligonucleotide
gcggagcaatgctttcagcaattgttacccttacgacgtaccagattatgcatcccttcg

SEQ ID NO: 74183 - DNA, 60 bp, Artificial
  Synthetic oligonucleotide
tttgatatgagtaatgaaggatcttatttcttcggagacaatgcagaagagttcgacaat

SEQ ID NO: 74184 - DNA, 60 bp, Artificial
  Synthetic oligonucleotide
ggaagaacgcagatctcgaggctctcatggaatggctaaagacaagaccaatcctgtcac

SEQ ID NO: 74185 - DNA, 60 bp, Artificial
  Synthetic oligonucleotide
gttccttttcatctggggaccaagcaagtgtgcatagcatggtccagctcaagttgccac

SEQ ID NO: 74186 - DNA, 60 bp, Artificial
  Synthetic oligonucleotide
gttccatttcatctggggaccaagcaagtgtgcatagcatggtccagctcaagttgtcat

SEQ ID NO: 74187 - DNA, 60 bp, Artificial
  Synthetic oligonucleotide
gggaccaagcaagtgtgcatagcatggtccagctcaagttgccacgatggaaaagcatgg

SEQ ID NO: 74188 - DNA, 60 bp, Artificial
  Synthetic oligonucleotide
gttccttttcatctggggaccaagcaagtgtgcatagcatggtccagctcaagttgtcac

SEQ ID NO: 74189 - DNA, 60 bp, Artificial
  Synthetic oligonucleotide
ggtggtcatggagtaaaaggctgggcctttgatgatggaaatgacgtgtggatgggaaga

SEQ ID NO: 74190 - DNA, 60 bp, Artificial
  Synthetic oligonucleotide
ggatcatagcattgtttccagttatgtgtgttcaggacttgttggagacacacccagaaa

SEQ ID NO: 74191 - DNA, 58 bp, Artificial
  Synthetic oligonucleotide
tcatagcattgtttccagttatgtgtgttcaggacttgttggagacacacccagaaaa

SEQ ID NO: 74192 - DNA, 60 bp, Artificial
  Synthetic oligonucleotide
gaggagtgctcctgctatcctcgatatcctggtgtcagatgtgtctgcagagacaattgg

SEQ ID NO: 74193 - DNA, 60 bp, Artificial
  Synthetic oligonucleotide
aggtggtcatggagtgaaaggctgggcatttgatgatggaaatgacgtgtggatgggaag

SEQ ID NO: 74194 - DNA, 60 bp, Artificial
  Synthetic oligonucleotide
aaggtggtcatggagtaaaaggctgggcctttgatgatggaaatgacgtgtggatgggaa

SEQ ID NO: 74195 - DNA, 60 bp, Artificial
  Synthetic oligonucleotide
gtcgaggagtgctcctgctttcctcgatatcctggtgtcagatgtgtctgcagagacaac

SEQ ID NO: 74196 - DNA, 60 bp, Artificial
  Synthetic oligonucleotide
gtaatgactgatgggagtgcttcaggaaaagctgatactaaaatactattcattgaggag

SEQ ID NO: 74197 - DNA, 60 bp, Artificial
  Synthetic oligonucleotide
gggaccaagcaagtgtgcatagcatggtccagctcaagttgtcatgatggaaaagcatgg

SEQ ID NO: 74198 - DNA, 60 bp, Artificial
  Synthetic oligonucleotide
catgtcgaggagtgctcctgctatcctcgatatcctggtgtcagatgtgtctgcagagac

SEQ ID NO: 74199 - DNA, 60 bp, Artificial
  Synthetic oligonucleotide
agcatgtcgaggagtgctcctgctatcctcgatatcctggtgtcagatgtgtctgcagag

SEQ ID NO: 74200 - DNA, 60 bp, Artificial
  Synthetic oligonucleotide
cagcatgtcgaggagtgctcctgctatcctcgatatcctggtgtcagatgtgtctgcaga

SEQ ID NO: 74201 - DNA, 60 bp, Artificial
  Synthetic oligonucleotide
aatgaaagaacatggggaagatccaagaattgaaactaacaaattcgctgcaatatgcac

SEQ ID NO: 74202 - DNA, 60 bp, Artificial
  Synthetic oligonucleotide
aaagaatatggggaggatccgaaaatcgaaactaacaaattcgctgcaatatgcacacac

SEQ ID NO: 74203 - DNA, 60 bp, Artificial
  Synthetic oligonucleotide
aatgaaagaatatggggaggatccgaaaatcgaaactaacaaattcgctgcaatatgcac

SEQ ID NO: 74204 - DNA, 60 bp, Artificial
  Synthetic oligonucleotide
aatgaaagaatatggggaagatccgaaaattgaaactaacaaattcgctgcaatatgcac

SEQ ID NO: 74205 - DNA, 60 bp, Artificial
  Synthetic oligonucleotide
atggatgtcaatccgactttacttttcttgaaagtgccagcgcaaaatgccataagtact

SEQ ID NO: 74206 - DNA, 60 bp, Artificial
  Synthetic oligonucleotide
ttgttgaacgcagcaaagcctacagcaactgttacccttatgatgtgccggatcatgcct

SEQ ID NO: 74207 - DNA, 60 bp, Artificial
  Synthetic oligonucleotide
cgcagcagagcctacagcaactgttacccttatgatgtgccggattatgtctcccttagg

SEQ ID NO: 74208 - DNA, 60 bp, Artificial
  Synthetic oligonucleotide
tgaacgcagcagagcctacagcaactgttacccttatgatgtgccggattatgtctccct

SEQ ID NO: 74209 - DNA, 59 bp, Artificial
  Synthetic oligonucleotide
ttttgttgaacgcagcaaagcctacagcaactgttacccttatgatgtgccggattatg

SEQ ID NO: 74210 - DNA, 60 bp, Artificial
  Synthetic oligonucleotide
cttacaggcaatctccaaacattgaaaataagagtacatgaggggtatgaggagttcaca

SEQ ID NO: 74211 - DNA, 60 bp, Artificial
  Synthetic oligonucleotide
ggctaatgtgctaatcgggcaaggagacgtagtgttggtaatgaaacggaaacgggactc

SEQ ID NO: 74212 - DNA, 60 bp, Artificial
  Synthetic oligonucleotide
aaggctaatgtgctaatcgggcaaggagacgtagtgttggtaatgaaacggaaacgggac

SEQ ID NO: 74213 - DNA, 60 bp, Artificial
  Synthetic oligonucleotide
ggagacgtggtgttggtcatgaaacggaaacgggactctagcatacttactgacagccag

SEQ ID NO: 74214 - DNA, 60 bp, Artificial
  Synthetic oligonucleotide
ggcattaaagggaagaggcagcacacttggactcgacctaagagtggctacaatggaagg

SEQ ID NO: 74215 - DNA, 60 bp, Artificial
  Synthetic oligonucleotide
gcattaaagggaagaggcagcacacttggactcgatctaagagtggccacaatggaaggg

SEQ ID NO: 74216 - DNA, 60 bp, Artificial
  Synthetic oligonucleotide
tttattcgaaaaattcttccccagcagttcatacaggagaccagttggaatttccagtat

SEQ ID NO: 74217 - DNA, 60 bp, Artificial
  Synthetic oligonucleotide
ggaatgacacagatgtggtaaactttgtgagcatggagttttctctcactgacccgagac

SEQ ID NO: 74218 - DNA, 60 bp, Artificial
  Synthetic oligonucleotide
tgcagggaagaacaccgatcttgaggctctcatggaatggctaaagacaagaccaatcct

SEQ ID NO: 74219 - DNA, 60 bp, Artificial
  Synthetic oligonucleotide
ggaagaacaccgatctcgaggctctcatggaatggctaaagacaagaccaatcctgtcac

SEQ ID NO: 74220 - DNA, 60 bp, Artificial
  Synthetic oligonucleotide
cttgaggcactcatggaatggctaaagacaagaccaatcctgtcacctttgactaagggg

SEQ ID NO: 74221 - DNA, 60 bp, Artificial
  Synthetic oligonucleotide
ttgggcaaactgaaattagtttcaacgggggccatatagaagaatgctcatgctacccca

SEQ ID NO: 74222 - DNA, 60 bp, Artificial
  Synthetic oligonucleotide
ttgggcaaactgaaatcagcttcaatggaggccatatagaagaatgctcatgctacccca

SEQ ID NO: 74223 - DNA, 60 bp, Artificial
  Synthetic oligonucleotide
aattgggcaaactgaaatcagcttcagcggaggccatatagaagaatgctcatgctaccc

SEQ ID NO: 74224 - DNA, 60 bp, Artificial
  Synthetic oligonucleotide
gcattaaacaaccgattccaaatcaagggtgtagagctaaaatctgggtacaaagattgg

SEQ ID NO: 74225 - DNA, 60 bp, Artificial
  Synthetic oligonucleotide
cctcgtttcaggtagattgctatctatggcacataaggaagctgctcagcatgagagaca

SEQ ID NO: 74226 - DNA, 60 bp, Artificial
  Synthetic oligonucleotide
agaagaatgctcatgctaccccaatgaaggtaaagtggaatgcgtttgtagagataattg

SEQ ID NO: 74227 - DNA, 52 bp, Artificial
  Synthetic oligonucleotide
tacaccatggatacagtcaacagaacacaccaatattcagaaaagggaaagt

SEQ ID NO: 74228 - DNA, 60 bp, Artificial
  Synthetic oligonucleotide
cgaatggattaacagctaatgaatcaggaaggctaatagatttcctcaaggatgtgatgg

SEQ ID NO: 74229 - DNA, 52 bp, Artificial
  Synthetic oligonucleotide
ttggaatttctagcatggtggaggccatggtgtctagggcccggattgatgt

SEQ ID NO: 74230 - DNA, 60 bp, Artificial
  Synthetic oligonucleotide
gccagaatgcaactgaaatcagagcatctgtcggaaggatggtgggaggaatcggccggt

SEQ ID NO: 74231 - DNA, 60 bp, Artificial
  Synthetic oligonucleotide
ggaacgccagaatgcaactgaaatcagagcatctgtcggaaggatggtgggaggaatcgg

SEQ ID NO: 74232 - DNA, 60 bp, Artificial
  Synthetic oligonucleotide
agaacgccagaatgcaactgaaatcagagcatctgtcggaaggatggtgggaggaatcgg

SEQ ID NO: 74233 - DNA, 60 bp, Artificial
  Synthetic oligonucleotide
cgccagaatgcaactgaaatcagagcatctgtcggaaggatggtgggaggaatcggccgg

SEQ ID NO: 74234 - DNA, 60 bp, Artificial
  Synthetic oligonucleotide
aaaacgggaggcccgatatacagaaggaaagatgggaaatggatgagggaactcatcctc

SEQ ID NO: 74235 - DNA, 60 bp, Artificial
  Synthetic oligonucleotide
ggaaaagaccctaagaaaacgggaggcccgatatacagaaggaaagatgggaaatggatg

SEQ ID NO: 74236 - DNA, 60 bp, Artificial
  Synthetic oligonucleotide
gctgggaaagaccctaagaaaacaggaggcccgatatacagaaggaaagatgggaaatgg

SEQ ID NO: 74237 - DNA, 60 bp, Artificial
  Synthetic oligonucleotide
gtgctgggaaagaccctaagaaaacaggaggcccgatatacagaaggaaagatgggaaat

SEQ ID NO: 74238 - DNA, 60 bp, Artificial
  Synthetic oligonucleotide
ggccggttttatgttcagatgtgtactgagcttaaactaaacgaccatgaagggcggctg

SEQ ID NO: 74239 - DNA, 60 bp, Artificial
  Synthetic oligonucleotide
ttggagtaacgggccctgatgccaaagcagtagcagtggtgcattatgggggaattccta

SEQ ID NO: 74240 - DNA, 60 bp, Artificial
  Synthetic oligonucleotide
agtaacgggccctgatgccaaagcagtagcagtggtgcattatgggggaattcctactga

SEQ ID NO: 74241 - DNA, 60 bp, Artificial
  Synthetic oligonucleotide
atgacaaacattctaatggcacagtgaaagaccggagcccctatagaactctaatgagtg

SEQ ID NO: 74242 - DNA, 60 bp, Artificial
  Synthetic oligonucleotide
gcacacagattggtgggataaggatggtggacatccttaggcagaatccaacagaggaac

SEQ ID NO: 74243 - DNA, 60 bp, Artificial
  Synthetic oligonucleotide
ggggctatatgaagcaatcgaggagtgcctgattaacgatccctgggttttgcttaatgc

SEQ ID NO: 74244 - DNA, 60 bp, Artificial
  Synthetic oligonucleotide
gatcttggggggctatatgaagcaatcgaggagtgcctgattaacgatccctgggttttg

SEQ ID NO: 74245 - DNA, 60 bp, Artificial
  Synthetic oligonucleotide
cttgtgcgtactgggatggatcccaggatgtgctctctgatgcaaggatcaactctcccg

SEQ ID NO: 74246 - DNA, 60 bp, Artificial
  Synthetic oligonucleotide
tatacagagatgaagcattaaacaaccgattccaaatcaagggtgtagagctaaaatctg

SEQ ID NO: 74247 - DNA, 60 bp, Artificial
  Synthetic oligonucleotide
aacatcctcaaggggaaattccaaacagcagcacaacgagcaatgatggaccaagtgaga

SEQ ID NO: 74248 - DNA, 60 bp, Artificial
  Synthetic oligonucleotide
ggggaaattccaaacagcagcacaacgagcaatgatggaccaagtgagagaaagccggaa

SEQ ID NO: 74249 - DNA, 60 bp, Artificial
  Synthetic oligonucleotide
aactgggtgatgccccattccttgaccggcttcgccgagaccagaagtccctaaaaggaa

SEQ ID NO: 74250 - DNA, 60 bp, Artificial
  Synthetic oligonucleotide
caagaactgggtgatgccccattccttgaccggcttcgccgagaccagaagtccctaagg

SEQ ID NO: 74251 - DNA, 60 bp, Artificial
  Synthetic oligonucleotide
gaccaagaactgggtgatgccccattccttgaccggcttcgccgagaccagaagtcccta

SEQ ID NO: 74252 - DNA, 60 bp, Artificial
  Synthetic oligonucleotide
atggcgtctcaaggcaccaaacgatcttatgagcagatggaaactggtggagagcgccag

SEQ ID NO: 74253 - DNA, 60 bp, Artificial
  Synthetic oligonucleotide
cttgcatagagtcaatcagaaatgggacttatgaccatgatatatacagagacgaagcgc

SEQ ID NO: 74254 - DNA, 60 bp, Artificial
  Synthetic oligonucleotide
tgataatgcttgcatagagtcaatcagaaatgggacttatgaccatgatatatacagaga

SEQ ID NO: 74255 - DNA, 60 bp, Artificial
  Synthetic oligonucleotide
aaccaaatcaggaagcacatacccagtgctgaacgtgactatgccaaacaatgacaattt

SEQ ID NO: 74256 - DNA, 60 bp, Artificial
  Synthetic oligonucleotide
tgctgtcgcaactacacactcctggattcccaagaggaaccgctctattctaaacacaag

SEQ ID NO: 74257 - DNA, 60 bp, Artificial
  Synthetic oligonucleotide
ctgtcgcaactacacactcctggattcccaagaggaaccgctctattctaaacacaagcc

SEQ ID NO: 74258 - DNA, 50 bp, Artificial
  Synthetic oligonucleotide
atgaaggatcttatttcttcggagacaatgcagaggagtatgacaattaa

SEQ ID NO: 74259 - DNA, 60 bp, Artificial
  Synthetic oligonucleotide
gtgcaggacgttcttccttactcaaggttccctactcaatgacaaacattctaatggcac

SEQ ID NO: 74260 - DNA, 60 bp, Artificial
  Synthetic oligonucleotide
cccttatactggagatcctccatacagccatggaacaggaacagggtataccatggacac

SEQ ID NO: 74261 - DNA, 60 bp, Artificial
  Synthetic oligonucleotide
cataagggaaccatttgtttcttgctctccaacagagtgcaggacgttcttccttactca

SEQ ID NO: 74262 - DNA, 60 bp, Artificial
  Synthetic oligonucleotide
tcataagggaaccatttgtttcttgctctccaacagagtgcaggacgttcttccttactc

SEQ ID NO: 74263 - DNA, 64 bp, Artificial
  Synthetic oligonucleotide
gggacatatgaccattacatatacagagatgaagcattaaacaaccgatttcaaattaaaggtg

SEQ ID NO: 74264 - DNA, 60 bp, Artificial
  Synthetic oligonucleotide
gggacatatgaccattacatatacagagatgaagcattaaacaaccgatttcagatcaaa

SEQ ID NO: 74265 - DNA, 59 bp, Artificial
  Synthetic oligonucleotide
caagtgatcctctcgttattaccgcaagcatcattgggatcttgcacttgatattgtgg

SEQ ID NO: 74266 - DNA, 58 bp, Artificial
  Synthetic oligonucleotide
aagtgatcctctcgttattaccgcaagcatcattgggatcttgcacttgatattgtgg

SEQ ID NO: 74267 - DNA, 60 bp, Artificial
  Synthetic oligonucleotide
cagcaaacagacaagcacaatacagagcattcaaagccaagcagggaaaaataattgggc

SEQ ID NO: 74268 - DNA, 60 bp, Artificial
  Synthetic oligonucleotide
gactggtcatggcacgatggagctattcttccctttgacatcgataagatgtagtttacg

SEQ ID NO: 74269 - DNA, 60 bp, Artificial
  Synthetic oligonucleotide
caggaaacgcatatccagtgttgaacgtgactatgccaaacaatgacaattttgacaaac

SEQ ID NO: 74270 - DNA, 60 bp, Artificial
  Synthetic oligonucleotide
caggaaacgcatatccaatgttgaacgtgactatgccaaacaatgacaattttgacaaac

SEQ ID NO: 74271 - DNA, 60 bp, Artificial
  Synthetic oligonucleotide
agcactcttggtctggacatcgaaacagccactcgtgcaggaaagcagatagtggagcag

SEQ ID NO: 74272 - DNA, 60 bp, Artificial
  Synthetic oligonucleotide
tatacagagatgaagcattaaacaaccggttccagatcaaaggcgttgagctgaagtcag

SEQ ID NO: 74273 - DNA, 53 bp, Artificial
  Synthetic oligonucleotide
tatacagagatgaagcattaaacaaccggttccagatcaaaggcgttgagctg

SEQ ID NO: 74274 - DNA, 60 bp, Artificial
  Synthetic oligonucleotide
tatacagagatgaagcattaaacaaccggttccagatcaagggcgttgagctgaagtcag

SEQ ID NO: 74275 - DNA, 60 bp, Artificial
  Synthetic oligonucleotide
ggattatagcattgtttccagatatgtgtgctcaggacttgttggagacacacccagaaa

SEQ ID NO: 74276 - DNA, 60 bp, Artificial
  Synthetic oligonucleotide
ggactatagcattgtttccagatatgtttgctcaggacttgttggagacacacccagaaa

SEQ ID NO: 74277 - DNA, 60 bp, Artificial
  Synthetic oligonucleotide
atacaggagaccagttggaatttccagcatggtggaggccatggtgtctagggcccggat

SEQ ID NO: 74278 - DNA, 57 bp, Artificial
  Synthetic oligonucleotide
gagtctctgaaactctacagagattcgcttggagaagcagtaatgaggatgggagac

SEQ ID NO: 74279 - DNA, 54 bp, Artificial
  Synthetic oligonucleotide
tctctgaaactctacagagattcgcttggagaagcagtaatgaggatgggagac

SEQ ID NO: 74280 - DNA, 60 bp, Artificial
  Synthetic oligonucleotide
attcgagtctctgaaactctacagagattcgcttggagaagcagtaatgaggatgggaga

SEQ ID NO: 74281 - DNA, 51 bp, Artificial
  Synthetic oligonucleotide
acaccatggatacagtcaacagaacacaccaatattcagaaaagggaaagt

SEQ ID NO: 74282 - DNA, 60 bp, Artificial
  Synthetic oligonucleotide
tctctgttgaaggcaaaagctgcatcaatcggtgcttttatgtggagttgacaaggggaa

SEQ ID NO: 74283 - DNA, 60 bp, Artificial
  Synthetic oligonucleotide
tctctgttgaaggcaaaagctgcatcaatcggtgtttttatgtggagttgataaggggaa

SEQ ID NO: 74284 - DNA, 60 bp, Artificial
  Synthetic oligonucleotide
ctctgttgaaggcaaaagctgcatcaatcggtgcttttatgtggagttgacaaggggaag

SEQ ID NO: 74285 - DNA, 60 bp, Artificial
  Synthetic oligonucleotide
ggacttcaagtagctccattgtgatgtgtggagtagaccatgagattgccgactggtcat

SEQ ID NO: 74286 - DNA, 55 bp, Artificial
  Synthetic oligonucleotide
ggacctcaagtagctccattgtgatgtgtggagtagaccatgagattgccgactg

SEQ ID NO: 74287 - DNA, 60 bp, Artificial
  Synthetic oligonucleotide
ggacctcaagtagctccattgtgatgtgtggagtagaccatgaaattgccgattggtcat

SEQ ID NO: 74288 - DNA, 60 bp, Artificial
  Synthetic oligonucleotide
acagataacattcttacaggcattgcaactcttacttgaagttgagagtgagataagaac

SEQ ID NO: 74289 - DNA, 60 bp, Artificial
  Synthetic oligonucleotide
cggaaggagtacctgagtctatgagggaagaatatcggcaggaacagcagagtgctgtgg

SEQ ID NO: 74290 - DNA, 60 bp, Artificial
  Synthetic oligonucleotide
caactacacactcttggattcccaagaggaaccgttccattctcaataccagccaaaggg

SEQ ID NO: 74291 - DNA, 60 bp, Artificial
  Synthetic oligonucleotide
cttccccagcagttcatacaggagaccagttggaatttccagtatggtggaggccatggt

SEQ ID NO: 74292 - DNA, 60 bp, Artificial
  Synthetic oligonucleotide
caagagcatggaatatgatgctgttgcaactacacactcctggattcctaagagaaaccg

SEQ ID NO: 74293 - DNA, 60 bp, Artificial
  Synthetic oligonucleotide
gcatggaatatgatgctgttgcaactacacactcctggattcctaagagaaaccgttcca

SEQ ID NO: 74294 - DNA, 60 bp, Artificial
  Synthetic oligonucleotide
tagtgaatgcacctaaccatgagggaatacaagcaggagtggataggttctataggactt

SEQ ID NO: 74295 - DNA, 60 bp, Artificial
  Synthetic oligonucleotide
gtgaatgcaccaaatcatgagggaatccaagcaggagtggataggttctataggacctgc

SEQ ID NO: 74296 - DNA, 60 bp, Artificial
  Synthetic oligonucleotide
tgttcgagagtaagagcatgaagcttcggacacaaataccagcagaaatgctcgcaagta

SEQ ID NO: 74297 - DNA, 60 bp, Artificial
  Synthetic oligonucleotide
tagtgaatgcaccaaatcatgagggaatccaagcaggagtggataggttctataggacct

SEQ ID NO: 74298 - DNA, 60 bp, Artificial
  Synthetic oligonucleotide
gaccattacatatacagagatgaagcattaaacaaccgatttcaaatcaaaggtgttgag

SEQ ID NO: 74299 - DNA, 60 bp, Artificial
  Synthetic oligonucleotide
tgcaatagcaggttttatagaaaatggatgggaagggatgatagatggttggtatggctt

SEQ ID NO: 74300 - DNA, 60 bp, Artificial
  Synthetic oligonucleotide
tgcaatagcaggttttatagaaaatggatgggagggaatgatagacggttggtacgggtt

SEQ ID NO: 74301 - DNA, 60 bp, Artificial
  Synthetic oligonucleotide
gcaatagcaggttttatagaaaatggatgggagggaatgatagacggttggtacggtttc

SEQ ID NO: 74302 - DNA, 57 bp, Artificial
  Synthetic oligonucleotide
ttggggtcctcatcggaggacttgaatggaatgataacacagttcgagtctctaaaa

SEQ ID NO: 74303 - DNA, 60 bp, Artificial
  Synthetic oligonucleotide
ttggggtcctcatcggaggacttgaatggaatgataacacagttcgagtctctaaaaatc

SEQ ID NO: 74304 - DNA, 60 bp, Artificial
  Synthetic oligonucleotide
aaccaggctgttcaccataagacaagaaatggccagtaggggcctatgggattcctttcg

SEQ ID NO: 74305 - DNA, 60 bp, Artificial
  Synthetic oligonucleotide
ccaggctgttcaccataagacaagaaatggccagtaggggcctatgggattcctttcgtc

SEQ ID NO: 74306 - DNA, 60 bp, Artificial
  Synthetic oligonucleotide
ctaatgctaccgagctagttcaaagctcttcaacagggaaaatatgcaacaatccccaca

SEQ ID NO: 74307 - DNA, 60 bp, Artificial
  Synthetic oligonucleotide
caatgcttgcatagagtcaattagaaacgggacttatgaccatgacatatacagagatga

SEQ ID NO: 74308 - DNA, 60 bp, Artificial
  Synthetic oligonucleotide
cagatgcagaaatgaataaattattcgagaagactagacgccagttaagagaaaacgcgg

SEQ ID NO: 74309 - DNA, 60 bp, Artificial
  Synthetic oligonucleotide
cagacgcagaaatgaataaattattcgagaagactagacgccagttaagagaaaacgcgg

SEQ ID NO: 74310 - DNA, 60 bp, Artificial
  Synthetic oligonucleotide
cagatgcagaaatgaataaattattcgagaagactagacgccagttaagagaaaacgcag

SEQ ID NO: 74311 - DNA, 60 bp, Artificial
  Synthetic oligonucleotide
gaaaagaccaggaggcaactgagggaaaatgctgaagacatgggcaatggttgtttcaag

SEQ ID NO: 74312 - DNA, 60 bp, Artificial
  Synthetic oligonucleotide
ccgaacggctgcattgagggcaagctttctcaaatgtccaaagaagtgaatgcccaaatt

SEQ ID NO: 74313 - DNA, 60 bp, Artificial
  Synthetic oligonucleotide
tgcttcttaatttgcgttgttctattgggtttcattatgtgggcttgccaaagaggcaac

SEQ ID NO: 74314 - DNA, 60 bp, Artificial
  Synthetic oligonucleotide
tatacagagatgaagcattaaacaaccggtttcagatcaagggcgttgagctgaagtcag

SEQ ID NO: 74315 - DNA, 60 bp, Artificial
  Synthetic oligonucleotide
cggtctgctctcatcttgaggggatcagtggctcataagtcctgcctgcctgcttgtgtg

SEQ ID NO: 74316 - DNA, 60 bp, Artificial
  Synthetic oligonucleotide
cacggtctgctctcatcttgaggggatcagtggctcataagtcctgcctgcctgcttgtg

SEQ ID NO: 74317 - DNA, 60 bp, Artificial
  Synthetic oligonucleotide
cacgatctgctctcattttgaggggatcagtggctcataagtcctgcctgcctgcttgtg

SEQ ID NO: 74318 - DNA, 60 bp, Artificial
  Synthetic oligonucleotide
ataatcactcaccgagtgacatccacatcatggcgtctcaaggcaccaaacgatcttatg

SEQ ID NO: 74319 - DNA, 60 bp, Artificial
  Synthetic oligonucleotide
caccccaactcaacccaattgatggaccactacctgaggataatgaaccaagcggatatg

SEQ ID NO: 74320 - DNA, 60 bp, Artificial
  Synthetic oligonucleotide
tggagcaccccaactcaacccaattgatggaccactacctgaggataatgagccaagtgg

SEQ ID NO: 74321 - DNA, 60 bp, Artificial
  Synthetic oligonucleotide
catcccaactcaacccaattgatggaccactacctgaggataatgaaccaagtggatatg

SEQ ID NO: 74322 - DNA, 60 bp, Artificial
  Synthetic oligonucleotide
cccaactcaacccaattgatggaccactacctgaggataatgaaccaagcggatatgcac

SEQ ID NO: 74323 - DNA, 60 bp, Artificial
  Synthetic oligonucleotide
actcaacccaattgatggaccactacctgaggataatgaaccaagtggatatgcacaaac

SEQ ID NO: 74324 - DNA, 60 bp, Artificial
  Synthetic oligonucleotide
aggagaaccgattcattgaaattggagtgacacggagggaagtccacatatactacctag

SEQ ID NO: 74325 - DNA, 60 bp, Artificial
  Synthetic oligonucleotide
atctgtatgactataaggaaaaccgattcattgaaattggagtgacacggagggaagtcc

SEQ ID NO: 74326 - DNA, 60 bp, Artificial
  Synthetic oligonucleotide
cccggacttgtatgactacaaggagaaccgattcattgaaattggagtgacacggaggga

SEQ ID NO: 74327 - DNA, 60 bp, Artificial
  Synthetic oligonucleotide
ctgtatgactataaggaaaaccgattcattgaaattggagtgacacggagggaagtccac

SEQ ID NO: 74328 - DNA, 60 bp, Artificial
  Synthetic oligonucleotide
ctggccatgcagacctcagtgccaaagaggcacaggatgtaatcatggaagttgttttcc

SEQ ID NO: 74329 - DNA, 60 bp, Artificial
  Synthetic oligonucleotide
ggagtagattatgaagttgccgattggtcatggcacgatggagctattcttccctttgac

SEQ ID NO: 74330 - DNA, 60 bp, Artificial
  Synthetic oligonucleotide
ctgactaaggggattttaggatttgtgttcacgctcaccgtgcccagtgagcgaggactg

SEQ ID NO: 74331 - DNA, 60 bp, Artificial
  Synthetic oligonucleotide
cgcagcaatgctttcagcaattgttacccttatgatgtgccagattatgcctcccttagg

SEQ ID NO: 74332 - DNA, 60 bp, Artificial
  Synthetic oligonucleotide
gttgaacgcagcaatgctttcagcaattgttacccttatgatgtgccagattatgcctcc

SEQ ID NO: 74333 - DNA, 60 bp, Artificial
  Synthetic oligonucleotide
atggattccaacacgataacctcgtttcaggtagattgttatctatggcacataaggaag

SEQ ID NO: 74334 - DNA, 60 bp, Artificial
  Synthetic oligonucleotide
ctccaacacgataacctcgtttcaggtagattgttatctatggcacataaggaagctgct

SEQ ID NO: 74335 - DNA, 60 bp, Artificial
  Synthetic oligonucleotide
ccaacacgataacctcgtttcaggtagattgctatctatggcacataaggaagctgctca

SEQ ID NO: 74336 - DNA, 60 bp, Artificial
  Synthetic oligonucleotide
ccaacacgataacctcgtttcaggtagattgctatctatggcacataagaaagctgctca

SEQ ID NO: 74337 - DNA, 60 bp, Artificial
  Synthetic oligonucleotide
aagggctcttgtgcgtacagggatggatcccaggatgtgctctctgatgcaaggctcaac

SEQ ID NO: 74338 - DNA, 60 bp, Artificial
  Synthetic oligonucleotide
atcagaaggatttggcgtcaagcgaataatggagaagacgcaaccgctggtctaacccac

SEQ ID NO: 74339 - DNA, 60 bp, Artificial
  Synthetic oligonucleotide
gatcagaagggtttggcgtcaagcgaataatggagaagacgcaactgctggtctcactca

SEQ ID NO: 74340 - DNA, 60 bp, Artificial
  Synthetic oligonucleotide
gggctcttgtgcgtacagggatggatcccaggatgtgctctctgatgcaaggctcaactc

SEQ ID NO: 74341 - DNA, 60 bp, Artificial
  Synthetic oligonucleotide
aacaagggcacttgtgcgtactgggatggatcccaggatgtgctctctgatgcaaggctc

SEQ ID NO: 74342 - DNA, 60 bp, Artificial
  Synthetic oligonucleotide
gctttcaggtagactgttttctttggcatgtccgcaaacgatttgcagaccaagaactgg

SEQ ID NO: 74343 - DNA, 60 bp, Artificial
  Synthetic oligonucleotide
ctgtgtcaagctttcaggtagactgttttctttggcatgtccgcaaacgatttgcagacc

SEQ ID NO: 74344 - DNA, 60 bp, Artificial
  Synthetic oligonucleotide
tgcagaccaagaactgggtgatgccccattccttgaccgacttcgccgagaccagaagtc

SEQ ID NO: 74345 - DNA, 60 bp, Artificial
  Synthetic oligonucleotide
tcgcagaccaagaactgggtgatgccccattccttgaccggcttcgccgagaccagaagt

SEQ ID NO: 74346 - DNA, 60 bp, Artificial
  Synthetic oligonucleotide
cagaccaagaactgggtgatgccccattccttgaccggcttcgccgagaccagaagtctc

SEQ ID NO: 74347 - DNA, 60 bp, Artificial
  Synthetic oligonucleotide
tcaggtagactgttttctttggcatgtccgcaaacgatttgcagaccaagaactgggtga

SEQ ID NO: 74348 - DNA, 60 bp, Artificial
  Synthetic oligonucleotide
tgtccgcaaacgatttgcagaccaagaactgggtgatgccccattccttgaccgacttcg

SEQ ID NO: 74349 - DNA, 60 bp, Artificial
  Synthetic oligonucleotide
tgcagaccaagaactgggtgatgccccattccttgaccggcttcgccgagaccagaagtc

SEQ ID NO: 74350 - DNA, 60 bp, Artificial
  Synthetic oligonucleotide
cctaggggttacttcaaaatacgaagtgggaaaagctcaataatgagatcagatgcaccc

SEQ ID NO: 74351 - DNA, 60 bp, Artificial
  Synthetic oligonucleotide
ggggttacttcaaaatacgaagtgggaaaagctcaataatgagatcagatgcacccattg

SEQ ID NO: 74352 - DNA, 60 bp, Artificial
  Synthetic oligonucleotide
ctaggggttacttcaaaatacgaagtgggaaaagctcaataatgagatcagatgcaccca

SEQ ID NO: 74353 - DNA, 60 bp, Artificial
  Synthetic oligonucleotide
tcctcggggttacttcaaaatacgaagtgggaaaagctcaataatgagatcagatgcacc

SEQ ID NO: 74354 - DNA, 60 bp, Artificial
  Synthetic oligonucleotide
atgcaattggggtcctcatcggaggacttgaatggaatgataacacaattcgagtctctg

SEQ ID NO: 74355 - DNA, 60 bp, Artificial
  Synthetic oligonucleotide
tggggtcctcatcggaggacttgaatggaatgataacacagttagagtctctgaaactct

SEQ ID NO: 74356 - DNA, 60 bp, Artificial
  Synthetic oligonucleotide
aatgcaattggggtcctcatcggaggacttgaatggaatgataacacagttagagtctct

SEQ ID NO: 74357 - DNA, 60 bp, Artificial
  Synthetic oligonucleotide
gagtgcaggacgttcttccttactcaaggttccctactcaatgacaaacattctaatggc

SEQ ID NO: 74358 - DNA, 60 bp, Artificial
  Synthetic oligonucleotide
gtcgaagggaggattcaggaccttgagaaatatgttgaggacaccaaaatagatctctgg

SEQ ID NO: 74359 - DNA, 60 bp, Artificial
  Synthetic oligonucleotide
gaagtcgaagggaggattcaggaccttgagaaatatgttgaggacaccaaaatagatctc

SEQ ID NO: 74360 - DNA, 60 bp, Artificial
  Synthetic oligonucleotide
ctcagaagtcgaagggaggattcaggaccttgagaaatatgttgaggacaccaaaataga

SEQ ID NO: 74361 - DNA, 60 bp, Artificial
  Synthetic oligonucleotide
tattcgagaaattcttccctagcagttcatacaggagaccggttggaatttctagcatgg

SEQ ID NO: 74362 - DNA, 60 bp, Artificial
  Synthetic oligonucleotide
gctgcaatctattcgagaaattcttccctagcagttcatataggagaccggttgggatct

SEQ ID NO: 74363 - DNA, 60 bp, Artificial
  Synthetic oligonucleotide
aaaagtgttgcaatctattcgagaaattcttccctagcagttcatacaggagaccggttg

SEQ ID NO: 74364 - DNA, 60 bp, Artificial
  Synthetic oligonucleotide
ggaacgggacctatgatcatgacatatacagagacgaagcactaaacaatcgattccaga

SEQ ID NO: 74365 - DNA, 60 bp, Artificial
  Synthetic oligonucleotide
aatcaggaacgggacctatgatcatgacatatacagagacgaagcactaaacaatcgatt

SEQ ID NO: 74366 - DNA, 60 bp, Artificial
  Synthetic oligonucleotide
agagctctcctttacaattactggagacaacaccaaatggaatgaaaatcagaatcctcg

SEQ ID NO: 74367 - DNA, 60 bp, Artificial
  Synthetic oligonucleotide
cggcggacttgaatggaatgataacacaattcgagcgtctgaaaatatacagagattcgc

SEQ ID NO: 74368 - DNA, 60 bp, Artificial
  Synthetic oligonucleotide
gcatccccaatgacaagccctttcaaaatgtaaacaagatcacatacggagcatgtccaa

SEQ ID NO: 74369 - DNA, 60 bp, Artificial
  Synthetic oligonucleotide
atggaagcatccccaatgacaagccctttcaaaatgtaaacaagatcacatacggagcat

SEQ ID NO: 74370 - DNA, 60 bp, Artificial
  Synthetic oligonucleotide
gcatccccaatgacaagccctttcaaaatgtaaacaagatcacatacggagcatgtccca

SEQ ID NO: 74371 - DNA, 57 bp, Artificial
  Synthetic oligonucleotide
gaattcgggtggccatcaattagtgtcgaattgtttaaaaacgaccttgtttctact

SEQ ID NO: 74372 - DNA, 50 bp, Artificial
  Synthetic oligonucleotide
gatggccatcaattagtgtcgaattgtttaaaaacgaccttgtttctact

SEQ ID NO: 74373 - DNA, 60 bp, Artificial
  Synthetic oligonucleotide
gatcatgacatatacagagatgaagcattaaacaaccgattccaaatcaagggtgtggaa

SEQ ID NO: 74374 - DNA, 60 bp, Artificial
  Synthetic oligonucleotide
gggttccctactcaatgacaaacattctaatggcacagtgaaagaccgaagcccatatag

SEQ ID NO: 74375 - DNA, 60 bp, Artificial
  Synthetic oligonucleotide
ctcaaggttccctactcaatgacaaacattctaatggcacagtgaaagacaggagcccct

SEQ ID NO: 74376 - DNA, 60 bp, Artificial
  Synthetic oligonucleotide
tcagggttccctactcaatgacaaacattctaatggcacagtgaaagaccgaagcccata

SEQ ID NO: 74377 - DNA, 60 bp, Artificial
  Synthetic oligonucleotide
gcaggacgttcttccttactcaaggctccctactcaatgacaaacattctaatggcacag

SEQ ID NO: 74378 - DNA, 60 bp, Artificial
  Synthetic oligonucleotide
attggaagattctacatacagatgtgcactgaactcaaactcagtgactatgaaggaagg

SEQ ID NO: 74379 - DNA, 60 bp, Artificial
  Synthetic oligonucleotide
aacattaggtgcaacatttgcatttgagtatactaataattaaaaacacccttgtttcta

SEQ ID NO: 74380 - DNA, 60 bp, Artificial
  Synthetic oligonucleotide
tcagaagagatcaaaaggcattaaagggaagaggcagcacacttggactcgacctgcgag

SEQ ID NO: 74381 - DNA, 60 bp, Artificial
  Synthetic oligonucleotide
cagaagagaccaaaaggcattaaagggaagaggcagcacacttggactcgacctaagagt

SEQ ID NO: 74382 - DNA, 60 bp, Artificial
  Synthetic oligonucleotide
aggagagatcaaaaggcattaaagggaagaggcagcacacttgggctcgacttgcgagtg

SEQ ID NO: 74383 - DNA, 60 bp, Artificial
  Synthetic oligonucleotide
acagactcagaagagaccaaaaggcattaaagggaagaggcagcacacttggactcgatc

SEQ ID NO: 74384 - DNA, 60 bp, Artificial
  Synthetic oligonucleotide
tttgatgatagactcaggagagatcaaaaggcattaaagggaagaggcagcacacttggg

SEQ ID NO: 74385 - DNA, 60 bp, Artificial
  Synthetic oligonucleotide
ctttgatgatagactcaggagagatcaaaaggcattaaagggaagaggcagcacacttgg

SEQ ID NO: 74386 - DNA, 60 bp, Artificial
  Synthetic oligonucleotide
ctcaccgtgcccagtgagcgaggactgcagcgtagacgctttgtccaaaacgccctaaat

SEQ ID NO: 74387 - DNA, 60 bp, Artificial
  Synthetic oligonucleotide
ccgtgcccagtgagcgaggactgcagcgtagacgctttgttcaaaatgccctaaatggga

SEQ ID NO: 74388 - DNA, 60 bp, Artificial
  Synthetic oligonucleotide
ccgtgcccagtgagcgaggactgcagcgtagacgctttgtccaaaacgccctaaatggga

SEQ ID NO: 74389 - DNA, 60 bp, Artificial
  Synthetic oligonucleotide
aaatacataatggactccaacacgataacctcgtttcaggtagattgctatctatggcac

SEQ ID NO: 74390 - DNA, 60 bp, Artificial
  Synthetic oligonucleotide
cactccctccaaagcagaaacgctacatggcgagaagagttgagtcagaaatttgaagaa

SEQ ID NO: 74391 - DNA, 60 bp, Artificial
  Synthetic oligonucleotide
ctaagtcaggaaacgcatatccagtgttgaacgtgactatgccaaacaatgacaattttg

SEQ ID NO: 74392 - DNA, 60 bp, Artificial
  Synthetic oligonucleotide
caggaagcacatacccagtgctgaacgtgactatgccaaacaatgacaattttgacaagc

SEQ ID NO: 74393 - DNA, 60 bp, Artificial
  Synthetic oligonucleotide
ctaagtcaggaaacgcatatccaatgttgaacgtgactatgccaaacaatgacaattttg

SEQ ID NO: 74394 - DNA, 60 bp, Artificial
  Synthetic oligonucleotide
ggatccaggccttgggtcagaggccaatcagggaggataagcatctactggacaatagtg

SEQ ID NO: 74395 - DNA, 60 bp, Artificial
  Synthetic oligonucleotide
gtcattagggaatacaatgaaacagtaaggattgagaaggtaacacaatggcacaatacc

SEQ ID NO: 74396 - DNA, 60 bp, Artificial
  Synthetic oligonucleotide
atgatgactaattcacaagacacagagctttctttcacaatcactggggacaacactaag

SEQ ID NO: 74397 - DNA, 60 bp, Artificial
  Synthetic oligonucleotide
tctaaaaatctacagagattcgcttggagaagcagtaatgagaatgggggacctccactt

SEQ ID NO: 74398 - DNA, 60 bp, Artificial
  Synthetic oligonucleotide
tctaaaaatctacagagattcgcttggagaagcagtaatgagaatgggggacctccattt

SEQ ID NO: 74399 - DNA, 60 bp, Artificial
  Synthetic oligonucleotide
tgacaattggagtaacgggccctgatgccaaagcagtagcagtggtgcattatgggggaa

SEQ ID NO: 74400 - DNA, 60 bp, Artificial
  Synthetic oligonucleotide
tccggttgggggtaatgaaaagaaggccaaactggcaaatgttgtgagaaaaatgatgac

SEQ ID NO: 74401 - DNA, 60 bp, Artificial
  Synthetic oligonucleotide
aaaagaaggccaaactggcaaatgttgtgagaaaaatgatgactaattcacaagacactg

SEQ ID NO: 74402 - DNA, 60 bp, Artificial
  Synthetic oligonucleotide
ggaagggaggctgatccaaaacagcataacattggaaagaatggtcctttctgcctttga

SEQ ID NO: 74403 - DNA, 60 bp, Artificial
  Synthetic oligonucleotide
tgatctggcattctaacctgaatgacgccacataccaaaggacaagagcccttgtgcgta

SEQ ID NO: 74404 - DNA, 60 bp, Artificial
  Synthetic oligonucleotide
gcgtactgggatggaccccagaatgtgttccctgatgcagggctcaactcttccaagaag

SEQ ID NO: 74405 - DNA, 60 bp, Artificial
  Synthetic oligonucleotide
gggaaagaccccaagaagactggcggtccaatctatagaaggagagatggaaaatggatt

SEQ ID NO: 74406 - DNA, 60 bp, Artificial
  Synthetic oligonucleotide
ttccgcttgctcaagaacactcagatattcagtcttattagaccgaatgaaaacccagca

SEQ ID NO: 74407 - DNA, 60 bp, Artificial
  Synthetic oligonucleotide
gaggaactaaagtagtcccaagagggcaactgtcaacaagaggagtccagattgcttcaa

SEQ ID NO: 74408 - DNA, 60 bp, Artificial
  Synthetic oligonucleotide
atacaaatgtgcaccgaactcaaactcagcgaccaggaagggaggctgatccaaaacagc

SEQ ID NO: 74409 - DNA, 57 bp, Artificial
  Synthetic oligonucleotide
aacacccttgaattgagaagcagatactgggctatacggaccagaagtggaggaaac

SEQ ID NO: 74410 - DNA, 60 bp, Artificial
  Synthetic oligonucleotide
tctgcgggacaggttagcatacagcccacattctctgtgcaaagaaaccttcctttcgaa

SEQ ID NO: 74411 - DNA, 60 bp, Artificial
  Synthetic oligonucleotide
caagaagatctggagctgccggtgctgcagtaaaaggagttggaacaatggtaatggaac

SEQ ID NO: 74412 - DNA, 60 bp, Artificial
  Synthetic oligonucleotide
gtgcgagaaagccgaaaccctggaaatgctgagatcgaagacctaatatttctggcgcga

SEQ ID NO: 74413 - DNA, 60 bp, Artificial
  Synthetic oligonucleotide
gccagaatgccagtgaaatcagagcatctgtcggaagaatggttggtggaattggaagat

SEQ ID NO: 74414 - DNA, 59 bp, Artificial
  Synthetic oligonucleotide
gacaaagaagagatcaggagaaactggcgccaggcaaataatggagaagatgcaacagc

SEQ ID NO: 74415 - DNA, 54 bp, Artificial
  Synthetic oligonucleotide
cactcactgagtgacatttacgtcatggcgtctcaaggcaccaaacgatcttac

SEQ ID NO: 74416 - DNA, 60 bp, Artificial
  Synthetic oligonucleotide
ggagaaacaagtatctagaggaacaccccagtgctgggaaagaccccaagaagactggcg

SEQ ID NO: 74417 - DNA, 60 bp, Artificial
  Synthetic oligonucleotide
aggaatttttggagaggtgaaaatggccgaagaacaagaatagcatatgagagaatgtgc

SEQ ID NO: 74418 - DNA, 60 bp, Artificial
  Synthetic oligonucleotide
gaacaatggtaatggaacttattcgaatgataaagcgggggatcaatgataggaattttt

SEQ ID NO: 74419 - DNA, 60 bp, Artificial
  Synthetic oligonucleotide
caagaggagtccagattgcttcaaatgagaacatagagacaatggaatctaacacccttg

SEQ ID NO: 74420 - DNA, 60 bp, Artificial
  Synthetic oligonucleotide
caatgatggatcaagtgcgagaaagccgaaaccctggaaatgctgagatcgaagacctaa

SEQ ID NO: 74421 - DNA, 60 bp, Artificial
  Synthetic oligonucleotide
tcttaaagggaagtttcagacagcagcacaacgagcaatgatggatcaagtgcgagaaag

SEQ ID NO: 74422 - DNA, 60 bp, Artificial
  Synthetic oligonucleotide
agcccacaagtcatgtcttcctgcctgtatatatggacttgctgtggccagtggttatga

SEQ ID NO: 74423 - DNA, 60 bp, Artificial
  Synthetic oligonucleotide
ctggcgcgatctgcactcatactgagagggtctgtagcccacaagtcatgtcttcctgcc

SEQ ID NO: 74424 - DNA, 60 bp, Artificial
  Synthetic oligonucleotide
cttcctttgacatgagtaacgagggttcttacttcttcggagacaatgcagaggagtatg

SEQ ID NO: 74425 - DNA, 60 bp, Artificial
  Synthetic oligonucleotide
caaaccagaagatgtgtctttccaggggcggggagtcttcgagatttcggacgaaaaggc

SEQ ID NO: 74426 - DNA, 60 bp, Artificial
  Synthetic oligonucleotide
gagggtacttcaaaatgcgcactgggaaaagctcaataatgagatcagatgcacctattg

SEQ ID NO: 74427 - DNA, 60 bp, Artificial
  Synthetic oligonucleotide
cttgaaaagtcccaccccggaatctttgaaaactcgtgtcttgaaacgatggaagttgtt

SEQ ID NO: 74428 - DNA, 60 bp, Artificial
  Synthetic oligonucleotide
ctttccttgaagagtcccacccaggaatctttgaaaactcgtgtcttgaaacgatggaag

SEQ ID NO: 74429 - DNA, 60 bp, Artificial
  Synthetic oligonucleotide
gtcccaccccggaatctttgaaaactcgtgtcttgaaacgatggaagttgttcaacaaac

SEQ ID NO: 74430 - DNA, 55 bp, Artificial
  Synthetic oligonucleotide
agcgaaagcaggcaaaccatttgaatggatgtcaatccgactttactcttcttga

SEQ ID NO: 74431 - DNA, 60 bp, Artificial
  Synthetic oligonucleotide
atcgctcctcggggttatttcaagatgcgcactgggaaaagctcaataatgagatcagat

SEQ ID NO: 74432 - DNA, 60 bp, Artificial
  Synthetic oligonucleotide
gagaacctcaaaatagccattgcctccagccctgctcctcggtacattaccgatatgagc

SEQ ID NO: 74433 - DNA, 60 bp, Artificial
  Synthetic oligonucleotide
gtttcgagcagataacattcttgcaagcattgcaactcttacttgaagttgagagtgaga

SEQ ID NO: 74434 - DNA, 60 bp, Artificial
  Synthetic oligonucleotide
gtgtcaagctttcaggtagattgttttctttggcatgtccgcaaacgatttgcagaccag

SEQ ID NO: 74435 - DNA, 60 bp, Artificial
  Synthetic oligonucleotide
ctgtgtcaagctttcaggtagattgttttctttggcatgtccgcaaacgatttgcagacc

SEQ ID NO: 74436 - DNA, 60 bp, Artificial
  Synthetic oligonucleotide
cagattgcttcaaatgagaacatggaaacaatggactccagtactctcgaattgaggagc

SEQ ID NO: 74437 - DNA, 60 bp, Artificial
  Synthetic oligonucleotide
aaattgcttcaaatgagaacatggaaacaatggactccagcactcttgaactgagaagca

SEQ ID NO: 74438 - DNA, 60 bp, Artificial
  Synthetic oligonucleotide
acgggcccggatgccaaagcagtagcagtggtgcattatgggggaattcccactgatgta

SEQ ID NO: 74439 - DNA, 60 bp, Artificial
  Synthetic oligonucleotide
ttacatatacagagatgaagcattaaacaaccgatttcagatcaaaggtgtagagttgaa

SEQ ID NO: 74440 - DNA, 60 bp, Artificial
  Synthetic oligonucleotide
cccagtgctgggaaagaccccaagaagactggaggtccaatctacaggaggagagatggg

SEQ ID NO: 74441 - DNA, 60 bp, Artificial
  Synthetic oligonucleotide
ggtatggcttcaggcatcaaaattccgaaggtacaggacaagcagcagaccttaaaagca

SEQ ID NO: 74442 - DNA, 60 bp, Artificial
  Synthetic oligonucleotide
caggcatcaaaattccgaaggtacaggacaagcagcagaccttaaaagcactcaggcagc

SEQ ID NO: 74443 - DNA, 60 bp, Artificial
  Synthetic oligonucleotide
acagaggaacaagccgtggatatatgcaaggcagcaatgggcttgaggattagctcatct

SEQ ID NO: 74444 - DNA, 60 bp, Artificial
  Synthetic oligonucleotide
cctgccctcaggatgaaatggatgatggcaatgaaatacccaataacggctgacaagagg

SEQ ID NO: 74445 - DNA, 60 bp, Artificial
  Synthetic oligonucleotide
gccatatagaagaatgctcatgctaccccaatgaaggtaaagtggaatgtgtttgtaggg

SEQ ID NO: 74446 - DNA, 60 bp, Artificial
  Synthetic oligonucleotide
cagcttcaatggaggccatatagaagaatgctcatgctaccccaatgaaggtaaagtgga

SEQ ID NO: 74447 - DNA, 60 bp, Artificial
  Synthetic oligonucleotide
ggaggccatatagaagaatgctcatgctaccccaatgaaggtaaagtggaatgtgtttgt

SEQ ID NO: 74448 - DNA, 60 bp, Artificial
  Synthetic oligonucleotide
ggccatatagaagaatgctcatgctaccccaatgaaggtaaagtggaatgtgtttgtagg

SEQ ID NO: 74449 - DNA, 60 bp, Artificial
  Synthetic oligonucleotide
agaaccaaagaagggagacggaaaacaaatctgtatggattcattataaaaggaaggtct

SEQ ID NO: 74450 - DNA, 60 bp, Artificial
  Synthetic oligonucleotide
gaaccaaagaagggagacggaaaacaaatctgtatggattcattataaaaggaaggtctc

SEQ ID NO: 74451 - DNA, 60 bp, Artificial
  Synthetic oligonucleotide
gtaatgacggatggaccagcaaacagacaagcacaatacagagcattcaaagccaagcag

SEQ ID NO: 74452 - DNA, 60 bp, Artificial
  Synthetic oligonucleotide
ataacatttatgcaagccttacaactattgcttgaagtagaacaagagataagaactttc

SEQ ID NO: 74453 - DNA, 60 bp, Artificial
  Synthetic oligonucleotide
cctttgacatgagtaacgagggttcttacttcttcggagacaatgcagaggagtatgaca

SEQ ID NO: 74454 - DNA, 60 bp, Artificial
  Synthetic oligonucleotide
aaatgatgactaattcacaagacacagagctttctttcacaatcactggggacaacacta

SEQ ID NO: 74455 - DNA, 60 bp, Artificial
  Synthetic oligonucleotide
ctccagcactgtgtcaagctttcaggtagactgttttctttggcatgtccgcaaacgatt

SEQ ID NO: 74456 - DNA, 60 bp, Artificial
  Synthetic oligonucleotide
gttgagttgaaatcaggctacaaagattggatactgtggatttcattcaccatatcatgc

SEQ ID NO: 74457 - DNA, 60 bp, Artificial
  Synthetic oligonucleotide
tcaaatcaaaggtgttgagttgaaatcaggctacaaagattggatactgtggatttcatt

SEQ ID NO: 74458 - DNA, 60 bp, Artificial
  Synthetic oligonucleotide
tcaaattaaaggtgttgagttgaaatcaggctacaaagattggatactgtggatttcatt

SEQ ID NO: 74459 - DNA, 60 bp, Artificial
  Synthetic oligonucleotide
tcaaattagaggtgttgagttgaaatcaggctacaaagattggatactgtggatttcatt

SEQ ID NO: 74460 - DNA, 60 bp, Artificial
  Synthetic oligonucleotide
caggctacaaagattggatactgtggatttcattcgccatatcatgcttcttaatttgcg

SEQ ID NO: 74461 - DNA, 60 bp, Artificial
  Synthetic oligonucleotide
gtagagttgaaatcaggctacaaagattggatactgtggatttcattcgccatatcatgc

SEQ ID NO: 74462 - DNA, 60 bp, Artificial
  Synthetic oligonucleotide
gttgagttgaaatcaggctacaaagattggatactgtggatttcattcgccatatcatgc

SEQ ID NO: 74463 - DNA, 60 bp, Artificial
  Synthetic oligonucleotide
ggcttcgccgagaccagaagtccctaaaaggaagaggcagcactcttggtctggacatcg

SEQ ID NO: 74464 - DNA, 60 bp, Artificial
  Synthetic oligonucleotide
ttaaatggaatgataatacggttagaatctctgaaactctacagagattcgcttggagaa

SEQ ID NO: 74465 - DNA, 60 bp, Artificial
  Synthetic oligonucleotide
gcagaagagtagatataaaccctggtcatgcagacctcagtgccaaagaggcacaagatg

SEQ ID NO: 74466 - DNA, 54 bp, Artificial
  Synthetic oligonucleotide
ttacttgaagttgagagtgagataaggactttctcttttcagcttatttaatac

SEQ ID NO: 74467 - DNA, 60 bp, Artificial
  Synthetic oligonucleotide
gcaaacgattcgcagaccaagaactgggtgatgccccattccttgaccggcttcgccgag

SEQ ID NO: 74468 - DNA, 60 bp, Artificial
  Synthetic oligonucleotide
tgtccgcaaacgattcgcagaccaagaactgggtgatgccccattccttgaccggcttcg

SEQ ID NO: 74469 - DNA, 60 bp, Artificial
  Synthetic oligonucleotide
caagaactgggtgatgccccattccttgaccggctccgccgagatcagaaatccctgagg

SEQ ID NO: 74470 - DNA, 60 bp, Artificial
  Synthetic oligonucleotide
aaacggtttgcagaccaagaactgggtgatgccccattccttgaccggctccgccgagat

SEQ ID NO: 74471 - DNA, 60 bp, Artificial
  Synthetic oligonucleotide
aaacgattcgcagaccaagaactgggtgatgccccattccttgaccggcttcgccgagac

SEQ ID NO: 74472 - DNA, 54 bp, Artificial
  Synthetic oligonucleotide
ccaggaggggaagtaagaaatgatgatgttgaccaaagtttaattatcgctgcc

SEQ ID NO: 74473 - DNA, 60 bp, Artificial
  Synthetic oligonucleotide
gatgtaatcaattcctgggcaggggatattctaagaactcaggaatcatcatgcacttgc

SEQ ID NO: 74474 - DNA, 60 bp, Artificial
  Synthetic oligonucleotide
gcaggaaagaacaccgatcttgaggcactcatggaatggctaaagacaagaccaatcctg

SEQ ID NO: 74475 - DNA, 60 bp, Artificial
  Synthetic oligonucleotide
aatgaaagaatatggggaagatccgaaaatcgaaactaacaaattcgctgcaatatgcac

SEQ ID NO: 74476 - DNA, 60 bp, Artificial
  Synthetic oligonucleotide
aaacagatgagaacctcaaaatagccattgcctccagccctgctcctcggtacattaccg

SEQ ID NO: 74477 - DNA, 60 bp, Artificial
  Synthetic oligonucleotide
gaagagatcagatggctcatcgctgaatgcaggaatatactgacaaagacagaaaacagc

SEQ ID NO: 74478 - DNA, 60 bp, Artificial
  Synthetic oligonucleotide
gtttgaagagatcagatggctcatcgctgaatgcaggaatatactgacaaagacagaaaa

SEQ ID NO: 74479 - DNA, 60 bp, Artificial
  Synthetic oligonucleotide
tttctcagttctatttgaccaactagagacattagtctctctgagggcattcacagagga

SEQ ID NO: 74480 - DNA, 60 bp, Artificial
  Synthetic oligonucleotide
catccttagagcaaatttctcagttctatttgaccaactagagacattagtctctctgag

SEQ ID NO: 74481 - DNA, 60 bp, Artificial
  Synthetic oligonucleotide
ttcctgggcaggggatattctaagaactcaggaatcatcatgcacttgcattcaaggtga

SEQ ID NO: 74482 - DNA, 60 bp, Artificial
  Synthetic oligonucleotide
ctcctgggcaggagatattctaagaactcaggaatcatcatgcacttgcattcaaggtga

SEQ ID NO: 74483 - DNA, 60 bp, Artificial
  Synthetic oligonucleotide
gatgtaatcaattcctgggcaggagatattctaagaactcaggaatcatcatgcacttgc

SEQ ID NO: 74484 - DNA, 60 bp, Artificial
  Synthetic oligonucleotide
atcaattcctgggcaggagatattctaagaactcaggaatcatcatgcacttgcattcaa

SEQ ID NO: 74485 - DNA, 60 bp, Artificial
  Synthetic oligonucleotide
caatgaaaagaaggctaaactggcaaatgttgtgagaaaaatgatgactaattcacagga

SEQ ID NO: 74486 - DNA, 60 bp, Artificial
  Synthetic oligonucleotide
aaagaaagccaaactggcaaatgttgtgagaaaaatgatgactaattcacaagacataga

SEQ ID NO: 74487 - DNA, 60 bp, Artificial
  Synthetic oligonucleotide
gatttgaaatcacaggaaccatgcgcaggcttgccgaccaaagtctcccaccgaacttct

SEQ ID NO: 74488 - DNA, 60 bp, Artificial
  Synthetic oligonucleotide
tactcctcattgttcaggcactcagggataacctggaacctggaaccttcgatcttgggg

SEQ ID NO: 74489 - DNA, 60 bp, Artificial
  Synthetic oligonucleotide
acggagagttgacataaaccctggtcatgcagacctcagtgccaaagaggcacaggatgt

SEQ ID NO: 74490 - DNA, 60 bp, Artificial
  Synthetic oligonucleotide
cggagagttgacataaaccctggtcatgcagacctcagtgccaaagaggcacaggatgta

SEQ ID NO: 74491 - DNA, 60 bp, Artificial
  Synthetic oligonucleotide
tgggaaaagctcaataatgagatcagatgcaccaattgacacatgcatttctgagtgcat

SEQ ID NO: 74492 - DNA, 60 bp, Artificial
  Synthetic oligonucleotide
acgaaagcgggactctagcatacttactgacagccagacagcgaccaaaagaattcggat

SEQ ID NO: 74493 - DNA, 60 bp, Artificial
  Synthetic oligonucleotide
tctagcatacttactgacagccagacagcgaccaaaagaattcggatggccaccaattag

SEQ ID NO: 74494 - DNA, 60 bp, Artificial
  Synthetic oligonucleotide
cggaaacgggactctagcatacttactgacagccagacagcgaccaaaagaattcggatg

SEQ ID NO: 74495 - DNA, 60 bp, Artificial
  Synthetic oligonucleotide
catacttactgacagccagacagcgaccaaaagaattcggatggccaccaattagtgtcg

SEQ ID NO: 74496 - DNA, 60 bp, Artificial
  Synthetic oligonucleotide
cacctggacaggagtcactcaaaatggaggaagcaatgcctgcaaaagagggcctgctag

SEQ ID NO: 74497 - DNA, 60 bp, Artificial
  Synthetic oligonucleotide
cacatggacaggagtcactcaaaatggaggaagcaatgcatgcaaaagaggacctgctag

SEQ ID NO: 74498 - DNA, 60 bp, Artificial
  Synthetic oligonucleotide
cacatggacaggagtcactcaaaatggaggaagcagtgcctgcaaaagagggcctgctag

SEQ ID NO: 74499 - DNA, 60 bp, Artificial
  Synthetic oligonucleotide
cctgggacctttatgtggaacgtagcagcgccttcagcaactgctatccctatgatgtac

SEQ ID NO: 74500 - DNA, 60 bp, Artificial
  Synthetic oligonucleotide
ctcatatgatgatctggcactccaatctcaatgacaccacctaccaaagaacaagggctc

SEQ ID NO: 74501 - DNA, 60 bp, Artificial
  Synthetic oligonucleotide
atgatgatctggcactccaatctcaatgacaccacataccaaagaacaagggctcttgtt

SEQ ID NO: 74502 - DNA, 60 bp, Artificial
  Synthetic oligonucleotide
ggcgtcaggccaacaatggtgaagatgctactgctggtcttactcatatgatgatctggc

SEQ ID NO: 74503 - DNA, 60 bp, Artificial
  Synthetic oligonucleotide
ctcatatgatgatctggcactccaatctcaatgacaccacataccaaagaacaagggctc

SEQ ID NO: 74504 - DNA, 60 bp, Artificial
  Synthetic oligonucleotide
tctggcgtcaggccaacaatggtgaagacgctactgctggtcttactcatatgatgatct

SEQ ID NO: 74505 - DNA, 60 bp, Artificial
  Synthetic oligonucleotide
ggcgtcaggccaacaatggtgaagacgctactgctggtcttactcatatgatgatctggc

SEQ ID NO: 74506 - DNA, 60 bp, Artificial
  Synthetic oligonucleotide
gaggatctggcgtcaggccaacaatggtgaagatgctactgctggtcttactcatatgat

SEQ ID NO: 74507 - DNA, 60 bp, Artificial
  Synthetic oligonucleotide
gagaatctggcgtcaggccaacaatggtgaagacgctactgctggtcttactcatatgat

SEQ ID NO: 74508 - DNA, 60 bp, Artificial
  Synthetic oligonucleotide
atgatctggcactccaatctcaatgacaccacctaccaaagaacaagggctcttgttcgg

SEQ ID NO: 74509 - DNA, 57 bp, Artificial
  Synthetic oligonucleotide
atgatctggcactccaatctcaatgacaccacctaccaaagaacaagggctcttgtt

SEQ ID NO: 74510 - DNA, 60 bp, Artificial
  Synthetic oligonucleotide
ggccggttctatgttcagatgtgtactgagcttaaactcaacgaccatgaagggcggctg

SEQ ID NO: 74511 - DNA, 60 bp, Artificial
  Synthetic oligonucleotide
gaccatgaagggcggctgattcagaacagcataacaatagaaaggatggtactttcggca

SEQ ID NO: 74512 - DNA, 60 bp, Artificial
  Synthetic oligonucleotide
tgaagggcggctgattcagaacagcataacaatagaaaggatggtactttcggcattcga

SEQ ID NO: 74513 - DNA, 60 bp, Artificial
  Synthetic oligonucleotide
agggcggctgattcagaacagcataacaatagaaaggatggtactttcggcattcgacga

SEQ ID NO: 74514 - DNA, 60 bp, Artificial
  Synthetic oligonucleotide
gggcggctgattcagaacagcataacaatagaaaggatggtactttcggcattcgacgaa

SEQ ID NO: 74515 - DNA, 60 bp, Artificial
  Synthetic oligonucleotide
actttcggcattcgacgaaagaagaaacaagtatctcgaggagcatcccagtgctgggaa

SEQ ID NO: 74516 - DNA, 58 bp, Artificial
  Synthetic oligonucleotide
ttctggagaggtgaaaatggtcgaagaaccagaattgcttatgaaagaatgtgcaaca

SEQ ID NO: 74517 - DNA, 60 bp, Artificial
  Synthetic oligonucleotide
ttctggagaggtgaaaatggtcgaaggaccagaattgcttatgaaagaatgtgcaatatc

SEQ ID NO: 74518 - DNA, 60 bp, Artificial
  Synthetic oligonucleotide
ttctggagaggtgaaaatggtcgaagaaccagaattgcttatgaaagaatgtgcaatatc

SEQ ID NO: 74519 - DNA, 60 bp, Artificial
  Synthetic oligonucleotide
ttctggagaggtgaaaatggtcgaaaaaccagaattgcttatgaaagaatgtgcaatatc

SEQ ID NO: 74520 - DNA, 60 bp, Artificial
  Synthetic oligonucleotide
gaaaacatggagacaatagattctagcacacttgaactgagaagcaaatattgggcaata

SEQ ID NO: 74521 - DNA, 60 bp, Artificial
  Synthetic oligonucleotide
cccaagaggacagttaacaaccagaggagttcaaattgcttcaaatgaaaacatggagac

SEQ ID NO: 74522 - DNA, 56 bp, Artificial
  Synthetic oligonucleotide
cttcctttgacatgagcaatgaagggtcttatttcttcggagacaatgctgaggag

SEQ ID NO: 74523 - DNA, 60 bp, Artificial
  Synthetic oligonucleotide
atggatgagagaactcatcctccatgataaagaagaaatcatgaggatctggcgtcaggc

SEQ ID NO: 74524 - DNA, 60 bp, Artificial
  Synthetic oligonucleotide
gaaatggatgagggaactcatcctccatgataaagaagaaatcatgagaatctggcgtca

SEQ ID NO: 74525 - DNA, 60 bp, Artificial
  Synthetic oligonucleotide
gatgggaaatggatgagggaactcatcctccatgataaagaagaaatcatgagaatctgg

SEQ ID NO: 74526 - DNA, 60 bp, Artificial
  Synthetic oligonucleotide
gatgggaaatggatgagagaactcatcctccatgataaagaagaaatcatgaggatctgg

SEQ ID NO: 74527 - DNA, 60 bp, Artificial
  Synthetic oligonucleotide
gctgggaaagaccccaagaaaacgggaggcccgatatacagaaggaaagatgggaaatgg

SEQ ID NO: 74528 - DNA, 60 bp, Artificial
  Synthetic oligonucleotide
gtgctgggaaagaccccaagaaaacgggaggcccgatatacagaaggaaagatgggaaat

SEQ ID NO: 74529 - DNA, 60 bp, Artificial
  Synthetic oligonucleotide
ggcattcgacgaaagaagaaacaagtatctcgaggagcatcccagtgctgggaaagaccc

SEQ ID NO: 74530 - DNA, 60 bp, Artificial
  Synthetic oligonucleotide
actttcggcattcgacgaaagaagaaacaagtacctcgaggagcatcccagtgctgggaa

SEQ ID NO: 74531 - DNA, 60 bp, Artificial
  Synthetic oligonucleotide
ggatgagggaactcatcctccatgataaagaagaaatcatgagaatctggcgtcaggcca

SEQ ID NO: 74532 - DNA, 60 bp, Artificial
  Synthetic oligonucleotide
ggatgagagaactcatcctccatgataaagaagaaatcatgaggatctggcgtcaggcca

SEQ ID NO: 74533 - DNA, 60 bp, Artificial
  Synthetic oligonucleotide
ctagggcccgaattgatgcacgaattgacttcgagtctggacggattaagaaggaggagt

SEQ ID NO: 74534 - DNA, 60 bp, Artificial
  Synthetic oligonucleotide
cttgcgaaaggggagaaggctaacgtattgatagggcaaggagacgtagtgttggtaatg

SEQ ID NO: 74535 - DNA, 60 bp, Artificial
  Synthetic oligonucleotide
acaagtggatcatctgtcaagagggaagaagaagtgctcacaggcaacctccaaacattg

SEQ ID NO: 74536 - DNA, 60 bp, Artificial
  Synthetic oligonucleotide
gatggagtttgagccatttcaatctttggtacctaaagctgccaggggccaatacagtgg

SEQ ID NO: 74537 - DNA, 60 bp, Artificial
  Synthetic oligonucleotide
cagagcgaaccaacgattgaatcccatgcaccaactcttgaggcatttccaaaaggatgc

SEQ ID NO: 74538 - DNA, 60 bp, Artificial
  Synthetic oligonucleotide
ttaaagcatggaacctttggtcccgtccacttccgaaaccaagttaaaatacgccgcagg

SEQ ID NO: 74539 - DNA, 60 bp, Artificial
  Synthetic oligonucleotide
agcaaccaagaggcttacggtcctcggaaaggatgcaggcgcactaactgaagacccaga

SEQ ID NO: 74540 - DNA, 60 bp, Artificial
  Synthetic oligonucleotide
ggtgcgcaagaccagattcctcccagtagctggcggaacaagcagtgtgtacatcgaagt

SEQ ID NO: 74541 - DNA, 60 bp, Artificial
  Synthetic oligonucleotide
ggccataatcaagaagtacacatcaggaagacaggagaagaaccctgccctcaggatgaa

SEQ ID NO: 74542 - DNA, 60 bp, Artificial
  Synthetic oligonucleotide
cactgatgtaatcaattcctgggcaggagatattctaagaactcaggaatcatcatgcac

SEQ ID NO: 74543 - DNA, 60 bp, Artificial
  Synthetic oligonucleotide
gctcatgctaccccaatgaaggtaaagtggaatgtgtttgtagggacaactggactggaa

SEQ ID NO: 74544 - DNA, 60 bp, Artificial
  Synthetic oligonucleotide
ctcatgctaccccaatgaaggtaaagtggaatgtgtttgtagggacaactggactggaac

SEQ ID NO: 74545 - DNA, 60 bp, Artificial
  Synthetic oligonucleotide
gaatgctcatgctaccccaatgaaggtaaagtggaatgcgtttgtagggacaactggact

SEQ ID NO: 74546 - DNA, 60 bp, Artificial
  Synthetic oligonucleotide
catgctaccccaatgaaggtaaagtggaatgcgtttgtagggacaactggactggaacca

SEQ ID NO: 74547 - DNA, 60 bp, Artificial
  Synthetic oligonucleotide
tgctcatgctaccccaatgaaggtaaagtggaatgtgtttgtagggacaactggactgga

SEQ ID NO: 74548 - DNA, 60 bp, Artificial
  Synthetic oligonucleotide
gtgttcatgctaccccaatgaaggtaaagtggaatgtgtatgtagggacaactggactgg

SEQ ID NO: 74549 - DNA, 60 bp, Artificial
  Synthetic oligonucleotide
gcacctattgacacctgcatttctgaatgcatcactccaaatggaagcatccccaatgac

SEQ ID NO: 74550 - DNA, 60 bp, Artificial
  Synthetic oligonucleotide
gcacctattgacacttgtatttctgaatgcatcactccaaatggaagcatccccaatgac

SEQ ID NO: 74551 - DNA, 51 bp, Artificial
  Synthetic oligonucleotide
catccacatcatggcgtctcaaggcaccaaacgatcttatgaacagatgga

SEQ ID NO: 74552 - DNA, 60 bp, Artificial
  Synthetic oligonucleotide
atcctcatcggcggacttgaatggaatgataacacaattcgagcgtctgaaaatatacag

SEQ ID NO: 74553 - DNA, 60 bp, Artificial
  Synthetic oligonucleotide
ggtggacattcttagacagaacccgactgaagaacaagctgtggatatatgcaaggctgc

SEQ ID NO: 74554 - DNA, 60 bp, Artificial
  Synthetic oligonucleotide
ggagttcacaatggtggggaaaagagcaacagctatactaagaaaagcaaccagaagatt

SEQ ID NO: 74555 - DNA, 60 bp, Artificial
  Synthetic oligonucleotide
gtgcatgaggggtatgaggagttcacaatggtggggaaaagagcaacagctatactcaga

SEQ ID NO: 74556 - DNA, 60 bp, Artificial
  Synthetic oligonucleotide
gaagataagagtacatgaggggtatgaggagttcacaatggtggggaaaagggcaacagc

SEQ ID NO: 74557 - DNA, 60 bp, Artificial
  Synthetic oligonucleotide
gacaaactctatggagtaaaatgagtgatgctggatcagatagagtgatggtatcacctt

SEQ ID NO: 74558 - DNA, 60 bp, Artificial
  Synthetic oligonucleotide
gcagtctcgcactcgcgagatacttacaaaaaccacagtggaccatatggccataattaa

SEQ ID NO: 74559 - DNA, 60 bp, Artificial
  Synthetic oligonucleotide
accactaaaagactaacaattctcggaaaagatgccggcactttaattgaagacccagat

SEQ ID NO: 74560 - DNA, 60 bp, Artificial
  Synthetic oligonucleotide
gcaaagcagaatgcagttctcttcactgactgtaaatgtgaggggatcagggatgagaat

SEQ ID NO: 74561 - DNA, 60 bp, Artificial
  Synthetic oligonucleotide
ctggcggaacaagcagtatatacattgaagttttacatttgactcaaggaacgtgttggg

SEQ ID NO: 74562 - DNA, 60 bp, Artificial
  Synthetic oligonucleotide
gaacaagctgtggatatatgcaaggctgcaatgggattgagaatcagctcatccttcagc

SEQ ID NO: 74563 - DNA, 60 bp, Artificial
  Synthetic oligonucleotide
ggcaatctccaaacattgaagataagagtacatgaggggtatgaggagttcacaatggtg

SEQ ID NO: 74564 - DNA, 60 bp, Artificial
  Synthetic oligonucleotide
cgttattggagatgtgccacagcacacaaattggcgggacaaggatggtggacattctta

SEQ ID NO: 74565 - DNA, 60 bp, Artificial
  Synthetic oligonucleotide
aaggggcaagccagaggaaaagacaatatggacctcaagtagctccattgtgatgtgtgg

SEQ ID NO: 74566 - DNA, 60 bp, Artificial
  Synthetic oligonucleotide
aaggggcaagccagaagaaaagacgatatggacctcaagtagctccattgtgatgtgtgg

SEQ ID NO: 74567 - DNA, 60 bp, Artificial
  Synthetic oligonucleotide
aaggggcaagccggaagaaaagacgatatggacctcaagtagctccattgtgatgtgtgg

SEQ ID NO: 74568 - DNA, 60 bp, Artificial
  Synthetic oligonucleotide
ggggcaagccagaagaaaagacgatatggacctcaagtagctccattgtgatgtgtggag

SEQ ID NO: 74569 - DNA, 60 bp, Artificial
  Synthetic oligonucleotide
ggggcaagccggaagaaaagacgatatggacctcaagtagctccattgtgatgtgtggag

SEQ ID NO: 74570 - DNA, 60 bp, Artificial
  Synthetic oligonucleotide
ggtggaattgggaggttttacatacagatgtgcactgaactcaaactcagcgactatgaa

SEQ ID NO: 74571 - DNA, 60 bp, Artificial
  Synthetic oligonucleotide
tgagttgaaatcaggctacaaagattggatactgtggatttcattcgccatatcatgcct

SEQ ID NO: 74572 - DNA, 60 bp, Artificial
  Synthetic oligonucleotide
tcagatcaaaggtgtagagttgaaatcaggctacaaagattggatactgtggatttcatt

SEQ ID NO: 74573 - DNA, 60 bp, Artificial
  Synthetic oligonucleotide
accccgcactcaggatgaaatggatgatggcaatgaaatatccaattacggcggataaga

SEQ ID NO: 74574 - DNA, 60 bp, Artificial
  Synthetic oligonucleotide
cccgcactcaggatgaaatggatgatggcaatgaaatatccaattacggcggataagagg

SEQ ID NO: 74575 - DNA, 60 bp, Artificial
  Synthetic oligonucleotide
gtcaattagaaacgggacttatgaccatgacatatacagagatgaggcattgaacaaccg

SEQ ID NO: 74576 - DNA, 60 bp, Artificial
  Synthetic oligonucleotide
ctaccgagctagttcaaagctcttcaacagggaaaatatgcaacaatccccacaggatcc

SEQ ID NO: 74577 - DNA, 60 bp, Artificial
  Synthetic oligonucleotide
agctcttcaacagggaaaatatgcaacaatccccacagaatccttgatggaagggactgc

SEQ ID NO: 74578 - DNA, 60 bp, Artificial
  Synthetic oligonucleotide
gcatccccaatgacaagccatttcaaaatgtaaacaagatcacttacggagcatgcccta

SEQ ID NO: 74579 - DNA, 60 bp, Artificial
  Synthetic oligonucleotide
gagatgaagcattaaacaaccgatttcaaatcaagggtgtagagctaaaatctgggtaca

SEQ ID NO: 74580 - DNA, 60 bp, Artificial
  Synthetic oligonucleotide
tgtagagcggagcaatgctttcagcaattgttacccttacgatgtaccagactatgcatc

SEQ ID NO: 74581 - DNA, 60 bp, Artificial
  Synthetic oligonucleotide
tgtagagcggagcaatgctttcagcaattgttacccttacgacgtaccagattatgcatc

SEQ ID NO: 74582 - DNA, 60 bp, Artificial
  Synthetic oligonucleotide
gcggagcaatgctttcagcaattgttacccttacgatgtaccagactatgcatcccttcg

SEQ ID NO: 74583 - DNA, 60 bp, Artificial
  Synthetic oligonucleotide
gaacaggacaagctgcagatctaaagagcactcaagcagccatcgaccagatcaatggaa

SEQ ID NO: 74584 - DNA, 60 bp, Artificial
  Synthetic oligonucleotide
atcttgaggcactcatggaatggctaaagacaagaccaatcctgtcacctctgactaagg

SEQ ID NO: 74585 - DNA, 60 bp, Artificial
  Synthetic oligonucleotide
aaaatgcaattggggtcctcatcggaggacttgaatggaatgataacacaattcgagtct

SEQ ID NO: 74586 - DNA, 53 bp, Artificial
  Synthetic oligonucleotide
cctgggatgatgatgggcatgttcaacatgctaagtacggttttaggagtctc

SEQ ID NO: 74587 - DNA, 60 bp, Artificial
  Synthetic oligonucleotide
cctgggatgatgatgggcatgttcaacatgctaagtacagttttaggagtctcgatactg

SEQ ID NO: 74588 - DNA, 60 bp, Artificial
  Synthetic oligonucleotide
cgcatgtatagagtcaatcaggaacgggacctatgatcatgacatatacagagatgaagc

SEQ ID NO: 74589 - DNA, 60 bp, Artificial
  Synthetic oligonucleotide
tgacaacgcatgtatagagtcaatcaggaacgggacctatggtcatgacatatacagaga

SEQ ID NO: 74590 - DNA, 60 bp, Artificial
  Synthetic oligonucleotide
cgcatgtatagagtcaatcaggaacgggacctatggtcatgacatatacagagatgaagc

SEQ ID NO: 74591 - DNA, 60 bp, Artificial
  Synthetic oligonucleotide
gcaattggggtcctcatcggaggacttgaatggaatggtaacacagttcgagtctctaaa

SEQ ID NO: 74592 - DNA, 60 bp, Artificial
  Synthetic oligonucleotide
tacaccatggatacagtcaacagaacacaccaatattcagaaaagggaaagtggacaaca

SEQ ID NO: 74593 - DNA, 53 bp, Artificial
  Synthetic oligonucleotide
tatacagagatgaagcattaaacaaccggtttcagatcaagggcgttgagctg

SEQ ID NO: 74594 - DNA, 60 bp, Artificial
  Synthetic oligonucleotide
ttagtgaaacacagggaacagagaaattgacaataacatattcatcatcgatgatgtggg

SEQ ID NO: 74595 - DNA, 60 bp, Artificial
  Synthetic oligonucleotide
agaatgcaactgaaatcagagcatctgttggaaggatggtgggaggaatcggccggttct

SEQ ID NO: 74596 - DNA, 60 bp, Artificial
  Synthetic oligonucleotide
ctccatacagccatggaacgggaacaggatacaccatggacacagtcaacagaacacatc

SEQ ID NO: 74597 - DNA, 60 bp, Artificial
  Synthetic oligonucleotide
cagaaacgctacatggcgagacgagttgagtcagaagtttgaagagatcagatggctcat

SEQ ID NO: 74598 - DNA, 60 bp, Artificial
  Synthetic oligonucleotide
atgcagggctcgactctccctagaaggtccggagctgcaggtgctgcagtcaaaggaatc

SEQ ID NO: 74599 - DNA, 60 bp, Artificial
  Synthetic oligonucleotide
gagattagggcatccgtcgggaagatgattgatggaattgggagattctacatccaaatg

SEQ ID NO: 74600 - DNA, 58 bp, Artificial
  Synthetic oligonucleotide
ttttggagaggtgagaatgggcggaaaacaagaagtgcttatgagagaatgtgcaaca

SEQ ID NO: 74601 - DNA, 60 bp, Artificial
  Synthetic oligonucleotide
gctcgactctccctagaaggtccggagctgcaggtgctgcagtcaaaggaatcgggacaa

SEQ ID NO: 74602 - DNA, 60 bp, Artificial
  Synthetic oligonucleotide
cactcactgagtgacatcaaaatcatggcgtcccaaggcaccaaacggtcttatgaacag

SEQ ID NO: 74603 - DNA, 60 bp, Artificial
  Synthetic oligonucleotide
gctgcacaaagagcaatggtggatcaagtgagagaaagtcggaacccaggaaacgctgag

SEQ ID NO: 74604 - DNA, 60 bp, Artificial
  Synthetic oligonucleotide
aagaatgatggaaggtgcaaaaccagaagaagtgtcattccgggggaggggagtcttcga

SEQ ID NO: 74605 - DNA, 60 bp, Artificial
  Synthetic oligonucleotide
gagggaaggacttcagacatgagggcagaaatcataagaatgatggaaggtgcaaaacca

SEQ ID NO: 74606 - DNA, 60 bp, Artificial
  Synthetic oligonucleotide
agggcatccgtcgggaagatgattgatggaattgggagattctacatccaaatgtgcact

SEQ ID NO: 74607 - DNA, 60 bp, Artificial
  Synthetic oligonucleotide
gattagggcatccgtcgggaagatgattgatggaattgggagattctacatccaaatgtg

SEQ ID NO: 74608 - DNA, 60 bp, Artificial
  Synthetic oligonucleotide
cacaaagagcaatggtggatcaagtgagagaaagtcggaacccaggaaacgctgagatcg

SEQ ID NO: 74609 - DNA, 60 bp, Artificial
  Synthetic oligonucleotide
gcacaaagagcaatggtggatcaagtgagagaaagtcggaacccaggaaacgctgagatc

SEQ ID NO: 74610 - DNA, 60 bp, Artificial
  Synthetic oligonucleotide
tctacatccaaatgtgcactgaacttaaactcagtgatcatgaagggcgattgatccaga

SEQ ID NO: 74611 - DNA, 60 bp, Artificial
  Synthetic oligonucleotide
atatagaagaatgctcatgctaccccaatgaaggtaaggtggaatgcgtttgcagagaca

SEQ ID NO: 74612 - DNA, 60 bp, Artificial
  Synthetic oligonucleotide
gggagaatccaggaccttgagaaatatgttgaggacactaagatagatctatggtcttac

SEQ ID NO: 74613 - DNA, 60 bp, Artificial
  Synthetic oligonucleotide
ctactgagggctttcactgatgaaggagcaattgttggcgaaatctcaccattgccttct

SEQ ID NO: 74614 - DNA, 60 bp, Artificial
  Synthetic oligonucleotide
gaaacaagtacctcgaggagcatcccagtgctgggaaagaccccaagaaaacgggaggcc

SEQ ID NO: 74615 - DNA, 60 bp, Artificial
  Synthetic oligonucleotide
tttaaaattgagcattgaagacccaagtcacgaaggagaagggatcccattatatgatgc

SEQ ID NO: 74616 - DNA, 60 bp, Artificial
  Synthetic oligonucleotide
gcagatcgagagcatgattgaagccgagtcctcagttaaagagaaagacatgaccaaaga

SEQ ID NO: 74617 - DNA, 60 bp, Artificial
  Synthetic oligonucleotide
tggggaggaaatggccacaaaggcagactacactctcgacgaggaaagccgggctaggat

SEQ ID NO: 74618 - DNA, 53 bp, Artificial
  Synthetic oligonucleotide
cggaaggagtacctgagtctatgagggaagaatatcggcaggaacagcagaat

SEQ ID NO: 74619 - DNA, 60 bp, Artificial
  Synthetic oligonucleotide
tcaggggaacaagagtagtcccaagaggacaactgtccaccagaggagttcaaattgctt

SEQ ID NO: 74620 - DNA, 60 bp, Artificial
  Synthetic oligonucleotide
gcttctcatcgttcaggcacttagggacaacctggaacctggaaccttcgatcttggagg

SEQ ID NO: 74621 - DNA, 60 bp, Artificial
  Synthetic oligonucleotide
acaattgacttaacagatgcagaaatgaataaattattcgagaagactaggcgccagtta

SEQ ID NO: 74622 - DNA, 60 bp, Artificial
  Synthetic oligonucleotide
acgattgacttaacagatgcagaaatgaataaattattcgagaagactaggcgccagtta

SEQ ID NO: 74623 - DNA, 60 bp, Artificial
  Synthetic oligonucleotide
ggatttcattcaccatatcatgcttcttaatttgcgttgttctattgggtttcattatgt

SEQ ID NO: 74624 - DNA, 60 bp, Artificial
  Synthetic oligonucleotide
ttgacttaacagatgcagaaatgaataaattattcgagaagactaggcgccagttaagag

SEQ ID NO: 74625 - DNA, 60 bp, Artificial
  Synthetic oligonucleotide
ttgacttaacagatgcagaaatgaataaattattcgagaagactaggcgccagttaaggg

SEQ ID NO: 74626 - DNA, 60 bp, Artificial
  Synthetic oligonucleotide
tgtgaggcccagggctttgcaccattttccaaagataatggaatacgaattgggtcgaga

SEQ ID NO: 74627 - DNA, 60 bp, Artificial
  Synthetic oligonucleotide
gagagaccttcaaatgaatactacatgaacaacaccgaaccactttgtgaggcccagggc

SEQ ID NO: 74628 - DNA, 60 bp, Artificial
  Synthetic oligonucleotide
acatagagagaccttcaaatgaatactacatgaacaacaccgaaccactttgtgaggccc

SEQ ID NO: 74629 - DNA, 60 bp, Artificial
  Synthetic oligonucleotide
agtaagagtagaaagagttatccaatggtataatacaaatacaattgagtacatagagag

SEQ ID NO: 74630 - DNA, 60 bp, Artificial
  Synthetic oligonucleotide
caattggatctgcatcattaggaatactaatcctcaacgtcattctccatgtagtcagca

SEQ ID NO: 74631 - DNA, 60 bp, Artificial
  Synthetic oligonucleotide
ataacaattggatctgcatcattaggaatactaatcctcaacgtcattctccatgtagtc

SEQ ID NO: 74632 - DNA, 60 bp, Artificial
  Synthetic oligonucleotide
cgggtttcgacaaggaactgacgtatgggccggaaggacaattagtaggacttcaagatc

SEQ ID NO: 74633 - DNA, 60 bp, Artificial
  Synthetic oligonucleotide
gtttcgggtttcgacaaggaactgacgtatgggccggaaggacaattagtaggacttcaa

SEQ ID NO: 74634 - DNA, 60 bp, Artificial
  Synthetic oligonucleotide
gaatggttggacacagaacagtaaagaccaaatcagaaggcaagtgattattgataaccc

SEQ ID NO: 74635 - DNA, 60 bp, Artificial
  Synthetic oligonucleotide
ggaatggttggacacagaacagtaaagaccaaatcagaaggcaagtgattattgataacc

SEQ ID NO: 74636 - DNA, 60 bp, Artificial
  Synthetic oligonucleotide
tatctcctgatctatcgtacacagtcggatatttgtgtgctggcattcccactgacactc

SEQ ID NO: 74637 - DNA, 60 bp, Artificial
  Synthetic oligonucleotide
gaccaattctggtaatatctcctgatctatcgtacacagtcggatatttgtgtgctggca

SEQ ID NO: 74638 - DNA, 60 bp, Artificial
  Synthetic oligonucleotide
gctcatgcacaagccctttgggaaataaaggatacggtgtaaagggtttcgggtttcgac

SEQ ID NO: 74639 - DNA, 60 bp, Artificial
  Synthetic oligonucleotide
cacaggctcatgcacaagccctttgggaaataaaggatacggtgtaaagggtttcgggtt

SEQ ID NO: 74640 - DNA, 60 bp, Artificial
  Synthetic oligonucleotide
gataacccaaattggtcaggatatagcggttctttcacattgccggttgaactaacaaaa

SEQ ID NO: 74641 - DNA, 60 bp, Artificial
  Synthetic oligonucleotide
attgataacccaaattggtcaggatatagcggttctttcacattgccggttgaactaaca

SEQ ID NO: 74642 - DNA, 60 bp, Artificial
  Synthetic oligonucleotide
gaagaataattgggcagactgatataagtttcaatgggggacacatagaggagtgttctt

SEQ ID NO: 74643 - DNA, 52 bp, Artificial
  Synthetic oligonucleotide
gagtgttcttgttaccccaatgaagggaaggtggaatgcgtatgcagggaca

SEQ ID NO: 74644 - DNA, 60 bp, Artificial
  Synthetic oligonucleotide
gggcaatcacctaatgtgtatcaagctaggtttgaatcggtggcatggtcagcaacagca

SEQ ID NO: 74645 - DNA, 51 bp, Artificial
  Synthetic oligonucleotide
tgaactatggaggtgttccggttgatattattaattcatgggcaggggata

SEQ ID NO: 74646 - DNA, 60 bp, Artificial
  Synthetic oligonucleotide
gtcatgcacctgcattaaaggagactgttattgggtgatgactgatggaccggcaaacag

SEQ ID NO: 74647 - DNA, 60 bp, Artificial
  Synthetic oligonucleotide
cacctgcattaaaggagactgttattgggtgatgactgatggaccggcaaacaggcaagc

SEQ ID NO: 74648 - DNA, 60 bp, Artificial
  Synthetic oligonucleotide
ggcccagggctttgcaccattttccaaagataatggaatacgaattgggtcgagaggcca

SEQ ID NO: 74649 - DNA, 60 bp, Artificial
  Synthetic oligonucleotide
tttgtctcatgttcgccctcagaatgtaggacctttttcctcacacagggctcattactt

SEQ ID NO: 74650 - DNA, 51 bp, Artificial
  Synthetic oligonucleotide
ctcattacttaatgacaaacattctaacggcacagtgaaggaccgaagtcc

SEQ ID NO: 74651 - DNA, 60 bp, Artificial
  Synthetic oligonucleotide
gtgtcaaaatagggcaatcacctaatgtgtatcaagctaggtttgaatcggtggcatggt

SEQ ID NO: 74652 - DNA, 60 bp, Artificial
  Synthetic oligonucleotide
tgaactaacaaaaaaaggatgtttagtcccctgtttctgggttgaaatgatcagaggtaa

SEQ ID NO: 74653 - DNA, 60 bp, Artificial
  Synthetic oligonucleotide
gctccattgtgatgtgtggagtagatcataaaattgccagttggtcatggcacgatggag

SEQ ID NO: 74654 - DNA, 60 bp, Artificial
  Synthetic oligonucleotide
gcgtaggcttgctgaccaaagtctcccaccgaacttctccagccttgaaaactttagagc

SEQ ID NO: 74655 - DNA, 60 bp, Artificial
  Synthetic oligonucleotide
tccttccttacacatgcactgaaatagctgtggcaatgctactatttgctatccatactg

SEQ ID NO: 74656 - DNA, 60 bp, Artificial
  Synthetic oligonucleotide
cgtaggcttgctgaccaaagtctcccaccgaacttctccagccttgaaaactttagagcc

SEQ ID NO: 74657 - DNA, 60 bp, Artificial
  Synthetic oligonucleotide
ccttacacatgcactgaaatagctgtggcaatgctactatttgctatccatactgtccaa

SEQ ID NO: 74658 - DNA, 60 bp, Artificial
  Synthetic oligonucleotide
tcctcacacatgcactgaaatagttgtggcaatgctactatttgctatccatactgtcca

SEQ ID NO: 74659 - DNA, 60 bp, Artificial
  Synthetic oligonucleotide
gatgtgtggagtagaccatgagattgccgactggtcatggcacgatggagctattcttcc

SEQ ID NO: 74660 - DNA, 60 bp, Artificial
  Synthetic oligonucleotide
ttgtttgagaagaccagaaggcaactgagggaaaatgctgaagacatgggcaatggttgt

SEQ ID NO: 74661 - DNA, 60 bp, Artificial
  Synthetic oligonucleotide
tgtttgaaaagacaaggagacaactgagggaaaatgctgaagacatgggcaatggttgtt

SEQ ID NO: 74662 - DNA, 60 bp, Artificial
  Synthetic oligonucleotide
tttgaaaagacaaggagacaactgagggaaaatgctgaagacatgggcaatggttgtttc

SEQ ID NO: 74663 - DNA, 60 bp, Artificial
  Synthetic oligonucleotide
aatgaccattgcctctgttcctgcttcacgctacttaactgacatgactcttgatgagat

SEQ ID NO: 74664 - DNA, 60 bp, Artificial
  Synthetic oligonucleotide
tgatagatggttggtatggcttcaggcatcaaaattccgaaggtacaggacaagcagcag

SEQ ID NO: 74665 - DNA, 60 bp, Artificial
  Synthetic oligonucleotide
gatggttggtatggcttcaggcatcaaaattccgaaggtacaggacaagcagcagacctc

SEQ ID NO: 74666 - DNA, 60 bp, Artificial
  Synthetic oligonucleotide
ccaggcgaagccaacagactataatcccgaacattggatctagaccctgggtaaggggcc

SEQ ID NO: 74667 - DNA, 60 bp, Artificial
  Synthetic oligonucleotide
gactataatcccgaacattggatctagaccctgggtaaggggccagtcaggcagaataag

SEQ ID NO: 74668 - DNA, 60 bp, Artificial
  Synthetic oligonucleotide
tgccgaagacatgggcaatggttgtttcaagatataccacaagtgtgacaatgcttgcat

SEQ ID NO: 74669 - DNA, 60 bp, Artificial
  Synthetic oligonucleotide
gatggttggtatggcttcaggcatcaaaattccgaaggtacaggacaagcagcagacctt

SEQ ID NO: 74670 - DNA, 60 bp, Artificial
  Synthetic oligonucleotide
tgctgaggacatgggaaatggttgtttcaagatataccacaagtgtgacaatgcttgcat

SEQ ID NO: 74671 - DNA, 60 bp, Artificial
  Synthetic oligonucleotide
ccacaagtgtgacaatgcttgcatagagtcaattagaaatgggacttatgaccatgatat

SEQ ID NO: 74672 - DNA, 60 bp, Artificial
  Synthetic oligonucleotide
ttgtttcaagatataccacaagtgtgacaatgcttgcatagagtcaattagaaatgggac

SEQ ID NO: 74673 - DNA, 60 bp, Artificial
  Synthetic oligonucleotide
ccgaagacatgggcaatggttgtttcaagatataccacaagtgtgacaatgcttgcatag

SEQ ID NO: 74674 - DNA, 60 bp, Artificial
  Synthetic oligonucleotide
gacatgggcaatggttgtttcaggatataccacaagtgtgacaatgcttgcatagagtca

SEQ ID NO: 74675 - DNA, 60 bp, Artificial
  Synthetic oligonucleotide
ggagggaatggtggatggttggtacggtttcaggcatcaaaattctgagggaataggaca

SEQ ID NO: 74676 - DNA, 60 bp, Artificial
  Synthetic oligonucleotide
ggtggatggttggtacggtttcaggcatcaaaattctgagggaataggacaagcggcaga

SEQ ID NO: 74677 - DNA, 60 bp, Artificial
  Synthetic oligonucleotide
ggtggatggttggtacggtttcaggcatcaaaattctgagggaatgggacaagcagcaga

SEQ ID NO: 74678 - DNA, 60 bp, Artificial
  Synthetic oligonucleotide
gggaatggtggatggttggtacggtttcaggcatcaaaattctgagggaatgggacaagc

SEQ ID NO: 74679 - DNA, 60 bp, Artificial
  Synthetic oligonucleotide
gggatcaatgatcggaatttctggagaggtgaaaatggacggaggacaagaattgcatac

SEQ ID NO: 74680 - DNA, 60 bp, Artificial
  Synthetic oligonucleotide
attatgtgggcctgccaaagaggcaacattaggtgcaacatttgcatttgagtatattag

SEQ ID NO: 74681 - DNA, 60 bp, Artificial
  Synthetic oligonucleotide
cttgaagagtcccacccagggatctttgaaaactcgtgtcttgaaacgatggaagttgtt

SEQ ID NO: 74682 - DNA, 60 bp, Artificial
  Synthetic oligonucleotide
gtcccacccagggatctttgaaaactcgtgtcttgaaacgatggaagttgttcaacaaac

SEQ ID NO: 74683 - DNA, 60 bp, Artificial
  Synthetic oligonucleotide
gattctacatacagatgtgcactgaactcaaactcagtgactacgaagggagactgatcc

SEQ ID NO: 74684 - DNA, 60 bp, Artificial
  Synthetic oligonucleotide
gcgcaaaatgccataagcacaacattcccttatactggagatcctccatacagccatgga

SEQ ID NO: 74685 - DNA, 60 bp, Artificial
  Synthetic oligonucleotide
ctaagaactcaggaatcatcatgcacttgcattcaaggtgaatgttattgggtaatgacg

SEQ ID NO: 74686 - DNA, 60 bp, Artificial
  Synthetic oligonucleotide
atcctaagaactcaggaatcatcatgcacttgcattcaaggtgaatgttactgggtaatg

SEQ ID NO: 74687 - DNA, 60 bp, Artificial
  Synthetic oligonucleotide
gttatcatggaagtcgttttcccaaatgaagtgggagctagaatattgacatcagagtcg

SEQ ID NO: 74688 - DNA, 60 bp, Artificial
  Synthetic oligonucleotide
agccaagtggatatgcacaaacagactgtgtccttgaggctatggccttccttgaagaat

SEQ ID NO: 74689 - DNA, 60 bp, Artificial
  Synthetic oligonucleotide
agccaagtggatatgcacaaacagactgtgtcctggaagcaatggctttccttgaaaagt

SEQ ID NO: 74690 - DNA, 60 bp, Artificial
  Synthetic oligonucleotide
ttgtaagattgctcctttaatggtggcatacatgttggaaagggaactggtccgcaaaac

SEQ ID NO: 74691 - DNA, 60 bp, Artificial
  Synthetic oligonucleotide
ggaggtcgtcttcccaaatgaagtgggagctagaatattgacatcagagtcgcaattgac

SEQ ID NO: 74692 - DNA, 60 bp, Artificial
  Synthetic oligonucleotide
tgtcacccctagctgtaacttggtggaacaggaatgggccaacaacaagtacagttcatt

SEQ ID NO: 74693 - DNA, 60 bp, Artificial
  Synthetic oligonucleotide
ggtcaatacagtggatttgtgagaacactattccaacaaatgcgtgacgtactggggaca

SEQ ID NO: 74694 - DNA, 60 bp, Artificial
  Synthetic oligonucleotide
agagaaattgacaataacatattcatcatcaatgatgtgggagataaacggtcctgaatc

SEQ ID NO: 74695 - DNA, 60 bp, Artificial
  Synthetic oligonucleotide
agcagacaagagaataatggagatgattcctgaaaggaatgaacaagggcagacgctttg

SEQ ID NO: 74696 - DNA, 60 bp, Artificial
  Synthetic oligonucleotide
ctgcatttgactcaaggaacctgctgggaacagatgtacactccaggcggagaagtgaga

SEQ ID NO: 74697 - DNA, 60 bp, Artificial
  Synthetic oligonucleotide
aagatgcaaaagtgctgtttcagaattggggaattgaacctattgataatgtcatgggga

SEQ ID NO: 74698 - DNA, 60 bp, Artificial
  Synthetic oligonucleotide
gggcggagagcaacagctatcttgaggaaagcaactagaaggctgatccagttgatagta

SEQ ID NO: 74699 - DNA, 60 bp, Artificial
  Synthetic oligonucleotide
tccttaggcaaaatccaactgaggagcaagctgtggatatatgcaaagcagcaatgggtt

SEQ ID NO: 74700 - DNA, 60 bp, Artificial
  Synthetic oligonucleotide
ggtggagtttgaaccgttccaatccttggtacctaaagctgccagaggtcaatacagtgg

SEQ ID NO: 74701 - DNA, 60 bp, Artificial
  Synthetic oligonucleotide
aagagtgcatgaggggtatgaggaattcacaatggttgggcggagagcaacagctatctt

SEQ ID NO: 74702 - DNA, 60 bp, Artificial
  Synthetic oligonucleotide
acagtctctaccaaaagaagccaacaaactgtgatcccgaatatcggatctagacccaga

SEQ ID NO: 74703 - DNA, 60 bp, Artificial
  Synthetic oligonucleotide
attgaacgtgactatgccaaacaatgaagaatttgacaaattgtacatttggggggttca

SEQ ID NO: 74704 - DNA, 60 bp, Artificial
  Synthetic oligonucleotide
tgacaatgcctgcataggatcaatcagaaatggaacttatgaccatgatgtatacagagc

SEQ ID NO: 74705 - DNA, 60 bp, Artificial
  Synthetic oligonucleotide
taccaaacggaacgatagtgaaaacaatcacgaatgaccaaattgaagttactaatgcta

SEQ ID NO: 74706 - DNA, 60 bp, Artificial
  Synthetic oligonucleotide
taagcatctattggacaatagtgaaaccgggagacatacttttgattaacagcacaggga

SEQ ID NO: 74707 - DNA, 50 bp, Artificial
  Synthetic oligonucleotide
tcatccggcacactggagtttaacaatgaaagcttcaattggactggagt

SEQ ID NO: 74708 - DNA, 60 bp, Artificial
  Synthetic oligonucleotide
agcacagggaatctaattgctcctaggggttacttcaaaatacgaagtgggaaaagctca

SEQ ID NO: 74709 - DNA, 60 bp, Artificial
  Synthetic oligonucleotide
gacaatagtgaaaccgggagacatacttttgattaacagcacagggaatctaattgctcc

SEQ ID NO: 74710 - DNA, 60 bp, Artificial
  Synthetic oligonucleotide
cattgaggaggggaaaatcgttcatactagcacattgtcaggaagtgctcagcatgtcga

SEQ ID NO: 74711 - DNA, 60 bp, Artificial
  Synthetic oligonucleotide
tcattgaagaggggaaaatcgttcatactagcacattgtcaggaagtgctcagcatgtcg

SEQ ID NO: 74712 - DNA, 60 bp, Artificial
  Synthetic oligonucleotide
ctattcattgaggaggggaaaatcgttcatactagcacattgtcaggaagtgctcagcat

SEQ ID NO: 74713 - DNA, 60 bp, Artificial
  Synthetic oligonucleotide
ctattcattgaggaggggaaaatcgttcatactagcacattgtcaggaagtgcccagcat

SEQ ID NO: 74714 - DNA, 60 bp, Artificial
  Synthetic oligonucleotide
aaatactattcattgaggaggggaaaatcgttcatactagcacattgtcaggaagtgctc

SEQ ID NO: 74715 - DNA, 60 bp, Artificial
  Synthetic oligonucleotide
aagatactattcattgaggaggggaaaatcgttcatactagcacattgtcaggaagtgct

SEQ ID NO: 74716 - DNA, 60 bp, Artificial
  Synthetic oligonucleotide
tagcacattgtcaggaagtgctcagcatgtcgaggagtgctcctgctatcctcgatatcc

SEQ ID NO: 74717 - DNA, 60 bp, Artificial
  Synthetic oligonucleotide
aggaagtgctcagcatgtcgaggagtgctcctgctatcctcgatatcctggtgtcagatg

SEQ ID NO: 74718 - DNA, 60 bp, Artificial
  Synthetic oligonucleotide
gaggaggggaaaatcgttcatactagcacattgtcaggaagtgctcagcatgtcgaggag

SEQ ID NO: 74719 - DNA, 60 bp, Artificial
  Synthetic oligonucleotide
ggaggggaaaatcgttcatactagcacattgtcaggaagtgctcagcatgtcgaggagtg

SEQ ID NO: 74720 - DNA, 60 bp, Artificial
  Synthetic oligonucleotide
actagcacattgtcaggaagtgctcagcatgtcgaggagtgctcctgctatcctcgatat

SEQ ID NO: 74721 - DNA, 60 bp, Artificial
  Synthetic oligonucleotide
tgcatcttggttcaactccttcctcatacatgcactgaaatagttgtggcaatgctacta

SEQ ID NO: 74722 - DNA, 60 bp, Artificial
  Synthetic oligonucleotide
cataaatagaacaggaacatttgaattcactagctttttctatcgctatggatttgtagc

SEQ ID NO: 74723 - DNA, 60 bp, Artificial
  Synthetic oligonucleotide
cataaacaggacaggaacatttgaattcacgagctttttctatcgctatggatttgtagc

SEQ ID NO: 74724 - DNA, 60 bp, Artificial
  Synthetic oligonucleotide
cataaacaggacaggaacatttgagttcacaagctttttctatcgctatggatttgtagc

SEQ ID NO: 74725 - DNA, 60 bp, Artificial
  Synthetic oligonucleotide
gctcctaggggttacttcagaatacgaagtgggaaaagctcaataatgagatcagatgca

SEQ ID NO: 74726 - DNA, 60 bp, Artificial
  Synthetic oligonucleotide
cgctcctcggggctacttcaaaatgcgcactgggaaaagctcaataatgagatcagatgc

SEQ ID NO: 74727 - DNA, 60 bp, Artificial
  Synthetic oligonucleotide
cgctcctcgaggatacttcaaaatgcgcactgggaaaagctcaataatgagatcagatgc

SEQ ID NO: 74728 - DNA, 60 bp, Artificial
  Synthetic oligonucleotide
gctcctaggggttacttcaaaatacaaagtgggaaaagctcaataatgagatcagatgca

SEQ ID NO: 74729 - DNA, 60 bp, Artificial
  Synthetic oligonucleotide
cgctcctcggggctatttcaaaatgcgcactgggaaaagctcaataatgagatcagatgc

SEQ ID NO: 74730 - DNA, 60 bp, Artificial
  Synthetic oligonucleotide
agcaaaagcagggtagataatcactcactgagtgacatcaaagtcatggcgtctcaaggc

SEQ ID NO: 74731 - DNA, 60 bp, Artificial
  Synthetic oligonucleotide
agcaaaagcagggtagataatcactcactgagtgacatttacgtcatggcgtctcaaggc

SEQ ID NO: 74732 - DNA, 60 bp, Artificial
  Synthetic oligonucleotide
caaaatgccataagcacaacattcccttatactggagatcctccatacagccatggaaca

SEQ ID NO: 74733 - DNA, 60 bp, Artificial
  Synthetic oligonucleotide
gtggaggccatggtatctagggcccggattgatgcacgaattgacttcgagtctggaagg

SEQ ID NO: 74734 - DNA, 60 bp, Artificial
  Synthetic oligonucleotide
cgtacgttctctctatcgttccgtcaggccccctcaaagccgagatcgcgcagagacttg

SEQ ID NO: 74735 - DNA, 60 bp, Artificial
  Synthetic oligonucleotide
aggccccctcaaagccgagatcgcgcagagacttgaggatgtctttgcagggaagaacgc

SEQ ID NO: 74736 - DNA, 60 bp, Artificial
  Synthetic oligonucleotide
aggccccctcaaagccgagatcgcgcagagacttgaggatgtctttgcagggaagaacac

SEQ ID NO: 74737 - DNA, 60 bp, Artificial
  Synthetic oligonucleotide
gctttgaacagataacgttcttgcaggcattgcaactcttacttgaagttgagagtgaga

SEQ ID NO: 74738 - DNA, 60 bp, Artificial
  Synthetic oligonucleotide
gctagttcaaagctcttcaacagggaaaatatgcaacaatccccacaggattcttgacgg

SEQ ID NO: 74739 - DNA, 60 bp, Artificial
  Synthetic oligonucleotide
gctagtccaaagctcttcaacagggaaaatatgcaacaaccctcataggatccttgatgg

SEQ ID NO: 74740 - DNA, 60 bp, Artificial
  Synthetic oligonucleotide
cgccatatcatgcttcttaatttgcgttgttctattgggtctcattatgtgggcttgcca

SEQ ID NO: 74741 - DNA, 60 bp, Artificial
  Synthetic oligonucleotide
cgccatatcatgcttcttaatttgcgttgttctattgggtttcatcatgtgggcttgcca

SEQ ID NO: 74742 - DNA, 53 bp, Artificial
  Synthetic oligonucleotide
cacgctcaccgtgcccagtgagcgaggactgcagcgtagacgctttgtccaga

SEQ ID NO: 74743 - DNA, 60 bp, Artificial
  Synthetic oligonucleotide
atcgctcctcggggctatttcaaaatgcgcactgggaaaagctcaataatgagatcagat

SEQ ID NO: 74744 - DNA, 60 bp, Artificial
  Synthetic oligonucleotide
atcgctcctcggggctacttcaaaatgcgcactgggaaaagctcaataatgagatcagat

SEQ ID NO: 74745 - DNA, 60 bp, Artificial
  Synthetic oligonucleotide
ctgatcgctcctcgaggatacttcaaaatgcgcactgggaaaagctcaataatgagatca

SEQ ID NO: 74746 - DNA, 60 bp, Artificial
  Synthetic oligonucleotide
accggagcccctatagaactctaatgagtgtagaaatagggcaatcacccaatgtgtacc

SEQ ID NO: 74747 - DNA, 60 bp, Artificial
  Synthetic oligonucleotide
aatcgagaaaacaaatgaaaagtttcatcagattgagaaggagttttcagaagtggaagg

SEQ ID NO: 74748 - DNA, 60 bp, Artificial
  Synthetic oligonucleotide
aaccagcatacaattgatctgactgattcagaaatgaacaaactatttgaaaaaacaaga

SEQ ID NO: 74749 - DNA, 60 bp, Artificial
  Synthetic oligonucleotide
tttttcagtagactgaattggctgactaaatctggtagtgcttatccattgctgaacgtg

SEQ ID NO: 74750 - DNA, 54 bp, Artificial
  Synthetic oligonucleotide
tcacacaaaatggagggagtggtgcttgcaaaagagggcccaccaatggctttt

SEQ ID NO: 74751 - DNA, 60 bp, Artificial
  Synthetic oligonucleotide
tcacacaaaatggagggagtggtgcttgcaaaagagggcccaccaatggctttttcagta

SEQ ID NO: 74752 - DNA, 60 bp, Artificial
  Synthetic oligonucleotide
agagttcatcactgaaggcttcacgtggacaggagtcacacaaaatggagggagtggtgc

SEQ ID NO: 74753 - DNA, 60 bp, Artificial
  Synthetic oligonucleotide
agactgaattggctgactaaatctggtagtgcttatccattgctgaacgtgactatgccg

SEQ ID NO: 74754 - DNA, 60 bp, Artificial
  Synthetic oligonucleotide
ggatgctctactaggggaccctcattgtgatgtatttcaagatgaaacatgggaccttta

SEQ ID NO: 74755 - DNA, 60 bp, Artificial
  Synthetic oligonucleotide
tcaacggggaaaatatgcaacaatcctcacagaattctcgatggaagagactgcacatta

SEQ ID NO: 74756 - DNA, 60 bp, Artificial
  Synthetic oligonucleotide
cggatgatcaaattgaggtaactaatgcgactgaactggtccagagctcctcaacgggga

SEQ ID NO: 74757 - DNA, 60 bp, Artificial
  Synthetic oligonucleotide
ctgcacattaatggatgctctactaggggaccctcattgtgatgtatttcaagatgaaac

SEQ ID NO: 74758 - DNA, 60 bp, Artificial
  Synthetic oligonucleotide
cggggaaaatatgcaacaatcctcacagaattctcgatggaagagactgcacattaatgg

SEQ ID NO: 74759 - DNA, 60 bp, Artificial
  Synthetic oligonucleotide
ctcatcaggaaccctagagttcatcactgaaggcttcacgtggacaggagtcacacaaaa

SEQ ID NO: 74760 - DNA, 60 bp, Artificial
  Synthetic oligonucleotide
gggcatgtcccaaatatgtcaagcagagcactctaaagttggcaactggaatgcggaatg

SEQ ID NO: 74761 - DNA, 60 bp, Artificial
  Synthetic oligonucleotide
tgatagatggttggtatggtttcaggcatcaaaactcggaaggtacaggacaagcagcag

SEQ ID NO: 74762 - DNA, 60 bp, Artificial
  Synthetic oligonucleotide
gatggttggtatggtttcaggcatcaaaactcggaaggtacaggacaagcagcagacctt

SEQ ID NO: 74763 - DNA, 60 bp, Artificial
  Synthetic oligonucleotide
caagcagcagaccttaaaagcactcaagccgccattgaccaaatcaatggaaaactgaat

SEQ ID NO: 74764 - DNA, 60 bp, Artificial
  Synthetic oligonucleotide
cagcagaccttaaaagcactcaagccgccattgaccaaatcaatggaaaactgaatcgag

SEQ ID NO: 74765 - DNA, 60 bp, Artificial
  Synthetic oligonucleotide
aaaactgaatcgagtaatcgagaaaacaaatgaaaagtttcatcagattgagaaggagtt

SEQ ID NO: 74766 - DNA, 60 bp, Artificial
  Synthetic oligonucleotide
tgccgttgcaactacacactcctggattcctaagaggaaccgctctattctaaacacaag

SEQ ID NO: 74767 - DNA, 60 bp, Artificial
  Synthetic oligonucleotide
ccgttgcaactacacactcctggattcctaagaggaaccgctctattctaaacacaagcc

SEQ ID NO: 74768 - DNA, 60 bp, Artificial
  Synthetic oligonucleotide
tactggggttcattgtgtgggcctgccaaagaggcaacattaggtgcaacatttgcattt

SEQ ID NO: 74769 - DNA, 60 bp, Artificial
  Synthetic oligonucleotide
ctccaacgacaagccattccaaaatgtgaacaaagttacatatggaaaatgccccaagta

SEQ ID NO: 74770 - DNA, 60 bp, Artificial
  Synthetic oligonucleotide
atccccaacgacaagccattccaaaatgtgaacaaagttacatatggaaaatgccccaag

SEQ ID NO: 74771 - DNA, 60 bp, Artificial
  Synthetic oligonucleotide
catctccaacgacaagccattccaaaatgtgaacaaagttacatatggaaaatgccccaa

SEQ ID NO: 74772 - DNA, 60 bp, Artificial
  Synthetic oligonucleotide
catccccaacgacaagccattccaaaatgtgaacaaagttacatatggaaaatgccccaa

SEQ ID NO: 74773 - DNA, 60 bp, Artificial
  Synthetic oligonucleotide
atctccaacgacaagccattccaaaatgtgaacaaagttacatatggaaaatgccccaag

SEQ ID NO: 74774 - DNA, 60 bp, Artificial
  Synthetic oligonucleotide
tgacgctgttgcaactacacactcctggattcccaagaggaaccgctctatactcaacac

SEQ ID NO: 74775 - DNA, 60 bp, Artificial
  Synthetic oligonucleotide
tatggacctctagcagctccattgtgatgtgtggagtagatcataaaattgccagttggt

SEQ ID NO: 74776 - DNA, 60 bp, Artificial
  Synthetic oligonucleotide
acgtttttccttactcaaggttccctactcaatgacaaacattctaatggcacagtgaaa

SEQ ID NO: 74777 - DNA, 60 bp, Artificial
  Synthetic oligonucleotide
cgtgactatgccaaacaatgacaattttgacaaactatacatatggggagttcatcaccc

SEQ ID NO: 74778 - DNA, 60 bp, Artificial
  Synthetic oligonucleotide
cccagtgttgaacgtgactatgccaaacaatgacaattttgacaaactatacatatgggg

SEQ ID NO: 74779 - DNA, 60 bp, Artificial
  Synthetic oligonucleotide
cgcactgggaaaagctcaataatgagatcagatgcacctattgacacatgcatttctgag

SEQ ID NO: 74780 - DNA, 60 bp, Artificial
  Synthetic oligonucleotide
tgcgcactgggaaaagctcaataatgagatcagatgcacctattgacacatgcatttctg

SEQ ID NO: 74781 - DNA, 57 bp, Artificial
  Synthetic oligonucleotide
gccagttggtcatggcacgatggagctattcttccctttgacatcgataagatgtaa

SEQ ID NO: 74782 - DNA, 60 bp, Artificial
  Synthetic oligonucleotide
aatgtgcaacatcctcaaggggaaattccaaacagcagcacaacgagcaatgatggacca

SEQ ID NO: 74783 - DNA, 51 bp, Artificial
  Synthetic oligonucleotide
aaagaggcaacattaggtgcaacatttgcatttgagtatattagtaattaa

SEQ ID NO: 74784 - DNA, 60 bp, Artificial
  Synthetic oligonucleotide
gaccattacatatacagagatgaagcattaaacaaccgatttcagatcaaaggtgtagag

SEQ ID NO: 74785 - DNA, 60 bp, Artificial
  Synthetic oligonucleotide
gttgggatatcaagcatggtggaggccatggtgtctagggcccgaatcgatgcgcgaatt

SEQ ID NO: 74786 - DNA, 60 bp, Artificial
  Synthetic oligonucleotide
tgcaaaattgcccccttgatggtagcatacatgctagaaagagagttagtccgcaagacg

SEQ ID NO: 74787 - DNA, 60 bp, Artificial
  Synthetic oligonucleotide
ttaagataagacggagagttgacataaaccctgggcacgcagatctcagtgccaaagagg

SEQ ID NO: 74788 - DNA, 60 bp, Artificial
  Synthetic oligonucleotide
tagctcatctttcagcttcggtggattcacttttaaaagaacaagtgggtcgtcagtcaa

SEQ ID NO: 74789 - DNA, 60 bp, Artificial
  Synthetic oligonucleotide
taagagtgcatgaggggtatgaagagtttacaatggttgggagaagagcaacagctatcc

SEQ ID NO: 74790 - DNA, 60 bp, Artificial
  Synthetic oligonucleotide
gagatctaatgtcacagtcccgcactcgcgagatactcaccaaaaccactgtggaccata

SEQ ID NO: 74791 - DNA, 60 bp, Artificial
  Synthetic oligonucleotide
gccccgtccacttcaggaatcaagttaaaataagacggagagttgacataaaccctggcc

SEQ ID NO: 74792 - DNA, 60 bp, Artificial
  Synthetic oligonucleotide
ccaccggaacagagtaggatgcagttctcctccttgactgtgaatgtgagaggatcagga

SEQ ID NO: 74793 - DNA, 60 bp, Artificial
  Synthetic oligonucleotide
cgtggatatatgcaaggcagcaatgggcttgaggattagctcatctttcagcttcggtgg

SEQ ID NO: 74794 - DNA, 60 bp, Artificial
  Synthetic oligonucleotide
gcacacagattggtggaataagaatggtagacatccttaggcagaatccaacagaggagc

SEQ ID NO: 74795 - DNA, 50 bp, Artificial
  Synthetic oligonucleotide
caatgatgtgggagatcaatggtcctgagtcagtgctggtcaatacttac

SEQ ID NO: 74796 - DNA, 60 bp, Artificial
  Synthetic oligonucleotide
ccccttgatggtagcatacatgctagaaagagagttagtccgcaagacgaggttcctccc

SEQ ID NO: 74797 - DNA, 60 bp, Artificial
  Synthetic oligonucleotide
gtggaccacatggccataatcaaaaagtacacatcaggaagacaagagaagaaccccgca

SEQ ID NO: 74798 - DNA, 60 bp, Artificial
  Synthetic oligonucleotide
gggcaggagatatattaagaactcaggagtcttcctgcacttgcatccaaggtaattgct

SEQ ID NO: 74799 - DNA, 60 bp, Artificial
  Synthetic oligonucleotide
cctgggcaggagatatattaagaactcaggagtcttcctgcacttgcatccaaggtaatt

SEQ ID NO: 74800 - DNA, 60 bp, Artificial
  Synthetic oligonucleotide
caactttaatggaggacacattgaagagtgttcttgctaccctaatgatggtaaagtgga

SEQ ID NO: 74801 - DNA, 60 bp, Artificial
  Synthetic oligonucleotide
caaggtaattgctattgggtgatgactgatggccccgccaataggcaggcacagtataga

SEQ ID NO: 74802 - DNA, 60 bp, Artificial
  Synthetic oligonucleotide
ttaggactctcatgagtgtcgaagtgggccaatcacccaatgtataccaagccagatttg

SEQ ID NO: 74803 - DNA, 60 bp, Artificial
  Synthetic oligonucleotide
aggatagaagcccatttaggactctcatgagtgtcgaagtgggccaatcacccaatgtat

SEQ ID NO: 74804 - DNA, 60 bp, Artificial
  Synthetic oligonucleotide
caatgtataccaagccagatttgaagctgtggcatggtcagcaacggcctgccacgatgg

SEQ ID NO: 74805 - DNA, 60 bp, Artificial
  Synthetic oligonucleotide
cccaatgtataccaagccagatttgaagctgtggcatggtcagcaacggcctgccacgat

SEQ ID NO: 74806 - DNA, 60 bp, Artificial
  Synthetic oligonucleotide
gtaaagtggaatgcgtgtgtagagacaattggacaggaaccaacaggcctgtactggtta

SEQ ID NO: 74807 - DNA, 60 bp, Artificial
  Synthetic oligonucleotide
ggaggacacattgaagagtgttcttgctaccctaatgatggtaaagtggaatgcgtgtgt

SEQ ID NO: 74808 - DNA, 56 bp, Artificial
  Synthetic oligonucleotide
gtggatctttcaccctgccagttgaattgactgggaaagactgcctagttccctgt

SEQ ID NO: 74809 - DNA, 60 bp, Artificial
  Synthetic oligonucleotide
gaaatactgagaataaagaatggttggacacagacaagtaaagagcaggtgagaaaacag

SEQ ID NO: 74810 - DNA, 60 bp, Artificial
  Synthetic oligonucleotide
cctcactcaggggtctttgctcaatgacaaacattcgaatgggacggtaaaggatagaag

SEQ ID NO: 74811 - DNA, 60 bp, Artificial
  Synthetic oligonucleotide
cactcaggggtctttgctcaatgacaaacattcgaatgggacggtaaaggatagaagccc

SEQ ID NO: 74812 - DNA, 60 bp, Artificial
  Synthetic oligonucleotide
agcaatatgtgatgtcaagggctttgctcctttctccaaggacaatggaataagaattgg

SEQ ID NO: 74813 - DNA, 60 bp, Artificial
  Synthetic oligonucleotide
caagggctttgctcctttctccaaggacaatggaataagaattggttccaggggacatgt

SEQ ID NO: 74814 - DNA, 60 bp, Artificial
  Synthetic oligonucleotide
taagaattggttccaggggacatgtctttgttataagggagccctttgtttcttgttcgc

SEQ ID NO: 74815 - DNA, 60 bp, Artificial
  Synthetic oligonucleotide
attggttccaggggacatgtctttgttataagggagccctttgtttcttgttcgcccatg

SEQ ID NO: 74816 - DNA, 60 bp, Artificial
  Synthetic oligonucleotide
ccattgggtccatatcattgggattggttgtattcaatgttctactgcatgtcgtgagca

SEQ ID NO: 74817 - DNA, 60 bp, Artificial
  Synthetic oligonucleotide
gtcgtgagcatcatagtaacagtattggtcctggggaaaggtggaaacaatggggtctgc

SEQ ID NO: 74818 - DNA, 60 bp, Artificial
  Synthetic oligonucleotide
gtcccatggggaatcaggggtatggggtaaaaggcttcggatttcggcagggaactgatg

SEQ ID NO: 74819 - DNA, 60 bp, Artificial
  Synthetic oligonucleotide
tttcggcagggaactgatgtatggatggggcgaacaattagtcgaacctctaggtcagga

SEQ ID NO: 74820 - DNA, 60 bp, Artificial
  Synthetic oligonucleotide
ctgcccagtgatactccaagaggagaagatgcccaatttactggttcatgcactagtccc

SEQ ID NO: 74821 - DNA, 60 bp, Artificial
  Synthetic oligonucleotide
catgcactagtcccatggggaatcaggggtatggggtaaaaggcttcggatttcggcagg

SEQ ID NO: 74822 - DNA, 60 bp, Artificial
  Synthetic oligonucleotide
ctcgcctgatctctcttacagagttgggtatttatgtgcagggctgcccagtgatactcc

SEQ ID NO: 74823 - DNA, 60 bp, Artificial
  Synthetic oligonucleotide
agggctgcccagtgatactccaagaggagaagatgcccaatttactggttcatgcactag

SEQ ID NO: 74824 - DNA, 60 bp, Artificial
  Synthetic oligonucleotide
gcgtgtgtagagacaattggacaggaaccaacaggcctgtactggttatctcgcctgatc

SEQ ID NO: 74825 - DNA, 60 bp, Artificial
  Synthetic oligonucleotide
gtactggttatctcgcctgatctctcttacagagttgggtatttatgtgcagggctgccc

SEQ ID NO: 74826 - DNA, 60 bp, Artificial
  Synthetic oligonucleotide
ggggcaagccagaagagaaaacaatctggacttccagcagctccattgtgatgtgtggag

SEQ ID NO: 74827 - DNA, 60 bp, Artificial
  Synthetic oligonucleotide
ggcagggaactgatgtatggatggggcgaacaattagtcgaacctctaggtcaggatttg

SEQ ID NO: 74828 - DNA, 60 bp, Artificial
  Synthetic oligonucleotide
caggggcaagccagaagagaaaacaatctggacttccagcagctccattgtgatgtgtgg

SEQ ID NO: 74829 - DNA, 60 bp, Artificial
  Synthetic oligonucleotide
taggtcaggatttgaaatactgagaataaagaatggttggacacagacaagtaaagagca

SEQ ID NO: 74830 - DNA, 60 bp, Artificial
  Synthetic oligonucleotide
cctcttttgagatgagtaatgaaggatcttatttcttcggagacaatgcagaagagtacg

SEQ ID NO: 74831 - DNA, 60 bp, Artificial
  Synthetic oligonucleotide
cctcttttgatacgagtaatgaaggatcttatttcttcggagacaatgcagaagagtacg

SEQ ID NO: 74832 - DNA, 60 bp, Artificial
  Synthetic oligonucleotide
gacatgactccaagcacagagatgtcactgagaggagtgagagttagtaagatgggagta

SEQ ID NO: 74833 - DNA, 59 bp, Artificial
  Synthetic oligonucleotide
gacatgactccaagcacagagatgtcactgaggggagtgagggttagtaaaatgggagt

SEQ ID NO: 74834 - DNA, 60 bp, Artificial
  Synthetic oligonucleotide
ctcctttaatggtggcatacatgttggaaagagaactagttcggaaaaccagattcctac

SEQ ID NO: 74835 - DNA, 60 bp, Artificial
  Synthetic oligonucleotide
tatacagagatgaagcattaaacaaccggttccagatcaaaggtgttgagctgaagtcag

SEQ ID NO: 74836 - DNA, 60 bp, Artificial
  Synthetic oligonucleotide
ggcgagacgagttgagtcagaagtttgaagagatcagatggctcattgctgaatgcagga

SEQ ID NO: 74837 - DNA, 60 bp, Artificial
  Synthetic oligonucleotide
agcggatatgcacaaacagactgtgtcctggaggctatggccttccttgaagaatcccac

SEQ ID NO: 74838 - DNA, 60 bp, Artificial
  Synthetic oligonucleotide
tggaccactacctgaggataatgaaccaagtggatatgcacaaacagactgtgtcctgga

SEQ ID NO: 74839 - DNA, 60 bp, Artificial
  Synthetic oligonucleotide
tgatgtgtggagtagaccatgagattgccgactggtcgtggcacgatggagctattcttc

SEQ ID NO: 74840 - DNA, 60 bp, Artificial
  Synthetic oligonucleotide
gatgtgtggagtagaccatgagattgccgactggtcgtggcacgatggagctattcttcc

SEQ ID NO: 74841 - DNA, 60 bp, Artificial
  Synthetic oligonucleotide
tccttgaagaatcccacccagggatctttgaaaactcgtgtctcgaaacgatggaagttg

SEQ ID NO: 74842 - DNA, 60 bp, Artificial
  Synthetic oligonucleotide
agtctcgcactcgcgagatactgacaaaaaccacagtggaccatatggccataattaaga

SEQ ID NO: 74843 - DNA, 60 bp, Artificial
  Synthetic oligonucleotide
cggaaggagtacctgagtctatgagggaagaatatcggcaggaacagcagaatgctgtgg

SEQ ID NO: 74844 - DNA, 60 bp, Artificial
  Synthetic oligonucleotide
tgggtcaggggccaatcagggaggataagcatctactggacaatagtgaagccgggggat

SEQ ID NO: 74845 - DNA, 52 bp, Artificial
  Synthetic oligonucleotide
gggaggataagcatctactggacaatagtgaagccaggggatgtactagtaa

SEQ ID NO: 74846 - DNA, 60 bp, Artificial
  Synthetic oligonucleotide
tgatagacggctggtatggtttcagacaccagaactctgagggtacagggcaagctgcag

SEQ ID NO: 74847 - DNA, 60 bp, Artificial
  Synthetic oligonucleotide
gacggctggtatggtttcagacaccagaactctgagggtacagggcaagctgcagaccta

SEQ ID NO: 74848 - DNA, 60 bp, Artificial
  Synthetic oligonucleotide
ccttgggtcagaggccaatcagggaggataagcatctactggacaatagtgaagccgggg

SEQ ID NO: 74849 - DNA, 60 bp, Artificial
  Synthetic oligonucleotide
ccttgggtcaggggccaatcagggaggataagcatctactggacaatagtgaagccgggg

SEQ ID NO: 74850 - DNA, 57 bp, Artificial
  Synthetic oligonucleotide
tgggtcaggggccaatcagggaggataagcatctactggacaatagtgaagccgggg

SEQ ID NO: 74851 - DNA, 60 bp, Artificial
  Synthetic oligonucleotide
aatacataatggattccaacacgataacctcgtttcaggtagattgctatctatggcaca

SEQ ID NO: 74852 - DNA, 60 bp, Artificial
  Synthetic oligonucleotide
atacataatggattccaacacgataacctcgtttcaggtagattgctatctatggcacat

SEQ ID NO: 74853 - DNA, 60 bp, Artificial
  Synthetic oligonucleotide
aacaagagcccttgtgcgtactgggatggaccccagaatgtgctctctgatgcaaggatc

SEQ ID NO: 74854 - DNA, 60 bp, Artificial
  Synthetic oligonucleotide
aagagctcttgtgcgtactgggatggaccccagaatgtgctctctgatgcaaggatcaac

SEQ ID NO: 74855 - DNA, 60 bp, Artificial
  Synthetic oligonucleotide
gcaatggtggatcaagtgagagaaagtcggaacccaggaaatgctgaaatcgaagatctc

SEQ ID NO: 74856 - DNA, 60 bp, Artificial
  Synthetic oligonucleotide
gcgtcttggttcaactccttcctcacacatgcactgaaatagttgtggcaatgctactat

SEQ ID NO: 74857 - DNA, 50 bp, Artificial
  Synthetic oligonucleotide
cacatgcactgaaatagttgtggcaatgctactatttgctatccatactg

SEQ ID NO: 74858 - DNA, 60 bp, Artificial
  Synthetic oligonucleotide
catctccaacgacaaaccatttcaaaatgtgaacaaagttacatatggaaaatgccccaa

SEQ ID NO: 74859 - DNA, 60 bp, Artificial
  Synthetic oligonucleotide
catccccaacgacaaaccatttcaaaatgtgaacaaagttacatatggaaaatgccccaa

SEQ ID NO: 74860 - DNA, 60 bp, Artificial
  Synthetic oligonucleotide
gtgcgacatagactaaaggttacagagaatagttttgaacaaataacatttatgcaagcc

SEQ ID NO: 74861 - DNA, 60 bp, Artificial
  Synthetic oligonucleotide
ggatgtcaatccgactctactgttcttaaaggttccagcgcaaaatgccataagcaccac

SEQ ID NO: 74862 - DNA, 60 bp, Artificial
  Synthetic oligonucleotide
aatgcaccagaccatgagggaatacaagcaggagtggatagattctacaggacctgcaag

SEQ ID NO: 74863 - DNA, 60 bp, Artificial
  Synthetic oligonucleotide
ggatttcattcgccatatcatgcttcttaatttgcgttgttctattgggtctcattatgt

SEQ ID NO: 74864 - DNA, 60 bp, Artificial
  Synthetic oligonucleotide
ggatttcattcgccatatcatgcttcttaatttgcgttgttctattgggtttcatcatgt

SEQ ID NO: 74865 - DNA, 60 bp, Artificial
  Synthetic oligonucleotide
ggctttcactgatgaaggagcaattgttggcgaaatctcaccattgccttctcttccagg

SEQ ID NO: 74866 - DNA, 60 bp, Artificial
  Synthetic oligonucleotide
aaagcagggtagataatcactcaccgagtgacatccacatcatggcgtctcaaggcacca

SEQ ID NO: 74867 - DNA, 60 bp, Artificial
  Synthetic oligonucleotide
tgctttgtgttgttttgctggggttcattatgtgggcctgccagagaggcaacattagat

SEQ ID NO: 74868 - DNA, 60 bp, Artificial
  Synthetic oligonucleotide
tgctttgtgttgttttgctggggttcattatgtgggcctgccagagaggcaacattaggt

SEQ ID NO: 74869 - DNA, 60 bp, Artificial
  Synthetic oligonucleotide
gttttgctggggttcattatgtgggcctgccagagaggcaacattaggtgcaacatttgc

SEQ ID NO: 74870 - DNA, 60 bp, Artificial
  Synthetic oligonucleotide
gatgcgaagggttttgcacccttttccaaagacaacggaataagaattggatcgagaggt

SEQ ID NO: 74871 - DNA, 60 bp, Artificial
  Synthetic oligonucleotide
gggttttgcacccttttccaaagacaacggaataagaatcggatcgagaggtcatgtttt

SEQ ID NO: 74872 - DNA, 60 bp, Artificial
  Synthetic oligonucleotide
acagagccattatgtgatgcgaagggttttgcacccttttccaaagacaacggaataaga

SEQ ID NO: 74873 - DNA, 60 bp, Artificial
  Synthetic oligonucleotide
cagtgaaagaccggagcccctatagaactctaatgagtgtagaaatagggcaatcaccca

SEQ ID NO: 74874 - DNA, 60 bp, Artificial
  Synthetic oligonucleotide
aaatttgaaatctcaggaactatgcataggcttgccgaccaaagtctcccaccgaacttc

SEQ ID NO: 74875 - DNA, 60 bp, Artificial
  Synthetic oligonucleotide
catggcccagccaagagcatggaatatgatgctgttgctactacacactcctggatcccc

SEQ ID NO: 74876 - DNA, 60 bp, Artificial
  Synthetic oligonucleotide
ggcccagccaagagcatggaatatgatgctgttgctactacacactcctggatccccaag

SEQ ID NO: 74877 - DNA, 60 bp, Artificial
  Synthetic oligonucleotide
tctgctgacatgagcattggggtaacagtgataaagaacaacatgataaacaatgacctt

SEQ ID NO: 74878 - DNA, 60 bp, Artificial
  Synthetic oligonucleotide
gaccatgagggaatacaagcaggagtggatagattctacaggacctgcaagttagtggga

SEQ ID NO: 74879 - DNA, 60 bp, Artificial
  Synthetic oligonucleotide
acctgaatgacgccacataccaaaggacaagagcccttgtgcgtactgggatggacccca

SEQ ID NO: 74880 - DNA, 60 bp, Artificial
  Synthetic oligonucleotide
caagagccagttggtgtggatggcatgccattctgcagcatttgaggacctgagagtttt

SEQ ID NO: 74881 - DNA, 54 bp, Artificial
  Synthetic oligonucleotide
caagagccagttggtgtggatggcatgccattctgcagcatttgaggacctgag

SEQ ID NO: 74882 - DNA, 60 bp, Artificial
  Synthetic oligonucleotide
gagccagttggtgtggatggcatgccattctgcagcatttgaggacctgagagttttgaa

SEQ ID NO: 74883 - DNA, 60 bp, Artificial
  Synthetic oligonucleotide
cacaagacacagagctctctttcacaatcactggagacaacaccaaatggaatgaaaatc

SEQ ID NO: 74884 - DNA, 60 bp, Artificial
  Synthetic oligonucleotide
aagacatagaactctctttcacaatcactggagacaacaccaaatggaatgaaaatcaga

SEQ ID NO: 74885 - DNA, 60 bp, Artificial
  Synthetic oligonucleotide
aagacacagagctctctttcacaatcactggagacaacaccaaatggaatgaaaatcaga

SEQ ID NO: 74886 - DNA, 60 bp, Artificial
  Synthetic oligonucleotide
ctctctttcacaatcactggagacaacaccaaatggaatgaaaatcagaaccctaggatg

SEQ ID NO: 74887 - DNA, 60 bp, Artificial
  Synthetic oligonucleotide
tagtgaatgcaccgaatcatgagggaatacaagcaggagtagatagattctatagaacct

SEQ ID NO: 74888 - DNA, 60 bp, Artificial
  Synthetic oligonucleotide
gaacggctgcattgagggcaagctttctcaaatgtccaaggacgtaaatgcaaggataga

SEQ ID NO: 74889 - DNA, 60 bp, Artificial
  Synthetic oligonucleotide
aaataaggcctcttctaatagatggcacagcctcattgagccctgggatgatgatgggca

SEQ ID NO: 74890 - DNA, 60 bp, Artificial
  Synthetic oligonucleotide
cagccggctgcaactgcattagctaatactatagaagtcttcagatcgaacggtttgacg

SEQ ID NO: 74891 - DNA, 60 bp, Artificial
  Synthetic oligonucleotide
gccggctgcaactgcattagctaatactatagaagtcttcagatcgaacggtttgacggc

SEQ ID NO: 74892 - DNA, 60 bp, Artificial
  Synthetic oligonucleotide
caagatacgcagaagggtagacataaaccctggtcatgcagacctcagtgccaaagaggc

SEQ ID NO: 74893 - DNA, 53 bp, Artificial
  Synthetic oligonucleotide
aaaagtacacatcaggaagacaagagaagaaccccgcactcaggatgaagtgg

SEQ ID NO: 74894 - DNA, 60 bp, Artificial
  Synthetic oligonucleotide
ttgagcatcaatgaactgagcaatcttgcgaaaggggagaaagctaatgtgctgataggg

SEQ ID NO: 74895 - DNA, 60 bp, Artificial
  Synthetic oligonucleotide
aaggcctcttctaatagacggcactgcatcattgagccctgggatgatgatgggcatgtt

SEQ ID NO: 74896 - DNA, 60 bp, Artificial
  Synthetic oligonucleotide
ggcctcttctaatagacggcactgcatcattgagccctgggatgatgatgggcatgttca

SEQ ID NO: 74897 - DNA, 60 bp, Artificial
  Synthetic oligonucleotide
cctctcttaatagatggaacagcctcattgagccctgggatgatgatgggcatgttcaac

SEQ ID NO: 74898 - DNA, 60 bp, Artificial
  Synthetic oligonucleotide
aagacctctcttaatagatggaacagcctcattgagccctgggatgatgatgggcatgtt

SEQ ID NO: 74899 - DNA, 60 bp, Artificial
  Synthetic oligonucleotide
acagatgtaccaaaagtgctgcaatctattcgagaaattcttccctagcagttcatacag

SEQ ID NO: 74900 - DNA, 60 bp, Artificial
  Synthetic oligonucleotide
atgtatcagaagtgctgcaatctattcgagaaattcttccctagcagttcatacaggaga

SEQ ID NO: 74901 - DNA, 60 bp, Artificial
  Synthetic oligonucleotide
gaagtgctgcaatctattcgagaaattcttccctagcagttcatacaggagaccagttgg

SEQ ID NO: 74902 - DNA, 60 bp, Artificial
  Synthetic oligonucleotide
gctgcaatctattcgagaaattcttccctagcagttcatacaggagaccggttgggattt

SEQ ID NO: 74903 - DNA, 50 bp, Artificial
  Synthetic oligonucleotide
tgcttgaagtggagcaagagataagaactttctcgtttcagcttatttaa

SEQ ID NO: 74904 - DNA, 60 bp, Artificial
  Synthetic oligonucleotide
gcaagccttacaactattgcttgaagtaggacaagagataagaactttctcgtttcagct

SEQ ID NO: 74905 - DNA, 60 bp, Artificial
  Synthetic oligonucleotide
gcaagccttacaactattacttgaagtagaacaagagataagaactttctcgtttcagct

SEQ ID NO: 74906 - DNA, 60 bp, Artificial
  Synthetic oligonucleotide
gggctatacgaagcaattgaggagtgcctgattaatgatccctgggttttgcttaatgcg

SEQ ID NO: 74907 - DNA, 60 bp, Artificial
  Synthetic oligonucleotide
gtcaggggccaatcaggaaggataagcatctactggacaatagtgaagccgggggatgta

SEQ ID NO: 74908 - DNA, 60 bp, Artificial
  Synthetic oligonucleotide
gacctcgagaaatatgttgaagacactaagatagatctatggtcttacaatgcagagctt

SEQ ID NO: 74909 - DNA, 60 bp, Artificial
  Synthetic oligonucleotide
tgggtcaggggccaatcaggaaggataagcatctactggacaatagtgaagccgggggat

SEQ ID NO: 74910 - DNA, 60 bp, Artificial
  Synthetic oligonucleotide
gcttcctcaggaaccctggagttcatcacagaaggattcacatggacaggagtcactcaa

SEQ ID NO: 74911 - DNA, 60 bp, Artificial
  Synthetic oligonucleotide
aggtctctaattgcttcctcaggaaccctggagttcatcacagaaggattcacatggaca

SEQ ID NO: 74912 - DNA, 60 bp, Artificial
  Synthetic oligonucleotide
ccagctcatggtccagccaagagcatggaatatgatgctgttgcaactacacactcttgg

SEQ ID NO: 74913 - DNA, 60 bp, Artificial
  Synthetic oligonucleotide
acatgttcgaaagtaagagcatgaagctacggacacaaataccagcagaaatgctcgcaa

SEQ ID NO: 74914 - DNA, 60 bp, Artificial
  Synthetic oligonucleotide
ggtaatgccagctcatggtccagccaagagcatggaatatgatgctgttgcaactacaca

SEQ ID NO: 74915 - DNA, 60 bp, Artificial
  Synthetic oligonucleotide
cgctacttaactgacatgactcttgatgagatgtcaagagactggttcatgctcatgccc

SEQ ID NO: 74916 - DNA, 60 bp, Artificial
  Synthetic oligonucleotide
acctaactgacatgactcttgaggagatgtcaagagactggttcatgctcatgcccaagc

SEQ ID NO: 74917 - DNA, 60 bp, Artificial
  Synthetic oligonucleotide
cctaactgacatgactcttgaggagatgtcaagagactggttcatgctcatgcccaagca

SEQ ID NO: 74918 - DNA, 60 bp, Artificial
  Synthetic oligonucleotide
caacacgataacctcgtttcaggtagattgctatctatggcacataagaaagctgttcag

SEQ ID NO: 74919 - DNA, 61 bp, Artificial
  Synthetic oligonucleotide
ggacatatgaccattacatatacagagatgaagcattaaacaaccgatttcaaatcaaagg

SEQ ID NO: 74920 - DNA, 60 bp, Artificial
  Synthetic oligonucleotide
gggacatatgaccattacatatacagagatgaagcattaaacaaccgatttcaaatcaaa

SEQ ID NO: 74921 - DNA, 60 bp, Artificial
  Synthetic oligonucleotide
gggacatatgaccattacatatacagagatgaagcattaaacaaccgatttcaaattaaa

SEQ ID NO: 74922 - DNA, 60 bp, Artificial
  Synthetic oligonucleotide
tcttaagagcactcaagcagctatagatcaaatcaatgggaaattaaacagagtgattga

SEQ ID NO: 74923 - DNA, 60 bp, Artificial
  Synthetic oligonucleotide
tagatcaatagttgcctcgtcaggcaccctggagttcattacggagggtttcacttggac

SEQ ID NO: 74924 - DNA, 60 bp, Artificial
  Synthetic oligonucleotide
gatgtcttccaggatgagacatgggatctttttgtggaacgaggtaatgctttcagcaac

SEQ ID NO: 74925 - DNA, 50 bp, Artificial
  Synthetic oligonucleotide
tcacttggacaggagtaactcaaaacggaggaagtggtgcttgcaagaga

SEQ ID NO: 74926 - DNA, 60 bp, Artificial
  Synthetic oligonucleotide
gcctcgtcaggcaccctggagttcattacggagggtttcacttggacaggagtaactcaa

SEQ ID NO: 74927 - DNA, 60 bp, Artificial
  Synthetic oligonucleotide
ctgaattggttgactaaatcagggagtgcataccccttgctgaatgtaactatgcccaac

SEQ ID NO: 74928 - DNA, 60 bp, Artificial
  Synthetic oligonucleotide
cttcagtagactgaattggttgactaaatcagggagtgcataccccttgctgaatgtaac

SEQ ID NO: 74929 - DNA, 60 bp, Artificial
  Synthetic oligonucleotide
gttcaggcgtcagggagagttacagtttccactaaagaaagccagcaaactataatccca

SEQ ID NO: 74930 - DNA, 60 bp, Artificial
  Synthetic oligonucleotide
atctatatgttcaggcgtcagggagagttacagtttccactaaagaaagccagcaaacta

SEQ ID NO: 74931 - DNA, 60 bp, Artificial
  Synthetic oligonucleotide
atctggcagaataagcatatattggacgatagttaaaccgggagatatactggtgattaa

SEQ ID NO: 74932 - DNA, 60 bp, Artificial
  Synthetic oligonucleotide
cagcaaactataatcccaaatattgggtctagaccttgggtaagaggtcaatctggcaga

SEQ ID NO: 74933 - DNA, 60 bp, Artificial
  Synthetic oligonucleotide
tgatgtatatagggacgaggcactaaataatcggtttcagatcaaaggtgttgagctgag

SEQ ID NO: 74934 - DNA, 60 bp, Artificial
  Synthetic oligonucleotide
tggaacttatgatcatgatgtatatagggacgaggcactaaataatcggtttcagatcaa

SEQ ID NO: 74935 - DNA, 60 bp, Artificial
  Synthetic oligonucleotide
cacaaatgcgataactcctgcatggaatcaatcagaaatggaacttatgatcatgatgta

SEQ ID NO: 74936 - DNA, 60 bp, Artificial
  Synthetic oligonucleotide
ttcaagatatatcacaaatgcgataactcctgcatggaatcaatcagaaatggaacttat

SEQ ID NO: 74937 - DNA, 60 bp, Artificial
  Synthetic oligonucleotide
agctacattctctgtctggtttctggccagaacccttcagaaaacaataacaacacagca

SEQ ID NO: 74938 - DNA, 53 bp, Artificial
  Synthetic oligonucleotide
gtttctggccagaacccttcagaaaacaataacaacacagcaacactatgcct

SEQ ID NO: 74939 - DNA, 60 bp, Artificial
  Synthetic oligonucleotide
acaatggtgaagacaatcacagatgaccagattgaagtgactaacgccactgaactagtt

SEQ ID NO: 74940 - DNA, 60 bp, Artificial
  Synthetic oligonucleotide
gacaatcacagatgaccagattgaagtgactaacgccactgaactagttcaaagctcctc

SEQ ID NO: 74941 - DNA, 60 bp, Artificial
  Synthetic oligonucleotide
ctgagggaaaatgccgaagacatgggtaatggttgcttcaagatatatcacaaatgcgat

SEQ ID NO: 74942 - DNA, 60 bp, Artificial
  Synthetic oligonucleotide
agcaaaagcaggggataattctgttaatcatgaagaccatcattgccttaagctacattc

SEQ ID NO: 74943 - DNA, 60 bp, Artificial
  Synthetic oligonucleotide
ggggataattctgttaatcatgaagaccatcattgccttaagctacattctctgtctggt

SEQ ID NO: 74944 - DNA, 60 bp, Artificial
  Synthetic oligonucleotide
gttgaagacacaaaagtggatctttggtcttacaatgcagagcttcttgttgccctggaa

SEQ ID NO: 74945 - DNA, 60 bp, Artificial
  Synthetic oligonucleotide
atggaagggattgcacattgatagatgctctattgggagatcctcactgcgatgtcttcc

SEQ ID NO: 74946 - DNA, 60 bp, Artificial
  Synthetic oligonucleotide
cattgatagatgctctattgggagatcctcactgcgatgtcttccaggatgagacatggg

SEQ ID NO: 74947 - DNA, 60 bp, Artificial
  Synthetic oligonucleotide
tcgagaaatatgttgaagacacaaaagtggatctttggtcttacaatgcagagcttcttg

SEQ ID NO: 74948 - DNA, 60 bp, Artificial
  Synthetic oligonucleotide
ttgggaaaagctcgataatgaagtcgaatgcacccatcgatacttgcatttccgattgca

SEQ ID NO: 74949 - DNA, 60 bp, Artificial
  Synthetic oligonucleotide
ccctttcaaaatgtaaacaaaatcacatatggagcatgccccaaatatatcaaacaaaac

SEQ ID NO: 74950 - DNA, 60 bp, Artificial
  Synthetic oligonucleotide
tggcagaataagcatatattggacgatagttaaaccgggagatatactggtgattaatag

SEQ ID NO: 74951 - DNA, 60 bp, Artificial
  Synthetic oligonucleotide
aatgagaattgggaaaagctcgataatgaagtcgaatgcacccatcgatacttgcatttc

SEQ ID NO: 74952 - DNA, 60 bp, Artificial
  Synthetic oligonucleotide
aaagttggcaacagggatgaggaatgtaccagagaagcagaccagaggtttgttcggtgc

SEQ ID NO: 74953 - DNA, 60 bp, Artificial
  Synthetic oligonucleotide
ggagttctcagaagtggaaggaagaatccaagacctcgagaaatatgttgaagacacaaa

SEQ ID NO: 74954 - DNA, 60 bp, Artificial
  Synthetic oligonucleotide
aacaaaatcacatatggagcatgccccaaatatatcaaacaaaacaccctaaagttggca

SEQ ID NO: 74955 - DNA, 60 bp, Artificial
  Synthetic oligonucleotide
caaacaaaacaccctaaagttggcaacagggatgaggaatgtaccagagaagcagaccag

SEQ ID NO: 74956 - DNA, 60 bp, Artificial
  Synthetic oligonucleotide
atcttaagagcactcaagcagctatagatcaaatcaatgggaaattaaacagagtgattg

SEQ ID NO: 74957 - DNA, 60 bp, Artificial
  Synthetic oligonucleotide
ccatcagattgaaaaggagttctcagaagtggaaggaagaatccaagacctcgagaaata

SEQ ID NO: 74958 - DNA, 52 bp, Artificial
  Synthetic oligonucleotide
tgggaggggatgatagatggctggtatggattcaggcatcagaactctgagg

SEQ ID NO: 74959 - DNA, 54 bp, Artificial
  Synthetic oligonucleotide
atctgttccaccattgaagagctcagacggcaaaaatagtgaatttagcttgtc

SEQ ID NO: 74960 - DNA, 60 bp, Artificial
  Synthetic oligonucleotide
cgctcctcggggttatttcaagatgcgcactgggaaaagctcaataatgagatcagatgc

SEQ ID NO: 74961 - DNA, 60 bp, Artificial
  Synthetic oligonucleotide
ggcaccaaacgatcttacgaacagatggaaactggtggagaacgccagaatgccagtgaa

SEQ ID NO: 74962 - DNA, 60 bp, Artificial
  Synthetic oligonucleotide
gggtgatgccccattccttgaccggcttcgccgagaccagaagtccctaaaaggaagagg

SEQ ID NO: 74963 - DNA, 60 bp, Artificial
  Synthetic oligonucleotide
ctgggtgatgccccattccttgaccggcttcgccgagaccagaagtccctaaaaggaaga

SEQ ID NO: 74964 - DNA, 60 bp, Artificial
  Synthetic oligonucleotide
caggacgttcttccttactcaaggttccctactcaatgacaaacattctaatggcacagt

SEQ ID NO: 74965 - DNA, 60 bp, Artificial
  Synthetic oligonucleotide
gcaggacgttcttccttactcaaggttccctactcaatgacaaacattctaatggcacag

SEQ ID NO: 74966 - DNA, 60 bp, Artificial
  Synthetic oligonucleotide
gctcaccgtgcccagtgagcgaggactgcagcgtagacgctttgtccaaaatgcccttag

SEQ ID NO: 74967 - DNA, 60 bp, Artificial
  Synthetic oligonucleotide
caccgtgcccagtgagcgaggactgcagcgtagacgctttgtccaaaatgcccttagtgg

SEQ ID NO: 74968 - DNA, 60 bp, Artificial
  Synthetic oligonucleotide
cgtgcccagtgagcgaggactgcagcgtagacgctttgtccaaaatgcccttagtggaaa

SEQ ID NO: 74969 - DNA, 60 bp, Artificial
  Synthetic oligonucleotide
cgtgcccagtgagcgaggactgcagcgtagacgctttgtccaaaatgccctgaatgggaa

SEQ ID NO: 74970 - DNA, 60 bp, Artificial
  Synthetic oligonucleotide
acctgaggataatgagccaagtggatatgcacaaacagactgtgtcctggaagcaatggc

SEQ ID NO: 74971 - DNA, 60 bp, Artificial
  Synthetic oligonucleotide
ctttccttgaagaatcccacccagggatctttgaaaactcgtgtcttgaaacgatggaag

SEQ ID NO: 74972 - DNA, 60 bp, Artificial
  Synthetic oligonucleotide
gtgggcctgccaaagaggcaacattaggtgcaacatttgcatttgagtatattagtaatt

SEQ ID NO: 74973 - DNA, 60 bp, Artificial
  Synthetic oligonucleotide
ttatgcaagccttacaactattgcttgaagtggaacaagagataagaactttctcgtttc

SEQ ID NO: 74974 - DNA, 60 bp, Artificial
  Synthetic oligonucleotide
atatgagtaatgaagggtcttatttcttcggagacaatgcagaagagtacgacaattaag

SEQ ID NO: 74975 - DNA, 60 bp, Artificial
  Synthetic oligonucleotide
atcaaatcgaaaaggaattctccgaagtagaagggaggattcaggaccttgagaaatacg

SEQ ID NO: 74976 - DNA, 60 bp, Artificial
  Synthetic oligonucleotide
ttgaaacaaacaaatttgcagcaatatgcactcacttggaggtgtgtttcatgtattcag

SEQ ID NO: 74977 - DNA, 60 bp, Artificial
  Synthetic oligonucleotide
ttgaaacaaacaaatttgcagcaatatgcactcacttggaagtgtgtttcatgtattcag

SEQ ID NO: 74978 - DNA, 60 bp, Artificial
  Synthetic oligonucleotide
tcatagcattgtttccagttatgtgtgttcaggacttgttggagacacacccagaaaaaa

SEQ ID NO: 74979 - DNA, 60 bp, Artificial
  Synthetic oligonucleotide
acataatggattccaacactgtgtcaagtttccaggtagactgctttctttggcatatcc

SEQ ID NO: 74980 - DNA, 60 bp, Artificial
  Synthetic oligonucleotide
gacataatggattccaacactgtgtcaagtttccaggtagactgctttctttggcatatc

SEQ ID NO: 74981 - DNA, 60 bp, Artificial
  Synthetic oligonucleotide
caccgagtgacatccacatcatggcgtctcaaggcaccaaacgatcttatgagcaaatgg

SEQ ID NO: 74982 - DNA, 60 bp, Artificial
  Synthetic oligonucleotide
ggggttcattgtgtgggcctgccaaagaggcaacattaggtgcaacatttgcatttgagt

SEQ ID NO: 74983 - DNA, 60 bp, Artificial
  Synthetic oligonucleotide
ttggaagcaatggccttccttgaggaatcccacccagggatctttgaaaactcgtgtctt

SEQ ID NO: 74984 - DNA, 60 bp, Artificial
  Synthetic oligonucleotide
tgatgtgtggagtagattatgaagttgccgattggtcatggcacgatggagctattcttc

SEQ ID NO: 74985 - DNA, 60 bp, Artificial
  Synthetic oligonucleotide
tgatgtgtggagtagactatgagattgccgattggtcatggcacgatggagctattcttc

SEQ ID NO: 74986 - DNA, 60 bp, Artificial
  Synthetic oligonucleotide
ataattgggcaagctgaaatcagtttcaatggaggccatatagaagaatgctcatgctac

SEQ ID NO: 74987 - DNA, 60 bp, Artificial
  Synthetic oligonucleotide
aataattgggcaaactgaaatcagtttcaatggaggccatatagaagaatgctcatgcta

SEQ ID NO: 74988 - DNA, 60 bp, Artificial
  Synthetic oligonucleotide
gatcagagggcattaaagggaagaggcagcacacttggactcgatctaagagtggccaca

SEQ ID NO: 74989 - DNA, 60 bp, Artificial
  Synthetic oligonucleotide
gaccaaaaggcattaaagggaagaggcagcacacttggactcgatctaagagtggctaca

SEQ ID NO: 74990 - DNA, 60 bp, Artificial
  Synthetic oligonucleotide
agctgttcagcatgagagacatgtgtgatgctccctttgatgatagactcaggagagatc

SEQ ID NO: 74991 - DNA, 60 bp, Artificial
  Synthetic oligonucleotide
cataaggaagctgctcagcatgagagacatgtgtgatgctccctttgatgacagactcag

SEQ ID NO: 74992 - DNA, 60 bp, Artificial
  Synthetic oligonucleotide
cataagaaagctactcagcatgagagacatgtgtgatgctccctttgatgacaggctcag

SEQ ID NO: 74993 - DNA, 60 bp, Artificial
  Synthetic oligonucleotide
gctatttatggcacataagaaagctgctcagcatgagagacatgtgtgatgctccctttg

SEQ ID NO: 74994 - DNA, 60 bp, Artificial
  Synthetic oligonucleotide
tatggcacataagaaagctgttcagcatgagagacatgtgtgatgctccctttgatgata

SEQ ID NO: 74995 - DNA, 60 bp, Artificial
  Synthetic oligonucleotide
gaaagctgctcagcatgagagacatgtgtgatgctccctttgatgacagactcagaagag

SEQ ID NO: 74996 - DNA, 60 bp, Artificial
  Synthetic oligonucleotide
tctatggcacataagaaagctgctcagcatgagagacatgtgtgatgctccctttgatga

SEQ ID NO: 74997 - DNA, 60 bp, Artificial
  Synthetic oligonucleotide
gctgctcagcatgagagacatgtgtgatgctccctttgatgacagactcagaagagacca

SEQ ID NO: 74998 - DNA, 60 bp, Artificial
  Synthetic oligonucleotide
cctttgatgacagactcagaagagatcaaaaggcattaaagggaagaggcagcacacttg

SEQ ID NO: 74999 - DNA, 60 bp, Artificial
  Synthetic oligonucleotide
acaggctcagaagagatcaaaaggcattaaagggaagaggcagcacacttggactcgacc

SEQ ID NO: 75000 - DNA, 60 bp, Artificial
  Synthetic oligonucleotide
cagcatgagagacatgtgtgatgctccctttgatgacaggctcagaagagatcaaaaggc

SEQ ID NO: 75001 - DNA, 60 bp, Artificial
  Synthetic oligonucleotide
cataagaaagctgctcagcatgagagacatgtgtgatgctccctttgatgacagactcag

SEQ ID NO: 75002 - DNA, 60 bp, Artificial
  Synthetic oligonucleotide
acagactcagaagagatcaaaaggcattaaagggaagaggcagcacacttggactcgacc

SEQ ID NO: 75003 - DNA, 60 bp, Artificial
  Synthetic oligonucleotide
caggagagatcaaaaggcattaaagggaagaggcagcacacttgggctcgacctgcgagt

SEQ ID NO: 75004 - DNA, 60 bp, Artificial
  Synthetic oligonucleotide
atggaagattttgtgcgacaatgcttcaacccgatgattgtcgagcttgcagaaaaagca

SEQ ID NO: 75005 - DNA, 57 bp, Artificial
  Synthetic oligonucleotide
aatggaagattttgtgcgacaatgcttcaacccgatgattgtcgaacttgcagaaaa

SEQ ID NO: 75006 - DNA, 52 bp, Artificial
  Synthetic oligonucleotide
aagattttgtgcgacaatgcttcaacccgatgattgtcgaacttgcagaaaa

SEQ ID NO: 75007 - DNA, 60 bp, Artificial
  Synthetic oligonucleotide
atttggaagagcatcccagtgctgggaaagaccctaagaaaactgggggtccaatctaca

SEQ ID NO: 75008 - DNA, 60 bp, Artificial
  Synthetic oligonucleotide
atctggaagagcatcccagtgctgggaaagaccctaagaagactgggggtccaatctaca

SEQ ID NO: 75009 - DNA, 60 bp, Artificial
  Synthetic oligonucleotide
aagaatgatggaaggtgcaaaaccagaagaagtgtcgttccgggggaggggagttttcga

SEQ ID NO: 75010 - DNA, 60 bp, Artificial
  Synthetic oligonucleotide
tgatggaaggtgcaaaaccagaagaagtgtctttccgtgggcggggagttttcgagctct

SEQ ID NO: 75011 - DNA, 60 bp, Artificial
  Synthetic oligonucleotide
agcattgagcatcaatgaactgagcaatcttgcgaaaggggagaaagctaatgtgctgat

SEQ ID NO: 75012 - DNA, 60 bp, Artificial
  Synthetic oligonucleotide
ctcgaggctctcatggaatggctaaagacaagaccaatcctgtcacctctgactaaaggg

SEQ ID NO: 75013 - DNA, 60 bp, Artificial
  Synthetic oligonucleotide
gaacctggaaccttcgatcttgggggattatatgaagcaattgaggagtgcctgattaac

SEQ ID NO: 75014 - DNA, 60 bp, Artificial
  Synthetic oligonucleotide
tccagatttgtcttacagagtcggatacttatgtgcaggtctccccagtgacactccaag

SEQ ID NO: 75015 - DNA, 60 bp, Artificial
  Synthetic oligonucleotide
acctaagagtggctacaatggaagggaaaaagatcgttgaggacattctgaagagtgaaa

SEQ ID NO: 75016 - DNA, 55 bp, Artificial
  Synthetic oligonucleotide
aaaagatcgttgaggacattctgaagagtgaaacagatgagaacctcaaaatagc

SEQ ID NO: 75017 - DNA, 60 bp, Artificial
  Synthetic oligonucleotide
gtcctgctcctcggtatattactgatatgagcatagaggagataagccgagaatggtata

SEQ ID NO: 75018 - DNA, 60 bp, Artificial
  Synthetic oligonucleotide
gctcctcggtatattactgatatgagcatagaggagataagccgagaatggtatatgctg

SEQ ID NO: 75019 - DNA, 55 bp, Artificial
  Synthetic oligonucleotide
tacattaccgatatgagcatagaggagataagccgagaatggtatatgctgatgc

SEQ ID NO: 75020 - DNA, 60 bp, Artificial
  Synthetic oligonucleotide
agtggccacaatggaagggaaaaagatcgttgaggacattctgaagagtgaaacagatga

SEQ ID NO: 75021 - DNA, 60 bp, Artificial
  Synthetic oligonucleotide
acttgaagttgagagtgagataaggactttctcttttcagcttatttaatactaaaaaac

SEQ ID NO: 75022 - DNA, 60 bp, Artificial
  Synthetic oligonucleotide
ggactcgatctaagagtggctacaatggaagggaaaaagatcgttgaggacattctgaag

SEQ ID NO: 75023 - DNA, 53 bp, Artificial
  Synthetic oligonucleotide
atgcggaatgtacctgagaaacagaccaggggtctgttcggtgcaatagcagg

SEQ ID NO: 75024 - DNA, 60 bp, Artificial
  Synthetic oligonucleotide
tagaatctctgaaactctacagagattcgcttggagaagcagtcatgagaatgggagacc

SEQ ID NO: 75025 - DNA, 60 bp, Artificial
  Synthetic oligonucleotide
tagagtctctgaaactctacagagattcgcttggagaagcagtcatgagaatgggagacc

SEQ ID NO: 75026 - DNA, 60 bp, Artificial
  Synthetic oligonucleotide
gttcgagtctctgaaactctacagagattcgcttggagaaacagtaatgaggatgggaga

SEQ ID NO: 75027 - DNA, 60 bp, Artificial
  Synthetic oligonucleotide
ccaacactgtgtcaagctttcaggtagactgttttctttggcatgtccgcaaacgatttg

SEQ ID NO: 75028 - DNA, 60 bp, Artificial
  Synthetic oligonucleotide
atggattccaacactgtgtcaagctttcaggtagactgttttctttggcatgtccgcaaa

SEQ ID NO: 75029 - DNA, 60 bp, Artificial
  Synthetic oligonucleotide
ccaacactgtgtcaagctttcaggtagactgttttctttggcatgtccgcaaacgattcg

SEQ ID NO: 75030 - DNA, 60 bp, Artificial
  Synthetic oligonucleotide
tggattccaacactgtgtcaagctttcaggtagactgttttctttggcatgtccgcaaac

SEQ ID NO: 75031 - DNA, 60 bp, Artificial
  Synthetic oligonucleotide
ctaatgtgctaattgggcaaggagacgtagtgttggtaatgaaacggaaacgggactcta

SEQ ID NO: 75032 - DNA, 60 bp, Artificial
  Synthetic oligonucleotide
cctgattaacgatccctgggttttgcttaatgcatcttggttcaactccttcctcacaca

SEQ ID NO: 75033 - DNA, 60 bp, Artificial
  Synthetic oligonucleotide
ctgggttttgcttaatgcatcttggttcaactccttcctcatacatgcactgaaatagtt

SEQ ID NO: 75034 - DNA, 60 bp, Artificial
  Synthetic oligonucleotide
ccgagaccagaagtctctaagaggaagaggcagcactcttggtctggacatcgaaacagc

SEQ ID NO: 75035 - DNA, 50 bp, Artificial
  Synthetic oligonucleotide
aaaaggggatcagccgatagtttctttagccgactgaattggctaacaaa

SEQ ID NO: 75036 - DNA, 52 bp, Artificial
  Synthetic oligonucleotide
gcaaaaggggatcagccgatagtttctttagccgactgaattggctaacaaa

SEQ ID NO: 75037 - DNA, 60 bp, Artificial
  Synthetic oligonucleotide
cccatatgacatccctgactatgcatcgctccgatccattgtagcatcctcaggaacatt

SEQ ID NO: 75038 - DNA, 60 bp, Artificial
  Synthetic oligonucleotide
cccatatgacatccctgactatgcatcgctccggtccattgtagcatcctcaggaacatt

SEQ ID NO: 75039 - DNA, 60 bp, Artificial
  Synthetic oligonucleotide
cccatatgacatccctgactatgcatcgctccgatccattgtagcatcctcaggaacagt

SEQ ID NO: 75040 - DNA, 60 bp, Artificial
  Synthetic oligonucleotide
cccatatgacatccctgactatgcatcgctccggtctattgtggcatcttcaggaacatt

SEQ ID NO: 75041 - DNA, 60 bp, Artificial
  Synthetic oligonucleotide
ctacccatatgacatccctgactatgcatcgctccggtctattgtggcatcttcaggaac

SEQ ID NO: 75042 - DNA, 60 bp, Artificial
  Synthetic oligonucleotide
ctacccatatgacatccctgactatgcatcgctccggtccattgtagcatcctcaggaac

SEQ ID NO: 75043 - DNA, 60 bp, Artificial
  Synthetic oligonucleotide
gctacccatatgacatccctgactatgcatcgctccggtctattgtggcatcttcaggaa

SEQ ID NO: 75044 - DNA, 60 bp, Artificial
  Synthetic oligonucleotide
ttgctacccatatgacatccctgactatgcatcgctccggtccattgtagcatcctcagg

SEQ ID NO: 75045 - DNA, 60 bp, Artificial
  Synthetic oligonucleotide
tcaagtgatcctctcgttgttgcagcaagcatcattgggatcttgcacttgatattgtgg

SEQ ID NO: 75046 - DNA, 60 bp, Artificial
  Synthetic oligonucleotide
tgttataagggaaccatttgtttcttgctcgccaacagagtgcaggacgttcttccttac

SEQ ID NO: 75047 - DNA, 60 bp, Artificial
  Synthetic oligonucleotide
agggaaccatttgtttcttgctcgccaacagagtgcaggacgttcttccttactcaaggt

SEQ ID NO: 75048 - DNA, 60 bp, Artificial
  Synthetic oligonucleotide
ttataagggaaccatttgtttcttgctcgccaacagagtgcaggacgttcttccttactc

SEQ ID NO: 75049 - DNA, 60 bp, Artificial
  Synthetic oligonucleotide
tcataagggaaccatttgtttcttgctcgccaacagagtgcaggacgttcttccttactc

SEQ ID NO: 75050 - DNA, 60 bp, Artificial
  Synthetic oligonucleotide
ttagttcagagctcctcaacggggaaaatatgcaacaatccccatagaatccttgatgga

SEQ ID NO: 75051 - DNA, 60 bp, Artificial
  Synthetic oligonucleotide
acattcccttatactggagatcctccatacagccatggaacaggaacagggtacaccatg

SEQ ID NO: 75052 - DNA, 60 bp, Artificial
  Synthetic oligonucleotide
caacattcccttatactggagatcctccatacagccatggaacaggaacagggtacacca

SEQ ID NO: 75053 - DNA, 60 bp, Artificial
  Synthetic oligonucleotide
caacgcacttccaaagaaaaaggagggtaagggacaacatgaccaagaaaatggtcacgc

SEQ ID NO: 75054 - DNA, 60 bp, Artificial
  Synthetic oligonucleotide
tcaatggaggccatatagaagaatgctcatgctaccccaatgaagggaaagtggagtgcg

SEQ ID NO: 75055 - DNA, 60 bp, Artificial
  Synthetic oligonucleotide
tcagcttcaatggaggccatatagaagaatgctcatgctaccccaatgaagggaaagtgg

SEQ ID NO: 75056 - DNA, 60 bp, Artificial
  Synthetic oligonucleotide
gaaatcagtttcaatggaggccatatagaagaatgctcatgctaccccaatgaaggtaaa

SEQ ID NO: 75057 - DNA, 60 bp, Artificial
  Synthetic oligonucleotide
taaggtcactttcaagctggatacagaatgagttcaacaaggcctgtgagctaactgatt

SEQ ID NO: 75058 - DNA, 60 bp, Artificial
  Synthetic oligonucleotide
ataaagggaagatctcatttaaggaatgacacagacgtggtaaattttgtgagcatggag

SEQ ID NO: 75059 - DNA, 60 bp, Artificial
  Synthetic oligonucleotide
atgataagcaagtgcagaactacagagggaaggcgaaaaaccaatttatatggattcatc

SEQ ID NO: 75060 - DNA, 60 bp, Artificial
  Synthetic oligonucleotide
caggaagacaagagaagaaccccgcgctcaggatgaaatggatgatggcaatgaaatatc

SEQ ID NO: 75061 - DNA, 60 bp, Artificial
  Synthetic oligonucleotide
atgccaaagcagtagcagtggtgcattatgggggaattcctactgatgtagtcaattcct

SEQ ID NO: 75062 - DNA, 60 bp, Artificial
  Synthetic oligonucleotide
atgccaaagcagtagcagtggtgcattatgggggaattcctactgatgtaatcaattcct

SEQ ID NO: 75063 - DNA, 60 bp, Artificial
  Synthetic oligonucleotide
caaaagcatggaatatgacgctgttgcaactacacactcctggattcccaagaggaaccg

SEQ ID NO: 75064 - DNA, 60 bp, Artificial
  Synthetic oligonucleotide
ggaacagtcattagggaatacaatgaaacagtaaggattgagaaggtaacacaatggcac

SEQ ID NO: 75065 - DNA, 60 bp, Artificial
  Synthetic oligonucleotide
gagacagtcattagggaatacaatgaaacagtaaggatagagaaggtaactcaatggcac

SEQ ID NO: 75066 - DNA, 60 bp, Artificial
  Synthetic oligonucleotide
gttgcaatgaaacagtcattagggaatacaatgaaacagtaaggattgagaaggtaacac

SEQ ID NO: 75067 - DNA, 60 bp, Artificial
  Synthetic oligonucleotide
gaaacagtcattagggaatacaatgaaacagtaaggattgagaaggtaacacaatggcac

SEQ ID NO: 75068 - DNA, 60 bp, Artificial
  Synthetic oligonucleotide
tgggagttgcaatgaaacagtcattagggaatacaatgaaacagtaaggattgagaaggt

SEQ ID NO: 75069 - DNA, 60 bp, Artificial
  Synthetic oligonucleotide
tgagagttgcaatgaaacagtcattagggaatacaatgaaacagtaaggattgagaaggt

SEQ ID NO: 75070 - DNA, 60 bp, Artificial
  Synthetic oligonucleotide
tatacagagacgaagcattgaacaaccggttccagatcaaaggtgttgagctgaagtcag

SEQ ID NO: 75071 - DNA, 60 bp, Artificial
  Synthetic oligonucleotide
aacaaccggttccagatcaaaggtgttgagctaaaatctggatacaaagactggatcctg

SEQ ID NO: 75072 - DNA, 60 bp, Artificial
  Synthetic oligonucleotide
tgaacaaccggttccagatcaaaggtgttgagctaaaatctggatacaaagactggatcc

SEQ ID NO: 75073 - DNA, 60 bp, Artificial
  Synthetic oligonucleotide
tattggagatgtgccacagcacacagattggagggataaggatggtagatattcttcggc

SEQ ID NO: 75074 - DNA, 60 bp, Artificial
  Synthetic oligonucleotide
gcagacccactagcatctctattggagatgtgccacagcacacagattggtgggataagg

SEQ ID NO: 75075 - DNA, 60 bp, Artificial
  Synthetic oligonucleotide
tacgagtgcacgaggggtatgaagagttcacaatggttgggagaagagcaacagctatcc

SEQ ID NO: 75076 - DNA, 60 bp, Artificial
  Synthetic oligonucleotide
agcaacggtatcagcagacccactagcatctctattggagatgtgccacagcacacagat

SEQ ID NO: 75077 - DNA, 60 bp, Artificial
  Synthetic oligonucleotide
agttaagataagacggagagttgacataaaccctggccacgcagacctcagtgccaagga

SEQ ID NO: 75078 - DNA, 60 bp, Artificial
  Synthetic oligonucleotide
agcaacggtatcagcagacccactagcgtctctattggagatgtgccacagcacacagat

SEQ ID NO: 75079 - DNA, 60 bp, Artificial
  Synthetic oligonucleotide
gtatcagcagatccattagcatctctattggagatgtgccacagcacacagattggtgga

SEQ ID NO: 75080 - DNA, 60 bp, Artificial
  Synthetic oligonucleotide
ggtatcagcagacccactagcgtctctattggagatgtgccacagcacacagattggtgg

SEQ ID NO: 75081 - DNA, 60 bp, Artificial
  Synthetic oligonucleotide
tgacaatgcttgcatagagtcaatcagaaatgggacttatgatcatgatatatacagaga

SEQ ID NO: 75082 - DNA, 60 bp, Artificial
  Synthetic oligonucleotide
aagacctcgagaaatacgttgaagacactaaaatagatctctggtcttacaatgcggagc

SEQ ID NO: 75083 - DNA, 60 bp, Artificial
  Synthetic oligonucleotide
ccaagatgaaacatgggaccttttcatagaacgcagcaatgctttcagcaattgttaccc

SEQ ID NO: 75084 - DNA, 60 bp, Artificial
  Synthetic oligonucleotide
aatgctttcagcaattgttacccttatgatgtgccagatcatgcctcccttaggtcacta

SEQ ID NO: 75085 - DNA, 60 bp, Artificial
  Synthetic oligonucleotide
tgttacccttatgatgtgccagatcatgcctcccttaggtcactagttgcctcgtcaggc

SEQ ID NO: 75086 - DNA, 60 bp, Artificial
  Synthetic oligonucleotide
taggtcactagttgcctcgtcaggcactctggagtttatcactgagggtttcacttgggc

SEQ ID NO: 75087 - DNA, 60 bp, Artificial
  Synthetic oligonucleotide
taaactggttgaccaaatcaggaagcacatacccagtgctgaacgtgactatgccaaaca

SEQ ID NO: 75088 - DNA, 60 bp, Artificial
  Synthetic oligonucleotide
caggttttatagaaaatggatgggagggaatgatagacggttggtacgggttcagacacc

SEQ ID NO: 75089 - DNA, 60 bp, Artificial
  Synthetic oligonucleotide
atgacaattttgacaagctatacatttggggggttcaccacccgagcacgaaccaagaac

SEQ ID NO: 75090 - DNA, 60 bp, Artificial
  Synthetic oligonucleotide
ggaagtggaggggaggattcaagacctcgagaaatacgttgaagacactaaaatagatct

SEQ ID NO: 75091 - DNA, 60 bp, Artificial
  Synthetic oligonucleotide
gactggtcatggcacgatggagctattcttccctttgacatcgataagatgtaatttacg

SEQ ID NO: 75092 - DNA, 60 bp, Artificial
  Synthetic oligonucleotide
gtgccggatcatgcctcccttaggtcactagttgcctcatccggcacactggagtttaac

SEQ ID NO: 75093 - DNA, 60 bp, Artificial
  Synthetic oligonucleotide
gagaagaagaagtgcttacaggcaatctccaaacattgaaaataagagtgcatgaggggt

SEQ ID NO: 75094 - DNA, 60 bp, Artificial
  Synthetic oligonucleotide
ttgaacaaataacatttatgcaagccttacaactattgcttgaagtggaacaagagataa

SEQ ID NO: 75095 - DNA, 60 bp, Artificial
  Synthetic oligonucleotide
ccagttggaatttccagcatggtggaggccatggtgtctagggcccggattgacgcacga

SEQ ID NO: 75096 - DNA, 60 bp, Artificial
  Synthetic oligonucleotide
ccagactattcaccataagacaagaaatggccagtagaggtctctgggattcctttcgtc

SEQ ID NO: 75097 - DNA, 60 bp, Artificial
  Synthetic oligonucleotide
ccaggctattcaccataagacaagaaatggccagtaggggtctatgggattcctttcgtc

SEQ ID NO: 75098 - DNA, 60 bp, Artificial
  Synthetic oligonucleotide
catggtggaggccatggtgtctagggcccgaattgatgcgcggattgacttcgagtctgg

SEQ ID NO: 75099 - DNA, 60 bp, Artificial
  Synthetic oligonucleotide
catggtggaggccatggtgtctagggcccgaatcgatgcgcgaattgacttcgagtctgg

SEQ ID NO: 75100 - DNA, 60 bp, Artificial
  Synthetic oligonucleotide
tgtcacctctgaccaaagggattttaggatttgtgttcacgctcaccgtgcccagtgagc

SEQ ID NO: 75101 - DNA, 60 bp, Artificial
  Synthetic oligonucleotide
tgtcacctttgactaaggggattttaggatttgtgttcacgctcaccgtgcccagtgagc

SEQ ID NO: 75102 - DNA, 60 bp, Artificial
  Synthetic oligonucleotide
gtgaatgcacctaaccatgagggaatacaagcaggagtggataggttctataggacttgc

SEQ ID NO: 75103 - DNA, 60 bp, Artificial
  Synthetic oligonucleotide
cgcatgtatagagtcaatcaggaacgggacctatgatcatgacatatacagggatgaagc

SEQ ID NO: 75104 - DNA, 60 bp, Artificial
  Synthetic oligonucleotide
tgacaacgcatgtatagagtcaatcaggaacgggacctatgatcatgacatatacaggga

SEQ ID NO: 75105 - DNA, 60 bp, Artificial
  Synthetic oligonucleotide
ggcgtcaagcgaataatggagaagacgcaactgctggtctcactcatttgatgatctggc

SEQ ID NO: 75106 - DNA, 60 bp, Artificial
  Synthetic oligonucleotide
ggcgtcaagcgaataatggagaagacgcaaccgctggtctaacccacttgatgatctggc

SEQ ID NO: 75107 - DNA, 60 bp, Artificial
  Synthetic oligonucleotide
ttggcgtcaagcgaataatggagaagacgcaactgctggtctcactcatttgatgatctg

SEQ ID NO: 75108 - DNA, 60 bp, Artificial
  Synthetic oligonucleotide
gaatttggcgtcaagcgaataatggagaagacgcaactgctggtctcacccatttgatga

SEQ ID NO: 75109 - DNA, 60 bp, Artificial
  Synthetic oligonucleotide
gaaggatttggcgtcaagcgaataatggagaagacgcaactgctggtctcacccatttga

SEQ ID NO: 75110 - DNA, 60 bp, Artificial
  Synthetic oligonucleotide
agcccagtggatatgcacaaacagactgtgtccttgaagcaatggctttccttgaagagt

SEQ ID NO: 75111 - DNA, 60 bp, Artificial
  Synthetic oligonucleotide
ccttactcaaggttccctactcaatgacaaacattctaatggcacagtgaaagaccggag

SEQ ID NO: 75112 - DNA, 60 bp, Artificial
  Synthetic oligonucleotide
tgttcacgctcaccgtgcccagtgagcgaggactgcagcgtagacgttttgtccaaaatg

SEQ ID NO: 75113 - DNA, 53 bp, Artificial
  Synthetic oligonucleotide
ggggattatatgaagcaattgaggagtgcctgattaacgatccctgggttttg

SEQ ID NO: 75114 - DNA, 55 bp, Artificial
  Synthetic oligonucleotide
caagctgaaatcagtttcaatggaggccatatagaagaatgctcatgctacccca

SEQ ID NO: 75115 - DNA, 60 bp, Artificial
  Synthetic oligonucleotide
aaactgaaatcagcttcaatggaggccatatagaagaatgctcatgctaccccaatgaag

SEQ ID NO: 75116 - DNA, 60 bp, Artificial
  Synthetic oligonucleotide
ggcaagctgaaatcagtttcaatggaggccatatagaagaatgctcatgctaccccaatg

SEQ ID NO: 75117 - DNA, 60 bp, Artificial
  Synthetic oligonucleotide
gggcaagctgaaatcagtttcaatggaggccatatagaagaatgctcatgctaccccaat

SEQ ID NO: 75118 - DNA, 60 bp, Artificial
  Synthetic oligonucleotide
caagctgaaatcagcttcaatggaggccatatagaagaatgctcatgctaccccaatgaa

SEQ ID NO: 75119 - DNA, 60 bp, Artificial
  Synthetic oligonucleotide
ccggaaacaagttgtagaccaagaactgagtgatgccccattcctcgatcggcttcgccg

SEQ ID NO: 75120 - DNA, 60 bp, Artificial
  Synthetic oligonucleotide
actctacagagattcgcttggagaagcagtaatgaggatgggagacctccactccctgca

SEQ ID NO: 75121 - DNA, 60 bp, Artificial
  Synthetic oligonucleotide
ccgaggtagaagggaggattcaggaccttgagaaatacgttgaagacacaaaagtagatc

SEQ ID NO: 75122 - DNA, 55 bp, Artificial
  Synthetic oligonucleotide
ctctgaagtagaagggaggattcaggaccttgagaaatacgttgaagacacaaaa

SEQ ID NO: 75123 - DNA, 60 bp, Artificial
  Synthetic oligonucleotide
ctctgaagtagaagggaggattcaggaccttgagaaatacgttgaagacacaaaaataga

SEQ ID NO: 75124 - DNA, 60 bp, Artificial
  Synthetic oligonucleotide
aaacaagaagacaactgagggaaaatgccgaagacatgggtaatggttgcttcaagatat

SEQ ID NO: 75125 - DNA, 60 bp, Artificial
  Synthetic oligonucleotide
ggagtagaccatgagattgccgactggtcgtggcacgatggagctattcttccctttgac

SEQ ID NO: 75126 - DNA, 60 bp, Artificial
  Synthetic oligonucleotide
ttgacttaacagatgcagaaatgaataaattattcgagaagactagacgccagttaagag

SEQ ID NO: 75127 - DNA, 60 bp, Artificial
  Synthetic oligonucleotide
cgggattcatagaaaacggctgggaaggaatggttgatgggtggtatggattccgatatc

SEQ ID NO: 75128 - DNA, 60 bp, Artificial
  Synthetic oligonucleotide
acaattgacttaacagatgcagaaatgaataaattattcgagaagactagacgccagtta

SEQ ID NO: 75129 - DNA, 60 bp, Artificial
  Synthetic oligonucleotide
atagcgggattcatagaaaacggctgggaaggaatggttgatgggtggtatggattccga

SEQ ID NO: 75130 - DNA, 51 bp, Artificial
  Synthetic oligonucleotide
aaatatacagagattcgcttggggagtccgtgatgagaatgggggacctcc

SEQ ID NO: 75131 - DNA, 53 bp, Artificial
  Synthetic oligonucleotide
gagcactcttgaactgagaagcgggtactgggccataaggaccaggagtgggg

SEQ ID NO: 75132 - DNA, 60 bp, Artificial
  Synthetic oligonucleotide
gttttgctggggttcattatgtgggcctgccagagaggcaacattagatgcaacatttgc

SEQ ID NO: 75133 - DNA, 56 bp, Artificial
  Synthetic oligonucleotide
gactatgaagggagactgattcagaacagcataacaatagagagaatggttctctc

SEQ ID NO: 75134 - DNA, 60 bp, Artificial
  Synthetic oligonucleotide
gactatgaagggagactgattcagaacagcataacaatagagagaatggttctctctgca

SEQ ID NO: 75135 - DNA, 60 bp, Artificial
  Synthetic oligonucleotide
tgaggagcagatactgggctataaggaccagaagcggagggaacactaaccagcagagag

SEQ ID NO: 75136 - DNA, 60 bp, Artificial
  Synthetic oligonucleotide
attgaggagcagatactgggctataaggaccagaagcggagggaacactaaccagcagag

SEQ ID NO: 75137 - DNA, 60 bp, Artificial
  Synthetic oligonucleotide
aattgacttaacagatgcagaaatgaataaattatttgagaagactagacgccagttaag

SEQ ID NO: 75138 - DNA, 60 bp, Artificial
  Synthetic oligonucleotide
acaattgacttaacagatgcagaaatgaataaattatttgagaagactagacgccagtta

SEQ ID NO: 75139 - DNA, 60 bp, Artificial
  Synthetic oligonucleotide
ttgacttaacagatgcagaaatgaataaattattcgagaggactaggcgccagttaagag

SEQ ID NO: 75140 - DNA, 60 bp, Artificial
  Synthetic oligonucleotide
gaacggctgcattgagggcaagctttctcaaatgtcaaaagaagtgaatgccaaaattga

SEQ ID NO: 75141 - DNA, 60 bp, Artificial
  Synthetic oligonucleotide
gaacggctgcattgagggcaagctttctcaaatgtcaaaagaagtgaatgccagaattga

SEQ ID NO: 75142 - DNA, 60 bp, Artificial
  Synthetic oligonucleotide
gaacggctgcattgagggcaagctttctcaaatgtcaaaagaagtgaacgcacgaattga

SEQ ID NO: 75143 - DNA, 60 bp, Artificial
  Synthetic oligonucleotide
cggctgcattgagggcaagctttctcaaatgtcaaaagaagtgaatgccaaaattgagcc

SEQ ID NO: 75144 - DNA, 60 bp, Artificial
  Synthetic oligonucleotide
aacggctgcattgagggcaagctttctcaaatgtcaaaagaagtgaacgccagaattgag

SEQ ID NO: 75145 - DNA, 60 bp, Artificial
  Synthetic oligonucleotide
cggctgcattgagggcaagctttctcaaatgtcaaaagaagtgaacgcacgaattgagcc

SEQ ID NO: 75146 - DNA, 60 bp, Artificial
  Synthetic oligonucleotide
ggctgcattgagggcaagctttctcaaatgtccaaagaagtgaatgcaagaattgagccc

SEQ ID NO: 75147 - DNA, 60 bp, Artificial
  Synthetic oligonucleotide
ggctgcattgagggcaagctttctcaaatgtcaaaagaagtgaatgccagaattgaaccg

SEQ ID NO: 75148 - DNA, 60 bp, Artificial
  Synthetic oligonucleotide
ggaagagcatcccagtgctgggaaagaccccaagaagactggaggtccaatctacaggag

SEQ ID NO: 75149 - DNA, 60 bp, Artificial
  Synthetic oligonucleotide
ccaaacattgaaaataagagtgcatgaggggtatgaggaattcacaatggttgggcggag

SEQ ID NO: 75150 - DNA, 60 bp, Artificial
  Synthetic oligonucleotide
acatccttaggcaaaacccaacagaggaacaagccgtggatatatgcaaggcagcgatgg

SEQ ID NO: 75151 - DNA, 60 bp, Artificial
  Synthetic oligonucleotide
tactcaaggttccctactcaatgacaaacattctaatggcacagtgaaagaccggagccc

SEQ ID NO: 75152 - DNA, 60 bp, Artificial
  Synthetic oligonucleotide
gagcattggagtaacagtggtaaagaacaacatgataaacaatgaccttggaccagcaac

SEQ ID NO: 75153 - DNA, 60 bp, Artificial
  Synthetic oligonucleotide
cagtggtaaagaacaacatgataaacaatgaccttggaccagcaacagcccagatggctc

SEQ ID NO: 75154 - DNA, 60 bp, Artificial
  Synthetic oligonucleotide
gagaagctgatactaaaatactattcattgaggaggggaaaatcgttcatactagcacat

SEQ ID NO: 75155 - DNA, 60 bp, Artificial
  Synthetic oligonucleotide
ggagtagaccatgagattgccgactggtcatggcacgatggagctattcttccctttgac

SEQ ID NO: 75156 - DNA, 60 bp, Artificial
  Synthetic oligonucleotide
ccaagtggatatgcacaaacagactgtgtcctggaggctatggccttccttgaagaatcc

SEQ ID NO: 75157 - DNA, 60 bp, Artificial
  Synthetic oligonucleotide
tattccaagatgaaacctgggacctttatgtggaacgtagcagcgccttcagcaactgct

SEQ ID NO: 75158 - DNA, 60 bp, Artificial
  Synthetic oligonucleotide
ccagagaacaacaacagcactgcaacactgtgcttggggcatcatgcggtaccgaatggg

SEQ ID NO: 75159 - DNA, 60 bp, Artificial
  Synthetic oligonucleotide
caagatgaaacctgggacctttatgtggaacgtagcagcgccttcagcaactgctatccc

SEQ ID NO: 75160 - DNA, 60 bp, Artificial
  Synthetic oligonucleotide
ctggacaggagtcactcaaaatggaggaagcaatgcctgcaaaagagggcctgctagtgg

SEQ ID NO: 75161 - DNA, 60 bp, Artificial
  Synthetic oligonucleotide
ggacaggagtcactcaaaatggaggaagcaatgcctgcaaaagagggcctgctagtggtt

SEQ ID NO: 75162 - DNA, 60 bp, Artificial
  Synthetic oligonucleotide
tgatagacggctggtatggtttcagacaccagaactctgagggtacaggacaagctgcag

SEQ ID NO: 75163 - DNA, 60 bp, Artificial
  Synthetic oligonucleotide
tggtagacggctggtatggtttcagacaccagaactctgagggtacaggacaagctgcag

SEQ ID NO: 75164 - DNA, 60 bp, Artificial
  Synthetic oligonucleotide
gacggctggtatggtttcagacaccagaactctgagggtacaggacaagctgcagaccta

SEQ ID NO: 75165 - DNA, 60 bp, Artificial
  Synthetic oligonucleotide
gatgtgtggagtagactatgagattgccgattggtcatggcacgatggagctattcttcc

SEQ ID NO: 75166 - DNA, 60 bp, Artificial
  Synthetic oligonucleotide
cgagaccagaagtccctaaggggaagaggtagcactcttggtctggacatcgaaacagcc

SEQ ID NO: 75167 - DNA, 60 bp, Artificial
  Synthetic oligonucleotide
cttgcatttccgattgcatcactccaaatggaagcatccccaatgacaagccctttcaaa

SEQ ID NO: 75168 - DNA, 60 bp, Artificial
  Synthetic oligonucleotide
gcatttccgattgcatcactccaaatggaagcatccccaatgacaagccctttcaaaatg

SEQ ID NO: 75169 - DNA, 60 bp, Artificial
  Synthetic oligonucleotide
caggccccctcaaagccgagatcgcgcagagacttgaagatgtctttgccgggaaaaaca

SEQ ID NO: 75170 - DNA, 60 bp, Artificial
  Synthetic oligonucleotide
aggccccctcaaagccgagatcgcgcagagacttgaagatgtctttgcaggaaagaacac

SEQ ID NO: 75171 - DNA, 60 bp, Artificial
  Synthetic oligonucleotide
acgttctctctatcgtcccgtcaggccccctcaaagccgagatcgcgcagagacttgaag

SEQ ID NO: 75172 - DNA, 60 bp, Artificial
  Synthetic oligonucleotide
ccgtcaggccccctcaaagccgagatcgcgcagagacttgaagatgtctttgcagggaag

SEQ ID NO: 75173 - DNA, 60 bp, Artificial
  Synthetic oligonucleotide
catcaggccccctcaaagccgagatcgcgcagagacttgaagatgtcttttctgggaaaa

SEQ ID NO: 75174 - DNA, 60 bp, Artificial
  Synthetic oligonucleotide
cgtacgttctctctattgtcccgtcaggccccctcaaagccgagatcgcgcagagacttg

SEQ ID NO: 75175 - DNA, 60 bp, Artificial
  Synthetic oligonucleotide
gtacgttctctctatcttaccatcaggccccctcaaagccgagatcgcgcagagacttga

SEQ ID NO: 75176 - DNA, 60 bp, Artificial
  Synthetic oligonucleotide
gtacgttctctctatcgtaccatcaggccccctcaaagccgagatcgcgcagagacttga

SEQ ID NO: 75177 - DNA, 60 bp, Artificial
  Synthetic oligonucleotide
ccctcaaagccgagatcgcgcagagacttgaagatgtctttgcagggaagaacaccgatc

SEQ ID NO: 75178 - DNA, 60 bp, Artificial
  Synthetic oligonucleotide
cgtacgttctctctatcgtaccatcaggccccctcaaagccgagatcgcgcagagacttg

SEQ ID NO: 75179 - DNA, 53 bp, Artificial
  Synthetic oligonucleotide
cccctcaaagccgagatcgcgcagagacttgaagatgtctttgcaggaaagaa

SEQ ID NO: 75180 - DNA, 52 bp, Artificial
  Synthetic oligonucleotide
cccctcaaagccgagatcgcgcagagacttgaggatgtctttgcagggaaaa

SEQ ID NO: 75181 - DNA, 60 bp, Artificial
  Synthetic oligonucleotide
cccctcaaagccgagatcgcgcagagacttgaagatgtctttgcagggaagaacaccgat

SEQ ID NO: 75182 - DNA, 60 bp, Artificial
  Synthetic oligonucleotide
aggccccctcaaagccgagatcgcgcagagacttgaggatgtctttgcagggaaaaacac

SEQ ID NO: 75183 - DNA, 60 bp, Artificial
  Synthetic oligonucleotide
aggccccctcaaagccgagatcgcgcagagacttgaagatgtcttcgcagggaagaacac

SEQ ID NO: 75184 - DNA, 52 bp, Artificial
  Synthetic oligonucleotide
cccctcaaagccgagatcgcgcagagacttgaagatgtcttttctgggaaaa

SEQ ID NO: 75185 - DNA, 52 bp, Artificial
  Synthetic oligonucleotide
cccctcaaagccgagatcgcgcagagacttgaagatgtctttgccgggaaaa

SEQ ID NO: 75186 - DNA, 60 bp, Artificial
  Synthetic oligonucleotide
gaaccctgccctcaggatgaaatggatgatggcaatgaaatacccaataacggctgacaa

SEQ ID NO: 75187 - DNA, 60 bp, Artificial
  Synthetic oligonucleotide
caagatacgcagaagagtagatataaaccctggtcatgcagacctcagtgccaaagaggc

SEQ ID NO: 75188 - DNA, 60 bp, Artificial
  Synthetic oligonucleotide
tatgagtaatgaaggatcttatttcttcggagacaatgcagaagagttcgacaattaagg

SEQ ID NO: 75189 - DNA, 60 bp, Artificial
  Synthetic oligonucleotide
gaggtgactaatgctaccgagctagttcaaagctcttcaacagggaaaatatgcaacaat

SEQ ID NO: 75190 - DNA, 60 bp, Artificial
  Synthetic oligonucleotide
cgggacaatagtgaagacaatcacagatgatcagattgaggtgactaatgctaccgagct

SEQ ID NO: 75191 - DNA, 60 bp, Artificial
  Synthetic oligonucleotide
ggacaatagtgaaaacaatcacagatgatcagattgaggtgactaatgctaccgagctag

SEQ ID NO: 75192 - DNA, 60 bp, Artificial
  Synthetic oligonucleotide
gccgaatgggacaatagtgaaggccattacagatgatcagattgaggtgactaatgctac

SEQ ID NO: 75193 - DNA, 60 bp, Artificial
  Synthetic oligonucleotide
accgaatgggacaatagtgaaaacaatcacagatgatcagattgaggtgactaatgctac

SEQ ID NO: 75194 - DNA, 60 bp, Artificial
  Synthetic oligonucleotide
gccgaatgggacaatagtgaagacaatcacagatgatcagattgaggtgactaatgctac

SEQ ID NO: 75195 - DNA, 60 bp, Artificial
  Synthetic oligonucleotide
ttgcagcaatatgcactcacttggaagtgtgtttcatgtattcagattttcatttcatca

SEQ ID NO: 75196 - DNA, 60 bp, Artificial
  Synthetic oligonucleotide
tgcagcaatatgcactcacttggaggtgtgtttcatgtattcagattttcatttcatcaa

SEQ ID NO: 75197 - DNA, 60 bp, Artificial
  Synthetic oligonucleotide
gcagcaatatgcactcacttggaggtgtgtttcatgtattcagattttcatttcatcaat

SEQ ID NO: 75198 - DNA, 60 bp, Artificial
  Synthetic oligonucleotide
ggtacttcaaaatgcgcactgggaaaagctcaataatgagatcagatgcacctattgaca

SEQ ID NO: 75199 - DNA, 60 bp, Artificial
  Synthetic oligonucleotide
tccaaatgtgcactgaacttaaactcagtgatcatgaagggcggttgatccagaacagct

SEQ ID NO: 75200 - DNA, 60 bp, Artificial
  Synthetic oligonucleotide
tgatgcagggctcaactctccctagaaggtccggagctgcaggtgctgcagtcaaaggaa

SEQ ID NO: 75201 - DNA, 60 bp, Artificial
  Synthetic oligonucleotide
gcagggctcaactctccctagaaggtccggagctgcaggtgctgcagtcaaaggaattgg

SEQ ID NO: 75202 - DNA, 60 bp, Artificial
  Synthetic oligonucleotide
caactagaaggagccaacaaaccataatcccgaatattggatccaggccttgggtcaggg

SEQ ID NO: 75203 - DNA, 60 bp, Artificial
  Synthetic oligonucleotide
ccaaatattggatccaggccttgggtcaggggccaatcagggaggataagcatctactgg

SEQ ID NO: 75204 - DNA, 60 bp, Artificial
  Synthetic oligonucleotide
caacaaaccataatcccgaatattggatccaggccttgggtcaggggccaatcaggaagg

SEQ ID NO: 75205 - DNA, 60 bp, Artificial
  Synthetic oligonucleotide
caacaaaccataatcccgaatattggatccaggccttgggtcaggggccaatcagggagg

SEQ ID NO: 75206 - DNA, 60 bp, Artificial
  Synthetic oligonucleotide
gagccaacaaaccataatcccgaatattggatccaggccttgggtcaggggccaatcagg

SEQ ID NO: 75207 - DNA, 60 bp, Artificial
  Synthetic oligonucleotide
gagcatcccagtgctgggaaagaccccaagaagactggaggtccaatctacaggaggaga

SEQ ID NO: 75208 - DNA, 60 bp, Artificial
  Synthetic oligonucleotide
tcattcgccatatcatgcttcttaatttgcgttgttctattgggtttcattatgtgggct

SEQ ID NO: 75209 - DNA, 60 bp, Artificial
  Synthetic oligonucleotide
ggatttcattcgccatatcatgcttcttaatttgcgttgttctattgggtttcattatgt

SEQ ID NO: 75210 - DNA, 60 bp, Artificial
  Synthetic oligonucleotide
atatcatgcttcttaatttgcgttgttctattgggtttcattatgtgggcttgccaaaaa

SEQ ID NO: 75211 - DNA, 59 bp, Artificial
  Synthetic oligonucleotide
atatcatgcttcttaatttgcgttgttctattgggtttcattatgtgggcttgccaaaa

SEQ ID NO: 75212 - DNA, 60 bp, Artificial
  Synthetic oligonucleotide
cgccatatcatgcttcttaatttgcgttgttctattgggtttcattatgtgggcttgcca

SEQ ID NO: 75213 - DNA, 60 bp, Artificial
  Synthetic oligonucleotide
caccatatcatgcttcttaatttgcgttgttctattgggtttcattatgtgggcttgcca

SEQ ID NO: 75214 - DNA, 60 bp, Artificial
  Synthetic oligonucleotide
gagttgacataaaccctggccatgcagacctcagtgccaaagaggcacaggatgtaatca

SEQ ID NO: 75215 - DNA, 60 bp, Artificial
  Synthetic oligonucleotide
ctagcatggtggaggccatggtgtctagggcccggattgatgctagaattgacttcgagt

SEQ ID NO: 75216 - DNA, 60 bp, Artificial
  Synthetic oligonucleotide
gttgggatctccagcatggtggaggccatggtgtctagggcccgaattgatgcgcggatt

SEQ ID NO: 75217 - DNA, 60 bp, Artificial
  Synthetic oligonucleotide
ctgaatcgaggaaattgcttctcattgttcaggcacttagggacaacctggaacctggaa

SEQ ID NO: 75218 - DNA, 60 bp, Artificial
  Synthetic oligonucleotide
tcagctgagtcaagaaagctgcttcttattgttcaggcacttagggacaacctggaacct

SEQ ID NO: 75219 - DNA, 60 bp, Artificial
  Synthetic oligonucleotide
cgagaaagttgcttctcattgttcaggcacttagggacaacctggaacctggaaccttcg

SEQ ID NO: 75220 - DNA, 60 bp, Artificial
  Synthetic oligonucleotide
gcctctgttcctgcttcacgctacctaactgacatgactcttgatgagatgtcaagagac

SEQ ID NO: 75221 - DNA, 60 bp, Artificial
  Synthetic oligonucleotide
gaatacagaaattggtcaaagccgcaatgtgacattacaggatttgcacctttttctaag

SEQ ID NO: 75222 - DNA, 60 bp, Artificial
  Synthetic oligonucleotide
tcgtattcacgctcaccgtgcccagtgagcgaggactgcagcgtagacgctttgtccaaa

SEQ ID NO: 75223 - DNA, 60 bp, Artificial
  Synthetic oligonucleotide
tcgtgttcacgctcaccgtgcccagtgagcgaggactgcagcgtagacgctttgtccaaa

SEQ ID NO: 75224 - DNA, 60 bp, Artificial
  Synthetic oligonucleotide
cggctgcattgagggcaagctttctcaaatgtccaaggacgtaaatgcaaggatagagcc

SEQ ID NO: 75225 - DNA, 60 bp, Artificial
  Synthetic oligonucleotide
aaatttgaaatcacaggaactatgcgtaggcttgccgaccaaagtctcccaccgaacttc

SEQ ID NO: 75226 - DNA, 60 bp, Artificial
  Synthetic oligonucleotide
caggaactatgcataggcttgccgaccaaagtctcccaccgaacttctcctgccttgaga

SEQ ID NO: 75227 - DNA, 60 bp, Artificial
  Synthetic oligonucleotide
ctatcgttccatcaggccccctcaaagccgagatcgcgcagagacttgaagatgtctttt

SEQ ID NO: 75228 - DNA, 60 bp, Artificial
  Synthetic oligonucleotide
ttccatcaggccccctcaaagccgagatcgcgcagagacttgaagatgtctttgctggga

SEQ ID NO: 75229 - DNA, 60 bp, Artificial
  Synthetic oligonucleotide
cttgtgcgtactgggatggaccccagaatgtgttccctgatgcagggctcaactcttcca

SEQ ID NO: 75230 - DNA, 60 bp, Artificial
  Synthetic oligonucleotide
acatctgggtaacaagagaaccttatgtgtcatgcgatcctgacaagtgttatcaattcg

SEQ ID NO: 75231 - DNA, 57 bp, Artificial
  Synthetic oligonucleotide
cgactatgaaggaaggctgattcagaacagcataacaatagagagaatggttctctc

SEQ ID NO: 75232 - DNA, 60 bp, Artificial
  Synthetic oligonucleotide
gatgaaatggatgatggcaatgaaatacccaatcactgctgacaaaaggataacagaaat

SEQ ID NO: 75233 - DNA, 60 bp, Artificial
  Synthetic oligonucleotide
caacagactataatcccgaacattggatctagaccctgggtaaggggccagtctggcaga

SEQ ID NO: 75234 - DNA, 60 bp, Artificial
  Synthetic oligonucleotide
ccctaacattggatctagaccctgggtaaggggccagtccggcagaataagcatctactg

SEQ ID NO: 75235 - DNA, 60 bp, Artificial
  Synthetic oligonucleotide
ccgaacattggatctagaccctgggtaaggggccagtcaggcagaataagcatctactgg

SEQ ID NO: 75236 - DNA, 60 bp, Artificial
  Synthetic oligonucleotide
gattctacatacagatgtgcactgaactcaaactcagtgactatgaaggaaggctgatcc

SEQ ID NO: 75237 - DNA, 60 bp, Artificial
  Synthetic oligonucleotide
atcgggagattctacatacagatgtgcactgaactcaaactcagcgactatgaagggagg

SEQ ID NO: 75238 - DNA, 60 bp, Artificial
  Synthetic oligonucleotide
ctcaaacaagatggcgaggttagggaaagggtacatgttcgagagtaagagcatgaagct

SEQ ID NO: 75239 - DNA, 60 bp, Artificial
  Synthetic oligonucleotide
gctgtggtaatgccagctcatggtccagccaagagcatggaatatgatgccgttgcgact

SEQ ID NO: 75240 - DNA, 60 bp, Artificial
  Synthetic oligonucleotide
caatggaacttgtacagtagtaatgactgatgggagtgcttcaggagaagctgatactaa

SEQ ID NO: 75241 - DNA, 60 bp, Artificial
  Synthetic oligonucleotide
ttccagcgcagaatgccataagcaccacgttcccttatactggagatcctccatacagcc

SEQ ID NO: 75242 - DNA, 54 bp, Artificial
  Synthetic oligonucleotide
gattggtcatggcacgatggagctattcttccctttgacatcgataagatgtag

SEQ ID NO: 75243 - DNA, 60 bp, Artificial
  Synthetic oligonucleotide
cccacccagggatctttgaaaactcgtgtcttgaaacgatggaagttgttcagcaaacaa

SEQ ID NO: 75244 - DNA, 60 bp, Artificial
  Synthetic oligonucleotide
ggccttccttgaggaatcccacccagggatctttgaaaactcgtgtcttgaaacgatgga

SEQ ID NO: 75245 - DNA, 60 bp, Artificial
  Synthetic oligonucleotide
gagactgcacactaatagatgctctactaggggaccctcattgtgatgtatttcaagatg

SEQ ID NO: 75246 - DNA, 60 bp, Artificial
  Synthetic oligonucleotide
tggaagagactgcacactaatagatgctctactaggggaccctcattgtgatgtatttca

SEQ ID NO: 75247 - DNA, 60 bp, Artificial
  Synthetic oligonucleotide
cgcaaaatgccataagcactacattcccatatactggagatcctccatacagccatggaa

SEQ ID NO: 75248 - DNA, 60 bp, Artificial
  Synthetic oligonucleotide
gattggttccaggggacatgtttttgttataagggagcccttcgtctcttgttcgcccac

SEQ ID NO: 75249 - DNA, 60 bp, Artificial
  Synthetic oligonucleotide
taaggattggttccaggggacatgtttttgttataagggagcccttcgtctcttgttcgc

SEQ ID NO: 75250 - DNA, 60 bp, Artificial
  Synthetic oligonucleotide
aatgcgacctattgcttggtgatcaaagctggtcatatatagtggaaagacctacagctc

SEQ ID NO: 75251 - DNA, 60 bp, Artificial
  Synthetic oligonucleotide
atatgtgaaaagtgaaagtttgaggcttgcaactggactgagaaatgttccacagattga

SEQ ID NO: 75252 - DNA, 60 bp, Artificial
  Synthetic oligonucleotide
agctaacgtgttgatagggcaaggagacgtagtgttggtaatgaaacggaaacgggactc

SEQ ID NO: 75253 - DNA, 60 bp, Artificial
  Synthetic oligonucleotide
ggctaatgtgctaattgggcaaggagacgcggtgttggtaatgaaacggaaacgggactc

SEQ ID NO: 75254 - DNA, 60 bp, Artificial
  Synthetic oligonucleotide
tggataggtgaatgccccaaatatgtgaaaagtgaaagtctgaggcttgcaactggactg

SEQ ID NO: 75255 - DNA, 60 bp, Artificial
  Synthetic oligonucleotide
tcaggatgggaactgaaagcatgaattttgccaagagtccagaaattgcagcaaggcctg

SEQ ID NO: 75256 - DNA, 60 bp, Artificial
  Synthetic oligonucleotide
gcgatcgatatgttaggatgggaactgaaagcatgaattttgccaagagcccggaaattg

SEQ ID NO: 75257 - DNA, 60 bp, Artificial
  Synthetic oligonucleotide
gagcccctatagaactctgatgagtgtagaaatagggcaatcacccaatgtgtaccaggc

SEQ ID NO: 75258 - DNA, 60 bp, Artificial
  Synthetic oligonucleotide
attcttgctatttatagtacggtatcgagcagtctagttttggtaggactgatcatggca

SEQ ID NO: 75259 - DNA, 60 bp, Artificial
  Synthetic oligonucleotide
tgcttctcattgttcaggcacttagggacaacctggaacctgggacattcgatcttgggg

SEQ ID NO: 75260 - DNA, 60 bp, Artificial
  Synthetic oligonucleotide
aatgtaagccctctgtggataggagaatgccccaaatatgtgaaaagtgaaagtttgagg

SEQ ID NO: 75261 - DNA, 60 bp, Artificial
  Synthetic oligonucleotide
catacaatgctgaactgttggttcttcttgaaaatgaaagaacactagatctgcatgatg

SEQ ID NO: 75262 - DNA, 60 bp, Artificial
  Synthetic oligonucleotide
catacaatgctgaactgttggttcttcttgaaaatgaaagaacattagatctgcatgatg

SEQ ID NO: 75263 - DNA, 53 bp, Artificial
  Synthetic oligonucleotide
catacaatgctgaactgttggttcttcttgaaaatgaaagaacactagatctg

SEQ ID NO: 75264 - DNA, 60 bp, Artificial
  Synthetic oligonucleotide
ggtatcatgccaacaattcaacaacacaagtggatacgatacttgagaagaatgtaaccg

SEQ ID NO: 75265 - DNA, 60 bp, Artificial
  Synthetic oligonucleotide
cagaaatcctgggaatgctgaaattgaagatctcatcttcctggcacggtctgcactcat

SEQ ID NO: 75266 - DNA, 60 bp, Artificial
  Synthetic oligonucleotide
ccaggctgttcaccataagacaagaaatggccagtaggggtttatgggattcctttcgtc

SEQ ID NO: 75267 - DNA, 60 bp, Artificial
  Synthetic oligonucleotide
ggaagagcatcccagtgctgggaaagaccctaagaagactggaggtccaatctacaggag

SEQ ID NO: 75268 - DNA, 60 bp, Artificial
  Synthetic oligonucleotide
gccttcaggtagactgctttctttggcatgtccgcaaacgatttgcagaccaagaactgg

SEQ ID NO: 75269 - DNA, 60 bp, Artificial
  Synthetic oligonucleotide
gctttcatgtagactgctttctttggcatgtccgcaaacgatttgcagaccaagaactgg

SEQ ID NO: 75270 - DNA, 60 bp, Artificial
  Synthetic oligonucleotide
ccatttatagtacggtatcgagcagtctagttttggtaggtctgatcttggcaatgggtg

SEQ ID NO: 75271 - DNA, 60 bp, Artificial
  Synthetic oligonucleotide
ccatttatagtacggtatcgagcagtctagttttggtagggctgatcttggcaatgggtg

SEQ ID NO: 75272 - DNA, 60 bp, Artificial
  Synthetic oligonucleotide
gtcttggtagggctgattatagcaatgggtctttggatgtgttcaaatggttcaatgcaa

SEQ ID NO: 75273 - DNA, 60 bp, Artificial
  Synthetic oligonucleotide
atccttgctatttatagtacggtatcgagcagtctggttttggtgggactgatcattgcc

SEQ ID NO: 75274 - DNA, 60 bp, Artificial
  Synthetic oligonucleotide
aatccttgctatttatagtacggtatcgagcagtctggtattggcagggctgatcatagc

SEQ ID NO: 75275 - DNA, 60 bp, Artificial
  Synthetic oligonucleotide
cgccatctatagtacggtatcgagcagtctagtcttggtagggctgatcatggcaatggg

SEQ ID NO: 75276 - DNA, 60 bp, Artificial
  Synthetic oligonucleotide
ggaggcaatggctttccttgaagagtcccacccagggatctttgaaaactcgtgtctcga

SEQ ID NO: 75277 - DNA, 60 bp, Artificial
  Synthetic oligonucleotide
aaagtagagtcggtgaagctagagaatcttggtgtgtatcaaattcttgccatttatagt

SEQ ID NO: 75278 - DNA, 60 bp, Artificial
  Synthetic oligonucleotide
tactaacaaaaactactgtggaccatatggccataatcaagaaatacacatcaggaagac

SEQ ID NO: 75279 - DNA, 55 bp, Artificial
  Synthetic oligonucleotide
tcggagacaatgcagaggagtatgacaattaaagaaaaatacccttgtttctact

SEQ ID NO: 75280 - DNA, 60 bp, Artificial
  Synthetic oligonucleotide
cgagctgagaagcagatattgggcaataaggaccaggagtggaggaaacaccaaccagca

SEQ ID NO: 75281 - DNA, 60 bp, Artificial
  Synthetic oligonucleotide
agggaggctgattcaaaacagcataacaatagagagaatggttctctctgcatttgatga

SEQ ID NO: 75282 - DNA, 59 bp, Artificial
  Synthetic oligonucleotide
agtagttcattatggaggggtgcctactgatgtcgttaattcctgggcaggggatatat

SEQ ID NO: 75283 - DNA, 60 bp, Artificial
  Synthetic oligonucleotide
ggcaatgggtctttggatgtgttcaaatggttcaatgcaatgcaggatatgtatataatt

SEQ ID NO: 75284 - DNA, 60 bp, Artificial
  Synthetic oligonucleotide
gctcgataatgagatcagatgcacctattgacacatgtatctctgagtgcatcactccta

SEQ ID NO: 75285 - DNA, 60 bp, Artificial
  Synthetic oligonucleotide
tgagaatagaaagaattactcaatggtataatactaatataatcgagtatatagagagac

SEQ ID NO: 75286 - DNA, 60 bp, Artificial
  Synthetic oligonucleotide
gatctcgaggctctcatggaatggctaaagacaagaccaatcctgtcacctctgacaaag

SEQ ID NO: 75287 - DNA, 60 bp, Artificial
  Synthetic oligonucleotide
cataaacaggacgggaacatttgaattcacaagctttttctatcgctatggatttgtagc

SEQ ID NO: 75288 - DNA, 60 bp, Artificial
  Synthetic oligonucleotide
ttgggagactgtaaagattcaatggtctcaagaccctacaatgctatacaataagatgga

SEQ ID NO: 75289 - DNA, 60 bp, Artificial
  Synthetic oligonucleotide
aaattgcttctcattgttcaggcacttagggacaacctggaacctggaaccttcgatctt

SEQ ID NO: 75290 - DNA, 56 bp, Artificial
  Synthetic oligonucleotide
cttcctttgacatgagtaatgaaggatcttatttcttcggagacaatgcagaggag

SEQ ID NO: 75291 - DNA, 57 bp, Artificial
  Synthetic oligonucleotide
cttcctttgacatgagtaatgaaggatcttatttcttcggagacaatgcagaggagt

SEQ ID NO: 75292 - DNA, 60 bp, Artificial
  Synthetic oligonucleotide
aatggatgctttgaattttggcataagtgtgatgatgaatgcatggagtctgtcaaaaat

SEQ ID NO: 75293 - DNA, 58 bp, Artificial
  Synthetic oligonucleotide
aatggatgctttgaattttggcataagtgtgatgatgaatgcatggagtctgtcaaaa

SEQ ID NO: 75294 - DNA, 60 bp, Artificial
  Synthetic oligonucleotide
ttctcaaggctcaggatatgcagcagacagagaaagcactcaaaaggctatagacggaat

SEQ ID NO: 75295 - DNA, 60 bp, Artificial
  Synthetic oligonucleotide
caaggctcaggatatgcagcagacagagaaagcactcaaaaggctatagacggaattaca

SEQ ID NO: 75296 - DNA, 60 bp, Artificial
  Synthetic oligonucleotide
attctcaaggctcaggatatgcagcagacagagaaagcactcaaaaggctatagacggaa

SEQ ID NO: 75297 - DNA, 60 bp, Artificial
  Synthetic oligonucleotide
ccataattcctaacatcgggtccaggccttgggtcagaggccaatcaggaagaataagca

SEQ ID NO: 75298 - DNA, 60 bp, Artificial
  Synthetic oligonucleotide
ggaacaggctcatggcctgatggggcgaatatcgatttcatgcctatataagctttcgca

SEQ ID NO: 75299 - DNA, 60 bp, Artificial
  Synthetic oligonucleotide
aactgggtgatgccccattccttgaccggcttcgccgagaccagaagtccctaaggggaa

SEQ ID NO: 75300 - DNA, 60 bp, Artificial
  Synthetic oligonucleotide
atgttctattgcatatcgtgagcatcatagtaacagtattagtccttgggagaggtggaa

SEQ ID NO: 75301 - DNA, 60 bp, Artificial
  Synthetic oligonucleotide
gatcaaaaggcattaaagggaagaggcagcacacttgggctcgacccgcgagtggccaca

SEQ ID NO: 75302 - DNA, 60 bp, Artificial
  Synthetic oligonucleotide
aaaaggcattaaagggaagaggcagcacacttgggctcgacccgcgagtggccacaatgg

SEQ ID NO: 75303 - DNA, 58 bp, Artificial
  Synthetic oligonucleotide
agtgctgtggatgttgacgatggtcattttgtcaacatagagctggagtaaaaaacta

SEQ ID NO: 75304 - DNA, 60 bp, Artificial
  Synthetic oligonucleotide
tcagaagagatcaaaaggcattaaagggaagaggcagcacacttgggctcgacctgcgag

SEQ ID NO: 75305 - DNA, 60 bp, Artificial
  Synthetic oligonucleotide
atcctgggaatgctgaaattgaagatctcatcttcctggcacggtctgcactcattctga

SEQ ID NO: 75306 - DNA, 60 bp, Artificial
  Synthetic oligonucleotide
ataagcatatattggaccattgtgaaacctggagatgtcctaatgataaacagtaatggc

SEQ ID NO: 75307 - DNA, 55 bp, Artificial
  Synthetic oligonucleotide
gatgggctatatacagcaaggacaatggtataaggataggttccaagggagatgt

SEQ ID NO: 75308 - DNA, 60 bp, Artificial
  Synthetic oligonucleotide
gatgggctatatacagcaaggacaatggtataaggataggttccaagggagatgtgtttg

SEQ ID NO: 75309 - DNA, 60 bp, Artificial
  Synthetic oligonucleotide
ggtagtcaaatcggtcgagttgaatgctcctaattaccactatgaggagtgttcctgtta

SEQ ID NO: 75310 - DNA, 60 bp, Artificial
  Synthetic oligonucleotide
ggatatgcacaaacagactgtgtccttgaagcaatggctttccttgaagaatcccaccca

SEQ ID NO: 75311 - DNA, 60 bp, Artificial
  Synthetic oligonucleotide
caaattcttgccatttatagtacggtatcgagcagtctagttttggtagggctgatcttg

SEQ ID NO: 75312 - DNA, 60 bp, Artificial
  Synthetic oligonucleotide
caaacattctaatggcacagtgaaagaccgaagcccctatagaactctaatgagtgtaga

SEQ ID NO: 75313 - DNA, 60 bp, Artificial
  Synthetic oligonucleotide
ttctaatggcacagtgaaagaccgaagcccctatagaactctaatgagtgtagaaatagg

SEQ ID NO: 75314 - DNA, 60 bp, Artificial
  Synthetic oligonucleotide
ttctaatggcacagtgaaggaccggagcccctatagaactctaatgagtgtagaaatagg

SEQ ID NO: 75315 - DNA, 60 bp, Artificial
  Synthetic oligonucleotide
tctaatggcacagtgaaagatcggagcccctatagaactctaatgagtgtagaaataggg

SEQ ID NO: 75316 - DNA, 60 bp, Artificial
  Synthetic oligonucleotide
gcttcctcaggaaccctagagttcatcacagaagggtttacatggacaggagtcactcaa

SEQ ID NO: 75317 - DNA, 60 bp, Artificial
  Synthetic oligonucleotide
gatctgcatcgggtatcatgccaacaattcaacaacacaagtggatacgatattggagaa

SEQ ID NO: 75318 - DNA, 51 bp, Artificial
  Synthetic oligonucleotide
ggcacgatggagctattcttccctttgacatcgataagatgtaatttacga

SEQ ID NO: 75319 - DNA, 60 bp, Artificial
  Synthetic oligonucleotide
ggaatctaatggaaatctaatcgctccttggtatgcatacaaatttgtcagcacaaacag

SEQ ID NO: 75320 - DNA, 60 bp, Artificial
  Synthetic oligonucleotide
gagaggaccaggcgccagttaagagaaaacgcggaagacatagggaatggatgtttcaag

SEQ ID NO: 75321 - DNA, 60 bp, Artificial
  Synthetic oligonucleotide
gagaggaccaggcgccagttaagagaaaacgcggaagatatggggaatggatgtttcaag

SEQ ID NO: 75322 - DNA, 59 bp, Artificial
  Synthetic oligonucleotide
cttgaaagttccagcgcaaaatgccataagcaccacattcccatatactggagatcccc

SEQ ID NO: 75323 - DNA, 60 bp, Artificial
  Synthetic oligonucleotide
cttgaaagttccagcgcaaaatgccataagcaccacattcccatatactggagatccccc

SEQ ID NO: 75324 - DNA, 60 bp, Artificial
  Synthetic oligonucleotide
ggagagatgaacagtcaattgctgaagcaataattgtggccatggtattttcacaggagg

SEQ ID NO: 75325 - DNA, 60 bp, Artificial
  Synthetic oligonucleotide
ggtcggcaactgcatgtcatgatgggaagaaatggatgacaattggagtaacgggccctg

SEQ ID NO: 75326 - DNA, 60 bp, Artificial
  Synthetic oligonucleotide
ggtcagccacggcgtgtcatgatgggaagaaatggatgacaattggagtaacgggccctg

SEQ ID NO: 75327 - DNA, 58 bp, Artificial
  Synthetic oligonucleotide
tcagccactgcgtgtcatgatgggaagaaatggatgacaattggagtaacgggccctg

SEQ ID NO: 75328 - DNA, 60 bp, Artificial
  Synthetic oligonucleotide
gcgtggtcagccactgcgtgtcatgatgggaagaaatggatgacaattggagtaacgggc

SEQ ID NO: 75329 - DNA, 60 bp, Artificial
  Synthetic oligonucleotide
gcgtggtcagccacggcgtgtcatgatgggaagaaatggatgacaattggagtaacgggc

SEQ ID NO: 75330 - DNA, 60 bp, Artificial
  Synthetic oligonucleotide
ggtcggctactgcatgtcatgatgggaagaaatggatgacaattggagtaacgggccctg

SEQ ID NO: 75331 - DNA, 58 bp, Artificial
  Synthetic oligonucleotide
tcagccactgcatgtcatgatgggaagaaatggatgacaattggagtaacgggccctg

SEQ ID NO: 75332 - DNA, 60 bp, Artificial
  Synthetic oligonucleotide
gcgtggtcagccactgcatgtcatgatgggaagaaatggatgacaattggagtaacgggc

SEQ ID NO: 75333 - DNA, 60 bp, Artificial
  Synthetic oligonucleotide
gcgtggtcagctactgcatgtcatgatgggaagaaatggatgacaattggagtaacgggc

SEQ ID NO: 75334 - DNA, 60 bp, Artificial
  Synthetic oligonucleotide
gtgcctgattaatgatccctgggttttgcttaatgcatcttggttcaactccttcctcac

SEQ ID NO: 75335 - DNA, 60 bp, Artificial
  Synthetic oligonucleotide
tatctggaagagcatcccagtgctgggaaagaccctaagaaaactggaggcccaatatac

SEQ ID NO: 75336 - DNA, 60 bp, Artificial
  Synthetic oligonucleotide
ggggttacttcaagatgcgcactgggaaaagctcaataatgaggtcagatgcacctattg

SEQ ID NO: 75337 - DNA, 60 bp, Artificial
  Synthetic oligonucleotide
caggttttatagaaaatggatgggagggaatgatagacggttggtacggattcagacacc

SEQ ID NO: 75338 - DNA, 60 bp, Artificial
  Synthetic oligonucleotide
caggttttatagaaaatggatgggagggaatgatagatggctggtatggcttcaggcatc

SEQ ID NO: 75339 - DNA, 60 bp, Artificial
  Synthetic oligonucleotide
gattctacatacagatgtgcactgaactcaaactcagtgactatgaagggaggctgatcc

SEQ ID NO: 75340 - DNA, 60 bp, Artificial
  Synthetic oligonucleotide
gaccttttcgttgaacgcagcaatgctttcagcaattgttacccttatgatgtgccagat

SEQ ID NO: 75341 - DNA, 60 bp, Artificial
  Synthetic oligonucleotide
ggaggggaggattcaagacctcgagaaatacgttgaagacactaaaatagatctctggtc

SEQ ID NO: 75342 - DNA, 60 bp, Artificial
  Synthetic oligonucleotide
tgaggacacaagaatcatcctgcacttgcatccaaggtgattgctattgggtaatgactg

SEQ ID NO: 75343 - DNA, 60 bp, Artificial
  Synthetic oligonucleotide
tttgatgacagactcagaagagatcaaaaggcattaaagggaagaggcagcacacttgga

SEQ ID NO: 75344 - DNA, 60 bp, Artificial
  Synthetic oligonucleotide
cttggtgatcaaagctggtcatatatagtggaaagacctacagctcaaaatgggatctgc

SEQ ID NO: 75345 - DNA, 60 bp, Artificial
  Synthetic oligonucleotide
tgcttggtgatcaaagctggtcatatatagtggaaagacctacagctcaaaatgggattt

SEQ ID NO: 75346 - DNA, 60 bp, Artificial
  Synthetic oligonucleotide
taatccccaacatcggatctagaccgggggtcaggggtcaatcaggcaggataagcatat

SEQ ID NO: 75347 - DNA, 60 bp, Artificial
  Synthetic oligonucleotide
tgtttatcaaattcttgccatttatagtacggtatcgagcagtctagtattggtaggact

SEQ ID NO: 75348 - DNA, 60 bp, Artificial
  Synthetic oligonucleotide
cgaaaagacgaggcggcaactgagggagaatgctgaagacatgggcaacggttgcttcaa

SEQ ID NO: 75349 - DNA, 60 bp, Artificial
  Synthetic oligonucleotide
ttaggatgggaactgaaagcatgaattttgccaagagtccggaaattgcagaaagaccgg

SEQ ID NO: 75350 - DNA, 60 bp, Artificial
  Synthetic oligonucleotide
cgttaggatgggaactgaaagcatgaattttgccaagagtccggaaattgcagaaagacc

SEQ ID NO: 75351 - DNA, 55 bp, Artificial
  Synthetic oligonucleotide
tgggaaaagctcaataatgagatcagatgcacctattgacacatgcatttctgag

SEQ ID NO: 75352 - DNA, 60 bp, Artificial
  Synthetic oligonucleotide
ccctcgaggttatttcaagatacgcactgggaaaagctcaataatgagatcagatgcacc

SEQ ID NO: 75353 - DNA, 60 bp, Artificial
  Synthetic oligonucleotide
cgctcctcggggctacttcaaggtgcgcactgggaaaagctcaataatgagatcagatgc

SEQ ID NO: 75354 - DNA, 60 bp, Artificial
  Synthetic oligonucleotide
cccctcgaggttatttcaagatacgcactgggaaaagctcaataatgagatcagatgcac

SEQ ID NO: 75355 - DNA, 60 bp, Artificial
  Synthetic oligonucleotide
ggcttcaggcatcaaaattccgaaggtacaggacaagcagcagaccttaaaagcactcag

SEQ ID NO: 75356 - DNA, 60 bp, Artificial
  Synthetic oligonucleotide
cgtcgtattctgtggcacttcaggtacctatggaacaggctcatggcctgatggggcgaa

SEQ ID NO: 75357 - DNA, 60 bp, Artificial
  Synthetic oligonucleotide
gagattctacatacagatgtgcactgaactcaaactcagtgactacgaagggagactgat

SEQ ID NO: 75358 - DNA, 60 bp, Artificial
  Synthetic oligonucleotide
gaggttctacatacagatgtgcactgaactcaaactcagtgactacgaagggaggctgat

SEQ ID NO: 75359 - DNA, 60 bp, Artificial
  Synthetic oligonucleotide
gctatcaccatgaaaattctcaaggctcaggatatgcagcagacagagaaagcactcaaa

SEQ ID NO: 75360 - DNA, 60 bp, Artificial
  Synthetic oligonucleotide
gcacttgcatccaaggtgattgctattgggtgatgactgacggtcccgccaataggcagg

SEQ ID NO: 75361 - DNA, 60 bp, Artificial
  Synthetic oligonucleotide
cctgaagaggttagtgaaacacagggaacagaaaagctgacaataacatattcatcgtcc

SEQ ID NO: 75362 - DNA, 60 bp, Artificial
  Synthetic oligonucleotide
aatcaggaagcacatatccagtgctgaatgtgactatgccaaacaatgacaattttgaca

SEQ ID NO: 75363 - DNA, 60 bp, Artificial
  Synthetic oligonucleotide
cgcagcaatgctttcagcaattgttacccttatgatgtgccagattatgcctcccttaga

SEQ ID NO: 75364 - DNA, 60 bp, Artificial
  Synthetic oligonucleotide
ttagttcaaagctcctcaacggggaaaatatgcaacaatccccatagaatccttgatgga

SEQ ID NO: 75365 - DNA, 60 bp, Artificial
  Synthetic oligonucleotide
gctagttcagagctcctcaacggggaaaatatgcaacaatcctcataggatccttgatgg

SEQ ID NO: 75366 - DNA, 53 bp, Artificial
  Synthetic oligonucleotide
gggcacaggacaagcagcagatcttaaaagcactcaagcagccatcgaccaaa

SEQ ID NO: 75367 - DNA, 60 bp, Artificial
  Synthetic oligonucleotide
caggaagcacatatccagtgctgaatgtgactatgccaaacaatgacaattttgacaaac

SEQ ID NO: 75368 - DNA, 60 bp, Artificial
  Synthetic oligonucleotide
agtagcgcctgcagaaggggatcagccgatagtttctttagtcgactgaattggctaaca

SEQ ID NO: 75369 - DNA, 60 bp, Artificial
  Synthetic oligonucleotide
gtagcgcctgcagaaggggatcagccgatagtttctttagtcgactgaattggctaacaa

SEQ ID NO: 75370 - DNA, 60 bp, Artificial
  Synthetic oligonucleotide
cgcctgcagaaggggatcagccgatagtttctttagccgactgaattggctaacacaatc

SEQ ID NO: 75371 - DNA, 60 bp, Artificial
  Synthetic oligonucleotide
ctcctgcagaaggggatcagccgatagtttctttagccgactgaattggctgacaaaatc

SEQ ID NO: 75372 - DNA, 60 bp, Artificial
  Synthetic oligonucleotide
taatccccaacatcggatctagaccgtgggtcaggggtcaatcaggcaggataagcatat

SEQ ID NO: 75373 - DNA, 60 bp, Artificial
  Synthetic oligonucleotide
cccaacatcgggtccagaccgtgggtcaggggtcaatcaggcaggataagcatatattgg

SEQ ID NO: 75374 - DNA, 60 bp, Artificial
  Synthetic oligonucleotide
cgaccatgaagggaggctgattcagaacagcataacaatagagagaatggttctctctgc

SEQ ID NO: 75375 - DNA, 60 bp, Artificial
  Synthetic oligonucleotide
gaattaacaggactggactgcatgagaccttgcttctgggttgaactgatcagaggaagg

SEQ ID NO: 75376 - DNA, 60 bp, Artificial
  Synthetic oligonucleotide
gccaaacaatgacaattttgacaaactatacatctggggagttcaccacccgagcacaaa

SEQ ID NO: 75377 - DNA, 60 bp, Artificial
  Synthetic oligonucleotide
aggaacagaaaagctgacaataacttattcgtcatcaatgatgtgggagatcaacggtcc

SEQ ID NO: 75378 - DNA, 60 bp, Artificial
  Synthetic oligonucleotide
tgcagattgccatcctagcaacgactgtgacattgcacttcaagcaaaatgaatgcagca

SEQ ID NO: 75379 - DNA, 60 bp, Artificial
  Synthetic oligonucleotide
tagtatgtttcctcatgcagattgccatcctagcaacgactgtgacattgcacttcaagc

SEQ ID NO: 75380 - DNA, 60 bp, Artificial
  Synthetic oligonucleotide
cactttcaaaagaacaagtgggtcatcagttaaaagagaagaagaagtgctcacaggcaa

SEQ ID NO: 75381 - DNA, 60 bp, Artificial
  Synthetic oligonucleotide
ccaatggcacagtgaaagaccggagcccctatagaactctaatgagtgtagaaatagggc

SEQ ID NO: 75382 - DNA, 60 bp, Artificial
  Synthetic oligonucleotide
gggagactgtgaagatccaatggtcccaggaccctacaatgctatacaataagatggagt

SEQ ID NO: 75383 - DNA, 60 bp, Artificial
  Synthetic oligonucleotide
ttgggagactgtgaagatccaatggtcccaggaccctacaatgctatacaataagatgga

SEQ ID NO: 75384 - DNA, 60 bp, Artificial
  Synthetic oligonucleotide
tatctatggcacataagaaagctactcagcatgagagacatgtgtgatgctccctttgat

SEQ ID NO: 75385 - DNA, 60 bp, Artificial
  Synthetic oligonucleotide
gcccattatagatataaatatggcagattatagcattgattccagttatgtgtgctcagg

SEQ ID NO: 75386 - DNA, 60 bp, Artificial
  Synthetic oligonucleotide
taggcccattatagatataaatatggcagattatagcattgattccagttatgtgtgctc

SEQ ID NO: 75387 - DNA, 60 bp, Artificial
  Synthetic oligonucleotide
ggagctatagcaggttttattgaaggaggatggactggaatgatagatgggtggtatggc

SEQ ID NO: 75388 - DNA, 60 bp, Artificial
  Synthetic oligonucleotide
ggagctatcgcaggttttattgaaggaggatggactggaatgatagatgggtggtatggc

SEQ ID NO: 75389 - DNA, 60 bp, Artificial
  Synthetic oligonucleotide
catacaattcaagattcgagtcggttgcttggtcggcaagtgcttgtcatgatggcattg

SEQ ID NO: 75390 - DNA, 60 bp, Artificial
  Synthetic oligonucleotide
ttggtcggcaagtgcttgtcatgatggcattagttggttgacaatcggaatttctggtcc

SEQ ID NO: 75391 - DNA, 60 bp, Artificial
  Synthetic oligonucleotide
gagtcagttgcttggtcggcaagtgcttgtcatgatggcattagttggctgacaattgga

SEQ ID NO: 75392 - DNA, 60 bp, Artificial
  Synthetic oligonucleotide
tcgagtcggttgcttggtcggcaagtgcttgtcatgatggcattggttggttaacaattg

SEQ ID NO: 75393 - DNA, 60 bp, Artificial
  Synthetic oligonucleotide
tacaactcaaggtttgagtcagttgcttggtcggcaagtgcttgtcatgatggcattagt

SEQ ID NO: 75394 - DNA, 60 bp, Artificial
  Synthetic oligonucleotide
tagggaaaggatacatgttcgaaagtaagagcatgaagcttcgaacacaaataccggcag

SEQ ID NO: 75395 - DNA, 60 bp, Artificial
  Synthetic oligonucleotide
gggaaaggatacatgttcgaaagtaagagcatgaagcttcgaacacagataccggcagaa

SEQ ID NO: 75396 - DNA, 60 bp, Artificial
  Synthetic oligonucleotide
agacaaaatctgcattgggtaccatgccaacaattcaacaacacaagtggatacgatact

SEQ ID NO: 75397 - DNA, 57 bp, Artificial
  Synthetic oligonucleotide
caaaatctgcattgggtaccatgccaacaattcaacaacacaagtggatacgatact

SEQ ID NO: 75398 - DNA, 59 bp, Artificial
  Synthetic oligonucleotide
gacaaaatctgcattgggtaccatgccaacaattcaacaacacaagtggatacgatact

SEQ ID NO: 75399 - DNA, 54 bp, Artificial
  Synthetic oligonucleotide
aatctgcattgggtaccatgccaacaattcaacaacacaagtggatacgatact

SEQ ID NO: 75400 - DNA, 60 bp, Artificial
  Synthetic oligonucleotide
gggctgatcatagcaatgggtctttggatgtgttcaaatggttcaatgcaatgcaggata

SEQ ID NO: 75401 - DNA, 60 bp, Artificial
  Synthetic oligonucleotide
tggggctgatcatagcaatgggtctttggatgtgttcaaatggttcaatgcaatgcagga

SEQ ID NO: 75402 - DNA, 60 bp, Artificial
  Synthetic oligonucleotide
ggggctgatcatagcaatgggtctttggatgtgttcaaatggttcaatgcaatgcaggat

SEQ ID NO: 75403 - DNA, 60 bp, Artificial
  Synthetic oligonucleotide
ttggtaggtctgatcatagcaatgggtctttggatgtgttcaaatggttcaatgcaatgc

SEQ ID NO: 75404 - DNA, 60 bp, Artificial
  Synthetic oligonucleotide
gtaggtctgatcatagcaatgggtctttggatgtgttcaaatggttcaatgcaatgcagg

SEQ ID NO: 75405 - DNA, 60 bp, Artificial
  Synthetic oligonucleotide
gtggggctgatcatagcaatgggtctttggatgtgttcaaatggttcaatgcaatgcagg

SEQ ID NO: 75406 - DNA, 60 bp, Artificial
  Synthetic oligonucleotide
tagggctgatcatagcaatgggtctttggatgtgttcaaatggttcaatgcaatgcagga

SEQ ID NO: 75407 - DNA, 60 bp, Artificial
  Synthetic oligonucleotide
ggttgggaactgaaagcatgaattttgccaagagtccagaaattgcagaaagacctgctg

SEQ ID NO: 75408 - DNA, 60 bp, Artificial
  Synthetic oligonucleotide
gggctggactgcatgagaccttgcttctgggttgaactaatcaggggacggcccaaggag

SEQ ID NO: 75409 - DNA, 60 bp, Artificial
  Synthetic oligonucleotide
ggactggactgcatgagaccttgcttctgggttgagctgatcaggggaaggcccaaggag

SEQ ID NO: 75410 - DNA, 60 bp, Artificial
  Synthetic oligonucleotide
aatccggggaatgctgaaattgaagatctcatcttcttagcacggtctgcactcattctg

SEQ ID NO: 75411 - DNA, 60 bp, Artificial
  Synthetic oligonucleotide
gaatctaatggaaatctaatcgctccttggtatgcatacaaatttgtcagcacaaacagg

SEQ ID NO: 75412 - DNA, 60 bp, Artificial
  Synthetic oligonucleotide
ccttcaaacattgaaaataagagtgcatgaggggtatgaggaattcacaatggttgggcg

SEQ ID NO: 75413 - DNA, 60 bp, Artificial
  Synthetic oligonucleotide
atccctgggttttgcttaatgcatcttggttcaactccttcctcacacatgcactgaaat

SEQ ID NO: 75414 - DNA, 60 bp, Artificial
  Synthetic oligonucleotide
tgcttaatgcatcttggttcaactccttcctcacacatgcactgaaatagttgtggcaat

SEQ ID NO: 75415 - DNA, 60 bp, Artificial
  Synthetic oligonucleotide
tttgcttaatgcatcttggttcaactccttcctcacacatgcactgaaatagttgtggca

SEQ ID NO: 75416 - DNA, 60 bp, Artificial
  Synthetic oligonucleotide
cactgtgcctggggcaccatgcagtgccgaatgggacaatagtgaagacaatcacagatg

SEQ ID NO: 75417 - DNA, 60 bp, Artificial
  Synthetic oligonucleotide
cactgtgcctgggacatcatgcagtgccgaatgggacaatagtgaagacaatcacagatg

SEQ ID NO: 75418 - DNA, 60 bp, Artificial
  Synthetic oligonucleotide
tatcaaattcttgccatttatagtacggtatcgagcagtctagttttggtagggctgatc

SEQ ID NO: 75419 - DNA, 60 bp, Artificial
  Synthetic oligonucleotide
caaacagcagcacaacgagcaatgatggaccaagtgcgggaaagccggaatcctgggaat

SEQ ID NO: 75420 - DNA, 60 bp, Artificial
  Synthetic oligonucleotide
gtaccaaaagtgctgcaatctattcgagaaattcttccctagcagttcatacaggagacc

SEQ ID NO: 75421 - DNA, 60 bp, Artificial
  Synthetic oligonucleotide
cggagacaatccacgccccaatgatggaacaggcagttgtggtccagtgtcttctaatgg

SEQ ID NO: 75422 - DNA, 60 bp, Artificial
  Synthetic oligonucleotide
aaagttggtcttacatagtggagagacctggagcccaacatgggatatgctacccagggg

SEQ ID NO: 75423 - DNA, 60 bp, Artificial
  Synthetic oligonucleotide
ccagcaaatcagataagatctgcattggataccatgccaacaactcgacaacgcaagtgg

SEQ ID NO: 75424 - DNA, 60 bp, Artificial
  Synthetic oligonucleotide
cccctctggattggagaatgccccaagtatgttaaaagtgatagcctaagactggcaact

SEQ ID NO: 75425 - DNA, 60 bp, Artificial
  Synthetic oligonucleotide
tcttgcttggagaccaaagttggtcttacatagtggagagacctggagcccaacatggga

SEQ ID NO: 75426 - DNA, 60 bp, Artificial
  Synthetic oligonucleotide
gggtgttttgaattttggcataaatgtgatgatgaatgcatcaactcagtgaagaatggc

SEQ ID NO: 75427 - DNA, 60 bp, Artificial
  Synthetic oligonucleotide
gggtgttttgaattttggcataaatgtgatgatgaatgcatcaactcagttaagaatggc

SEQ ID NO: 75428 - DNA, 60 bp, Artificial
  Synthetic oligonucleotide
gctgaacttttagttctactggaaaatgagagaaccttagacctgcacgatgccaatgtg

SEQ ID NO: 75429 - DNA, 60 bp, Artificial
  Synthetic oligonucleotide
gtatgcttacaaattcatcagttccaataacaagggagctgtcttcaaatcaaaccttcc

SEQ ID NO: 75430 - DNA, 60 bp, Artificial
  Synthetic oligonucleotide
gtatgcttacaaattcaccagttccaacaataagggagctgtcttcaaatcaaaccttcc

SEQ ID NO: 75431 - DNA, 60 bp, Artificial
  Synthetic oligonucleotide
acaatgctgaacttttagttctactggaaaatgagagaaccttagacctgcacgatgcca

SEQ ID NO: 75432 - DNA, 60 bp, Artificial
  Synthetic oligonucleotide
tgtggacctacaatgctgaacttttagttctactggaaaatgagagaaccttggacctgc

SEQ ID NO: 75433 - DNA, 60 bp, Artificial
  Synthetic oligonucleotide
gctgaacttttagttctactggaaaatgagagaaccttggacctgcatgatgccaatgtg

SEQ ID NO: 75434 - DNA, 60 bp, Artificial
  Synthetic oligonucleotide
caatgctgaacttttagttctactggaaaatgagagaaccttggatctgcatgatgccaa

SEQ ID NO: 75435 - DNA, 60 bp, Artificial
  Synthetic oligonucleotide
actggcaactggtctgagaaatgtcccacaggcagagacaagaggattgttcggggccat

SEQ ID NO: 75436 - DNA, 60 bp, Artificial
  Synthetic oligonucleotide
tctaccagcaaatcagataagatctgcattggataccatgccaacaactcgacaacgcaa

SEQ ID NO: 75437 - DNA, 60 bp, Artificial
  Synthetic oligonucleotide
gatgtgtggacatacaatgctgaacttttagttctactggaaaatgagagaaccttggat

SEQ ID NO: 75438 - DNA, 60 bp, Artificial
  Synthetic oligonucleotide
ctggtctgagaaatgtcccacaggcagagacaagaggattgttcggggccatagctgggt

SEQ ID NO: 75439 - DNA, 60 bp, Artificial
  Synthetic oligonucleotide
ggaagaacatcccagtgctgggaaagaccccaagaagactggaggcccaatctacaggag

SEQ ID NO: 75440 - DNA, 60 bp, Artificial
  Synthetic oligonucleotide
cttcttaatttgcgttgttctattgggtttcattatgtgggcttgcgaaaaaggcaacat

SEQ ID NO: 75441 - DNA, 60 bp, Artificial
  Synthetic oligonucleotide
ctatagaaccttaatgagctgccctgttggtgaggctccctctccatacaattcaaggtt

SEQ ID NO: 75442 - DNA, 60 bp, Artificial
  Synthetic oligonucleotide
accttaatgagctgccctgttggtgaggctccctctccatacaattcaaggtttgagtcg

SEQ ID NO: 75443 - DNA, 60 bp, Artificial
  Synthetic oligonucleotide
ccttgatgagctgtcctgttggtgaggctccctctccatacaattcaagattcgagtcgg

SEQ ID NO: 75444 - DNA, 60 bp, Artificial
  Synthetic oligonucleotide
cacaagagtctgaatgtgcctgcataaatggttcttgctttactataatgactgatggac

SEQ ID NO: 75445 - DNA, 60 bp, Artificial
  Synthetic oligonucleotide
atgtgcctgcataaatggttcttgctttactataatgactgacggaccaagtaatggcca

SEQ ID NO: 75446 - DNA, 60 bp, Artificial
  Synthetic oligonucleotide
cggtatcgagcggtctagttttggtggggctgatcattgccatgggtctttggatgtgct

SEQ ID NO: 75447 - DNA, 60 bp, Artificial
  Synthetic oligonucleotide
acaacacaagtggacacaatattagagaagaatgtgacagtgacacactcagtggagctc

SEQ ID NO: 75448 - DNA, 60 bp, Artificial
  Synthetic oligonucleotide
cacaagtggacacaatattagagaagaatgtgacagtgacacactcagtggagctcctag

SEQ ID NO: 75449 - DNA, 60 bp, Artificial
  Synthetic oligonucleotide
cgcaagtggacacaatattagagaagaatgtgacagtgacgcactcagttgagctcctag

SEQ ID NO: 75450 - DNA, 60 bp, Artificial
  Synthetic oligonucleotide
gggtgttttgaattttggcacaaatgcgacaatgaatgcatcaactcagttaaaaatggc

SEQ ID NO: 75451 - DNA, 60 bp, Artificial
  Synthetic oligonucleotide
gacaacgcaagtggacacaatattagagaagaatgtgacagtgacgcactcagttgagct

SEQ ID NO: 75452 - DNA, 60 bp, Artificial
  Synthetic oligonucleotide
gacaacacaagtggacacaatattagagaagaatgtgacagtgacacactcagtggagct

SEQ ID NO: 75453 - DNA, 60 bp, Artificial
  Synthetic oligonucleotide
ggctccatatcattgggattggttgtattcaatgttctactgcatgtcgtgagcatcaca

SEQ ID NO: 75454 - DNA, 60 bp, Artificial
  Synthetic oligonucleotide
ccgaatattggatccaggccttgggtcagaggccaatcagggagaataagcatctactgg

SEQ ID NO: 75455 - DNA, 60 bp, Artificial
  Synthetic oligonucleotide
cagatgcagagatgaataaattattcgagaagaccaggcgccagttaagagaaaacgcgg

SEQ ID NO: 75456 - DNA, 57 bp, Artificial
  Synthetic oligonucleotide
cgactatgaaggaaggttgatccagaacagcataacaatagagagaatggttctctc

SEQ ID NO: 75457 - DNA, 60 bp, Artificial
  Synthetic oligonucleotide
cagcgactatgaagggagattgattcagaacagcataacaatagagagaatggttctctc

SEQ ID NO: 75458 - DNA, 60 bp, Artificial
  Synthetic oligonucleotide
gtgttggtgatgaaacggaaacgggactctagcatacttactgacagccagacagcgacc

SEQ ID NO: 75459 - DNA, 60 bp, Artificial
  Synthetic oligonucleotide
ggcaaggagacgtggtgttggtgatgaaacggaaacgggactctagcatacttactgaca

SEQ ID NO: 75460 - DNA, 60 bp, Artificial
  Synthetic oligonucleotide
gacggttggtacggttttaggcatcaaaattctgagggcacaggacaagcagcagacctt

SEQ ID NO: 75461 - DNA, 60 bp, Artificial
  Synthetic oligonucleotide
gagaaagcagaaatcctgggaatgctgaaattgaagatctcatctttctggcacggtctg

SEQ ID NO: 75462 - DNA, 60 bp, Artificial
  Synthetic oligonucleotide
cacgccccaatgatggaacaggcagttgtggtccagtgtcttctaatggagcgtacggag

SEQ ID NO: 75463 - DNA, 60 bp, Artificial
  Synthetic oligonucleotide
cagaccaagaactgggtgatgccccattccttgaccggcttcgccgagatcagaagtctc

SEQ ID NO: 75464 - DNA, 60 bp, Artificial
  Synthetic oligonucleotide
cagaccaagaactgggtgatgccccattccttgaccggcttcgccgagatcagaagtcgc

SEQ ID NO: 75465 - DNA, 60 bp, Artificial
  Synthetic oligonucleotide
cagaccaagaactgggtgatgccccattccttgaccggcttcgccgagatcagaagtcac

SEQ ID NO: 75466 - DNA, 60 bp, Artificial
  Synthetic oligonucleotide
ctatttatagtacggtatcgagcagtctagtcttggtagggctgatcatgtcaatgggtc

SEQ ID NO: 75467 - DNA, 50 bp, Artificial
  Synthetic oligonucleotide
tcatggcccggccaagagcatggaatatgatgctgttgctactactcact

SEQ ID NO: 75468 - DNA, 50 bp, Artificial
  Synthetic oligonucleotide
tcatggcccggccaagagcatggaatatgatgctgttgctactacgcact

SEQ ID NO: 75469 - DNA, 50 bp, Artificial
  Synthetic oligonucleotide
tcatggcccggccaagagcatggaatatgatgctgttgctactacacact

SEQ ID NO: 75470 - DNA, 60 bp, Artificial
  Synthetic oligonucleotide
agagaaggaattctcagaagtagaagggagaatccaagacttggagaagtacgtagaaga

SEQ ID NO: 75471 - DNA, 60 bp, Artificial
  Synthetic oligonucleotide
gagaaggaattctcagaagtagaagggagaatccaagacttggagaagtacgtagaagac

SEQ ID NO: 75472 - DNA, 60 bp, Artificial
  Synthetic oligonucleotide
gttggtgtaacagggccagattccaaggcagtagcagtaattcactatggaggagtgcct

SEQ ID NO: 75473 - DNA, 60 bp, Artificial
  Synthetic oligonucleotide
tagaccatatggccataatcaagaaatacacatcaggaagacaggagaagaaccctgccc

SEQ ID NO: 75474 - DNA, 60 bp, Artificial
  Synthetic oligonucleotide
tgattattattggtctgttttaaagccgggggaaaccttgaatgtggaatctaatggaaa

SEQ ID NO: 75475 - DNA, 60 bp, Artificial
  Synthetic oligonucleotide
caaagctggtcatatatagtggaaagacctactgctcaaaatgggatttgctacccagga

SEQ ID NO: 75476 - DNA, 60 bp, Artificial
  Synthetic oligonucleotide
ggatgggaactgaaagtatgaattttgccaagagtccagaaattgcagcaaggcctgctg

SEQ ID NO: 75477 - DNA, 60 bp, Artificial
  Synthetic oligonucleotide
agctgctcagcatgagagacatgtgtgatgctccctttgatgacagactcagaagagatc

SEQ ID NO: 75478 - DNA, 60 bp, Artificial
  Synthetic oligonucleotide
ggcacataagaaagctgctcagcatgagagacatgtgtgatgctccctttgatgataggc

SEQ ID NO: 75479 - DNA, 60 bp, Artificial
  Synthetic oligonucleotide
gggacctcatcggaggacttgaatggaatgataacacagttcgagtctctgaaactctac

SEQ ID NO: 75480 - DNA, 51 bp, Artificial
  Synthetic oligonucleotide
aactctaatgagtgtagaaatagggcaatcacccaacgtgtaccaggcaag

SEQ ID NO: 75481 - DNA, 51 bp, Artificial
  Synthetic oligonucleotide
aactctaatgagtgtagaaatagggcaatcacccaatgtgtaccaggcaag

SEQ ID NO: 75482 - DNA, 60 bp, Artificial
  Synthetic oligonucleotide
cggcggacttgagtggaatgataactcaattcgagcgtctgaaaatatacagagattcgc

SEQ ID NO: 75483 - DNA, 60 bp, Artificial
  Synthetic oligonucleotide
atcctcatcggcggacttgagtggaatgataactcaattcgagcgtctgaaaatatacag

SEQ ID NO: 75484 - DNA, 60 bp, Artificial
  Synthetic oligonucleotide
ttgccatttatagtacggtatcgagcagtctagtattggtaggactgatcatagcaatgg

SEQ ID NO: 75485 - DNA, 60 bp, Artificial
  Synthetic oligonucleotide
ccttggacatgagcaatgaagggtcttatttcttcggagacaatgcagaggagtatgaca

SEQ ID NO: 75486 - DNA, 60 bp, Artificial
  Synthetic oligonucleotide
gcctgcattaacggttcctgctttaccataatgactgatggaccaagtaatggccaggcc

SEQ ID NO: 75487 - DNA, 60 bp, Artificial
  Synthetic oligonucleotide
gaggtaaacctgaagagataacaatatggacctctagcagctccattgtgatgtgtggag

SEQ ID NO: 75488 - DNA, 60 bp, Artificial
  Synthetic oligonucleotide
tcagaggtaaacctgaagagataacaatatggacctctagcagctccattgtgatgtgtg

SEQ ID NO: 75489 - DNA, 60 bp, Artificial
  Synthetic oligonucleotide
aagagataacaatatggacctctagcagctccattgtgatgtgtggagtagaccataaag

SEQ ID NO: 75490 - DNA, 60 bp, Artificial
  Synthetic oligonucleotide
aagaggtaacaatatggacctctagcagctccattgtgatgtgtggagtagataataaag

SEQ ID NO: 75491 - DNA, 60 bp, Artificial
  Synthetic oligonucleotide
aggatgtttagtcccctgtttctgggttgaaatgatcagaggtaaacctgaagacacaac

SEQ ID NO: 75492 - DNA, 60 bp, Artificial
  Synthetic oligonucleotide
aggatgtttagtcccctgtttctgggttgaaatgatcagaggtaaacctgaagaggtaac

SEQ ID NO: 75493 - DNA, 60 bp, Artificial
  Synthetic oligonucleotide
cccctgtttctgggttgaaatgatcagaggtaaacctgaagagataacaatatggacctc

SEQ ID NO: 75494 - DNA, 60 bp, Artificial
  Synthetic oligonucleotide
cccctgtttctgggttgaaatgatcagaggtaaacctgaagaggtaacaatatggacctc

SEQ ID NO: 75495 - DNA, 60 bp, Artificial
  Synthetic oligonucleotide
gtggcatggtcagcaacagcatgccacgatgggaaaaagtggatgacagttggagtcaca

SEQ ID NO: 75496 - DNA, 52 bp, Artificial
  Synthetic oligonucleotide
gagtgttcgtgttaccccaatgaagggaaggtggagtgcgtatgcagggaca

SEQ ID NO: 75497 - DNA, 52 bp, Artificial
  Synthetic oligonucleotide
gaatgttcgtgttaccccaatgaagggaaggtggagtgcgtatgcagagaca

SEQ ID NO: 75498 - DNA, 60 bp, Artificial
  Synthetic oligonucleotide
aggatgtttagtcccctgtttctgggttgaaatgatcagaggtaaacctgaagagataac

SEQ ID NO: 75499 - DNA, 60 bp, Artificial
  Synthetic oligonucleotide
gtggcatggtcagcaacagcatgccatgatgggaaaaagtggatgacagttggagtcaca

SEQ ID NO: 75500 - DNA, 55 bp, Artificial
  Synthetic oligonucleotide
tcagaggtaaacctgaagacacaacaatatggacctctagcagctccattgtgat

SEQ ID NO: 75501 - DNA, 60 bp, Artificial
  Synthetic oligonucleotide
tcagaggtaaacctgaagacacaacaatatggacctctagcagctccattgtgatgtgtg

SEQ ID NO: 75502 - DNA, 60 bp, Artificial
  Synthetic oligonucleotide
cttcttaatttgcgttgttctgttgggtttcattatgtgggcttgccaaaaaggcaacat

SEQ ID NO: 75503 - DNA, 51 bp, Artificial
  Synthetic oligonucleotide
cttcttaatttgcgttgttctgttgggtttcattatgtgggcttgccaaaa

SEQ ID NO: 75504 - DNA, 60 bp, Artificial
  Synthetic oligonucleotide
gtggaccatatggccataatcaagaaatacacatcggggagacaagagaagaaccctgct

SEQ ID NO: 75505 - DNA, 60 bp, Artificial
  Synthetic oligonucleotide
tatttatagtacggtatcgagcagtctggttttggtagggctgatcatggcaatgggtct

SEQ ID NO: 75506 - DNA, 60 bp, Artificial
  Synthetic oligonucleotide
gagctcttgtgcgtactgggatggaccccagaatgtgctctctgatgcaaggatcaactc

SEQ ID NO: 75507 - DNA, 60 bp, Artificial
  Synthetic oligonucleotide
cagattctataggacttgcaaactggtcgggatcaacatgagcaaaaagaagtcctacat

SEQ ID NO: 75508 - DNA, 60 bp, Artificial
  Synthetic oligonucleotide
agacattcttcggcaaaatccaacagaggaacaagctgtggatatatgcaaggcagcaat

SEQ ID NO: 75509 - DNA, 60 bp, Artificial
  Synthetic oligonucleotide
cgagaaattcttccctagcagttcatacaggagaccggttgggatttccagcatggtgga

SEQ ID NO: 75510 - DNA, 60 bp, Artificial
  Synthetic oligonucleotide
agaagagatcaaaaggcattaaagggaagaggcagcacacttggactcgacctgcgagtg

SEQ ID NO: 75511 - DNA, 60 bp, Artificial
  Synthetic oligonucleotide
gaatgcggagtccaatggaaatctaatcgccccttggtatgcatacaaatttgtcagcac

SEQ ID NO: 75512 - DNA, 60 bp, Artificial
  Synthetic oligonucleotide
gaatgtagagtccaatggaaatctaatcgccccttggtatgcatacaaatttgtcagcac

SEQ ID NO: 75513 - DNA, 60 bp, Artificial
  Synthetic oligonucleotide
ttctcaaggctcaggatatgcagcagacagagaaagcacccaaaaggctatagacggaat

SEQ ID NO: 75514 - DNA, 54 bp, Artificial
  Synthetic oligonucleotide
catcctcaacacaagccaaaggggaatactcgaagatgaacagatgtatcaaaa

SEQ ID NO: 75515 - DNA, 60 bp, Artificial
  Synthetic oligonucleotide
catcctcaacacaagccaaaggggaatactcgaagatgaacagatgtatcaaaaatgctg

SEQ ID NO: 75516 - DNA, 60 bp, Artificial
  Synthetic oligonucleotide
gcaggcaaaccatttgaatggatgtcaatccgactttacttttcttgaaaattccagcgc

SEQ ID NO: 75517 - DNA, 60 bp, Artificial
  Synthetic oligonucleotide
gggtggtatggctatcaccatgaaaattctcaaggctcaggatatgcagcagacagagaa

SEQ ID NO: 75518 - DNA, 60 bp, Artificial
  Synthetic oligonucleotide
tcaggatgggaactgaaagcatgaattttgccaagagtccagaaattgcggcaaggcctg

SEQ ID NO: 75519 - DNA, 60 bp, Artificial
  Synthetic oligonucleotide
gcacttgcatccaaggtgattgctattgggtaatgactgacggccccgccaataggcagg

SEQ ID NO: 75520 - DNA, 60 bp, Artificial
  Synthetic oligonucleotide
gaatcatcctgcacttgcatccaaggtgattgctattgggtaatgactgacggccccgcc

SEQ ID NO: 75521 - DNA, 60 bp, Artificial
  Synthetic oligonucleotide
cttcttttgacatgagcaacgaagggtcttatttcttcggagacaatgcagaggaatatg

SEQ ID NO: 75522 - DNA, 60 bp, Artificial
  Synthetic oligonucleotide
atcaacatcatggcgtctcaaggcaccaaacgatcttatgaacagatggaaactggtggg

SEQ ID NO: 75523 - DNA, 60 bp, Artificial
  Synthetic oligonucleotide
gggtcctcatcggtggacttgaatggaatgataacacagttcgagtctctgaaactctac

SEQ ID NO: 75524 - DNA, 60 bp, Artificial
  Synthetic oligonucleotide
ccaaacattgaaaataagagtacatgaagggtatgaggaattcacaatggttgggcgaag

SEQ ID NO: 75525 - DNA, 60 bp, Artificial
  Synthetic oligonucleotide
ccagccaagagcatggaatatgatgctgttgctactacacactcctggattcctaaaagg

SEQ ID NO: 75526 - DNA, 51 bp, Artificial
  Synthetic oligonucleotide
agacagtagtgagggaatacaatgagacagttaggatagagaaggtaactc

SEQ ID NO: 75527 - DNA, 60 bp, Artificial
  Synthetic oligonucleotide
atgacaattggtgtcacagggccagattccaaggcagtagcagtagttcattatggaggg

SEQ ID NO: 75528 - DNA, 60 bp, Artificial
  Synthetic oligonucleotide
cagggccagattccaaggcagtagcagtagttcattatggaggggtgcctactgatgtcg

SEQ ID NO: 75529 - DNA, 60 bp, Artificial
  Synthetic oligonucleotide
aaggaggatggactggaatgatagatggatggtatggctatcaccatgaaaattctcaag

SEQ ID NO: 75530 - DNA, 60 bp, Artificial
  Synthetic oligonucleotide
ggaggatggactggaatgatagatggatggtatggctatcaccatgaaaattctcaaggc

SEQ ID NO: 75531 - DNA, 60 bp, Artificial
  Synthetic oligonucleotide
aataatggagaagacgcaactgctggtctcacccatttgatgatctggcattccaatctg

SEQ ID NO: 75532 - DNA, 60 bp, Artificial
  Synthetic oligonucleotide
tattggtctgttttacggccaggggaaaccttgaatgtggaatctaatggaaatctaatc

SEQ ID NO: 75533 - DNA, 60 bp, Artificial
  Synthetic oligonucleotide
ataattctattaatcatgaagaccatcattgttctaagttatcttttctgtctggctctc

SEQ ID NO: 75534 - DNA, 60 bp, Artificial
  Synthetic oligonucleotide
ataattctattaatcatgaagaccatcattgttctaagctatcttttctgtctggctctc

SEQ ID NO: 75535 - DNA, 60 bp, Artificial
  Synthetic oligonucleotide
ggggaatccccgatgtgacctgttgcttggtgatcaaagctggtcatatatagtggaaag

SEQ ID NO: 75536 - DNA, 60 bp, Artificial
  Synthetic oligonucleotide
ggaattttcggagctatcgcaggttttattgaaggaggatggactggaatgatagatggg

SEQ ID NO: 75537 - DNA, 60 bp, Artificial
  Synthetic oligonucleotide
ccattggctccatatcattgggattggttgtattcaatgttctactgcatgtcgtaagca

SEQ ID NO: 75538 - DNA, 60 bp, Artificial
  Synthetic oligonucleotide
ccattggctccatatcattgggattggttgtattcaatgttctactgcatgtcgtgagca

SEQ ID NO: 75539 - DNA, 60 bp, Artificial
  Synthetic oligonucleotide
ggtcatgcaccagccccatggggaatcaggggtatggtgtaaaaggcttcggatttcgac

SEQ ID NO: 75540 - DNA, 60 bp, Artificial
  Synthetic oligonucleotide
atggggaatcaggggtatggtgtaaaaggctttggatttcggcagggaactgatgtatgg

SEQ ID NO: 75541 - DNA, 60 bp, Artificial
  Synthetic oligonucleotide
cttccttggacatgagcaatgaagggtcttatttcttcggagacaatgcagaggagtatg

SEQ ID NO: 75542 - DNA, 60 bp, Artificial
  Synthetic oligonucleotide
ggggtatggtgtaaaaggcttcggatttcggcagggaactgatgtatggatggggcggac

SEQ ID NO: 75543 - DNA, 60 bp, Artificial
  Synthetic oligonucleotide
ggggtacggtgtaaaaggcttcggatttcgacagggaactgatgtatggatggggcggac

SEQ ID NO: 75544 - DNA, 60 bp, Artificial
  Synthetic oligonucleotide
ggatttcgacagggaactgatgtatggatggggcggacaattagtcgaacctccaggtca

SEQ ID NO: 75545 - DNA, 60 bp, Artificial
  Synthetic oligonucleotide
cagggaactgatgtatggatggggcggacaattagtcgaacctccaggtcaggatttgag

SEQ ID NO: 75546 - DNA, 60 bp, Artificial
  Synthetic oligonucleotide
ggggtatggtgtaaaaggctttggatttcggcagggaactgatgtatggatggggcggac

SEQ ID NO: 75547 - DNA, 60 bp, Artificial
  Synthetic oligonucleotide
cggatttcggcagggaactgatgtatggatggggcggacaattagtcgaacctccaggtc

SEQ ID NO: 75548 - DNA, 51 bp, Artificial
  Synthetic oligonucleotide
tgaagggaggctgattcagaacagcataacaatagagagaatggttctctc

SEQ ID NO: 75549 - DNA, 60 bp, Artificial
  Synthetic oligonucleotide
gcgcccaatcatgaaggaatacaggctggagtagacagattctataggacttgcaaactg

SEQ ID NO: 75550 - DNA, 60 bp, Artificial
  Synthetic oligonucleotide
gatgtttcccaaaagtacatgggcaggagtagacactagcagtggggtaacaagagcttg

SEQ ID NO: 75551 - DNA, 60 bp, Artificial
  Synthetic oligonucleotide
gggaatgctgaaattgaagatctcatcttcctggcacggtctgcactcatcctgagggga

SEQ ID NO: 75552 - DNA, 60 bp, Artificial
  Synthetic oligonucleotide
aaattcttgccatttatagtacggtatcgagcagtctagtcttggtagggctgatcatag

SEQ ID NO: 75553 - DNA, 60 bp, Artificial
  Synthetic oligonucleotide
tcttctaacggggcatttggagtgaaagggttttcatttaaatacggcaatggtgtttgg

SEQ ID NO: 75554 - DNA, 60 bp, Artificial
  Synthetic oligonucleotide
tcctctaacggggcatttggagtgaaagggttttcatttaaatacggcaatggtgtttgg

SEQ ID NO: 75555 - DNA, 60 bp, Artificial
  Synthetic oligonucleotide
cttctaatggagcgtacggagtaaaagggttttcatttaaatacggcaatggtgtttgga

SEQ ID NO: 75556 - DNA, 60 bp, Artificial
  Synthetic oligonucleotide
ggagcgtacggagtaaaagggttttcatttaaatacggcaatggtgtttggatagggaga

SEQ ID NO: 75557 - DNA, 60 bp, Artificial
  Synthetic oligonucleotide
cggggcatttggagtgaaagggttttcatttaaatacggcaatggtgtttggattgggag

SEQ ID NO: 75558 - DNA, 60 bp, Artificial
  Synthetic oligonucleotide
gggttttcatttaaatacggcaatggtgtttggataggaagaactaagagcactagttca

SEQ ID NO: 75559 - DNA, 60 bp, Artificial
  Synthetic oligonucleotide
aaggcaacatcaggtgcaacatttgcatttgagtaaactgatagttaaaaacacccttgt

SEQ ID NO: 75560 - DNA, 60 bp, Artificial
  Synthetic oligonucleotide
ttcatcatgtgggcttgccaaaaaggcaacatcaggtgcaacatttgcatttgagtaaac

SEQ ID NO: 75561 - DNA, 60 bp, Artificial
  Synthetic oligonucleotide
ggtcaatcaggcagaataagcatatattggaccattgtgaaacctggagatgttttagtg

SEQ ID NO: 75562 - DNA, 60 bp, Artificial
  Synthetic oligonucleotide
gaggtcaatcaggcagaataagcatatattggaccattgtgaaacctggagatgttttag

SEQ ID NO: 75563 - DNA, 60 bp, Artificial
  Synthetic oligonucleotide
tctcgtgcgtactgggatggaccccagaatgtgctctctgatgcaaggatcaactcttcc

SEQ ID NO: 75564 - DNA, 60 bp, Artificial
  Synthetic oligonucleotide
ggggaatccccgatgcgacctgttacttggtgatcaaagctggtcatatatagtggaaag

SEQ ID NO: 75565 - DNA, 60 bp, Artificial
  Synthetic oligonucleotide
cgaccaagaaggaagattgatccagaacagtataacaatagagagaatggttctctctgc

SEQ ID NO: 75566 - DNA, 60 bp, Artificial
  Synthetic oligonucleotide
ctcagaccgagtgatggtatcacctctagctgtgacatggtggaataggaatggaccaac

SEQ ID NO: 75567 - DNA, 60 bp, Artificial
  Synthetic oligonucleotide
ccctcaaagccgagatcgcgcagagacttgaagatgtctttgcagggaagaacacagatc

SEQ ID NO: 75568 - DNA, 60 bp, Artificial
  Synthetic oligonucleotide
ggagagccggaatcctgggaatgctgaaattgaagatctcatcttcctcgcacggtctgc

SEQ ID NO: 75569 - DNA, 60 bp, Artificial
  Synthetic oligonucleotide
caggcagggaatagaatcggtgaagctagagaatcttggtgtgtatcaaattcttgctat

SEQ ID NO: 75570 - DNA, 60 bp, Artificial
  Synthetic oligonucleotide
caggcaggaaatagagtcggtaaaattagagaatcttggtgtgtatcaaattcttgctat

SEQ ID NO: 75571 - DNA, 61 bp, Artificial
  Synthetic oligonucleotide
ggtaaaattagagaatcttggtgtgtatcaaattcttgctatttatagtacggtatcgagc

SEQ ID NO: 75572 - DNA, 60 bp, Artificial
  Synthetic oligonucleotide
gagaacggaaatcataaggatgatggaaaatgccagatcagaagatgtgtctttccaggg

SEQ ID NO: 75573 - DNA, 60 bp, Artificial
  Synthetic oligonucleotide
acatgagaacggaaatcataaggatgatggaaaatgccagatcagaagatgtgtctttcc

SEQ ID NO: 75574 - DNA, 60 bp, Artificial
  Synthetic oligonucleotide
ctcgaggctctcatggaatggctaaagacaagaccaatcctgtcacctctgacaaagggg

SEQ ID NO: 75575 - DNA, 60 bp, Artificial
  Synthetic oligonucleotide
aacactgatcttgaggctctcatggaatggctaaagacaagaccaatcctgtcacctctg

SEQ ID NO: 75576 - DNA, 60 bp, Artificial
  Synthetic oligonucleotide
agggaggctgatccagaacagcataacaatagagagaatggttctctctgcatttgatga

SEQ ID NO: 75577 - DNA, 60 bp, Artificial
  Synthetic oligonucleotide
aagagtacatgaagggtatgaggaattcacaatggttgggcgaagggcaacagctatcct

SEQ ID NO: 75578 - DNA, 50 bp, Artificial
  Synthetic oligonucleotide
agggcggctgattcagaacagcataacaatagagaggatggtgctttcgg

SEQ ID NO: 75579 - DNA, 60 bp, Artificial
  Synthetic oligonucleotide
aagctagagaaccttggtgtgtatcaaattcttgccatttatagtacggtatcgagcagc

SEQ ID NO: 75580 - DNA, 60 bp, Artificial
  Synthetic oligonucleotide
taggatacatatgcagtggagttttcggagacaatccacgccccaatgatggaacaggca

SEQ ID NO: 75581 - DNA, 60 bp, Artificial
  Synthetic oligonucleotide
tcttggtgtgtatcaaatccttgctatttatagtacggtatcgagcagtctggtattggc

SEQ ID NO: 75582 - DNA, 60 bp, Artificial
  Synthetic oligonucleotide
taggaaaatgccccaaatatgtgaaaagtgaaagtcttaggcttgcaactggactgagaa

SEQ ID NO: 75583 - DNA, 60 bp, Artificial
  Synthetic oligonucleotide
aggaacggagaagctgacaataacttactcgtcatcaatgatgtgggagatcaatggtcc

SEQ ID NO: 75584 - DNA, 60 bp, Artificial
  Synthetic oligonucleotide
cctgatcgcccctcgagggtacttcaaaatgcgcactgggaaaagctcaataatgaggtc

SEQ ID NO: 75585 - DNA, 60 bp, Artificial
  Synthetic oligonucleotide
cctgatagctcctcgagggtacttcaaaatgcgcactgggaaaagctcaataatgaggtc

SEQ ID NO: 75586 - DNA, 60 bp, Artificial
  Synthetic oligonucleotide
taacctgatcgctcctcgagggtacttcaaaatgcgcactgggaaaagctcaataatgag

SEQ ID NO: 75587 - DNA, 60 bp, Artificial
  Synthetic oligonucleotide
cctgatcgctcctcgagggtacttcaaaatgcgcactgggaaaagctcaataatgaggtc

SEQ ID NO: 75588 - DNA, 60 bp, Artificial
  Synthetic oligonucleotide
aatatacagagattcgcttggggaatccatgatgaggatgggggacctccactccctcca

SEQ ID NO: 75589 - DNA, 60 bp, Artificial
  Synthetic oligonucleotide
gttagttcagggctcctcaacagggaaaatatgcaacaacccacatagaatccttgatgg

SEQ ID NO: 75590 - DNA, 60 bp, Artificial
  Synthetic oligonucleotide
ggtccagggctcctcaacagggaaaatatgcaacaacccacatagaatccttgatggacg

SEQ ID NO: 75591 - DNA, 60 bp, Artificial
  Synthetic oligonucleotide
actcagaagagaccagaaggcattaaagggaagaggcagcacacttggactcgacctgcg

SEQ ID NO: 75592 - DNA, 60 bp, Artificial
  Synthetic oligonucleotide
tctcgcttacagagttgggtacttatgtgcggggctgcccagtgatactccaagagggga

SEQ ID NO: 75593 - DNA, 60 bp, Artificial
  Synthetic oligonucleotide
ctgcatgtcgtgagcatcatagtaacagtattagtccttgggagaggtggaaacaacggg

SEQ ID NO: 75594 - DNA, 60 bp, Artificial
  Synthetic oligonucleotide
ctatttatagtacggtatcgagcagtctagttttggtaggactgatcatggcaataggtc

SEQ ID NO: 75595 - DNA, 60 bp, Artificial
  Synthetic oligonucleotide
cctttgacatgaataacgaaggatcttatttcttcggagacaatgcagaggaatatgaca

SEQ ID NO: 75596 - DNA, 60 bp, Artificial
  Synthetic oligonucleotide
gactgctttctttggcacgtccgcaaacgatttgcagaccaagaactgggtgatgcccca

SEQ ID NO: 75597 - DNA, 60 bp, Artificial
  Synthetic oligonucleotide
aaacgatttgcagaccaagaactgggtgatgccccattcctcgatcggcttcgccgagat

SEQ ID NO: 75598 - DNA, 60 bp, Artificial
  Synthetic oligonucleotide
aaacgatttgcagaccaagaactgggtgatgccccattccttgaccggctccgccgagat

SEQ ID NO: 75599 - DNA, 60 bp, Artificial
  Synthetic oligonucleotide
aacgatttgcagaccaagaactgggtgatgccccatttcttgaccggcttcgccgagatc

SEQ ID NO: 75600 - DNA, 60 bp, Artificial
  Synthetic oligonucleotide
ggggaaaggatacatgttcgaaagtaagagcatgaagctacggacacaaataccagcaga

SEQ ID NO: 75601 - DNA, 51 bp, Artificial
  Synthetic oligonucleotide
gcgaccaaaagaattcggatggccatcaattagtgtcgaattgtttaaaaa

SEQ ID NO: 75602 - DNA, 60 bp, Artificial
  Synthetic oligonucleotide
aggcacttccaaaaggatgcaaaagtgctgtttcagaactggggaattgaacctattgat

SEQ ID NO: 75603 - DNA, 60 bp, Artificial
  Synthetic oligonucleotide
ggcacttccaaaaggatgcaaaagtgctgtttcagaactggggaattgaacctattgata

SEQ ID NO: 75604 - DNA, 60 bp, Artificial
  Synthetic oligonucleotide
ggaggatggactggaatgatagatgggtggtatggctatcaccatgaaaattctcaaggc

SEQ ID NO: 75605 - DNA, 60 bp, Artificial
  Synthetic oligonucleotide
caggaacgttagaattcatggcagagggattcacatggacaggtgtcactcaaaacggaa

SEQ ID NO: 75606 - DNA, 60 bp, Artificial
  Synthetic oligonucleotide
cccatacgacgtccctgactatgcatcgctccggtctattgtagcatcctcaggaacgtt

SEQ ID NO: 75607 - DNA, 60 bp, Artificial
  Synthetic oligonucleotide
tcctcaggaacattagaattcacagcagagggattcacatggacaggtgtcactcaaaac

SEQ ID NO: 75608 - DNA, 60 bp, Artificial
  Synthetic oligonucleotide
cctcaggaacattagaattcacagcagagggattcacatggacaggtgtcactcaaaacg

SEQ ID NO: 75609 - DNA, 60 bp, Artificial
  Synthetic oligonucleotide
tggccagacggatatcagttttaatggaggacatattgaagagtgttcttgctatcctaa

SEQ ID NO: 75610 - DNA, 60 bp, Artificial
  Synthetic oligonucleotide
ttattgcttggtgatcaaagctggtcatatatagtggaaaggcctactgctcaaaatggg

SEQ ID NO: 75611 - DNA, 60 bp, Artificial
  Synthetic oligonucleotide
gatagatgggtggtatggctatcaccatgaaaattctcaaggctcaggatatgcagcaga

SEQ ID NO: 75612 - DNA, 60 bp, Artificial
  Synthetic oligonucleotide
ctggtcgggatcaacatgagcaaaaagaagtcctacataaatagaaccggcacattcgaa

SEQ ID NO: 75613 - DNA, 60 bp, Artificial
  Synthetic oligonucleotide
ataatccccaacatcgggtccagaccgtgggtcaggggtcaatcaggcaggataagcata

SEQ ID NO: 75614 - DNA, 60 bp, Artificial
  Synthetic oligonucleotide
atggactccaacacgataacctcgtttcaggtagattgctatctatggcacataagaaaa

SEQ ID NO: 75615 - DNA, 60 bp, Artificial
  Synthetic oligonucleotide
ccatatggccataatcaagaaatacacatcaggaagacaggagaagaaccctgccctcag

SEQ ID NO: 75616 - DNA, 60 bp, Artificial
  Synthetic oligonucleotide
tgaaagaaatgaacagggacaaaccctttggagcaaatcaaatgatgccggctcagaccg

SEQ ID NO: 75617 - DNA, 60 bp, Artificial
  Synthetic oligonucleotide
ccagcaagtcagacaagatctgcattggataccatgccaacaactcgacaacgcaagtgg

SEQ ID NO: 75618 - DNA, 60 bp, Artificial
  Synthetic oligonucleotide
tctaccagcaaatcagacaagatctgcattggataccatgccaacaactcgacaacgcaa

SEQ ID NO: 75619 - DNA, 60 bp, Artificial
  Synthetic oligonucleotide
ccagcaaatcagacaagatctgcattggataccatgccaacaactcgacaacgcaagtgg

SEQ ID NO: 75620 - DNA, 60 bp, Artificial
  Synthetic oligonucleotide
tctaccagcaagtcagacaagatctgcattggataccatgccaacaactcgacaacgcaa

SEQ ID NO: 75621 - DNA, 60 bp, Artificial
  Synthetic oligonucleotide
aagacaatggaataagaattggatcgagaggtcatgtttttgttataagggaaccatttg

SEQ ID NO: 75622 - DNA, 60 bp, Artificial
  Synthetic oligonucleotide
aggagaataggcaatctgaacaaaagaatggaagatggatttttagacgtgtggacatac

SEQ ID NO: 75623 - DNA, 56 bp, Artificial
  Synthetic oligonucleotide
aggcaatctgaacaaaagaatggaagatggatttttagacgtgtggacatacaatg

SEQ ID NO: 75624 - DNA, 60 bp, Artificial
  Synthetic oligonucleotide
tgtatttgtcatcagagagccttttatttcatgctcccacttggaatgcaggactttctt

SEQ ID NO: 75625 - DNA, 60 bp, Artificial
  Synthetic oligonucleotide
gctcatgctaccccaatgaaggtaaagtggaatgtgtttgcagagacaactggactggaa

SEQ ID NO: 75626 - DNA, 60 bp, Artificial
  Synthetic oligonucleotide
gccatatagaagaatgctcatgctaccccaatgaaggtaaagtggaatgtgtttgcagag

SEQ ID NO: 75627 - DNA, 60 bp, Artificial
  Synthetic oligonucleotide
cagtggaggccatatagaagaatgctcatgctaccccaatgaaggtaaagtggaatgtgt

SEQ ID NO: 75628 - DNA, 60 bp, Artificial
  Synthetic oligonucleotide
gggagattctacatacagatgtgcactgaactcaaactcagcgactatgaaggaaggttg

SEQ ID NO: 75629 - DNA, 60 bp, Artificial
  Synthetic oligonucleotide
gaacataacagagatagtgtatttgaataatactaccatagaaaaagagatttgtcctga

SEQ ID NO: 75630 - DNA, 60 bp, Artificial
  Synthetic oligonucleotide
agatataaatatggcagattatagcattgactcaagttatgtgtgctcaggacttgttgg

SEQ ID NO: 75631 - DNA, 60 bp, Artificial
  Synthetic oligonucleotide
aatagagaggaacataacagagatagtatatttgaataatactaccatagaaaaagagat

SEQ ID NO: 75632 - DNA, 60 bp, Artificial
  Synthetic oligonucleotide
acatttggataacaagagaaccttatgtgtcatgcgaccccagtaaatgttatcaatttg

SEQ ID NO: 75633 - DNA, 60 bp, Artificial
  Synthetic oligonucleotide
gcagattatagcattgactcaagttatgtgtgctcaggacttgttggagacacaccaagg

SEQ ID NO: 75634 - DNA, 60 bp, Artificial
  Synthetic oligonucleotide
atgtgtgctcaggacttgttggagacacaccaaggaacgatgatagctctagcagcagca

SEQ ID NO: 75635 - DNA, 60 bp, Artificial
  Synthetic oligonucleotide
gagaaccttatgtgtcatgcgaccccagtaaatgttatcaatttgcactcgggcagggga

SEQ ID NO: 75636 - DNA, 60 bp, Artificial
  Synthetic oligonucleotide
ctcaaacagtattgtcgtattttgtggcacttcagggacatatggaacaggctcatggcc

SEQ ID NO: 75637 - DNA, 60 bp, Artificial
  Synthetic oligonucleotide
ggtggacctcaaacagtattgtcgtattttgtggcacttcagggacatatggaacaggct

SEQ ID NO: 75638 - DNA, 60 bp, Artificial
  Synthetic oligonucleotide
atggtggacctcaaacagtattgtcgtattttgtggcacttcaggtacttatggaacagg

SEQ ID NO: 75639 - DNA, 60 bp, Artificial
  Synthetic oligonucleotide
gtgtttttatgtggagttgataagaggaaggccacaggagactagagtatggtggacctc

SEQ ID NO: 75640 - DNA, 60 bp, Artificial
  Synthetic oligonucleotide
aggtgtttttatgtggagttgataagaggaaggccacaggagactagagtatggtggacc

SEQ ID NO: 75641 - DNA, 57 bp, Artificial
  Synthetic oligonucleotide
tctggttattctggtattttctctgttgaaagcaaaggctgcatcaataggtgtttt

SEQ ID NO: 75642 - DNA, 60 bp, Artificial
  Synthetic oligonucleotide
tctggttattctggtattttctctgttgaaagcaaaggctgcatcaataggtgtttttat

SEQ ID NO: 75643 - DNA, 51 bp, Artificial
  Synthetic oligonucleotide
tggtggttgggccacagctaattccaagtcacagaccaatagacaagtcat

SEQ ID NO: 75644 - DNA, 60 bp, Artificial
  Synthetic oligonucleotide
cttgttggagacacaccaaggaacgatgatagctctagcagcagcaactgcagggatcct

SEQ ID NO: 75645 - DNA, 60 bp, Artificial
  Synthetic oligonucleotide
gacttgttggagacacaccaaggaacgatgatagctctagcagcagcaactgcagggatc

SEQ ID NO: 75646 - DNA, 56 bp, Artificial
  Synthetic oligonucleotide
tttatggcatataagaaagctgctcagcatgagagacatgtgtgatgctccctttg

SEQ ID NO: 75647 - DNA, 60 bp, Artificial
  Synthetic oligonucleotide
gctatttatggcatataagaaagctgctcagcatgagagacatgtgtgatgctccctttg

SEQ ID NO: 75648 - DNA, 60 bp, Artificial
  Synthetic oligonucleotide
gggtcagtatccttaggattggtagtccttaatattctcctacatatagttagcattaca

SEQ ID NO: 75649 - DNA, 60 bp, Artificial
  Synthetic oligonucleotide
attgggtcagtatccttaggattggtagtccttaatattctcctacatatagttagcatt

SEQ ID NO: 75650 - DNA, 60 bp, Artificial
  Synthetic oligonucleotide
ccattgggtcagtatccttaggattggtagtccttaatattctcctacatatagttagca

SEQ ID NO: 75651 - DNA, 60 bp, Artificial
  Synthetic oligonucleotide
gcctcctcaggaaccctagagttcatcacagaaggattcacatggacaggagtcactcaa

SEQ ID NO: 75652 - DNA, 60 bp, Artificial
  Synthetic oligonucleotide
tggcatggttcgaatcgaccatgggtgtctttcaatcaggatctagactaccaaatagga

SEQ ID NO: 75653 - DNA, 60 bp, Artificial
  Synthetic oligonucleotide
catttccttctgtggtgtaagtagcgacactgtaggttggtcttggccagacggtgctga

SEQ ID NO: 75654 - DNA, 60 bp, Artificial
  Synthetic oligonucleotide
ccttttgtggggtaaatagcgacactgtaggttggtcttggccagacggtgctgagttgc

SEQ ID NO: 75655 - DNA, 60 bp, Artificial
  Synthetic oligonucleotide
tggctcgaatcgaccatgggtgtctttcaatcagaatctagagtatcagataggatacat

SEQ ID NO: 75656 - DNA, 60 bp, Artificial
  Synthetic oligonucleotide
ggagtatcaaataggatacatatgcagtggggttttcggagacaatccacgccccaatga

SEQ ID NO: 75657 - DNA, 60 bp, Artificial
  Synthetic oligonucleotide
agcaaaagcaggagttcaaaatgaatccaaatcggaagataataactattgggtcaatct

SEQ ID NO: 75658 - DNA, 60 bp, Artificial
  Synthetic oligonucleotide
ttgtggcacttcaggtacctatggaacaggctcatggcctgatggggcgaacatcaattt

SEQ ID NO: 75659 - DNA, 60 bp, Artificial
  Synthetic oligonucleotide
agccaggagaaaccttgaatgtggaatccaatggaaatttaatagctccttggtatgctt

SEQ ID NO: 75660 - DNA, 60 bp, Artificial
  Synthetic oligonucleotide
ccaggagaaaccttgaatgtggaatccaatggaaatttaatagctccttggtatgcttac

SEQ ID NO: 75661 - DNA, 60 bp, Artificial
  Synthetic oligonucleotide
gggaggttctacatacagatgtgcactgaactcaaactcagtgactacgaagggaggctg

SEQ ID NO: 75662 - DNA, 60 bp, Artificial
  Synthetic oligonucleotide
tggtaattggaatagtcagcttgattttacaaattggaaacataatctcaatatggatta

SEQ ID NO: 75663 - DNA, 60 bp, Artificial
  Synthetic oligonucleotide
gcgtggtcagccactgcgtgtcacgatgggaagaaatggatgacaattggagtaacgggc

SEQ ID NO: 75664 - DNA, 60 bp, Artificial
  Synthetic oligonucleotide
gcttggtcagccactgcatgccatgatgggaagaaatggatgacaattggagtaacgggc

SEQ ID NO: 75665 - DNA, 60 bp, Artificial
  Synthetic oligonucleotide
ggtcagccactgcgtgtcacgatgggaagaaatggatgacaattggagtaacgggccctg

SEQ ID NO: 75666 - DNA, 60 bp, Artificial
  Synthetic oligonucleotide
gccactgcatgccatgatgggaagaaatggatgacaattggagtaacgggccctgatgcc

SEQ ID NO: 75667 - DNA, 60 bp, Artificial
  Synthetic oligonucleotide
acggaaacgtgactctagcatacttactgacagccagacagcgaccaaaaggattcggat

SEQ ID NO: 75668 - DNA, 60 bp, Artificial
  Synthetic oligonucleotide
cgtgactctagcatacttactgacagccagacagcgaccaaaaggattcggatggccatc

SEQ ID NO: 75669 - DNA, 60 bp, Artificial
  Synthetic oligonucleotide
ttggaagcaatggctttccttgaagaatcccacccagggatctttgaaaactcatgcctt

SEQ ID NO: 75670 - DNA, 60 bp, Artificial
  Synthetic oligonucleotide
accgaactcaaactcagcgactatgaagggaggctgattcagaacagcataacaatagag

SEQ ID NO: 75671 - DNA, 60 bp, Artificial
  Synthetic oligonucleotide
cactacgaggagtgctcctgttatcctgatgatggcgaaatcacgtgtgtgtgcagagat

SEQ ID NO: 75672 - DNA, 60 bp, Artificial
  Synthetic oligonucleotide
gcggagggttgacataaaccctggccacgcagacctcagtgccaaagaggcacaggatgt

SEQ ID NO: 75673 - DNA, 60 bp, Artificial
  Synthetic oligonucleotide
ctcagaccgagtgatggtatcacctctggccgtgacatggtggaataggaatggaccaac

SEQ ID NO: 75674 - DNA, 60 bp, Artificial
  Synthetic oligonucleotide
aaatgcttacgggcaaccttcaaacattgaaaataagagtacatgaggggtatgaagagt

SEQ ID NO: 75675 - DNA, 60 bp, Artificial
  Synthetic oligonucleotide
aagtgcttacgggcaaccttcaaacattgaaaataagagtacatgaggggtatgaagagt

SEQ ID NO: 75676 - DNA, 60 bp, Artificial
  Synthetic oligonucleotide
gtttcgggtttcgacaagggaatgacgtgtgggttggaaggacaattagtaagacttcca

SEQ ID NO: 75677 - DNA, 60 bp, Artificial
  Synthetic oligonucleotide
tggtcaggatatagtggttcttttacattgccggttgaactaacaaagaaaggatgttta

SEQ ID NO: 75678 - DNA, 60 bp, Artificial
  Synthetic oligonucleotide
agtaagagtagaaagaatcactcaatggtataatactaatataatcgagtatatagggag

SEQ ID NO: 75679 - DNA, 60 bp, Artificial
  Synthetic oligonucleotide
gtttcgggtttcgacaagggaatgacgtgtgggccggaaggacaattagtaggacctcca

SEQ ID NO: 75680 - DNA, 60 bp, Artificial
  Synthetic oligonucleotide
ggttcttttacattgccggttgaactaacaaagaaaggatgtttagtcccctgtttctgg

SEQ ID NO: 75681 - DNA, 60 bp, Artificial
  Synthetic oligonucleotide
tggtcaggatatagtggttctttcacattgccggttgaactaacaaagaaaggatgttta

SEQ ID NO: 75682 - DNA, 60 bp, Artificial
  Synthetic oligonucleotide
gataatcactcatcgagtgacatccacatcatggcgtctcaaggcaccaaacgatcttat

SEQ ID NO: 75683 - DNA, 60 bp, Artificial
  Synthetic oligonucleotide
gtccttgaagcaatggctttccttgaagagtcccacccaggaatctttgaaaactcgtgt

SEQ ID NO: 75684 - DNA, 60 bp, Artificial
  Synthetic oligonucleotide
tgtgagcccgctgtggataggagaatgccccaaatatgtgaaaagtgaaagtctgaggct

SEQ ID NO: 75685 - DNA, 60 bp, Artificial
  Synthetic oligonucleotide
gagaggagaaacaaatatctggaagagcatcccagtgctgggaaagaccctaagaaaact

SEQ ID NO: 75686 - DNA, 60 bp, Artificial
  Synthetic oligonucleotide
ccctctggggcaaaacaaatgatgccggctcagaccgagtgatggtatcacctctggctg

SEQ ID NO: 75687 - DNA, 60 bp, Artificial
  Synthetic oligonucleotide
aaaccctctggggcaaaacaaatgatgccggctcagaccgagtgatggtatcacctctgg

SEQ ID NO: 75688 - DNA, 60 bp, Artificial
  Synthetic oligonucleotide
tgctctgtgttgttttgctggggttcatcatgtgggcctgccagagaggcaacattaggt

SEQ ID NO: 75689 - DNA, 60 bp, Artificial
  Synthetic oligonucleotide
tgctttgtgttattttgctggggttcatcatgtgggcctgccagagaggcaacattaggt

SEQ ID NO: 75690 - DNA, 60 bp, Artificial
  Synthetic oligonucleotide
ctctgtgttgttttgctggggttcatcatgtgggcctgccagagaggcaacattaggtgc

SEQ ID NO: 75691 - DNA, 60 bp, Artificial
  Synthetic oligonucleotide
agggtggactggaatgatagatgggtggtatggctatcatcatgaaaattctcaaggctc

SEQ ID NO: 75692 - DNA, 60 bp, Artificial
  Synthetic oligonucleotide
ggtcagctactgcatgtcatgacgggaagaaatggatgacaattggagtaacgggccctg

SEQ ID NO: 75693 - DNA, 60 bp, Artificial
  Synthetic oligonucleotide
acaaataacgttcttacaggcattgcaactcttacttgaagttgagagtgagataaggac

SEQ ID NO: 75694 - DNA, 59 bp, Artificial
  Synthetic oligonucleotide
ttttgggttgaaatgatcaggggcaagccagaagagaagacaatctggacttccagcag

SEQ ID NO: 75695 - DNA, 60 bp, Artificial
  Synthetic oligonucleotide
ccgaatattggatccaggccttgggtcagaggccaatcagggaggataagcatctactgg

SEQ ID NO: 75696 - DNA, 60 bp, Artificial
  Synthetic oligonucleotide
taagaattggttccaggggacatatttttgttataagggagcccttcgtctcttgttcac

SEQ ID NO: 75697 - DNA, 60 bp, Artificial
  Synthetic oligonucleotide
ggataaagaatggttggacacagacaagtaaagagcaggttagaaagcaggtagttgttg

SEQ ID NO: 75698 - DNA, 60 bp, Artificial
  Synthetic oligonucleotide
aatgattgatgggtggtatggctatcatcatgaaaattctcaaggctcaggatatgcagc

SEQ ID NO: 75699 - DNA, 50 bp, Artificial
  Synthetic oligonucleotide
agtgctgtggatgttgacgatggtcattttgtcaacatagagctggagta

SEQ ID NO: 75700 - DNA, 60 bp, Artificial
  Synthetic oligonucleotide
gacaggaacagcagagtgctgtggatgttgacgatggtcattttgtcaacatagagctgg

SEQ ID NO: 75701 - DNA, 60 bp, Artificial
  Synthetic oligonucleotide
caggaacagcagagtgctgtggatgttgacgatggtcattttgtcaacatagagctggag

SEQ ID NO: 75702 - DNA, 60 bp, Artificial
  Synthetic oligonucleotide
gaagtgcttacaggcaacctccaaacattgaaaataagggtacatgaagggtatgaggaa

SEQ ID NO: 75703 - DNA, 60 bp, Artificial
  Synthetic oligonucleotide
ctcttcaacagggaaaatatgcaacaatcctcacaggatccttgatggagggaactgcac

SEQ ID NO: 75704 - DNA, 60 bp, Artificial
  Synthetic oligonucleotide
ctcctcaacagggaaaatatgcaacaatcctcacaggatccttgatggaagggcctgcac

SEQ ID NO: 75705 - DNA, 60 bp, Artificial
  Synthetic oligonucleotide
ctcctcaacagggaaaatatgcaacaatcctcaccgaattctcgatggaagagactgcac

SEQ ID NO: 75706 - DNA, 60 bp, Artificial
  Synthetic oligonucleotide
actaatgctactgagctagttcaaagctcctcaacagggaaaatatgcaacaatcctcac

SEQ ID NO: 75707 - DNA, 60 bp, Artificial
  Synthetic oligonucleotide
tgagagaaatgaacagggacaaaccctttggagcaaaacgaacgatgctggctcagaccg

SEQ ID NO: 75708 - DNA, 60 bp, Artificial
  Synthetic oligonucleotide
gagactgcacattaatggatgctctactaggggaccctcattgtgatgtattccaagatg

SEQ ID NO: 75709 - DNA, 60 bp, Artificial
  Synthetic oligonucleotide
atggaagagactgcacattaatggatgctctactaggggaccctcattgtgatgtattcc

SEQ ID NO: 75710 - DNA, 60 bp, Artificial
  Synthetic oligonucleotide
atattcatcatcaatgatgtgggagatcaatggtcctgagtcagtgcttgtcaatactta

SEQ ID NO: 75711 - DNA, 60 bp, Artificial
  Synthetic oligonucleotide
tattcatcatcaatgatgtgggagatcaatggtcctgagtcagtgcttgtcaatacttat

SEQ ID NO: 75712 - DNA, 60 bp, Artificial
  Synthetic oligonucleotide
agctttcaggtagactgctttctttggcacgtccgcaaacgatttgcagaccaagaactg

SEQ ID NO: 75713 - DNA, 60 bp, Artificial
  Synthetic oligonucleotide
ggactcttcggagctatcgcaggcttcatcgaaggaggatggactggaatgatagatgga

SEQ ID NO: 75714 - DNA, 60 bp, Artificial
  Synthetic oligonucleotide
ccaatacgataacctcgtttcaggtagattgctatctatggcacataagaaagctgctca

SEQ ID NO: 75715 - DNA, 60 bp, Artificial
  Synthetic oligonucleotide
cgtctggacatacaatgctgaactgttggttcttcttgagaacgaaaggacattagatct

SEQ ID NO: 75716 - DNA, 53 bp, Artificial
  Synthetic oligonucleotide
gcgaccaaaagaattcggatggccatcaattagtgtcgaattgttaaaaacga

SEQ ID NO: 75717 - DNA, 60 bp, Artificial
  Synthetic oligonucleotide
gcagagtgctgtggatgttgacgatggtcattttgtcaacatagagctggagtaaaaaac

SEQ ID NO: 75718 - DNA, 57 bp, Artificial
  Synthetic oligonucleotide
gcagagtgctgtggatgttgacgatggtcattttgtcaacatagagctggagtaaaa

SEQ ID NO: 75719 - DNA, 59 bp, Artificial
  Synthetic oligonucleotide
cagcagagtgctgtggatgttgacgatggtcattttgtcaacatagagctggagtaaaa

SEQ ID NO: 75720 - DNA, 60 bp, Artificial
  Synthetic oligonucleotide
cagcagagtgctgtggatgttgacgatggtcattttgtcaacatagagctggagtaaaaa

SEQ ID NO: 75721 - DNA, 60 bp, Artificial
  Synthetic oligonucleotide
atacagatgtgcactgaactcaaactcagtgactatgaagggaggctgattcagaacagc

SEQ ID NO: 75722 - DNA, 60 bp, Artificial
  Synthetic oligonucleotide
ccatttatagtacggtatcgagcagtctagtattggtagggctgatcatagcaatgggtc

SEQ ID NO: 75723 - DNA, 60 bp, Artificial
  Synthetic oligonucleotide
ccggaaagtcagacaagatctgcattggataccatgccaacaactcaacaacacaagtgg

SEQ ID NO: 75724 - DNA, 60 bp, Artificial
  Synthetic oligonucleotide
aaaccctttggagcaaaacaaatgatgctggctcagaccgagtgatggtatcacctctgg

SEQ ID NO: 75725 - DNA, 60 bp, Artificial
  Synthetic oligonucleotide
gagcccgctgtggataggagaatgccccaaatatgtgaaaagtgaaagtctgaggcttgc

SEQ ID NO: 75726 - DNA, 60 bp, Artificial
  Synthetic oligonucleotide
gagccctctgtggataggagaatgccccaaatatgtgaaaagtgaaagtctgaggcttgc

SEQ ID NO: 75727 - DNA, 60 bp, Artificial
  Synthetic oligonucleotide
gagcccgctgtggataggagaatgccccaaatatgtgaaaagtgaaagtctgaggctcgc

SEQ ID NO: 75728 - DNA, 60 bp, Artificial
  Synthetic oligonucleotide
cagtattgtcgtattctgtggtacttcaggtacctatggaacaggctcatggcctgatgg

SEQ ID NO: 75729 - DNA, 51 bp, Artificial
  Synthetic oligonucleotide
aggatacatatgcagcggggtttttggagacaatccacgccccaatgatgg

SEQ ID NO: 75730 - DNA, 60 bp, Artificial
  Synthetic oligonucleotide
cttcaatggaggccatatagaagaatgctcatgctaccccaatgaaggtaaagtggagtg

SEQ ID NO: 75731 - DNA, 60 bp, Artificial
  Synthetic oligonucleotide
ctaagagatctgatgtcacagtctcgcactcgcgagatactaacaaaaaccactgtggac

SEQ ID NO: 75732 - DNA, 60 bp, Artificial
  Synthetic oligonucleotide
gatgtgtggagtagaccatgagattgccgactggtcatggcacgatggagctatccttcc

SEQ ID NO: 75733 - DNA, 60 bp, Artificial
  Synthetic oligonucleotide
cggccaggggaaaccttgaatgtggaatctaatggaaatctaatcgctccttggtatgca

SEQ ID NO: 75734 - DNA, 54 bp, Artificial
  Synthetic oligonucleotide
gatgcggaatgtacctgagaaacagaccaggggtctgttcggtgcaatagcagg

SEQ ID NO: 75735 - DNA, 60 bp, Artificial
  Synthetic oligonucleotide
aaagtagaatcggtgaagctagagaatcttggtgtgtatcaaattcttgccatttatagt

SEQ ID NO: 75736 - DNA, 60 bp, Artificial
  Synthetic oligonucleotide
gggatagaatcggtgaagctagagaatcttggtgtgtatcaaattcttgccatttatagt

SEQ ID NO: 75737 - DNA, 60 bp, Artificial
  Synthetic oligonucleotide
aaaatagaatcagtgaagctagagaatcttggtgtgtatcaaattcttgccatttatagt

SEQ ID NO: 75738 - DNA, 60 bp, Artificial
  Synthetic oligonucleotide
agaatgctgtggatgttgacgatggtcattttgtcaacatagagctggagtaaaaaacta

SEQ ID NO: 75739 - DNA, 60 bp, Artificial
  Synthetic oligonucleotide
gcttacaggcaacctccaaacattgaaaataagagtgcatgaagggtatgaggaattcac

SEQ ID NO: 75740 - DNA, 60 bp, Artificial
  Synthetic oligonucleotide
gctcacaggcaacctccaaacattgaaaataagagtgcatgaagggtatgaggaattcac

SEQ ID NO: 75741 - DNA, 60 bp, Artificial
  Synthetic oligonucleotide
ggaagtgctcacaggcaacctccaaacattgaaaataagagtgcatgaagggtatgagga

SEQ ID NO: 75742 - DNA, 60 bp, Artificial
  Synthetic oligonucleotide
gtcttggaggcaatggctttccttgaagagtcccacccagggatctttgaaaactcgtgt

SEQ ID NO: 75743 - DNA, 60 bp, Artificial
  Synthetic oligonucleotide
cagagctcctcaacagggaaaatatgcaacaatccccacagaattctcgatggaagagac

SEQ ID NO: 75744 - DNA, 60 bp, Artificial
  Synthetic oligonucleotide
ggaaggcaagagaagaaccctgcactcaggatgaagtggatgatggcaatgaaataccca

SEQ ID NO: 75745 - DNA, 56 bp, Artificial
  Synthetic oligonucleotide
aaaaggggatcagccgatagtttctttagccgactgaattggctaacaaaatctgg

SEQ ID NO: 75746 - DNA, 60 bp, Artificial
  Synthetic oligonucleotide
agcaaaagcagggtagataatcactcactgagtgacatcgacatcatggcgtctcaaggc

SEQ ID NO: 75747 - DNA, 60 bp, Artificial
  Synthetic oligonucleotide
ttgctcaatgcatcttggttcaactccttcctcacacatgcactgaaatagttgtggcaa

SEQ ID NO: 75748 - DNA, 60 bp, Artificial
  Synthetic oligonucleotide
gtgtgtatcaaatccttgctatttatagtacggtatcgagcagtctagtcttggtaggtc

SEQ ID NO: 75749 - DNA, 60 bp, Artificial
  Synthetic oligonucleotide
cagcgactatgaagggaggctgattcagaacagcataacaatagagagaatggttctctc

SEQ ID NO: 75750 - DNA, 60 bp, Artificial
  Synthetic oligonucleotide
cagtgactatgaagggaggctgattcagaacagcataacaatagagagaatggttctctc

SEQ ID NO: 75751 - DNA, 60 bp, Artificial
  Synthetic oligonucleotide
ccctactcaatgacaaacattctaatggcacagttaaagaccggagcccctatagaactc

SEQ ID NO: 75752 - DNA, 60 bp, Artificial
  Synthetic oligonucleotide
tgcttgaagtagaacaagagataagaactttctcgtttcagcttatttaatgataaaaaa

SEQ ID NO: 75753 - DNA, 60 bp, Artificial
  Synthetic oligonucleotide
gcctgatctctcttacagagttgggtacttatgtgcagggattcctagtgatactccaag

SEQ ID NO: 75754 - DNA, 60 bp, Artificial
  Synthetic oligonucleotide
gatctctcttacagagttgggtacttatgtgcagggattcctagtgatactccaagaggg

SEQ ID NO: 75755 - DNA, 60 bp, Artificial
  Synthetic oligonucleotide
ggagccatagcagggtttattgaagggggatggactggaatgatagatgggtggtatggc

SEQ ID NO: 75756 - DNA, 60 bp, Artificial
  Synthetic oligonucleotide
gcattgagcatcaatgaactgagcaatcttgcaaaaggggagaaagctaatgtgctgata

SEQ ID NO: 75757 - DNA, 60 bp, Artificial
  Synthetic oligonucleotide
cgccatttatagtacggtatcgagcagtctagtcttggtagggctgatcatggcaatggg

SEQ ID NO: 75758 - DNA, 60 bp, Artificial
  Synthetic oligonucleotide
ggcccccctcaaagccgagatcgcgcagagacttgaagatgtctttgcagggaagaacac

SEQ ID NO: 75759 - DNA, 54 bp, Artificial
  Synthetic oligonucleotide
cccctcaaagccgagatcgcgcagagacttgaagatgtctttgcagggaagaac

SEQ ID NO: 75760 - DNA, 58 bp, Artificial
  Synthetic oligonucleotide
cccctcaaagccgagatcgcgcagagacttgaagatgtctttgcagggaagaacaccg

SEQ ID NO: 75761 - DNA, 60 bp, Artificial
  Synthetic oligonucleotide
gctctgtctctctaaccattgcaacagtatgtttcctcatgcagattgccatcctagcaa

SEQ ID NO: 75762 - DNA, 60 bp, Artificial
  Synthetic oligonucleotide
tggatccgtctctctaactattgcaacagtgtgtttcctcatgcagattgccatcctagc

SEQ ID NO: 75763 - DNA, 60 bp, Artificial
  Synthetic oligonucleotide
ccattgcaacagtatgtttcctcatgcagattgccatcctagcaacgactgtgacactgc

SEQ ID NO: 75764 - DNA, 60 bp, Artificial
  Synthetic oligonucleotide
cgtctctctaactattgcaacagtgtgtttcctcatgcagattgccatcctagcaacgac

SEQ ID NO: 75765 - DNA, 60 bp, Artificial
  Synthetic oligonucleotide
gggtaatcgagaaaacaaatgaaaagtttcatcagattgaaaaggaattttccgaagtgg

SEQ ID NO: 75766 - DNA, 60 bp, Artificial
  Synthetic oligonucleotide
gagtaatcgagaaaacaaatgaaaagtttcatcagattgaaaaggaattttccgaagtag

SEQ ID NO: 75767 - DNA, 60 bp, Artificial
  Synthetic oligonucleotide
ccgagtaatcgagaaaacaaatgaaaagtttcatcagattgagaaggaattctctgaagt

SEQ ID NO: 75768 - DNA, 60 bp, Artificial
  Synthetic oligonucleotide
tggttatcaccatgaaaattctcaaggctcaggatatgcagcagacagagaaagcactca

SEQ ID NO: 75769 - DNA, 60 bp, Artificial
  Synthetic oligonucleotide
ggaggatggactggaatgatagatgggtggtacggctatcatcatgaaaattctcaaggc

SEQ ID NO: 75770 - DNA, 60 bp, Artificial
  Synthetic oligonucleotide
ggaggatggactggaatgatagatgggtggtacggctatcatcatgaaaattcccaaggc

SEQ ID NO: 75771 - DNA, 60 bp, Artificial
  Synthetic oligonucleotide
ccggccaagacaatggggcggtggctgtattgaaatacaatggcataataacagatacta

SEQ ID NO: 75772 - DNA, 60 bp, Artificial
  Synthetic oligonucleotide
ccggcccagacaatggagcggtggctgtattgaaatacaatggcataataacagatactg

SEQ ID NO: 75773 - DNA, 60 bp, Artificial
  Synthetic oligonucleotide
cctttgacatgggtaatgaaggatcttatttcttcggagacaatgcagaggagtatgaca

SEQ ID NO: 75774 - DNA, 60 bp, Artificial
  Synthetic oligonucleotide
caccgagtgacatccacatcatggcgtctcaaggcaccaaacgatcttatgagctgatgg

SEQ ID NO: 75775 - DNA, 60 bp, Artificial
  Synthetic oligonucleotide
caccgagtgacatccacatcatggcgtctcaaggcaccaaacgatcttatgaacagatgg

SEQ ID NO: 75776 - DNA, 60 bp, Artificial
  Synthetic oligonucleotide
caacactgtgcttggggcatcatgcagtaccaaacggaacaatagtgaaaacaataacgg

SEQ ID NO: 75777 - DNA, 60 bp, Artificial
  Synthetic oligonucleotide
ctcagaagtagaaggaagaattcaggacctcgagaaatacgttgaagacactaaaataga

SEQ ID NO: 75778 - DNA, 60 bp, Artificial
  Synthetic oligonucleotide
ggaagaattcaggacctcgagaaatacgttgaagacactaaaatagatctctggtcttac

SEQ ID NO: 75779 - DNA, 60 bp, Artificial
  Synthetic oligonucleotide
gcagcaactgcagagatcctaataatgagagaggaaatccaggagtaaaagggtgggcct

SEQ ID NO: 75780 - DNA, 60 bp, Artificial
  Synthetic oligonucleotide
cagtattgtcgtattttgtggcacttcaggtacttatggaacaggctcatggcctgatgg

SEQ ID NO: 75781 - DNA, 60 bp, Artificial
  Synthetic oligonucleotide
ggaacaggctcatggcctgatggagctaacatcaatttcatgcctatataagctttcgca

SEQ ID NO: 75782 - DNA, 60 bp, Artificial
  Synthetic oligonucleotide
ggtccagctcaagttgtcatgatgggaaagcatggttgcacatttgtgtcactggggatg

SEQ ID NO: 75783 - DNA, 60 bp, Artificial
  Synthetic oligonucleotide
tgatgggatgcttgttgacagtattgtttcatggtctcaaaatatcctcagaacccagga

SEQ ID NO: 75784 - DNA, 60 bp, Artificial
  Synthetic oligonucleotide
ggcctttgacaatggaaatgatgtttggatgggaagaacaataagtaaagattcgcgctc

SEQ ID NO: 75785 - DNA, 60 bp, Artificial
  Synthetic oligonucleotide
tgtgcatagcatggtccagctcaagttgtcatgatgggaaagcatggttgcacatttgtg

SEQ ID NO: 75786 - DNA, 60 bp, Artificial
  Synthetic oligonucleotide
gcaacatccccgcgaacaaccaagtagtgccatgtgaaccaatcataatagagaggaaca

SEQ ID NO: 75787 - DNA, 56 bp, Artificial
  Synthetic oligonucleotide
gtgatgactgatggaagtgcatcagggagggccgacactagaatactattcattag

SEQ ID NO: 75788 - DNA, 60 bp, Artificial
  Synthetic oligonucleotide
tgacagtattgtttcatggtctcaaaatatcctcagaacccaggagtcagagtgcgtttg

SEQ ID NO: 75789 - DNA, 60 bp, Artificial
  Synthetic oligonucleotide
atggcccagcattaagcatcaatgagctgagcaatcttgcaaaaggagagaaggctaatg

SEQ ID NO: 75790 - DNA, 60 bp, Artificial
  Synthetic oligonucleotide
ttgagccctggaatgatgatgggcatgttcaacatgctaagtacagttttgggagtctca

SEQ ID NO: 75791 - DNA, 55 bp, Artificial
  Synthetic oligonucleotide
ttacttgaagtcgagagtgagataaggacattttcttttcagcttatttagtact

SEQ ID NO: 75792 - DNA, 57 bp, Artificial
  Synthetic oligonucleotide
ttacttgaagtcgagagtgagataaggacattttcttttcagcttatttagtactaa

SEQ ID NO: 75793 - DNA, 60 bp, Artificial
  Synthetic oligonucleotide
tacttgaagttgagagtgagataaggacattttcttttcagcttatttagtactaaaaaa

SEQ ID NO: 75794 - DNA, 60 bp, Artificial
  Synthetic oligonucleotide
ccttcaaacattgaaaataagagtgcatgaggggtatgaagagttcacaatggttgggag

SEQ ID NO: 75795 - DNA, 60 bp, Artificial
  Synthetic oligonucleotide
cactaagatagatctatggtcttacaatgcagagcttctggtggccttggaaaaccagca

SEQ ID NO: 75796 - DNA, 60 bp, Artificial
  Synthetic oligonucleotide
cactaagatagatctatggtcttacaatgcagagcttctggtggccttggaaaaccaaca

SEQ ID NO: 75797 - DNA, 60 bp, Artificial
  Synthetic oligonucleotide
cactaggatagatctatggtcttacaatgcagagcttctggtggccttggaaaaccagca

SEQ ID NO: 75798 - DNA, 60 bp, Artificial
  Synthetic oligonucleotide
agatagatctatggtcttacaatgcagagcttctggtggccttggaaaatcagcatacaa

SEQ ID NO: 75799 - DNA, 60 bp, Artificial
  Synthetic oligonucleotide
cagtctcgcactcgcgagatactgacaaaaaccactgtggatcatatggccataatcaag

SEQ ID NO: 75800 - DNA, 60 bp, Artificial
  Synthetic oligonucleotide
aaccctgctctcagaatgaaatggatgatggcaatgaagtatccaatcacagcagacaag

SEQ ID NO: 75801 - DNA, 60 bp, Artificial
  Synthetic oligonucleotide
tagaccatatggccataatcaagaaatacacatcaggaagacaggagaagaaccctgctc

SEQ ID NO: 75802 - DNA, 60 bp, Artificial
  Synthetic oligonucleotide
ggaccatatggccataatcaagaaatacacatcaggaagacaagagaagaaccccgcact

SEQ ID NO: 75803 - DNA, 60 bp, Artificial
  Synthetic oligonucleotide
ctattcaccataagacaagaaatggccagtagaggtctctgggattcctttcgtcagtcc

SEQ ID NO: 75804 - DNA, 60 bp, Artificial
  Synthetic oligonucleotide
tgatgatagactcaggagagatcaaaaggcattaaagggaagaggcagcacacttggact

SEQ ID NO: 75805 - DNA, 60 bp, Artificial
  Synthetic oligonucleotide
atgcagcggggtatttggagacaatccacgccccaatgatggaacaggcagttgtggtcc

SEQ ID NO: 75806 - DNA, 60 bp, Artificial
  Synthetic oligonucleotide
ggacttcaagcagctccattgtgatgtgtggagtagatcatgagattgccgactggtcgt

SEQ ID NO: 75807 - DNA, 60 bp, Artificial
  Synthetic oligonucleotide
atcctgggaatgctgaaattgaagatctcatcttcctggcacggtctgcactcatcctga

SEQ ID NO: 75808 - DNA, 60 bp, Artificial
  Synthetic oligonucleotide
cgagtctggacggattaagaaagaggagttcgctgagatcatgaagatctgttccaccat

SEQ ID NO: 75809 - DNA, 60 bp, Artificial
  Synthetic oligonucleotide
ccatccatctatcattccagtccatcctccttcaatgaagcctgcgatagctccgaagag

SEQ ID NO: 75810 - DNA, 60 bp, Artificial
  Synthetic oligonucleotide
gtatggatggggcggacaattagtcgaacctccaggtcaggatttgagatattaaggata

SEQ ID NO: 75811 - DNA, 54 bp, Artificial
  Synthetic oligonucleotide
atggatggggcggacaattagtcgaacctccagatcaggatttgagatactaag

SEQ ID NO: 75812 - DNA, 60 bp, Artificial
  Synthetic oligonucleotide
tgatgtatggatggggcggacaattagtcgaacctccaggtcaggatttgagatattgag

SEQ ID NO: 75813 - DNA, 60 bp, Artificial
  Synthetic oligonucleotide
gatgtatggatggggcggacaattagtcgaacctccaggtcaggatttgagatattgagg

SEQ ID NO: 75814 - DNA, 54 bp, Artificial
  Synthetic oligonucleotide
atggatggggcggacaattagtcgaacctccagatcaggctttgagatactaag

SEQ ID NO: 75815 - DNA, 60 bp, Artificial
  Synthetic oligonucleotide
aatcaggggtatggtgtaaaaggcttcggatttcggcagggaactgatgtatggatgggg

SEQ ID NO: 75816 - DNA, 60 bp, Artificial
  Synthetic oligonucleotide
gttggccaaacggatgtcagctttaatggaggacatattgaagagtgttcttgctaccct

SEQ ID NO: 75817 - DNA, 60 bp, Artificial
  Synthetic oligonucleotide
ggatagttggccaaacggatgtcagtcttgatggaggacatattgaagagtgttcttgct

SEQ ID NO: 75818 - DNA, 60 bp, Artificial
  Synthetic oligonucleotide
tcgtcccgtcaggccccctcaaagccgagatcgcgcagagacttgaagatgtctttgcag

SEQ ID NO: 75819 - DNA, 60 bp, Artificial
  Synthetic oligonucleotide
cgtaccatcaggccccctcaaagccgagatcgcgcagagacttgaagatgtctttgcagg

SEQ ID NO: 75820 - DNA, 60 bp, Artificial
  Synthetic oligonucleotide
cgtcccatcaggccccctcaaagccgagatcgcgcagagacttgaagatgtctttgcagg

SEQ ID NO: 75821 - DNA, 60 bp, Artificial
  Synthetic oligonucleotide
cgtacgttctctctatcgtcccgtcaggccccctcaaagccgagatcgcgcagagactcg

SEQ ID NO: 75822 - DNA, 60 bp, Artificial
  Synthetic oligonucleotide
ctctctatcgtcccgtcaggccccctcaaagccgagatcgcgcagagacttgaagatgtc

SEQ ID NO: 75823 - DNA, 60 bp, Artificial
  Synthetic oligonucleotide
gtcaggccccctcaaagccgagatcgcgcagagacttgaagatgtctttgcagggaagaa

SEQ ID NO: 75824 - DNA, 60 bp, Artificial
  Synthetic oligonucleotide
caggccccctcaaagccgagatcgcgcagagacttgaagatgtctttgcagggaagaaca

SEQ ID NO: 75825 - DNA, 60 bp, Artificial
  Synthetic oligonucleotide
tgcttgaagtggagcaagagataagaactttctcgtttcagcttatctaatgataaaaaa

SEQ ID NO: 75826 - DNA, 60 bp, Artificial
  Synthetic oligonucleotide
tgcgcactgggaaaagctcaataatgaggtcagatgcacctattgacacctgtatctctg

SEQ ID NO: 75827 - DNA, 60 bp, Artificial
  Synthetic oligonucleotide
tgggaaaagctcaataatgaggtcagatgcacaaattgacacatgcatttctgagtgcat

SEQ ID NO: 75828 - DNA, 52 bp, Artificial
  Synthetic oligonucleotide
acgaggggtcttatttcttcggagacaatgcagaggagtatgacagttaaag

SEQ ID NO: 75829 - DNA, 60 bp, Artificial
  Synthetic oligonucleotide
ggagggaatggttgatgggtggtatggattccgatatcagaattcggaaggaacaggaca

SEQ ID NO: 75830 - DNA, 60 bp, Artificial
  Synthetic oligonucleotide
ggagggaatggttgatgggtggtatggattccgatatcagaattcggaagggacagggca

SEQ ID NO: 75831 - DNA, 60 bp, Artificial
  Synthetic oligonucleotide
ggatttcattcgccatatcatgcttcttaatttgtgttgttctattgggtttcattatgt

SEQ ID NO: 75832 - DNA, 60 bp, Artificial
  Synthetic oligonucleotide
ggatttcattcgccatatcatgcttcttaatttgtgttgttctattgggtttcatcatgt

SEQ ID NO: 75833 - DNA, 60 bp, Artificial
  Synthetic oligonucleotide
ctggagcaaaacaaatgatgccggttcagaccgagtgatggtatcacctctggctgtgac

SEQ ID NO: 75834 - DNA, 60 bp, Artificial
  Synthetic oligonucleotide
gtcccgtcaggccccctcaaagccgagatcgcgcagagacttgaagatgtgtttgcaggg

SEQ ID NO: 75835 - DNA, 60 bp, Artificial
  Synthetic oligonucleotide
cctttgatgatagactcagaagagatcaaaaggcattaaagggaagaggcagcacacttg

SEQ ID NO: 75836 - DNA, 60 bp, Artificial
  Synthetic oligonucleotide
aatgcgacctattgcttggtgatcaaagctggtcatatatagtggaaagacctactgctc

SEQ ID NO: 75837 - DNA, 60 bp, Artificial
  Synthetic oligonucleotide
aatgcgacctattgcttggtgatcaaagctggtcatatatagtggaaagacccacagctc

SEQ ID NO: 75838 - DNA, 60 bp, Artificial
  Synthetic oligonucleotide
acacaaagaccacatactggtgggatggtctgcaatcatccgatgattttgctttgatag

SEQ ID NO: 75839 - DNA, 60 bp, Artificial
  Synthetic oligonucleotide
ctccctacagtcatggaacagggacaggatacaccatggatactgtcaacagaacacacc

SEQ ID NO: 75840 - DNA, 60 bp, Artificial
  Synthetic oligonucleotide
gctttgatagtgaatgcgcccaatcatgaaggaatacaggctggagtagacagattctat

SEQ ID NO: 75841 - DNA, 60 bp, Artificial
  Synthetic oligonucleotide
cacattcgaattcacaagctttttctaccggtatggttttgtcgccaatttcagcatgga

SEQ ID NO: 75842 - DNA, 60 bp, Artificial
  Synthetic oligonucleotide
cacaccaatactcagaaaaggggaaatggacaacaaacactgagattggagcaccacaac

SEQ ID NO: 75843 - DNA, 60 bp, Artificial
  Synthetic oligonucleotide
cggtatggttttgtcgccaatttcagcatggagctacccagttttggggtttccgggata

SEQ ID NO: 75844 - DNA, 60 bp, Artificial
  Synthetic oligonucleotide
cccagttttggggtttccgggataaatgaatctgcagacatgagcattggagtgacagtc

SEQ ID NO: 75845 - DNA, 60 bp, Artificial
  Synthetic oligonucleotide
ggcactccaactcttcattaaggattatcggtacacataccggtgccatagaggcgatac

SEQ ID NO: 75846 - DNA, 60 bp, Artificial
  Synthetic oligonucleotide
ggaaatggacaacaaacactgagattggagcaccacaacttaatccaatcgatggaccgc

SEQ ID NO: 75847 - DNA, 60 bp, Artificial
  Synthetic oligonucleotide
tggaaataacaacacacttccaacggaagagaagagtaagagacaacatgacaaagagaa

SEQ ID NO: 75848 - DNA, 60 bp, Artificial
  Synthetic oligonucleotide
gagctatctgatcagggcattaaccctaaacacaatgaccaaggacgctgagagagggaa

SEQ ID NO: 75849 - DNA, 60 bp, Artificial
  Synthetic oligonucleotide
acctacacatcccggaagtctgtttgaaatgggagctgatggatgaagattataagggga

SEQ ID NO: 75850 - DNA, 60 bp, Artificial
  Synthetic oligonucleotide
gagtatgatgctgttgcaacaacacactcttggatccccaagaggaaccggtccatattg

SEQ ID NO: 75851 - DNA, 60 bp, Artificial
  Synthetic oligonucleotide
ggtgccagcgcaaaatgctataagcacaacattcccttatactggagatcctccctacag

SEQ ID NO: 75852 - DNA, 60 bp, Artificial
  Synthetic oligonucleotide
ctgaacacgagccaaaggggaatactcgaagatgagcagatgtatcagaaatgctgcaac

SEQ ID NO: 75853 - DNA, 60 bp, Artificial
  Synthetic oligonucleotide
aaatcagaacccacgcatgttcctggcaatgatcacatacataactagaaaccagccaga

SEQ ID NO: 75854 - DNA, 60 bp, Artificial
  Synthetic oligonucleotide
caatcgatggaccgcttcctgaagacaatgaaccaagtgggtacgcccaaacagattgtg

SEQ ID NO: 75855 - DNA, 60 bp, Artificial
  Synthetic oligonucleotide
gtacgcccaaacagattgtgtattggaagcaatggctttccttgaagaatcccatcccgg

SEQ ID NO: 75856 - DNA, 60 bp, Artificial
  Synthetic oligonucleotide
gatcttttgagttgaagaaactgtgggaacagactcgatcaaagactggtctactggtat

SEQ ID NO: 75857 - DNA, 60 bp, Artificial
  Synthetic oligonucleotide
aggacgctgagagagggaaattgaaacgacgagcaattgcaaccccaggaatgcagataa

SEQ ID NO: 75858 - DNA, 60 bp, Artificial
  Synthetic oligonucleotide
gttgagcactgtactaggtgtatccatattaaacctgggccagaggaaatacacaaagac

SEQ ID NO: 75859 - DNA, 60 bp, Artificial
  Synthetic oligonucleotide
ctgatggatgaagattataaggggaggctatgtaatccattgaatcctttcgttagccac

SEQ ID NO: 75860 - DNA, 60 bp, Artificial
  Synthetic oligonucleotide
tgaaagcaaaagtatgaaattgagaactcagataccagcaggaatgctcgcaagcattga

SEQ ID NO: 75861 - DNA, 60 bp, Artificial
  Synthetic oligonucleotide
atgactaattcccaagacactgaactctccttcaccatcactggggacaataccaaatgg

SEQ ID NO: 75862 - DNA, 60 bp, Artificial
  Synthetic oligonucleotide
ccatttgaatggatgtcaatccgactctactcttcttaaaggtgccagcgcaaaatgcta

SEQ ID NO: 75863 - DNA, 60 bp, Artificial
  Synthetic oligonucleotide
tgagattggagcaccacaacttaatccaatcgatggaccgcttcctgaagacaatgaacc

SEQ ID NO: 75864 - DNA, 60 bp, Artificial
  Synthetic oligonucleotide
ggccgacaaacttacgattggaccttgaataggaatcaacctgccgcaacagcacttgct

SEQ ID NO: 75865 - DNA, 60 bp, Artificial
  Synthetic oligonucleotide
ccgattatgttctcaaataaaatggcaagactggggaaaggatatatgtttgaaagcaaa

SEQ ID NO: 75866 - DNA, 60 bp, Artificial
  Synthetic oligonucleotide
acaaagagaatggtgacacagagaaccatagggaagaaaaaacaacgattaaacagaaag

SEQ ID NO: 75867 - DNA, 60 bp, Artificial
  Synthetic oligonucleotide
cgcaggttttattgaaggaggatggactggaatgatagatgggtggtatggctatcacca

SEQ ID NO: 75868 - DNA, 60 bp, Artificial
  Synthetic oligonucleotide
agggaggctgatccagaacagcataacaatagagagaatggttctctcagcattcgatga

SEQ ID NO: 75869 - DNA, 60 bp, Artificial
  Synthetic oligonucleotide
ggttctacatacagatgtgcactgaactcaaactcagtgactacgaagggaggctgatac

SEQ ID NO: 75870 - DNA, 60 bp, Artificial
  Synthetic oligonucleotide
ccagaaattgcggcaaggcctgctgtgaatggtcaaagaggcagaattgattattattgg

SEQ ID NO: 75871 - DNA, 60 bp, Artificial
  Synthetic oligonucleotide
caatgggtctttggatgtgttcaaatggttcaatgcaatgcaggatatgtatatagttaa

SEQ ID NO: 75872 - DNA, 60 bp, Artificial
  Synthetic oligonucleotide
tggtcttacaatgcagagcttctggtggccttggaaaatcagcatacaattgatctgact

SEQ ID NO: 75873 - DNA, 60 bp, Artificial
  Synthetic oligonucleotide
cttctaatggggcatatggagtaaaggggttttcatttaaatacggtaatggtgtttgga

SEQ ID NO: 75874 - DNA, 60 bp, Artificial
  Synthetic oligonucleotide
cagtgtcttctaatggggcatatggagtaaaggggttttcatttaaatacggcaatggtg

SEQ ID NO: 75875 - DNA, 60 bp, Artificial
  Synthetic oligonucleotide
gccttgcttctgggttgagctgatcagaggaaggcccaaggagaatacaatctggaccag

SEQ ID NO: 75876 - DNA, 60 bp, Artificial
  Synthetic oligonucleotide
ggggcatatggagtaaaggggttttcatttaaatacggtaatggtgtttggataggaaga

SEQ ID NO: 75877 - DNA, 60 bp, Artificial
  Synthetic oligonucleotide
gttgccagttggtcatggcacgatggagctattcttccctttgacatcgataagatgtag

SEQ ID NO: 75878 - DNA, 60 bp, Artificial
  Synthetic oligonucleotide
gattggtcatggcacgatggagctattcttccctttgacatcgataagatgtaatttacg

SEQ ID NO: 75879 - DNA, 60 bp, Artificial
  Synthetic oligonucleotide
ccgattggtcatggcacgatggagctattcttccctttgacatcgataagatgtaattta

SEQ ID NO: 75880 - DNA, 60 bp, Artificial
  Synthetic oligonucleotide
gcaagccttacagctactgcttgaagtggagcaagagataagaactttctcgtttcagct

SEQ ID NO: 75881 - DNA, 60 bp, Artificial
  Synthetic oligonucleotide
aagccttacaactattgcttgaagtggagcaagagataagaactttctcgtttcagctta

SEQ ID NO: 75882 - DNA, 60 bp, Artificial
  Synthetic oligonucleotide
cctccaaacattgaaaataagagtgcatgaagggtatgaggaattcacaatggttggacg

SEQ ID NO: 75883 - DNA, 60 bp, Artificial
  Synthetic oligonucleotide
ccaaacattgaaaataagagtgcatgaagggtatgaggaattcacaatggttggacggag

SEQ ID NO: 75884 - DNA, 60 bp, Artificial
  Synthetic oligonucleotide
gtgtcaaaatagggcaatcacctaatgtgtatcaagctaggtttgaagcggtggcatggt

SEQ ID NO: 75885 - DNA, 60 bp, Artificial
  Synthetic oligonucleotide
tttgtctcatgttcgccctcagaatgtagaacctttttcctcacacagggctcattactc

SEQ ID NO: 75886 - DNA, 60 bp, Artificial
  Synthetic oligonucleotide
tttgtttcatgttcgccgttagaatgtagaacctttttcctcacacagggctcattactt

SEQ ID NO: 75887 - DNA, 60 bp, Artificial
  Synthetic oligonucleotide
gtttcgggtttcgacaagggaatgacgtgtgggccggaaggacaattagtaggacttcca

SEQ ID NO: 75888 - DNA, 60 bp, Artificial
  Synthetic oligonucleotide
gtgtcgaagtagggcaatcacctaatgtgtatcaagctaggtttgaagcggtggcatggt

SEQ ID NO: 75889 - DNA, 60 bp, Artificial
  Synthetic oligonucleotide
gggcaatcacctaatgtgtatcaagctaggtttgaagcggtggcatggtcagcaacagca

SEQ ID NO: 75890 - DNA, 60 bp, Artificial
  Synthetic oligonucleotide
gaatcgtcatgcacctgcattaaaggagactgttattgggtgatgactgatggaccggca

SEQ ID NO: 75891 - DNA, 60 bp, Artificial
  Synthetic oligonucleotide
ggagaataattgggcagactgatataaatttcaatgggggacacatagaggagtgttcgt

SEQ ID NO: 75892 - DNA, 52 bp, Artificial
  Synthetic oligonucleotide
gagtgttcttgttaccccaatgaagggaaggtggagtgtgtatgcagggaca

SEQ ID NO: 75893 - DNA, 60 bp, Artificial
  Synthetic oligonucleotide
gaccaattctggtaatatcttctgatctatcgtacacagtcggatatttgtgtgctggca

SEQ ID NO: 75894 - DNA, 60 bp, Artificial
  Synthetic oligonucleotide
ggccggttctggtaatatctcctgatctatcgtacacagtcggatatttgtgtgctggca

SEQ ID NO: 75895 - DNA, 60 bp, Artificial
  Synthetic oligonucleotide
tttgtttcatgttcaccattagaatgtagaacctttttcctcacacagggctcattgctt

SEQ ID NO: 75896 - DNA, 60 bp, Artificial
  Synthetic oligonucleotide
ggttctttcacattgccggttgaactaacaaagaaaggatgtttagtcccctgtttctgg

SEQ ID NO: 75897 - DNA, 60 bp, Artificial
  Synthetic oligonucleotide
ggacctctagcagctccattgtgatgtgtggagtagataataaagttgccaattggtcat

SEQ ID NO: 75898 - DNA, 60 bp, Artificial
  Synthetic oligonucleotide
tgaactaacaaagaaaggatgtttagtcccctgtttctgggttgaaatgatcagaggtaa

SEQ ID NO: 75899 - DNA, 60 bp, Artificial
  Synthetic oligonucleotide
tttgtctcatgttcgcccttagaatgtagaacctttttcctcacacagggctcattactt

SEQ ID NO: 75900 - DNA, 60 bp, Artificial
  Synthetic oligonucleotide
tgaactaacaaaaaagggatgtttagtcccctgtttctgggttgaaatgattagaggtaa

SEQ ID NO: 75901 - DNA, 60 bp, Artificial
  Synthetic oligonucleotide
ttgattattattggtcggttttaaaaccaggggaaaccttgaatgtggaatctaatggaa

SEQ ID NO: 75902 - DNA, 60 bp, Artificial
  Synthetic oligonucleotide
gcccacggaatgcagaactttcttcctcactcaggggtccctgctcaatgacagacactc

SEQ ID NO: 75903 - DNA, 60 bp, Artificial
  Synthetic oligonucleotide
gtacttgcattcaaggtgattgctattgggtgatgactgacggtcccgctaataggcagg

SEQ ID NO: 75904 - DNA, 50 bp, Artificial
  Synthetic oligonucleotide
ttttgttataagggagcccttcgtctcttgttcgcccacggaatgcagaa

SEQ ID NO: 75905 - DNA, 60 bp, Artificial
  Synthetic oligonucleotide
caggggacatgtctttgttataagggagcccttcgtctcttgttcgcccacggaatgcag

SEQ ID NO: 75906 - DNA, 60 bp, Artificial
  Synthetic oligonucleotide
gtcgggatacagtgggtctttcaccctgccagtagaattgtctgggaaagattgcttggt

SEQ ID NO: 75907 - DNA, 60 bp, Artificial
  Synthetic oligonucleotide
ggtcgggatacagtgggtctttcaccctgccagtagaattgtccggaaaagactgcttag

SEQ ID NO: 75908 - DNA, 60 bp, Artificial
  Synthetic oligonucleotide
aactggtcgggatacagtgggtctttcaccctgccagtagaattgtccggaaaagactgc

SEQ ID NO: 75909 - DNA, 60 bp, Artificial
  Synthetic oligonucleotide
gttcgcccacggaatgcagaactttcttcctcactcaggggtccctgctcaatgacagac

SEQ ID NO: 75910 - DNA, 60 bp, Artificial
  Synthetic oligonucleotide
ggtagttgttgataatttgaactggtcgggatacagtgggtctttcaccctgccagtgga

SEQ ID NO: 75911 - DNA, 60 bp, Artificial
  Synthetic oligonucleotide
tgtcagctttaatggaggacatattgaagagtgttcttgctatcccaatgatgggaaagt

SEQ ID NO: 75912 - DNA, 60 bp, Artificial
  Synthetic oligonucleotide
gcccacggaatgcagaactttcttcctcactcaggggtcactgcttaatgacaaacactc

SEQ ID NO: 75913 - DNA, 60 bp, Artificial
  Synthetic oligonucleotide
tcgggatacagtgggtctttcaccctgccagtagaattgtctggaaaagattgcttggtc

SEQ ID NO: 75914 - DNA, 60 bp, Artificial
  Synthetic oligonucleotide
tgctgtggtgatgccagctcatggcccagccaagagcatggaatatgatgctgttgccac

SEQ ID NO: 75915 - DNA, 60 bp, Artificial
  Synthetic oligonucleotide
ccctttggagcaaaacaaatgatgctggctcagaccgagtgatggtatcacctctggctg

SEQ ID NO: 75916 - DNA, 60 bp, Artificial
  Synthetic oligonucleotide
ggagctatagcagggtttattgaaggaggatggactggaatgatagatgggtggtatggc

SEQ ID NO: 75917 - DNA, 60 bp, Artificial
  Synthetic oligonucleotide
ggatgggaactgaaagcatgaattttgccaagagtccggaaattgcagaaagaccggttg

SEQ ID NO: 75918 - DNA, 60 bp, Artificial
  Synthetic oligonucleotide
caatgctgtggtaatgccagcccatggcccagccaagagcatggaatatgatgctgttgc

SEQ ID NO: 75919 - DNA, 50 bp, Artificial
  Synthetic oligonucleotide
gcactgaaatagttgtggcaatgctactatttgctatccatactgtccaa

SEQ ID NO: 75920 - DNA, 56 bp, Artificial
  Synthetic oligonucleotide
cacatgcactgaaatagttgtggcaatgctactatttgctatccatactgtccaaa

SEQ ID NO: 75921 - DNA, 60 bp, Artificial
  Synthetic oligonucleotide
cactgatcttgaggcactcatggaatggctaaagacaagaccaatcctgtcacctctgac

SEQ ID NO: 75922 - DNA, 60 bp, Artificial
  Synthetic oligonucleotide
ggggtaaatagcgacactgtaggttggtcttggccagacggtgctgagttgccattcacc

SEQ ID NO: 75923 - DNA, 60 bp, Artificial
  Synthetic oligonucleotide
ggtgtaagtagcgacactgtaggttggtcttggccagacggtgctgagttgccattcacc

SEQ ID NO: 75924 - DNA, 60 bp, Artificial
  Synthetic oligonucleotide
taaatagcaaaactgtgggttggtcttggccagacggtgctgagttgccattcaccattg

SEQ ID NO: 75925 - DNA, 60 bp, Artificial
  Synthetic oligonucleotide
atagagagaccttcaaatgaatactacatgaacaacaccgaaccactttgtgaggcccag

SEQ ID NO: 75926 - DNA, 60 bp, Artificial
  Synthetic oligonucleotide
actagactgctcgataccgtactataaatggcaagaatttgatacacaccaaggttttct

SEQ ID NO: 75927 - DNA, 60 bp, Artificial
  Synthetic oligonucleotide
cgggactctagcatacttactgacagccagacagcgaccaaaagaattcggatgcccatc

SEQ ID NO: 75928 - DNA, 60 bp, Artificial
  Synthetic oligonucleotide
caggagagatcaaaaggcattaaagggaagaggcagcacacttgggctcgatctgcgagt

SEQ ID NO: 75929 - DNA, 60 bp, Artificial
  Synthetic oligonucleotide
ccctctctggataggagaatgccccaaatatgtgaaaagcgaaagtttgagacttgcaac

SEQ ID NO: 75930 - DNA, 60 bp, Artificial
  Synthetic oligonucleotide
tggaccatatggccataatcaagaaatacacatcaggaagacaggagaaaaaccctgctc

SEQ ID NO: 75931 - DNA, 60 bp, Artificial
  Synthetic oligonucleotide
tggaccatatggccataatcaagaaatacacatcaggaagacaagagaagaaccccgcac

SEQ ID NO: 75932 - DNA, 51 bp, Artificial
  Synthetic oligonucleotide
tggaccatatggccataatcaagaaatacacatcaggaagacaggagaaaa

SEQ ID NO: 75933 - DNA, 60 bp, Artificial
  Synthetic oligonucleotide
ggtggaattggaagattctacatacagatgtgcactgaactcaaactcagtgactatgaa

SEQ ID NO: 75934 - DNA, 60 bp, Artificial
  Synthetic oligonucleotide
tgaaaggaatgaacagggacaaaccctttggagcaaaacaaatgatgccggctcagaccg

SEQ ID NO: 75935 - DNA, 60 bp, Artificial
  Synthetic oligonucleotide
tgctggggttcatcatgtgggcctgccagagaggcaacattaggtgcaacatttgcattt

SEQ ID NO: 75936 - DNA, 60 bp, Artificial
  Synthetic oligonucleotide
tactggggttcattatgtgggcctgccagagaggcaacattaggtgcaacatttgcattt

SEQ ID NO: 75937 - DNA, 60 bp, Artificial
  Synthetic oligonucleotide
gaatgtggagtccaatggaaatctaatcgccccttggtatgcatacaaatttgtcagcac

SEQ ID NO: 75938 - DNA, 60 bp, Artificial
  Synthetic oligonucleotide
gtgtgtatcaaattcttgctatttatagtacggtatcgagcagtctagtcttggtagggc

SEQ ID NO: 75939 - DNA, 60 bp, Artificial
  Synthetic oligonucleotide
ccggaaagtcagacaagatctgcattgggtatcatgccaacaattcaacaacacaagtgg

SEQ ID NO: 75940 - DNA, 60 bp, Artificial
  Synthetic oligonucleotide
ggcaaaacccaactgaggagcaagctgtggatatatgcaaagcagcaatgggtttgagga

SEQ ID NO: 75941 - DNA, 60 bp, Artificial
  Synthetic oligonucleotide
gccaacaattcaacaacacaagtggatacgatacttgagaagaatgtaaccgtcacacac

SEQ ID NO: 75942 - DNA, 60 bp, Artificial
  Synthetic oligonucleotide
gcggactggaatggaccccagaatgtgctctctgatgcaaggatcaaccctcccgaggag

SEQ ID NO: 75943 - DNA, 60 bp, Artificial
  Synthetic oligonucleotide
attggaaggttctacatacagatgtgcactgaactcaaactcagtgactatgaaggaagg

SEQ ID NO: 75944 - DNA, 60 bp, Artificial
  Synthetic oligonucleotide
agatctaatgttgcagtcccgcactcgcgagatactaacaaaaaccactgtggaccatat

SEQ ID NO: 75945 - DNA, 60 bp, Artificial
  Synthetic oligonucleotide
aaatctaatgttgcagtcccgcactcgcgagatactaacaaaaaccactgtggaccatat

SEQ ID NO: 75946 - DNA, 60 bp, Artificial
  Synthetic oligonucleotide
tgaatgtgcctgcattaacggttcctgctttaccataatgactgatggaccaagtaatgg

SEQ ID NO: 75947 - DNA, 60 bp, Artificial
  Synthetic oligonucleotide
tgaatgtgtctgcattaacggttcctgctttaccataatgactgatggaccaagtaatgg

SEQ ID NO: 75948 - DNA, 60 bp, Artificial
  Synthetic oligonucleotide
agagtctgaatgtgcctgcattaatggttcttgctttaccataatgactgatggaccaag

SEQ ID NO: 75949 - DNA, 60 bp, Artificial
  Synthetic oligonucleotide
gttggtgtgacagggccagattccaaggcagtagcagtagttcattatgggggggtgcct

SEQ ID NO: 75950 - DNA, 52 bp, Artificial
  Synthetic oligonucleotide
gttggtgtgacagggccagattccaaggcagtagcagtagttcattatgggg

SEQ ID NO: 75951 - DNA, 60 bp, Artificial
  Synthetic oligonucleotide
aggggtgcctactgatgtcgttaattcctgggcaggggatatattgagaacccaagaatc

SEQ ID NO: 75952 - DNA, 60 bp, Artificial
  Synthetic oligonucleotide
ggggtgcctactgatgtcgttaattcctgggcaggggatatattgagaacccaagaatca

SEQ ID NO: 75953 - DNA, 60 bp, Artificial
  Synthetic oligonucleotide
gttggtgtgacagggccagattccaaggcagtagcagtagttcattatggaggggtgcct

SEQ ID NO: 75954 - DNA, 60 bp, Artificial
  Synthetic oligonucleotide
gtgtcacagggccagattccaaggcagtagcagtagttcattatggaggggtgcctactg

SEQ ID NO: 75955 - DNA, 60 bp, Artificial
  Synthetic oligonucleotide
acaagcggatcatctgtcaagagggaagaagaagtgctcacaggcaacctccaaacattg

SEQ ID NO: 75956 - DNA, 60 bp, Artificial
  Synthetic oligonucleotide
caagcggatcatctgtcaagagggaagaagaagtgctcacaggcaacctccaaacattga

SEQ ID NO: 75957 - DNA, 60 bp, Artificial
  Synthetic oligonucleotide
caagtggatcatctgtcaagagggaagaagaagtgctcacaggcaacctccaaacattga

SEQ ID NO: 75958 - DNA, 60 bp, Artificial
  Synthetic oligonucleotide
tcaaggttccctactcaatgacaaacattctaatggcacagtgaaagaccggagccccta

SEQ ID NO: 75959 - DNA, 55 bp, Artificial
  Synthetic oligonucleotide
acattagtccattgtcaggaagtgctcagcatatagaggagtgttcctgttatcc

SEQ ID NO: 75960 - DNA, 60 bp, Artificial
  Synthetic oligonucleotide
ggcacaatacatgatagaatccctcatcggacccttttgatgaatgaattgggtgttccg

SEQ ID NO: 75961 - DNA, 60 bp, Artificial
  Synthetic oligonucleotide
atggtacaatacatgatagaatccctcatcggactctcttgatgaacgaattgggtgttc

SEQ ID NO: 75962 - DNA, 60 bp, Artificial
  Synthetic oligonucleotide
agcaaaagcaggggaaaatgattgcaatcataatactcgcgatagtggcctctaccagca

SEQ ID NO: 75963 - DNA, 60 bp, Artificial
  Synthetic oligonucleotide
agcaaaagcaggggaaaatgattgcaatcataatacttgcaatagtggtctctaccagca

SEQ ID NO: 75964 - DNA, 60 bp, Artificial
  Synthetic oligonucleotide
agcaaaagcaggggaaaatgattgcaatcataatacttgcgatagtggcctctaccagca

SEQ ID NO: 75965 - DNA, 60 bp, Artificial
  Synthetic oligonucleotide
gcaaaagcaggggaaaatgattgcaatcataatacttgcaatagtggtctctaccagcaa

SEQ ID NO: 75966 - DNA, 60 bp, Artificial
  Synthetic oligonucleotide
agcaaaagcaggggaaaatgattgcaatcataatattcgcgatagtggcctctaccagca

SEQ ID NO: 75967 - DNA, 58 bp, Artificial
  Synthetic oligonucleotide
gacaaaatctgcattgggtaccatgccaacaattcaacaacacaagtggatacgatac

SEQ ID NO: 75968 - DNA, 60 bp, Artificial
  Synthetic oligonucleotide
caatgggtctttggatgtgctcaaatggttcaatgcaatgcaggatatgtatataattaa

SEQ ID NO: 75969 - DNA, 60 bp, Artificial
  Synthetic oligonucleotide
atactactgacccattgggtctacagtcaaaacccaatcagtggcaacaacacagccaca

SEQ ID NO: 75970 - DNA, 60 bp, Artificial
  Synthetic oligonucleotide
cggctgggaaggaatggttgatgggtggtatggattccgatatcaaaactcggaaggaac

SEQ ID NO: 75971 - DNA, 60 bp, Artificial
  Synthetic oligonucleotide
aaactcggaaggaacaggacaagctggagatctaaagagcactcaagcagccatcgacca

SEQ ID NO: 75972 - DNA, 60 bp, Artificial
  Synthetic oligonucleotide
agagtgctgtggatgttgacgatggtcattttgtcaacatagagctggagtaaaaaacta

SEQ ID NO: 75973 - DNA, 60 bp, Artificial
  Synthetic oligonucleotide
ggaacagcagagtgctgtggatgttgacgatggtcattttgtcaacatagagctggagta

SEQ ID NO: 75974 - DNA, 60 bp, Artificial
  Synthetic oligonucleotide
acaagtggatcatccgtcaagaaggaagaggaagtgctcacaggcaacctccaaacattg

SEQ ID NO: 75975 - DNA, 60 bp, Artificial
  Synthetic oligonucleotide
caagtggatcatccgtcaagaaggaagaggaagtgctcacaggcaacctccaaacattga

SEQ ID NO: 75976 - DNA, 60 bp, Artificial
  Synthetic oligonucleotide
ggtcccaagaccctacaatgctatacaataagatggagtttgagccatttcaatccttgg

SEQ ID NO: 75977 - DNA, 60 bp, Artificial
  Synthetic oligonucleotide
ttcttcagtagactgaattggctgactaaatctggtagcgcttatccagtgctgaacgta

SEQ ID NO: 75978 - DNA, 60 bp, Artificial
  Synthetic oligonucleotide
cgctaatggtttcttcagtagactgaattggctgactaaatctggtagcgcttatccagt

SEQ ID NO: 75979 - DNA, 60 bp, Artificial
  Synthetic oligonucleotide
tatacagagatgaagcactaaacaatcgattccagatcaagggtgtggaactgaaatctg

SEQ ID NO: 75980 - DNA, 60 bp, Artificial
  Synthetic oligonucleotide
cttcagtagactgaattggctgactaaatctggtagcgcttatccagtgctgaacgtaac

SEQ ID NO: 75981 - DNA, 60 bp, Artificial
  Synthetic oligonucleotide
cacgtccaaatgatgggacaggcagttgtggtccagtgtcttctaatggggcatatgggg

SEQ ID NO: 75982 - DNA, 60 bp, Artificial
  Synthetic oligonucleotide
taaaatagatctatggtcttacaatgcagagcttcttgtggccctggagaaccaacatac

SEQ ID NO: 75983 - DNA, 60 bp, Artificial
  Synthetic oligonucleotide
tgtggaatctaatggaaatctaatcgccccttggtatgcatacaaatttgtcagcaccaa

SEQ ID NO: 75984 - DNA, 60 bp, Artificial
  Synthetic oligonucleotide
gatagaatccctcatcggactctcttgatgaacgaattgggtgttccgttccatttaggg

SEQ ID NO: 75985 - DNA, 56 bp, Artificial
  Synthetic oligonucleotide
gctcagcatatagaggaatgttcctgttatcctcgatatcctgacgtcaggtgtat

SEQ ID NO: 75986 - DNA, 60 bp, Artificial
  Synthetic oligonucleotide
gctcagcatatagaggaatgttcctgttatcctcgatatcctgacgtcaggtgtatctgc

SEQ ID NO: 75987 - DNA, 60 bp, Artificial
  Synthetic oligonucleotide
tattcattaaagaggggaaaattgtccatattagcccattgtcaggaagtgctcagcata

SEQ ID NO: 75988 - DNA, 59 bp, Artificial
  Synthetic oligonucleotide
atgtgtttgtatcaatgggacttgcactgtagtaatgactgatggaagtgcatcaggaa

SEQ ID NO: 75989 - DNA, 60 bp, Artificial
  Synthetic oligonucleotide
tggtctcaaaatattctcagaacacaggagtcagaatgtgtttgtatcaatgggacttgc

SEQ ID NO: 75990 - DNA, 60 bp, Artificial
  Synthetic oligonucleotide
gacagtattggttcatggtctcaaaatattctcagaacacaggagtcagaatgtgtttgt

SEQ ID NO: 75991 - DNA, 60 bp, Artificial
  Synthetic oligonucleotide
gcgactgccagtttcatttatgacgggaggcttgtcgacagtattggttcatggtctcaa

SEQ ID NO: 75992 - DNA, 60 bp, Artificial
  Synthetic oligonucleotide
gggatgatagaaatgcgactgccagtttcatttatgacgggaggcttgtcgacagtattg

SEQ ID NO: 75993 - DNA, 60 bp, Artificial
  Synthetic oligonucleotide
cgatggaagagcatggttgcatatttgtgttactggggatgatagaaatgcgactgccag

SEQ ID NO: 75994 - DNA, 60 bp, Artificial
  Synthetic oligonucleotide
tggacaggggaccacactagacaacaaacattcgaatggtacaatacatgatagaatccc

SEQ ID NO: 75995 - DNA, 60 bp, Artificial
  Synthetic oligonucleotide
gagagagatttgccccgaagctgtggaatacagaaattggtcaaagccgcagtgtcaaat

SEQ ID NO: 75996 - DNA, 60 bp, Artificial
  Synthetic oligonucleotide
gatttgccccgaagctgtggaatacagaaattggtcaaagccgcagtgtcaaattacagg

SEQ ID NO: 75997 - DNA, 60 bp, Artificial
  Synthetic oligonucleotide
gtagaaaggaacataacagagatagtgtatttgaacagcaccagtatagagagagagatt

SEQ ID NO: 75998 - DNA, 60 bp, Artificial
  Synthetic oligonucleotide
acagagatagtgtatttgaacagcaccagtatagagagagagatttgccccgaagctgtg

SEQ ID NO: 75999 - DNA, 56 bp, Artificial
  Synthetic oligonucleotide
ttttatgtggagttgataaggggaagaccacaggaaactagagtatggtggacttc

SEQ ID NO: 76000 - DNA, 60 bp, Artificial
  Synthetic oligonucleotide
gtgtatctgcagagataactggaaaggctctaataggcccgttatagacataaatatggc

SEQ ID NO: 76001 - DNA, 60 bp, Artificial
  Synthetic oligonucleotide
gtatctgcagagataactggaaaggctctaataggcccgttatagacataaatatggcag

SEQ ID NO: 76002 - DNA, 60 bp, Artificial
  Synthetic oligonucleotide
taaatatggcagattatagcattgattccagttatgtatgttcagggctcgttggtgaca

SEQ ID NO: 76003 - DNA, 60 bp, Artificial
  Synthetic oligonucleotide
ggcagattatagcattgattccagttatgtatgttcagggctcgttggtgacacacccag

SEQ ID NO: 76004 - DNA, 60 bp, Artificial
  Synthetic oligonucleotide
ttcacgctcaggttacgagactttcaaagtcattggtggttggtccacacctaattccaa

SEQ ID NO: 76005 - DNA, 60 bp, Artificial
  Synthetic oligonucleotide
ggttacgagactttcaaagtcattggtggttggtccacacctaattccaagtcgcaggtc

SEQ ID NO: 76006 - DNA, 54 bp, Artificial
  Synthetic oligonucleotide
ctaattccaagtcgcaggtcaatagacaggtcatagttgacaacaataacaggt

SEQ ID NO: 76007 - DNA, 60 bp, Artificial
  Synthetic oligonucleotide
ctaattccaagtcgcaggtcaatagacaggtcatagttgacaacaataacaggtctggtt

SEQ ID NO: 76008 - DNA, 60 bp, Artificial
  Synthetic oligonucleotide
aggtctggttactctggtattttctctgttgagggcaaaagctgcatcaataggtgtttt

SEQ ID NO: 76009 - DNA, 60 bp, Artificial
  Synthetic oligonucleotide
taggtgtttttatgtggagttgataaggggaagaccacaggaaactagagtatggtggac

SEQ ID NO: 76010 - DNA, 60 bp, Artificial
  Synthetic oligonucleotide
gggtgttccgttccatttagggaccaaacaagtatgcatagcatggtccagctcaagttg

SEQ ID NO: 76011 - DNA, 60 bp, Artificial
  Synthetic oligonucleotide
cagctcaagttgtcacgatggaagagcatggttgcatatttgtgttactggggatgatag

SEQ ID NO: 76012 - DNA, 60 bp, Artificial
  Synthetic oligonucleotide
ataacaattggctctgtctcactcaccattgcaacaatatgcttcctcatgcagattgct

SEQ ID NO: 76013 - DNA, 60 bp, Artificial
  Synthetic oligonucleotide
ggctctgtctcactcaccattgcaacaatatgcttcctcatgcagattgctatcctggca

SEQ ID NO: 76014 - DNA, 60 bp, Artificial
  Synthetic oligonucleotide
gcagattgctatcctggcaactactgtgacactgcattttaagcaacatgaatgcaaccc

SEQ ID NO: 76015 - DNA, 60 bp, Artificial
  Synthetic oligonucleotide
cagattgctatcctggcaactactgtgacactgcattttaagcaacatgaatgcaacccc

SEQ ID NO: 76016 - DNA, 60 bp, Artificial
  Synthetic oligonucleotide
aatgcaacccccctgcaatcaaccaagtgaccccatgtgaaccaatcatagtagaaagga

SEQ ID NO: 76017 - DNA, 60 bp, Artificial
  Synthetic oligonucleotide
cccctgcaatcaaccaagtgaccccatgtgaaccaatcatagtagaaaggaacataacag

SEQ ID NO: 76018 - DNA, 60 bp, Artificial
  Synthetic oligonucleotide
ttgggtgttccgttccatttagggaccaaacaagtatgcatagcatggtccagctcaagt

SEQ ID NO: 76019 - DNA, 60 bp, Artificial
  Synthetic oligonucleotide
ttatcaatttgcacttggacaggggaccacactagacaacaaacattcgaatggtacaat

SEQ ID NO: 76020 - DNA, 60 bp, Artificial
  Synthetic oligonucleotide
ccaaataggatacatatgcagcggggtatttggagacaatccacgccccaatgatggaac

SEQ ID NO: 76021 - DNA, 60 bp, Artificial
  Synthetic oligonucleotide
cgagaaaattgcttctcattgttcaggcacttagggacaacctggaacctggaaccttcg

SEQ ID NO: 76022 - DNA, 60 bp, Artificial
  Synthetic oligonucleotide
tcgagaaaattgcttctcattgttcaggcacttagggacaacctggaacctggaaccttc

SEQ ID NO: 76023 - DNA, 60 bp, Artificial
  Synthetic oligonucleotide
caagaaaattgcttctcattgttcaggcacttagggacaacctggaacctggaaccttcg

SEQ ID NO: 76024 - DNA, 60 bp, Artificial
  Synthetic oligonucleotide
tggagaaacaacatattgaggacacaagagtctgaatgtgcctgcataaatggttcttgc

SEQ ID NO: 76025 - DNA, 60 bp, Artificial
  Synthetic oligonucleotide
aagcccctatagaaccttgatgagctgtcctgttggtgaggctccctctccatacaattc

SEQ ID NO: 76026 - DNA, 60 bp, Artificial
  Synthetic oligonucleotide
ggagaaataacatattaaggacacaagaatctgaatgtgcctgcataaatggttcttgct

SEQ ID NO: 76027 - DNA, 60 bp, Artificial
  Synthetic oligonucleotide
aagagtgcatgaagggtatgaggaattcacaatggttgggcggagagcaacagctatcct

SEQ ID NO: 76028 - DNA, 60 bp, Artificial
  Synthetic oligonucleotide
caatccgactttacttttcttgaaagttccagcgcaaaatgctataagcaccacattccc

SEQ ID NO: 76029 - DNA, 60 bp, Artificial
  Synthetic oligonucleotide
ggatgtcaacccgactttacttttcttgaaagttccagcgcaaaatgccataagcaccac

SEQ ID NO: 76030 - DNA, 60 bp, Artificial
  Synthetic oligonucleotide
ggtgatagatacgttaggatgggaactgaaagcatgaattttgccaagggtccggaaatt

SEQ ID NO: 76031 - DNA, 60 bp, Artificial
  Synthetic oligonucleotide
ttgggagactgtaaaaattcaatggtctcaagaccctacaatgctatacaataagatgga

SEQ ID NO: 76032 - DNA, 57 bp, Artificial
  Synthetic oligonucleotide
atctgttccaccattgaagagctcagacggcagaaatagtgaatttagcttgtcctt

SEQ ID NO: 76033 - DNA, 60 bp, Artificial
  Synthetic oligonucleotide
gagagttgacataaaccctggccatgcagacctcagtgccaaagaggcacaggatgtaat

SEQ ID NO: 76034 - DNA, 60 bp, Artificial
  Synthetic oligonucleotide
gggttgatataaaccctggtcatgcagacctcagtgccaaagaggcacaggatgtaatca

SEQ ID NO: 76035 - DNA, 60 bp, Artificial
  Synthetic oligonucleotide
agatatggaccagcattgagcatcaatgaactgagcaatcttgcgaaaggggagaaagct

SEQ ID NO: 76036 - DNA, 60 bp, Artificial
  Synthetic oligonucleotide
tctgggttgagctgatcagaggaaggcccaaggagaatacaatctggaccagtgggagca

SEQ ID NO: 76037 - DNA, 60 bp, Artificial
  Synthetic oligonucleotide
atatggagtaaaggggttttcatttaagtacggtaatggtgtttggataggaagaactaa

SEQ ID NO: 76038 - DNA, 57 bp, Artificial
  Synthetic oligonucleotide
gaattcggatgcccatcaattagtgtcgaattgtttaaaaacgaccttgtatctact

SEQ ID NO: 76039 - DNA, 57 bp, Artificial
  Synthetic oligonucleotide
gaattcgaatggccatcaattagtgtcgaattgtttaaaaacgaccttatttctact

SEQ ID NO: 76040 - DNA, 57 bp, Artificial
  Synthetic oligonucleotide
ttcggatggccatcaattagtgtcgaattgtttaaaaacgaccttgtttctactaat

SEQ ID NO: 76041 - DNA, 52 bp, Artificial
  Synthetic oligonucleotide
atgaagggaggctgattcagaatagcataacaatagagagaatggttctctc

SEQ ID NO: 76042 - DNA, 60 bp, Artificial
  Synthetic oligonucleotide
gctagttcaaagctcctcaacagggaaaatatgcaacaatcctcacaggatccttgatgg

SEQ ID NO: 76043 - DNA, 60 bp, Artificial
  Synthetic oligonucleotide
ttgctatttatagtacggtatcgagcagtctagtcttggtagggctgataatagcaatgg

SEQ ID NO: 76044 - DNA, 60 bp, Artificial
  Synthetic oligonucleotide
cttttgacatgagtaaagaagggtcttatttcttcggagacaatgcagaggagtatgaca

SEQ ID NO: 76045 - DNA, 60 bp, Artificial
  Synthetic oligonucleotide
cctttgacatgagtaacgaagggtcttatttcttcggagacaatgcagaggagtatgaca

SEQ ID NO: 76046 - DNA, 60 bp, Artificial
  Synthetic oligonucleotide
gggagattctacatacagatgtgcactgaactcaaactcagcgactatgaggggaggctg

SEQ ID NO: 76047 - DNA, 60 bp, Artificial
  Synthetic oligonucleotide
gacggagggttgacataaaccctggtcacgcagacctcagtgccaaagaggcacaggatg

SEQ ID NO: 76048 - DNA, 60 bp, Artificial
  Synthetic oligonucleotide
gacggagggttgacataaatcctggccacgcagacctcagtgccaaagaggcacaggatg

SEQ ID NO: 76049 - DNA, 60 bp, Artificial
  Synthetic oligonucleotide
tggtgtgaatagtgacactgtgggttggtcttggccagacggtgctgagttgccattcac

SEQ ID NO: 76050 - DNA, 60 bp, Artificial
  Synthetic oligonucleotide
ctcagaccgagtgatggtgtcacctctggctgtgacatggtggaataggaatggaccaac

SEQ ID NO: 76051 - DNA, 60 bp, Artificial
  Synthetic oligonucleotide
ctcgccggatctctcttacagagttgggtacttatgtgcagggctgcccagtgatactcc

SEQ ID NO: 76052 - DNA, 60 bp, Artificial
  Synthetic oligonucleotide
tcctcaatgcgacttattgcttggtgatcaaagctggtcatatatagtggaaaggcctac

SEQ ID NO: 76053 - DNA, 56 bp, Artificial
  Synthetic oligonucleotide
caagacgagagcaaacttaatagacaggaaatagattcagtgaaactggaaaatct

SEQ ID NO: 76054 - DNA, 60 bp, Artificial
  Synthetic oligonucleotide
cacgatgccaatgtgaagaacctatatgaaaaggtgaaatcacaattgagagacaacgcg

SEQ ID NO: 76055 - DNA, 60 bp, Artificial
  Synthetic oligonucleotide
actggcaactggtctgagaaatgtcccacaggcagagacgagaggattgttcggggccat

SEQ ID NO: 76056 - DNA, 60 bp, Artificial
  Synthetic oligonucleotide
ctggtctgagaaatgtcccacaggcagagacgagaggattgttcggggccatagctgggt

SEQ ID NO: 76057 - DNA, 60 bp, Artificial
  Synthetic oligonucleotide
catcttgcttggggaccaacgttggtcttacatagtggagagacctggagcccaaaatgg

SEQ ID NO: 76058 - DNA, 60 bp, Artificial
  Synthetic oligonucleotide
ccaacgttggtcttacatagtggagagacctggagcccaaaatgggatatgctacccagg

SEQ ID NO: 76059 - DNA, 60 bp, Artificial
  Synthetic oligonucleotide
cctctctggattggagaatgtcccaagtatgttaaaagtgatagcctaagactggcaact

SEQ ID NO: 76060 - DNA, 60 bp, Artificial
  Synthetic oligonucleotide
cctctggattggagaatgccccaagtatgttaaaagtgatagcctaagactggcaactgg

SEQ ID NO: 76061 - DNA, 60 bp, Artificial
  Synthetic oligonucleotide
gattggagaatgtcccaagtatgttaaaagtgatagcctaagactggcaactggtctgag

SEQ ID NO: 76062 - DNA, 60 bp, Artificial
  Synthetic oligonucleotide
ggtcatatatagtggaaagacctacagctcaaaatgggatttgctacccaggagtgctga

SEQ ID NO: 76063 - DNA, 60 bp, Artificial
  Synthetic oligonucleotide
tctaatggcacagtgaaagaccggagcccctatagaactctaatgagtgtagaaataggg

SEQ ID NO: 76064 - DNA, 60 bp, Artificial
  Synthetic oligonucleotide
ttctaatggcacagtgaaagaccggagcccctatagaactctaatgagtgtagaaatagg

SEQ ID NO: 76065 - DNA, 60 bp, Artificial
  Synthetic oligonucleotide
gagcccctacagaactctaatgagtgtagaaatagggcaatcacccaatgtgtaccaggc

SEQ ID NO: 76066 - DNA, 60 bp, Artificial
  Synthetic oligonucleotide
ggagcccctacagaactctaatgagtgtagaaatagggcaatcacccaatgtgtaccagg

SEQ ID NO: 76067 - DNA, 60 bp, Artificial
  Synthetic oligonucleotide
ttccaatggcacagtgaaagaccggagcccctatagaactctaatgagtgtagaaatagg

SEQ ID NO: 76068 - DNA, 60 bp, Artificial
  Synthetic oligonucleotide
ggagcccctatagaactctaatgagtgtagaaatagggcaatcacccaatgtgtaccagg

SEQ ID NO: 76069 - DNA, 60 bp, Artificial
  Synthetic oligonucleotide
agtgactatgaggggagactaatccaaaacagcataacaatagagagaatggttctctcg

SEQ ID NO: 76070 - DNA, 60 bp, Artificial
  Synthetic oligonucleotide
cagtgactatgaagggaggctggtccaaaacagcataacaatagagagaatggttctctc

SEQ ID NO: 76071 - DNA, 60 bp, Artificial
  Synthetic oligonucleotide
gcagggataattggcatggctcgaatcggccgtgggtttctttcaatcagaatctggagt

SEQ ID NO: 76072 - DNA, 60 bp, Artificial
  Synthetic oligonucleotide
tttctggtccagacaatggggctgttgctgtattgaaatacaatggcataataacagaca

SEQ ID NO: 76073 - DNA, 60 bp, Artificial
  Synthetic oligonucleotide
ggtccagacaatggggctgttgctgtattgaaatacaatggcataataacagacactatc

SEQ ID NO: 76074 - DNA, 60 bp, Artificial
  Synthetic oligonucleotide
ggtcggcaagtgcttgtcatgatggcattagttggttgacaatcggaatttctggtccag

SEQ ID NO: 76075 - DNA, 60 bp, Artificial
  Synthetic oligonucleotide
ttgtttgaaaagaccaggaggcaactgagggaaaatgctgaagacatgggcaatggttgt

SEQ ID NO: 76076 - DNA, 60 bp, Artificial
  Synthetic oligonucleotide
gggtttcattatgtgggcctgccagagaggcaacattaggtgcaacatttgcatttgagt

SEQ ID NO: 76077 - DNA, 60 bp, Artificial
  Synthetic oligonucleotide
ggggttcattatgtgggcctgccagagaggcaacattaggtgcaacatttgcatttgagt

SEQ ID NO: 76078 - DNA, 60 bp, Artificial
  Synthetic oligonucleotide
tgggtttcattatgtgggcctgccagagaggcaacattaggtgcaacatttgcatttgag

SEQ ID NO: 76079 - DNA, 56 bp, Artificial
  Synthetic oligonucleotide
agtgacatccacatcatggcgtcccaaggcaccaaacgatcttatgagcagatgga

SEQ ID NO: 76080 - DNA, 58 bp, Artificial
  Synthetic oligonucleotide
tgagtgacatccacatcatggcgtcccaaggcaccaaacgatcttatgagcagatgga

SEQ ID NO: 76081 - DNA, 60 bp, Artificial
  Synthetic oligonucleotide
gacggctggtatggtttcagacaccagaactctgagggtacaggacaagctgcagatcta

SEQ ID NO: 76082 - DNA, 60 bp, Artificial
  Synthetic oligonucleotide
tacgtggacaggagtcacacaaaatggagggagtggtgcttgcaaaagagggcccgccaa

SEQ ID NO: 76083 - DNA, 60 bp, Artificial
  Synthetic oligonucleotide
atgagtcttctaaccgaggtcgaaacgtacgttctctctatcgtcccgtcaggccccatc

SEQ ID NO: 76084 - DNA, 60 bp, Artificial
  Synthetic oligonucleotide
tgatgctaagggttttgcacccttttccaaagacaatggaataagaattggatcgagagg

SEQ ID NO: 76085 - DNA, 60 bp, Artificial
  Synthetic oligonucleotide
aagggtatgaggaattcacaatggttggacggagagcaacagctatcctgaggaaagcaa

SEQ ID NO: 76086 - DNA, 60 bp, Artificial
  Synthetic oligonucleotide
gttggtacagggctcctcaacagggaaaatatgcaacaacccacatagaatccttgatgg

SEQ ID NO: 76087 - DNA, 60 bp, Artificial
  Synthetic oligonucleotide
gttggtccagggctcctcaacagggaaaatatgcaacaacccacatagaatccttgatgg

SEQ ID NO: 76088 - DNA, 60 bp, Artificial
  Synthetic oligonucleotide
gggctcctcaacagggaaaatatgcaacaacccacatagaatccttgatgggagggactg

SEQ ID NO: 76089 - DNA, 60 bp, Artificial
  Synthetic oligonucleotide
ggctcctcaacagggaaaatatgcaacaacccacatagaatccttgatggacgagactgc

SEQ ID NO: 76090 - DNA, 60 bp, Artificial
  Synthetic oligonucleotide
caccatgaaaattctcaaggctcaggatatgcagcagacagagaaagcactcaaaaggct

SEQ ID NO: 76091 - DNA, 54 bp, Artificial
  Synthetic oligonucleotide
ttttgttataagggagcccttcgtctcttgttcgcccacggaatgcagaacttt

SEQ ID NO: 76092 - DNA, 60 bp, Artificial
  Synthetic oligonucleotide
acatgtttttgttataagggagcccttcgtttcttgttcgcccacggaatgcagaacttt

SEQ ID NO: 76093 - DNA, 60 bp, Artificial
  Synthetic oligonucleotide
tcttgttcgcccacggaatgcagaactttcttcctcactcaggggtcactgcttaatgac

SEQ ID NO: 76094 - DNA, 60 bp, Artificial
  Synthetic oligonucleotide
aagggagcccttcgtttcttgttcgcccacggaatgcagaactttcttcttaactcaggg

SEQ ID NO: 76095 - DNA, 60 bp, Artificial
  Synthetic oligonucleotide
gttaggaaacaggtagttgttgataatctgaactggtcgggatacagtgggtctttcacc

SEQ ID NO: 76096 - DNA, 60 bp, Artificial
  Synthetic oligonucleotide
tctcttacagagttgggtacctatgtgcagggctgcccagtgatactccaagaggggaag

SEQ ID NO: 76097 - DNA, 60 bp, Artificial
  Synthetic oligonucleotide
gaatcagtaaagctagagaaccttggtgtgtatcaaattcttgccatttatagtacggtg

SEQ ID NO: 76098 - DNA, 60 bp, Artificial
  Synthetic oligonucleotide
gagaagaattgacaatctgaacaaaagaatggaagatggatttctggacgtttggacata

SEQ ID NO: 76099 - DNA, 60 bp, Artificial
  Synthetic oligonucleotide
aatggctttccttgaagagtcccacccaggaatctttgaaaactcgtgtcttgaaacgat

SEQ ID NO: 76100 - DNA, 60 bp, Artificial
  Synthetic oligonucleotide
ctttccttgaggagtcccacccaggaatctttgaaaactcgtgtcttgaaacgatggaag

SEQ ID NO: 76101 - DNA, 60 bp, Artificial
  Synthetic oligonucleotide
ccttgaagagtcccacccaggaatctttgaaaactcgtgtcttgaaacgatggaagttgt

SEQ ID NO: 76102 - DNA, 60 bp, Artificial
  Synthetic oligonucleotide
ccttgaggagtcccacccaggaatctttgaaaactcgtgtcttgaaacgatggaagttgt

SEQ ID NO: 76103 - DNA, 52 bp, Artificial
  Synthetic oligonucleotide
gcgaccaaaagaattcggatggccatcaattagtgtcgaattgttaaaaacg

SEQ ID NO: 76104 - DNA, 60 bp, Artificial
  Synthetic oligonucleotide
gtcgtgagcatcatagtaacagtattagtccttgggagaggtggcaacaatgggatttgt

SEQ ID NO: 76105 - DNA, 60 bp, Artificial
  Synthetic oligonucleotide
ctttcaggtagactgttttctttggcatgtccgcaaacgatttgcagaccaagaactggg

SEQ ID NO: 76106 - DNA, 60 bp, Artificial
  Synthetic oligonucleotide
tgaagggaggctgatccaaaacagcataacaatagagagaatggttctctctgcattcga

SEQ ID NO: 76107 - DNA, 51 bp, Artificial
  Synthetic oligonucleotide
tcagctggtgtggatggcatgccattctgcagcatttgaggatctgagagt

SEQ ID NO: 76108 - DNA, 50 bp, Artificial
  Synthetic oligonucleotide
cagctggtgtggatggcatgccattctgcagcatttgaggatctgagagt

SEQ ID NO: 76109 - DNA, 60 bp, Artificial
  Synthetic oligonucleotide
gatacgttaggatgggaactgaaagcatgaattttgccaagagtccggaaattgcagaaa

SEQ ID NO: 76110 - DNA, 60 bp, Artificial
  Synthetic oligonucleotide
tgaaagatgagtcttctaaccgaggtcgaaacgtacgttctctctatcattccgtcaggc

SEQ ID NO: 76111 - DNA, 60 bp, Artificial
  Synthetic oligonucleotide
attaagaaggaggagttcgctgagatcatgaagatctgttccaccattgaagagctcaga

SEQ ID NO: 76112 - DNA, 60 bp, Artificial
  Synthetic oligonucleotide
ggaggagttcgctgagatcatgaagatctgttccaccattgaagagctcagacggcagaa

SEQ ID NO: 76113 - DNA, 60 bp, Artificial
  Synthetic oligonucleotide
gaaggatgagttcgctgagatcatgaagatctgttccaccattgaagagctcagacggca

SEQ ID NO: 76114 - DNA, 60 bp, Artificial
  Synthetic oligonucleotide
gttcgctgagatcatgaagatctgttccaccattgaagagctcagacggcagaaatagtg

SEQ ID NO: 76115 - DNA, 60 bp, Artificial
  Synthetic oligonucleotide
agatcatgaagatctgttccaccattgaagagctcagacggcagaaatagtgaatttagc

SEQ ID NO: 76116 - DNA, 60 bp, Artificial
  Synthetic oligonucleotide
caatggaggccatatagaagaatgctcatgctatcccaatgaaggtaaagtggaatgtgt

SEQ ID NO: 76117 - DNA, 60 bp, Artificial
  Synthetic oligonucleotide
cccaagaggacagttagcaaccagaggagtgcaaattgcttcaaatgaaaacatggagac

SEQ ID NO: 76118 - DNA, 60 bp, Artificial
  Synthetic oligonucleotide
gcactccaatctcaatgacaccacataccaaagaacaagggctcttgttcggactgggat

SEQ ID NO: 76119 - DNA, 60 bp, Artificial
  Synthetic oligonucleotide
ccttgaatgtggagtccaatggaaacctaatcgctccttggtatgcatacaaatttgtca

SEQ ID NO: 76120 - DNA, 60 bp, Artificial
  Synthetic oligonucleotide
cagggtttgctcctttctccaaggacaactcaattcggctttctgccggtggggacattt

SEQ ID NO: 76121 - DNA, 60 bp, Artificial
  Synthetic oligonucleotide
atacagaaattggtcaaaaccacaatgccaaatcacagggtttgctcctttctccaagga

SEQ ID NO: 76122 - DNA, 60 bp, Artificial
  Synthetic oligonucleotide
tatgcatagcgtggtccagctcaagctgtcatgatgggagagcatggttacatgtatgta

SEQ ID NO: 76123 - DNA, 60 bp, Artificial
  Synthetic oligonucleotide
gctcctttctccaaggacaactcaattcggctttctgccggtggggacatttgggtgaca

SEQ ID NO: 76124 - DNA, 60 bp, Artificial
  Synthetic oligonucleotide
tcctagcaacgactgtgacactgcacttcaagcaagatgaatgcaacataccctcgaaaa

SEQ ID NO: 76125 - DNA, 60 bp, Artificial
  Synthetic oligonucleotide
atcctagcaacgactgtgacactgcacttcaagcaagatgaatgcaacataccctcgaaa

SEQ ID NO: 76126 - DNA, 60 bp, Artificial
  Synthetic oligonucleotide
tcctaaagtggtagaatacagaaattggtcaaaaccacaatgccaaatcacagggtttgc

SEQ ID NO: 76127 - DNA, 60 bp, Artificial
  Synthetic oligonucleotide
accctcgaaaaaccaggtagtgccatgtgaaccaatcataatagaaaggaacataacaga

SEQ ID NO: 76128 - DNA, 60 bp, Artificial
  Synthetic oligonucleotide
catgtatgtatcacgggggatgacagaaatgcgactgctagcttcatttatgatgggatg

SEQ ID NO: 76129 - DNA, 60 bp, Artificial
  Synthetic oligonucleotide
gcgtggtccagctcaagctgtcatgatgggagagcatggttacatgtatgtatcacgggg

SEQ ID NO: 76130 - DNA, 60 bp, Artificial
  Synthetic oligonucleotide
aagagagggaaagattgtccatataagcccattgtcagggagtgctcagcacatagaaga

SEQ ID NO: 76131 - DNA, 60 bp, Artificial
  Synthetic oligonucleotide
tgtccatataagcccattgtcagggagtgctcagcacatagaagaatgttcctgttatcc

SEQ ID NO: 76132 - DNA, 60 bp, Artificial
  Synthetic oligonucleotide
ggaacaggctcatggcctgatggggcaaatatcaatttcatgccgatataagctttcgca

SEQ ID NO: 76133 - DNA, 60 bp, Artificial
  Synthetic oligonucleotide
ggagtgcttcaggagttgctgatactagaatactattcgcaagagagggaaagattgtcc

SEQ ID NO: 76134 - DNA, 60 bp, Artificial
  Synthetic oligonucleotide
atgacagatgggagtgcttcaggagttgctgatactagaatactattcgcaagagaggga

SEQ ID NO: 76135 - DNA, 60 bp, Artificial
  Synthetic oligonucleotide
aatgcgtttgcatcaatgggacttgtgcagtagtaatgacagatgggagtgcttcaggag

SEQ ID NO: 76136 - DNA, 60 bp, Artificial
  Synthetic oligonucleotide
gaactcaggaatctgaatgcgtttgcatcaatgggacttgtgcagtagtaatgacagatg

SEQ ID NO: 76137 - DNA, 60 bp, Artificial
  Synthetic oligonucleotide
tgatgggatgctcgccgacagcattggttcttggtctaaaaacatactcagaactcagga

SEQ ID NO: 76138 - DNA, 60 bp, Artificial
  Synthetic oligonucleotide
ggggatgacagaaatgcgactgctagcttcatttatgatgggatgctcgccgacagcatt

SEQ ID NO: 76139 - DNA, 60 bp, Artificial
  Synthetic oligonucleotide
cagggaccctaataatgagagagggaatccaggagtgaaagggtgggccttcgacgatgg

SEQ ID NO: 76140 - DNA, 60 bp, Artificial
  Synthetic oligonucleotide
ttgcagggaccctaataatgagagagggaatccaggagtgaaagggtgggccttcgacga

SEQ ID NO: 76141 - DNA, 60 bp, Artificial
  Synthetic oligonucleotide
atggtggacttcaaacagtattgtcgtattctgtggtacttcaggtacctatggaacagg

SEQ ID NO: 76142 - DNA, 60 bp, Artificial
  Synthetic oligonucleotide
atggaacaggctcatggcctgatggggcaaatatcaatttcatgccgatataagctttcg

SEQ ID NO: 76143 - DNA, 60 bp, Artificial
  Synthetic oligonucleotide
ccttcgacgatggaaatgatgtttggatgggaaggacaatcagcagagattcacgttcag

SEQ ID NO: 76144 - DNA, 60 bp, Artificial
  Synthetic oligonucleotide
cttcgacgatggaaatgatgtttggatgggaaggacaatcagcagagattcacgttcagg

SEQ ID NO: 76145 - DNA, 60 bp, Artificial
  Synthetic oligonucleotide
tcacgttcaggttatgagaccttcaaagtcattggtggttggatcaccgctaattccaaa

SEQ ID NO: 76146 - DNA, 60 bp, Artificial
  Synthetic oligonucleotide
caggttatgagaccttcaaagtcattggtggttggatcaccgctaattccaaatcgcagg

SEQ ID NO: 76147 - DNA, 59 bp, Artificial
  Synthetic oligonucleotide
ggtctggttattcgggtgttttctctgtagaaggcaaaagctgcatcaataggtgtttt

SEQ ID NO: 76148 - DNA, 60 bp, Artificial
  Synthetic oligonucleotide
ggtctggttattcgggtgttttctctgtagaaggcaaaagctgcatcaataggtgttttt

SEQ ID NO: 76149 - DNA, 60 bp, Artificial
  Synthetic oligonucleotide
aggtgtttttatgtggagttaataagaggaaggccgcaggaaactagagtatggtggact

SEQ ID NO: 76150 - DNA, 60 bp, Artificial
  Synthetic oligonucleotide
gagttaataagaggaaggccgcaggaaactagagtatggtggacttcaaacagtattgtc

SEQ ID NO: 76151 - DNA, 60 bp, Artificial
  Synthetic oligonucleotide
tgcctgcaaaagagggcctgctagtggtttcttcagtaggctgaattggctgactaaatc

SEQ ID NO: 76152 - DNA, 60 bp, Artificial
  Synthetic oligonucleotide
ggacaggagtcactcaaaatggaggaagtgatgcctgcaaaagagggcctgctagtggtt

SEQ ID NO: 76153 - DNA, 60 bp, Artificial
  Synthetic oligonucleotide
ggacaggagtcactcaaaatggaggaagtaatgcctgcaaaagagggcctgctagtggtt

SEQ ID NO: 76154 - DNA, 60 bp, Artificial
  Synthetic oligonucleotide
tgttcttgctaccctaatgatggaaaagtggaatgcgtatgtagagacaattggacaggg

SEQ ID NO: 76155 - DNA, 50 bp, Artificial
  Synthetic oligonucleotide
tcaaaaaataataaccattggctccatatcattgggattggttgtattca

SEQ ID NO: 76156 - DNA, 60 bp, Artificial
  Synthetic oligonucleotide
cgcctgacctctcttacagagttgggtatttatgtgcagggctgcccagtgatactccaa

SEQ ID NO: 76157 - DNA, 60 bp, Artificial
  Synthetic oligonucleotide
ttatgaagttgccgattggtcatggcacgatggagctattcttccctttgacatcgacaa

SEQ ID NO: 76158 - DNA, 60 bp, Artificial
  Synthetic oligonucleotide
gaccataaagttgccagttggtcatggcacgatggagctattcttccctttgacatcgat

SEQ ID NO: 76159 - DNA, 60 bp, Artificial
  Synthetic oligonucleotide
ggagtagatcataaagttgccagttggtcatggcacgatggagctattcttccctttgac

SEQ ID NO: 76160 - DNA, 60 bp, Artificial
  Synthetic oligonucleotide
gagttgattatgaaattgccgattggtcatggcacgatggagctattcttccctttgaca

SEQ ID NO: 76161 - DNA, 60 bp, Artificial
  Synthetic oligonucleotide
ggagtagaccataaaattgccagttggtcatggcacgatggagctattcttccctttgac

SEQ ID NO: 76162 - DNA, 60 bp, Artificial
  Synthetic oligonucleotide
cagtgaaggaccggagcccctatagaactctaatgagtgtagaaatagggcaatcaccca

SEQ ID NO: 76163 - DNA, 60 bp, Artificial
  Synthetic oligonucleotide
cagtgaaagaccgaagcccctatagaactctaatgagtgtagaaatagggcaatcaccca

SEQ ID NO: 76164 - DNA, 60 bp, Artificial
  Synthetic oligonucleotide
cacagtgaaagaccgaagcccctatagaactctaatgagtgtagaaatagggcaatcacc

SEQ ID NO: 76165 - DNA, 60 bp, Artificial
  Synthetic oligonucleotide
catcgagtgacatccacatcatggcgtctcaaggcaccaaacgatcttatgaacagatgg

SEQ ID NO: 76166 - DNA, 50 bp, Artificial
  Synthetic oligonucleotide
agggaggctgattcagaacagcataacaatagagagaatggttctctctg

SEQ ID NO: 76167 - DNA, 53 bp, Artificial
  Synthetic oligonucleotide
tgaagggaggctgattcagaacagcataacaatagagagaatggttctctctg

SEQ ID NO: 76168 - DNA, 60 bp, Artificial
  Synthetic oligonucleotide
tcgatatgtcaggatgggaactgaaagcatgaattttgccaaaactccggaaattgcggc

SEQ ID NO: 76169 - DNA, 60 bp, Artificial
  Synthetic oligonucleotide
ttagacaaaacccaacagaagagcaagctgtggatatatgcaaagcagcaatgggtctaa

SEQ ID NO: 76170 - DNA, 60 bp, Artificial
  Synthetic oligonucleotide
cccaacagaagagcaagctgtggatatatgcaaagcagcaatgggtctaaggatcagttc

SEQ ID NO: 76171 - DNA, 60 bp, Artificial
  Synthetic oligonucleotide
tgctcctcattgttcaggcacttagggacaacctggaacctggtaccttcgatcttggag

SEQ ID NO: 76172 - DNA, 60 bp, Artificial
  Synthetic oligonucleotide
cctcattgttcaggcacttagggacaacctggaacctggtaccttcgatcttggaggact

SEQ ID NO: 76173 - DNA, 60 bp, Artificial
  Synthetic oligonucleotide
tcattgttcaggcacttagggacaacctggaacctggaactttcgatcttggagggctat

SEQ ID NO: 76174 - DNA, 60 bp, Artificial
  Synthetic oligonucleotide
tattgttcaggcacttagggacaacctggaacccggaaccttcgatcttggagggctata

SEQ ID NO: 76175 - DNA, 60 bp, Artificial
  Synthetic oligonucleotide
tttcttactcaaggttccctactcaatgacaaacattctaatggcacagtgaaggaccgg

SEQ ID NO: 76176 - DNA, 60 bp, Artificial
  Synthetic oligonucleotide
gcaggacgttctttcttactcaaggttccctactcaatgacaaacattctaatggcacag

SEQ ID NO: 76177 - DNA, 58 bp, Artificial
  Synthetic oligonucleotide
caggactttcttcctgactcaaggggccttgttgaatgacaagcattccaatggaacc

SEQ ID NO: 76178 - DNA, 60 bp, Artificial
  Synthetic oligonucleotide
agaatcccacccaggaatctttgaaaactcgtgtcttgaaacgatggaagttgttcaaca

SEQ ID NO: 76179 - DNA, 60 bp, Artificial
  Synthetic oligonucleotide
gggtgaggctccttccccatataactcaagatttgagtctgttgcttggtcggcaagtgc

SEQ ID NO: 76180 - DNA, 60 bp, Artificial
  Synthetic oligonucleotide
attgcttctcattgttcaggcacttagggacaacctggaacctggaaccttcgatcttgg

SEQ ID NO: 76181 - DNA, 60 bp, Artificial
  Synthetic oligonucleotide
tctaatggaaatctaatcgctccttggtatgcatacaaatttgtcagcacaaacagtaaa

SEQ ID NO: 76182 - DNA, 60 bp, Artificial
  Synthetic oligonucleotide
cagtgaaagaccggagcccctatagaactctaatgagtgtagaaatagggcagtcaccca

SEQ ID NO: 76183 - DNA, 60 bp, Artificial
  Synthetic oligonucleotide
cacagtgaaagaccggagcccctatagaactctaatgagtgtagaaatagggcagtcacc

SEQ ID NO: 76184 - DNA, 60 bp, Artificial
  Synthetic oligonucleotide
catccccaacgacaaaccatttcaaaatgtgaacaagattacatatgggaaatgccctaa

SEQ ID NO: 76185 - DNA, 60 bp, Artificial
  Synthetic oligonucleotide
catccccaacgacaaaccatttcaaaatgtgaacaaagttacatacggagaatgccccaa

SEQ ID NO: 76186 - DNA, 60 bp, Artificial
  Synthetic oligonucleotide
ccccaacgacaaaccatttcaaaatgtgaacaagattacatatgggaaatgccctaagta

SEQ ID NO: 76187 - DNA, 60 bp, Artificial
  Synthetic oligonucleotide
ccccaacgacaaaccatttcaaaatgtgaacaaagttacatacggagaatgccccaagta

SEQ ID NO: 76188 - DNA, 60 bp, Artificial
  Synthetic oligonucleotide
atctgttccaccattgaagagctcagacggcaaaaatagtgaatttagcttgatcttcgt

SEQ ID NO: 76189 - DNA, 60 bp, Artificial
  Synthetic oligonucleotide
atctgttccaccattgaagagctcagacggcagaaatagtgaatttagcttgtcctcatg

SEQ ID NO: 76190 - DNA, 60 bp, Artificial
  Synthetic oligonucleotide
atctgttccaccattgaagagctcagacggcaaaaatagtgaagttcgcttgtccttcat

SEQ ID NO: 76191 - DNA, 59 bp, Artificial
  Synthetic oligonucleotide
atctgttccaccattgaagagctcagacggcagaaatagtgaatttagcttgtccttca

SEQ ID NO: 76192 - DNA, 60 bp, Artificial
  Synthetic oligonucleotide
ctgacggccccgccaataggcaggcacagtatagaatatacaaagcaaatcaaggcagaa

SEQ ID NO: 76193 - DNA, 60 bp, Artificial
  Synthetic oligonucleotide
actgacggccccgccaataggcaggcacagtatagaatatacaaagcaaatcaaggcaga

SEQ ID NO: 76194 - DNA, 60 bp, Artificial
  Synthetic oligonucleotide
actgaactcaaactcagtgactatgaagggaggctggtccaaaacagcataacaatagag

SEQ ID NO: 76195 - DNA, 60 bp, Artificial
  Synthetic oligonucleotide
gcgcagaatgccataagcaccacattcccatatactggagatcctccatacagccatgga

SEQ ID NO: 76196 - DNA, 60 bp, Artificial
  Synthetic oligonucleotide
actggtagatgggtggtatggctatcaccatgaaaattctcaaggctcaggatatgcagc

SEQ ID NO: 76197 - DNA, 60 bp, Artificial
  Synthetic oligonucleotide
tagtacggtgtcgagcagtctagtcttggtagggctgatcatagcaatgggtctttggat

SEQ ID NO: 76198 - DNA, 60 bp, Artificial
  Synthetic oligonucleotide
gtacggtgtcgagcagtctagtcttggtagggctgatcatagcaatgggtctttggatgt

SEQ ID NO: 76199 - DNA, 60 bp, Artificial
  Synthetic oligonucleotide
aaagccgggggaaaccttgaatgtggaatctaatggaaatctaatcgccccttggtatgc

SEQ ID NO: 76200 - DNA, 60 bp, Artificial
  Synthetic oligonucleotide
catctatagtacggtatcgagcagtctagtattggtagggctgatcatagcaatgggtct

SEQ ID NO: 76201 - DNA, 60 bp, Artificial
  Synthetic oligonucleotide
gcgacttattgcttggtgatcaaagctggtcatatatagtggaaaggcctactgctcaaa

SEQ ID NO: 76202 - DNA, 60 bp, Artificial
  Synthetic oligonucleotide
ccaagtggatatgcacaaacagactgcgtcctggaagcaatggctttccttgaagaatcc

SEQ ID NO: 76203 - DNA, 60 bp, Artificial
  Synthetic oligonucleotide
gctgctcagcatgagagacatgtgtgatgctccctttgatgacagactcaggagagatca

SEQ ID NO: 76204 - DNA, 60 bp, Artificial
  Synthetic oligonucleotide
cagagttgggtacttatgtgcagggattcctagtgatactccaagaggggaagatgccca

SEQ ID NO: 76205 - DNA, 60 bp, Artificial
  Synthetic oligonucleotide
cgcagggttcattgaaggaggatggactggaatgatagatgggtggtatggctatcacca

SEQ ID NO: 76206 - DNA, 60 bp, Artificial
  Synthetic oligonucleotide
tcctcataggatccttgatggaagagactgcacactgatagatgctctcttgggggaccc

SEQ ID NO: 76207 - DNA, 55 bp, Artificial
  Synthetic oligonucleotide
tcctcataggatccttgatggaagagactgcacactgatagatgctctcttgggg

SEQ ID NO: 76208 - DNA, 60 bp, Artificial
  Synthetic oligonucleotide
tgccaaacaatgacaattttgacaagctatacatttggggggttcaccacccgagcacga

SEQ ID NO: 76209 - DNA, 60 bp, Artificial
  Synthetic oligonucleotide
tgacaatgcttgcatagagtcaatcagaaatgggacttatgaccatgatatatacagaga

SEQ ID NO: 76210 - DNA, 60 bp, Artificial
  Synthetic oligonucleotide
gcttgcatagagtcaatcagaaatgggacttatgaccatgatatatacagagacgaagcg

SEQ ID NO: 76211 - DNA, 60 bp, Artificial
  Synthetic oligonucleotide
cttgcatagagtcaatcagaaatgggacttatgatcatgatatatacagagatgaagcac

SEQ ID NO: 76212 - DNA, 60 bp, Artificial
  Synthetic oligonucleotide
ataagggtacatgaagggtatgaggaattcacaatggttgggcgaagagcaacagccatc

SEQ ID NO: 76213 - DNA, 60 bp, Artificial
  Synthetic oligonucleotide
aagagtgcatgaagggtatgaggaattcacaatggttggacggagagcaacagctatcat

SEQ ID NO: 76214 - DNA, 60 bp, Artificial
  Synthetic oligonucleotide
aagagtgcatgaagggtatgaggaattcacaatggttgggcgaagagcaacagctatcct

SEQ ID NO: 76215 - DNA, 60 bp, Artificial
  Synthetic oligonucleotide
aaccatttgaatggatgtcaatccgactttacttttcttgaaagttccagcgcagaatgc

SEQ ID NO: 76216 - DNA, 60 bp, Artificial
  Synthetic oligonucleotide
gcactaaacaatcgattccagatcaagggtgtggaactgaaatctggatacaaagattgg

SEQ ID NO: 76217 - DNA, 60 bp, Artificial
  Synthetic oligonucleotide
gtgcttgggacaccatgcagtaccaaatggaacaatagtgaaaacaataacggatgatca

SEQ ID NO: 76218 - DNA, 60 bp, Artificial
  Synthetic oligonucleotide
cggatgatcaaattgaagtaactaatgcgactgaactggttcagagctcctcaacaggga

SEQ ID NO: 76219 - DNA, 60 bp, Artificial
  Synthetic oligonucleotide
gtgcttgggacatcatgcagtaccaaatgggacaatagtgaaaacaataacggatgatca

SEQ ID NO: 76220 - DNA, 60 bp, Artificial
  Synthetic oligonucleotide
ctaacaaaaaccactgtggaccatatggccataatcaagaaatacacatcaggaagacaa

SEQ ID NO: 76221 - DNA, 60 bp, Artificial
  Synthetic oligonucleotide
ctggtgatcgatatgtcaggatgggaactgaaagcatgaattttgccaagagtccagaaa

SEQ ID NO: 76222 - DNA, 60 bp, Artificial
  Synthetic oligonucleotide
gcaatggctttccttgaagagtcccacccaggaatctttgaaaactcgtgtcttgaaacg

SEQ ID NO: 76223 - DNA, 60 bp, Artificial
  Synthetic oligonucleotide
ggcaccaaacgatcttatgagcagatggaaactggtggagaacgccagaatgctaccgag

SEQ ID NO: 76224 - DNA, 60 bp, Artificial
  Synthetic oligonucleotide
taggcaaaacccaactgaggagcaagctgtggatatatgcaaagcagcaatgggtttgag

SEQ ID NO: 76225 - DNA, 60 bp, Artificial
  Synthetic oligonucleotide
ggcaaaatccaactgaggagcaagctgtggatatatgcaaagcagcaatgggtttgagga

SEQ ID NO: 76226 - DNA, 60 bp, Artificial
  Synthetic oligonucleotide
taggcaaaatccaactgaggagcaagctgtggatatatgcaaagcagcaatgggtttgag

SEQ ID NO: 76227 - DNA, 60 bp, Artificial
  Synthetic oligonucleotide
ctgaggagcaagctgtggatatatgcaaagcagcaatgggtttgaggatcagttcatcct

SEQ ID NO: 76228 - DNA, 60 bp, Artificial
  Synthetic oligonucleotide
cttgaatgtggaatctaatggaaatctaatcgctccttggtatgcatacaaatttgtcag

SEQ ID NO: 76229 - DNA, 60 bp, Artificial
  Synthetic oligonucleotide
gaccaagagcaaaccaatctgtatgttcaagcatcagggagagtcacagtctctaccaag

SEQ ID NO: 76230 - DNA, 60 bp, Artificial
  Synthetic oligonucleotide
gattctacatacagatgtgcactgaactcaaactcagtgactatgaagggagactgatcc

SEQ ID NO: 76231 - DNA, 60 bp, Artificial
  Synthetic oligonucleotide
gctgctcagtatgagagacatgtgtgatgctccctttgatgatagactcaggagagatca

SEQ ID NO: 76232 - DNA, 60 bp, Artificial
  Synthetic oligonucleotide
cagcatgagagacatgtgtgatgctccctttgatgatagactcaggagagatcaaaaggc

SEQ ID NO: 76233 - DNA, 60 bp, Artificial
  Synthetic oligonucleotide
ggaaagaacaccgatcttgaggcactcatggaatggctaaagacaagaccaatcctgtca

SEQ ID NO: 76234 - DNA, 60 bp, Artificial
  Synthetic oligonucleotide
gcgcactgggatggaccccagaatgtgctctctgatgcaaggatcaactctcccgaggag

SEQ ID NO: 76235 - DNA, 60 bp, Artificial
  Synthetic oligonucleotide
aaatctgggtgtatatcagatccttgctatttatagtacggtatcgagcagtctagtttt

SEQ ID NO: 76236 - DNA, 60 bp, Artificial
  Synthetic oligonucleotide
aaatctgggtgtatatcaaatccttgctatttatagtacggtatcgagcagtctagtttt

SEQ ID NO: 76237 - DNA, 60 bp, Artificial
  Synthetic oligonucleotide
gagctcctcaacagggaaaatatgcaacaatcctcaccgaattctcgatggaagagactg

SEQ ID NO: 76238 - DNA, 60 bp, Artificial
  Synthetic oligonucleotide
aagagcatcccagtgctgggaaagaccccaagaagactggaggtccaatctacaggagga

SEQ ID NO: 76239 - DNA, 60 bp, Artificial
  Synthetic oligonucleotide
cacaagagtctgaatgtgcctgcattaatggttcttgctttaccataatgactgatggac

SEQ ID NO: 76240 - DNA, 60 bp, Artificial
  Synthetic oligonucleotide
attccaaacagcagcacaacgagcaatgatggaccaggtgagggaaagccggaatcctgg

SEQ ID NO: 76241 - DNA, 60 bp, Artificial
  Synthetic oligonucleotide
cttcttaatttgcgttgttctattgggtttcattatgtgggcttgccaaaaaggcaacat

SEQ ID NO: 76242 - DNA, 60 bp, Artificial
  Synthetic oligonucleotide
ctttttaatttgcgttgttctattgggtttcattatgtgggcttgccaaaaaggcaacat

SEQ ID NO: 76243 - DNA, 60 bp, Artificial
  Synthetic oligonucleotide
gaatgcaacatccccgcgaacaaccaagtagtgccatgtgaaccaatcataatagagagg

SEQ ID NO: 76244 - DNA, 60 bp, Artificial
  Synthetic oligonucleotide
ggcagactatagcattgactccagttatgtgtgctcagggcttgttggcgacacgccaag

SEQ ID NO: 76245 - DNA, 60 bp, Artificial
  Synthetic oligonucleotide
caggtagtgccatgtgaaccaatcataatagaaaggaacataacagaggtagtgtatttg

SEQ ID NO: 76246 - DNA, 51 bp, Artificial
  Synthetic oligonucleotide
tgaggggaggctgattcagaacagcataacaatagagagaatggttctctc

SEQ ID NO: 76247 - DNA, 51 bp, Artificial
  Synthetic oligonucleotide
tgaagggagactgattcagaacagcataacaatagagagaatggttctctc

SEQ ID NO: 76248 - DNA, 51 bp, Artificial
  Synthetic oligonucleotide
tgaaggaaggctgattcagaacagcataacaatagagagaatggttctctc

SEQ ID NO: 76249 - DNA, 60 bp, Artificial
  Synthetic oligonucleotide
cctgcattaaaggagactgttattgggtgatgactgacggaccggcaaacaggcaagctc

SEQ ID NO: 76250 - DNA, 60 bp, Artificial
  Synthetic oligonucleotide
cgccatatcatgcttcttaatttgtgttgttctattgggtttcattatgtgggcttgcca

SEQ ID NO: 76251 - DNA, 60 bp, Artificial
  Synthetic oligonucleotide
ctccctttgatgacaggctccgaagagaccaaaaggcattaaagggaagaggcagcacac

SEQ ID NO: 76252 - DNA, 60 bp, Artificial
  Synthetic oligonucleotide
ccaaacattgaaaataagagtgcatgaagggtatgaggaattcacaatggttgggcgaag

SEQ ID NO: 76253 - DNA, 57 bp, Artificial
  Synthetic oligonucleotide
ggattcggatggccatcaattagtgttgaattgtttaaaaacgaccttgtttctact

SEQ ID NO: 76254 - DNA, 57 bp, Artificial
  Synthetic oligonucleotide
gaattcgaatggccatcaattagtgttgaattgtttaaaaacgaccttgtttctact

SEQ ID NO: 76255 - DNA, 54 bp, Artificial
  Synthetic oligonucleotide
gtctcaaggcaccaaacgatcttatgagcagatggagactggtggggagcgcca

SEQ ID NO: 76256 - DNA, 54 bp, Artificial
  Synthetic oligonucleotide
gtctcaaggcaccaaacgatcttatgagcagatggaaactggtggagagcgcca

SEQ ID NO: 76257 - DNA, 60 bp, Artificial
  Synthetic oligonucleotide
gtctcaaggcaccaaacgatcttatgagcagatggaaactagtggagagcgccagaatgc

SEQ ID NO: 76258 - DNA, 60 bp, Artificial
  Synthetic oligonucleotide
tagcaataactgattggtcaggatatagcggaagttttgttcagcatccagaactgacgg

SEQ ID NO: 76259 - DNA, 60 bp, Artificial
  Synthetic oligonucleotide
tatcgtagcaataactgattggtcaggatatagcgggagttttgttcaacatccagaatt

SEQ ID NO: 76260 - DNA, 60 bp, Artificial
  Synthetic oligonucleotide
ctgcagaaggggatcagccgatagtttctttagccgactgaattggctgacaaaatctgg

SEQ ID NO: 76261 - DNA, 60 bp, Artificial
  Synthetic oligonucleotide
agggaggctgattcaaaacagcataacaatagagagaatggttctctctgcatttgacga

SEQ ID NO: 76262 - DNA, 60 bp, Artificial
  Synthetic oligonucleotide
ggtacaggacaagcagcagaccttaaaagcactcaagccgccattgaccaaatcaatggg

SEQ ID NO: 76263 - DNA, 60 bp, Artificial
  Synthetic oligonucleotide
aagggacaggacaagcagcagaccttaaaagcactcaagccgctattgaccaaatcaatg

SEQ ID NO: 76264 - DNA, 60 bp, Artificial
  Synthetic oligonucleotide
gggacaggacaagcagcagaccttaaaagcactcaagccgctattgaccaaatcaatgga

SEQ ID NO: 76265 - DNA, 60 bp, Artificial
  Synthetic oligonucleotide
gtgctgtggtgatgccagctcatggcccagccaagagcatggaatatgatgctgttgcta

SEQ ID NO: 76266 - DNA, 60 bp, Artificial
  Synthetic oligonucleotide
gagatgtttcccaaaagtacatgggcaggagtagataccaacagtggggtgacaaatgct

SEQ ID NO: 76267 - DNA, 60 bp, Artificial
  Synthetic oligonucleotide
tgcatcttggttcaactccttcctcacacatgcactgaaatagttgtggcaatgctacta

SEQ ID NO: 76268 - DNA, 60 bp, Artificial
  Synthetic oligonucleotide
ccgcaacactgtgcttggggcatcatgcagtaccaaacggaacaatagtgaaaacaataa

SEQ ID NO: 76269 - DNA, 60 bp, Artificial
  Synthetic oligonucleotide
ccataatcccgaatattggatccaggccttgggtcagaggccaatcagggagaataagca

SEQ ID NO: 76270 - DNA, 60 bp, Artificial
  Synthetic oligonucleotide
ggactaagaaatgttccacagattgaaactagaggacttttcggagctatcgcaggtttt

SEQ ID NO: 76271 - DNA, 60 bp, Artificial
  Synthetic oligonucleotide
cgggcaaccttcaaacattgaaaataagagtgcatgaggggtatgaagagttcacaatgg

SEQ ID NO: 76272 - DNA, 60 bp, Artificial
  Synthetic oligonucleotide
cgggcaaccttcaaacattgaaaataagagtgcatgagggctatgaagaattcacaatgg

SEQ ID NO: 76273 - DNA, 60 bp, Artificial
  Synthetic oligonucleotide
tcacaggcaaccttcaaacattgaaaataagagtgcatgaggggtatgaagagttcacaa

SEQ ID NO: 76274 - DNA, 60 bp, Artificial
  Synthetic oligonucleotide
atgcttacgggcaaccttcaaacattgaaaataagagtgcatgagggctatgaagaattc

SEQ ID NO: 76275 - DNA, 60 bp, Artificial
  Synthetic oligonucleotide
ttacgggcaaccttcaaacattgaaaataagagtgcatgaggggtatgaagagttcacaa

SEQ ID NO: 76276 - DNA, 60 bp, Artificial
  Synthetic oligonucleotide
gtatcaaattcttgctatttatagtacggtatcgagcagtctagtcttggtagggctgat

SEQ ID NO: 76277 - DNA, 60 bp, Artificial
  Synthetic oligonucleotide
tcctcatcggaggacttgaatggaatgataacacagttcgagtctctgaagctctacaga

SEQ ID NO: 76278 - DNA, 60 bp, Artificial
  Synthetic oligonucleotide
gtcctcatcggaggacttgaatggaatgataacacagttcgagtctctgaagctctacag

SEQ ID NO: 76279 - DNA, 60 bp, Artificial
  Synthetic oligonucleotide
gaagagaccaaaaggcattaaagggaagaggcagcacacttggactcgacctaagagtgg

SEQ ID NO: 76280 - DNA, 60 bp, Artificial
  Synthetic oligonucleotide
tggagacaacccgcgccccaatgacggaacaggcagttgtggtccagtgtcttctaatgg

SEQ ID NO: 76281 - DNA, 60 bp, Artificial
  Synthetic oligonucleotide
cccgcgccccaatgacggaacaggcagttgtggtccagtgtcttctaatggggcatatgg

SEQ ID NO: 76282 - DNA, 60 bp, Artificial
  Synthetic oligonucleotide
tgatggaacaggcagttgtggtccagtgtcttctaatggggcatatggagtaaagggatt

SEQ ID NO: 76283 - DNA, 60 bp, Artificial
  Synthetic oligonucleotide
atgggctatatacagcaaggacaatggtataaggataggttccaagggagatgtatttgt

SEQ ID NO: 76284 - DNA, 60 bp, Artificial
  Synthetic oligonucleotide
agataatcactcaccgagtgacatccacatcatggcgtctcaaggcaccaaacgatctta

SEQ ID NO: 76285 - DNA, 60 bp, Artificial
  Synthetic oligonucleotide
caggaatgaggaacgtacctgagaaacaaaccaggggtctgttcggtgcaatagcaggat

SEQ ID NO: 76286 - DNA, 57 bp, Artificial
  Synthetic oligonucleotide
attcagcaactgctacccatatgacgtgccagactatgcatctctcaggtctctagt

SEQ ID NO: 76287 - DNA, 60 bp, Artificial
  Synthetic oligonucleotide
ggagccatagcagggtttattgaggggggatggactggaatgatagatgggtggtatggc

SEQ ID NO: 76288 - DNA, 60 bp, Artificial
  Synthetic oligonucleotide
aggaacgacgatagctctagcaacagcaattgcaaagatcctaataatgagagagggaac

SEQ ID NO: 76289 - DNA, 58 bp, Artificial
  Synthetic oligonucleotide
atatcagcccattatcaggaagtgctcagcatatagaggagtgctcctgttatccccg

SEQ ID NO: 76290 - DNA, 60 bp, Artificial
  Synthetic oligonucleotide
gagagggaacccgggagtgaaagggtgggcctttgactacggagatgatgtttggatggg

SEQ ID NO: 76291 - DNA, 60 bp, Artificial
  Synthetic oligonucleotide
cgacgatagctctagcaacagcaattgcaaagatcctaataatgagagagggaacccggg

SEQ ID NO: 76292 - DNA, 60 bp, Artificial
  Synthetic oligonucleotide
caatcagcaaggattcacgctcaggttatgaaactttcagagttactggtggttggacca

SEQ ID NO: 76293 - DNA, 60 bp, Artificial
  Synthetic oligonucleotide
tttggatgggaagaacaatcagcaaggattcacgctcaggttatgaaactttcagagtta

SEQ ID NO: 76294 - DNA, 60 bp, Artificial
  Synthetic oligonucleotide
ctggtggttggaccacagctaattccaaatcccaggtaaatagacaagtcatagttgaca

SEQ ID NO: 76295 - DNA, 60 bp, Artificial
  Synthetic oligonucleotide
ttcagagttactggtggttggaccacagctaattccaaatcccaggtaaatagacaagtc

SEQ ID NO: 76296 - DNA, 60 bp, Artificial
  Synthetic oligonucleotide
gttgacaataataactggtctggttattctggtattttctctgttgaaggcaaacactgc

SEQ ID NO: 76297 - DNA, 60 bp, Artificial
  Synthetic oligonucleotide
tagacaagtcatagttgacaataataactggtctggttattctggtattttctctgttga

SEQ ID NO: 76298 - DNA, 51 bp, Artificial
  Synthetic oligonucleotide
tagaattcctcatcgaacccttttaatgaacgagttgggtgttccatttca

SEQ ID NO: 76299 - DNA, 60 bp, Artificial
  Synthetic oligonucleotide
tacaggaattggtcaaaaccacaatgtcagattgcagggtttgctcctctctccaaggac

SEQ ID NO: 76300 - DNA, 52 bp, Artificial
  Synthetic oligonucleotide
atagaattcctcatcgaacccttttaatgaacgagttgggtgttccatttca

SEQ ID NO: 76301 - DNA, 60 bp, Artificial
  Synthetic oligonucleotide
taatgggatgcttgttgatagcattggttcatggtctcaaaacatcctcagaactcagga

SEQ ID NO: 76302 - DNA, 60 bp, Artificial
  Synthetic oligonucleotide
tgttgatagcattggttcatggtctcaaaacatcctcagaactcaggagtcagaatgcgt

SEQ ID NO: 76303 - DNA, 60 bp, Artificial
  Synthetic oligonucleotide
catgtttgtgtcactggggatgacagaaatgcaacagctagtttcatttataatgggatg

SEQ ID NO: 76304 - DNA, 60 bp, Artificial
  Synthetic oligonucleotide
tgcattaatggaacttgtacagtggtaatgactgatggaagtgcatcaggaagggctgat

SEQ ID NO: 76305 - DNA, 60 bp, Artificial
  Synthetic oligonucleotide
gaacttgtacagtggtaatgactgatggaagtgcatcaggaagggctgatactagaatac

SEQ ID NO: 76306 - DNA, 60 bp, Artificial
  Synthetic oligonucleotide
ataagagggaggccacaggaaactagagtatggtggacctcaaacagtatcgtcgtattc

SEQ ID NO: 76307 - DNA, 60 bp, Artificial
  Synthetic oligonucleotide
tctctgttgaaggcaaacactgcatcaataggtgtttttatgtggagctgataagaggga

SEQ ID NO: 76308 - DNA, 60 bp, Artificial
  Synthetic oligonucleotide
gagggaggccacaggaaactagagtatggtggacctcaaacagtatcgtcgtattctgtg

SEQ ID NO: 76309 - DNA, 60 bp, Artificial
  Synthetic oligonucleotide
cctaaagcagtagaatacaggaattggtcaaaaccacaatgtcagattgcagggtttgct

SEQ ID NO: 76310 - DNA, 60 bp, Artificial
  Synthetic oligonucleotide
cacttcaagcaaaatgaatgcagcatcccctcgaataatcaagtagtgccgtgtgaccca

SEQ ID NO: 76311 - DNA, 60 bp, Artificial
  Synthetic oligonucleotide
ggatgggaactgaaagcatgaattttgccaagagcccggaaattgcggcaaggcctgcag

SEQ ID NO: 76312 - DNA, 60 bp, Artificial
  Synthetic oligonucleotide
aattctcaaggctcaggatatgcagcagacagagaaagcactcaaaaggctatagacgga

SEQ ID NO: 76313 - DNA, 60 bp, Artificial
  Synthetic oligonucleotide
caaggctcaggatatgcagcagacagagaaagcacccaaaaggctatagacggaattaca

SEQ ID NO: 76314 - DNA, 60 bp, Artificial
  Synthetic oligonucleotide
cagatgcagagatgaataaattattcgagaagactaggcgccagttaagagaaaacgcgg

SEQ ID NO: 76315 - DNA, 60 bp, Artificial
  Synthetic oligonucleotide
cggctgcattgagggcaagctttctcaaatgtccaaagaagtaaatgccagaattgaacc

SEQ ID NO: 76316 - DNA, 60 bp, Artificial
  Synthetic oligonucleotide
tgtgtatcaaattcttgccatttatagtacggtatcgagcagcctagtgttggtagggct

SEQ ID NO: 76317 - DNA, 60 bp, Artificial
  Synthetic oligonucleotide
tcttggtgtgtatcaaattcttgccatttatagtacggtatcgagcagtctggtcttggt

SEQ ID NO: 76318 - DNA, 60 bp, Artificial
  Synthetic oligonucleotide
cactgagtgacatccacatcatggcgtcccaaggcaccaaacgatcttatgagcagatgg

SEQ ID NO: 76319 - DNA, 60 bp, Artificial
  Synthetic oligonucleotide
cactgagtgacatccatatcatggcgtcccaaggcaccaaacgatcttatgagcagatgg

SEQ ID NO: 76320 - DNA, 60 bp, Artificial
  Synthetic oligonucleotide
cctcctttgacatgagtaatgaaggatcttatttcttcggagacaatgcagaggagtatg

SEQ ID NO: 76321 - DNA, 60 bp, Artificial
  Synthetic oligonucleotide
gaatggatgtcaatccgactttacttttcttgaaagttccagcgcaaaatgccataagca

SEQ ID NO: 76322 - DNA, 60 bp, Artificial
  Synthetic oligonucleotide
tttgaatggatgtcaatccgactttacttttcttgaaagttccagcgcaaaatgctataa

SEQ ID NO: 76323 - DNA, 60 bp, Artificial
  Synthetic oligonucleotide
ggatgtcaatccgactttacttttcttgaaagttccagcgcagaatgccataagcaccac

SEQ ID NO: 76324 - DNA, 60 bp, Artificial
  Synthetic oligonucleotide
ggatgtcaatccgactttacttttcttgaaagttccagcgcaaaatgccataagcactac

SEQ ID NO: 76325 - DNA, 60 bp, Artificial
  Synthetic oligonucleotide
atgggaatctaatcgctccttggtatgcatacaaatttgacagtaccactagcaaaggag

SEQ ID NO: 76326 - DNA, 60 bp, Artificial
  Synthetic oligonucleotide
ggttgatgggtggtatggattccgatatcagaattcggaagggacagggcaagctgcaga

SEQ ID NO: 76327 - DNA, 60 bp, Artificial
  Synthetic oligonucleotide
gaaagaagaaacaagtacctcgaggagcatcccagtgctgggaaagaccctaagaaaacg

SEQ ID NO: 76328 - DNA, 60 bp, Artificial
  Synthetic oligonucleotide
aaatctaatcgctccttggtatgcatacaaatttgacagtacaactaacaaaggagcagt

SEQ ID NO: 76329 - DNA, 60 bp, Artificial
  Synthetic oligonucleotide
tcctcatcggtggacttgaatggaatgataactcaattcgagcgtctgaaaatatacaga

SEQ ID NO: 76330 - DNA, 60 bp, Artificial
  Synthetic oligonucleotide
ctgcccagtgatactccaagaggggaagatgcccaatttactgggtcatgcaccagcccc

SEQ ID NO: 76331 - DNA, 60 bp, Artificial
  Synthetic oligonucleotide
atactccaagaggggaagatgcccaatttactggttcgtgcactagtcccatggggaatc

SEQ ID NO: 76332 - DNA, 60 bp, Artificial
  Synthetic oligonucleotide
ggtacctatgtgcagggctgcccagtgatactccaagaggggaagatgcccaatttactg

SEQ ID NO: 76333 - DNA, 60 bp, Artificial
  Synthetic oligonucleotide
gatgtgtggagttaattatgaagttgccgattggtcatggcacgatggagctattcttcc

SEQ ID NO: 76334 - DNA, 60 bp, Artificial
  Synthetic oligonucleotide
atattggatccaggccttgggtcagaggccaatcagggaggataagcatctactggacaa

SEQ ID NO: 76335 - DNA, 60 bp, Artificial
  Synthetic oligonucleotide
gaatggttggtgggattggaaggttttatatacagatgtgcactgaactcaaactcagtg

SEQ ID NO: 76336 - DNA, 60 bp, Artificial
  Synthetic oligonucleotide
cccgcaaacaaccaagtaacgccatgtgaaccaatagtaatagagaggaacataacagag

SEQ ID NO: 76337 - DNA, 60 bp, Artificial
  Synthetic oligonucleotide
ggtccagctcaagctgtcatgatgggaaagcatggttgcacgtttgtgtcactggggatg

SEQ ID NO: 76338 - DNA, 60 bp, Artificial
  Synthetic oligonucleotide
tgcagggatcctaataatgagagagggaacccaggagtgaaagggtgggcctttgataat

SEQ ID NO: 76339 - DNA, 60 bp, Artificial
  Synthetic oligonucleotide
ccatcctagcaacgactgtgacactgcatttcaaacaaaatgaatgcagcattcccgcaa

SEQ ID NO: 76340 - DNA, 60 bp, Artificial
  Synthetic oligonucleotide
gaagtgctcagcatgtagaggaatgttcttgttatccccggtacccaaacgtcagatgtg

SEQ ID NO: 76341 - DNA, 60 bp, Artificial
  Synthetic oligonucleotide
gtattgtcgtattttgtggcacttcagggacatatggaacaggctcatggcctgatgggg

SEQ ID NO: 76342 - DNA, 60 bp, Artificial
  Synthetic oligonucleotide
cgcgctcaggctatgagaccttcaaggtcattggtggttgggccattgctaattccaagt

SEQ ID NO: 76343 - DNA, 60 bp, Artificial
  Synthetic oligonucleotide
tgacagtattggttcctggtctcaaaatatcctcaggactcaggagtcagaatgcgtttg

SEQ ID NO: 76344 - DNA, 60 bp, Artificial
  Synthetic oligonucleotide
ctttgataatggaaatgatgtatggatgggaagaacaatcagtaaagattcgcgctcagg

SEQ ID NO: 76345 - DNA, 60 bp, Artificial
  Synthetic oligonucleotide
agaggggaaaattgtccacattagtccattgtcaggaagtgctcagcatgtagaggaatg

SEQ ID NO: 76346 - DNA, 60 bp, Artificial
  Synthetic oligonucleotide
ggagtcagaatgcgtttgtatcagtggaacttgtacagtagtaatgactgatggaagtgc

SEQ ID NO: 76347 - DNA, 60 bp, Artificial
  Synthetic oligonucleotide
ggctggcaactggtttgagaaatgtcccacaggcagagacaagaggattgttcggggcca

SEQ ID NO: 76348 - DNA, 60 bp, Artificial
  Synthetic oligonucleotide
agagcatgaattttgccaaaagtccggaaatagcagcaagaccagctgtgaatgggcaaa

SEQ ID NO: 76349 - DNA, 51 bp, Artificial
  Synthetic oligonucleotide
cagttgagctcctagagagtcaaaaggaggaaagattctgcagagtgttaa

SEQ ID NO: 76350 - DNA, 60 bp, Artificial
  Synthetic oligonucleotide
tggtatgcttacaaattcaccagttccaacaataagggagctgtcttcaaatcaaacctt

SEQ ID NO: 76351 - DNA, 60 bp, Artificial
  Synthetic oligonucleotide
ccaaaggcccagaaatagcagcaagaccagctgtgaatggacaaagagggagaattgatt

SEQ ID NO: 76352 - DNA, 60 bp, Artificial
  Synthetic oligonucleotide
ataactcaattcgagcgtctgaaaatatacagagattcgcttggggaatccatgatgagg

SEQ ID NO: 76353 - DNA, 60 bp, Artificial
  Synthetic oligonucleotide
caattcgagcgtctgaaaatatacagagattcgcttggggaatccatgatgaggatgggg

SEQ ID NO: 76354 - DNA, 60 bp, Artificial
  Synthetic oligonucleotide
gcactaaacaatcgattccagatcaagggtgtggagctaaagtctggatacaaagattgg

SEQ ID NO: 76355 - DNA, 60 bp, Artificial
  Synthetic oligonucleotide
ccctactcaatgacaaacattctaatggcacagtgaaagaccggagcccctacagaactc

SEQ ID NO: 76356 - DNA, 60 bp, Artificial
  Synthetic oligonucleotide
gcaatcgaggagtgcctgattaatgatccctgggttttgcttaatgcatcttggttcaac

SEQ ID NO: 76357 - DNA, 60 bp, Artificial
  Synthetic oligonucleotide
ggagggctatatgaagcaattgaggagtgcctgattaatgatccctgggttttgcttaat

SEQ ID NO: 76358 - DNA, 60 bp, Artificial
  Synthetic oligonucleotide
acagccggaaagtcagacaagatctgcattgggtatcatgccaacaattcaacaacacaa

SEQ ID NO: 76359 - DNA, 60 bp, Artificial
  Synthetic oligonucleotide
ccaacactgtgtcaagccttcaggtagactgctttctttggcatgtccgcaaacgatttg

SEQ ID NO: 76360 - DNA, 60 bp, Artificial
  Synthetic oligonucleotide
ctccaatactgtgtcaagctttcaggtagactgctttctttggcatgtccgcaaacgatt

SEQ ID NO: 76361 - DNA, 60 bp, Artificial
  Synthetic oligonucleotide
ccaacactgtgtcaagttttcaggtagactgctttctttggcatgtccgcaaacgatttg

SEQ ID NO: 76362 - DNA, 60 bp, Artificial
  Synthetic oligonucleotide
ccaacactgtatcaagctttcaggtagactgctttctttggcatgtccgcaaacgatttg

SEQ ID NO: 76363 - DNA, 60 bp, Artificial
  Synthetic oligonucleotide
cctcaacagggaaaatatgcaacaatcctcatagaattctcgatggaagagactgcacat

SEQ ID NO: 76364 - DNA, 60 bp, Artificial
  Synthetic oligonucleotide
tcagagttcctcaacagggaaaatatgcaacaatcctcatagaattctcgatggaagaga

SEQ ID NO: 76365 - DNA, 60 bp, Artificial
  Synthetic oligonucleotide
tcaaatccttgctatttatagtacggtatcgagcagtctagttttggtgggactggtcat

SEQ ID NO: 76366 - DNA, 60 bp, Artificial
  Synthetic oligonucleotide
tcagatccttgctatttatagtacggtatcgagcagtctagttttggtgggactgatcgt

SEQ ID NO: 76367 - DNA, 53 bp, Artificial
  Synthetic oligonucleotide
gcactgaaatagttgtggcaatgctactatttgctatccatactgtccaaaga

SEQ ID NO: 76368 - DNA, 53 bp, Artificial
  Synthetic oligonucleotide
aaaagctctataatgagatcagatgcacccatagacacttgtgtgtccgagtg

SEQ ID NO: 76369 - DNA, 61 bp, Artificial
  Synthetic oligonucleotide
caatgggtctttggatgtgttcaaatggttcaatgcaatgcaggatatgtatataattaag

SEQ ID NO: 76370 - DNA, 60 bp, Artificial
  Synthetic oligonucleotide
caatgggtctttggatgtgttcaaatggttcaatgcaatgcaggatatgtatataattaa

SEQ ID NO: 76371 - DNA, 60 bp, Artificial
  Synthetic oligonucleotide
caataggtctttggatgtgttcaaatggttcaatgcaatgcaggatatgtatataattaa

SEQ ID NO: 76372 - DNA, 60 bp, Artificial
  Synthetic oligonucleotide
catttatagtacggtatcgagcagtctagttttggtagggctgatcatggcaatgggtct

SEQ ID NO: 76373 - DNA, 60 bp, Artificial
  Synthetic oligonucleotide
tatttatagtacggtatcgagcagtctagttttggtagggctgatcatggcaatgggtct

SEQ ID NO: 76374 - DNA, 60 bp, Artificial
  Synthetic oligonucleotide
aatgcgacctattacttggtgatcaaagctggtcatatatagtggaaagacctacagctc

SEQ ID NO: 76375 - DNA, 60 bp, Artificial
  Synthetic oligonucleotide
aatgtgatctattacttggtgatcaaagctggtcatatatagtggaaagacctacagctc

SEQ ID NO: 76376 - DNA, 60 bp, Artificial
  Synthetic oligonucleotide
aatgtgacctattacttggtgatcaaagctggtcatatatagtggaaagacctacagctc

SEQ ID NO: 76377 - DNA, 60 bp, Artificial
  Synthetic oligonucleotide
aatgctgtggtgatgccagctcatggaccagccaagagcatggaatatgatgctgttgct

SEQ ID NO: 76378 - DNA, 60 bp, Artificial
  Synthetic oligonucleotide
gaacggctgcattgagggcaagctttctcaaatgtccaaagaagtaaatgccagaattga

SEQ ID NO: 76379 - DNA, 60 bp, Artificial
  Synthetic oligonucleotide
ggacctctagcagctccattgtgatgtgtggagtagaccataaagttgccagttggtcat

SEQ ID NO: 76380 - DNA, 57 bp, Artificial
  Synthetic oligonucleotide
gagtgacatccacatcatggcgtctcaaggcaccaaacgatcttatgagcagatgga

SEQ ID NO: 76381 - DNA, 60 bp, Artificial
  Synthetic oligonucleotide
gccccaatgatgggacaggcagttgtggtccggtgtcctctaacggggcatttggagtga

SEQ ID NO: 76382 - DNA, 60 bp, Artificial
  Synthetic oligonucleotide
tggtgtttggattgggagaaccaaaaacactagttccaggcgcggctttgaaatgatttg

SEQ ID NO: 76383 - DNA, 59 bp, Artificial
  Synthetic oligonucleotide
aaatgatttgggatccaaatgggtggactgaaactgacagtggcttttcagtgaagcaa

SEQ ID NO: 76384 - DNA, 60 bp, Artificial
  Synthetic oligonucleotide
ggagtaccaaataggatacatatgcagtgggattttcggagacaatccacgccccaatga

SEQ ID NO: 76385 - DNA, 60 bp, Artificial
  Synthetic oligonucleotide
tcggagacaatccacgccccaatgatgggacaggcagttgtggtccggtgtcctctaacg

SEQ ID NO: 76386 - DNA, 60 bp, Artificial
  Synthetic oligonucleotide
ctgacaggattaaattgcatgagaccttgtttctgggttgagctaatcagagggcagccc

SEQ ID NO: 76387 - DNA, 60 bp, Artificial
  Synthetic oligonucleotide
gtggatgggccatatacagtaaggacaatggtataagaattggttccaaaggggatgtat

SEQ ID NO: 76388 - DNA, 60 bp, Artificial
  Synthetic oligonucleotide
cctgtgggtgaggctccttccccatataactcaagatttgagtctgttgcttggtcggca

SEQ ID NO: 76389 - DNA, 60 bp, Artificial
  Synthetic oligonucleotide
tttctggtccagacaatggggctgttgctgtattgaaatacaatggcataataccagaca

SEQ ID NO: 76390 - DNA, 60 bp, Artificial
  Synthetic oligonucleotide
ggggatgtatttgttataagagagccattcatctcatgctcccacttggaatgcaggacc

SEQ ID NO: 76391 - DNA, 60 bp, Artificial
  Synthetic oligonucleotide
gtctgaatgtgcatgtgtaaatggttcttgctttaccgtaatgacagacggaccaagtaa

SEQ ID NO: 76392 - DNA, 60 bp, Artificial
  Synthetic oligonucleotide
caaaagttggaggaacaatatactgagaactcaagagtctgaatgtgcatgtgtaaatgg

SEQ ID NO: 76393 - DNA, 60 bp, Artificial
  Synthetic oligonucleotide
ccagacactatcaaaagttggaggaacaatatactgagaactcaagagtctgaatgtgca

SEQ ID NO: 76394 - DNA, 60 bp, Artificial
  Synthetic oligonucleotide
acgtgtgtgtgcagagataattggcatggctcgaatcggccgtgggtatctttcaatcaa

SEQ ID NO: 76395 - DNA, 60 bp, Artificial
  Synthetic oligonucleotide
ctaattatcactacgaggagtgctcctgttatcctgatgatggcgaaatcacgtgtgtgt

SEQ ID NO: 76396 - DNA, 60 bp, Artificial
  Synthetic oligonucleotide
gaccaagtaatggacaggcctcatacaagatcttcaagatagaaaaagggaaagtagtta

SEQ ID NO: 76397 - DNA, 60 bp, Artificial
  Synthetic oligonucleotide
gcatgtgtaaatggttcttgctttaccgtaatgacagacggaccaagtaatggacaggcc

SEQ ID NO: 76398 - DNA, 60 bp, Artificial
  Synthetic oligonucleotide
tttcaatcaaaacttggagtaccaaataggatacatatgcagtgggattttcggagacaa

SEQ ID NO: 76399 - DNA, 50 bp, Artificial
  Synthetic oligonucleotide
cagagggcagcccaaagagaacacaatttggactagtgggagcagcatat

SEQ ID NO: 76400 - DNA, 60 bp, Artificial
  Synthetic oligonucleotide
ctgggtaaatcagacatatgttaacatcagcaataccaattttctcactgagcaagctgt

SEQ ID NO: 76401 - DNA, 60 bp, Artificial
  Synthetic oligonucleotide
gtcattcaattcagacctgcattacttatgaaaacaacacctgggtaaatcagacatatg

SEQ ID NO: 76402 - DNA, 60 bp, Artificial
  Synthetic oligonucleotide
gctgtggcttcagtaactttagcgggcaattcctctctttgccctattagtggatgggcc

SEQ ID NO: 76403 - DNA, 60 bp, Artificial
  Synthetic oligonucleotide
tagattgctatctatggcacataagaaagctgctcagcatgagagacatgtgtgatgctc

SEQ ID NO: 76404 - DNA, 60 bp, Artificial
  Synthetic oligonucleotide
tatggcacataagaaagctgctcagcatgagagacatgtgtgatgctccctttgatgaca

SEQ ID NO: 76405 - DNA, 60 bp, Artificial
  Synthetic oligonucleotide
ggcatataagaaagctgctcagcatgagagacatgtgtgatgctccctttgatgatagac

SEQ ID NO: 76406 - DNA, 60 bp, Artificial
  Synthetic oligonucleotide
ggcccagccaagagcatggaatatgatgctgttgctactacacactcctggattcctaag

SEQ ID NO: 76407 - DNA, 60 bp, Artificial
  Synthetic oligonucleotide
ctcatggcccagccaagagcatggaatatgatgctgttgctactacacactcctggattc

SEQ ID NO: 76408 - DNA, 60 bp, Artificial
  Synthetic oligonucleotide
gcccagccaagagcatggaatatgatgctgttgctactacacactcctggattcctaaaa

SEQ ID NO: 76409 - DNA, 60 bp, Artificial
  Synthetic oligonucleotide
caccgagtgacatccacatcatggcgtctcaaggcaccaaacgatcctatgaacagatgg

SEQ ID NO: 76410 - DNA, 60 bp, Artificial
  Synthetic oligonucleotide
cgtgcgtactgggatggaccccagaatgtgctctctgatgcaaggatcaactcttccaag

SEQ ID NO: 76411 - DNA, 60 bp, Artificial
  Synthetic oligonucleotide
acaagagctctcgtgcgtactgggatggaccccagaatgtgctctctgatgcaaggatca

SEQ ID NO: 76412 - DNA, 60 bp, Artificial
  Synthetic oligonucleotide
gcgtactgggatggaccccagaatgtgctctctgatgcaaggatcaactcttccaaggag

SEQ ID NO: 76413 - DNA, 60 bp, Artificial
  Synthetic oligonucleotide
aacaagagctctcgtgcgtactgggatggaccccagaatgtgctctctgatgcaaggatc

SEQ ID NO: 76414 - DNA, 60 bp, Artificial
  Synthetic oligonucleotide
gacaggatctgcattggttaccatgcaaacaactcgacaacacaagtggacacaatatta

SEQ ID NO: 76415 - DNA, 60 bp, Artificial
  Synthetic oligonucleotide
gcacgtggaccggggtagatactaatagcggagttacgagcgcttgcccctacaatggtg

SEQ ID NO: 76416 - DNA, 60 bp, Artificial
  Synthetic oligonucleotide
ataaagcgccactggatctaatggactgcaccactgagggttggatccttggaaaccccc

SEQ ID NO: 76417 - DNA, 60 bp, Artificial
  Synthetic oligonucleotide
agaggcctgatgcccaaaatgggatatgttacccaggggtattgaaggagacggaagagc

SEQ ID NO: 76418 - DNA, 60 bp, Artificial
  Synthetic oligonucleotide
agtacggtatcgagcagtctggttttggtgggactgatcattgccatgggtctttggatg

SEQ ID NO: 76419 - DNA, 60 bp, Artificial
  Synthetic oligonucleotide
gaggcagtagagcatgagttctcaagtctcgaaaggagaataggcaatctgaacaaaaga

SEQ ID NO: 76420 - DNA, 60 bp, Artificial
  Synthetic oligonucleotide
gccaaaggtcctgaaatagcagacagaccacctgcgaatgggcaacgaggaagaattgat

SEQ ID NO: 76421 - DNA, 60 bp, Artificial
  Synthetic oligonucleotide
gaggattgtttggagcaatagctgggtttatagaaggaggatggacaggtatggtagacg

SEQ ID NO: 76422 - DNA, 60 bp, Artificial
  Synthetic oligonucleotide
ggaggatggactggaatgatagatgggtggtatggctaccaccatgaaaattctcaaggc

SEQ ID NO: 76423 - DNA, 60 bp, Artificial
  Synthetic oligonucleotide
cgttaggatgggaactgaaagcatgaattttgccaagggtccggaaatttcagcaagacc

SEQ ID NO: 76424 - DNA, 60 bp, Artificial
  Synthetic oligonucleotide
ctgctgtgaacggtcaaagaggcagaattgattattactggtctgttttgaaaccagggg

SEQ ID NO: 76425 - DNA, 60 bp, Artificial
  Synthetic oligonucleotide
cgcgtaatggtatcacctctggcagtgacatggtggaataggaatggaccaacaacgagc

SEQ ID NO: 76426 - DNA, 60 bp, Artificial
  Synthetic oligonucleotide
gacggagggttgacataaaccctggtcatgcagacctcagtgccaaagaggcacaggatg

SEQ ID NO: 76427 - DNA, 60 bp, Artificial
  Synthetic oligonucleotide
gacggaaaagttgacaataacttactcatcatcaatgatgtgggagatcaatggtcctga

SEQ ID NO: 76428 - DNA, 60 bp, Artificial
  Synthetic oligonucleotide
gacgagcaatcaattgctgaagcaataattgtggccatggtattttcacaagaggattgc

SEQ ID NO: 76429 - DNA, 60 bp, Artificial
  Synthetic oligonucleotide
gattcaatggtctcaagaccctacaatgctatacaataagatggaatttgaaccgtccca

SEQ ID NO: 76430 - DNA, 60 bp, Artificial
  Synthetic oligonucleotide
tgagcatcatagtaacagtattagtccttgggagaggtggaaaaaataggatttgtaatg

SEQ ID NO: 76431 - DNA, 60 bp, Artificial
  Synthetic oligonucleotide
tcgtgagcatcatagtaacagtattagtccttgggagaggtggaaacaacgggatctgta

SEQ ID NO: 76432 - DNA, 60 bp, Artificial
  Synthetic oligonucleotide
ggaattttcggagccattgcaggttttatagaaggaggatggactggaatgatagatggt

SEQ ID NO: 76433 - DNA, 57 bp, Artificial
  Synthetic oligonucleotide
tgcttgaagtagagcaagagataagaactttctcgtttcagcttatttaatgataaa

SEQ ID NO: 76434 - DNA, 57 bp, Artificial
  Synthetic oligonucleotide
tacttgaagtggagcaagagataagaactttctcgtttcagcttatttaatgataaa

SEQ ID NO: 76435 - DNA, 56 bp, Artificial
  Synthetic oligonucleotide
cttgaagtggagcaagagataagaactttctcgtttcagcttatttaatgataaaa

SEQ ID NO: 76436 - DNA, 60 bp, Artificial
  Synthetic oligonucleotide
cttcttttgacatgagtaaagaagggtcttatttcttcggagacaatgcagaggagtatg

SEQ ID NO: 76437 - DNA, 60 bp, Artificial
  Synthetic oligonucleotide
agcaaaagcagggtagataatcactcactgagtgacattcacatcatggcgtctcaaggc

SEQ ID NO: 76438 - DNA, 60 bp, Artificial
  Synthetic oligonucleotide
agcaaaagcagggtagataatcactcactgagtgacatccatatcatggcgtctcaaggc

SEQ ID NO: 76439 - DNA, 60 bp, Artificial
  Synthetic oligonucleotide
agcaaaagcagggtagataatcactcactgagtgacatcaacgtcatggcgtctcaaggc

SEQ ID NO: 76440 - DNA, 60 bp, Artificial
  Synthetic oligonucleotide
ggaaccatgcgtaggcttgccgaccaaagtctcccaccgaacttctccagccttgaaaac

SEQ ID NO: 76441 - DNA, 60 bp, Artificial
  Synthetic oligonucleotide
gcaggaaccatgcgcaggcttgccgaccaaagtctcccaccgaacttctccagccttgaa

SEQ ID NO: 76442 - DNA, 60 bp, Artificial
  Synthetic oligonucleotide
cacagggacgatgcgcaggcttgccaattacagtctcccaccgaacttctccagccttga

SEQ ID NO: 76443 - DNA, 60 bp, Artificial
  Synthetic oligonucleotide
cacaggaaccatgcgtaggcttgctgaccaaagtctcccaccgaacttctccagccttga

SEQ ID NO: 76444 - DNA, 60 bp, Artificial
  Synthetic oligonucleotide
cacaggaaccatacgcaggcttgccgaccaaagtctcccaccgaacttctccagccttga

SEQ ID NO: 76445 - DNA, 60 bp, Artificial
  Synthetic oligonucleotide
tcgatcttggagggctatacgaagcaattgaggagtgcctgattaatgatccctgggttt

SEQ ID NO: 76446 - DNA, 60 bp, Artificial
  Synthetic oligonucleotide
gatcttggggggctatatgaagcaatcgaggagtgcctgattaatgatccctgggttttg

SEQ ID NO: 76447 - DNA, 60 bp, Artificial
  Synthetic oligonucleotide
ttgatattggggggttatatgaatcaattgaggagtgcctgattaatgatccctgggttt

SEQ ID NO: 76448 - DNA, 59 bp, Artificial
  Synthetic oligonucleotide
ttcgatcttggagggctatatgaagcaatcgaggagtgcctgattaatgatccctgggt

SEQ ID NO: 76449 - DNA, 60 bp, Artificial
  Synthetic oligonucleotide
cttcgatcttggagggctatacgaagcaattgaggagtgcctgattaatgatccctgggt

SEQ ID NO: 76450 - DNA, 60 bp, Artificial
  Synthetic oligonucleotide
ggaaccatgcgcaggctcgccaaccaaagtctcccaccgaacttctccagccttgaaaac

SEQ ID NO: 76451 - DNA, 60 bp, Artificial
  Synthetic oligonucleotide
ggaaccatgcgcaggcttgccgaccagagtctcccaccgaacttctccagccttgaaaac

SEQ ID NO: 76452 - DNA, 60 bp, Artificial
  Synthetic oligonucleotide
ccctacagaaccttaatgagctgtcctgttggtgaagctccctctccatacaactcaagg

SEQ ID NO: 76453 - DNA, 60 bp, Artificial
  Synthetic oligonucleotide
gcccctacagaaccttaatgagctgtcctgttggtgaagctccctctccatacaactcaa

SEQ ID NO: 76454 - DNA, 55 bp, Artificial
  Synthetic oligonucleotide
gacaataacttattcgtcatcaatgatgtgggagatcaatggtcctgaatcggtg

SEQ ID NO: 76455 - DNA, 53 bp, Artificial
  Synthetic oligonucleotide
gacaataacttattcgtcatcaatgatgtgggagatcaatggtcctgaatcag

SEQ ID NO: 76456 - DNA, 60 bp, Artificial
  Synthetic oligonucleotide
gacaataacttattcgtcatcaatgatgtgggagatcaatggtcctgaatcggtgttggt

SEQ ID NO: 76457 - DNA, 54 bp, Artificial
  Synthetic oligonucleotide
ttctttagccgactgaattggctaacaaaatctggaaattcttaccccacattg

SEQ ID NO: 76458 - DNA, 60 bp, Artificial
  Synthetic oligonucleotide
cccatatgacatccctgactatgcatcgctccggtctattgtggcatcctcaggaacatt

SEQ ID NO: 76459 - DNA, 60 bp, Artificial
  Synthetic oligonucleotide
ggatatttctgtcaatcatgaagacaaccattattttgatactactaatccattgggtcc

SEQ ID NO: 76460 - DNA, 60 bp, Artificial
  Synthetic oligonucleotide
caggaacattagaattcacagcagagggattcacatggacaggtgtcactcaaaacggaa

SEQ ID NO: 76461 - DNA, 60 bp, Artificial
  Synthetic oligonucleotide
ctacccatatgacatccctgactatgcatcgctccggtctattgtggcatcctcaggaac

SEQ ID NO: 76462 - DNA, 60 bp, Artificial
  Synthetic oligonucleotide
gctacccatatgacatccctgactatgcatcgctccggtctattgtggcatcctcaggaa

SEQ ID NO: 76463 - DNA, 60 bp, Artificial
  Synthetic oligonucleotide
ggaaggttttacatacagatgtgcactgaactcaaactcagtgaccatgaagggaggctg

SEQ ID NO: 76464 - DNA, 60 bp, Artificial
  Synthetic oligonucleotide
gcctgattaatgatccctgggttttgcttaatgcatcttggttcaactccttccttacac

SEQ ID NO: 76465 - DNA, 60 bp, Artificial
  Synthetic oligonucleotide
cggtgaaactggaaaaccttggtgtgtatcaaattcttgccatttatagtacggtatcga

SEQ ID NO: 76466 - DNA, 60 bp, Artificial
  Synthetic oligonucleotide
ggtaaagctggagaaccttggtgtttatcaaattcttgccatttatagtacggtatcgag

SEQ ID NO: 76467 - DNA, 60 bp, Artificial
  Synthetic oligonucleotide
cgataccgtactataaatggcaagaatttgatacacaccaaggttttctagtttcaccga

SEQ ID NO: 76468 - DNA, 60 bp, Artificial
  Synthetic oligonucleotide
tggtcccaagaccctacaatgctatacaataagatggaatttgagccttttcaatctttg

SEQ ID NO: 76469 - DNA, 60 bp, Artificial
  Synthetic oligonucleotide
ccagccccatggggaatcaggggtatggtgtaaaaggcttcggatttcgacagggaactg

SEQ ID NO: 76470 - DNA, 60 bp, Artificial
  Synthetic oligonucleotide
gccatttatagtacggtatcgagcagtctagttttggtagggctgatcttggcaatgggt

SEQ ID NO: 76471 - DNA, 60 bp, Artificial
  Synthetic oligonucleotide
tgccatttatagtacggtatcgagcagtctagttttggtaggactgatcatggcaatggg

SEQ ID NO: 76472 - DNA, 60 bp, Artificial
  Synthetic oligonucleotide
agttcatcactgaaggcttcacgtggacaggagtcacacaaaatggagggagtggtgctt

SEQ ID NO: 76473 - DNA, 60 bp, Artificial
  Synthetic oligonucleotide
gtgatgtgtggagtagaccataaaattgccagttggtcatggcacgatggagctattctt

SEQ ID NO: 76474 - DNA, 60 bp, Artificial
  Synthetic oligonucleotide
gtgatgtgtggagtagatcataaagttgccagttggtcatggcacgatggagctattctt

SEQ ID NO: 76475 - DNA, 60 bp, Artificial
  Synthetic oligonucleotide
ggagaataattgggcagactgatgtaaatttcaatgggggacacatagaggagtgttcgt

SEQ ID NO: 76476 - DNA, 60 bp, Artificial
  Synthetic oligonucleotide
cccagggctttgcaccattttccaaagataatggaatacgaattggatcaaaaggccatg

SEQ ID NO: 76477 - DNA, 60 bp, Artificial
  Synthetic oligonucleotide
ggcccagggctttgcaccattttccaaagataatggaatacgaattgggtcgagaggtca

SEQ ID NO: 76478 - DNA, 60 bp, Artificial
  Synthetic oligonucleotide
tgaagcccagggctttgcaccattttccaaagataatggaatacgaattggatcaaaagg

SEQ ID NO: 76479 - DNA, 60 bp, Artificial
  Synthetic oligonucleotide
gaggcccagggctttgcaccattttccaaagataatggaatacgaattgggtcgagaggc

SEQ ID NO: 76480 - DNA, 60 bp, Artificial
  Synthetic oligonucleotide
caccgagccactgtgtgaagcccagggctttgcaccattttccaaagataatggaatacg

SEQ ID NO: 76481 - DNA, 60 bp, Artificial
  Synthetic oligonucleotide
actttgtgaggcccagggctttgcaccattttccaaagataatggaatacgaattgggtc

SEQ ID NO: 76482 - DNA, 60 bp, Artificial
  Synthetic oligonucleotide
tgaggcccagggctttgcaccattttccaaagataatggaatacgaattgggtcgagagg

SEQ ID NO: 76483 - DNA, 60 bp, Artificial
  Synthetic oligonucleotide
tgaagcccagggctttgcaccattttccaaagataatggaatacgaattggatcgagagg

SEQ ID NO: 76484 - DNA, 60 bp, Artificial
  Synthetic oligonucleotide
accaggggagtgcaaattgcttcaaatgaaaacatggaaacaatagactccagcacactc

SEQ ID NO: 76485 - DNA, 60 bp, Artificial
  Synthetic oligonucleotide
ggggagtgcaaattgcttcaaatgaaaacatggaaacaatagactccagcacactcgagc

SEQ ID NO: 76486 - DNA, 51 bp, Artificial
  Synthetic oligonucleotide
gcactgaaatagttgtggcaatgctactatttgctatccatactgtccaaa

SEQ ID NO: 76487 - DNA, 60 bp, Artificial
  Synthetic oligonucleotide
aaggctaatgtgctaatcgggcaaggggacgtagtgttggtaatgaaacggaaacgggac

SEQ ID NO: 76488 - DNA, 51 bp, Artificial
  Synthetic oligonucleotide
gggtgtagagctaaaatctgggtacaaagattggatcttatggatttcctt

SEQ ID NO: 76489 - DNA, 60 bp, Artificial
  Synthetic oligonucleotide
gcgaccaaaagaattcggatggccatcaattagtgttgaattgtttaaaaacgaccttgt

SEQ ID NO: 76490 - DNA, 56 bp, Artificial
  Synthetic oligonucleotide
ttccgggataaatgaatctgcagacatgagcattggagtgacagtcatcaaaaaca

SEQ ID NO: 76491 - DNA, 60 bp, Artificial
  Synthetic oligonucleotide
ttgctatttatagtacggtatcgagcagtctagtcttggtaggtctgatcatagcaatgg

SEQ ID NO: 76492 - DNA, 60 bp, Artificial
  Synthetic oligonucleotide
gggtctttggatgtgttcaaatggttcaatgcaatgcaggatatgtatatagttaagaaa

SEQ ID NO: 76493 - DNA, 60 bp, Artificial
  Synthetic oligonucleotide
acagccggaaagtcagacaagatctgcattggataccatgccaacaactcaacaacacaa

SEQ ID NO: 76494 - DNA, 60 bp, Artificial
  Synthetic oligonucleotide
atgaggggtcttatttcttcggagacaacgcagaggagtatgacaattaaagaaaaatac

SEQ ID NO: 76495 - DNA, 60 bp, Artificial
  Synthetic oligonucleotide
caacacggtgtcaagctttcaggtagactgctttctttggcatgtccgcaaacgatttgc

SEQ ID NO: 76496 - DNA, 60 bp, Artificial
  Synthetic oligonucleotide
caagatctgcattgggtatcatgccaacaattcaacaacacaagtggatacgatacttga

SEQ ID NO: 76497 - DNA, 60 bp, Artificial
  Synthetic oligonucleotide
tcaacagggaaaatatgcaacaatcctcacaaaattctcgatgggagagactgcacacta

SEQ ID NO: 76498 - DNA, 60 bp, Artificial
  Synthetic oligonucleotide
atgcagcagacagagaaagcactcaaaaggctatagacggaattacaaataaggtcaatt

SEQ ID NO: 76499 - DNA, 60 bp, Artificial
  Synthetic oligonucleotide
cttcctttgacatgaataacgaaggatcttatttcttcggagacaatgcagaggaatatg

SEQ ID NO: 76500 - DNA, 60 bp, Artificial
  Synthetic oligonucleotide
aatgatagatgggtggtatggctatcaccatgaaaattctcaaggctcaggatatgcagc

SEQ ID NO: 76501 - DNA, 60 bp, Artificial
  Synthetic oligonucleotide
actgatagatgggtggtatggctatcaccatgaaaattctcaaggctcaggatatgcagc

SEQ ID NO: 76502 - DNA, 50 bp, Artificial
  Synthetic oligonucleotide
ggggatggactggaatgatagatgggtggtatggctatcatcatgaaaat

SEQ ID NO: 76503 - DNA, 60 bp, Artificial
  Synthetic oligonucleotide
ggaggatggactggaatgatagatgggtggtatggctatcatcatgaaaattctcaaggc

SEQ ID NO: 76504 - DNA, 60 bp, Artificial
  Synthetic oligonucleotide
acgtgactatgccaaacaatgacaattttgacaaactatacatctggggagttcaccacc

SEQ ID NO: 76505 - DNA, 52 bp, Artificial
  Synthetic oligonucleotide
cacatgcactgaaatagttgtggcaatgctactatttgctatccatactgtc

SEQ ID NO: 76506 - DNA, 60 bp, Artificial
  Synthetic oligonucleotide
caatctgtatgttcaagcatcagggagagtcacagtctctaccaagagaggccagcaaac

SEQ ID NO: 76507 - DNA, 60 bp, Artificial
  Synthetic oligonucleotide
cgacctgtatgttcaagcatcagggagagtcacagtctctaccaggagaagtcagcagac

SEQ ID NO: 76508 - DNA, 60 bp, Artificial
  Synthetic oligonucleotide
aaaccataataccgaatattggatccaggccttgggtcaggggccaatcagggaggataa

SEQ ID NO: 76509 - DNA, 60 bp, Artificial
  Synthetic oligonucleotide
ataatcccgaatattggatccaggccttgggtcaggggccaatcaggaaggataagcatc

SEQ ID NO: 76510 - DNA, 60 bp, Artificial
  Synthetic oligonucleotide
cataatcccgaatattggatccaggccttgggtcaggggccaatcaggaagaataagcat

SEQ ID NO: 76511 - DNA, 60 bp, Artificial
  Synthetic oligonucleotide
cataatcccgaatattggatccaggccttgggtcagaggccaatcagggaggataagcat

SEQ ID NO: 76512 - DNA, 60 bp, Artificial
  Synthetic oligonucleotide
ccataatcccgaatattggatccaggccttgggtcagaggccaatcagggaggataagca

SEQ ID NO: 76513 - DNA, 60 bp, Artificial
  Synthetic oligonucleotide
tagatggaatcacaaacaaagtcaattccatcattgacaaaatgaacacacaatttgaag

SEQ ID NO: 76514 - DNA, 60 bp, Artificial
  Synthetic oligonucleotide
tggtggaggccatggtgtctagggcccgaattgatgcgcgaattgacttcgaatctggac

SEQ ID NO: 76515 - DNA, 56 bp, Artificial
  Synthetic oligonucleotide
gaactttctttctaactcaaggggccttgttgaatgacaagcattccaacggaacc

SEQ ID NO: 76516 - DNA, 60 bp, Artificial
  Synthetic oligonucleotide
ggcaatggtgtttggataggaagaactaaaagcactagttcaaggagtggatttgaaatg

SEQ ID NO: 76517 - DNA, 60 bp, Artificial
  Synthetic oligonucleotide
ggggttttcatttaagtacggtaatggtgtttggataggaagaactaaaagcactagttc

SEQ ID NO: 76518 - DNA, 60 bp, Artificial
  Synthetic oligonucleotide
gggaatgctgaaattgaagatctcatcttcctggcacggtctgcactcatcctgagagga

SEQ ID NO: 76519 - DNA, 60 bp, Artificial
  Synthetic oligonucleotide
tagttcaaagctcctcaacagggaaaatatgcaacaatcctcacaggatccttgatggaa

SEQ ID NO: 76520 - DNA, 60 bp, Artificial
  Synthetic oligonucleotide
atcctggaaatgctgaaattgaagatctcatcttcctggcacggtctgcactcattctga

SEQ ID NO: 76521 - DNA, 60 bp, Artificial
  Synthetic oligonucleotide
gatatgcagcagacagagaaagcactcaaaaggctatagacggaattacaaataaggtca

SEQ ID NO: 76522 - DNA, 60 bp, Artificial
  Synthetic oligonucleotide
gaagctagagaatcttggtgtgtatcaaattcttgctatttatagtacggtatcgagcag

SEQ ID NO: 76523 - DNA, 60 bp, Artificial
  Synthetic oligonucleotide
tatttatggcatataagaaagctgctcagcatgagagacatgtgtgatgctccctttgat

SEQ ID NO: 76524 - DNA, 60 bp, Artificial
  Synthetic oligonucleotide
tttatggcatataagaaagctgctcagcatgagagacatgtgtgatgctccctttgatga

SEQ ID NO: 76525 - DNA, 60 bp, Artificial
  Synthetic oligonucleotide
aaacgatttgcagaccaagaactgggtgatgccccattccttgaccggcttcgccgtgat

SEQ ID NO: 76526 - DNA, 60 bp, Artificial
  Synthetic oligonucleotide
aacgatttgcagaccaagaactgggtgatgccccattccttgaccggcttcgccgagacc

SEQ ID NO: 76527 - DNA, 60 bp, Artificial
  Synthetic oligonucleotide
cggtttgcagaccaagaactgggtgatgccccattccttgaccggcttcgccgagatcag

SEQ ID NO: 76528 - DNA, 60 bp, Artificial
  Synthetic oligonucleotide
aaacggtttgcagaccaagaactgggtgatgccccattccttgaccggcttcgccgagat

SEQ ID NO: 76529 - DNA, 60 bp, Artificial
  Synthetic oligonucleotide
cgatttgcagaccaagaactgggtgatgccccattccttgaccggcttcgccgagatcaa

SEQ ID NO: 76530 - DNA, 57 bp, Artificial
  Synthetic oligonucleotide
tgggagtagatgaatactccagcacagagagagtggtggtgagcattgaccgatttt

SEQ ID NO: 76531 - DNA, 60 bp, Artificial
  Synthetic oligonucleotide
tgggagtagatgaatactccagcacagagagagtggtggtgagcattgaccgatttttaa

SEQ ID NO: 76532 - DNA, 60 bp, Artificial
  Synthetic oligonucleotide
tgaagggaggctgattcagaacagcataacaatagagagaatggttctctctgcatttga

SEQ ID NO: 76533 - DNA, 60 bp, Artificial
  Synthetic oligonucleotide
tgaaggaaggctgattcagaacagcataacaatagagagaatggttctctctgcatttga

SEQ ID NO: 76534 - DNA, 60 bp, Artificial
  Synthetic oligonucleotide
tgaagggagactgattcagaacagcataacaatagagagaatggttctctctgcatttga

SEQ ID NO: 76535 - DNA, 60 bp, Artificial
  Synthetic oligonucleotide
tgaggggaggctgattcagaacagcataacaatagagagaatggttctctctgcatttga

SEQ ID NO: 76536 - DNA, 60 bp, Artificial
  Synthetic oligonucleotide
tgaagggaggctaattcagaacagcataacaatagagagaatggttctctctgcatttga

SEQ ID NO: 76537 - DNA, 60 bp, Artificial
  Synthetic oligonucleotide
gagcagtcaattgctgaagcaataatcgtagccatggtattttcacaagaggattgcatg

SEQ ID NO: 76538 - DNA, 60 bp, Artificial
  Synthetic oligonucleotide
ggtagataatcactcactgagtgacatcaacatcatggcgtctcaaggcaccaaacgatc

SEQ ID NO: 76539 - DNA, 60 bp, Artificial
  Synthetic oligonucleotide
cataaacaggacaggaacatttgaattcacaagctttttctatcgctatgggtttgtagc

SEQ ID NO: 76540 - DNA, 60 bp, Artificial
  Synthetic oligonucleotide
gcaggggatatttctgtcaatcatgaagacaaccattattttgatactactgacccatgc

SEQ ID NO: 76541 - DNA, 51 bp, Artificial
  Synthetic oligonucleotide
caggctacaaagattggatactgtggatttcattcgccatatcatgctttt

SEQ ID NO: 76542 - DNA, 60 bp, Artificial
  Synthetic oligonucleotide
gggatatttctgtcaatcatgaagacaaccattattttgatactactgacccattgggtc

SEQ ID NO: 76543 - DNA, 60 bp, Artificial
  Synthetic oligonucleotide
gtagagctgaaatcaggctacaaagattggatactgtggatttcattcgccatatcatgc

SEQ ID NO: 76544 - DNA, 60 bp, Artificial
  Synthetic oligonucleotide
aaaaggggatcagccgatagtttctttagccgactgaattggctaacaaaatctggaaat

SEQ ID NO: 76545 - DNA, 60 bp, Artificial
  Synthetic oligonucleotide
tcaaattaaaggtgtagagctgaaatcaggctacaaagattggatactgtggatttcatt

SEQ ID NO: 76546 - DNA, 60 bp, Artificial
  Synthetic oligonucleotide
aaatcaggctacaaagattggatactgtggatttcattcgccatatcatgcttcttaatt

SEQ ID NO: 76547 - DNA, 60 bp, Artificial
  Synthetic oligonucleotide
aaatcaggctacaaagattggatactgtggatttcattcgccatatcatgctttttaatt

SEQ ID NO: 76548 - DNA, 60 bp, Artificial
  Synthetic oligonucleotide
gcaaggacaatggtataaggataggttccaagggagatgtgtttgtcatcagagagccgt

SEQ ID NO: 76549 - DNA, 60 bp, Artificial
  Synthetic oligonucleotide
gtgtcaaagtagggcaatcacctaatgtgtatcaagctaggtttgaatcggtggcatggt

SEQ ID NO: 76550 - DNA, 60 bp, Artificial
  Synthetic oligonucleotide
catacaatgctgaactgttggttcttcttgaaaacgagagaacactagacctgcatgatg

SEQ ID NO: 76551 - DNA, 60 bp, Artificial
  Synthetic oligonucleotide
catacaatgctgaactgttggttcttcttgaaaacgaaagaacactagacatgcatgacg

SEQ ID NO: 76552 - DNA, 60 bp, Artificial
  Synthetic oligonucleotide
gggcaatcacctaacgtgtatcaagctaggtttgaagcggtggcatggtcagcaacagca

SEQ ID NO: 76553 - DNA, 60 bp, Artificial
  Synthetic oligonucleotide
gtgtcgaagtagggcaatcacctaacgtgtatcaagctaggtttgaagcggtggcatggt

SEQ ID NO: 76554 - DNA, 60 bp, Artificial
  Synthetic oligonucleotide
tccagggcccgcattgatgcacgaattgacttcgaatctggacggataaagaaggatgag

SEQ ID NO: 76555 - DNA, 51 bp, Artificial
  Synthetic oligonucleotide
atacgaccacttctggtcgatggaactgcttcactgagtcctggcatgatg

SEQ ID NO: 76556 - DNA, 60 bp, Artificial
  Synthetic oligonucleotide
gagcccctatagaactctaatgagtgtagaaatagggcagtcacccaatgtgtaccaggc

SEQ ID NO: 76557 - DNA, 60 bp, Artificial
  Synthetic oligonucleotide
ctgttgtgaacggtcaaagaggcagaattgattattactggtctgttttaaaaccagggg

SEQ ID NO: 76558 - DNA, 60 bp, Artificial
  Synthetic oligonucleotide
agacctgctgtgaacggtcaaagaggcagaattgattattactggtctgttttaaaacca

SEQ ID NO: 76559 - DNA, 60 bp, Artificial
  Synthetic oligonucleotide
ctgctgtgaacggtcaaagaggcagaattgattattactggtctgttttaaaaccagggg

SEQ ID NO: 76560 - DNA, 60 bp, Artificial
  Synthetic oligonucleotide
aattcttgccatttatagtacggtatcgagcagtctggtcttggtggggctgatcatagc

SEQ ID NO: 76561 - DNA, 60 bp, Artificial
  Synthetic oligonucleotide
tgcaatagcaggttttatagaaaatggatgggagggaatgatagacggttggtacggatt

SEQ ID NO: 76562 - DNA, 60 bp, Artificial
  Synthetic oligonucleotide
atgccaacaattcaacaacacaagtggatacgatattggagaaaaatgtaaccgtcacac

SEQ ID NO: 76563 - DNA, 60 bp, Artificial
  Synthetic oligonucleotide
cctggagaaaccttgaatgtagagtctaatggaaatctaatcgctccttggtatgcatac

SEQ ID NO: 76564 - DNA, 60 bp, Artificial
  Synthetic oligonucleotide
cctggggaaaccttgaatgtagagtctaatggaaatctaatcgctccttggtatgcatac

SEQ ID NO: 76565 - DNA, 60 bp, Artificial
  Synthetic oligonucleotide
ttactcatcatcaatgatgtgggagatcaatggtcctgagtcagtgttggtcaacaccta

SEQ ID NO: 76566 - DNA, 60 bp, Artificial
  Synthetic oligonucleotide
attcatcatcaatgatgtgggagatcaatggtcctgagtcggtgttggtcaatacttatc

SEQ ID NO: 76567 - DNA, 58 bp, Artificial
  Synthetic oligonucleotide
ttcatcatcaatgatgtgggagatcaatggtcctgaatcggttttggtcaatacttat

SEQ ID NO: 76568 - DNA, 60 bp, Artificial
  Synthetic oligonucleotide
ggaatcaggggtatggtgtaaaaggctttggatttcggcagggaactgatgtatggatgg

SEQ ID NO: 76569 - DNA, 60 bp, Artificial
  Synthetic oligonucleotide
gggaaaccttgaatgtggaatctaacggaaatctaatcgctccttggtatgcatacaagt

SEQ ID NO: 76570 - DNA, 64 bp, Artificial
  Synthetic oligonucleotide
ggtcaaatatattcaatatggagagaataaaagaattaagagatctaatgttgcagtcccgcac

SEQ ID NO: 76571 - DNA, 65 bp, Artificial
  Synthetic oligonucleotide
gcaggtcaaatatattcaatatggagagaataaaagaattaagaaatctaatgttgcagtcccgc

SEQ ID NO: 76572 - DNA, 61 bp, Artificial
  Synthetic oligonucleotide
gcgaaagcaggtcaaatatattcaatatggagagaataaaagaactgagagatctaatgtc

SEQ ID NO: 76573 - DNA, 60 bp, Artificial
  Synthetic oligonucleotide
agcgaaagcaggtcaaatatattcaatatggagagaataaaagaactgagagatctaatg

SEQ ID NO: 76574 - DNA, 60 bp, Artificial
  Synthetic oligonucleotide
agcaaaagcaggtcaaatatattcaatatggagagaataaaagaattaagagatctaatg

SEQ ID NO: 76575 - DNA, 60 bp, Artificial
  Synthetic oligonucleotide
agcaaaagcaggtcaaatatattcaatatggagagaataaaagaactgagagatctaatg

SEQ ID NO: 76576 - DNA, 60 bp, Artificial
  Synthetic oligonucleotide
ggagggaatggttgatgggtggtatggattccgatatcagaattcggaagggacactgca

SEQ ID NO: 76577 - DNA, 60 bp, Artificial
  Synthetic oligonucleotide
aaataaggcctcttctaatagatggtacagcctcattgagtcctggaatgatgatgggca

SEQ ID NO: 76578 - DNA, 60 bp, Artificial
  Synthetic oligonucleotide
ggataagacctcttctaatagatggtacagcctcattgagtcctggaatgatgatgggca

SEQ ID NO: 76579 - DNA, 60 bp, Artificial
  Synthetic oligonucleotide
ggaattttcggagctattgcaggttttatagaaggaggatggactggaatgatagatggt

SEQ ID NO: 76580 - DNA, 56 bp, Artificial
  Synthetic oligonucleotide
gaggaacaagctgtggatatatgcaaagcagcaatggggttaagaattagctcatc

SEQ ID NO: 76581 - DNA, 55 bp, Artificial
  Synthetic oligonucleotide
aggaacaagctgtggatatatgcaaagcagcaatggggttaagaattagctcatc

SEQ ID NO: 76582 - DNA, 60 bp, Artificial
  Synthetic oligonucleotide
ggtccagagctcctcaacagggaaaatatgcaacaaccctcacagaatccttgatgggag

SEQ ID NO: 76583 - DNA, 60 bp, Artificial
  Synthetic oligonucleotide
aagctagagaatcttggtgtgtatcaaattcttgccatttatagtacggtatcgagcagc

SEQ ID NO: 76584 - DNA, 60 bp, Artificial
  Synthetic oligonucleotide
gaagctagagaatcttggtgtgtatcaaattcttgccatttatagtacggtatcgagcag

SEQ ID NO: 76585 - DNA, 60 bp, Artificial
  Synthetic oligonucleotide
aaatatacagagattcgcttggggaatccatgatgaggatgggggacctccactccctcc

SEQ ID NO: 76586 - DNA, 60 bp, Artificial
  Synthetic oligonucleotide
ttctcacaggaggattgcatgataaaagcagtccgaggtgatctgaatttcgtaaacaga

SEQ ID NO: 76587 - DNA, 60 bp, Artificial
  Synthetic oligonucleotide
ggtatcgagcagtctagtcttggtagggctgatcatagcaatgggtctttggatgtgctc

SEQ ID NO: 76588 - DNA, 60 bp, Artificial
  Synthetic oligonucleotide
ggtatcgagcagtctagtcttggtagggctgatcatagcaatgggtctttggatgtgttc

SEQ ID NO: 76589 - DNA, 60 bp, Artificial
  Synthetic oligonucleotide
agtgaagacaatcacagatgatcagattgaggtgactaatgctactgagctagttcaaag

SEQ ID NO: 76590 - DNA, 60 bp, Artificial
  Synthetic oligonucleotide
tgccgaatgggacaatagtgaagacaatcacagatgatcagattgaggtgactaatgcta

SEQ ID NO: 76591 - DNA, 60 bp, Artificial
  Synthetic oligonucleotide
tagtgaagacaatcacagatgatcagattgaggtgactaatgctaccgagctagttcaaa

SEQ ID NO: 76592 - DNA, 60 bp, Artificial
  Synthetic oligonucleotide
ctgaagacatgggcaatggttgtttcaagatataccacaattgtgacaatgcttgcatag

SEQ ID NO: 76593 - DNA, 60 bp, Artificial
  Synthetic oligonucleotide
tgctgaagacatgggcaatggttgtttcaagatataccacaattgtgacaatgcttgcat

SEQ ID NO: 76594 - DNA, 60 bp, Artificial
  Synthetic oligonucleotide
caatacagcaacactgtgcctgggacatcatgcagtgccgaatgggacaatagtgaagac

SEQ ID NO: 76595 - DNA, 60 bp, Artificial
  Synthetic oligonucleotide
ctagttcaaagctcttcaacagggaaaatatgcaacaatcctcacaggatccttgatgga

SEQ ID NO: 76596 - DNA, 60 bp, Artificial
  Synthetic oligonucleotide
ggtatggcttcaggcatcaaaattctgagggtacaggacaagcagcagaccttaaaagca

SEQ ID NO: 76597 - DNA, 60 bp, Artificial
  Synthetic oligonucleotide
gtaaacaagatcacatacggagcatgtcccaaatatgtgaagcagaacaccctgaagttg

SEQ ID NO: 76598 - DNA, 60 bp, Artificial
  Synthetic oligonucleotide
cggttccagatcaaaggtgtcgaactaaaatctggatacaaagactggatcctgtggatt

SEQ ID NO: 76599 - DNA, 60 bp, Artificial
  Synthetic oligonucleotide
cgaacattggatctagaccctgggtaaggggccagtctggcagagtaagcatctattgga

SEQ ID NO: 76600 - DNA, 60 bp, Artificial
  Synthetic oligonucleotide
cagatgatcagattgaggtgactaatgctaccgagctagttcaaagctcttcaacaggga

SEQ ID NO: 76601 - DNA, 60 bp, Artificial
  Synthetic oligonucleotide
ccggttccagatcaaaggtgttgagctaaaatctggatacaaagactggatcctgtggat

SEQ ID NO: 76602 - DNA, 60 bp, Artificial
  Synthetic oligonucleotide
aggcattgaacaaccggttccagatcaaaggtgttgagctaaaatctggatacaaagact

SEQ ID NO: 76603 - DNA, 60 bp, Artificial
  Synthetic oligonucleotide
cagatgatcagattgaggtgactaatgctactgagctagttcaaagctcctcaacaggga

SEQ ID NO: 76604 - DNA, 60 bp, Artificial
  Synthetic oligonucleotide
agtacagcaacactgtgcctggggcaccatgcagtgccgaatgggacaatagtgaagaca

SEQ ID NO: 76605 - DNA, 51 bp, Artificial
  Synthetic oligonucleotide
gcttgaagtggagcaagagataagaactttctcgtttcagcttatctaatg

SEQ ID NO: 76606 - DNA, 60 bp, Artificial
  Synthetic oligonucleotide
ttgattattactggtctgttttaaaaccaggggaaaccttgaatgtggaatctaatggaa

SEQ ID NO: 76607 - DNA, 60 bp, Artificial
  Synthetic oligonucleotide
gcactgaactcaaactcagtgactatgaagggagactgatccaaaacagcataacaatag

SEQ ID NO: 76608 - DNA, 60 bp, Artificial
  Synthetic oligonucleotide
ggtgtgaatagtgacactgtgggttggtcttggccagacggtgctgagttgccattcacc

SEQ ID NO: 76609 - DNA, 60 bp, Artificial
  Synthetic oligonucleotide
agtgacactgtgggttggtcttggccagacggtgctgagttgccattcaccgttgacaag

SEQ ID NO: 76610 - DNA, 60 bp, Artificial
  Synthetic oligonucleotide
gtgacactgtgggttggtcttggccagacggtgctgagttgccattcaccgttgacaagt

SEQ ID NO: 76611 - DNA, 60 bp, Artificial
  Synthetic oligonucleotide
ctgtgggttggtcttggccagacggtgctgagttgccattcaccattgacaagtagtttg

SEQ ID NO: 76612 - DNA, 60 bp, Artificial
  Synthetic oligonucleotide
ggaaagccggaatcctgggaatgctgaaattgaagatctcatcttccttgcacggtctgc

SEQ ID NO: 76613 - DNA, 60 bp, Artificial
  Synthetic oligonucleotide
agatctaatgttgcagtcccgcactcgcgagatactaacaaaaactactgtggaccatat

SEQ ID NO: 76614 - DNA, 60 bp, Artificial
  Synthetic oligonucleotide
cgagttgaatgctcctaattaccactatgaggagtgttcctgttatcctgatgctggcga

SEQ ID NO: 76615 - DNA, 60 bp, Artificial
  Synthetic oligonucleotide
gggatatttctgtcaatcatgaagacaaccattgttttgatactactgacccattgggtc

SEQ ID NO: 76616 - DNA, 60 bp, Artificial
  Synthetic oligonucleotide
agcaaaagcaggggatatttctgtcaatcatgaagacaaccattattttgatactactaa

SEQ ID NO: 76617 - DNA, 60 bp, Artificial
  Synthetic oligonucleotide
agcaaaagcaggggatatttctgtcaatcatgaagacaaccattattttgatactactga

SEQ ID NO: 76618 - DNA, 60 bp, Artificial
  Synthetic oligonucleotide
agcaaaagcaggggatatttctgtcaatcatgaagacaaccattgttttgatactactga

SEQ ID NO: 76619 - DNA, 60 bp, Artificial
  Synthetic oligonucleotide
agcaaaagcaggggatatttctgtcaatcatgaagacaaccactattttgatactactga

SEQ ID NO: 76620 - DNA, 54 bp, Artificial
  Synthetic oligonucleotide
cagctcatggcccagccaagagcatggaatatgatgctgttgctactacacact

SEQ ID NO: 76621 - DNA, 60 bp, Artificial
  Synthetic oligonucleotide
ctatttatagtacggtatcgagcagtctagtcttggtagggctgatcatagcaatgggtc

SEQ ID NO: 76622 - DNA, 60 bp, Artificial
  Synthetic oligonucleotide
tccttaggcaaaatccaactgaggaacaagctgtggatatatgcaaggcagcaatgggtt

SEQ ID NO: 76623 - DNA, 60 bp, Artificial
  Synthetic oligonucleotide
ccaactgaggaacaagctgtggatatatgcaaggcagcaatgggtttgaggatcagttca

SEQ ID NO: 76624 - DNA, 60 bp, Artificial
  Synthetic oligonucleotide
tattcttaggcaaaatccaacagaggagcaagctgtggatatatgcaaggcagcaatggg

SEQ ID NO: 76625 - DNA, 60 bp, Artificial
  Synthetic oligonucleotide
ggagcaatagctgggtttatagaaggaggatggacaggtatggtagacggatggtacgga

SEQ ID NO: 76626 - DNA, 60 bp, Artificial
  Synthetic oligonucleotide
tcggggccatagctgggtttatagaaggaggatggacaggcatgatagatggatggtatg

SEQ ID NO: 76627 - DNA, 60 bp, Artificial
  Synthetic oligonucleotide
ggggccatagctgggtttatagaaggaggatggacaggcatgatagatggatggtatggc

SEQ ID NO: 76628 - DNA, 60 bp, Artificial
  Synthetic oligonucleotide
ggggccatagctgggtttatagaaggaggatggacaggcatgatagatggttggtacggc

SEQ ID NO: 76629 - DNA, 60 bp, Artificial
  Synthetic oligonucleotide
cgtaaacagagcaaaccaaagattgaaccccatgcaccaactcctgaggcacttccaaaa

SEQ ID NO: 76630 - DNA, 60 bp, Artificial
  Synthetic oligonucleotide
cttgccatttatagtacggtatcgagcagtctagttttggtagggctgatcttggcaatg

SEQ ID NO: 76631 - DNA, 60 bp, Artificial
  Synthetic oligonucleotide
ctggtccagagctcctcaacagggaaaatatgcaacaaccctcacagaatccttgatggg

SEQ ID NO: 76632 - DNA, 60 bp, Artificial
  Synthetic oligonucleotide
gctggtccagagctcctcaacagggaaaatatgcaacaaccctcatcgaatccttgatgg

SEQ ID NO: 76633 - DNA, 60 bp, Artificial
  Synthetic oligonucleotide
cttcctttgacatgggtaatgaaggatcttatttcttcggagacaatgcagaggagtatg

SEQ ID NO: 76634 - DNA, 50 bp, Artificial
  Synthetic oligonucleotide
ggggatggactggaatgatagatgggtggtatggctatcaccatgagaat

SEQ ID NO: 76635 - DNA, 60 bp, Artificial
  Synthetic oligonucleotide
tgccatttatagtacggtatcgagcagtctagtattggtaggactgatcatagcaatggg

SEQ ID NO: 76636 - DNA, 60 bp, Artificial
  Synthetic oligonucleotide
gaatgtggagtccaatggaaatctaatcgctccttggtatgcatacaaatttgtcagcac

SEQ ID NO: 76637 - DNA, 60 bp, Artificial
  Synthetic oligonucleotide
gtccatattgaacacaagccaaaggggaatactcgaagatgagcagatgtatcagaaatg

SEQ ID NO: 76638 - DNA, 60 bp, Artificial
  Synthetic oligonucleotide
ttgaacacaagccaaaggggaatactcgaagatgagcagatgtatcagaaatgctgcaac

SEQ ID NO: 76639 - DNA, 60 bp, Artificial
  Synthetic oligonucleotide
tggtcttggtggggctgatcatagcaatgggtctttggatgtgttcaaatggttcaatgc

SEQ ID NO: 76640 - DNA, 60 bp, Artificial
  Synthetic oligonucleotide
caagtaatggccaggcctcatacaggattttcaagatagagaaggggaaggtagtcaaat

SEQ ID NO: 76641 - DNA, 60 bp, Artificial
  Synthetic oligonucleotide
ggccaggcctcatacaggattttcaagatagagaaggggaaggtagtcaaatcagttgag

SEQ ID NO: 76642 - DNA, 60 bp, Artificial
  Synthetic oligonucleotide
caatggctttttcagtagactgaattggctgactaaatctggtagtgcttatccattgct

SEQ ID NO: 76643 - DNA, 60 bp, Artificial
  Synthetic oligonucleotide
gagggcccgctaatggcttcttcagtagactgaattggctgactaaatctggtaatgctt

SEQ ID NO: 76644 - DNA, 60 bp, Artificial
  Synthetic oligonucleotide
caaaagagggcccgctaatggcttcttcagtagactgaattggctgactaaatctggtaa

SEQ ID NO: 76645 - DNA, 60 bp, Artificial
  Synthetic oligonucleotide
cgccaacaattcaacaacacaagtggatacgatacttgagaagaatgtcaccgtcacaca

SEQ ID NO: 76646 - DNA, 60 bp, Artificial
  Synthetic oligonucleotide
tgaaagtctgaggcttgcaactggactaagaaatgttccacagattgaaactagaggact

SEQ ID NO: 76647 - DNA, 60 bp, Artificial
  Synthetic oligonucleotide
gaagaattgacaatctgaacaaaagaatggaagatggatttctggacgtttggacataca

SEQ ID NO: 76648 - DNA, 60 bp, Artificial
  Synthetic oligonucleotide
gatcattgccatgggtctttggatgtgctcaaatggttcaatgcagtgcaagatatgtat

SEQ ID NO: 76649 - DNA, 60 bp, Artificial
  Synthetic oligonucleotide
cgctcctcgagggtacttcaaaatgcgcactgggaaaagctcaataatgaggtcagatgc

SEQ ID NO: 76650 - DNA, 60 bp, Artificial
  Synthetic oligonucleotide
tggcaatgggtctttggatgtgttcaaatggttcaatgcaatgcaggatatgtatataat

SEQ ID NO: 76651 - DNA, 60 bp, Artificial
  Synthetic oligonucleotide
gcgacctattgcttggtgatcaaagctggtcatatatagtggagaggcctactgctcaaa

SEQ ID NO: 76652 - DNA, 60 bp, Artificial
  Synthetic oligonucleotide
cttgtatagagtcaatcaggaatgggacttatgatcatgacatatacagagatgaagcac

SEQ ID NO: 76653 - DNA, 60 bp, Artificial
  Synthetic oligonucleotide
atgtgcactgaactcaaactcagtgactatgaagggagactgatccaaaacagcataaca

SEQ ID NO: 76654 - DNA, 60 bp, Artificial
  Synthetic oligonucleotide
agtcggaggcaatgaaaagaaggctaaactggcaaatgttgtgagaaaaatgatgactaa

SEQ ID NO: 76655 - DNA, 59 bp, Artificial
  Synthetic oligonucleotide
caatgaaaagaaggctaaactggcaaatgttgtgagaaaaatgatgactaactcacaag

SEQ ID NO: 76656 - DNA, 60 bp, Artificial
  Synthetic oligonucleotide
gaccccagaatgtgctctctgatgcaaggatcaactcttccaaggagatctggagctgct

SEQ ID NO: 76657 - DNA, 60 bp, Artificial
  Synthetic oligonucleotide
ggtcccaagagggcaactgtccaccagaggagttcagattgcttcaaatgagaacatgga

SEQ ID NO: 76658 - DNA, 57 bp, Artificial
  Synthetic oligonucleotide
cggactttctttctaactcaaggggccttgttgaatgacaagcattccaatggaacc

SEQ ID NO: 76659 - DNA, 60 bp, Artificial
  Synthetic oligonucleotide
ccaaacgttgaaaataagagtgcatgaagggtatgaggaattcacaatggttgggcggag

SEQ ID NO: 76660 - DNA, 60 bp, Artificial
  Synthetic oligonucleotide
ccaaacattgaaaataagagtgcatgaagggtatgaggaattcacaatggttgggcggag

SEQ ID NO: 76661 - DNA, 60 bp, Artificial
  Synthetic oligonucleotide
atagactcaggagagatcaaaaggcattaaagggaagaggcagcacacttgggctcgacc

SEQ ID NO: 76662 - DNA, 60 bp, Artificial
  Synthetic oligonucleotide
gctcaggagagatcaaaaggcattaaagggaagaggcagcacacttgggctcgacctgcg

SEQ ID NO: 76663 - DNA, 60 bp, Artificial
  Synthetic oligonucleotide
gctcagaagagatcaaaaggcattaaagggaagaggcagcacacttgggctcgacctgcg

SEQ ID NO: 76664 - DNA, 60 bp, Artificial
  Synthetic oligonucleotide
gctcagaagagatcaaaaggcattaaagggaagaggcagcacacttgggctcgatctgcg

SEQ ID NO: 76665 - DNA, 52 bp, Artificial
  Synthetic oligonucleotide
tgctgtgtgttgttctactaggattcatcatgtgggcctgccagagaggcaa

SEQ ID NO: 76666 - DNA, 60 bp, Artificial
  Synthetic oligonucleotide
ctcgaggcactcatggaatggctaaagacaagaccaatcctgtcacctctgactaagggg

SEQ ID NO: 76667 - DNA, 60 bp, Artificial
  Synthetic oligonucleotide
gctggtcatatatagtggaaagacctacagctcaaaatgggatttgctacccaggagtgc

SEQ ID NO: 76668 - DNA, 60 bp, Artificial
  Synthetic oligonucleotide
ggataggagaatgccccaaatatgtgaaaagtgaaagtttgagacttgcaactggactaa

SEQ ID NO: 76669 - DNA, 60 bp, Artificial
  Synthetic oligonucleotide
gagccctctgtggataggagaatgccccaaatatgtgaaaagtaaaagtctgaggcttgc

SEQ ID NO: 76670 - DNA, 60 bp, Artificial
  Synthetic oligonucleotide
aaccgaggtcgaaacgtacgttctctctatcgtcccgtcaggccccctcaaagccgagat

SEQ ID NO: 76671 - DNA, 60 bp, Artificial
  Synthetic oligonucleotide
ggcaatttaatagctccttggtatgcttacaaattcactagttctaataataagggagct

SEQ ID NO: 76672 - DNA, 60 bp, Artificial
  Synthetic oligonucleotide
gatcaggggcaagccagaagaggaaacaatctggacttccagcagctccattgtgatgtg

SEQ ID NO: 76673 - DNA, 60 bp, Artificial
  Synthetic oligonucleotide
gctcaataatgagatcagatgcacctattgacacctgtatttctgaatgcatcactccaa

SEQ ID NO: 76674 - DNA, 60 bp, Artificial
  Synthetic oligonucleotide
ccttgaatgtggagtccaatggaaatctaatcgctccttggtatgcatacaaatttgtca

SEQ ID NO: 76675 - DNA, 56 bp, Artificial
  Synthetic oligonucleotide
ggtatcgagcagtctagtattggtggggctgatcatagcaatgggtctttggatgt

SEQ ID NO: 76676 - DNA, 60 bp, Artificial
  Synthetic oligonucleotide
ggatgggaactgaaagcatgaattttgccaaaactccggaaattgcggcaagacctgcgg

SEQ ID NO: 76677 - DNA, 54 bp, Artificial
  Synthetic oligonucleotide
cactcactgagtgacatcgacatcatggcgtctcaaggcaccaaacgatcttat

SEQ ID NO: 76678 - DNA, 60 bp, Artificial
  Synthetic oligonucleotide
ggggttatatgaatcaattgaggagtgcctgattaatgatccctgggttttgctcaatgc

SEQ ID NO: 76679 - DNA, 60 bp, Artificial
  Synthetic oligonucleotide
gcaattgaggagtgcctgattaatgatccctgggttttgctcaatgcatcttggttcaac

SEQ ID NO: 76680 - DNA, 60 bp, Artificial
  Synthetic oligonucleotide
aagctgctcagcatgagagacatgtgtgatgctccctttgatgacagactcaggagagat

SEQ ID NO: 76681 - DNA, 61 bp, Artificial
  Synthetic oligonucleotide
caatgggtctttggatgtgtcaaaatggttcaatgcaatgcaggatatgtatataattaag

SEQ ID NO: 76682 - DNA, 60 bp, Artificial
  Synthetic oligonucleotide
ttaccataatgactgatggaccaagtaatggccaggcctcatacaagattttcaagatag

SEQ ID NO: 76683 - DNA, 60 bp, Artificial
  Synthetic oligonucleotide
atacaagattttcaagatagagaaggggaaggtagtcaaatctgtcgagttgaatgctcc

SEQ ID NO: 76684 - DNA, 60 bp, Artificial
  Synthetic oligonucleotide
cactgagtgacatcaaagtcatggcgtctcaaggcaccaaacgatcttatgagcagatgg

SEQ ID NO: 76685 - DNA, 60 bp, Artificial
  Synthetic oligonucleotide
taagggttttgcacccttttccaaagacaacggaataagaattggatcgagaggtcatgt

SEQ ID NO: 76686 - DNA, 60 bp, Artificial
  Synthetic oligonucleotide
gggttttgcacccttttccaaagacaacggaataagaattggatcgagaggtcatgtttt

SEQ ID NO: 76687 - DNA, 60 bp, Artificial
  Synthetic oligonucleotide
caagggttttgcacccttttccaaagacaacggaataagaattggatcgagaggtcatgt

SEQ ID NO: 76688 - DNA, 60 bp, Artificial
  Synthetic oligonucleotide
caaccagcagagagcatctgcaggacaaatcagtgtgcagcctactttctcagtacagag

SEQ ID NO: 76689 - DNA, 60 bp, Artificial
  Synthetic oligonucleotide
ggacatacaatgctgaactgttggttcttcttgaaaacgaaaggacactagaccagcatg

SEQ ID NO: 76690 - DNA, 60 bp, Artificial
  Synthetic oligonucleotide
catacaatgctgaactgttggttcttcttgaaaacgaaaggacactagacctgcatgacg

SEQ ID NO: 76691 - DNA, 60 bp, Artificial
  Synthetic oligonucleotide
actgacggtcccgccaataggcaggcacagtatagaatatacaaagcgaatcaaggtaag

SEQ ID NO: 76692 - DNA, 60 bp, Artificial
  Synthetic oligonucleotide
ctgacggtcccgccaataggcaggcacagtatagaatatacaaagcgaatcaaggtaaga

SEQ ID NO: 76693 - DNA, 60 bp, Artificial
  Synthetic oligonucleotide
ccattggctccatatcattgggattggttgtatttaatgttctactgcatgtcgtgagca

SEQ ID NO: 76694 - DNA, 60 bp, Artificial
  Synthetic oligonucleotide
aacatattcatcatcaatgatgtgggagatcaacggtcctgagtcagtgcttgtcaatac

SEQ ID NO: 76695 - DNA, 60 bp, Artificial
  Synthetic oligonucleotide
cagaccaagaactgggtgatgccccattccttgaccggctccgccgagatcagaaatccc

SEQ ID NO: 76696 - DNA, 60 bp, Artificial
  Synthetic oligonucleotide
tcatgaagatctgttccaccattgaagagctcagacggcaaaaatagtgaatttagcttg

SEQ ID NO: 76697 - DNA, 60 bp, Artificial
  Synthetic oligonucleotide
ccttgaatgtggaatctaatggaaatctaatcgctccttggtatgcatacaaatttgtca

SEQ ID NO: 76698 - DNA, 60 bp, Artificial
  Synthetic oligonucleotide
gccagttggtcatggcacgatggagctattcttccctttgacatcgataagatgtaattt

SEQ ID NO: 76699 - DNA, 60 bp, Artificial
  Synthetic oligonucleotide
atgatagatgggtggtatggctatcaccatgaaaattctcaaggctcagggtatgcggca

SEQ ID NO: 76700 - DNA, 60 bp, Artificial
  Synthetic oligonucleotide
gttgataagaggaaggccacaggagactagagtatggtggacctcaaacagtattgtcgt

SEQ ID NO: 76701 - DNA, 60 bp, Artificial
  Synthetic oligonucleotide
gagttgataagaggaaggccacaggagactagagtatggtggacctcaaacagtattgtc

SEQ ID NO: 76702 - DNA, 60 bp, Artificial
  Synthetic oligonucleotide
taggcccgttatagatataaatatggcagattatagcattgactccagttatgtgtgctc

SEQ ID NO: 76703 - DNA, 60 bp, Artificial
  Synthetic oligonucleotide
gcccgttatagatataaatatggcagattatagcattgactccagttatgtgtgctcagg

SEQ ID NO: 76704 - DNA, 60 bp, Artificial
  Synthetic oligonucleotide
cagaccaagaactgggtgatgccccattccttgaccggcttcgccgtgatcagaagtccc

SEQ ID NO: 76705 - DNA, 60 bp, Artificial
  Synthetic oligonucleotide
tggcaatgggtctttggatgtgttcaaatggttcaatgcagtgcaggatatgtatataat

SEQ ID NO: 76706 - DNA, 60 bp, Artificial
  Synthetic oligonucleotide
ggcaatgggtctttggatgtgttcaaatggttcaatgcagtgcaggatatgtatataatt

SEQ ID NO: 76707 - DNA, 60 bp, Artificial
  Synthetic oligonucleotide
tggtattggcagggctgatcatagcaataggtctttggatgtgttcaaatggttcaatgc

SEQ ID NO: 76708 - DNA, 59 bp, Artificial
  Synthetic oligonucleotide
tggcaatgggtctttggatgtgttcaaatggttcaatgcagtgcaggatatgtatataa

SEQ ID NO: 76709 - DNA, 56 bp, Artificial
  Synthetic oligonucleotide
caatgggtctttggatgtgttcaaatggttcaatgcagtgcaatgtgtgtatatga

SEQ ID NO: 76710 - DNA, 56 bp, Artificial
  Synthetic oligonucleotide
caatgggtctttggatgtgttcaaatggttcaatgcagtgcaggatatgtatataa

SEQ ID NO: 76711 - DNA, 60 bp, Artificial
  Synthetic oligonucleotide
gaggctagagaatcttggtgtgtatcaaattcttgctatttatagtacggtatcgagcag

SEQ ID NO: 76712 - DNA, 60 bp, Artificial
  Synthetic oligonucleotide
catacaatgctgaactgttggttcttcttgaaaatgaaagaacactagacctgcatgacg

SEQ ID NO: 76713 - DNA, 60 bp, Artificial
  Synthetic oligonucleotide
gtgcttggggcatcatgcagtaccgaatgggacaatagtgaagacaatcacggatgatca

SEQ ID NO: 76714 - DNA, 60 bp, Artificial
  Synthetic oligonucleotide
tatagaacctgcaagctggtcgggatcaacatgagcaaaaagaagtcctacataaacagg

SEQ ID NO: 76715 - DNA, 60 bp, Artificial
  Synthetic oligonucleotide
gagttcacaatggttgggagaagagcaacagccattctcaggaaggcaaccagaagattg

SEQ ID NO: 76716 - DNA, 60 bp, Artificial
  Synthetic oligonucleotide
tatgaagagttcacaatggttgggagaagagcaacagccattctcaggaaggcaaccaga

SEQ ID NO: 76717 - DNA, 60 bp, Artificial
  Synthetic oligonucleotide
taagagtacatgaggggtatgaagagttcacaatggttgggagaagagcaacagctattc

SEQ ID NO: 76718 - DNA, 60 bp, Artificial
  Synthetic oligonucleotide
aataagagtacatgaggggtatgaagagttcacaatggttgggagaagagcaacagccat

SEQ ID NO: 76719 - DNA, 60 bp, Artificial
  Synthetic oligonucleotide
cgccatatcatgcttcttaatttgcgttgttctattgggtttcatcatgtgggcttgcga

SEQ ID NO: 76720 - DNA, 60 bp, Artificial
  Synthetic oligonucleotide
ttgagtcctggaatgatgatgggcatgttcaacatgctaagtactgtcttaggagtctca

SEQ ID NO: 76721 - DNA, 60 bp, Artificial
  Synthetic oligonucleotide
ccctctctggataggagaatgccccaaatatgtgaaaagtgaaagtttgagacttgcaac

SEQ ID NO: 76722 - DNA, 60 bp, Artificial
  Synthetic oligonucleotide
tgtaagccctctctggataggagaatgccccaaatatgtgaaaagtgaaagtttgagact

SEQ ID NO: 76723 - DNA, 60 bp, Artificial
  Synthetic oligonucleotide
taaggacacaagaatctgaatgtgcctgcataaatggttcttgcttcactataatgactg

SEQ ID NO: 76724 - DNA, 60 bp, Artificial
  Synthetic oligonucleotide
tctaccagcaagtcagacaggatctgcattggttaccatgcaaacaactcgacaacacaa

SEQ ID NO: 76725 - DNA, 60 bp, Artificial
  Synthetic oligonucleotide
atacttgcaatagtggtctctaccagcaagtcagacaggatctgcattggttaccatgca

SEQ ID NO: 76726 - DNA, 60 bp, Artificial
  Synthetic oligonucleotide
ccagcaagtcagacaggatctgcattggttaccatgcaaacaactcgacaacacaagtgg

SEQ ID NO: 76727 - DNA, 60 bp, Artificial
  Synthetic oligonucleotide
atgattgcaatcataatacttgcaatagtggtctctaccagcaagtcagacaggatctgc

SEQ ID NO: 76728 - DNA, 60 bp, Artificial
  Synthetic oligonucleotide
ctaccagcaagtcagacaggatctgcattggttaccatgcaaacaactcgacaacacaag

SEQ ID NO: 76729 - DNA, 60 bp, Artificial
  Synthetic oligonucleotide
aatggaaatctaatcgctccttggtatgcatacaaatttgtcagcacaaacagtaaagga

SEQ ID NO: 76730 - DNA, 60 bp, Artificial
  Synthetic oligonucleotide
tggataggagaatgccccaaatatgtgaaaagtgaaagtctgaggcttgcaactggactg

SEQ ID NO: 76731 - DNA, 60 bp, Artificial
  Synthetic oligonucleotide
acgattgacttaacagatgcagagatgaataaattattcgagaagactaggcgccagttg

SEQ ID NO: 76732 - DNA, 60 bp, Artificial
  Synthetic oligonucleotide
cagatgcagagatgaataaattattcgagaagactaggcgccagttgagggaaaacgcgg

SEQ ID NO: 76733 - DNA, 60 bp, Artificial
  Synthetic oligonucleotide
ctcaatgacaaacattctaatggcacagtgaaagaccggagcccctatagaactctaatg

SEQ ID NO: 76734 - DNA, 61 bp, Artificial
  Synthetic oligonucleotide
ccattacatatacagagatgaagcattaaacaaccgatttcaaattaaaggtgtagagctg

SEQ ID NO: 76735 - DNA, 60 bp, Artificial
  Synthetic oligonucleotide
ggcaccaaacgatcttatgagcagatggaaactggtggagagcgccagaatgctactgag

SEQ ID NO: 76736 - DNA, 51 bp, Artificial
  Synthetic oligonucleotide
actgaagtagttgtggcaatgctactatttgctatccatactgtccaaaga

SEQ ID NO: 76737 - DNA, 60 bp, Artificial
  Synthetic oligonucleotide
tacatggacaggagtcactcaaaatggaggaagtgatgcctgcaaaagagggcctgctag

SEQ ID NO: 76738 - DNA, 51 bp, Artificial
  Synthetic oligonucleotide
cacatggacaggagtcactcaaaatggaggaagcaatgcctgcaaaagggg

SEQ ID NO: 76739 - DNA, 60 bp, Artificial
  Synthetic oligonucleotide
cacatggacaggagtcactcaaaatggaggaagcaatgcctgcaaaagggggcctgctag

SEQ ID NO: 76740 - DNA, 60 bp, Artificial
  Synthetic oligonucleotide
ttcacatggacaggagtcactcaaaatggaggaagcaatgcctgcaaaagagggcctgct

SEQ ID NO: 76741 - DNA, 60 bp, Artificial
  Synthetic oligonucleotide
tgcatggacaggagtcactcaaaatggaggaagtaatgcctgcaaaagagggcctgctag

SEQ ID NO: 76742 - DNA, 60 bp, Artificial
  Synthetic oligonucleotide
tacatggacaggagtcactcaaaatggaggaagtaatgcctgcaaaagagggcctgctag

SEQ ID NO: 76743 - DNA, 60 bp, Artificial
  Synthetic oligonucleotide
gacggttggtatggtttcagacaccagaactctgagggtacaggacaagctgcagacctg

SEQ ID NO: 76744 - DNA, 60 bp, Artificial
  Synthetic oligonucleotide
cttgaagagtcccacccagggatctttgaaaactcgtgtcttgaaacgatggaaattgtt

SEQ ID NO: 76745 - DNA, 60 bp, Artificial
  Synthetic oligonucleotide
aatgtggaatctaatggaaatctaatcgccccttggtatgcatacaaatttgtcagcaca

SEQ ID NO: 76746 - DNA, 60 bp, Artificial
  Synthetic oligonucleotide
tattcgagaagaccaggcgccagttaagagaaaacgcggaagacatggggaatggatgtt

SEQ ID NO: 76747 - DNA, 60 bp, Artificial
  Synthetic oligonucleotide
taaattattcgagaagaccaggcgccagttaagagaaaacgcggaagacatggggaatgg

SEQ ID NO: 76748 - DNA, 60 bp, Artificial
  Synthetic oligonucleotide
ggtcagctactgcatgtcatgatgggaagaaatggatgacaattggagtaacgggtcctg

SEQ ID NO: 76749 - DNA, 60 bp, Artificial
  Synthetic oligonucleotide
ggtcagccactgcatgtcatgatgggaagaaatggatgacaattggagtaacgggtcctg

SEQ ID NO: 76750 - DNA, 60 bp, Artificial
  Synthetic oligonucleotide
gccactgcatgtcatgatgggaagaaatggatgacaattggagtaacgggtcctgatgcc

SEQ ID NO: 76751 - DNA, 60 bp, Artificial
  Synthetic oligonucleotide
gattcaatggtctcaaaaccctacaatgctatacaataagatggaatttgaaccgttcca

SEQ ID NO: 76752 - DNA, 60 bp, Artificial
  Synthetic oligonucleotide
gattcaatggtctcaagaccctacaatgctatacaataagatggaatttgaaccgttcca

SEQ ID NO: 76753 - DNA, 60 bp, Artificial
  Synthetic oligonucleotide
aattcaatggtctcaagaccctacaatgctatacaataagatggaatttgaaccgttcca

SEQ ID NO: 76754 - DNA, 60 bp, Artificial
  Synthetic oligonucleotide
accaacatacaattgatctgactgattcagaaatgaacaaactatttgaaaaaacaagga

SEQ ID NO: 76755 - DNA, 60 bp, Artificial
  Synthetic oligonucleotide
aaccagcatacgattgatctgactgattcagaaatgaacaaactatttgaaaaaacaaga

SEQ ID NO: 76756 - DNA, 60 bp, Artificial
  Synthetic oligonucleotide
cagagttgggtacttatgtgcggggctgcccagtgatactccaagaggggaagatgccca

SEQ ID NO: 76757 - DNA, 60 bp, Artificial
  Synthetic oligonucleotide
tgcagggctgcccagtgatactccaagaggggaagatgcccaatttactgggtcatgcac

SEQ ID NO: 76758 - DNA, 60 bp, Artificial
  Synthetic oligonucleotide
ccattggctccatatcattaggattggttgtattcaatgttctactgcatgtcgtgagca

SEQ ID NO: 76759 - DNA, 60 bp, Artificial
  Synthetic oligonucleotide
gagagatcaaaaggcattaaagggaagaggcagcacacttggactcgacctgcgagtggc

SEQ ID NO: 76760 - DNA, 60 bp, Artificial
  Synthetic oligonucleotide
acaactattgcttgaagtggagcaagagataagaactttctcgtttcagcttatttaatg

SEQ ID NO: 76761 - DNA, 60 bp, Artificial
  Synthetic oligonucleotide
agagtcccacccagggatctttgaaaactcgtgtcttgaaacgatggaagttgttcaaca

SEQ ID NO: 76762 - DNA, 60 bp, Artificial
  Synthetic oligonucleotide
caaccggctgcaactgcattagctaatactatagaggtcttcagatcgaacggtctgaca

SEQ ID NO: 76763 - DNA, 60 bp, Artificial
  Synthetic oligonucleotide
gacaagaccaatcctgtcacctctgactaaggggattttagggttcgtgttcacgctcac

SEQ ID NO: 76764 - DNA, 60 bp, Artificial
  Synthetic oligonucleotide
aaggacaagaccaatcctgtcacctctgactaaggggattttgggatttgtgttcacgct

SEQ ID NO: 76765 - DNA, 60 bp, Artificial
  Synthetic oligonucleotide
agtacggtatcgagcagtctggttttggtgggactgatcatttccatgggtctttggatg

SEQ ID NO: 76766 - DNA, 60 bp, Artificial
  Synthetic oligonucleotide
gtgcaacattctcaaggggaaattccaaacagcagcacaacgagcaatgatggaccaggt

SEQ ID NO: 76767 - DNA, 60 bp, Artificial
  Synthetic oligonucleotide
gcccgttatagatataaatatggcagattacagcattgattccagttatgtgtgttcagg

SEQ ID NO: 76768 - DNA, 60 bp, Artificial
  Synthetic oligonucleotide
cggagggttgacacaaaccctggccacgcagacctcagtgccaaagaggcacaggatgta

SEQ ID NO: 76769 - DNA, 60 bp, Artificial
  Synthetic oligonucleotide
tggagcaagacaaatgatgctggatcagacagagtgatggtatcacctctggctgtgacg

SEQ ID NO: 76770 - DNA, 60 bp, Artificial
  Synthetic oligonucleotide
acaggaatctgttgtggataataaaaataagatctgatccgtactcattgatcaagggga

SEQ ID NO: 76771 - DNA, 60 bp, Artificial
  Synthetic oligonucleotide
acaggaatctgttgtggataataaaaataagatctgatccgtactcattgatcaagggaa

SEQ ID NO: 76772 - DNA, 57 bp, Artificial
  Synthetic oligonucleotide
ggtcatatatagtggaaagacctacagctcaaaatggaatttgctacccaggagtgc

SEQ ID NO: 76773 - DNA, 60 bp, Artificial
  Synthetic oligonucleotide
agcttcatcagaggaacaagagtggtcccaagaggacaactgtccaccagaggagttcag

SEQ ID NO: 76774 - DNA, 60 bp, Artificial
  Synthetic oligonucleotide
caatgatgtgggagatcaatggtcctgagtcagtactggtcaatacttaccaatggatca

SEQ ID NO: 76775 - DNA, 54 bp, Artificial
  Synthetic oligonucleotide
ccattgcaatgggattggttttcatttgcataaagaatggaaacatgcggtgca

SEQ ID NO: 76776 - DNA, 60 bp, Artificial
  Synthetic oligonucleotide
cttctagccattgcaatgggattggttttcatttgcataaagaatggaaacatgcggtgc

SEQ ID NO: 76777 - DNA, 60 bp, Artificial
  Synthetic oligonucleotide
ctagccattgcaatgggattggttttcatttgcataaagaatggaaacatgcagtgcact

SEQ ID NO: 76778 - DNA, 60 bp, Artificial
  Synthetic oligonucleotide
ttgaggagtgcctgattaatgatccctgggttttgcttaatgcatcttggttcaactcct

SEQ ID NO: 76779 - DNA, 60 bp, Artificial
  Synthetic oligonucleotide
gagactagagtatggtggacctcaaacagtattgtcgtattttgtggcacttcaggcacc

SEQ ID NO: 76780 - DNA, 60 bp, Artificial
  Synthetic oligonucleotide
agtgactatgaaggaagactaatccaaaacagcataacaatagagagaatggttctctcg

SEQ ID NO: 76781 - DNA, 56 bp, Artificial
  Synthetic oligonucleotide
gactatgaagggagactaatccaaaacagcataacaatagagagaatggttctctc

SEQ ID NO: 76782 - DNA, 60 bp, Artificial
  Synthetic oligonucleotide
agaagaagtgcttacgggcaaccttcaaacattgaaaataagagtacatgaggggtatga

SEQ ID NO: 76783 - DNA, 60 bp, Artificial
  Synthetic oligonucleotide
tctcgaggcactcatggaatggttaaagacaagaccaatcctgtcacctctgactaaggg

SEQ ID NO: 76784 - DNA, 60 bp, Artificial
  Synthetic oligonucleotide
cttgaggcactcatggaatggttaaagacaagaccaatcctgtcacctctgactaagggg

SEQ ID NO: 76785 - DNA, 60 bp, Artificial
  Synthetic oligonucleotide
atggaatggctaaagacaagaccaatcctgtcacctctgactaaggggattttaggattt

SEQ ID NO: 76786 - DNA, 60 bp, Artificial
  Synthetic oligonucleotide
tcaaggggaaattccaaacagcagcacaacgagcaatgatggaccaagtgagagaaagcc

SEQ ID NO: 76787 - DNA, 60 bp, Artificial
  Synthetic oligonucleotide
tcaaagggaaattccaaacagcagcacaacgagcaatgatggaccaagtgagggaaagcc

SEQ ID NO: 76788 - DNA, 60 bp, Artificial
  Synthetic oligonucleotide
aggaaggccgcaagaaactagagtatggtggacctcaaacagtattgtcgtgttttgtgg

SEQ ID NO: 76789 - DNA, 60 bp, Artificial
  Synthetic oligonucleotide
tatgaccatactcaatacagaacagagtcattgcagaatagaatacagatagacccagtg

SEQ ID NO: 76790 - DNA, 60 bp, Artificial
  Synthetic oligonucleotide
cacgtatgaccatactcaatacagaacagagtcattgcagaatagaatacagatagaccc

SEQ ID NO: 76791 - DNA, 60 bp, Artificial
  Synthetic oligonucleotide
agtgcctgattaacgatccctgggttttgcttaatgcatcttggttcaactccttcctca

SEQ ID NO: 76792 - DNA, 60 bp, Artificial
  Synthetic oligonucleotide
gccctgcacctcggtacattactgatatgagcatagaggaaataagcagggaatggtaca

SEQ ID NO: 76793 - DNA, 60 bp, Artificial
  Synthetic oligonucleotide
agccctgcacctcggtacattactgatatgagcatagaggaaataagcagggaatggtac

SEQ ID NO: 76794 - DNA, 60 bp, Artificial
  Synthetic oligonucleotide
ctgcacctcggtacattactgatatgagcatagaggaaataagcagggaatggtacatgc

SEQ ID NO: 76795 - DNA, 60 bp, Artificial
  Synthetic oligonucleotide
accctgcacctcggtacattactgatatgagcatagaggaaataagcagggaatggtaca

SEQ ID NO: 76796 - DNA, 60 bp, Artificial
  Synthetic oligonucleotide
gcatccagccatgcacctcggtacattactgatatgagcatagaggaaataagcagggaa

SEQ ID NO: 76797 - DNA, 60 bp, Artificial
  Synthetic oligonucleotide
atccagccctgcacctcggtacattactgatatgagcatagaggaaataagcagggaatg

SEQ ID NO: 76798 - DNA, 60 bp, Artificial
  Synthetic oligonucleotide
ccagccctgcacctcggtacattactgatatgagcatagaggaaataagcagggaatggt

SEQ ID NO: 76799 - DNA, 58 bp, Artificial
  Synthetic oligonucleotide
gcttgctgaccaaagtctcccaccgaacttctccagccttgaaaactttagagcctat

SEQ ID NO: 76800 - DNA, 60 bp, Artificial
  Synthetic oligonucleotide
agtgaaaatgaatccaaatcagaagataataacaattggttccgtctctctaaccattgc

SEQ ID NO: 76801 - DNA, 60 bp, Artificial
  Synthetic oligonucleotide
agacaatgagttcaatgagatagaacaacaaataggaaatgtcattaattggacacgaga

SEQ ID NO: 76802 - DNA, 60 bp, Artificial
  Synthetic oligonucleotide
gacaatgagttcaatgagatagaacaacaaataggaaatgtcattaattggacacgagac

SEQ ID NO: 76803 - DNA, 60 bp, Artificial
  Synthetic oligonucleotide
aaacaatgagttcaatgagatagaacaacaaataggaaatgtcattaattggacacgaga

SEQ ID NO: 76804 - DNA, 60 bp, Artificial
  Synthetic oligonucleotide
cataaatagaacaggaacatttgaattcacaagctttttctatcgctatggatttgtagc

SEQ ID NO: 76805 - DNA, 60 bp, Artificial
  Synthetic oligonucleotide
atggtccagctcaagttgccatgatgggaaagcatggttgcacgtttgtgtcactgggga

SEQ ID NO: 76806 - DNA, 60 bp, Artificial
  Synthetic oligonucleotide
tatactggagatcctccatacagccatggaacgggaacaggatacaccatggacacagtc

SEQ ID NO: 76807 - DNA, 60 bp, Artificial
  Synthetic oligonucleotide
gcaccacattcccttatactggagatcctccatacagccatggaacgggaacaggataca

SEQ ID NO: 76808 - DNA, 60 bp, Artificial
  Synthetic oligonucleotide
ggtggacctcaaacagtattgtcgtattttgtggcacttcaggcacttatggaacaggct

SEQ ID NO: 76809 - DNA, 60 bp, Artificial
  Synthetic oligonucleotide
ccatgatgggaaagcatggttgcatgtttgtgtcactggggatgatagaaatgcgaccgc

SEQ ID NO: 76810 - DNA, 60 bp, Artificial
  Synthetic oligonucleotide
atcggctccgccgagatcaaaagtccctaaaaggaagaggcaacacccttggtctcgaca

SEQ ID NO: 76811 - DNA, 60 bp, Artificial
  Synthetic oligonucleotide
ctgacagccagacagcgaccaaaagaattcggatggccatcaattagtgtcgaattgtta

SEQ ID NO: 76812 - DNA, 60 bp, Artificial
  Synthetic oligonucleotide
ataaagaacaacatgataaacaatgaccttggaccagcaacggcccaaatggctctccag

SEQ ID NO: 76813 - DNA, 60 bp, Artificial
  Synthetic oligonucleotide
aatactattcattagagaggggaaaattgtccacattagtccattgtcaggaagtgctca

SEQ ID NO: 76814 - DNA, 60 bp, Artificial
  Synthetic oligonucleotide
ctttgacatgagtaatgaaggatcttatttcttcggagacaatgcagaggagtatgacaa

SEQ ID NO: 76815 - DNA, 60 bp, Artificial
  Synthetic oligonucleotide
tacataatggactccaacacgataacctcgtttcaggtagattgctatctatggcacata

SEQ ID NO: 76816 - DNA, 60 bp, Artificial
  Synthetic oligonucleotide
tgcaaggaacatagtaagaagagcaacagtatcagcagacccactagcatctctattgga

SEQ ID NO: 76817 - DNA, 60 bp, Artificial
  Synthetic oligonucleotide
gttcaggcacttagggacaacctggaacctggaaccttcgatcttggagggctatacgaa

SEQ ID NO: 76818 - DNA, 60 bp, Artificial
  Synthetic oligonucleotide
ttctcattgttcaggcacttagggacaacctggaacctggaaccttcgatcttggagggc

SEQ ID NO: 76819 - DNA, 60 bp, Artificial
  Synthetic oligonucleotide
tctcattgttcaggcacttagggacaacctggaacctggaaccttcgatcttggagggct

SEQ ID NO: 76820 - DNA, 60 bp, Artificial
  Synthetic oligonucleotide
cttctcattgttcaggcacttagggacaacctggaacctggaaccttcgatcttggaggg

SEQ ID NO: 76821 - DNA, 60 bp, Artificial
  Synthetic oligonucleotide
tcggccgacatgagcattggagtaacagtgataaagaacaacatgataaacaatgacctc

SEQ ID NO: 76822 - DNA, 60 bp, Artificial
  Synthetic oligonucleotide
gaactgctgcagattacaagagcacccagtcggcaattaatcaaataacagggaaattaa

SEQ ID NO: 76823 - DNA, 60 bp, Artificial
  Synthetic oligonucleotide
aatactattcattagagaggggaaaattgtccacattagtccattatcaggaagtgctca

SEQ ID NO: 76824 - DNA, 60 bp, Artificial
  Synthetic oligonucleotide
ggagagcaacagtatcagcagacccgttggcctctctcttggagatgtgccatagtacac

SEQ ID NO: 76825 - DNA, 60 bp, Artificial
  Synthetic oligonucleotide
gcaggtgcattgacagaagacccagatgagggaacagcaggagtggaatctgcggtgcta

SEQ ID NO: 76826 - DNA, 60 bp, Artificial
  Synthetic oligonucleotide
agtgcctaaagctgccagaggccagtatagtgggtttgtaagaacgctattccagcagat

SEQ ID NO: 76827 - DNA, 60 bp, Artificial
  Synthetic oligonucleotide
tggaccagcattgagcatcaacgaattgagcaatcttgtgaagggggagaaggctaatgt

SEQ ID NO: 76828 - DNA, 60 bp, Artificial
  Synthetic oligonucleotide
gtgatttgaattttgttaacagagcgaaccagcggctaaatcctatgcatcaactcctga

SEQ ID NO: 76829 - DNA, 60 bp, Artificial
  Synthetic oligonucleotide
gaaatatacgtcaggaagacaggagaagaaccctgctcttagaatgaaatggatgatggc

SEQ ID NO: 76830 - DNA, 60 bp, Artificial
  Synthetic oligonucleotide
ataaggaaagcaaccagaaggctgatccaactgatagtgagtgggagggacgagcagtcg

SEQ ID NO: 76831 - DNA, 60 bp, Artificial
  Synthetic oligonucleotide
gtgctcctgtctcctgaagaggttagtgaaacgcagggaacagaaaagctgacgataaca

SEQ ID NO: 76832 - DNA, 60 bp, Artificial
  Synthetic oligonucleotide
ttcgcaaaaccagattcctaccagtagctggcgggacaagcagcgtttatatcgaggtat

SEQ ID NO: 76833 - DNA, 60 bp, Artificial
  Synthetic oligonucleotide
atcagttcatccttcagctttggaggtttcactttcaaaaggacaagtggatcatctgtc

SEQ ID NO: 76834 - DNA, 60 bp, Artificial
  Synthetic oligonucleotide
agcaaaagcaggagtgaaaatgaatccaaatcagaagataatagcaattggctccgtctc

SEQ ID NO: 76835 - DNA, 60 bp, Artificial
  Synthetic oligonucleotide
atcggttcgtggtctcaaaatattctcagaactcaggagtcagagtgcgtttgcatcagt

SEQ ID NO: 76836 - DNA, 60 bp, Artificial
  Synthetic oligonucleotide
caggaagacaagagaagaaccctgcactcagaatgaaatggatgatggcaatgaaatacc

SEQ ID NO: 76837 - DNA, 60 bp, Artificial
  Synthetic oligonucleotide
actatttgaatggatgtcaatccgactttacttttcttgaaagttccagcgcaaaatgcc

SEQ ID NO: 76838 - DNA, 60 bp, Artificial
  Synthetic oligonucleotide
tttgaatggatgtcaatccgactttacttttcttgaaagttccagcgcaaaatgccataa

SEQ ID NO: 76839 - DNA, 60 bp, Artificial
  Synthetic oligonucleotide
tcggtatgtcaaacagaaaagcctccttctggctacaggaatgagaaatgttccagagaa

SEQ ID NO: 76840 - DNA, 60 bp, Artificial
  Synthetic oligonucleotide
ggattcttcccttttcacaaggacaatgcaatacgactgggtgagaacaaagacgtcata

SEQ ID NO: 76841 - DNA, 60 bp, Artificial
  Synthetic oligonucleotide
ggattcttcccttttcacaaagacaatgcaatacgactgggtgagaacaaagacgtcata

SEQ ID NO: 76842 - DNA, 60 bp, Artificial
  Synthetic oligonucleotide
cacaaggacaatgcaatacgactgggtgagaacaaagacgtcatagtcacaagggagcct

SEQ ID NO: 76843 - DNA, 60 bp, Artificial
  Synthetic oligonucleotide
cacaaagacaatgcaatacgactgggtgagaacaaagacgtcatagtcacaagggaacct

SEQ ID NO: 76844 - DNA, 60 bp, Artificial
  Synthetic oligonucleotide
ggctacaaagatgtgatactttggtttagcttcggggcatcatgtttcatacttctggcc

SEQ ID NO: 76845 - DNA, 60 bp, Artificial
  Synthetic oligonucleotide
tgagcagcggctacaaagatgtgatactttggtttagcttcggggcatcatgtttcatac

SEQ ID NO: 76846 - DNA, 60 bp, Artificial
  Synthetic oligonucleotide
cggctacaaagatgtgatactttggtttagcttcggggcatcatgtttcatacttctggc

SEQ ID NO: 76847 - DNA, 60 bp, Artificial
  Synthetic oligonucleotide
ggctacaaagatgtgatactttggtttagcttcggggcgtcatgtttcatatttctggcc

SEQ ID NO: 76848 - DNA, 60 bp, Artificial
  Synthetic oligonucleotide
gagcagcggctacaaagatgtgatactttggtttagcttcggggcatcatgtttcatact

SEQ ID NO: 76849 - DNA, 60 bp, Artificial
  Synthetic oligonucleotide
gcagtggctacaaagatgtgatactttggtttagcttcggggcgtcatgtttcatatttc

SEQ ID NO: 76850 - DNA, 60 bp, Artificial
  Synthetic oligonucleotide
aattcttccctagcagttcatacaggagaccagttgggatttccagcatggtggaggcca

SEQ ID NO: 76851 - DNA, 60 bp, Artificial
  Synthetic oligonucleotide
aattcttccctagcagttcatacaggagaccagttgggatttccagcatgatggaggcca

SEQ ID NO: 76852 - DNA, 60 bp, Artificial
  Synthetic oligonucleotide
tgaacaaataacatttatgcaagccttacaactactgcttgaagtggaacaagagataag

SEQ ID NO: 76853 - DNA, 60 bp, Artificial
  Synthetic oligonucleotide
agtttgcactcgggcaggggaccacgctagacaacaaacattcaaatggcacaatacatg

SEQ ID NO: 76854 - DNA, 60 bp, Artificial
  Synthetic oligonucleotide
tggtagacatccttaggcagaatccaacagaggaacaagccgtggacatatgcaaggcag

SEQ ID NO: 76855 - DNA, 60 bp, Artificial
  Synthetic oligonucleotide
gtagacatccttaggcagaatccaacagaggaacaagccgtggacatatgcaaggcagca

SEQ ID NO: 76856 - DNA, 60 bp, Artificial
  Synthetic oligonucleotide
gggaggctgatccaaaacagcataacaatagagagaatggtcctctctgcatttgatgaa

SEQ ID NO: 76857 - DNA, 60 bp, Artificial
  Synthetic oligonucleotide
gacacagtgaccttcactttcaatggggcattcatagcccctgacagggcaagtttcttc

SEQ ID NO: 76858 - DNA, 60 bp, Artificial
  Synthetic oligonucleotide
acagtgaccttcactttcaatggggcattcatagcccctgacagggcaagtttctttaga

SEQ ID NO: 76859 - DNA, 56 bp, Artificial
  Synthetic oligonucleotide
ccaatgacacagtgaccttcactttcaatggggcattcatagcccctgacagggca

SEQ ID NO: 76860 - DNA, 60 bp, Artificial
  Synthetic oligonucleotide
ccaatgacacagtgaccttcactttcaatggggcattcatagcccctgacagggcaagtt

SEQ ID NO: 76861 - DNA, 60 bp, Artificial
  Synthetic oligonucleotide
ccttgatcccaatgacacagtgaccttcactttcaatggggcattcatagcccctgacag

SEQ ID NO: 76862 - DNA, 60 bp, Artificial
  Synthetic oligonucleotide
tgccatttatagtacggtatcgagcagtctagtcttggtagggctgatattggcaatggg

SEQ ID NO: 76863 - DNA, 60 bp, Artificial
  Synthetic oligonucleotide
aatgaatccaaatcagaagataataacaattggctccatctctctaaccattgcagcagt

SEQ ID NO: 76864 - DNA, 60 bp, Artificial
  Synthetic oligonucleotide
atgaatccaaatcagaagataataacaattggctccgtctctctgaccattgcaacagtg

SEQ ID NO: 76865 - DNA, 60 bp, Artificial
  Synthetic oligonucleotide
gtcgtattttgtggcacttcacgcacctatggaacaggctcatggcctgatggggcgaat

SEQ ID NO: 76866 - DNA, 55 bp, Artificial
  Synthetic oligonucleotide
gaacaacatgataaacaatgaccttggaccagcaacggctcaaatggctcttcag

SEQ ID NO: 76867 - DNA, 56 bp, Artificial
  Synthetic oligonucleotide
gaacaacatgataaacaatgaccttggaccagcaacggctcaaatggctcttcagt

SEQ ID NO: 76868 - DNA, 60 bp, Artificial
  Synthetic oligonucleotide
gaacaacatgataaacaatgaccttggaccagcaacggctcaaatggctcttcagctatt

SEQ ID NO: 76869 - DNA, 56 bp, Artificial
  Synthetic oligonucleotide
gaacaacatgataaacaatgaccttggaccagcaacggctcaaatggctcttcaat

SEQ ID NO: 76870 - DNA, 60 bp, Artificial
  Synthetic oligonucleotide
gggtaatgggtgttttgagttttggcacaaatgtgacaatgaatgcatcaaatcggttaa

SEQ ID NO: 76871 - DNA, 60 bp, Artificial
  Synthetic oligonucleotide
gggtgttttgagttttggcacaaatgtgacaatgaatgcatcaaatcggttaaaaatggt

SEQ ID NO: 76872 - DNA, 53 bp, Artificial
  Synthetic oligonucleotide
tggagcaagacaaatgatgctggatcagacagagtgatggtatcacctctggc

SEQ ID NO: 76873 - DNA, 60 bp, Artificial
  Synthetic oligonucleotide
tttggcatgtccgcaaacgatttgcagaccaagaaatgggtgatgccccattccttgacc

SEQ ID NO: 76874 - DNA, 55 bp, Artificial
  Synthetic oligonucleotide
tttggcatgtccgcaaacgatttgcagaccaagaaatgggtgatgccccattcct

SEQ ID NO: 76875 - DNA, 60 bp, Artificial
  Synthetic oligonucleotide
taggcccgttatagatataaatatggcagattacagcattgattccagttatgtgtgttc

SEQ ID NO: 76876 - DNA, 60 bp, Artificial
  Synthetic oligonucleotide
caccgagtgacatccacatcatggcgtctcaaggcaccaaacggtcttatgagcagatgg

SEQ ID NO: 76877 - DNA, 60 bp, Artificial
  Synthetic oligonucleotide
tcgccgagatcagaaatctctaagaggaagaggcagcactcttggtctggacatcggaac

SEQ ID NO: 76878 - DNA, 60 bp, Artificial
  Synthetic oligonucleotide
cataaacagaacaggaacatttgagttcacaagctttttctatcgctatggatttgtagc

SEQ ID NO: 76879 - DNA, 60 bp, Artificial
  Synthetic oligonucleotide
acttctggtacttatggaacaggctcatggcctgatggggcgaatatcaatttcatgcct

SEQ ID NO: 76880 - DNA, 60 bp, Artificial
  Synthetic oligonucleotide
ttcatcatcaatgatgtgggagatcaatggtcctgagtcagtactggtcaatacttacca

SEQ ID NO: 76881 - DNA, 60 bp, Artificial
  Synthetic oligonucleotide
catcaatgatgtgggagatcaatggtcctgaatcagtgttggtcaacacctatcagtgga

SEQ ID NO: 76882 - DNA, 60 bp, Artificial
  Synthetic oligonucleotide
catcaatgatgtgggagatcaatggtcctgagtcagtgctggtcaacacttatcagtgga

SEQ ID NO: 76883 - DNA, 60 bp, Artificial
  Synthetic oligonucleotide
gcaatgcaaaatagaatacagatcaacccagtcaaactaagcagcggctacaaagatgtg

SEQ ID NO: 76884 - DNA, 60 bp, Artificial
  Synthetic oligonucleotide
aatgcaaaatagaatacagattgacccggtcaaactaagcagcggctacaaagatgtgat

SEQ ID NO: 76885 - DNA, 60 bp, Artificial
  Synthetic oligonucleotide
atccttgctatttatagtacgatatcgagcagtctggttttggtgggactgatcattgcc

SEQ ID NO: 76886 - DNA, 60 bp, Artificial
  Synthetic oligonucleotide
agtacgatatcgagcagtctggttttggtgggactgatcattgccatgggtctttggatg

SEQ ID NO: 76887 - DNA, 60 bp, Artificial
  Synthetic oligonucleotide
ggagagcataaggaacaacacttatgaccatactcaatacagaacagagtcattgcagaa

SEQ ID NO: 76888 - DNA, 60 bp, Artificial
  Synthetic oligonucleotide
gctaattgggcaaggagacgtagtgttggtaatgaaacggaaacgggactctagcatact

SEQ ID NO: 76889 - DNA, 57 bp, Artificial
  Synthetic oligonucleotide
atgagccttctaaccgaggtcgaaacgtacgttctctctatcattccgtcaggcccc

SEQ ID NO: 76890 - DNA, 57 bp, Artificial
  Synthetic oligonucleotide
atgagccttctaaccgaggtcgaaacgtacgttctctctatcatcccatcaggcccc

SEQ ID NO: 76891 - DNA, 60 bp, Artificial
  Synthetic oligonucleotide
aaaataagggtgcatgaggggtatgaagaattcacaatggttgggagaagagcaacagcc

SEQ ID NO: 76892 - DNA, 60 bp, Artificial
  Synthetic oligonucleotide
gaccatactaaatacagaacagagtcattgcagaatagaatacagatagacccagtgaaa

SEQ ID NO: 76893 - DNA, 60 bp, Artificial
  Synthetic oligonucleotide
actgaatcccaatgacacagtcactttcagcttcaacggggcttttatagctccagatcg

SEQ ID NO: 76894 - DNA, 60 bp, Artificial
  Synthetic oligonucleotide
caatgtggactgctgggaacaatcactggaccaccccaatgtgaccaatttctagaattc

SEQ ID NO: 76895 - DNA, 60 bp, Artificial
  Synthetic oligonucleotide
agggaatcaggcggaattgataaggaaacaatgggattcacatacagtggggtaaggacc

SEQ ID NO: 76896 - DNA, 55 bp, Artificial
  Synthetic oligonucleotide
ccagccgcaactgccttggccaacactatagaggtcttcagatcgaacggtctga

SEQ ID NO: 76897 - DNA, 60 bp, Artificial
  Synthetic oligonucleotide
cactggctgctccttgatcccaatgacacagtgaccttcactttcaatggggcattcata

SEQ ID NO: 76898 - DNA, 60 bp, Artificial
  Synthetic oligonucleotide
ggagttacagtgataaagaacaacatgataaacaatgaccttggaccagcgacagctcag

SEQ ID NO: 76899 - DNA, 60 bp, Artificial
  Synthetic oligonucleotide
ctctattggagatgtgccacagcacacagattggtggaataagaatggtagacatcctta

SEQ ID NO: 76900 - DNA, 60 bp, Artificial
  Synthetic oligonucleotide
ccctaataggacctccccaatgtgatcaattcctggagttttcctctgatttgataattg

SEQ ID NO: 76901 - DNA, 60 bp, Artificial
  Synthetic oligonucleotide
gatagatggatggtatggctaccaccatgaaaattctcaaggctcagggtatgcagcaga

SEQ ID NO: 76902 - DNA, 60 bp, Artificial
  Synthetic oligonucleotide
caatctattcgagaaattcttccctagcagttcatacaggagaccggttggaatttccag

SEQ ID NO: 76903 - DNA, 60 bp, Artificial
  Synthetic oligonucleotide
cgggcaacctccaaacattgaaaataagagtgcatgaggggtatgaggaattcacaatgg

SEQ ID NO: 76904 - DNA, 60 bp, Artificial
  Synthetic oligonucleotide
ccatgatgggaaagcatggttgcacgtttgtgtcactggggatgatagaaatgcgactgc

SEQ ID NO: 76905 - DNA, 60 bp, Artificial
  Synthetic oligonucleotide
acaggaatctgttgtggataataaaaataaggtctgatccgtactcattgatcaagggga

SEQ ID NO: 76906 - DNA, 60 bp, Artificial
  Synthetic oligonucleotide
tacaggaatctgttgtggataataaaaataaggtctgatccgtactcattgatcaagggg

SEQ ID NO: 76907 - DNA, 60 bp, Artificial
  Synthetic oligonucleotide
tggctaccaccatgaaaattctcaaggctcagggtatgcagcagacagagagagcaccca

SEQ ID NO: 76908 - DNA, 60 bp, Artificial
  Synthetic oligonucleotide
ttgtcgtgttttgtggcacttcaggcacttatggaacaggctcatggcctgatggggcga

SEQ ID NO: 76909 - DNA, 60 bp, Artificial
  Synthetic oligonucleotide
ttgctgaagcgataattgtggccatggtattttcacaagaggattgcatgatcaaggcag

SEQ ID NO: 76910 - DNA, 60 bp, Artificial
  Synthetic oligonucleotide
cagtgccaaagaggcgcaggatgtaatcatggaagttgttttcccaaatgaagtgggagc

SEQ ID NO: 76911 - DNA, 60 bp, Artificial
  Synthetic oligonucleotide
tctgaaagttccagcgcaaaatgccataagcaccacgttcccatatactggagatcctcc

SEQ ID NO: 76912 - DNA, 60 bp, Artificial
  Synthetic oligonucleotide
aagccttacaactactgcttgaagtagagcaagagataagaactttctcgtttcagctta

SEQ ID NO: 76913 - DNA, 60 bp, Artificial
  Synthetic oligonucleotide
ccccactgtgatcaattcctggagttttcctctgatttgataattgagcgaagagaagga

SEQ ID NO: 76914 - DNA, 60 bp, Artificial
  Synthetic oligonucleotide
cgggcaggggaccacgctagacaacaaacattcaaatggcacaatacatgatagaatccc

SEQ ID NO: 76915 - DNA, 60 bp, Artificial
  Synthetic oligonucleotide
acggaaacgggactctagcatacttactgacagtcagacagcgaccaaaaggattcggat

SEQ ID NO: 76916 - DNA, 60 bp, Artificial
  Synthetic oligonucleotide
attgatggatggtatggtttcagacatcaaaatgcgcaaggagaaggaactgcagctgat

SEQ ID NO: 76917 - DNA, 60 bp, Artificial
  Synthetic oligonucleotide
ttggtaggactgatcatagcaatgggtctttggatgtgttcaaatggctcaatgcaatgc

SEQ ID NO: 76918 - DNA, 57 bp, Artificial
  Synthetic oligonucleotide
cttcctttgacatgagtaacgaaggatcttatttcttcggagacaatgcagaggaat

SEQ ID NO: 76919 - DNA, 60 bp, Artificial
  Synthetic oligonucleotide
ggaacaggctcatggcctgatggggctaacatcaatttcatgcctatataagctttcgca

SEQ ID NO: 76920 - DNA, 60 bp, Artificial
  Synthetic oligonucleotide
cagcaatcctttgtaccgagtccaggagcgagaccacaagtgaatggtcaatcagggaga

SEQ ID NO: 76921 - DNA, 60 bp, Artificial
  Synthetic oligonucleotide
ttgcaatgggccttgttttcatatgtgtgaaaaatggaaacatgcggtgcaccatttgta

SEQ ID NO: 76922 - DNA, 60 bp, Artificial
  Synthetic oligonucleotide
taactatcagcaatcctttgtaccgagtccaggagcgagaccacaagtgaatggtcaatc

SEQ ID NO: 76923 - DNA, 60 bp, Artificial
  Synthetic oligonucleotide
cttcctttgacataagtaacgagggatcttatttcttcggagacaatgcagaggagtatg

SEQ ID NO: 76924 - DNA, 60 bp, Artificial
  Synthetic oligonucleotide
tggtgccatagcgggtttcattgaaaatggatgggaaggtctggttgatggatggtatgg

SEQ ID NO: 76925 - DNA, 60 bp, Artificial
  Synthetic oligonucleotide
ggtgccatagcgggtttcattgaaaatggatgggaaggtctggttgatggatggtatggt

SEQ ID NO: 76926 - DNA, 60 bp, Artificial
  Synthetic oligonucleotide
ggtgccatagcgggtttcattgaaaatggatgggaaggtctggttgatggatggtatggc

SEQ ID NO: 76927 - DNA, 60 bp, Artificial
  Synthetic oligonucleotide
tgcagaatgccataagcaccacattcccatatactggagatcctccatacagccatggaa

SEQ ID NO: 76928 - DNA, 60 bp, Artificial
  Synthetic oligonucleotide
agccaagtggatatgcacaaacagactgtgtcctggaagcaatggctttccttgaagaat

SEQ ID NO: 76929 - DNA, 60 bp, Artificial
  Synthetic oligonucleotide
aaaagtgctgcaatctattcgagaaattcttccctagcagttcatacaggagaccagttg

SEQ ID NO: 76930 - DNA, 60 bp, Artificial
  Synthetic oligonucleotide
gccattgcaatgggccttgtcttcatatgtgtgaagaatggaaacatgcggtgcactatt

SEQ ID NO: 76931 - DNA, 60 bp, Artificial
  Synthetic oligonucleotide
gatggtatggtttcagacatcaaaatgcacagggagagggaactgcggcagattacaaga

SEQ ID NO: 76932 - DNA, 60 bp, Artificial
  Synthetic oligonucleotide
actgagtgacatcaacaccatggcgtctcaaggcaccaaacgatcttatgagcagatgga

SEQ ID NO: 76933 - DNA, 60 bp, Artificial
  Synthetic oligonucleotide
tcaatggggcattcatagcccctgacagggcaagtttctttaggggagaatcactaggag

SEQ ID NO: 76934 - DNA, 52 bp, Artificial
  Synthetic oligonucleotide
gcacaagatgtaatcatggaagttgttttcccaaatgaagtgggggccagaa

SEQ ID NO: 76935 - DNA, 52 bp, Artificial
  Synthetic oligonucleotide
gcacaagatgtaatcatggaagttgttttcccaaatgaagtgggggcaagaa

SEQ ID NO: 76936 - DNA, 60 bp, Artificial
  Synthetic oligonucleotide
gcaggagcagcagagtgcagtggatgttgacgatggtcattttgtcaacatagagctgga

SEQ ID NO: 76937 - DNA, 60 bp, Artificial
  Synthetic oligonucleotide
gcaggagcagcagagtgcggtggatgttgacgatggtcattttgtcaacatagagctgga

SEQ ID NO: 76938 - DNA, 60 bp, Artificial
  Synthetic oligonucleotide
catcaatgatgtgggagatcaatggtcctgagtcagtgttggtcaacacctatcagtgga

SEQ ID NO: 76939 - DNA, 60 bp, Artificial
  Synthetic oligonucleotide
gaccatactcaatacagaacagagtcattacagaatagaatacagatagacccagtgaaa

SEQ ID NO: 76940 - DNA, 60 bp, Artificial
  Synthetic oligonucleotide
gaccatactcaatacagaacagagtcactgcagaatagaatacagatagacccagtgaaa

SEQ ID NO: 76941 - DNA, 60 bp, Artificial
  Synthetic oligonucleotide
ggggaaattccaaacagcagcacaacgagcaatgatggaccaggtgagagagagccggaa

SEQ ID NO: 76942 - DNA, 60 bp, Artificial
  Synthetic oligonucleotide
ggggaagttccaaacagcagcacaacgagcaatgatggaccaggtgagagaaagccggaa

SEQ ID NO: 76943 - DNA, 60 bp, Artificial
  Synthetic oligonucleotide
ccgagtaatggtatcacctctggctgtgacatggtggaataggaatggaccaacaacaag

SEQ ID NO: 76944 - DNA, 60 bp, Artificial
  Synthetic oligonucleotide
ccgcaaatgacgaggtcatacaaaaacacaaggaaagacccagctctgataatctgggga

SEQ ID NO: 76945 - DNA, 60 bp, Artificial
  Synthetic oligonucleotide
cagatgactaagtcatacaaaaacacaaggaaagacccagctctgataatatggggaatc

SEQ ID NO: 76946 - DNA, 56 bp, Artificial
  Synthetic oligonucleotide
aaaacacaaggaaagacccagctctgataatatggggaatccaccattccggatca

SEQ ID NO: 76947 - DNA, 53 bp, Artificial
  Synthetic oligonucleotide
aaaacacaaggaaagacccagctctgataatctggggaatccatcattctgga

SEQ ID NO: 76948 - DNA, 60 bp, Artificial
  Synthetic oligonucleotide
gaataccagcaggagcagcagagtgcggtggatgttgacgatggtcattttgtcaacata

SEQ ID NO: 76949 - DNA, 60 bp, Artificial
  Synthetic oligonucleotide
gaataccagcaggagcagcagagtgcagtggatgttgacgatggtcattttgtcaacata

SEQ ID NO: 76950 - DNA, 60 bp, Artificial
  Synthetic oligonucleotide
caccaaatcatgagggaatacaagcaggagtagatagattctataggacctgcaagctag

SEQ ID NO: 76951 - DNA, 60 bp, Artificial
  Synthetic oligonucleotide
gggttgacataaaccctggacacgcagacctcagtgccaaagaggcacaggatgtaatca

SEQ ID NO: 76952 - DNA, 60 bp, Artificial
  Synthetic oligonucleotide
gagggttgacataaaccctggacacgcagacctcagtgccaaagaggcacaggatgtaat

SEQ ID NO: 76953 - DNA, 60 bp, Artificial
  Synthetic oligonucleotide
ggggcattcatagcccctgacagggcaagtttctttaggggagaatcactaggagtccag

SEQ ID NO: 76954 - DNA, 60 bp, Artificial
  Synthetic oligonucleotide
ggcattcatagcccctgacagggcaagtttctttaggggagaatcaataggagtccagag

SEQ ID NO: 76955 - DNA, 60 bp, Artificial
  Synthetic oligonucleotide
gtgcaacattctcaaagggaaattccaaacagcagcacaacgagcaatgatggaccaggt

SEQ ID NO: 76956 - DNA, 60 bp, Artificial
  Synthetic oligonucleotide
aacatcctcaaggggaagttccaaacagcagcacaacgagcaatgatggaccaggtgaga

SEQ ID NO: 76957 - DNA, 60 bp, Artificial
  Synthetic oligonucleotide
ttccagcgcaaaatgccataagcaccacattcccatatactggagatcctccatacagcc

SEQ ID NO: 76958 - DNA, 60 bp, Artificial
  Synthetic oligonucleotide
gaccaggcaattatggataagaacatcatactgaaagcgaacttcagtgtgatctttgat

SEQ ID NO: 76959 - DNA, 55 bp, Artificial
  Synthetic oligonucleotide
gaccaggcaattatggataagaacatcatactgaaagcgaacttcagtgtgatct

SEQ ID NO: 76960 - DNA, 60 bp, Artificial
  Synthetic oligonucleotide
gaccaggcaattatggataagaacatcatactgaaagcgaacttcagtgtggtcttcgat

SEQ ID NO: 76961 - DNA, 60 bp, Artificial
  Synthetic oligonucleotide
acaggctcatggcctgatggggcgaacatcaatttcatgcctatataagctttcgcaatt

SEQ ID NO: 76962 - DNA, 60 bp, Artificial
  Synthetic oligonucleotide
caggctcatggcctgatggggcgaacatcaatttcatgcctatataagctttcgcaattt

SEQ ID NO: 76963 - DNA, 60 bp, Artificial
  Synthetic oligonucleotide
gccatggaacgggaacaggatacaccatggacacagtcaacagaacacatcaatattcag

SEQ ID NO: 76964 - DNA, 60 bp, Artificial
  Synthetic oligonucleotide
gaccaggcgattatgaataagaacatcatactgaaagcgaacttcagtgtgattttcgat

SEQ ID NO: 76965 - DNA, 60 bp, Artificial
  Synthetic oligonucleotide
atggaccaggcgatcatggataagaacatcatactgaaagcgaacttcagtgtggtcttc

SEQ ID NO: 76966 - DNA, 60 bp, Artificial
  Synthetic oligonucleotide
ccatgatgggaaagcatggttgcacgtttgtgtcactggggatgatagaaatgcgaccgc

SEQ ID NO: 76967 - DNA, 60 bp, Artificial
  Synthetic oligonucleotide
tattcgagaaattcttccctagcagttcatacaggagaccggttgggatttccagcatgg

SEQ ID NO: 76968 - DNA, 60 bp, Artificial
  Synthetic oligonucleotide
aagagtacatgaaggatatgaggaattcacaatggttgggcgaagggcaacagccatcct

SEQ ID NO: 76969 - DNA, 60 bp, Artificial
  Synthetic oligonucleotide
taagagtacacgaaggatatgaggaattcacaatggttgggcgaagagcaacagccatta

SEQ ID NO: 76970 - DNA, 60 bp, Artificial
  Synthetic oligonucleotide
tttctgattctaggcaaagaagacaaaagatatgggccagcacttagcatcaacgagctg

SEQ ID NO: 76971 - DNA, 60 bp, Artificial
  Synthetic oligonucleotide
ggatatgaggaattcacaatggttgggcgaagagcaacagccattataaggaaagcaacc

SEQ ID NO: 76972 - DNA, 60 bp, Artificial
  Synthetic oligonucleotide
cccaaaagtacatgggcaggagtagacaccagcagtggggtaacaaaagcttgtccttat

SEQ ID NO: 76973 - DNA, 60 bp, Artificial
  Synthetic oligonucleotide
tcgccgagatcaaaagtccctaaaaggaagaggcagcactcttggtctggacatcgagac

SEQ ID NO: 76974 - DNA, 60 bp, Artificial
  Synthetic oligonucleotide
aacagcttcgagcaaataacgttcttgcaagcattgcaactcttacttgaagttgagagt

SEQ ID NO: 76975 - DNA, 60 bp, Artificial
  Synthetic oligonucleotide
agcttcgagcaaataacgttcttgcaagcattgcaactcttacttgaagttgagagtgag

SEQ ID NO: 76976 - DNA, 60 bp, Artificial
  Synthetic oligonucleotide
aggatgcagttctcctccttgactgtgaatgtgagaggatcagggatgaggatactggtg

SEQ ID NO: 76977 - DNA, 60 bp, Artificial
  Synthetic oligonucleotide
ggactccaacacgataacctcgtttcaggtagattgttatctatggcacataagaaagct

SEQ ID NO: 76978 - DNA, 60 bp, Artificial
  Synthetic oligonucleotide
gctcaaaatgccataagcaccacattcccatatactggagaccctccatacagccatgga

SEQ ID NO: 76979 - DNA, 60 bp, Artificial
  Synthetic oligonucleotide
tttaggatttgtgttcacgctcaccgtgcccagtgagcgaggactgcagcgtagacgctt

SEQ ID NO: 76980 - DNA, 60 bp, Artificial
  Synthetic oligonucleotide
tagtcacattagcccattgtcaggaagtgctcagcatatagaggaatgttcctgttatcc

SEQ ID NO: 76981 - DNA, 60 bp, Artificial
  Synthetic oligonucleotide
cgattttcactggctactccttgatcccaatgacacagtgaccttcactttcaatggggc

SEQ ID NO: 76982 - DNA, 60 bp, Artificial
  Synthetic oligonucleotide
tgcgtttgcatcaatggaacttgcacagtagtaatgactgatggaagtgcatcaggaaag

SEQ ID NO: 76983 - DNA, 60 bp, Artificial
  Synthetic oligonucleotide
gagaccctccatacagccatggaacgggaacaggatacaccatggacacagtcaacagaa

SEQ ID NO: 76984 - DNA, 60 bp, Artificial
  Synthetic oligonucleotide
gagatcctccatacagccatggaacgggaacaggatacaccatggacacagtcaacagaa

SEQ ID NO: 76985 - DNA, 60 bp, Artificial
  Synthetic oligonucleotide
caaggggacatataccaatacaggctctcagccaatcttatatttctggggtgtgcacca

SEQ ID NO: 76986 - DNA, 60 bp, Artificial
  Synthetic oligonucleotide
gggaacatataccaatacaggctctcagccaatcttatatttctggggtgtgcaccatcc

SEQ ID NO: 76987 - DNA, 60 bp, Artificial
  Synthetic oligonucleotide
ggggacatataccaatacaggctctcagccaatcttatatttctggggtgtgcaccatcc

SEQ ID NO: 76988 - DNA, 60 bp, Artificial
  Synthetic oligonucleotide
ccagccctgcacctcggtatattactgatatgagcatagaggaaataagcagggaatggt

SEQ ID NO: 76989 - DNA, 60 bp, Artificial
  Synthetic oligonucleotide
cagatggctgattgcagaatgcagaaacatattaaccaaaactgagaacagcttcgagca

SEQ ID NO: 76990 - DNA, 60 bp, Artificial
  Synthetic oligonucleotide
cctttgacatgagtaacgatggatcttatttcttcggagacaatgcagaggagtatgaca

SEQ ID NO: 76991 - DNA, 60 bp, Artificial
  Synthetic oligonucleotide
agctcatacaggagaccggttgggatttccagcatggtggaggccatggtgtctagggcc

SEQ ID NO: 76992 - DNA, 60 bp, Artificial
  Synthetic oligonucleotide
aaatctaggtgtatatcagatccttgctatttatagtacggtatcgagcagtctagtttt

SEQ ID NO: 76993 - DNA, 60 bp, Artificial
  Synthetic oligonucleotide
ttttagggttcgtgttcacgctcaccgtgcccagtgagcgaggactgcagcgtagacgct

SEQ ID NO: 76994 - DNA, 60 bp, Artificial
  Synthetic oligonucleotide
gcatgtgtgcatgacagggaacgataatgatgcaagtgcccagataatatatgcagggaa

SEQ ID NO: 76995 - DNA, 60 bp, Artificial
  Synthetic oligonucleotide
ggcctttcaagcctccactaccgctgtgccccttcagaggattcttcccttttcacaagg

SEQ ID NO: 76996 - DNA, 60 bp, Artificial
  Synthetic oligonucleotide
aaggcctttcaagcctccactaccgctgtgccccttcagaggattcttcccttttcacaa

SEQ ID NO: 76997 - DNA, 60 bp, Artificial
  Synthetic oligonucleotide
ctgtcacagatggccctgctgctaatagtgcagatcacagggtttactggatacgagagg

SEQ ID NO: 76998 - DNA, 60 bp, Artificial
  Synthetic oligonucleotide
gaagataatagcaatcggggtagtgaataccactctgtcaacaatagcccttctcatcgg

SEQ ID NO: 76999 - DNA, 60 bp, Artificial
  Synthetic oligonucleotide
gaagataataacaatcggggtagtgaataccactctgtcaacaatagcccttctcattgg

SEQ ID NO: 77000 - DNA, 60 bp, Artificial
  Synthetic oligonucleotide
atgaatccaaatcagaagataatagcaatcggggtagtgaataccactctgtcaacaata

SEQ ID NO: 77001 - DNA, 60 bp, Artificial
  Synthetic oligonucleotide
atgaatccaaatcagaagataataacaatcggggtagtgaataccactctgtcaacaata

SEQ ID NO: 77002 - DNA, 60 bp, Artificial
  Synthetic oligonucleotide
gaagcgaaaaggcctttcaagcctccactaccgctgtgccccttcagaggattcttccct

SEQ ID NO: 77003 - DNA, 60 bp, Artificial
  Synthetic oligonucleotide
ctgaagcgaaaaggcctttcaagcctccactaccgctgtgccccttcagaggattcttcc

SEQ ID NO: 77004 - DNA, 60 bp, Artificial
  Synthetic oligonucleotide
ctgaagcagaaaggcctttcaagtctccactaccgctgtgccccttcagaggattcttcc

SEQ ID NO: 77005 - DNA, 60 bp, Artificial
  Synthetic oligonucleotide
gaagataataacaatcggggtagtgaataccactctgtcaacaatagcccttctcatcgg

SEQ ID NO: 77006 - DNA, 60 bp, Artificial
  Synthetic oligonucleotide
caacaacgagactatactggaaacagggtatgtgtgcagcaaatttcactcagacacccc

SEQ ID NO: 77007 - DNA, 60 bp, Artificial
  Synthetic oligonucleotide
caacaacgagactatactggaaacagggtatgtatgcagtaaatttcactcagacacccc

SEQ ID NO: 77008 - DNA, 60 bp, Artificial
  Synthetic oligonucleotide
tgtttactgtatatgtagggacaattggaagggttctaacagaccttggatgagaatcaa

SEQ ID NO: 77009 - DNA, 60 bp, Artificial
  Synthetic oligonucleotide
tgagaatcaacaacgagactatactggaaacagggtatgtatgcagtaaatttcactcag

SEQ ID NO: 77010 - DNA, 60 bp, Artificial
  Synthetic oligonucleotide
tgagaatcaacaacgagactatactggaaacagggtatgtgtgcagcaaatttcactcag

SEQ ID NO: 77011 - DNA, 60 bp, Artificial
  Synthetic oligonucleotide
gctggtcctttgctctcgcacaaggagcattgctagggactaaacatagcaatgggacca

SEQ ID NO: 77012 - DNA, 60 bp, Artificial
  Synthetic oligonucleotide
aggggtggattaactctcccaaccatgccaaatcaattacacaaacactggtgtccaaca

SEQ ID NO: 77013 - DNA, 60 bp, Artificial
  Synthetic oligonucleotide
aggggtggatcaactctcctaaccatgccaaatcaattacacaaacactggtgtccaaca

SEQ ID NO: 77014 - DNA, 60 bp, Artificial
  Synthetic oligonucleotide
ggcctttcaagtctccactaccgctgtgccccttcagaggattcttcccttttcacaagg

SEQ ID NO: 77015 - DNA, 60 bp, Artificial
  Synthetic oligonucleotide
ctggtcctttgccctcgcacaaggagcattgctagggactaaacatagcaatgggaccat

SEQ ID NO: 77016 - DNA, 60 bp, Artificial
  Synthetic oligonucleotide
gagtggatgcatgtgtgcatgacagggaacgataatgatgcaagtgcccagataatatat

SEQ ID NO: 77017 - DNA, 60 bp, Artificial
  Synthetic oligonucleotide
ctcctaaccatgccaaatcaattacacaaacactggtgtccaacaatgactggtcaggct

SEQ ID NO: 77018 - DNA, 60 bp, Artificial
  Synthetic oligonucleotide
ctcccaaccatgccaaatcaattacacaaacactggtgtccaacaatgattggtcaggct

SEQ ID NO: 77019 - DNA, 60 bp, Artificial
  Synthetic oligonucleotide
ccatgccaaatcaattacacaaacactggtgtccaacaacgattggtcaggctattcagg

SEQ ID NO: 77020 - DNA, 60 bp, Artificial
  Synthetic oligonucleotide
gccaaatcaattacacaaacactggtgtccaacaacgattggtcaggctattcaggtagc

SEQ ID NO: 77021 - DNA, 51 bp, Artificial
  Synthetic oligonucleotide
ggatcgggaaattggccggatggttctaacattgggtttatgcccaagtaa

SEQ ID NO: 77022 - DNA, 60 bp, Artificial
  Synthetic oligonucleotide
gttgttgctgtcacagatggccctgctgctaatagtgcggatcacagggtttactggata

SEQ ID NO: 77023 - DNA, 60 bp, Artificial
  Synthetic oligonucleotide
tatttactgtatatgtagggacaattggaagggttctaacagaccttggatgagaatcaa

SEQ ID NO: 77024 - DNA, 60 bp, Artificial
  Synthetic oligonucleotide
tggggagttcatcactctgaatcggttagcgagcagaccaaactctatggaagtggaaac

SEQ ID NO: 77025 - DNA, 60 bp, Artificial
  Synthetic oligonucleotide
tctgccgacatgagcattggagtgacagtgataaagaacaacatgataaacaatgacctt

SEQ ID NO: 77026 - DNA, 60 bp, Artificial
  Synthetic oligonucleotide
gagatcctccatacagccatggaacgggaacaggatacaccatggacacagtcagtagaa

SEQ ID NO: 77027 - DNA, 60 bp, Artificial
  Synthetic oligonucleotide
gagatcctccatacagccatggaacgggaacaggatacactatggacacagtcaacagga

SEQ ID NO: 77028 - DNA, 60 bp, Artificial
  Synthetic oligonucleotide
cataagcaccacattcccatatactggggatcctccatacagccatggaacgggaacagg

SEQ ID NO: 77029 - DNA, 60 bp, Artificial
  Synthetic oligonucleotide
gcaccacattcccatacactggagatcctccatacagccatggaacgggaacaggataca

SEQ ID NO: 77030 - DNA, 60 bp, Artificial
  Synthetic oligonucleotide
cataagcaccacattcccatatactggagaccctccatacagccatggaacgggaacagg

SEQ ID NO: 77031 - DNA, 51 bp, Artificial
  Synthetic oligonucleotide
tagcccattgtcaggaagtgctcagcatatagaggaatgttcctgttatcc

SEQ ID NO: 77032 - DNA, 60 bp, Artificial
  Synthetic oligonucleotide
gcgtacagcccacattctctgtgcagagaaacctcccattcgagagagcaaccattatgg

SEQ ID NO: 77033 - DNA, 56 bp, Artificial
  Synthetic oligonucleotide
tacttgaagtggagcaagagataagaactttctcgtttcagcttatttaataataa

SEQ ID NO: 77034 - DNA, 60 bp, Artificial
  Synthetic oligonucleotide
aaaatcagtgatgctggaaaatctgggagtatatcaaatccttgctatttatagtacggt

SEQ ID NO: 77035 - DNA, 60 bp, Artificial
  Synthetic oligonucleotide
cccatatactggagatcctccatacagccatggaacgggaacaggatacactatggacac

SEQ ID NO: 77036 - DNA, 60 bp, Artificial
  Synthetic oligonucleotide
agcaccacattcccatatactggagatcctccatacagccatggaacgggaacaggatac

SEQ ID NO: 77037 - DNA, 60 bp, Artificial
  Synthetic oligonucleotide
aatgccataagcaccacattcccatatactggagatcctccatacagccatggaacggga

SEQ ID NO: 77038 - DNA, 60 bp, Artificial
  Synthetic oligonucleotide
tgccataagcaccacattcccatatactggagatcctccatacagccatggaacgggaac

SEQ ID NO: 77039 - DNA, 60 bp, Artificial
  Synthetic oligonucleotide
cattcccatatactggagatcctccatacagccatggaacgggaacaggatacaccatgg

SEQ ID NO: 77040 - DNA, 60 bp, Artificial
  Synthetic oligonucleotide
cccatatactggagatcctccatacagccatggaacgggaacaggatacaccatggatac

SEQ ID NO: 77041 - DNA, 60 bp, Artificial
  Synthetic oligonucleotide
aaatgccataagcaccacattcccatatactggagatcctccatacagccatggaacggg

SEQ ID NO: 77042 - DNA, 60 bp, Artificial
  Synthetic oligonucleotide
cataaacaggacaggaacatttgaattcacaagctttttctaccgctatggatttgtagc

SEQ ID NO: 77043 - DNA, 54 bp, Artificial
  Synthetic oligonucleotide
aatgctgtggatgttgacgatggtcattttgtcaacatagagctggagtaaaaa

SEQ ID NO: 77044 - DNA, 54 bp, Artificial
  Synthetic oligonucleotide
agtgctgtggatgttgacgatggtcattttgtcaacatagagctggagtaaaaa

SEQ ID NO: 77045 - DNA, 55 bp, Artificial
  Synthetic oligonucleotide
agtgctgtggatgttgacgatggtcattttgtcaacatagagctggagtaaaaaa

SEQ ID NO: 77046 - DNA, 55 bp, Artificial
  Synthetic oligonucleotide
gaccaggcgattatgaataagaacatcatactgaaagcgaacttcagtgtgattt

SEQ ID NO: 77047 - DNA, 53 bp, Artificial
  Synthetic oligonucleotide
ccaggcgatcatggaaaagaacatcatactgaaagcgaacttcagtgtgatct

SEQ ID NO: 77048 - DNA, 60 bp, Artificial
  Synthetic oligonucleotide
catggataagaacatcatactgaaagcgaacttcagtgtggtcttcgatcggctggagac

SEQ ID NO: 77049 - DNA, 60 bp, Artificial
  Synthetic oligonucleotide
ttcaggcacttagggacaacctggaacctggaacattcgatcttggagggctatatgaag

SEQ ID NO: 77050 - DNA, 60 bp, Artificial
  Synthetic oligonucleotide
ctcattgttcaggcacttagggacaacctggaacctggtaccttcgatcttgggggacta

SEQ ID NO: 77051 - DNA, 60 bp, Artificial
  Synthetic oligonucleotide
cttctcattgttcaggcacttagggacaacctggaacctggaaccttcgatcttgggggg

SEQ ID NO: 77052 - DNA, 58 bp, Artificial
  Synthetic oligonucleotide
cttctcattgttcaggcacttagggacaacctggaacctggaaccttcgatcttgggg

SEQ ID NO: 77053 - DNA, 60 bp, Artificial
  Synthetic oligonucleotide
ttctcattgttcaggcacttagggacaacctggaacctggaaccttcaatcttggagggc

SEQ ID NO: 77054 - DNA, 60 bp, Artificial
  Synthetic oligonucleotide
tctcattgttcaggcacttagggacaacctggaacctggaaccttcgatctcggagggct

SEQ ID NO: 77055 - DNA, 55 bp, Artificial
  Synthetic oligonucleotide
ctcattgttcaggcacttagggacaacctggaacctggtaccttcgatcttgggg

SEQ ID NO: 77056 - DNA, 60 bp, Artificial
  Synthetic oligonucleotide
cattgttcaggcacttagggacaacctggaacctggaaccttcgatcttggggggctata

SEQ ID NO: 77057 - DNA, 60 bp, Artificial
  Synthetic oligonucleotide
cattgttcaggcacttagggacaacctggaacctggaaccttcgaccttggagggctata

SEQ ID NO: 77058 - DNA, 60 bp, Artificial
  Synthetic oligonucleotide
cttctcattgttcaggcacttagggacaacctggaacctggaactttcgatcttggaggg

SEQ ID NO: 77059 - DNA, 60 bp, Artificial
  Synthetic oligonucleotide
gctactcattgttcaggcacttagggacaacctggaacctggtactttcgatcttggagg

SEQ ID NO: 77060 - DNA, 60 bp, Artificial
  Synthetic oligonucleotide
agcgcaaaatgccataagcaccacattcccatatactggagatcctccatacagccatgg

SEQ ID NO: 77061 - DNA, 55 bp, Artificial
  Synthetic oligonucleotide
ttcacgctcaccgtgcccagtgagcgaggactgcagcgtagacgctttgtccaga

SEQ ID NO: 77062 - DNA, 54 bp, Artificial
  Synthetic oligonucleotide
gatcattgcaatgggtctttggatgtgttcaaatggctcaatgcaatgcaggat

SEQ ID NO: 77063 - DNA, 60 bp, Artificial
  Synthetic oligonucleotide
catgagtaacgaaggatcttatttcttcggagacaatgcaaaggagtatgacaattgagg

SEQ ID NO: 77064 - DNA, 60 bp, Artificial
  Synthetic oligonucleotide
gtggaacttcaggtacctatggaacaggctcatggcctgatggggcaaatatcaacttca

SEQ ID NO: 77065 - DNA, 60 bp, Artificial
  Synthetic oligonucleotide
tctggaattaatgaatcggctgacatgagcattggagtaacagtgataaagaacaacatg

SEQ ID NO: 77066 - DNA, 60 bp, Artificial
  Synthetic oligonucleotide
tgtaagccctctctggataggagaatgccccaaatatgtgaagagtgaaagtttgagact

SEQ ID NO: 77067 - DNA, 53 bp, Artificial
  Synthetic oligonucleotide
cctgatggggcgaatatcaatttcatgcctatataagctttcgcaattttaga

SEQ ID NO: 77068 - DNA, 53 bp, Artificial
  Synthetic oligonucleotide
tgcaacagtatgtttcctcatgcagattgccatcctagcaacgactgtaacac

SEQ ID NO: 77069 - DNA, 54 bp, Artificial
  Synthetic oligonucleotide
ttgcaacagtatgtttcctcatgcagattgccatcctagcaacgactgtaacac

SEQ ID NO: 77070 - DNA, 57 bp, Artificial
  Synthetic oligonucleotide
atgagtcttctaaccgaggtcgaaacgtacgttttctctatcatcccatcaggcccc

SEQ ID NO: 77071 - DNA, 60 bp, Artificial
  Synthetic oligonucleotide
atgagccttctaaccgaggtcgaaacgtacgttctctctatcattccgtcaggccccctc

SEQ ID NO: 77072 - DNA, 60 bp, Artificial
  Synthetic oligonucleotide
atgtttcatacttctggccattgcaatgggccttgttttcatgtgtgtgaaaaatggaaa

SEQ ID NO: 77073 - DNA, 53 bp, Artificial
  Synthetic oligonucleotide
atgtttcatacttctggccattgcaatgggccttgttttcatgtgtgtgaaaa

SEQ ID NO: 77074 - DNA, 60 bp, Artificial
  Synthetic oligonucleotide
ggggcatcatgtttcatacttctggccattgcaatgggccttgtcttcatgtgtgtgaag

SEQ ID NO: 77075 - DNA, 60 bp, Artificial
  Synthetic oligonucleotide
cggggcatcatgtttcatacttctggccattgcaatgggccttgtcttcatgtgtgtgaa

SEQ ID NO: 77076 - DNA, 60 bp, Artificial
  Synthetic oligonucleotide
gtttcatacttctggccattgcaatgggccttgtcttcatgtgtgtgaagaacggaaaca

SEQ ID NO: 77077 - DNA, 60 bp, Artificial
  Synthetic oligonucleotide
tgtttcatacttctggccattgcaatgggccttgtcttcatatgtgtgaagaacggaaac

SEQ ID NO: 77078 - DNA, 60 bp, Artificial
  Synthetic oligonucleotide
aatgcgacctattgctcggtgatcaaagctggtcatatatagtggaaagacctactgctc

SEQ ID NO: 77079 - DNA, 60 bp, Artificial
  Synthetic oligonucleotide
gcgacctattgctcggtgatcaaagctggtcatatatagtggaaagacctactgctcaaa

SEQ ID NO: 77080 - DNA, 60 bp, Artificial
  Synthetic oligonucleotide
atcctcatcggtggatttgaatggaatgataactcaattcgagcgtctgaaaatatacag

SEQ ID NO: 77081 - DNA, 60 bp, Artificial
  Synthetic oligonucleotide
gtgctgcaatctattcgagaaattcttccctagcagttcatacaggagaccggtgggaat

SEQ ID NO: 77082 - DNA, 60 bp, Artificial
  Synthetic oligonucleotide
gtgttgcaatctattcgagaaattcttccctagcagttcatacaggagaccggtgggaat

SEQ ID NO: 77083 - DNA, 60 bp, Artificial
  Synthetic oligonucleotide
aatccggcaacgatgtatggttgggtagaacagtgtcaactagtggtagatcgggctttg

SEQ ID NO: 77084 - DNA, 60 bp, Artificial
  Synthetic oligonucleotide
gggaaggataatgaagtatgaagatgtccccaaaacaaagatacaacacttagaagagtg

SEQ ID NO: 77085 - DNA, 60 bp, Artificial
  Synthetic oligonucleotide
tcgggctttgaaatcatcaaagttacagaggggtggattaactctcctaaccatgccaaa

SEQ ID NO: 77086 - DNA, 60 bp, Artificial
  Synthetic oligonucleotide
atacgagagggaaggataatgaagtatgaagatgtccccaaaacaaagatacaacactta

SEQ ID NO: 77087 - DNA, 60 bp, Artificial
  Synthetic oligonucleotide
aacagtgtcaactagtggtagatcgggctttgaaatcatcaaagttacagaggggtggat

SEQ ID NO: 77088 - DNA, 60 bp, Artificial
  Synthetic oligonucleotide
cagatggccctgctgctaatagtgcagatcacagggtttactggatacgagagggaagga

SEQ ID NO: 77089 - DNA, 60 bp, Artificial
  Synthetic oligonucleotide
ggtttcaaatccggcaacgatgtatggttgggtagaacagtgtcaactagtggtagatcg

SEQ ID NO: 77090 - DNA, 60 bp, Artificial
  Synthetic oligonucleotide
ggagtgaagggatttggtttcaaatccggcaacgatgtatggttgggtagaacagtgtca

SEQ ID NO: 77091 - DNA, 60 bp, Artificial
  Synthetic oligonucleotide
gtgcccagataatatatgcaggaagaatgacagactccattaaatcatggagaaaggaca

SEQ ID NO: 77092 - DNA, 60 bp, Artificial
  Synthetic oligonucleotide
gtggtagatcgggctttgaaatcatcaaagttacagaggggtggattaactctcccaacc

SEQ ID NO: 77093 - DNA, 60 bp, Artificial
  Synthetic oligonucleotide
tttcactcagacacccccaggccagctgacccctcaacggtatcatgtgactccccaagc

SEQ ID NO: 77094 - DNA, 51 bp, Artificial
  Synthetic oligonucleotide
gctcaccgtgcccagtgagcgaggactgcagcgtagacgctttgtccagag

SEQ ID NO: 77095 - DNA, 53 bp, Artificial
  Synthetic oligonucleotide
gctcaccgtgcccagtgagcgaggactgcagcgtagacgctttgtccagaatg

SEQ ID NO: 77096 - DNA, 60 bp, Artificial
  Synthetic oligonucleotide
cagccggctgcaactgcattagccaatactatagaggtcttcagatcgaacggtctgaca

SEQ ID NO: 77097 - DNA, 60 bp, Artificial
  Synthetic oligonucleotide
cagccagctgcaactgcattagccaatactatagaggtcttcagatcgaacggtctgaca

SEQ ID NO: 77098 - DNA, 60 bp, Artificial
  Synthetic oligonucleotide
cacaagaggattgcatgatcaaggcagttcggggtgatttgaactttgtcaatagggcaa

SEQ ID NO: 77099 - DNA, 60 bp, Artificial
  Synthetic oligonucleotide
gtttcgagcagataactttcttgcaggcattgcaactcttacttgaagttgagagtgaga

SEQ ID NO: 77100 - DNA, 60 bp, Artificial
  Synthetic oligonucleotide
aaggttgttcacattagcccattgtcaggaagtgctcagcatatagaggaatgttcctgt

SEQ ID NO: 77101 - DNA, 60 bp, Artificial
  Synthetic oligonucleotide
attcgtcatcaatgatgtgggagatcaatggtcctgagtcagtgctggtcaatacttatc

SEQ ID NO: 77102 - DNA, 60 bp, Artificial
  Synthetic oligonucleotide
ttactcatcatcaatgatgtgggagatcaatggtcctgaatcagtgttggtcaatactta

SEQ ID NO: 77103 - DNA, 60 bp, Artificial
  Synthetic oligonucleotide
ttactcatcatcaatgatgtgggagatcaatggtcctgaatcagtgttagtcaatactta

SEQ ID NO: 77104 - DNA, 60 bp, Artificial
  Synthetic oligonucleotide
catcaatgatgtgggagatcaatggtcctgagtcagtgttggtcaatacttaccagtgga

SEQ ID NO: 77105 - DNA, 60 bp, Artificial
  Synthetic oligonucleotide
ggcaggaaataaaatcagtgatgctggaaaatctaggggtataccaaatccttgctattt

SEQ ID NO: 77106 - DNA, 60 bp, Artificial
  Synthetic oligonucleotide
ggcaggaaataaaatcagtgatgctggaaaatctaggagtataccaaatccttgctattt

SEQ ID NO: 77107 - DNA, 60 bp, Artificial
  Synthetic oligonucleotide
ggcaggaaataaaatcagtgatgctggaaaatctgggagtataccaaatccttgccattt

SEQ ID NO: 77108 - DNA, 60 bp, Artificial
  Synthetic oligonucleotide
ataggcaggaaataaaatcagtgatgctggaaaatctaggagtataccaaatccttgcta

SEQ ID NO: 77109 - DNA, 60 bp, Artificial
  Synthetic oligonucleotide
cattggttaccatgcaaacaactcgacaacacaagtggacacaatattagagaagaatgt

SEQ ID NO: 77110 - DNA, 60 bp, Artificial
  Synthetic oligonucleotide
accatgcaaataactcgacaacacaagtggacacaatattagagaagaatgtgacagtga

SEQ ID NO: 77111 - DNA, 60 bp, Artificial
  Synthetic oligonucleotide
ggcaggaaataaaatcagtgatgctggaaaatctgggagtataccaaatccttgctattt

SEQ ID NO: 77112 - DNA, 60 bp, Artificial
  Synthetic oligonucleotide
ggacaggtatggtagacggatggtacggataccaccatgaaaattcacaggggtctggtt

SEQ ID NO: 77113 - DNA, 60 bp, Artificial
  Synthetic oligonucleotide
cgacaacacaagtggacacaatattagagaagaatgtgacagtgacgcactcagtagagc

SEQ ID NO: 77114 - DNA, 60 bp, Artificial
  Synthetic oligonucleotide
gcaaacaactcgacaacacaagtggacacaatattagagaagaatgtgacggtgacacac

SEQ ID NO: 77115 - DNA, 60 bp, Artificial
  Synthetic oligonucleotide
gacaacacaagtggacacaatattagagaagaatgtgacggtgacacactcagtggagct

SEQ ID NO: 77116 - DNA, 60 bp, Artificial
  Synthetic oligonucleotide
ataggcaggaaataaaatcagtgatgctggaaaatctgggagtataccaaatccttgcta

SEQ ID NO: 77117 - DNA, 60 bp, Artificial
  Synthetic oligonucleotide
ggacaggtatggtagacggatggtacggataccatcatgaaaattcacaaggatctggtt

SEQ ID NO: 77118 - DNA, 60 bp, Artificial
  Synthetic oligonucleotide
ataggcaagaaataaaatcagtgatgctggaaaatctgggagtataccaaatccttgcta

SEQ ID NO: 77119 - DNA, 60 bp, Artificial
  Synthetic oligonucleotide
ataggcaggaaataaaatcagtgatgctggaaaatctgggagtataccaaatccttgcca

SEQ ID NO: 77120 - DNA, 60 bp, Artificial
  Synthetic oligonucleotide
ataggcaggaaataaaatcagtgatgctggaaaatctaggggtataccaaatccttgcta

SEQ ID NO: 77121 - DNA, 60 bp, Artificial
  Synthetic oligonucleotide
ggatctgcattggttaccatgcaaacaactcgacaacacaagtggacacaatattagaga

SEQ ID NO: 77122 - DNA, 60 bp, Artificial
  Synthetic oligonucleotide
caatgctgctttcccgcagatgactaagtcatacagaaacacaaggaagggtccagctct

SEQ ID NO: 77123 - DNA, 60 bp, Artificial
  Synthetic oligonucleotide
tacttctggccattgcaatgggccttgttttcatatgtgtgaagaatggaaacatgcggt

SEQ ID NO: 77124 - DNA, 60 bp, Artificial
  Synthetic oligonucleotide
gtttaaagatgagtcttctaaccgaggtcgaaacgtacgttctctctatcatcccatcag

SEQ ID NO: 77125 - DNA, 60 bp, Artificial
  Synthetic oligonucleotide
atgagtcttctaaccgaggtcgaaacgtacgttttctctatcatcccatcaggccccctc

SEQ ID NO: 77126 - DNA, 60 bp, Artificial
  Synthetic oligonucleotide
gatactttggtttagcttcggggcatcatgtttcatacttctggccattgcaatgggcct

SEQ ID NO: 77127 - DNA, 60 bp, Artificial
  Synthetic oligonucleotide
ggtttagcttcggggcatcatgtttcatacttctggccattgcaatgggccttgtcttca

SEQ ID NO: 77128 - DNA, 60 bp, Artificial
  Synthetic oligonucleotide
acaggagaccggttggaatttccagcatggtggaggccatggtttctagggcccgaattg

SEQ ID NO: 77129 - DNA, 60 bp, Artificial
  Synthetic oligonucleotide
ggaaaatctgggagtatatcaaatccttgctatttatagtacggtatcgagcagtctggt

SEQ ID NO: 77130 - DNA, 51 bp, Artificial
  Synthetic oligonucleotide
tcacaagctttttctatcgctatggatttgtagccaactttagcatggaat

SEQ ID NO: 77131 - DNA, 60 bp, Artificial
  Synthetic oligonucleotide
atccttcggcagaatccaacagaggaacaagccgtggacatatgcaaggcagcaatgggc

SEQ ID NO: 77132 - DNA, 60 bp, Artificial
  Synthetic oligonucleotide
tcacaagtgtgatgacgactgtatggccagtattagaaacaacacttatgatcacagcaa

SEQ ID NO: 77133 - DNA, 60 bp, Artificial
  Synthetic oligonucleotide
ttcacaagtgtgatgacgactgtatggccagtataaggaacaacacttatgatcatagca

SEQ ID NO: 77134 - DNA, 60 bp, Artificial
  Synthetic oligonucleotide
tttcacaagtgtgatgacgactgtatggccagtattagaaacaacacctatgatcaccgc

SEQ ID NO: 77135 - DNA, 60 bp, Artificial
  Synthetic oligonucleotide
tatttcacaagtgtgatgacgactgtatggccagtattagaaacaacacctatgatcacc

SEQ ID NO: 77136 - DNA, 60 bp, Artificial
  Synthetic oligonucleotide
tacagagaatagtttcgaacaaataacatttatgcaagccttacaactactgcttgaagt

SEQ ID NO: 77137 - DNA, 60 bp, Artificial
  Synthetic oligonucleotide
aagtgcttacgggcaacctccaaacattgaaaataagagtgcatgaggggtatgaggaat

SEQ ID NO: 77138 - DNA, 54 bp, Artificial
  Synthetic oligonucleotide
atgtgacctattgcttggtgatcaaagctggtcatatatagtggagagacccac

SEQ ID NO: 77139 - DNA, 57 bp, Artificial
  Synthetic oligonucleotide
ttcgagcagataacgttcttgcaagcattgcaactcttacttgaagttgagagtgag

SEQ ID NO: 77140 - DNA, 60 bp, Artificial
  Synthetic oligonucleotide
actcatcatcaatgatgtgggagatcaatggtcctgagtcagtgttggtcaatacttacc

SEQ ID NO: 77141 - DNA, 60 bp, Artificial
  Synthetic oligonucleotide
ggatgtttcgagatattccataagtgtgatgatcagtgtatggagagcataaggaacaac

SEQ ID NO: 77142 - DNA, 60 bp, Artificial
  Synthetic oligonucleotide
cccatatactggagaccctccatacagccatggaacgggaacaggatacacgatggacac

SEQ ID NO: 77143 - DNA, 60 bp, Artificial
  Synthetic oligonucleotide
cacgtttgtgtcactggggatgatagaaatgcaactgctagtttcatttataatgggatg

SEQ ID NO: 77144 - DNA, 60 bp, Artificial
  Synthetic oligonucleotide
cacgtttgtgtcactggggatgatagaaatgcaactgctagtttcatttatgatgggatg

SEQ ID NO: 77145 - DNA, 60 bp, Artificial
  Synthetic oligonucleotide
tgtcgcagtctcgcacacgcgagatactaacaaaaaccactgtggaccatatggccataa

SEQ ID NO: 77146 - DNA, 60 bp, Artificial
  Synthetic oligonucleotide
gcgactgctagtttcatttatgatgggatgcttgttgacagtattggttcatggtctcaa

SEQ ID NO: 77147 - DNA, 60 bp, Artificial
  Synthetic oligonucleotide
atggagtgataacacagttcgagtctctgaaactctacagagattcgcttggagaagcag

SEQ ID NO: 77148 - DNA, 60 bp, Artificial
  Synthetic oligonucleotide
aaagtaggatgcagttctcctccttgactgtgaatgtaagaggatcaggaatgaggatac

SEQ ID NO: 77149 - DNA, 60 bp, Artificial
  Synthetic oligonucleotide
attcaaatggcacaatacatgatagaatccctcatcgaacccttttgatgaatgagttgg

SEQ ID NO: 77150 - DNA, 60 bp, Artificial
  Synthetic oligonucleotide
atcaggttcttctttctatgcagagatgaagtggttgctgtcgaattcagacaatgcagc

SEQ ID NO: 77151 - DNA, 60 bp, Artificial
  Synthetic oligonucleotide
cctgaggcttgcaactggactaagaaatgttccacagattgaaactagaggacttttcgg

SEQ ID NO: 77152 - DNA, 60 bp, Artificial
  Synthetic oligonucleotide
cacagattgaaactagaggacttttcggagctatcgcaggttttattgaaggaggatgga

SEQ ID NO: 77153 - DNA, 60 bp, Artificial
  Synthetic oligonucleotide
ggaattacaaataaggtcaattccatcatcgacaaaatgaacacacaattcgaagctgtc

SEQ ID NO: 77154 - DNA, 60 bp, Artificial
  Synthetic oligonucleotide
taagggtgcacgaggggtatgaagaattcacaatggttgggagaagagcaacagctattc

SEQ ID NO: 77155 - DNA, 60 bp, Artificial
  Synthetic oligonucleotide
ctgtatcagaatggaccaggcgatcatggataagaacatcatactgaaagcgaacttcag

SEQ ID NO: 77156 - DNA, 60 bp, Artificial
  Synthetic oligonucleotide
gactatgaagggagactaatccaaaacagcataacaatagagagaatggttctctctgca

SEQ ID NO: 77157 - DNA, 60 bp, Artificial
  Synthetic oligonucleotide
taaccattgcaacagtatgtttcctcatgcagattgccatcctagcaacgactgtaacac

SEQ ID NO: 77158 - DNA, 60 bp, Artificial
  Synthetic oligonucleotide
ggagaatagattctgcagagtcttgaataaagcgccactggatctaatggactgcaccac

SEQ ID NO: 77159 - DNA, 60 bp, Artificial
  Synthetic oligonucleotide
gaaaaccagaaggagaatagattctgcagagtcttgaataaagcgccactggatctaatg

SEQ ID NO: 77160 - DNA, 60 bp, Artificial
  Synthetic oligonucleotide
aataaagcgccactggatctaatggactgcaccactgagggttggatccttggaaacccc

SEQ ID NO: 77161 - DNA, 60 bp, Artificial
  Synthetic oligonucleotide
agattctgcagagtcttgaataaagcgccactggatctaatggactgcaccactgagggt

SEQ ID NO: 77162 - DNA, 60 bp, Artificial
  Synthetic oligonucleotide
tggtatgcttacaagttcactagttccagaaacaagggagctatttttaaatcagacctc

SEQ ID NO: 77163 - DNA, 60 bp, Artificial
  Synthetic oligonucleotide
tggtatgcttacaagttcactagttccagaaataagggagctattttcaaatcagacctt

SEQ ID NO: 77164 - DNA, 60 bp, Artificial
  Synthetic oligonucleotide
tggtatgcttacaagttcactagttccagaaacaagggagctattttcaaatcagacctc

SEQ ID NO: 77165 - DNA, 60 bp, Artificial
  Synthetic oligonucleotide
tggtatgcttacaagttcactagttccagaaacaagggagctattttcaaatcagacctt

SEQ ID NO: 77166 - DNA, 60 bp, Artificial
  Synthetic oligonucleotide
ataaagtcaattcaatcattgacaaaatgaacacacagtttgaggcggtagagcatgagt

SEQ ID NO: 77167 - DNA, 60 bp, Artificial
  Synthetic oligonucleotide
gtatgcttacaagttcactagttccagaaacaagggagctattttcaaatcagaccttcc

SEQ ID NO: 77168 - DNA, 60 bp, Artificial
  Synthetic oligonucleotide
gtcaattcaatcattgacaaaatgaacacacagtttgatgcagtagagcatgagttctca

SEQ ID NO: 77169 - DNA, 60 bp, Artificial
  Synthetic oligonucleotide
gtaggactgatcatagcaatgggtctttggatgtgttcaaatggctcaatgcaatgcagg

SEQ ID NO: 77170 - DNA, 60 bp, Artificial
  Synthetic oligonucleotide
accgagtgacatccacatcatggcgtctcaaggcaccaaacgatcttatgaacagatgga

SEQ ID NO: 77171 - DNA, 59 bp, Artificial
  Synthetic oligonucleotide
ctgagtgacatccacatcatggcgtctcaaggcaccaaacgatcttatgaacagatgga

SEQ ID NO: 77172 - DNA, 60 bp, Artificial
  Synthetic oligonucleotide
ctcaccgagtgacatccacatcatggcgtctcaaggcaccaaacgatcttatgaacagat

SEQ ID NO: 77173 - DNA, 60 bp, Artificial
  Synthetic oligonucleotide
tgaacaaataacatttatgcaagccttacaactattgcttgaagtggagcaagagataag

SEQ ID NO: 77174 - DNA, 60 bp, Artificial
  Synthetic oligonucleotide
gaaaatgaatccaaatcagaagataataacaattggttccgcctctctaaccattgcaac

SEQ ID NO: 77175 - DNA, 60 bp, Artificial
  Synthetic oligonucleotide
gaaaatgaatccaaatcagaagataataacaattggttccgtctctctaaccattgcaac

SEQ ID NO: 77176 - DNA, 60 bp, Artificial
  Synthetic oligonucleotide
ccctccatacagccatggaacgggaacaggatacaccatggacacagtcaacagaacaca

SEQ ID NO: 77177 - DNA, 60 bp, Artificial
  Synthetic oligonucleotide
ctccatacagccatggaacgggaacaggatacaccatggacacagtcaacagaacacacc

SEQ ID NO: 77178 - DNA, 60 bp, Artificial
  Synthetic oligonucleotide
gtgataaagaacaacatgataaacaatgaccttggaccagcaacggctcaaatggctctt

SEQ ID NO: 77179 - DNA, 60 bp, Artificial
  Synthetic oligonucleotide
tggattccaacacgataacctcgtttcaggtagattgctatctatggcacataagaaagc

SEQ ID NO: 77180 - DNA, 60 bp, Artificial
  Synthetic oligonucleotide
tggactccaacacgataacctcgtttcaggtagattgctatctatggcacataagaaagc

SEQ ID NO: 77181 - DNA, 60 bp, Artificial
  Synthetic oligonucleotide
ggcacataagaaagctactcagcatgagagacatgtgtgatgctccctttgatgatagac

SEQ ID NO: 77182 - DNA, 60 bp, Artificial
  Synthetic oligonucleotide
gctactcagcatgagagacatgtgtgatgctccctttgatgatagactcagaagagatca

SEQ ID NO: 77183 - DNA, 60 bp, Artificial
  Synthetic oligonucleotide
gctgctcagcatgagagacatgtgtgatgctccctttgatgatagactaagaagagatca

SEQ ID NO: 77184 - DNA, 60 bp, Artificial
  Synthetic oligonucleotide
cagtatgagagacatgtgtgatgctccctttgatgatagactcagaagagatcagaaagc

SEQ ID NO: 77185 - DNA, 60 bp, Artificial
  Synthetic oligonucleotide
gctactcagcatgagagacatgtgtgatgctccctttgatgacagactcagaagagatca

SEQ ID NO: 77186 - DNA, 60 bp, Artificial
  Synthetic oligonucleotide
atgaattcactgaggttgaaaagcaaattggcaatgtgataaattggaccagagattcca

SEQ ID NO: 77187 - DNA, 58 bp, Artificial
  Synthetic oligonucleotide
agacaatgaattcactgaggttgaaaagcaaattggcaatgtgataaattggaccaga

SEQ ID NO: 77188 - DNA, 60 bp, Artificial
  Synthetic oligonucleotide
tagacaatgaattcactgaggttgaaaagcaaattggcaacgtgataaactggaccagag

SEQ ID NO: 77189 - DNA, 60 bp, Artificial
  Synthetic oligonucleotide
aggcctatttggtgccatagcgggtttcattgaaaatggatgggaaggtctaattgatgg

SEQ ID NO: 77190 - DNA, 60 bp, Artificial
  Synthetic oligonucleotide
caaaaggaagaggcctatttggtgccatagcgggtttcattgaaaatggatgggaaggtc

SEQ ID NO: 77191 - DNA, 60 bp, Artificial
  Synthetic oligonucleotide
cccaaagggaagaggcctatttggtgctatagcgggtttcattgaaaatggatgggaagg

SEQ ID NO: 77192 - DNA, 58 bp, Artificial
  Synthetic oligonucleotide
gatgagccttctaaccgaggtcgaaacgtacgttctctctatcgtcccgtcaggcccc

SEQ ID NO: 77193 - DNA, 60 bp, Artificial
  Synthetic oligonucleotide
cattgttcaggcacttagggacaacctggaacctgggaccttcgatcttggagggctata

SEQ ID NO: 77194 - DNA, 60 bp, Artificial
  Synthetic oligonucleotide
ttccataagtgtgatgatcagtgtatggagagcataaggaacaacacttatgaccatact

SEQ ID NO: 77195 - DNA, 60 bp, Artificial
  Synthetic oligonucleotide
ccataagtgtgatgatcagtgtatggagagcataaggaacaacacttatgaccatactca

SEQ ID NO: 77196 - DNA, 60 bp, Artificial
  Synthetic oligonucleotide
tttgagatattccataagtgtgatgatcagtgtatggagagcataaggaacaacacttat

SEQ ID NO: 77197 - DNA, 60 bp, Artificial
  Synthetic oligonucleotide
tattccataagtgtgatgatcagtgtatggagagcataaggaacaacacttatgaccata

SEQ ID NO: 77198 - DNA, 60 bp, Artificial
  Synthetic oligonucleotide
ccacaagtgtgatgatcagtgtatggagagcataaggaacaacacttatgaccatactca

SEQ ID NO: 77199 - DNA, 60 bp, Artificial
  Synthetic oligonucleotide
caccacattcccatatactggagatcctccatacagccatggaacgggaacagggtacac

SEQ ID NO: 77200 - DNA, 60 bp, Artificial
  Synthetic oligonucleotide
ccacattcccatatactggagatcctccatacagccatggaacgggaacagggtacacca

SEQ ID NO: 77201 - DNA, 60 bp, Artificial
  Synthetic oligonucleotide
atgccataagtaccacattcccatatactggagatcctccatacagccatggaacgggga

SEQ ID NO: 77202 - DNA, 60 bp, Artificial
  Synthetic oligonucleotide
atgccataagcaccacgttcccatatactggagatcctccatacagccatggaacgggaa

SEQ ID NO: 77203 - DNA, 60 bp, Artificial
  Synthetic oligonucleotide
atcaggttcttctttctatgcagagatgaagtggttgctgtcgagttcagacaatgcggc

SEQ ID NO: 77204 - DNA, 59 bp, Artificial
  Synthetic oligonucleotide
aaaatgcaattggggtcctcatcggaggacttgaatggagtgataacacagttcgagtc

SEQ ID NO: 77205 - DNA, 60 bp, Artificial
  Synthetic oligonucleotide
aaattgcaattggggtcctcatcggaggacttgaatggaatgataacacagttcgagtct

SEQ ID NO: 77206 - DNA, 60 bp, Artificial
  Synthetic oligonucleotide
aaaatgcaattggggtcctcatcggaggacttgagtggaatgataacacagttcgagtct

SEQ ID NO: 77207 - DNA, 60 bp, Artificial
  Synthetic oligonucleotide
gttgataaggggaaggccgcaagaaactagagtatggtggacctcaaacagtattgtcgt

SEQ ID NO: 77208 - DNA, 60 bp, Artificial
  Synthetic oligonucleotide
gttgataagaggaatgccgcaagaaactagagtatggtggacctcaaacagtattgtcgt

SEQ ID NO: 77209 - DNA, 60 bp, Artificial
  Synthetic oligonucleotide
aagaccaatcctgtcacctctgactaaggggattttggggttcgtgttcacgctcaccgt

SEQ ID NO: 77210 - DNA, 60 bp, Artificial
  Synthetic oligonucleotide
caagaccaatcctgtcacctctgactaaggggattttggggttcgtgttcacgctcaccg

SEQ ID NO: 77211 - DNA, 60 bp, Artificial
  Synthetic oligonucleotide
gacaagaccaatcctgtcacctctgactaaggggattttggggttcgtgttcacgctcac

SEQ ID NO: 77212 - DNA, 60 bp, Artificial
  Synthetic oligonucleotide
accaatcctgtcacctctgactaaggggattttaggatttgtgttcacgctcaccgtgcc

SEQ ID NO: 77213 - DNA, 60 bp, Artificial
  Synthetic oligonucleotide
gcaagttctcagggaatcaggcggaattgagaaggagacaataggattcacatacagcgg

SEQ ID NO: 77214 - DNA, 60 bp, Artificial
  Synthetic oligonucleotide
tgccaaacggaactaaggtaaacacactgactgaaagaggagtggaagttgttaatgcga

SEQ ID NO: 77215 - DNA, 60 bp, Artificial
  Synthetic oligonucleotide
agcaatagggaaatgtccgaggtatgttaagcaagaaagtctgctactggcaactgggat

SEQ ID NO: 77216 - DNA, 60 bp, Artificial
  Synthetic oligonucleotide
gcagattacaagagcacccagtcagcaattaatcaaataacagggaaattaaaccggctc

SEQ ID NO: 77217 - DNA, 60 bp, Artificial
  Synthetic oligonucleotide
ggacaaactatatgaacgagtgaggagacagttgagagagaatgctgaagaagatggcac

SEQ ID NO: 77218 - DNA, 60 bp, Artificial
  Synthetic oligonucleotide
agcaaaagcaggagtgaaaatgaatccaaatcaaaaaataataacaattggctctgtctc

SEQ ID NO: 77219 - DNA, 60 bp, Artificial
  Synthetic oligonucleotide
ctaatagatggtacagcctcattgagccctggaatgatgatgggcatgttcaacatgctg

SEQ ID NO: 77220 - DNA, 60 bp, Artificial
  Synthetic oligonucleotide
gcacttcaggcacctatggaacaggctcatggcctgatggggcaaatatcaatttcatgc

SEQ ID NO: 77221 - DNA, 60 bp, Artificial
  Synthetic oligonucleotide
cacttcaggcacctatggaacaggctcatggcctgatggggcaaatatcaatttcatgcc

SEQ ID NO: 77222 - DNA, 60 bp, Artificial
  Synthetic oligonucleotide
gaccaggcgattatggataagaacatcatactgaaagcgaacttcagtgtggtcttcgat

SEQ ID NO: 77223 - DNA, 55 bp, Artificial
  Synthetic oligonucleotide
gaccaggcgattatggataagaacatcatactgaaagcgaacttcagtgtgattt

SEQ ID NO: 77224 - DNA, 60 bp, Artificial
  Synthetic oligonucleotide
atccttgccatttatagtacggtatcgagcagtctggttttggtaggactgatcattgca

SEQ ID NO: 77225 - DNA, 60 bp, Artificial
  Synthetic oligonucleotide
atcctcatcggtggacttgaatggaatgataactcaattagagcgtctgaaaatatacag

SEQ ID NO: 77226 - DNA, 60 bp, Artificial
  Synthetic oligonucleotide
cgaacaaataacatttatgcaagccttacaactactgcttgaagtggagcaagagataag

SEQ ID NO: 77227 - DNA, 60 bp, Artificial
  Synthetic oligonucleotide
tagtgaatgcaccgaatcatgagggaatacaagcaggagtagatagattctacaggacct

SEQ ID NO: 77228 - DNA, 60 bp, Artificial
  Synthetic oligonucleotide
caacagtcctttgtaccgagtccaggagcgagaccacaagtgaatggccaatctgggagg

SEQ ID NO: 77229 - DNA, 60 bp, Artificial
  Synthetic oligonucleotide
cactggctactcctggatcccaatgacacagtgaccttcactttcaatggggcattcata

SEQ ID NO: 77230 - DNA, 60 bp, Artificial
  Synthetic oligonucleotide
aattgctgaagcaataatcgtggccatggtattttcacaagaggattgcatgatcaaggc

SEQ ID NO: 77231 - DNA, 60 bp, Artificial
  Synthetic oligonucleotide
caatccgactttacttttcttgaaagttccagcgcagaatgccataagcaccacattccc

SEQ ID NO: 77232 - DNA, 60 bp, Artificial
  Synthetic oligonucleotide
ttcttgccatttatagtacggtatcgagcagtctagtcttggtagggctgatcatagcaa

SEQ ID NO: 77233 - DNA, 57 bp, Artificial
  Synthetic oligonucleotide
tgactatgaagggagactgatccagaacagcataacaatagagagaatggttctctc

SEQ ID NO: 77234 - DNA, 60 bp, Artificial
  Synthetic oligonucleotide
atggaacaggctcatggcctgatggggcgaacatcaatttcatgcctatataagctttcg

SEQ ID NO: 77235 - DNA, 60 bp, Artificial
  Synthetic oligonucleotide
atggaacgggaacaggatacaccatggacacagtcaacagaacacatcaatattcagaaa

SEQ ID NO: 77236 - DNA, 60 bp, Artificial
  Synthetic oligonucleotide
tggaacgggaacaggatacaccatggacacagtcaacagaacacatcaatattcagaaaa

SEQ ID NO: 77237 - DNA, 60 bp, Artificial
  Synthetic oligonucleotide
gaacgggaacaggatacaccatggacacagtcaacagaacacatcaatattcagaaaagg

SEQ ID NO: 77238 - DNA, 60 bp, Artificial
  Synthetic oligonucleotide
cctttgacataagtaacgagggatcttatttcttcggagacaatgcagaggagtatgaca

SEQ ID NO: 77239 - DNA, 60 bp, Artificial
  Synthetic oligonucleotide
cgactgtatggccagtattagaaacaacacttatgatcacagcaaatacagagaagaagc

SEQ ID NO: 77240 - DNA, 60 bp, Artificial
  Synthetic oligonucleotide
actgtatggccagtattagaaacaacacttatgaccacagtaagtacagagaagaagcaa

SEQ ID NO: 77241 - DNA, 60 bp, Artificial
  Synthetic oligonucleotide
gtatggccagtattagaaacaacacttatgaccacagtaagtacagagaagaagcaatgc

SEQ ID NO: 77242 - DNA, 60 bp, Artificial
  Synthetic oligonucleotide
atggcccagcattgagcatcaacgaactaagcaatcttgcaaaaggagagaaggctaacg

SEQ ID NO: 77243 - DNA, 60 bp, Artificial
  Synthetic oligonucleotide
ggcccagcattgagcatcaacgaactaagcaatcttgcaaaaggagagaaggctaacgtg

SEQ ID NO: 77244 - DNA, 60 bp, Artificial
  Synthetic oligonucleotide
gcccagcattgagcatcaacgaactaagcaatcttgcaaaaggagagaaggctaatgtgc

SEQ ID NO: 77245 - DNA, 60 bp, Artificial
  Synthetic oligonucleotide
gaacaacatgataaacaatgaccttggaccagcaacagctcaaatggctctccagctgtt

SEQ ID NO: 77246 - DNA, 60 bp, Artificial
  Synthetic oligonucleotide
ctggccattgcaatgggccttgttttcatatgtgtgaagaatggaaacatgcggtgcact

SEQ ID NO: 77247 - DNA, 60 bp, Artificial
  Synthetic oligonucleotide
ggcacaatacatgatagaatccctcatcggacccttttgatgaatgaattgggtgttcca

SEQ ID NO: 77248 - DNA, 60 bp, Artificial
  Synthetic oligonucleotide
cttggtgatcaaagctggtcatatatagtggaaagacctaatgctcaaaatgggatttgc

SEQ ID NO: 77249 - DNA, 57 bp, Artificial
  Synthetic oligonucleotide
ggggtattgaaagagacggaagagctgaaagcactcattgggtctatagatagcata

SEQ ID NO: 77250 - DNA, 60 bp, Artificial
  Synthetic oligonucleotide
agataagacctcttctaatagatggtacagcctcattgagtcctggaatgatgatgggca

SEQ ID NO: 77251 - DNA, 60 bp, Artificial
  Synthetic oligonucleotide
gataacaaacattcaaatggcacaatacatgatagaatccctcaccggactcttttaatg

SEQ ID NO: 77252 - DNA, 60 bp, Artificial
  Synthetic oligonucleotide
atcaggttcttctttctatgcagagatgaagtggttgctgtcaaattcagacaatgcggc

SEQ ID NO: 77253 - DNA, 60 bp, Artificial
  Synthetic oligonucleotide
gaatacaagcaggagtagatagattctataggacctgcaagctagtcggaatcaacatga

SEQ ID NO: 77254 - DNA, 60 bp, Artificial
  Synthetic oligonucleotide
gaagaagagttgacatgaaccctggccatgcagacctcagtgccaaagaggcacaggatg

SEQ ID NO: 77255 - DNA, 60 bp, Artificial
  Synthetic oligonucleotide
gggagttccaattatcaacagtcctttgtaccgagtccaggagcgagaccacaagtgaat

SEQ ID NO: 77256 - DNA, 60 bp, Artificial
  Synthetic oligonucleotide
ctcagaccgagtaatggtatcacctctggctgtgacatggtggaataggaatggaccaac

SEQ ID NO: 77257 - DNA, 60 bp, Artificial
  Synthetic oligonucleotide
ctcagaccgagtaatggtatcatctctggctgtgacatggtggaataggaatggaccaac

SEQ ID NO: 77258 - DNA, 60 bp, Artificial
  Synthetic oligonucleotide
cagaccgagtaatggtatcacctctggctgtgacatggtggaataggaatggaccaacga

SEQ ID NO: 77259 - DNA, 60 bp, Artificial
  Synthetic oligonucleotide
cagaccgagtaatggtatcacctctggctgtgacatggtggaataggaatggaccaacaa

SEQ ID NO: 77260 - DNA, 60 bp, Artificial
  Synthetic oligonucleotide
acacaaggaaagacccagctctgataatctggggaatccatcattctggatcaaccacag

SEQ ID NO: 77261 - DNA, 60 bp, Artificial
  Synthetic oligonucleotide
acacaaggaaagacccagctctgataatctggggaatccatcattccggatcaaccgcag

SEQ ID NO: 77262 - DNA, 60 bp, Artificial
  Synthetic oligonucleotide
acacaaggaaagacccagctctgataatctggggaatccatcattccggatcaagcgcag

SEQ ID NO: 77263 - DNA, 60 bp, Artificial
  Synthetic oligonucleotide
gtcgtattttgtggcacttcagggacctatggaacaggctcatggcctgatggggcgaat

SEQ ID NO: 77264 - DNA, 60 bp, Artificial
  Synthetic oligonucleotide
gggaggctgatccaaaacagcataacaatagagagaatggttctctcagcatttgatgag

SEQ ID NO: 77265 - DNA, 60 bp, Artificial
  Synthetic oligonucleotide
agggaggctgatccaaaacagcataacaatagagagaatggttctctcagcatttgatga

SEQ ID NO: 77266 - DNA, 60 bp, Artificial
  Synthetic oligonucleotide
gtaactttcagcttcaatggggctttcatagctccagatcgtgtaagttttctgagaggg

SEQ ID NO: 77267 - DNA, 60 bp, Artificial
  Synthetic oligonucleotide
accccaatgacacagtaactttcagcttcaatggggctttcatagctccagatcgtgtaa

SEQ ID NO: 77268 - DNA, 60 bp, Artificial
  Synthetic oligonucleotide
gtagagagatttgaaatgtttcccaaaagtacatgggcaggagtagacaccagcagtgga

SEQ ID NO: 77269 - DNA, 60 bp, Artificial
  Synthetic oligonucleotide
ggtagagaggtttgagatgtttcccaaaagtacatgggcaggagtagacaccagcagtgg

SEQ ID NO: 77270 - DNA, 60 bp, Artificial
  Synthetic oligonucleotide
ggtagaaagatttgagatgtttcccaaaagtacatgggcaggagtagacactagcagtgg

SEQ ID NO: 77271 - DNA, 60 bp, Artificial
  Synthetic oligonucleotide
tgatcagtgtatggagagcataaggaacaacacttatgaccatactcaatacagaacaga

SEQ ID NO: 77272 - DNA, 60 bp, Artificial
  Synthetic oligonucleotide
gtgtgatgatcagtgtatggagagcataaggaacaacacttatgaccatactcaatacag

SEQ ID NO: 77273 - DNA, 60 bp, Artificial
  Synthetic oligonucleotide
gtgtgtatcaaattcttgccatttatagtacggtgtcgagcagtctagtcttggtagggc

SEQ ID NO: 77274 - DNA, 60 bp, Artificial
  Synthetic oligonucleotide
ccttgaagcaatggctttccttgaagagtcccacccaggaatctttgaaaactcgtgtct

SEQ ID NO: 77275 - DNA, 60 bp, Artificial
  Synthetic oligonucleotide
ttgtgtcctggaagcaatggctttccttgaagagtcccacccaggaatctttgaaaactc

SEQ ID NO: 77276 - DNA, 60 bp, Artificial
  Synthetic oligonucleotide
ggagttttcctctgatttgataattgagcgaagagaaggaaccgatgtatgctatcccgg

SEQ ID NO: 77277 - DNA, 55 bp, Artificial
  Synthetic oligonucleotide
acgggcaaccttcaaacattgaaaataagagtacatgaggggtatgaagagttca

SEQ ID NO: 77278 - DNA, 60 bp, Artificial
  Synthetic oligonucleotide
acgggcaaccttcaaacattgaaaataagagtacatgaggggtatgaagagttcacaatg

SEQ ID NO: 77279 - DNA, 60 bp, Artificial
  Synthetic oligonucleotide
tattcattaaagaggggaaaattgtccacattagtccattgtcagggagtgctcaacaca

SEQ ID NO: 77280 - DNA, 60 bp, Artificial
  Synthetic oligonucleotide
aaaatgaatccaaatcagaagataataacaattggctccgtctctctaaccattgcaaca

SEQ ID NO: 77281 - DNA, 60 bp, Artificial
  Synthetic oligonucleotide
tcggctgacatgagcattggagtaacagtaataaagaacaacatgataaacaatgacctt

SEQ ID NO: 77282 - DNA, 60 bp, Artificial
  Synthetic oligonucleotide
ttcaaatgagaacatggatactatggaatcaagtactcttgaactgagaagcaggtactg

SEQ ID NO: 77283 - DNA, 57 bp, Artificial
  Synthetic oligonucleotide
aaaatcaaccgttatggcagcattcactgggaatacggagggaagaacctcagacat

SEQ ID NO: 77284 - DNA, 60 bp, Artificial
  Synthetic oligonucleotide
atacggagggaagaacctcagacatgagggcagaaatcataaggatgatggaaggtgcaa

SEQ ID NO: 77285 - DNA, 60 bp, Artificial
  Synthetic oligonucleotide
aagaaacctcccatttgaaaaatcaaccgttatggcagcattcactgggaatacggaggg

SEQ ID NO: 77286 - DNA, 60 bp, Artificial
  Synthetic oligonucleotide
ggagggaagaacctcagacatgagggcagaaatcataaggatgatggaaggtgcaaaacc

SEQ ID NO: 77287 - DNA, 60 bp, Artificial
  Synthetic oligonucleotide
gaaggtgcaaaaccagaagaagtgtccttccgtgggcggggagttttcgagctctcagac

SEQ ID NO: 77288 - DNA, 60 bp, Artificial
  Synthetic oligonucleotide
ggtgcaaaaccagaagaagtgtccttccgtgggcggggagttttcgagctctcagacgaa

SEQ ID NO: 77289 - DNA, 60 bp, Artificial
  Synthetic oligonucleotide
atgcagggttcgactctccctagaaggtccggagctgcaggcgctgcagtcaaaggaatc

SEQ ID NO: 77290 - DNA, 60 bp, Artificial
  Synthetic oligonucleotide
gatgtgctctctgatgcagggttcgactctccctagaaggtccggagctgcaggcgctgc

SEQ ID NO: 77291 - DNA, 60 bp, Artificial
  Synthetic oligonucleotide
atgatcaaacgggggatcaacgatcgaaatttctggagaggtgagaatgggcgaaaaaca

SEQ ID NO: 77292 - DNA, 60 bp, Artificial
  Synthetic oligonucleotide
atgctgagatcgaagatctcatattttcggcaagatctgcactaatattgagagggtcag

SEQ ID NO: 77293 - DNA, 51 bp, Artificial
  Synthetic oligonucleotide
ctcatattttcggcaagatctgcactaatattgagagggtcagttgctcac

SEQ ID NO: 77294 - DNA, 60 bp, Artificial
  Synthetic oligonucleotide
acaacttaccagaggacaagagctcttgttcgcaccggaatggaccccaggatgtgctct

SEQ ID NO: 77295 - DNA, 59 bp, Artificial
  Synthetic oligonucleotide
caagagctcttgttcgcaccggaatggaccccaggatgtgctctctgatgcagggttcg

SEQ ID NO: 77296 - DNA, 60 bp, Artificial
  Synthetic oligonucleotide
tgaagggcggttgatccagaacagcttgacagtagagagaatggtgctctctgcttttga

SEQ ID NO: 77297 - DNA, 60 bp, Artificial
  Synthetic oligonucleotide
gggcggttgatccagaacagcttgacagtagagagaatggtgctctctgcttttgatgag

SEQ ID NO: 77298 - DNA, 60 bp, Artificial
  Synthetic oligonucleotide
aagaacaccccagcgcggggaaagatcctaagaaaactggagggcccatatacaagagag

SEQ ID NO: 77299 - DNA, 60 bp, Artificial
  Synthetic oligonucleotide
ccccagcgcggggaaagatcctaagaaaactggagggcccatatacaagagagtaggtgg

SEQ ID NO: 77300 - DNA, 60 bp, Artificial
  Synthetic oligonucleotide
cgacacgtggtctaactcacatgatgatctggcattccaatttgaatgatacaacttacc

SEQ ID NO: 77301 - DNA, 60 bp, Artificial
  Synthetic oligonucleotide
catgtttgtgtcactggggatgatagaaatgcgactgctagtttcatttacaatggaatg

SEQ ID NO: 77302 - DNA, 60 bp, Artificial
  Synthetic oligonucleotide
aataacttactcatcatcaatgatgtgggagatcaatggtcctgagtcagtgttggtcaa

SEQ ID NO: 77303 - DNA, 52 bp, Artificial
  Synthetic oligonucleotide
gcacaggatgtaatcatggaagttgttttcccaaatgaagtgggggccagaa

SEQ ID NO: 77304 - DNA, 60 bp, Artificial
  Synthetic oligonucleotide
aaggaacaacacttatgaccatactcaatacagaacagagtcattgcagaatagaataca

SEQ ID NO: 77305 - DNA, 60 bp, Artificial
  Synthetic oligonucleotide
agacaatgagttcaatgagatagaacaacaaataggaaatgtcattaattggacaagaga

SEQ ID NO: 77306 - DNA, 60 bp, Artificial
  Synthetic oligonucleotide
tcttagaatgaaatggatgatggcaatgaaatatccgattacggcggacaaaaggataat

SEQ ID NO: 77307 - DNA, 60 bp, Artificial
  Synthetic oligonucleotide
tcactcaccgagtgacatccacatcatggcgtctcaaggcaccaaacgatcttatgagca

SEQ ID NO: 77308 - DNA, 60 bp, Artificial
  Synthetic oligonucleotide
aagaagagcaacagtatcagcagacccactagcatctctattggagatgtgccacagcac

SEQ ID NO: 77309 - DNA, 60 bp, Artificial
  Synthetic oligonucleotide
ggcgggaaggaaatgatgtctgttatcctgggaaatttgcgaatgaggaagctctgaggc

SEQ ID NO: 77310 - DNA, 60 bp, Artificial
  Synthetic oligonucleotide
aaggcgggaaggaaatgatgtctgttatcctgggaaatttgcgaatgaggaagctctgag

SEQ ID NO: 77311 - DNA, 60 bp, Artificial
  Synthetic oligonucleotide
gaccacaagtgaatggccaatctggaaggatcgacttccattggctgatgctaaatccca

SEQ ID NO: 77312 - DNA, 51 bp, Artificial
  Synthetic oligonucleotide
tgcaacagtatgtttcctcatgcagattgccattctagcaatgactgtaac

SEQ ID NO: 77313 - DNA, 53 bp, Artificial
  Synthetic oligonucleotide
tgcaacagtatgtttcctcatgcagattgccattctagcgacgactgtaacac

SEQ ID NO: 77314 - DNA, 53 bp, Artificial
  Synthetic oligonucleotide
tgcaacagtatgtttcctcatgcagattgccattctagcaacgactgtaacac

SEQ ID NO: 77315 - DNA, 54 bp, Artificial
  Synthetic oligonucleotide
ttacaacagtatgtttcctcatgcagattgccattctagcaacgactgtaacac

SEQ ID NO: 77316 - DNA, 54 bp, Artificial
  Synthetic oligonucleotide
ttgcaacagtatgtttcctcatgcagattgccattctagcaacgactgtaacac

SEQ ID NO: 77317 - DNA, 60 bp, Artificial
  Synthetic oligonucleotide
gctccgtctctctgactattgcaacagtatgtttcctcatgcagattgccattctagcaa

SEQ ID NO: 77318 - DNA, 60 bp, Artificial
  Synthetic oligonucleotide
gctccgtctctctaatcattgcaacagtatgtttcctcatgcagattgccattctagcaa

SEQ ID NO: 77319 - DNA, 53 bp, Artificial
  Synthetic oligonucleotide
tgcaacagtatgtttcctcatgcagattgccattctagcaatgactgtaacac

SEQ ID NO: 77320 - DNA, 60 bp, Artificial
  Synthetic oligonucleotide
cagccagacagcgaccaaaaggattcggatggccatcaattagtgtcgaattgttaaaaa

SEQ ID NO: 77321 - DNA, 59 bp, Artificial
  Synthetic oligonucleotide
cagccagacagcgaccaaaaggattcggatggccatcaattagtgtcgaattgttaaaa

SEQ ID NO: 77322 - DNA, 60 bp, Artificial
  Synthetic oligonucleotide
gatagttctagcagcagcaactgcagggatcctaatgaagagaggggaaacccaggagtg

SEQ ID NO: 77323 - DNA, 60 bp, Artificial
  Synthetic oligonucleotide
cagccggctgcaactgcattagctaatactatagaggtcttcagatcgaacggtctgacg

SEQ ID NO: 77324 - DNA, 60 bp, Artificial
  Synthetic oligonucleotide
cttgttgacagcattggttcgtggtctcaaaatatcctcagaactcaggagtcagagtgc

SEQ ID NO: 77325 - DNA, 60 bp, Artificial
  Synthetic oligonucleotide
tgcacttgggcagggaaccacgctggacaacaaacattcaaatggcacaatacatgatag

SEQ ID NO: 77326 - DNA, 60 bp, Artificial
  Synthetic oligonucleotide
gcacttgggcaggggaccacgctggacaacaaacattcaaatggcacaatacatgataga

SEQ ID NO: 77327 - DNA, 60 bp, Artificial
  Synthetic oligonucleotide
tgcacttgggcaggggaccacgctggacaacaaacattcaaatggcacaatacatgatag

SEQ ID NO: 77328 - DNA, 60 bp, Artificial
  Synthetic oligonucleotide
aaaccagctctgataatttggggagttcatcactctgaatcggttagcgagcagaccaaa

SEQ ID NO: 77329 - DNA, 60 bp, Artificial
  Synthetic oligonucleotide
tgccagactattgcaggagtcctaaggaccaataaaacatttcagaatgtgagccctctg

SEQ ID NO: 77330 - DNA, 60 bp, Artificial
  Synthetic oligonucleotide
ccatatgccagactattgcaggagtcctaaggaccaataaaacatttcagaatgtgagcc

SEQ ID NO: 77331 - DNA, 60 bp, Artificial
  Synthetic oligonucleotide
ggtcgaattgattattactggtctgttttaaaaccaggggaaaccttgaatgtggaatct

SEQ ID NO: 77332 - DNA, 60 bp, Artificial
  Synthetic oligonucleotide
ggtcgaattgattattactggtctgttttaaaaccaggggaaaccttgaatgtagaatct

SEQ ID NO: 77333 - DNA, 60 bp, Artificial
  Synthetic oligonucleotide
gaggtcgaattgattattactggtctgttttaaaaccaggggaaaccttgaatgtggaat

SEQ ID NO: 77334 - DNA, 60 bp, Artificial
  Synthetic oligonucleotide
gaggtcgaattgattattactggtctgttttaaaaccaggggaaaccttgaatgtagaat

SEQ ID NO: 77335 - DNA, 60 bp, Artificial
  Synthetic oligonucleotide
gttgcatgtttgtgtcactggggatgatagaaatgcgactgctagtttcatttacaatgg

SEQ ID NO: 77336 - DNA, 60 bp, Artificial
  Synthetic oligonucleotide
cataaggaagctgctcagcatgagagacatgtgtgatgctccctttgatgacaggctcag

SEQ ID NO: 77337 - DNA, 60 bp, Artificial
  Synthetic oligonucleotide
cataagaaagctactcagcatgagagacatgtgtgatgctccctttgatgacagactcag

SEQ ID NO: 77338 - DNA, 60 bp, Artificial
  Synthetic oligonucleotide
tgctatctatggcacataagaaagctgctcagcatgagagacatgtgtgatgctcccttt

SEQ ID NO: 77339 - DNA, 60 bp, Artificial
  Synthetic oligonucleotide
gataacctcgtttcaggtagattgttatctatggcacataagaaagctactcagcatgag

SEQ ID NO: 77340 - DNA, 60 bp, Artificial
  Synthetic oligonucleotide
caacacgataacctcgtttcaggtagattgttatctatggcacataagaaagctactcag

SEQ ID NO: 77341 - DNA, 58 bp, Artificial
  Synthetic oligonucleotide
cgagtgacatccacatcatggcgtctcaaggcaccaaacgatcttatgagcagatgga

SEQ ID NO: 77342 - DNA, 60 bp, Artificial
  Synthetic oligonucleotide
caccgagtgacatccacatcatggcgtcccaaggcaccaaacgatcttatgagcagatgg

SEQ ID NO: 77343 - DNA, 60 bp, Artificial
  Synthetic oligonucleotide
agctcaagttgccatgatgggaaagcatggttgcacgtttgtgtcactggggatgataga

SEQ ID NO: 77344 - DNA, 51 bp, Artificial
  Synthetic oligonucleotide
gggtgttttgagttttggcacaaatgtgacaatgaatgcatcaaatcggtt

SEQ ID NO: 77345 - DNA, 60 bp, Artificial
  Synthetic oligonucleotide
cataagaaagctgctcagcatgagagacatgtgtgatgctccctttgatgatagactaag

SEQ ID NO: 77346 - DNA, 60 bp, Artificial
  Synthetic oligonucleotide
cataagaaagctactcagcatgagagacatgtgtgatgctccctttgatgatagactcag

SEQ ID NO: 77347 - DNA, 60 bp, Artificial
  Synthetic oligonucleotide
tgttatctatggcacataagaaagctactcagcatgagagacatgtgtgatgctcccttt

SEQ ID NO: 77348 - DNA, 60 bp, Artificial
  Synthetic oligonucleotide
cttcaggcacttatggaacaggctcatggcctgatggggcgaacatcaatttcatgccta

SEQ ID NO: 77349 - DNA, 60 bp, Artificial
  Synthetic oligonucleotide
cttcaggcacttatggaacaggctcatggcctgatggggcgaatattaatttcatgccta

SEQ ID NO: 77350 - DNA, 60 bp, Artificial
  Synthetic oligonucleotide
tcaggcacttatggaacaggctcatggcctgatggggcgaacatcaatttcatgcctata

SEQ ID NO: 77351 - DNA, 60 bp, Artificial
  Synthetic oligonucleotide
ttcaggcacttatggaacaggctcatggcctgatggggcgaacatcaatttcatgcctat

SEQ ID NO: 77352 - DNA, 60 bp, Artificial
  Synthetic oligonucleotide
tccttcctcacacatgcactgaaatagttgtggcaatgctactatttgctatccatactg

SEQ ID NO: 77353 - DNA, 60 bp, Artificial
  Synthetic oligonucleotide
ttgaatggaatgataacacagttcgagtctctgaaactttacagagattcgcttggagaa

SEQ ID NO: 77354 - DNA, 58 bp, Artificial
  Synthetic oligonucleotide
tgttcacgctcaccgtgcccagtgagcgaggactgcagcgtagacgctttgtccagag

SEQ ID NO: 77355 - DNA, 60 bp, Artificial
  Synthetic oligonucleotide
cagtgactatgaaggaagactgatccaaaacagcataacaatagagagaatggttctctc

SEQ ID NO: 77356 - DNA, 60 bp, Artificial
  Synthetic oligonucleotide
cagtgactatgaagggaggctgatccaaaacagcataacaatagagagaatggttctctc

SEQ ID NO: 77357 - DNA, 60 bp, Artificial
  Synthetic oligonucleotide
aacctcccattcgagagagcaaccattatggcggcatttacaggaaacactgaaggcaga

SEQ ID NO: 77358 - DNA, 60 bp, Artificial
  Synthetic oligonucleotide
ggcgggaaggaaatgatgtctgttatcctggaaaatttgtaaacgaagaagctctgagac

SEQ ID NO: 77359 - DNA, 60 bp, Artificial
  Synthetic oligonucleotide
caaacactgtgtcaagcttccaggtagattgctttctctggcatgtccgcaaaagatttg

SEQ ID NO: 77360 - DNA, 60 bp, Artificial
  Synthetic oligonucleotide
ctgtgtcaagcttccaggtagattgctttctctggcatgtccgcaaaagatttgcagacc

SEQ ID NO: 77361 - DNA, 60 bp, Artificial
  Synthetic oligonucleotide
agccactcgcgctgggaagcagataattgagcggattctggatgaagaatccgatgaggc

SEQ ID NO: 77362 - DNA, 52 bp, Artificial
  Synthetic oligonucleotide
agccactcgcgctgggaagcagataattgagcggattctggatgaagaatcc

SEQ ID NO: 77363 - DNA, 55 bp, Artificial
  Synthetic oligonucleotide
aaagatttgcagaccaagaaatgggcgatgccccattcctagatcggatccgccg

SEQ ID NO: 77364 - DNA, 60 bp, Artificial
  Synthetic oligonucleotide
aaacactgtgtcaagcttccaggtagattgctttctctggcatgtccgcaaaagatttgc

SEQ ID NO: 77365 - DNA, 60 bp, Artificial
  Synthetic oligonucleotide
ccgatgaggcactaaagatgaatattgcctccgtacctgcaccgcgctatgtgactgaca

SEQ ID NO: 77366 - DNA, 60 bp, Artificial
  Synthetic oligonucleotide
ggcactaaagatgaatattgcctccgtacctgcaccgcgctatgtgactgacatgactcc

SEQ ID NO: 77367 - DNA, 56 bp, Artificial
  Synthetic oligonucleotide
aaaagatttgcagaccaagaaatgggcgatgccccattcctagatcggatccgccg

SEQ ID NO: 77368 - DNA, 60 bp, Artificial
  Synthetic oligonucleotide
gtttgaagagataagatggttgattgaagaagtaagacataagttgaaaacaacagaaaa

SEQ ID NO: 77369 - DNA, 60 bp, Artificial
  Synthetic oligonucleotide
gctccaaagcaggaacggaaaatggcgggaacagttgagtcagaagtttgaagagataag

SEQ ID NO: 77370 - DNA, 60 bp, Artificial
  Synthetic oligonucleotide
catttgctccaaagcaggaacggaaaatggcgggaacagttgagtcagaagtttgaagag

SEQ ID NO: 77371 - DNA, 60 bp, Artificial
  Synthetic oligonucleotide
aactctacagagatttgcttggggaagcagtaatgagaatgggagacctccatttgctcc

SEQ ID NO: 77372 - DNA, 60 bp, Artificial
  Synthetic oligonucleotide
gaacatcgtactgaaagcaaatttcagtgttgcttttgaccggctggaaactctcatact

SEQ ID NO: 77373 - DNA, 60 bp, Artificial
  Synthetic oligonucleotide
tcttagataagaacatcgtactgaaagcaaatttcagtgttgcttttgaccggctggaaa

SEQ ID NO: 77374 - DNA, 60 bp, Artificial
  Synthetic oligonucleotide
tgctggtcctctttgcattagaatggatcaggcaatcttagataagaacatcgtactgaa

SEQ ID NO: 77375 - DNA, 60 bp, Artificial
  Synthetic oligonucleotide
gcccaaacagaaatttgctggtcctctttgcattagaatggatcaggcaatcttagataa

SEQ ID NO: 77376 - DNA, 60 bp, Artificial
  Synthetic oligonucleotide
gtgactgacatgactcctgaagagatgtcaagggactggtttatgctcatgcccaaacag

SEQ ID NO: 77377 - DNA, 60 bp, Artificial
  Synthetic oligonucleotide
ggagaagacgcaactgctggtctcacccatttgatgatctggcattccaatctgaatgat

SEQ ID NO: 77378 - DNA, 60 bp, Artificial
  Synthetic oligonucleotide
caactggaagggctctaataggcctgttatagatataaatatggcagattatagcattga

SEQ ID NO: 77379 - DNA, 60 bp, Artificial
  Synthetic oligonucleotide
gacaactggaagggctctaataggcctgttatagatataaatatggcagattatagcatt

SEQ ID NO: 77380 - DNA, 60 bp, Artificial
  Synthetic oligonucleotide
ggaaaatctgggaatatatcaaatccttgctatttatagtacggtatcgagcagtctggt

SEQ ID NO: 77381 - DNA, 60 bp, Artificial
  Synthetic oligonucleotide
ggaacatctgggaatatatcaaatccttgctatttatagtacggtatcgagcagtctggt

SEQ ID NO: 77382 - DNA, 60 bp, Artificial
  Synthetic oligonucleotide
ggagagttgacataaatcctggccatgcagacctcagtgccaaagaggcacaggatgtaa

SEQ ID NO: 77383 - DNA, 60 bp, Artificial
  Synthetic oligonucleotide
gacgaagagttgacataaatcctggccatgcagacctcagtgccaaagaggcacaggatg

SEQ ID NO: 77384 - DNA, 56 bp, Artificial
  Synthetic oligonucleotide
acagaacagagtcattgcagaatagaatacagatagacccagtgaaattgagtagt

SEQ ID NO: 77385 - DNA, 60 bp, Artificial
  Synthetic oligonucleotide
tgaccatactcaatacagaacagagtcattgcagaatagaatacagatagacccagtgaa

SEQ ID NO: 77386 - DNA, 60 bp, Artificial
  Synthetic oligonucleotide
tggggaatccatcattctggatcaaccacagaacagaccaaattatatggaagtgggagc

SEQ ID NO: 77387 - DNA, 60 bp, Artificial
  Synthetic oligonucleotide
cacagtcactttcagcttcaatggggcttttatagctccagatcgtgcaagttttctgag

SEQ ID NO: 77388 - DNA, 60 bp, Artificial
  Synthetic oligonucleotide
cttcaatggggcttttatagctccagatcgtgcaagttttctgagagggaagtctatggg

SEQ ID NO: 77389 - DNA, 60 bp, Artificial
  Synthetic oligonucleotide
gggagggatactccctagtcggaattgatcctttccgtctgctccaaaacagtcaagtct

SEQ ID NO: 77390 - DNA, 60 bp, Artificial
  Synthetic oligonucleotide
cagccatggaacgggaacaggatacaccatggacacagtcaacagaacacatcaatattc

SEQ ID NO: 77391 - DNA, 60 bp, Artificial
  Synthetic oligonucleotide
ataatcactcaccgagtgacatccacatcatggcgtctcaaggcaccaaacggtcttatg

SEQ ID NO: 77392 - DNA, 60 bp, Artificial
  Synthetic oligonucleotide
taaccattgcaacagtatgtttcctcatgcagattgccattctagcaacgactgtaacac

SEQ ID NO: 77393 - DNA, 60 bp, Artificial
  Synthetic oligonucleotide
gctatctatggcacataaggaagctgctcagcatgagagacatgtgtgatgctccctttg

SEQ ID NO: 77394 - DNA, 60 bp, Artificial
  Synthetic oligonucleotide
gagcctttccaatccttggtacctaaagctgccaggggtcaatacagtggatttgtgaga

SEQ ID NO: 77395 - DNA, 60 bp, Artificial
  Synthetic oligonucleotide
agccatttcaatccttggtacctaaagctgccaggggtcaatacagtggatttgtgagga

SEQ ID NO: 77396 - DNA, 60 bp, Artificial
  Synthetic oligonucleotide
ccttggtacctaaagctgccaggggtcaatacagtggatttgtgaggacactattccaac

SEQ ID NO: 77397 - DNA, 60 bp, Artificial
  Synthetic oligonucleotide
agcaaagcagaatgcagttttcttctctaactgtgaatgtgagaggctcaggaatgagaa

SEQ ID NO: 77398 - DNA, 60 bp, Artificial
  Synthetic oligonucleotide
agcagagcaggatgcagttttcttctctaactgtgaatgtaagaggctcagggatgagaa

SEQ ID NO: 77399 - DNA, 60 bp, Artificial
  Synthetic oligonucleotide
gcaggatgcagttttcttctctaactgtgaatgtaagaggctcagggatgagaatactcg

SEQ ID NO: 77400 - DNA, 60 bp, Artificial
  Synthetic oligonucleotide
aagataataacaattggctccgtctctctaaccattgcaacagtatgtttcctcatgcag

SEQ ID NO: 77401 - DNA, 60 bp, Artificial
  Synthetic oligonucleotide
gccctcggtatgtcaaacagaaaagcctccttttggctacaggaatgagaaatgttccag

SEQ ID NO: 77402 - DNA, 60 bp, Artificial
  Synthetic oligonucleotide
cgtcgtattttgtggcacttcaggtacctatggaacaggctcatggcctgatggggcgaa

SEQ ID NO: 77403 - DNA, 50 bp, Artificial
  Synthetic oligonucleotide
atctgttccaccattgaagagctcagacggcaaaaatagtgaatttagct

SEQ ID NO: 77404 - DNA, 60 bp, Artificial
  Synthetic oligonucleotide
gaggacttttcggagctatcgcaggttttattgaaggaggatggactggaatgatagatg

SEQ ID NO: 77405 - DNA, 60 bp, Artificial
  Synthetic oligonucleotide
ggactcttcggagctatcgcaggcttcattgaaggaggatggactggaatgatagatgga

SEQ ID NO: 77406 - DNA, 60 bp, Artificial
  Synthetic oligonucleotide
tgcctgcttcacgctacctaactgacatgactcttgaagagatgtcaagagactggttca

SEQ ID NO: 77407 - DNA, 60 bp, Artificial
  Synthetic oligonucleotide
tacctgcttcacgctacctaactgacatgactcttgaagagatgtcaagagactggttca

SEQ ID NO: 77408 - DNA, 60 bp, Artificial
  Synthetic oligonucleotide
ctgcttcacgctacctaactgacatgactcttgaagagatgtcaagagactggttcatgc

SEQ ID NO: 77409 - DNA, 60 bp, Artificial
  Synthetic oligonucleotide
acttttatgcaagccttacaactactgcttgaagtggagcaagagataagaactttctcg

SEQ ID NO: 77410 - DNA, 60 bp, Artificial
  Synthetic oligonucleotide
tgagggaggaatatcggcaggaacagcagagtgctgtggatgttgacgatggtcattttg

SEQ ID NO: 77411 - DNA, 60 bp, Artificial
  Synthetic oligonucleotide
gacctccccaatgtgatcaattcctggagttttcctctgatttgataattgagcgaagag

SEQ ID NO: 77412 - DNA, 60 bp, Artificial
  Synthetic oligonucleotide
ttgccatttatagtacggtatcgagcagtctagtcttggtaggactgatcatagcaatgg

SEQ ID NO: 77413 - DNA, 60 bp, Artificial
  Synthetic oligonucleotide
ctttccttgaagagtcccacccagggatctttgaaaactcgtgtcttgaaacgatggaag

SEQ ID NO: 77414 - DNA, 60 bp, Artificial
  Synthetic oligonucleotide
cgggatcaccaataaagtcaattcaatcattgacaaaatgaacacacaatttgaggcagt

SEQ ID NO: 77415 - DNA, 60 bp, Artificial
  Synthetic oligonucleotide
tcggctgacatgagcattggagtaacagtgataaagaacaacatgataaacaatgacctt

SEQ ID NO: 77416 - DNA, 54 bp, Artificial
  Synthetic oligonucleotide
tggcctgatggggcgaatatcaatttcatgcctatataagctttcgcaatttta

SEQ ID NO: 77417 - DNA, 60 bp, Artificial
  Synthetic oligonucleotide
cgtatgaccatactcaatacagaacagagtcattgcagaatagaatacagatagacccag

SEQ ID NO: 77418 - DNA, 60 bp, Artificial
  Synthetic oligonucleotide
agatgggtggtatggctatcatcatgaaaattctcaaggctcagggtatgcagcagacag

SEQ ID NO: 77419 - DNA, 60 bp, Artificial
  Synthetic oligonucleotide
aggaatatcggcaggaacagcagagtgctgtggatgttgacgatggtcattttgtcaaca

SEQ ID NO: 77420 - DNA, 60 bp, Artificial
  Synthetic oligonucleotide
attggggtaacagtgataaagaacaacatgataaacaatgaccttggaccagcaacggcc

SEQ ID NO: 77421 - DNA, 60 bp, Artificial
  Synthetic oligonucleotide
tgcttacgggcaaccttcaaacattgaaaataagagtacatgaggggtatgaagaattca

SEQ ID NO: 77422 - DNA, 51 bp, Artificial
  Synthetic oligonucleotide
gggcgaacatcaatttcatgcctatataagctttcgcaattttagaaaaaa

SEQ ID NO: 77423 - DNA, 60 bp, Artificial
  Synthetic oligonucleotide
gtgaccttcactttcaatggggcattcatagcccctgacagggcaagtttctttagagga

SEQ ID NO: 77424 - DNA, 60 bp, Artificial
  Synthetic oligonucleotide
tgactatgaaggaagactgatccaaaacagcataacaatagagagaatggttctctcggc

SEQ ID NO: 77425 - DNA, 60 bp, Artificial
  Synthetic oligonucleotide
tttctttggcatgtccgcaaacgatttgcagaccaagaactgggtgatgccccattcctt

SEQ ID NO: 77426 - DNA, 60 bp, Artificial
  Synthetic oligonucleotide
ctgggtcaagctttcaggtagactgctttctttggcatgtccgcaaacgatttgcagacc

SEQ ID NO: 77427 - DNA, 60 bp, Artificial
  Synthetic oligonucleotide
ggtcaagctttcaggtagactgctttctttggcatgtccgcaaacgatttgcagaccaag

SEQ ID NO: 77428 - DNA, 60 bp, Artificial
  Synthetic oligonucleotide
accggcttcgccgagatcagaaatctctaagaggaagaggcagcactcttggtctggaca

SEQ ID NO: 77429 - DNA, 60 bp, Artificial
  Synthetic oligonucleotide
ggcttcgccgagatcagaaatctctaagaggaagaggcagcactcttggtctggacatcg

SEQ ID NO: 77430 - DNA, 54 bp, Artificial
  Synthetic oligonucleotide
cactcaatgagtgacatccacatcatggcgtctcaaggcaccaaacgatcttat

SEQ ID NO: 77431 - DNA, 60 bp, Artificial
  Synthetic oligonucleotide
gaacccaaaccagaagataataacaattggctccgtctctctaaccattgcaacagtatg

SEQ ID NO: 77432 - DNA, 60 bp, Artificial
  Synthetic oligonucleotide
tacagaaaatagttttgaacaaataacatttatgcaagccttacaactattgcttgaagt

SEQ ID NO: 77433 - DNA, 66 bp, Artificial
  Synthetic oligonucleotide
gagaatagttttgaacaaataacatttatgcaagccttacaactattgcttgaagtggaacaagag

SEQ ID NO: 77434 - DNA, 60 bp, Artificial
  Synthetic oligonucleotide
tacagagaatagttttgaacaaataacatttatgcaagccttacaactattgcttgaagt

SEQ ID NO: 77435 - DNA, 60 bp, Artificial
  Synthetic oligonucleotide
ggggctatatgaagcaatcgaggagtgcctaattaatgatccctgggttttgcttaatgc

SEQ ID NO: 77436 - DNA, 60 bp, Artificial
  Synthetic oligonucleotide
ttcacattagcccattgtcaggaagtgctcagcatatagaggaatgttcctgttatcccc

SEQ ID NO: 77437 - DNA, 60 bp, Artificial
  Synthetic oligonucleotide
tgttcacattagcccattgtcaggaagtgctcagcatatagaggaatgttcctgttatcc

SEQ ID NO: 77438 - DNA, 58 bp, Artificial
  Synthetic oligonucleotide
ttcacattagcccattgtcaggaagtgctcagcatatagaggaatgttcctgttatcc

SEQ ID NO: 77439 - DNA, 60 bp, Artificial
  Synthetic oligonucleotide
gtgagaagagcaacagtatcagcagatccactagcatctctattggagatgtgccacagc

SEQ ID NO: 77440 - DNA, 60 bp, Artificial
  Synthetic oligonucleotide
gtattggttcatggtctcaaaatatcctcagaactcaggagtcagagtgcgtttgcatca

SEQ ID NO: 77441 - DNA, 60 bp, Artificial
  Synthetic oligonucleotide
gataagaggaaggccgcaagaaactagagtatggtggacctcaaacagtattgtcgtgtt

SEQ ID NO: 77442 - DNA, 60 bp, Artificial
  Synthetic oligonucleotide
aagagactagagtatggtggacctcaaacagtattgtcgtattttgtggcacttctggta

SEQ ID NO: 77443 - DNA, 60 bp, Artificial
  Synthetic oligonucleotide
gttgataagaggaaggccacaagagactagagtatggtggacctcaaacagtattgtcgt

SEQ ID NO: 77444 - DNA, 60 bp, Artificial
  Synthetic oligonucleotide
gttgataagaggaaggccgcaagaaaatagagtatggtggacctcaaacagtattgtcgt

SEQ ID NO: 77445 - DNA, 60 bp, Artificial
  Synthetic oligonucleotide
agtgaaaatgaatccaaatcagaagataataacaattggctctgtctctctaaccattgc

SEQ ID NO: 77446 - DNA, 60 bp, Artificial
  Synthetic oligonucleotide
gccttacaactactgcttgaagtagagcaagagataagaactttctcgtttcagcttatt

SEQ ID NO: 77447 - DNA, 60 bp, Artificial
  Synthetic oligonucleotide
ccaggcgatcatggaaaagaacatcatactgaaagcgaacttcagtgtgatctttaaccg

SEQ ID NO: 77448 - DNA, 60 bp, Artificial
  Synthetic oligonucleotide
agctttgagcagataacgttcttgcaggcattgcaactcttacttgaagttgagagtgag

SEQ ID NO: 77449 - DNA, 60 bp, Artificial
  Synthetic oligonucleotide
atctctaagaggaagaggcagcactcttggtctggacatcgaaacagccactcgcgctgg

SEQ ID NO: 77450 - DNA, 60 bp, Artificial
  Synthetic oligonucleotide
cactacccaaaggtctataaaacctactttgaaaaggttgaaagattgaaacatgggacc

SEQ ID NO: 77451 - DNA, 60 bp, Artificial
  Synthetic oligonucleotide
aatgaatccaaatcagaagataataacaattggttccgtctctctaaccattgcaacagt

SEQ ID NO: 77452 - DNA, 60 bp, Artificial
  Synthetic oligonucleotide
atgaatccaaatcagaagataataacaattggttccgtctctctaaccattgcaacagta

SEQ ID NO: 77453 - DNA, 60 bp, Artificial
  Synthetic oligonucleotide
ggacaacctggaacctggaaccttcgatcttggagggctatatgaagcaattgaggagtg

SEQ ID NO: 77454 - DNA, 60 bp, Artificial
  Synthetic oligonucleotide
agaaattcttccctagcagttcatacaggagaccggttgggatttccagtatggtggagg

SEQ ID NO: 77455 - DNA, 60 bp, Artificial
  Synthetic oligonucleotide
aattcttccctagcagttcatacaggagaccggttgggatttctagtatggtggaggcca

SEQ ID NO: 77456 - DNA, 60 bp, Artificial
  Synthetic oligonucleotide
atccttgctatttatagtacggtatcgagcagtctggttttggtgggactgatcatttcc

SEQ ID NO: 77457 - DNA, 60 bp, Artificial
  Synthetic oligonucleotide
ggaatcctcatcggcggacttgaatggaatgataactcaattcgagcgtctgaaaatata

SEQ ID NO: 77458 - DNA, 60 bp, Artificial
  Synthetic oligonucleotide
caaacagcagcacaacgagcaatgatggaccaggtgcgagaaagcagaaatcctgggaat

SEQ ID NO: 77459 - DNA, 60 bp, Artificial
  Synthetic oligonucleotide
cattacccaaaggtctataaaacctattttgaaaaggtcgaaaggttaaaacatgggacc

SEQ ID NO: 77460 - DNA, 60 bp, Artificial
  Synthetic oligonucleotide
ggtatcgagcagtctagtcttggtagggctgatattggcaatgggtgtttggatgtgttc

SEQ ID NO: 77461 - DNA, 60 bp, Artificial
  Synthetic oligonucleotide
agggaacatacactaatactggctcacagccaatcttatatttctggggtgtgcaccatc

SEQ ID NO: 77462 - DNA, 60 bp, Artificial
  Synthetic oligonucleotide
ggggacatataccaatacagactctcagccaatcttatatttctggggtgtgcaccatcc

SEQ ID NO: 77463 - DNA, 60 bp, Artificial
  Synthetic oligonucleotide
tgttccgttccatttaggaaccaaacaagtatgcatagcatggtctagctcaagttgcca

SEQ ID NO: 77464 - DNA, 60 bp, Artificial
  Synthetic oligonucleotide
gtgtatcaaatcctcgccatttatagtacggtatcgagcagtctagtcttggtagggctg

SEQ ID NO: 77465 - DNA, 60 bp, Artificial
  Synthetic oligonucleotide
ttggtgtgtatcaaatcctcgccatttatagtacggtatcgagcagtctagtcttggtag

SEQ ID NO: 77466 - DNA, 60 bp, Artificial
  Synthetic oligonucleotide
agtgaaaatgaatccaaatcagaagataataacaattggctccgtctctctaaccattgc

SEQ ID NO: 77467 - DNA, 60 bp, Artificial
  Synthetic oligonucleotide
acaagagagcctgctactggcaacagggatgaagaacgttcctgaaattccaaaaggaag

SEQ ID NO: 77468 - DNA, 60 bp, Artificial
  Synthetic oligonucleotide
acaaaagagcctgctactggcaacagggatgaagaacgttcctgaaattccaaaagggag

SEQ ID NO: 77469 - DNA, 60 bp, Artificial
  Synthetic oligonucleotide
tgggggactatatgaagcaattgaggagtgcctgattaatgatccctgggttttgcttaa

SEQ ID NO: 77470 - DNA, 60 bp, Artificial
  Synthetic oligonucleotide
gggggctatacgaagcaattgaggagtgcctgattaatgatccctgggttttgcttaatg

SEQ ID NO: 77471 - DNA, 60 bp, Artificial
  Synthetic oligonucleotide
aaccatttgaatggatgtcaatccgactttacttttcttgaaagttccagtgcagaatgc

SEQ ID NO: 77472 - DNA, 60 bp, Artificial
  Synthetic oligonucleotide
caaaccatttgaatggatgtcaatccgactttacttttcctgaaagttccagcgcaaaat

SEQ ID NO: 77473 - DNA, 57 bp, Artificial
  Synthetic oligonucleotide
tggcctgatggggcgaatatcaatttcatgcctatataagctttcgcaattttagaa

SEQ ID NO: 77474 - DNA, 60 bp, Artificial
  Synthetic oligonucleotide
tggcctgatggggcgaatatcaatttcatgcctatataagctttcgcaattttagaaaaa

SEQ ID NO: 77475 - DNA, 59 bp, Artificial
  Synthetic oligonucleotide
tggcctgatggggcgaatatcaatttcatgcctatataagctttcgcaattttagaaaa

SEQ ID NO: 77476 - DNA, 60 bp, Artificial
  Synthetic oligonucleotide
cacttcaggcacctatggaacaggctcatggcctgatggggcgaatatcaatttcatgcc

SEQ ID NO: 77477 - DNA, 50 bp, Artificial
  Synthetic oligonucleotide
gtcaaatacagacaatgctgctttcccgcagatgactaagtcgtacaaaa

SEQ ID NO: 77478 - DNA, 50 bp, Artificial
  Synthetic oligonucleotide
gtcaaatacagacaatgctgctttcccgcagatgactaagtcatacaaaa

SEQ ID NO: 77479 - DNA, 60 bp, Artificial
  Synthetic oligonucleotide
cgggcaaccttcaaacattgaaaataagagtacatgaggggtatgaagaattcacaatgg

SEQ ID NO: 77480 - DNA, 60 bp, Artificial
  Synthetic oligonucleotide
ttacgggcaaccttcaaacattgaaaataagagtacatgaagggtatgaagagttcacaa

SEQ ID NO: 77481 - DNA, 60 bp, Artificial
  Synthetic oligonucleotide
cataagaaagctactcagtatgagagacatgtgtgatgctccctttgatgatagactcag

SEQ ID NO: 77482 - DNA, 50 bp, Artificial
  Synthetic oligonucleotide
gtttgtatcaatggaacttgtacagtagtaatgactgatggaagtgcatc

SEQ ID NO: 77483 - DNA, 60 bp, Artificial
  Synthetic oligonucleotide
gaccatactcaatacagagcagagtcattgcagaatagaatacagatagacccagtgaaa

SEQ ID NO: 77484 - DNA, 60 bp, Artificial
  Synthetic oligonucleotide
cgattttcactggctactccttgatcccaatgacacagtgaccttcactttcaatggagc

SEQ ID NO: 77485 - DNA, 57 bp, Artificial
  Synthetic oligonucleotide
cgattttcactggctactccttgatcccaatgacacagtgaccttcactttcaatgg

SEQ ID NO: 77486 - DNA, 59 bp, Artificial
  Synthetic oligonucleotide
ggctcatggcctgatggggcgaatatcaatttcatgcctatataagctttcgcaatttt

SEQ ID NO: 77487 - DNA, 60 bp, Artificial
  Synthetic oligonucleotide
aactatttgaatggatgtcaatccgactttacttttcttgaaagttccagcgcaaaatgc

SEQ ID NO: 77488 - DNA, 60 bp, Artificial
  Synthetic oligonucleotide
aagataataacaattggttccgtctctctaaccattgcaacagtatgtttcctcatgcag

SEQ ID NO: 77489 - DNA, 60 bp, Artificial
  Synthetic oligonucleotide
gaagataataacaattggttccgtctctctaaccattgcaacagtatgtttcctcatgca

SEQ ID NO: 77490 - DNA, 60 bp, Artificial
  Synthetic oligonucleotide
cgggaacagggtacaccatggacacagtcaacagaacacatcaatattcagagaagggga

SEQ ID NO: 77491 - DNA, 60 bp, Artificial
  Synthetic oligonucleotide
actttggacatgcatgatgctaatgtaaagaatctacatgaaaaggtgaaatcacaatta

SEQ ID NO: 77492 - DNA, 60 bp, Artificial
  Synthetic oligonucleotide
ggaaatctaatagctccttggtatgcttacaagttcactagttcaagacacaaaggagcc

SEQ ID NO: 77493 - DNA, 60 bp, Artificial
  Synthetic oligonucleotide
gggaatttaatagctccttggtatgcttacaagttcactagttcaagacacaaaggagcc

SEQ ID NO: 77494 - DNA, 60 bp, Artificial
  Synthetic oligonucleotide
ctgctggaaaatgagaggactttggatatgcatgatgctaatgtaaagaatctacatgaa

SEQ ID NO: 77495 - DNA, 60 bp, Artificial
  Synthetic oligonucleotide
ggaaaatgagaggactttggacatgcatgatgctaatgtaaagaatctacatgaaaaggt

SEQ ID NO: 77496 - DNA, 60 bp, Artificial
  Synthetic oligonucleotide
gaggactttggacatgcatgatgctaatgtaaagaatctacatgaaaaggtgaaatcaca

SEQ ID NO: 77497 - DNA, 60 bp, Artificial
  Synthetic oligonucleotide
agaaaatgagaggactttggacatgcatgatgctaatgtaaagaatctacatgaaaaagt

SEQ ID NO: 77498 - DNA, 60 bp, Artificial
  Synthetic oligonucleotide
taaatatggcagattacagcattgattccagttatgtatgctcagggctcgttggtgaca

SEQ ID NO: 77499 - DNA, 60 bp, Artificial
  Synthetic oligonucleotide
ttccttgaccggcttcgccgagatcagaaatctctaagaggaagaggcagcactcttggt

SEQ ID NO: 77500 - DNA, 60 bp, Artificial
  Synthetic oligonucleotide
tcaaggggaaattccaaacagcagcacaacgagcaatgatggaccaggtgagggaaagcc

SEQ ID NO: 77501 - DNA, 60 bp, Artificial
  Synthetic oligonucleotide
caaagggaaattccaaacagcagcacaacgagcaatgatggaccaggtgagggaaagccg

SEQ ID NO: 77502 - DNA, 54 bp, Artificial
  Synthetic oligonucleotide
gggaaattccaaacagcagcacaacgagcaatgatggaccaggtgagggaaagc

SEQ ID NO: 77503 - DNA, 60 bp, Artificial
  Synthetic oligonucleotide
gaatcatgagggaatacaagcaggagtagatagattctataggacctgcaagctagtcgg

SEQ ID NO: 77504 - DNA, 60 bp, Artificial
  Synthetic oligonucleotide
gaatcatgagggaatacaagcaggagtagatagattctataggacctgcaagctggtcgg

SEQ ID NO: 77505 - DNA, 60 bp, Artificial
  Synthetic oligonucleotide
atcatgagggaatacaagcaggagtagatagattctataggacctgcaagctggtcggaa

SEQ ID NO: 77506 - DNA, 60 bp, Artificial
  Synthetic oligonucleotide
catgaaggaatacaagcaggagtagatagattctataggacctgcaagctggtcggaatc

SEQ ID NO: 77507 - DNA, 57 bp, Artificial
  Synthetic oligonucleotide
agaatgccactgaaatcagagcatctgttgggagaatggttggtggaattgggagat

SEQ ID NO: 77508 - DNA, 60 bp, Artificial
  Synthetic oligonucleotide
agttgggagttccaattatcaacagtcctttgtaccgagtccgggggagagaccacaagt

SEQ ID NO: 77509 - DNA, 60 bp, Artificial
  Synthetic oligonucleotide
tacttttcttgaaagttccagcgcaaaatgccataagcaccacattcccatatactggag

SEQ ID NO: 77510 - DNA, 60 bp, Artificial
  Synthetic oligonucleotide
aatcactcactgagtgacatccacatcatggcgtctcaaggcaccaaacgatcttatgaa

SEQ ID NO: 77511 - DNA, 60 bp, Artificial
  Synthetic oligonucleotide
tttgcatagcatggtccagctcaagttgccatgatgggaaagcatggttgcatgtttgtg

SEQ ID NO: 77512 - DNA, 60 bp, Artificial
  Synthetic oligonucleotide
gctgcaatctgttcgagaaattcttccctagcagttcatacaggagaccggttgggattt

SEQ ID NO: 77513 - DNA, 60 bp, Artificial
  Synthetic oligonucleotide
gtgctgcaatttattcgagaaattcttccctagcagttcatacaggagaccggttggaat

SEQ ID NO: 77514 - DNA, 60 bp, Artificial
  Synthetic oligonucleotide
cactggctactccttgatcccaatgacacagtgaccttcactttcaatggggcattcata

SEQ ID NO: 77515 - DNA, 60 bp, Artificial
  Synthetic oligonucleotide
gtgacatcttacttggggaccaaagttggtcctacatagtggagagacctggagcccaac

SEQ ID NO: 77516 - DNA, 60 bp, Artificial
  Synthetic oligonucleotide
acacagtttgaggcagtagagcttgaattttcaaacctcgaaagaagaatagacaatcta

SEQ ID NO: 77517 - DNA, 60 bp, Artificial
  Synthetic oligonucleotide
cgcaagtggacacaatattagaaaagaatgtgacagtaacgcactcagttgagcttctag

SEQ ID NO: 77518 - DNA, 57 bp, Artificial
  Synthetic oligonucleotide
tgattgcaatcataatactcgcgatagtggcctctaccagcaaatcagacaagatct

SEQ ID NO: 77519 - DNA, 60 bp, Artificial
  Synthetic oligonucleotide
ggcaactggtctgagaaatgtcccacaagcagagacaagagggttgttcggggccatagc

SEQ ID NO: 77520 - DNA, 51 bp, Artificial
  Synthetic oligonucleotide
gagggttgttcggggccatagctgggtttatagaagggggatggacaggca

SEQ ID NO: 77521 - DNA, 60 bp, Artificial
  Synthetic oligonucleotide
ggctaccatcatgagaattcacagggatcgggctacgcagcagataaagaaagtactcag

SEQ ID NO: 77522 - DNA, 60 bp, Artificial
  Synthetic oligonucleotide
aattcacagggatcgggctacgcagcagataaagaaagtactcagaaagcaatcgacggg

SEQ ID NO: 77523 - DNA, 60 bp, Artificial
  Synthetic oligonucleotide
cagctgtgaatggacaaagagggagaattgattattattggtccgtgcttcaaccaggag

SEQ ID NO: 77524 - DNA, 60 bp, Artificial
  Synthetic oligonucleotide
aatgtcagccccctctggattggagaatgccccaagtatgtcagaagtgatagcctaaga

SEQ ID NO: 77525 - DNA, 60 bp, Artificial
  Synthetic oligonucleotide
cctctggattggagaatgccccaagtatgtcagaagtgatagcctaagactggcaactgg

SEQ ID NO: 77526 - DNA, 60 bp, Artificial
  Synthetic oligonucleotide
tagcctaagactggcaactggtctgagaaatgtcccacaagcagagacaagagggttgtt

SEQ ID NO: 77527 - DNA, 60 bp, Artificial
  Synthetic oligonucleotide
caatgctgaacttttagttctactggaaaatgagagaaccctggatctgcatgatgccaa

SEQ ID NO: 77528 - DNA, 60 bp, Artificial
  Synthetic oligonucleotide
gatgtttggacatacaatgctgaacttttagttctactggaaaatgagagaaccctggat

SEQ ID NO: 77529 - DNA, 50 bp, Artificial
  Synthetic oligonucleotide
aatgaactggaagagttgaaagcactcattggatctggagaaagagtaca

SEQ ID NO: 77530 - DNA, 60 bp, Artificial
  Synthetic oligonucleotide
gttgagcttctagagagtcaaaaggaggaaagattctgcagagtgttaagtaaagcccct

SEQ ID NO: 77531 - DNA, 60 bp, Artificial
  Synthetic oligonucleotide
ggggactgagagcatgaattttgccaaaggcccagaaatagcagcaagaccagctgtgaa

SEQ ID NO: 77532 - DNA, 58 bp, Artificial
  Synthetic oligonucleotide
cagtaattaggggaacatacaacaatactggctctcaaccgatcctatatttctgggg

SEQ ID NO: 77533 - DNA, 60 bp, Artificial
  Synthetic oligonucleotide
ggccggagtggacactagcagcggagttacgaaagcttgcccctacaatagtgggtcgtc

SEQ ID NO: 77534 - DNA, 60 bp, Artificial
  Synthetic oligonucleotide
ccaagagaacatgggccggagtggacactagcagcggagttacgaaagcttgcccctaca

SEQ ID NO: 77535 - DNA, 60 bp, Artificial
  Synthetic oligonucleotide
aaccctggatctgcatgatgccaatgtgaagaacctatatgaaaaagtgaagtcacaatt

SEQ ID NO: 77536 - DNA, 60 bp, Artificial
  Synthetic oligonucleotide
tagtggagagacctggagcccaacatgggatatgttacccagggacattgaatgaactgg

SEQ ID NO: 77537 - DNA, 60 bp, Artificial
  Synthetic oligonucleotide
caggacgagagcaaacttaataggcaggaaatagattcagtgaaattggaaaatctaggt

SEQ ID NO: 77538 - DNA, 60 bp, Artificial
  Synthetic oligonucleotide
gtgggactgatcgttgccatgggtctttggatgtgctcgaacggctcaatgcaatgcagg

SEQ ID NO: 77539 - DNA, 60 bp, Artificial
  Synthetic oligonucleotide
gtctagttttggtgggactgatcgttgccatgggtctttggatgtgctcgaacggctcaa

SEQ ID NO: 77540 - DNA, 60 bp, Artificial
  Synthetic oligonucleotide
tggaaacccccaatgtgacatcttacttggggaccaaagttggtcctacatagtggagag

SEQ ID NO: 77541 - DNA, 60 bp, Artificial
  Synthetic oligonucleotide
agtaaagcccctttagatctaaagggttgcactattgaaggttggattcttggaaacccc

SEQ ID NO: 77542 - DNA, 60 bp, Artificial
  Synthetic oligonucleotide
cgggactctagcatacttactgacagtcagacagcgaccaaaaggattcggatggccatc

SEQ ID NO: 77543 - DNA, 60 bp, Artificial
  Synthetic oligonucleotide
ctccatacagccatggaacggggacaggatacaccatggacacagtcaacagaacacatc

SEQ ID NO: 77544 - DNA, 60 bp, Artificial
  Synthetic oligonucleotide
ctccatacagccatggaacagggacaggatacaccatggacacagtcaacagaacacacc

SEQ ID NO: 77545 - DNA, 60 bp, Artificial
  Synthetic oligonucleotide
cctccatacagccatggaacggggacaggatacaccatggacacagtcaacagaacacat

SEQ ID NO: 77546 - DNA, 60 bp, Artificial
  Synthetic oligonucleotide
atgagtcttctaaccgaggtcgaaacgtacgttctctctatcattccatcaggccccctc

SEQ ID NO: 77547 - DNA, 60 bp, Artificial
  Synthetic oligonucleotide
agacaggatctgcattggttaccatgcaaacaactcgacaacacaagtggacacaatatt

SEQ ID NO: 77548 - DNA, 60 bp, Artificial
  Synthetic oligonucleotide
gctgcaatctattcgagaaattcttccctagcagttcatataggagaccggttggaattt

SEQ ID NO: 77549 - DNA, 60 bp, Artificial
  Synthetic oligonucleotide
catgtttgtgtcactggggatgatagaaatgcgactgctagtttcatttatgatgggatg

SEQ ID NO: 77550 - DNA, 60 bp, Artificial
  Synthetic oligonucleotide
ctggccattgcaatgggccttatcttcatgtgtgtgaagaatggaaacatgcggtgcact

SEQ ID NO: 77551 - DNA, 60 bp, Artificial
  Synthetic oligonucleotide
cgaaaggagaatagacaatctgaacaaaagaatggaagatggatttttagacgtgtggac

SEQ ID NO: 77552 - DNA, 60 bp, Artificial
  Synthetic oligonucleotide
cttcctttgacatgagtaacgatggatcttatttcttcggagacaatgcagaggagtatg

SEQ ID NO: 77553 - DNA, 60 bp, Artificial
  Synthetic oligonucleotide
gtccgaagtatgtgaaacaagagagcctactactggcaacagggatgaagaacgttcctg

SEQ ID NO: 77554 - DNA, 60 bp, Artificial
  Synthetic oligonucleotide
ggtccagctcaagttgccatgatgggaaagcatggttgcacgtttgtgtcactggggatg

SEQ ID NO: 77555 - DNA, 60 bp, Artificial
  Synthetic oligonucleotide
caatgatgtgggagatcaatggtcctgagtcagtgctggtcaatacttatcagtggatca

SEQ ID NO: 77556 - DNA, 60 bp, Artificial
  Synthetic oligonucleotide
ggttgataagaggaatgccgcaagaaactagagtatggtggacctcaaacagtattgtcg

SEQ ID NO: 77557 - DNA, 60 bp, Artificial
  Synthetic oligonucleotide
tcttggtgtgtatcaaattcttgctatttatagtacggtatcgagcagtctggtcttggt

SEQ ID NO: 77558 - DNA, 60 bp, Artificial
  Synthetic oligonucleotide
cattttgtggcacttcaggcacctatggaacaggctcatggcctgatggggcaaatatca

SEQ ID NO: 77559 - DNA, 60 bp, Artificial
  Synthetic oligonucleotide
ccggctgcaactgcattagctaatactatagaggtcttcagatcgaacggtctgacagct

SEQ ID NO: 77560 - DNA, 60 bp, Artificial
  Synthetic oligonucleotide
cagccggctgcaactgcgttagctaatactatagaggtcttcagatcgaacggtctgacg

SEQ ID NO: 77561 - DNA, 60 bp, Artificial
  Synthetic oligonucleotide
cttgaggcaatcatggaatggctaaagacaagaccaatcctgtcacctctgactaagggg

SEQ ID NO: 77562 - DNA, 60 bp, Artificial
  Synthetic oligonucleotide
agcactcatggaatggctaaagacaagaccaatcctgtcacctctgactaaggggatttt

SEQ ID NO: 77563 - DNA, 60 bp, Artificial
  Synthetic oligonucleotide
cggtggatttgaatggaatgataactcaattcgagcgtctgaaaatatacagagattcgc

SEQ ID NO: 77564 - DNA, 60 bp, Artificial
  Synthetic oligonucleotide
ggtgcacgaggggtatgaagaattcacaatggttgggagaagagcaacagctattctcag

SEQ ID NO: 77565 - DNA, 60 bp, Artificial
  Synthetic oligonucleotide
ggtgcatgaggggtatgaagaattcacaatggttgggagaagagcaacagctattctcag

SEQ ID NO: 77566 - DNA, 60 bp, Artificial
  Synthetic oligonucleotide
agctttgagcagataacgttcttgcaagcattgcaactcttacttgaagttgagagtgag

SEQ ID NO: 77567 - DNA, 53 bp, Artificial
  Synthetic oligonucleotide
tgaagggagactgatccaaaacagcataacaatagagagaatggttctctcag

SEQ ID NO: 77568 - DNA, 60 bp, Artificial
  Synthetic oligonucleotide
gtccattaccctaaggtctataaaacctactttgaaaaggtcgaaaggttaaaacatgga

SEQ ID NO: 77569 - DNA, 60 bp, Artificial
  Synthetic oligonucleotide
cgggaacaggatacaccatggacacagtcaacagaacacatcaatattcagaaaagggga

SEQ ID NO: 77570 - DNA, 60 bp, Artificial
  Synthetic oligonucleotide
gagcctgctactggcaacagggatgaagaacgttcctgaaattccaaaaggaagaggcct

SEQ ID NO: 77571 - DNA, 60 bp, Artificial
  Synthetic oligonucleotide
gagcctgctactggcaacagggatgaagaacgttcctgaaattccaaaagggagaggact

SEQ ID NO: 77572 - DNA, 60 bp, Artificial
  Synthetic oligonucleotide
gcaacagggatgaagaacgttcctgaaattccaaaaggaagaggcttatttggtgccata

SEQ ID NO: 77573 - DNA, 60 bp, Artificial
  Synthetic oligonucleotide
ctgctactggcaacagggatgaagaacgttcctgaaattccaaaaggaagaggcctattt

SEQ ID NO: 77574 - DNA, 60 bp, Artificial
  Synthetic oligonucleotide
gggatgaagaacgttcctgaaattccaaaaggaagaggcctatttggtgccatagcgggt

SEQ ID NO: 77575 - DNA, 60 bp, Artificial
  Synthetic oligonucleotide
gggatgaagaacgttcctgaaattccaaaaggaagaggcttatttggtgccatagcgggt

SEQ ID NO: 77576 - DNA, 60 bp, Artificial
  Synthetic oligonucleotide
atagtacggtatcgagcagtctggttttggtggggctgatcattgccacgggtctttgga

SEQ ID NO: 77577 - DNA, 60 bp, Artificial
  Synthetic oligonucleotide
atagtacggtatcgagcagtctggttttggtggggctgatcattgccatgggtctttgga

SEQ ID NO: 77578 - DNA, 60 bp, Artificial
  Synthetic oligonucleotide
atatggagagaataaaagaattaagagatctaatgtcacagtcccgcactcgcgagatac

SEQ ID NO: 77579 - DNA, 60 bp, Artificial
  Synthetic oligonucleotide
attcgagcgtctgaaaatatacagagattcgcttggggagtccgtgatgagaatagggga

SEQ ID NO: 77580 - DNA, 60 bp, Artificial
  Synthetic oligonucleotide
agcgtctgaaaatatacagagattcgcttggggagtccgtgatgagagtaggggacctcc

SEQ ID NO: 77581 - DNA, 60 bp, Artificial
  Synthetic oligonucleotide
cgtctgaaaatatacagagattcgcttggggagtccgtgatgagaataggggacctccac

SEQ ID NO: 77582 - DNA, 60 bp, Artificial
  Synthetic oligonucleotide
cgtctgaaaatatacagagattcgcttggggagtccgtgatgagaataggggacttccac

SEQ ID NO: 77583 - DNA, 60 bp, Artificial
  Synthetic oligonucleotide
caacacgtatgaccatactcaatacagaacagagtcattgcagaatagaatacagataga

SEQ ID NO: 77584 - DNA, 60 bp, Artificial
  Synthetic oligonucleotide
gaacggctgcattgagggcaagctttctcaaatgtcaaaagaagtgaacgcaagaattga

SEQ ID NO: 77585 - DNA, 60 bp, Artificial
  Synthetic oligonucleotide
gaacggctgcattgagggcaagctttctcaaatgtcaaaagaagtgaacgcaaggattga

SEQ ID NO: 77586 - DNA, 60 bp, Artificial
  Synthetic oligonucleotide
gcaatctattcgagaaattcttccctagcagttcatacaggagaccagttgggatttcca

SEQ ID NO: 77587 - DNA, 60 bp, Artificial
  Synthetic oligonucleotide
cggcacagattgaaaatgacagagaatagtttcgaacaaataacatttatgcaagcctta

SEQ ID NO: 77588 - DNA, 60 bp, Artificial
  Synthetic oligonucleotide
ggcacagattgaaaatgacagagaatagtttcgaacaaataacatttatgcaagccttac

SEQ ID NO: 77589 - DNA, 60 bp, Artificial
  Synthetic oligonucleotide
ggggaagaaagcaatcgaccttggtcagtgtgggttgcttggaattattacaggaccacc

SEQ ID NO: 77590 - DNA, 60 bp, Artificial
  Synthetic oligonucleotide
gggaagttaaatagattaatcgagaagactaaccaacaatttgaattaatagacaatgag

SEQ ID NO: 77591 - DNA, 60 bp, Artificial
  Synthetic oligonucleotide
cagagaagaagcaatgcagaatagagtgaaaatcgatccggtcaaattgagcagtggtta

SEQ ID NO: 77592 - DNA, 60 bp, Artificial
  Synthetic oligonucleotide
atgtccaagatatgtgaaacaaaaaagcctgctgttggcaacaggaatgaagaatgtccc

SEQ ID NO: 77593 - DNA, 60 bp, Artificial
  Synthetic oligonucleotide
ataacaagcaatttacctttccaaaatgttaatagcagagcagtgggcaaatgtccaaga

SEQ ID NO: 77594 - DNA, 60 bp, Artificial
  Synthetic oligonucleotide
tgccagttgacgccaattgtgaaggggaatgctatcacagtggaggtacaataacaagca

SEQ ID NO: 77595 - DNA, 60 bp, Artificial
  Synthetic oligonucleotide
cgtgtgagcttctttaaagggaaatccacagggattcaaagtgaagtgccagttgacgcc

SEQ ID NO: 77596 - DNA, 60 bp, Artificial
  Synthetic oligonucleotide
gcaacatcctcaaggggaaattccaaacagcagcacaacgagcaatgatggaccaagtga

SEQ ID NO: 77597 - DNA, 60 bp, Artificial
  Synthetic oligonucleotide
gcacttgggcagggaaccacactggacaacaaacattcaaatggcacaatacatgataga

SEQ ID NO: 77598 - DNA, 60 bp, Artificial
  Synthetic oligonucleotide
agaaactagagtatggtggacctcaaacagtattgtcgtgttttgtggcacttcaggcac

SEQ ID NO: 77599 - DNA, 60 bp, Artificial
  Synthetic oligonucleotide
aagaaactagagtatggtggacctcaaacagtattgtcgtgttttgtggcacttcaggca

SEQ ID NO: 77600 - DNA, 60 bp, Artificial
  Synthetic oligonucleotide
acagtattggttcatggtctcaaaatatcctcagaacccaggagtcagagtgcgtttgca

SEQ ID NO: 77601 - DNA, 60 bp, Artificial
  Synthetic oligonucleotide
tggcaatgggtgtttggatgtgttcaaatggctcaatgcaatgtagaatatgtataggat

SEQ ID NO: 77602 - DNA, 60 bp, Artificial
  Synthetic oligonucleotide
gcaatgggtgtttggatgtgttcaaatggctcaatgcaatgtagaatatgtataggatcc

SEQ ID NO: 77603 - DNA, 64 bp, Artificial
  Synthetic oligonucleotide
ggtcaaatatattcaatatggagagaataaaagaattaagagatctaatgtcacagtcccgcac

SEQ ID NO: 77604 - DNA, 60 bp, Artificial
  Synthetic oligonucleotide
cccattccttgaccggcttcgccgagatcagaaatctctaagaggaagaggcagcactct

SEQ ID NO: 77605 - DNA, 60 bp, Artificial
  Synthetic oligonucleotide
gaccaggcgattatggataagaacatcatactgaaagcgaacttcagtgtgattttcgat

SEQ ID NO: 77606 - DNA, 60 bp, Artificial
  Synthetic oligonucleotide
ctgagcagtggctacaaagatgtgatactttggtttagcttcggggcatcatgtttcata

SEQ ID NO: 77607 - DNA, 60 bp, Artificial
  Synthetic oligonucleotide
cttcaggtacctatggaacaggctcatggcctgatggggcaaatatcaacttcatgccta

SEQ ID NO: 77608 - DNA, 60 bp, Artificial
  Synthetic oligonucleotide
ccaacactaggtcaagctttcaggtagactgctttctttggcatgtccgcaaacgatttg

SEQ ID NO: 77609 - DNA, 60 bp, Artificial
  Synthetic oligonucleotide
ccaacactgggtcaagctttcaggtagactgctttctttggcatgtccgcaaacgatttg

SEQ ID NO: 77610 - DNA, 60 bp, Artificial
  Synthetic oligonucleotide
gacggagagttgacataaaccctggccatgcagacctcagtgccaaagaggcacaggatg

SEQ ID NO: 77611 - DNA, 60 bp, Artificial
  Synthetic oligonucleotide
cattcatagcccctgacagggcaagtttctttagaggagaatcactaggagtccagagtg

SEQ ID NO: 77612 - DNA, 60 bp, Artificial
  Synthetic oligonucleotide
gcccagcattgagcatcaacgaactaagcaatcttgcaaaaggagagaaggctaacgtgc

SEQ ID NO: 77613 - DNA, 60 bp, Artificial
  Synthetic oligonucleotide
aattgctgaagcaataattgtggccatggtattttcacaagaggattgcatgatcaaggc

SEQ ID NO: 77614 - DNA, 60 bp, Artificial
  Synthetic oligonucleotide
gaaacgggactctagcatacttactgacagccagacagcgaccaaaagatttcggatggc

SEQ ID NO: 77615 - DNA, 60 bp, Artificial
  Synthetic oligonucleotide
cgggactctagcatacttactgacagccagacagcgaccaaaagatttcggatggccatc

SEQ ID NO: 77616 - DNA, 60 bp, Artificial
  Synthetic oligonucleotide
agctcaagttgccatgatgggaaagcatggttgcacgtttgtgtcactggggatgatagg

SEQ ID NO: 77617 - DNA, 56 bp, Artificial
  Synthetic oligonucleotide
agctcaagttgccatgatgggaaagcatggttgcacgtttgtgtcactggggatga

SEQ ID NO: 77618 - DNA, 60 bp, Artificial
  Synthetic oligonucleotide
tgctccctttgatgatagactcagaagagatcagaaggcattaaagggaagaggcagcac

SEQ ID NO: 77619 - DNA, 60 bp, Artificial
  Synthetic oligonucleotide
tatcagtggatcatcagaaactgggagactgtgaaaattcaatggtcacaggatcccaca

SEQ ID NO: 77620 - DNA, 60 bp, Artificial
  Synthetic oligonucleotide
taccagtggatcatcagaaactgggagactgtgaaaattcaatggtcacaggatcccaca

SEQ ID NO: 77621 - DNA, 50 bp, Artificial
  Synthetic oligonucleotide
aatgggaccattaaagacagaacaccatataggtctctaattcgtttccc

SEQ ID NO: 77622 - DNA, 60 bp, Artificial
  Synthetic oligonucleotide
gggagaatgctgaggaagatggcactggttgtttcgaaatatttcacaagtgtgatgacg

SEQ ID NO: 77623 - DNA, 60 bp, Artificial
  Synthetic oligonucleotide
gaatgcggaggaagatggcactggttgtttcgaaatctttcacaaatgtgatgacgactg

SEQ ID NO: 77624 - DNA, 60 bp, Artificial
  Synthetic oligonucleotide
ggtgccatagcgggtttcattgaaaatggatgggaaggtctaattgatggatggtatggc

SEQ ID NO: 77625 - DNA, 60 bp, Artificial
  Synthetic oligonucleotide
ggcctatttggtgccatagcgggtttcattgaaaatggatgggaaggtctgattgatgga

SEQ ID NO: 77626 - DNA, 60 bp, Artificial
  Synthetic oligonucleotide
aaccagctctgataatttggggagttcatcactctgtatcggttagcgagcagaccaaac

SEQ ID NO: 77627 - DNA, 60 bp, Artificial
  Synthetic oligonucleotide
ccagctctgataatttggggagttcatcactctgtatcggttagcgagcagaccaaactc

SEQ ID NO: 77628 - DNA, 60 bp, Artificial
  Synthetic oligonucleotide
gtatcagcagatccactagcatctctattggagatgtgccacagcacacagattggtgga

SEQ ID NO: 77629 - DNA, 60 bp, Artificial
  Synthetic oligonucleotide
ggatgtcaatccgactttacttttcttgaaagttccagtgcagaatgccataagcaccac

SEQ ID NO: 77630 - DNA, 60 bp, Artificial
  Synthetic oligonucleotide
tcaggttcttctttctatgcagagatgaagtggttgctgtcgaattcagacaatgcggca

SEQ ID NO: 77631 - DNA, 60 bp, Artificial
  Synthetic oligonucleotide
atcaggttcttctttctatgcagagatgaagtggttgctgtcgaattcagacaatgcggc

SEQ ID NO: 77632 - DNA, 60 bp, Artificial
  Synthetic oligonucleotide
caacgcacttccaaaggaaaagaagagtgagggacaacatgaccaagaaaatggtcacac

SEQ ID NO: 77633 - DNA, 60 bp, Artificial
  Synthetic oligonucleotide
aaacactgatcttgaggcactcatggaatggctaaagacaagaccaatcctgtcacctct

SEQ ID NO: 77634 - DNA, 60 bp, Artificial
  Synthetic oligonucleotide
tttcccaaaagtacatgggcaggagtagacaccagcagtggggtaacaaaagcttgtcct

SEQ ID NO: 77635 - DNA, 60 bp, Artificial
  Synthetic oligonucleotide
ttggtgtttatcaaattcttgccatttatagtacggtatcgagcagtctagtcttggtag

SEQ ID NO: 77636 - DNA, 60 bp, Artificial
  Synthetic oligonucleotide
gatgtttcccaaaagtacatgggcaggagtagacaccagcagtggggtaacaagagcttg

SEQ ID NO: 77637 - DNA, 60 bp, Artificial
  Synthetic oligonucleotide
atgtttcccaaaagtacatgggcaggagtagacaccagcagtggagtaacaaaagcttgc

SEQ ID NO: 77638 - DNA, 60 bp, Artificial
  Synthetic oligonucleotide
tttcccaaaagtacatgggcaggagtagacaccggcagtggggtaacaaaagcttgtcct

SEQ ID NO: 77639 - DNA, 60 bp, Artificial
  Synthetic oligonucleotide
gtgtgtatcaaattcttgccatttatagtacggtatcgagcagtctagtcttggtaggac

SEQ ID NO: 77640 - DNA, 60 bp, Artificial
  Synthetic oligonucleotide
ccaatgacacagtgaccttcactttcaatggggcattcatagctcctgacagggcaagtt

SEQ ID NO: 77641 - DNA, 56 bp, Artificial
  Synthetic oligonucleotide
ccaatgacacagtgaccttcactttcaatggggcattcatagctcctgacagggca

SEQ ID NO: 77642 - DNA, 60 bp, Artificial
  Synthetic oligonucleotide
actccttgatcccaatgacacagtgaccttcactttcaatggggcattcatagctcctga

SEQ ID NO: 77643 - DNA, 60 bp, Artificial
  Synthetic oligonucleotide
cgtctgaaaatatacagagattcgcttggggagtccgtaatgagaataggggacctccac

SEQ ID NO: 77644 - DNA, 60 bp, Artificial
  Synthetic oligonucleotide
aattcgagtgtctgaaaatatacagagattcgcttggggaatccgtgatgaggatagggg

SEQ ID NO: 77645 - DNA, 60 bp, Artificial
  Synthetic oligonucleotide
ctcagggaatcaggcggaattgataaggagacaatgggattcacatacagcggaataaga

SEQ ID NO: 77646 - DNA, 60 bp, Artificial
  Synthetic oligonucleotide
gcattggttcgtggtctcaaaatattctcagaacacaggagtcggaatgtgtttgtatca

SEQ ID NO: 77647 - DNA, 60 bp, Artificial
  Synthetic oligonucleotide
agaacaacatgataaacaatgaccttggaccagcaacagctcaaatggctcttcagctgt

SEQ ID NO: 77648 - DNA, 60 bp, Artificial
  Synthetic oligonucleotide
gaacaacatgataaacaatgaccttggaccagcaacagctcaaatggctcttcagctatt

SEQ ID NO: 77649 - DNA, 60 bp, Artificial
  Synthetic oligonucleotide
tatgaccatactcaatacagaacagagtcattgcagaatagaatacagatagacccagtt

SEQ ID NO: 77650 - DNA, 60 bp, Artificial
  Synthetic oligonucleotide
ggtagataatcactcaccgagtgacatccacatcatggcgtctcaaggcaccaaacgatc

SEQ ID NO: 77651 - DNA, 60 bp, Artificial
  Synthetic oligonucleotide
acatagactaaagattacagagaatagttttgaacaaataacatttatgcaagccttaca

SEQ ID NO: 77652 - DNA, 60 bp, Artificial
  Synthetic oligonucleotide
tattcgagaaattcttccctagcagttcatacaggagaccagttggaatttccagcatgg

SEQ ID NO: 77653 - DNA, 60 bp, Artificial
  Synthetic oligonucleotide
aagaacaacatgataaacaatgaccttggaccagcgacagctcagatggctcttcagcta

SEQ ID NO: 77654 - DNA, 56 bp, Artificial
  Synthetic oligonucleotide
gaacaacatgataaacaatgaccttggaccagcaacggctcaaatggctctccagt

SEQ ID NO: 77655 - DNA, 60 bp, Artificial
  Synthetic oligonucleotide
gaacaacatgataaacaatgaccttggaccagcaacggctcaaatggctcttcagctgtt

SEQ ID NO: 77656 - DNA, 59 bp, Artificial
  Synthetic oligonucleotide
agcaaaagcaggggaaaatgattgcaatcataatattggcaatagtggtctctaccagc

SEQ ID NO: 77657 - DNA, 60 bp, Artificial
  Synthetic oligonucleotide
agcaaaagcaggggaaaatgattgcaatcataatattggcaatagtggtctctaccagca

SEQ ID NO: 77658 - DNA, 60 bp, Artificial
  Synthetic oligonucleotide
agtgcgacctattacttggtgatcaaagctggtcatatatagtggaaaggcctactgctc

SEQ ID NO: 77659 - DNA, 60 bp, Artificial
  Synthetic oligonucleotide
gcgacctattgcttggtgatcaaagctggtcatatatagtggaaaggcctactgctcaaa

SEQ ID NO: 77660 - DNA, 60 bp, Artificial
  Synthetic oligonucleotide
aatgcgacctattgcttggtgatcaaagctggtcatatatagtggaaaggcctactgctc

SEQ ID NO: 77661 - DNA, 60 bp, Artificial
  Synthetic oligonucleotide
gtgcgacctattacttggtgatcaaagctggtcatatatagtggaaaggcctactgctca

SEQ ID NO: 77662 - DNA, 60 bp, Artificial
  Synthetic oligonucleotide
accgagtgacatccacatcatggcgtctcaaggcaccaaacgatcttatgagcagatgga

SEQ ID NO: 77663 - DNA, 60 bp, Artificial
  Synthetic oligonucleotide
ccctgcaatcaaccaagtgaccccatgtgagccaatcataatagagaggaacatgacaga

SEQ ID NO: 77664 - DNA, 60 bp, Artificial
  Synthetic oligonucleotide
acgggtaaccttcaaacattgaaaataagagtacatgaggggtatgaagagttcacaatg

SEQ ID NO: 77665 - DNA, 60 bp, Artificial
  Synthetic oligonucleotide
ataaagtcaattcaatcattgacaaaatgaacacacagtttgaggcagtagagcatgagt

SEQ ID NO: 77666 - DNA, 60 bp, Artificial
  Synthetic oligonucleotide
caatagacgggatcaccaataaagtcaattcaatcattgacaaaatgaacacacaatttg

SEQ ID NO: 77667 - DNA, 60 bp, Artificial
  Synthetic oligonucleotide
ataaagtcaattcaatcattgacaaaatgaacacacaatttgaggcagtagagcatgagt

SEQ ID NO: 77668 - DNA, 60 bp, Artificial
  Synthetic oligonucleotide
ggatcaccaataaagtcaattcaatcattgacaaaatgaacacacagtttgatgcagtag

SEQ ID NO: 77669 - DNA, 60 bp, Artificial
  Synthetic oligonucleotide
gaggattgtttggagcaatagctgggtttatagaaggaggatggacaggcatggtagacg

SEQ ID NO: 77670 - DNA, 60 bp, Artificial
  Synthetic oligonucleotide
tgtttggagcaatagctgggtttatagaaggaggatggacaggcatggtagacggttggt

SEQ ID NO: 77671 - DNA, 60 bp, Artificial
  Synthetic oligonucleotide
ggagcaatagctgggtttatagaaggaggatggacaggcatggtagacggttggtacgga

SEQ ID NO: 77672 - DNA, 60 bp, Artificial
  Synthetic oligonucleotide
tgaaaacacgaggattgtttggagcaatagctgggtttatagaaggaggatggacaggca

SEQ ID NO: 77673 - DNA, 57 bp, Artificial
  Synthetic oligonucleotide
ggggattcatcattccggatcaaccacagaacagaccaaattatatggaagtgggaa

SEQ ID NO: 77674 - DNA, 60 bp, Artificial
  Synthetic oligonucleotide
atccttgctatttatagtacggtatcgagcagtctggttttggtaggactgatcattgtc

SEQ ID NO: 77675 - DNA, 60 bp, Artificial
  Synthetic oligonucleotide
aattcttgctatttatagtacggtatcgagcagtctggtcttggtagggctgatcatagc

SEQ ID NO: 77676 - DNA, 60 bp, Artificial
  Synthetic oligonucleotide
ccttgctatttatagtacggtatcgagcagtctggttttggtggggctgatcattgccat

SEQ ID NO: 77677 - DNA, 60 bp, Artificial
  Synthetic oligonucleotide
aacttaccaatcgagaactgtgatgcaacctgccaaactattgcaggggtactaaggaca

SEQ ID NO: 77678 - DNA, 60 bp, Artificial
  Synthetic oligonucleotide
ctggaaaccagccaatactctacttctggggtgtgcaccatcctccggataccaatgagc

SEQ ID NO: 77679 - DNA, 60 bp, Artificial
  Synthetic oligonucleotide
aaggtcttgaacagagcccctctcgacctgagaagctgcaccatagagggttggatattg

SEQ ID NO: 77680 - DNA, 60 bp, Artificial
  Synthetic oligonucleotide
atcccaaataccaggctgaaagcagattaaacaggcagacaatagaatcggtgaaactag

SEQ ID NO: 77681 - DNA, 60 bp, Artificial
  Synthetic oligonucleotide
gcagcagacagagagagcacccaaaaggctatagacgggatcacaaataaggtaaattct

SEQ ID NO: 77682 - DNA, 60 bp, Artificial
  Synthetic oligonucleotide
actcgattcgagcgtctgaaaatatacagagattcgcttggggagtccgtgatgagaata

SEQ ID NO: 77683 - DNA, 60 bp, Artificial
  Synthetic oligonucleotide
actcaattcgagcgtctgaaaatatacagagattcgcttggggagtccgtgatgagaata

SEQ ID NO: 77684 - DNA, 60 bp, Artificial
  Synthetic oligonucleotide
actcagttcgagcgtctgaaaatatacagagattcgcttggggagtccgtgatgagaata

SEQ ID NO: 77685 - DNA, 60 bp, Artificial
  Synthetic oligonucleotide
ctctgcgccaaatcctcagggaatcaggagggatcaacaaggaaacaacgggattcacat

SEQ ID NO: 77686 - DNA, 60 bp, Artificial
  Synthetic oligonucleotide
gagttcacagccgatttgataatcgagaggcgagaggggaatgatgtctgttatcctggg

SEQ ID NO: 77687 - DNA, 60 bp, Artificial
  Synthetic oligonucleotide
ccgaaacagtggagcagacaaacattcctaggatttgtactaaggggaagaaagcaatcg

SEQ ID NO: 77688 - DNA, 60 bp, Artificial
  Synthetic oligonucleotide
agttgtcaatgcaaccgaaacagtggagcagacaaacattcctaggatttgtactaaggg

SEQ ID NO: 77689 - DNA, 60 bp, Artificial
  Synthetic oligonucleotide
cccaggatttgtactaaggggaagaaagcaatcgatcttggtcagtgtggattgcttgga

SEQ ID NO: 77690 - DNA, 60 bp, Artificial
  Synthetic oligonucleotide
cggcgccatagctgggttcatcgaaaacggatgggaaggtttggttgatgggtggtatgg

SEQ ID NO: 77691 - DNA, 60 bp, Artificial
  Synthetic oligonucleotide
gattgcttggaattattacaggaccacctcaatgtgatcaattcctcgagttcacagccg

SEQ ID NO: 77692 - DNA, 60 bp, Artificial
  Synthetic oligonucleotide
gtggattgcttggaattattacaggaccacctcaatgtgatcaattcctcgagttcacag

SEQ ID NO: 77693 - DNA, 60 bp, Artificial
  Synthetic oligonucleotide
attacaggaccacctcaatgtgatcaatttctcgagttcacagccgatttgataatcgag

SEQ ID NO: 77694 - DNA, 60 bp, Artificial
  Synthetic oligonucleotide
attattacaggaccacctcaatgtgatcaatttctcgagttcacagccgatttgataatc

SEQ ID NO: 77695 - DNA, 60 bp, Artificial
  Synthetic oligonucleotide
cattcccaggatttgtactaaggggaagaaagcaatcgatcttggtcagtgtggattgct

SEQ ID NO: 77696 - DNA, 53 bp, Artificial
  Synthetic oligonucleotide
gtgatcaattggaccagagactccataacagaagtatggtcctacaatgctga

SEQ ID NO: 77697 - DNA, 60 bp, Artificial
  Synthetic oligonucleotide
actcacccttgcggcagtcatccacacaaatgcagacaaaatctgccttggacatcatgc

SEQ ID NO: 77698 - DNA, 60 bp, Artificial
  Synthetic oligonucleotide
actcacccttgcggcagtcacccacacaaatgcagacaaaatctgccttggacatcatgc

SEQ ID NO: 77699 - DNA, 60 bp, Artificial
  Synthetic oligonucleotide
ggacagcggctgattacaaaagcactcaatcagcaattgatcaaataacagggaaattaa

SEQ ID NO: 77700 - DNA, 60 bp, Artificial
  Synthetic oligonucleotide
cactcgaattctaatactcacccttgcggcagtcatccacacaaatgcagacaaaatctg

SEQ ID NO: 77701 - DNA, 60 bp, Artificial
  Synthetic oligonucleotide
cactcgaattctaatactcacccttgcggcagtcacccacacaaatgcagacaaaatctg

SEQ ID NO: 77702 - DNA, 60 bp, Artificial
  Synthetic oligonucleotide
ccgagtccgggagcgagaccacaagtgaatggtcaatcagggaggattgattttcattgg

SEQ ID NO: 77703 - DNA, 60 bp, Artificial
  Synthetic oligonucleotide
ggacagcggctgattacaaaagcactcaatcagcaattgatcaaataacagggaagttaa

SEQ ID NO: 77704 - DNA, 60 bp, Artificial
  Synthetic oligonucleotide
ataacagttgggagttctaactatcagcaatcctttgtgccgagtccgggagcgagacca

SEQ ID NO: 77705 - DNA, 60 bp, Artificial
  Synthetic oligonucleotide
tgtgccgagtccgggagcgagaccacaagtgaatggtcaatcagggaggattgattttca

SEQ ID NO: 77706 - DNA, 60 bp, Artificial
  Synthetic oligonucleotide
gggattcacatacagtgggataagaaccaatggagtgaccagtgcatgcaggagattagg

SEQ ID NO: 77707 - DNA, 60 bp, Artificial
  Synthetic oligonucleotide
ggattcacatacagtgggataagaaccaatggagtgaccagtgcatgcaggagatcagga

SEQ ID NO: 77708 - DNA, 60 bp, Artificial
  Synthetic oligonucleotide
gctctgcgccaaatcctcaggggatcaggagggatcaacaaggaaacaacgggattcaca

SEQ ID NO: 77709 - DNA, 60 bp, Artificial
  Synthetic oligonucleotide
gcgccaaatcctcagggaatcaggagggatcaacaaggaaacaacgggattcacatacag

SEQ ID NO: 77710 - DNA, 60 bp, Artificial
  Synthetic oligonucleotide
gggagtgggagtaaactaataacagttgggagttctaactatcagcaatcctttgtaccg

SEQ ID NO: 77711 - DNA, 60 bp, Artificial
  Synthetic oligonucleotide
agtgggaataaactaataacagttgggagttctaactatcagcaatcctttgtgccgagt

SEQ ID NO: 77712 - DNA, 60 bp, Artificial
  Synthetic oligonucleotide
cacatacagtgggataagaaccaatggagtgaccagtgcatgcaggagatcaggatcttc

SEQ ID NO: 77713 - DNA, 60 bp, Artificial
  Synthetic oligonucleotide
ttcggcgccatagctgggttcatcgaaaacggatgggaaggtttggttgatgggtggtat

SEQ ID NO: 77714 - DNA, 60 bp, Artificial
  Synthetic oligonucleotide
ttgattttcattggttaatattaaaccctaatgacacagtcacttttagtttcaatgggg

SEQ ID NO: 77715 - DNA, 60 bp, Artificial
  Synthetic oligonucleotide
cagaccaaactatatgggagtgggagtaaactaataacagttgggagttctaactatcag

SEQ ID NO: 77716 - DNA, 60 bp, Artificial
  Synthetic oligonucleotide
ggcgccatagctgggttcatcgaaaatggatgggaaggtttggttgatgggtggtatggt

SEQ ID NO: 77717 - DNA, 60 bp, Artificial
  Synthetic oligonucleotide
ccagctctgataatttggggagttcatcactctgaatcggttagcgtgcagaccaaactc

SEQ ID NO: 77718 - DNA, 60 bp, Artificial
  Synthetic oligonucleotide
gttttgcttaatgcatcttggttcaactccttcctcacacatgcactgaaatagttgtgg

SEQ ID NO: 77719 - DNA, 60 bp, Artificial
  Synthetic oligonucleotide
gggttttgcttaatgcatcttggttcaactccttcctcacacatgcactgaaatagttgt

SEQ ID NO: 77720 - DNA, 60 bp, Artificial
  Synthetic oligonucleotide
cttaatgcatcttggttcaactccttcctcacacatgcactgaaatagttgtggcaatgc

SEQ ID NO: 77721 - DNA, 60 bp, Artificial
  Synthetic oligonucleotide
taatgcatcttggttcaactccttcctcacacatgcactgaaatagttgtggcagtgcta

SEQ ID NO: 77722 - DNA, 59 bp, Artificial
  Synthetic oligonucleotide
taatgcatcttggttcaactccttcctcacacatgcactgaaatagttgtggcaatgct

SEQ ID NO: 77723 - DNA, 60 bp, Artificial
  Synthetic oligonucleotide
tctagaattctcagctgatttgatcatcgagaggcgggaagggaatgatgtttgttaccc

SEQ ID NO: 77724 - DNA, 60 bp, Artificial
  Synthetic oligonucleotide
gaattctcagctgatttgatcatcgagaggcgggaagggaatgatgtttgttaccctgga

SEQ ID NO: 77725 - DNA, 60 bp, Artificial
  Synthetic oligonucleotide
gagcagtaggaaaatgtccgaagtatgtgaaacaagagagcctactactggcaacaggga

SEQ ID NO: 77726 - DNA, 60 bp, Artificial
  Synthetic oligonucleotide
gaataagcaacctgaacaaaagaatggaagatggatttttagacgtgtggacatacaatg

SEQ ID NO: 77727 - DNA, 60 bp, Artificial
  Synthetic oligonucleotide
gcaattgggatcctcatcggtggacttgaatggaatgataactcaattcgagcgtctgaa

SEQ ID NO: 77728 - DNA, 60 bp, Artificial
  Synthetic oligonucleotide
gcaattggaatcctcatcggtggacttgaatggaatgataactcaattcgagcgtctgaa

SEQ ID NO: 77729 - DNA, 60 bp, Artificial
  Synthetic oligonucleotide
cttcctttaacatgagtaacgaaggatcttatttcttcggagacaatgcagaggagtatg

SEQ ID NO: 77730 - DNA, 59 bp, Artificial
  Synthetic oligonucleotide
cttcctttgacatgagtaacgaaggatcttatttcttcggagacaatgcagaggagtat

SEQ ID NO: 77731 - DNA, 60 bp, Artificial
  Synthetic oligonucleotide
aatgacacagtcactttcagcttcaatggggctttcatagctccagatcgtgcaagtttt

SEQ ID NO: 77732 - DNA, 60 bp, Artificial
  Synthetic oligonucleotide
ttcagcttcaatggggctttcatagctccagatcgtgcaagttttctgagagggaagtcc

SEQ ID NO: 77733 - DNA, 60 bp, Artificial
  Synthetic oligonucleotide
ggcgggaaggaaatgacgtttgttatcctggaaaatttgtaaacgaagaagctctgagac

SEQ ID NO: 77734 - DNA, 60 bp, Artificial
  Synthetic oligonucleotide
aatacagagaagaagcaatgcaaaataggatacagattgatccagtcaaactgagcagtg

SEQ ID NO: 77735 - DNA, 60 bp, Artificial
  Synthetic oligonucleotide
gagaagaagcaatgcaaaataggatacagattgacccagtcaaactgagcagcggctaca

SEQ ID NO: 77736 - DNA, 60 bp, Artificial
  Synthetic oligonucleotide
tgtcaaacggaactaaggtaaacacactaactgaaagaggagtggaagttgtcaatgcaa

SEQ ID NO: 77737 - DNA, 60 bp, Artificial
  Synthetic oligonucleotide
cagagaagaagcaatgcaaaataggatacagattgatccagtcaaactgagcagtggcta

SEQ ID NO: 77738 - DNA, 60 bp, Artificial
  Synthetic oligonucleotide
ttgtggtacttcaggcacttatggaacaggctcatggcctgatggggcgaatattaattt

SEQ ID NO: 77739 - DNA, 60 bp, Artificial
  Synthetic oligonucleotide
actcaattcgagcgtctgaaaatatacagagattcgcttggggagtccgtaatgagaata

SEQ ID NO: 77740 - DNA, 60 bp, Artificial
  Synthetic oligonucleotide
taaaagtgcatgaggggtatgaagaattcacaatggttgggagaagagcaacagctattc

SEQ ID NO: 77741 - DNA, 60 bp, Artificial
  Synthetic oligonucleotide
aggggtatgaagagttcacaatggttgggagaagagcaacagctattctcaggaaagcaa

SEQ ID NO: 77742 - DNA, 60 bp, Artificial
  Synthetic oligonucleotide
gagagccttatgtgtcatgtgacaccagcaaatgttaccaatttgcacttgggcagggga

SEQ ID NO: 77743 - DNA, 60 bp, Artificial
  Synthetic oligonucleotide
gactccaacactgtgtcaagcttccaggtagactgtttcctttggcatatccgcaaacgg

SEQ ID NO: 77744 - DNA, 60 bp, Artificial
  Synthetic oligonucleotide
aatctacagagattcgcttggagaaaccgtaatgaggatgggaggccttcactacctcca

SEQ ID NO: 77745 - DNA, 60 bp, Artificial
  Synthetic oligonucleotide
tggggtcctcatcggagggcttgaatggaatggtaacacggttcgagtctctaaaaatct

SEQ ID NO: 77746 - DNA, 60 bp, Artificial
  Synthetic oligonucleotide
atgctcatgcctaggcaaaagataataggctctctttgtgtgcgaatggaccaggcgatc

SEQ ID NO: 77747 - DNA, 60 bp, Artificial
  Synthetic oligonucleotide
cgcgctacctagctgacataaccctcgaggaaatgtcacgagactggttcatgctcatgc

SEQ ID NO: 77748 - DNA, 60 bp, Artificial
  Synthetic oligonucleotide
caggcacttagggacaacctggaacctggaaccttcgatcttggagggctatatgaagca

SEQ ID NO: 77749 - DNA, 60 bp, Artificial
  Synthetic oligonucleotide
atgagccttctaaccgaggtcgaaacgtacgttctctctatcatcccatcaggccccctc

SEQ ID NO: 77750 - DNA, 50 bp, Artificial
  Synthetic oligonucleotide
gtaaggagtcaatgggcttcacctatagtggaataagaaccaatggagcg

SEQ ID NO: 77751 - DNA, 60 bp, Artificial
  Synthetic oligonucleotide
aacggctcaatgcaatgcaggatatgtatataattaggaaaaaacacccttgtttctact

SEQ ID NO: 77752 - DNA, 52 bp, Artificial
  Synthetic oligonucleotide
ggatggtatggtttcagacatcaaaatgcacaaggagaaggaactgcagctg

SEQ ID NO: 77753 - DNA, 60 bp, Artificial
  Synthetic oligonucleotide
gagcaacagtatcagcagacccactagcatctctattggagatgtgccacagcacacaga

SEQ ID NO: 77754 - DNA, 60 bp, Artificial
  Synthetic oligonucleotide
tacgagtgcatgaggggtatgaagagttcacaatggttgggagaagagcaacagctatcc

SEQ ID NO: 77755 - DNA, 60 bp, Artificial
  Synthetic oligonucleotide
taatgaatctgctgacatgagcattggagtaacagtgataaagaacaacatgataaacaa

SEQ ID NO: 77756 - DNA, 60 bp, Artificial
  Synthetic oligonucleotide
cgactgaaaatatacagagattcgcttggggagtccgtgatgagaataggggacctccac

SEQ ID NO: 77757 - DNA, 60 bp, Artificial
  Synthetic oligonucleotide
gtggactggaatgatagatgggtggtatggctatcatcatgaaaattctcaaggctcagg

SEQ ID NO: 77758 - DNA, 60 bp, Artificial
  Synthetic oligonucleotide
cgagaactgcgatgccacatgccagactattgcaggagtcctaaggaccaataaaacatt

SEQ ID NO: 77759 - DNA, 60 bp, Artificial
  Synthetic oligonucleotide
cgagaactgtgatgccacatgccagactattgcaggagtcctaaggaccaataaaacatt

SEQ ID NO: 77760 - DNA, 60 bp, Artificial
  Synthetic oligonucleotide
tcgagaactgtgatgccacatgccagactattgcaggagtcctaaggaccaataaaacat

SEQ ID NO: 77761 - DNA, 60 bp, Artificial
  Synthetic oligonucleotide
tcgagaactgcgatgccacatgccagactattgcaggagtcctaaggaccaataaaacat

SEQ ID NO: 77762 - DNA, 60 bp, Artificial
  Synthetic oligonucleotide
ggaggatggactggaatgatagatgggtggtatggctatcatcatgaaaattctcaagga

SEQ ID NO: 77763 - DNA, 60 bp, Artificial
  Synthetic oligonucleotide
gcgatgccacatgccagactattgcaggagtcctaaggactaataaaacatttcagaatg

SEQ ID NO: 77764 - DNA, 60 bp, Artificial
  Synthetic oligonucleotide
cggagctatcgcaggttttattgaaggaggatggactggaatgatagatgggtggtatgg

SEQ ID NO: 77765 - DNA, 60 bp, Artificial
  Synthetic oligonucleotide
ggcagaattgattattactggtctgttttaaaaccaggggaaaccttgaatgtggaatcc

SEQ ID NO: 77766 - DNA, 60 bp, Artificial
  Synthetic oligonucleotide
ggcagaattgattattactggtctgttttaaaaccaggggaaaccttgaatgtggaatct

SEQ ID NO: 77767 - DNA, 60 bp, Artificial
  Synthetic oligonucleotide
ggactggaatgatagatgggtggtatggctatcatcatgaaaattctcaaggatcgggat

SEQ ID NO: 77768 - DNA, 60 bp, Artificial
  Synthetic oligonucleotide
ccaaagaggcagaattgattattactggtctgttttaaaaccaggggaaaccttgaatgt

SEQ ID NO: 77769 - DNA, 60 bp, Artificial
  Synthetic oligonucleotide
tctatttctggggtgtgcaccatcctcctgacaccaatgagcaaaatactctgtatggct

SEQ ID NO: 77770 - DNA, 60 bp, Artificial
  Synthetic oligonucleotide
ctgagagggaagtctatgggaattcagagtgatgtacaagttgatgccaattgtgagggg

SEQ ID NO: 77771 - DNA, 60 bp, Artificial
  Synthetic oligonucleotide
atgggaattcagagtgatgtacaagttgatgccaattgtgaaggggattgctatcatagt

SEQ ID NO: 77772 - DNA, 60 bp, Artificial
  Synthetic oligonucleotide
gggaagtctatggggattcagagtgatgtacaagttgatgccaattgtgaaggggattgc

SEQ ID NO: 77773 - DNA, 56 bp, Artificial
  Synthetic oligonucleotide
gagggaagtctatggggattcagagtgatgtacaagttgatgccaattgtgagggg

SEQ ID NO: 77774 - DNA, 60 bp, Artificial
  Synthetic oligonucleotide
gagggaagtctatggggattcagagtgatgtacaagttgatgccaattgtgagggggatt

SEQ ID NO: 77775 - DNA, 60 bp, Artificial
  Synthetic oligonucleotide
gagggaagtctatggggattcagagtgatgtacaagttgatgccaattgtgaaggggatt

SEQ ID NO: 77776 - DNA, 60 bp, Artificial
  Synthetic oligonucleotide
cagagtgatgtacaagttgatgccaattgtgaaggggattgctatcatagtggaggaaca

SEQ ID NO: 77777 - DNA, 60 bp, Artificial
  Synthetic oligonucleotide
gacccagctctgataatctggggaatccatcattctggatcaaccacagaacagaccaaa

SEQ ID NO: 77778 - DNA, 60 bp, Artificial
  Synthetic oligonucleotide
gacccagctctgataatctggggaatccatcattccggatcaaccgcagaacagaccaaa

SEQ ID NO: 77779 - DNA, 60 bp, Artificial
  Synthetic oligonucleotide
ccagctctgataatctggggaatccatcattctggatcaaccacagaacagaccaaatta

SEQ ID NO: 77780 - DNA, 60 bp, Artificial
  Synthetic oligonucleotide
gacccagctctgataatctggggaatccatcattccggatcaagcgcagaacagaccaaa

SEQ ID NO: 77781 - DNA, 60 bp, Artificial
  Synthetic oligonucleotide
tgcttgaagtggaacaagagataagaactttctcgtttcagcttatttaatgataaaaaa

SEQ ID NO: 77782 - DNA, 60 bp, Artificial
  Synthetic oligonucleotide
ggggtgtgcaccatcctcctgacaccaatgaacagaatactctgtatggctctggtgata

SEQ ID NO: 77783 - DNA, 60 bp, Artificial
  Synthetic oligonucleotide
tatttctggggtgtgcaccatcctcctgacaccaatgagcaaaacactttgtatggctct

SEQ ID NO: 77784 - DNA, 60 bp, Artificial
  Synthetic oligonucleotide
tacttctggggtgtgcaccatcctcctgacaccaatgagcaaaatactctgtacggctct

SEQ ID NO: 77785 - DNA, 60 bp, Artificial
  Synthetic oligonucleotide
ctggaaaccagccaatcctttatttctggggtgtgcaccatcctcctgacaccaatgagc

SEQ ID NO: 77786 - DNA, 60 bp, Artificial
  Synthetic oligonucleotide
caacaatactggaaaccagccaattctttatttctggggtgtgcaccatcctcctgacac

SEQ ID NO: 77787 - DNA, 60 bp, Artificial
  Synthetic oligonucleotide
aacactggaaaccagccaatcctttatttctggggtgtgcaccatcctcctgacaccaat

SEQ ID NO: 77788 - DNA, 60 bp, Artificial
  Synthetic oligonucleotide
tgatcagtgtatggagagcataaggaacaacacttatgaccataccaaatacagaacaga

SEQ ID NO: 77789 - DNA, 60 bp, Artificial
  Synthetic oligonucleotide
tcctggagttttcctctgatttgataattgagcgaagagaaggaaccgatgtatgctatc

SEQ ID NO: 77790 - DNA, 60 bp, Artificial
  Synthetic oligonucleotide
cagggtaaataatcactcaccgagtgacatccacatcatggcgtctcaaggcaccaaacg

SEQ ID NO: 77791 - DNA, 60 bp, Artificial
  Synthetic oligonucleotide
tgaccatactcaatacagaacagagtcgttgcagaatagaatacagatagacccagtgaa

SEQ ID NO: 77792 - DNA, 60 bp, Artificial
  Synthetic oligonucleotide
acaaggagatcattcgagctgaagaagttgtgggaacaaacccgctcaaaggcaggactg

SEQ ID NO: 77793 - DNA, 60 bp, Artificial
  Synthetic oligonucleotide
gggtgtgcaccatcctcctgacaccaatgagcaaaatactctgtatggctctggtgatcg

SEQ ID NO: 77794 - DNA, 60 bp, Artificial
  Synthetic oligonucleotide
ctgtaagattgctcctttaatggtggcatacatgttggagagagaactggttcgcaaaac

SEQ ID NO: 77795 - DNA, 60 bp, Artificial
  Synthetic oligonucleotide
ctttaatggtggcatacatgttggagagagaactggttcgcaaaaccagattcctaccag

SEQ ID NO: 77796 - DNA, 60 bp, Artificial
  Synthetic oligonucleotide
ctgaggagcaggctgtggatatatgcaaagcagcaatgggcttgagaatcagttcatcct

SEQ ID NO: 77797 - DNA, 60 bp, Artificial
  Synthetic oligonucleotide
gagcaagctgtggatatatgcaaagcagcaatgggtctaaggatcagttcatccttcagc

SEQ ID NO: 77798 - DNA, 60 bp, Artificial
  Synthetic oligonucleotide
agacgctttggagcaagacaaatgatgctggatcggacagggtaatggtgtctcccctag

SEQ ID NO: 77799 - DNA, 60 bp, Artificial
  Synthetic oligonucleotide
aagattgtaagattgctcctttaatggtggcatacatgttggaaagggaactggttcgca

SEQ ID NO: 77800 - DNA, 60 bp, Artificial
  Synthetic oligonucleotide
gggacaagccctttggagcaaaacaaatgatgccggctcagaccgagtgatggtatcacc

SEQ ID NO: 77801 - DNA, 60 bp, Artificial
  Synthetic oligonucleotide
acatagtaagaagagcaacagtatcagcagacccactagcatctctattggagatgtgcc

SEQ ID NO: 77802 - DNA, 60 bp, Artificial
  Synthetic oligonucleotide
ccagtcaaactgagcagcggctacaaagatgtgatactttggtttagcttcggggcatca

SEQ ID NO: 77803 - DNA, 57 bp, Artificial
  Synthetic oligonucleotide
gattgacccggtcaaactaagcagcggctacaaagatgtgatactttggtttagctt

SEQ ID NO: 77804 - DNA, 60 bp, Artificial
  Synthetic oligonucleotide
tttgaatggatgtcaatccgactttacttttcttgaaagttccagcgcagaatgccataa

SEQ ID NO: 77805 - DNA, 60 bp, Artificial
  Synthetic oligonucleotide
cttatgaccatactcaatacagaacagagtcattgcagaatagaatacagatagacccag

SEQ ID NO: 77806 - DNA, 60 bp, Artificial
  Synthetic oligonucleotide
atgaatccaaatcagaagataataacaattggctccgtctctctaaccattgcaacagta

SEQ ID NO: 77807 - DNA, 60 bp, Artificial
  Synthetic oligonucleotide
atgaatccaaatcagaagataataacaattggctccgtctctctaaccattacaacagta

SEQ ID NO: 77808 - DNA, 60 bp, Artificial
  Synthetic oligonucleotide
atgaatccaaatcagaagataataacaattggctccgtctctctaatcattgcaacagta

SEQ ID NO: 77809 - DNA, 60 bp, Artificial
  Synthetic oligonucleotide
atgaatccaaatcagaagataataacaattggctccgtctctctaaccattgcagcagta

SEQ ID NO: 77810 - DNA, 60 bp, Artificial
  Synthetic oligonucleotide
aatgaatccaaatcagaagataataacaattggctccgtctctctaaccattgcaacagt

SEQ ID NO: 77811 - DNA, 60 bp, Artificial
  Synthetic oligonucleotide
aatgaatccaaatcagaagataataacaattggctccgtctctctaaccattacaacagt

SEQ ID NO: 77812 - DNA, 60 bp, Artificial
  Synthetic oligonucleotide
ttgcaatgggccttgttttcatatgtgtgaagaatggaaacatgcggtgcaccatttgta

SEQ ID NO: 77813 - DNA, 60 bp, Artificial
  Synthetic oligonucleotide
gcaatgggccttgttttcatatgtgtgaagaatggaaacatgcggtgcaccatttgtata

SEQ ID NO: 77814 - DNA, 60 bp, Artificial
  Synthetic oligonucleotide
gggcaggggaccacgctggacaacaaacattcaaatggcacaatacatgatagaatccct

SEQ ID NO: 77815 - DNA, 60 bp, Artificial
  Synthetic oligonucleotide
tcaaatggcacaatacatgatagaatccctcaccggactcttttaatgaatgagttgggt

SEQ ID NO: 77816 - DNA, 60 bp, Artificial
  Synthetic oligonucleotide
cggctgcattgagggcaagctttctcaaatgtcaaaagaagtgaacgcaagaattgaacc

SEQ ID NO: 77817 - DNA, 60 bp, Artificial
  Synthetic oligonucleotide
cggctgcattgagggcaagctttctcaaatgtcaaaagaagtgaacgcaaggattgaacc

SEQ ID NO: 77818 - DNA, 60 bp, Artificial
  Synthetic oligonucleotide
gcttggagaagcagtaatgagaatgggagacctccactctctccaaaacagaaacggaaa

SEQ ID NO: 77819 - DNA, 60 bp, Artificial
  Synthetic oligonucleotide
tgcttggggaagcagtaatgagaatgggagacctccatttgctccaaagcaggaacggaa

SEQ ID NO: 77820 - DNA, 60 bp, Artificial
  Synthetic oligonucleotide
agataacagggggtctgatggtgaaaatggatcaggccattatgaacaagaggataatat

SEQ ID NO: 77821 - DNA, 60 bp, Artificial
  Synthetic oligonucleotide
atcatgagggaatacaagcaggagtagatagattctataggacctgcaagctagtcggga

SEQ ID NO: 77822 - DNA, 60 bp, Artificial
  Synthetic oligonucleotide
aactggtctgagaaatgttccacaggcagaaacaagaggattgtttggagcaatagctgg

SEQ ID NO: 77823 - DNA, 60 bp, Artificial
  Synthetic oligonucleotide
aactggtctgagaaatgttccacaggcacaaacaagaggattgtttggagcaatagctgg

SEQ ID NO: 77824 - DNA, 60 bp, Artificial
  Synthetic oligonucleotide
atcaagggaacatataccaatacaggctctcagccaatcttatatttctggggtgtgcac

SEQ ID NO: 77825 - DNA, 60 bp, Artificial
  Synthetic oligonucleotide
atcaaggggacatataccaatacaggctctcagccaatcttatatttctggggtgtgcac

SEQ ID NO: 77826 - DNA, 60 bp, Artificial
  Synthetic oligonucleotide
acacaatattagagaagaatgtgacagtgacacactcagtggagctcctagaaaaccaga

SEQ ID NO: 77827 - DNA, 60 bp, Artificial
  Synthetic oligonucleotide
cgtctctctaaccattgcaacagtatgtttcctcatgcagattgccatcctagcaacgac

SEQ ID NO: 77828 - DNA, 60 bp, Artificial
  Synthetic oligonucleotide
cctttaacatgagtaacgaaggatcttatttcttcggagacaatgcagaggagtatgaca

SEQ ID NO: 77829 - DNA, 60 bp, Artificial
  Synthetic oligonucleotide
ccagctctgataatttggggagttcatcactctgaatcggttagcgagcagaccaaactc

SEQ ID NO: 77830 - DNA, 60 bp, Artificial
  Synthetic oligonucleotide
caagctctgataatttggggagttcatcactctgaatcggttagcgagcagaccaaactc

SEQ ID NO: 77831 - DNA, 60 bp, Artificial
  Synthetic oligonucleotide
ccaactctgataatttggggagttcatcactctgaatcggttagcgagcagaccaaactc

SEQ ID NO: 77832 - DNA, 60 bp, Artificial
  Synthetic oligonucleotide
ggggaatccccgatgcgacttactgcttggtgatcaaagctggtcatatatagtggaaag

SEQ ID NO: 77833 - DNA, 60 bp, Artificial
  Synthetic oligonucleotide
aatgtgacctattgcttggtgatcaaagctggtcatatatagtggaaagacctaatgctc

SEQ ID NO: 77834 - DNA, 60 bp, Artificial
  Synthetic oligonucleotide
tctaccagcaaatcagacaagatctgcattggttaccatgcaaacaactcgacaacacaa

SEQ ID NO: 77835 - DNA, 60 bp, Artificial
  Synthetic oligonucleotide
gggaaaattgtccacattagtccattgtcagggagtgctcaacacatagaggagtgttcc

SEQ ID NO: 77836 - DNA, 60 bp, Artificial
  Synthetic oligonucleotide
agacaatgagttcactgaagtggagaagcagatcggcaatgtgatcaattggaccagaga

SEQ ID NO: 77837 - DNA, 60 bp, Artificial
  Synthetic oligonucleotide
gagagaggtgtagaagttgtcaatgcaaccgaaacagtggagcagacgaacattcccagg

SEQ ID NO: 77838 - DNA, 60 bp, Artificial
  Synthetic oligonucleotide
ggggaatccaccattctggatcagctgctgaacagaccaaactatatgggagtgggaata

SEQ ID NO: 77839 - DNA, 60 bp, Artificial
  Synthetic oligonucleotide
ggggatccaaagtgaagtgccagttgacatcaattgtgaaggggaatgctaccacagtgg

SEQ ID NO: 77840 - DNA, 60 bp, Artificial
  Synthetic oligonucleotide
cagagaagaagcaatgcaaaatagagtgaaaatcgatccggtcaaactgagcagtggtta

SEQ ID NO: 77841 - DNA, 60 bp, Artificial
  Synthetic oligonucleotide
ttatttggcgccatagctgggttcatcgaaaatggatgggaaggtttggttgatgggtgg

SEQ ID NO: 77842 - DNA, 60 bp, Artificial
  Synthetic oligonucleotide
gtggaggtacaataacaagcaacttacctttccaaaatgttaatagcagggcggtgggca

SEQ ID NO: 77843 - DNA, 60 bp, Artificial
  Synthetic oligonucleotide
tcgatttggctgattcggaaatgaacaagttatatgagagagtgagacgacaactgagag

SEQ ID NO: 77844 - DNA, 60 bp, Artificial
  Synthetic oligonucleotide
ggagtgaaggggtttggtttcaaagccggcaatgatgtatggttaggtagaacagtgtca

SEQ ID NO: 77845 - DNA, 60 bp, Artificial
  Synthetic oligonucleotide
ccaggagtctgaatgtcaatgcatcgacgggacttgtgttgttgctgtcacagatggccc

SEQ ID NO: 77846 - DNA, 58 bp, Artificial
  Synthetic oligonucleotide
ggagaccatcaaacagtgacccatccaacaataacgacccctgcagtaccgaactgca

SEQ ID NO: 77847 - DNA, 60 bp, Artificial
  Synthetic oligonucleotide
aagggagccttatgttagctgtgataatgacaactgctggtcctttgctctcgcacaagg

SEQ ID NO: 77848 - DNA, 60 bp, Artificial
  Synthetic oligonucleotide
gcagggaaaatgacagactccattaaatcatggaggaaggacatactaagaacccaggag

SEQ ID NO: 77849 - DNA, 60 bp, Artificial
  Synthetic oligonucleotide
cacagatggccctgctgctaatagtgcggatcacagggtttactggatacgggagggaag

SEQ ID NO: 77850 - DNA, 60 bp, Artificial
  Synthetic oligonucleotide
cgatttgcagaccaagaactgggtgatgccccattccttgaccggcttcgccgagaccaa

SEQ ID NO: 77851 - DNA, 60 bp, Artificial
  Synthetic oligonucleotide
cagaccaagaactgggtgatgccccattccttgaccggcttcgccgagatcaaaagtccc

SEQ ID NO: 77852 - DNA, 60 bp, Artificial
  Synthetic oligonucleotide
cgaattgcagaccaagaactgggtgatgccccattccttgaccggcttcgccgagatcag

SEQ ID NO: 77853 - DNA, 60 bp, Artificial
  Synthetic oligonucleotide
gtcaaatacagacaatgctgctttcccgcagatgactaagtcatacaaaaacacaaggaa

SEQ ID NO: 77854 - DNA, 60 bp, Artificial
  Synthetic oligonucleotide
gtcaaatacagacaatgctgctttcccgcagatgactaagtcgtacaaaaacacaaggaa

SEQ ID NO: 77855 - DNA, 60 bp, Artificial
  Synthetic oligonucleotide
gtcaaataatgacaatgctgctttcccgcagatgactaagtcatacagaaacacaaggaa

SEQ ID NO: 77856 - DNA, 60 bp, Artificial
  Synthetic oligonucleotide
gacctcagtgccaaggaggcacaggatgtaatcatggaagttgttttcccaaatgaagta

SEQ ID NO: 77857 - DNA, 60 bp, Artificial
  Synthetic oligonucleotide
gccagaatgccactgagatcagagcatctgttgggagaatggttggtggaatcgggagat

SEQ ID NO: 77858 - DNA, 60 bp, Artificial
  Synthetic oligonucleotide
ggaagactgatccaaaacagcataacaatagagagaatggttctctcggcatttgatgag

SEQ ID NO: 77859 - DNA, 60 bp, Artificial
  Synthetic oligonucleotide
aaaccatttgaatggatgtcaatccgactttacttttcttgaaagttccagcgcaaaatg

SEQ ID NO: 77860 - DNA, 60 bp, Artificial
  Synthetic oligonucleotide
gatgagtcttctaaccgaggtcgaaacgtacgttctctctatcattccgtcaggccccct

SEQ ID NO: 77861 - DNA, 60 bp, Artificial
  Synthetic oligonucleotide
aagatgagtcttctaaccgaggtcgaaacgtacgttctctctatcattccgtcaggcccc

SEQ ID NO: 77862 - DNA, 60 bp, Artificial
  Synthetic oligonucleotide
agatgagtcttctaaccgaggtcgaaacgtacgttctctctatcatcccatcaggccccc

SEQ ID NO: 77863 - DNA, 53 bp, Artificial
  Synthetic oligonucleotide
ctccttctggctacaggaatgagaaatgttccagagaaaccaaagccaagagg

SEQ ID NO: 77864 - DNA, 53 bp, Artificial
  Synthetic oligonucleotide
ctccttctggctacaggaatgagaaatgttccagagaaaccaaagcccagagg

SEQ ID NO: 77865 - DNA, 60 bp, Artificial
  Synthetic oligonucleotide
gatatgcacaaacagactgtgtcctggaagcaatggctttccttgaagaatcccacccag

SEQ ID NO: 77866 - DNA, 50 bp, Artificial
  Synthetic oligonucleotide
ttcacaagctttttctatcgctatggatttgtagccaactttagcatgga

SEQ ID NO: 77867 - DNA, 60 bp, Artificial
  Synthetic oligonucleotide
gggcaggggaccacgctggacaataagcattcaaatggcacaatacatgatagaatccct

SEQ ID NO: 77868 - DNA, 60 bp, Artificial
  Synthetic oligonucleotide
gcacttatcgtcgccttaaatacggtttgaaaagagggccttctacggaaggagtgcctg

SEQ ID NO: 77869 - DNA, 60 bp, Artificial
  Synthetic oligonucleotide
cggaaggagtgcctgagtctatgagggaagaatatcggcaggaacagcagagtgcggtgg

SEQ ID NO: 77870 - DNA, 60 bp, Artificial
  Synthetic oligonucleotide
tacggaaggagtgcctgagtctatgagggaagaatatcggcaggaacagcagagtgctgt

SEQ ID NO: 77871 - DNA, 60 bp, Artificial
  Synthetic oligonucleotide
ccaggattgcatatgagagaatgtgcaacatcctcaaagggaaatttcaaacagcagcac

SEQ ID NO: 77872 - DNA, 58 bp, Artificial
  Synthetic oligonucleotide
acataatctcaatatgggttagccattcaattcagactgggaaccaaaaccaacctga

SEQ ID NO: 77873 - DNA, 60 bp, Artificial
  Synthetic oligonucleotide
tgacattagcgggcaattcatctctttgccctattagtgggtgggctatatacagtaagg

SEQ ID NO: 77874 - DNA, 60 bp, Artificial
  Synthetic oligonucleotide
gccctattagtgggtgggctatatacagtaaggataacggtataagaattggttccaagg

SEQ ID NO: 77875 - DNA, 60 bp, Artificial
  Synthetic oligonucleotide
aacggggcatatggaataaaagggttttcatttaaatacggcaatggtgtttggatcgga

SEQ ID NO: 77876 - DNA, 60 bp, Artificial
  Synthetic oligonucleotide
aacatgatctcaatatgggttagccattcaattcagacagggaaccagtaccagcctgaa

SEQ ID NO: 77877 - DNA, 60 bp, Artificial
  Synthetic oligonucleotide
aacataatctcaatatgggttagccattcaattcagacagggaatcgataccagcctgaa

SEQ ID NO: 77878 - DNA, 60 bp, Artificial
  Synthetic oligonucleotide
aacataatctcaatatgggttagccattcaattcagacagggaatcaataccagcctgaa

SEQ ID NO: 77879 - DNA, 56 bp, Artificial
  Synthetic oligonucleotide
tcccgacaatggggctgtggctgtattgaaatacaatggtataataacggacacta

SEQ ID NO: 77880 - DNA, 60 bp, Artificial
  Synthetic oligonucleotide
ctggtcccgacaatggggctgtggctgtattgaaatacaatggtataataacggacacta

SEQ ID NO: 77881 - DNA, 60 bp, Artificial
  Synthetic oligonucleotide
atttctggtcccgacaatggggctgtggctgtattgaaatacaatggtataataacggac

SEQ ID NO: 77882 - DNA, 60 bp, Artificial
  Synthetic oligonucleotide
aatttctggtcccgacaatggggctgtggctgtattgaaatacaatggtataataacgga

SEQ ID NO: 77883 - DNA, 60 bp, Artificial
  Synthetic oligonucleotide
aacataatctcaatatgggttagccattcaattcagacagggaaccagtaccagcctgaa

SEQ ID NO: 77884 - DNA, 60 bp, Artificial
  Synthetic oligonucleotide
tcctctaacggggcatatggagtaaaagggttttcatttaaatacggcaatggtgtttgg

SEQ ID NO: 77885 - DNA, 60 bp, Artificial
  Synthetic oligonucleotide
tcctctaacggggcatatggaataaaagggttttcatttaaatacggcaatggtgtttgg

SEQ ID NO: 77886 - DNA, 60 bp, Artificial
  Synthetic oligonucleotide
caattggaatttctggtcccgacaatggggctgtggctgtattgaaatacaatggtataa

SEQ ID NO: 77887 - DNA, 55 bp, Artificial
  Synthetic oligonucleotide
cccgacaatggggctgtggctgtattgaaatacaatggtataataacggacacta

SEQ ID NO: 77888 - DNA, 60 bp, Artificial
  Synthetic oligonucleotide
atgtgaggaccaatggaacctccaaaatcaagatgaaatggggaatggaaatgaggcgct

SEQ ID NO: 77889 - DNA, 60 bp, Artificial
  Synthetic oligonucleotide
gtatgtgagaaccaatggaacctccaaaatcaagatgaaatggggcatggagatgaggcg

SEQ ID NO: 77890 - DNA, 60 bp, Artificial
  Synthetic oligonucleotide
gacccatgttcttatatgtgaggaccaatggaacctccaaaatcaagatgaaatggggaa

SEQ ID NO: 77891 - DNA, 60 bp, Artificial
  Synthetic oligonucleotide
ataaagaggagatcaggaggatctggcgtcaagccaataacggagaagatgctactgctg

SEQ ID NO: 77892 - DNA, 60 bp, Artificial
  Synthetic oligonucleotide
gggctcttgttcggaccggaatggatcctaggatgtgctctctgatgcaggggtcgactc

SEQ ID NO: 77893 - DNA, 60 bp, Artificial
  Synthetic oligonucleotide
gtcttcagtctaatcagaccaaatgaaaatccggcacacaagagtcaactagtgtggatg

SEQ ID NO: 77894 - DNA, 60 bp, Artificial
  Synthetic oligonucleotide
cgcttcaaaacagccaagtcttcagtctaatcagaccaaatgaaaatccggcacacaaga

SEQ ID NO: 77895 - DNA, 60 bp, Artificial
  Synthetic oligonucleotide
cttcaaaacagccaagtcttcagtctaatcagaccaaatgaaaatccggcacacaagagt

SEQ ID NO: 77896 - DNA, 60 bp, Artificial
  Synthetic oligonucleotide
ctgcgtgtatggccttgcagtggccagtggatatgattttgagagagaaggatactctct

SEQ ID NO: 77897 - DNA, 60 bp, Artificial
  Synthetic oligonucleotide
cccaatatacagaaggagagatggaaaatggataagagagctcatcctctatgataaaga

SEQ ID NO: 77898 - DNA, 60 bp, Artificial
  Synthetic oligonucleotide
ctcatcctgaggggatcagtagcccacaaatcgtgcctgcctgcctgcgtgtatggcctt

SEQ ID NO: 77899 - DNA, 60 bp, Artificial
  Synthetic oligonucleotide
atcctgaggggatcagtagcccacaaatcgtgcctgcctgcctgcgtgtatggccttgca

SEQ ID NO: 77900 - DNA, 60 bp, Artificial
  Synthetic oligonucleotide
agatagaagatctcattttcctagcacgatcagcactcatcctgaggggatcagtagccc

SEQ ID NO: 77901 - DNA, 60 bp, Artificial
  Synthetic oligonucleotide
tcagcactcatcctgaggggatcagtagcccacaaatcgtgcctgcctgcctgcgtgtat

SEQ ID NO: 77902 - DNA, 60 bp, Artificial
  Synthetic oligonucleotide
gtatggccttgcagtggccagtggatatgattttgagagagaaggatactctctggtggg

SEQ ID NO: 77903 - DNA, 60 bp, Artificial
  Synthetic oligonucleotide
ggagagatggaaaatggataagagagctcatcctctatgataaagaggagatcaggagga

SEQ ID NO: 77904 - DNA, 60 bp, Artificial
  Synthetic oligonucleotide
atgataaagaggagatcaggaggatctggcgtcaagccaataacggagaagatgctactg

SEQ ID NO: 77905 - DNA, 60 bp, Artificial
  Synthetic oligonucleotide
gagcatccgtcggaagaatggtgggaggaattggtcgcttctacattcagatgtgtactg

SEQ ID NO: 77906 - DNA, 60 bp, Artificial
  Synthetic oligonucleotide
acacaagagtcaactagtgtggatggcatgtcactctgcggcatttgaagacctgagagt

SEQ ID NO: 77907 - DNA, 60 bp, Artificial
  Synthetic oligonucleotide
gcacacaagagtcaactagtgtggatggcatgtcactctgcggcatttgaagacctgaga

SEQ ID NO: 77908 - DNA, 60 bp, Artificial
  Synthetic oligonucleotide
atgctgagatagaagatctcattttcctagcacgatcagcactcatcctgaggggatcag

SEQ ID NO: 77909 - DNA, 60 bp, Artificial
  Synthetic oligonucleotide
gagtcaactagtgtggatggcatgtcactctgcggcatttgaagacctgagagtttcgag

SEQ ID NO: 77910 - DNA, 60 bp, Artificial
  Synthetic oligonucleotide
tagactccagtacacttgaactgaggagcagatactgggcaataagaaccaggagtggag

SEQ ID NO: 77911 - DNA, 60 bp, Artificial
  Synthetic oligonucleotide
caaccattatggctgcgttcactggaaacacagaagggagaacatccgatatgaggactg

SEQ ID NO: 77912 - DNA, 60 bp, Artificial
  Synthetic oligonucleotide
gagagagcaaccattatggctgcgttcactggaaacacagaagggagaacatccgatatg

SEQ ID NO: 77913 - DNA, 60 bp, Artificial
  Synthetic oligonucleotide
gctgcagtgaaaggtgttggaacaatggtgatggaactcatcagaatgatcaagcgtgga

SEQ ID NO: 77914 - DNA, 60 bp, Artificial
  Synthetic oligonucleotide
gccgtaatcctggaaatgctgagatagaagatctcattttcctagcacgatcagcactca

SEQ ID NO: 77915 - DNA, 60 bp, Artificial
  Synthetic oligonucleotide
gctgcacaacgagcaatgatggaccaagtaagggagagccgtaatcctggaaatgctgag

SEQ ID NO: 77916 - DNA, 60 bp, Artificial
  Synthetic oligonucleotide
tcaaacagctgcacaacgagcaatgatggaccaagtaagggagagccgtaatcctggaaa

SEQ ID NO: 77917 - DNA, 60 bp, Artificial
  Synthetic oligonucleotide
gaaatttcaaacagctgcacaacgagcaatgatggaccaagtaagggagagccgtaatcc

SEQ ID NO: 77918 - DNA, 60 bp, Artificial
  Synthetic oligonucleotide
acaatagactccagtacacttgaactgaggagcagatactgggcaataagaaccaggagt

SEQ ID NO: 77919 - DNA, 60 bp, Artificial
  Synthetic oligonucleotide
atcctggaaatgctgagatagaagatctcattttcctagcacgatcagcactcatcctga

SEQ ID NO: 77920 - DNA, 60 bp, Artificial
  Synthetic oligonucleotide
tgccagcgcaaaatgccataagtactacattcccttatactggagatcctccatacagcc

SEQ ID NO: 77921 - DNA, 60 bp, Artificial
  Synthetic oligonucleotide
ggttcaactccttcctcacacatgcactgaagtagttgtggcaatgctactatttgctat

SEQ ID NO: 77922 - DNA, 60 bp, Artificial
  Synthetic oligonucleotide
tatctatggcacataagaaagctactcagtatgagagacatgtgtgatgctccctttgat

SEQ ID NO: 77923 - DNA, 60 bp, Artificial
  Synthetic oligonucleotide
tatctatggcacataagaaagatactcagtatgagagacatgtgtgatgctccctttgat

SEQ ID NO: 77924 - DNA, 60 bp, Artificial
  Synthetic oligonucleotide
tatctatggcaaataagaaagctactcagtatgagagacatgtgtgatgctccctttgat

SEQ ID NO: 77925 - DNA, 60 bp, Artificial
  Synthetic oligonucleotide
ataacaagaaaccaacctgaatggtttaggaatgtcttgagcattgcacctataatgttc

SEQ ID NO: 77926 - DNA, 60 bp, Artificial
  Synthetic oligonucleotide
gttccgcactcgcgagatactaacaaagacaactgtggaccatatggccataatcaagaa

SEQ ID NO: 77927 - DNA, 60 bp, Artificial
  Synthetic oligonucleotide
cgcactcgcgagatactaacaaagacaactgtggaccatatggccataatcaagaagtac

SEQ ID NO: 77928 - DNA, 60 bp, Artificial
  Synthetic oligonucleotide
gaggatttctaattctgggcaaagaagacaaaagatatggaccagcattgagcatcaacg

SEQ ID NO: 77929 - DNA, 60 bp, Artificial
  Synthetic oligonucleotide
ggctccaaaggagacgtatttgtcataagagagccatttatttcatgctctcacttggaa

SEQ ID NO: 77930 - DNA, 60 bp, Artificial
  Synthetic oligonucleotide
gttcttgttatcctgatgcaggtgaagtaatgtgtgtatgcagggataattggcatggtt

SEQ ID NO: 77931 - DNA, 60 bp, Artificial
  Synthetic oligonucleotide
tcggaataatcagcctaatattacaaattggaaacataatctcaatgtgggttagtcatt

SEQ ID NO: 77932 - DNA, 60 bp, Artificial
  Synthetic oligonucleotide
gacaccatcaaaagttggaaaaataacatattgagaacgcaagagtctgaatgtgcctgt

SEQ ID NO: 77933 - DNA, 60 bp, Artificial
  Synthetic oligonucleotide
cccaagcattgctggacaggatgcagcttcagtggcactagcaggcaattcctctctttg

SEQ ID NO: 77934 - DNA, 60 bp, Artificial
  Synthetic oligonucleotide
gcctgtataaatggttcatgtttcactataatgaccgatggcccaagtaatgggcaggcc

SEQ ID NO: 77935 - DNA, 58 bp, Artificial
  Synthetic oligonucleotide
tcagcaagtgcctgccatgatggcatgggttggctaacaatcggaatttctggtccag

SEQ ID NO: 77936 - DNA, 60 bp, Artificial
  Synthetic oligonucleotide
ggtagtcaaatcaagtgaattaaatgcacctaattaccactacgaggaatgttcttgtta

SEQ ID NO: 77937 - DNA, 60 bp, Artificial
  Synthetic oligonucleotide
cagactgaaaatcaaaatcaccatgaagcatgcaacccaagcattgctggacaggatgca

SEQ ID NO: 77938 - DNA, 60 bp, Artificial
  Synthetic oligonucleotide
ggaacaggcagctgtggtccagtgtcttctaatggagcatatgggataaaggggttctca

SEQ ID NO: 77939 - DNA, 60 bp, Artificial
  Synthetic oligonucleotide
ggggacggcccaaggagaatacgatctggactagtgggagcagcatttccttctgtggtg

SEQ ID NO: 77940 - DNA, 60 bp, Artificial
  Synthetic oligonucleotide
aactgattggtcgggatatagcgggagtttcgtccaacaccctgaattaacagggttgga

SEQ ID NO: 77941 - DNA, 60 bp, Artificial
  Synthetic oligonucleotide
ttcatgctctcacttggaatgcaggaccttttttctgactcagggcgccttgttgaatga

SEQ ID NO: 77942 - DNA, 60 bp, Artificial
  Synthetic oligonucleotide
cttgatgagctgtcctgttggtgaagctccttctccctacaattcaaggttcgtgtcggt

SEQ ID NO: 77943 - DNA, 60 bp, Artificial
  Synthetic oligonucleotide
ggacaggatgcagcttcagtggcactagcaggcaattcctctctttgtcccattagtggg

SEQ ID NO: 77944 - DNA, 60 bp, Artificial
  Synthetic oligonucleotide
ttagtgggtgggctatatacagtaaagacaatggtataagaattggctccaaaggagacg

SEQ ID NO: 77945 - DNA, 60 bp, Artificial
  Synthetic oligonucleotide
gaaactgacagcagtttctctgtgaagcaagatattgtagcaataactgattggtcggga

SEQ ID NO: 77946 - DNA, 60 bp, Artificial
  Synthetic oligonucleotide
ggagaaccaaaagcactagttccagaagcgggtttgagatgatttgggatcccaatggat

SEQ ID NO: 77947 - DNA, 60 bp, Artificial
  Synthetic oligonucleotide
gcactagttccagaagcgggtttgagatgatttgggatcccaatggatggacagaaactg

SEQ ID NO: 77948 - DNA, 60 bp, Artificial
  Synthetic oligonucleotide
gggttctcatttaagtatggtaatggtgtttggatagggagaaccaaaagcactagttcc

SEQ ID NO: 77949 - DNA, 60 bp, Artificial
  Synthetic oligonucleotide
cctgttggtgaagctccttctccctacaattcaaggttcgtgtcggttgcatggtcagca

SEQ ID NO: 77950 - DNA, 60 bp, Artificial
  Synthetic oligonucleotide
tcgtgtcggttgcatggtcagcaagtgcctgccatgatggcatgggttggctaacaatcg

SEQ ID NO: 77951 - DNA, 60 bp, Artificial
  Synthetic oligonucleotide
cctgatgcaggtgaagtaatgtgtgtatgcagggataattggcatggttcgaatcgacca

SEQ ID NO: 77952 - DNA, 60 bp, Artificial
  Synthetic oligonucleotide
tggcatggttcgaatcgaccatgggtgtctttcaataaaaaccttgattatcaaataggt

SEQ ID NO: 77953 - DNA, 60 bp, Artificial
  Synthetic oligonucleotide
ctagtggaagatcaggctttgaaatcatcaaagtcacagaggggtggatcaactccccca

SEQ ID NO: 77954 - DNA, 58 bp, Artificial
  Synthetic oligonucleotide
ctagtggaagatcaggctttgaaatcatcaaagtcacagaggggtggatcaactcccc

SEQ ID NO: 77955 - DNA, 60 bp, Artificial
  Synthetic oligonucleotide
caaatgtatttatcgtcgccttatatacggtttgaaaagagggccttctacggaaggagt

SEQ ID NO: 77956 - DNA, 60 bp, Artificial
  Synthetic oligonucleotide
caaacagcagcacaacgagcaatgatggaccaggtgcgagaaagtaggaatcctgggaat

SEQ ID NO: 77957 - DNA, 60 bp, Artificial
  Synthetic oligonucleotide
aggagtacatgaggggtatgaggaattcacaatggttgggcggagagcaacagctatcct

SEQ ID NO: 77958 - DNA, 60 bp, Artificial
  Synthetic oligonucleotide
gggtcgactctcccacggagatctggagctgcgggtgctgcagtgaaaggtgttggaaca

SEQ ID NO: 77959 - DNA, 60 bp, Artificial
  Synthetic oligonucleotide
ccgtcggaagaatggtgggaggaattggtcgcttctacattcagatgtgtactgagctca

SEQ ID NO: 77960 - DNA, 60 bp, Artificial
  Synthetic oligonucleotide
cctttgacatgagcaatgaaggatcttatttcttcggagacaatgctgaggagtttgaca

SEQ ID NO: 77961 - DNA, 60 bp, Artificial
  Synthetic oligonucleotide
gacagataagcgtgcagcccactttctcggtgcagagaaaccttccctttgagagagcaa

SEQ ID NO: 77962 - DNA, 60 bp, Artificial
  Synthetic oligonucleotide
gagctcaaactcagtgaccacgaagggaggctcattcagaacagcataacaatagagagg

SEQ ID NO: 77963 - DNA, 60 bp, Artificial
  Synthetic oligonucleotide
aagtcgtgcctgcctgcctgcgtgtatggccttgcagtggccagtgggtatgattttgag

SEQ ID NO: 77964 - DNA, 60 bp, Artificial
  Synthetic oligonucleotide
ggtgaaaatggtcggagaaccagaattgcctatgaaaggatgtgcaacatcctcaaaggg

SEQ ID NO: 77965 - DNA, 60 bp, Artificial
  Synthetic oligonucleotide
cccagcgccggaaaagaccccaagaagactggaggcccaatatacagaaggagagatgga

SEQ ID NO: 77966 - DNA, 60 bp, Artificial
  Synthetic oligonucleotide
acctgagagtttcgagtttcatcagagggaccagagtagttcccagaggacagctggcaa

SEQ ID NO: 77967 - DNA, 60 bp, Artificial
  Synthetic oligonucleotide
tgttcggaccgggatggatcctagaatgtgctctctgatgcaggggtcgactctcccacg

SEQ ID NO: 77968 - DNA, 58 bp, Artificial
  Synthetic oligonucleotide
tcacagagggatggattaattctcccagccatgccaaatcagttacacaaacattagt

SEQ ID NO: 77969 - DNA, 60 bp, Artificial
  Synthetic oligonucleotide
gcattgatgggacctgtgttgtcgctgttacagatggtcctgcggctaatagtgcagacc

SEQ ID NO: 77970 - DNA, 60 bp, Artificial
  Synthetic oligonucleotide
agggtaataaagtatgaaaacattcccaaaacaaagatacaacatttggaggagtgttct

SEQ ID NO: 77971 - DNA, 60 bp, Artificial
  Synthetic oligonucleotide
gaagataataacaattggggtagtgaatactactctatcaacaatagcccttctcatcgg

SEQ ID NO: 77972 - DNA, 54 bp, Artificial
  Synthetic oligonucleotide
catatgtgtgaagaatggaaacatgcggtgcactatttgtatataagtttggaa

SEQ ID NO: 77973 - DNA, 60 bp, Artificial
  Synthetic oligonucleotide
ggatgtcaatccgactttacttttcttgaaagtgccagcgcaaaatgctataagtaccac

SEQ ID NO: 77974 - DNA, 60 bp, Artificial
  Synthetic oligonucleotide
gatcaggctttgaagtcatcagagttgcggaggggtggatcaactctcccaatcatgcca

SEQ ID NO: 77975 - DNA, 60 bp, Artificial
  Synthetic oligonucleotide
atgttaagcaagagagtctgctgctggcaacaggaatgaagaatgttcccgaaatcccaa

SEQ ID NO: 77976 - DNA, 60 bp, Artificial
  Synthetic oligonucleotide
ctgaaaatatacagagattcgcttggggaatccgtgatgagaatgggggacctccactcc

SEQ ID NO: 77977 - DNA, 60 bp, Artificial
  Synthetic oligonucleotide
aaatatacagagattcgcttggggaatccgtgatgagaatgggggacctccactcccttc

SEQ ID NO: 77978 - DNA, 60 bp, Artificial
  Synthetic oligonucleotide
aacagtgtcaactagtggtagatcgggctttgaaatcataaaagttacagagggatggat

SEQ ID NO: 77979 - DNA, 60 bp, Artificial
  Synthetic oligonucleotide
aacagtgtcaactagtggtagatcgggctttgaaatcatcaaagttacagagggatggat

SEQ ID NO: 77980 - DNA, 60 bp, Artificial
  Synthetic oligonucleotide
ggagctacctaataagagcactgacactgaacacaatgacaaaagatgcagaaagaggca

SEQ ID NO: 77981 - DNA, 60 bp, Artificial
  Synthetic oligonucleotide
cccttccccatacaactcaaagtttgagtctgttgcttggtcggcaagtgcttgtcatga

SEQ ID NO: 77982 - DNA, 60 bp, Artificial
  Synthetic oligonucleotide
caactcaaagtttgagtctgttgcttggtcggcaagtgcttgtcatgatggcatcagttg

SEQ ID NO: 77983 - DNA, 60 bp, Artificial
  Synthetic oligonucleotide
cccttccccatacaactcaaggtttgagtctgttgcttggtcggcaagtgcttgtcatga

SEQ ID NO: 77984 - DNA, 60 bp, Artificial
  Synthetic oligonucleotide
ctcaaagtttgagtctgttgcttggtcggcaagtgcttgtcatgatggcatcagttggtt

SEQ ID NO: 77985 - DNA, 60 bp, Artificial
  Synthetic oligonucleotide
aacattgttaggagagcaacagtatcagcagatccactagcttcactgttggaaatgtgc

SEQ ID NO: 77986 - DNA, 54 bp, Artificial
  Synthetic oligonucleotide
actttctttctaactcaaggggccttgttgaatgacaagcattccaatggaacc

SEQ ID NO: 77987 - DNA, 60 bp, Artificial
  Synthetic oligonucleotide
atcagagagccttttatttcatgctctcacttggaatgcaggactttctttctaactcaa

SEQ ID NO: 77988 - DNA, 60 bp, Artificial
  Synthetic oligonucleotide
gtagttaaatcagttgagttgaatgcccctaattaccactatgaggagtgctcctgttat

SEQ ID NO: 77989 - DNA, 60 bp, Artificial
  Synthetic oligonucleotide
agcggaagttttgttcagcatccagaactgacaggactagactgcatgagaccttgcttc

SEQ ID NO: 77990 - DNA, 60 bp, Artificial
  Synthetic oligonucleotide
caaataggatacatatgcagcggagtttttggtgacaatccacgccccaatgatggaaca

SEQ ID NO: 77991 - DNA, 60 bp, Artificial
  Synthetic oligonucleotide
cgctcaaggggctctactggggactaaacacagcaatggaaccatcaaagacagaacacc

SEQ ID NO: 77992 - DNA, 60 bp, Artificial
  Synthetic oligonucleotide
caatgaactgagcaatcttgcaaaaggagagaaggctaatgtgctaatcgggcaaggaga

SEQ ID NO: 77993 - DNA, 60 bp, Artificial
  Synthetic oligonucleotide
atggcccagcactaagcatcaacgaactgagcaatcttgcaaaaggagagaaggctaatg

SEQ ID NO: 77994 - DNA, 60 bp, Artificial
  Synthetic oligonucleotide
gcccagcactaagcatcaacgaactgagcaatcttgcaaaaggagagaaggctaatgtgc

SEQ ID NO: 77995 - DNA, 60 bp, Artificial
  Synthetic oligonucleotide
aaccatttgaatggatgtcaatccgactttacttttcttgaaagtgccagcgcaaaatgc

SEQ ID NO: 77996 - DNA, 60 bp, Artificial
  Synthetic oligonucleotide
gctcttccttctatgcggagatgaagtggttgctgtcgaattcagacaatgcggcattcc

SEQ ID NO: 77997 - DNA, 60 bp, Artificial
  Synthetic oligonucleotide
cccagtcaaactaagcagcggctacaaagatgtgatactttggtttagcttcggggcatc

SEQ ID NO: 77998 - DNA, 60 bp, Artificial
  Synthetic oligonucleotide
ttgacccagtcaaactaagcagcggctacaaagatgtgatactttggtttagcttcgggg

SEQ ID NO: 77999 - DNA, 60 bp, Artificial
  Synthetic oligonucleotide
acccagtcaaactaagcagcggctacaaagatgtgatactttggtttagcttcggggcat

SEQ ID NO: 78000 - DNA, 60 bp, Artificial
  Synthetic oligonucleotide
cagcacctggaagagtgttcttgctacgtggacattgatgtgtactgcatatgcagagac

SEQ ID NO: 78001 - DNA, 60 bp, Artificial
  Synthetic oligonucleotide
cctaaaacaaagatacagcacctggaagagtgttcttgctacgtggacattgatgtgtac

SEQ ID NO: 78002 - DNA, 60 bp, Artificial
  Synthetic oligonucleotide
agtagctgtttcgatgggaaagaatggatgcatgtatgcatgacagggaatgataaagat

SEQ ID NO: 78003 - DNA, 60 bp, Artificial
  Synthetic oligonucleotide
ccatcaaatcatggagaaaagacatactaagaacccaggaatctgaatgtcagtgcattg

SEQ ID NO: 78004 - DNA, 60 bp, Artificial
  Synthetic oligonucleotide
cgatgggaaagaatggatgcatgtatgcatgacagggaatgataaagatgcaagtgctca

SEQ ID NO: 78005 - DNA, 60 bp, Artificial
  Synthetic oligonucleotide
ggagaaaagacatactaagaacccaggaatctgaatgtcagtgcattggcggaacctgtg

SEQ ID NO: 78006 - DNA, 60 bp, Artificial
  Synthetic oligonucleotide
cagtgcattggcggaacctgtgttgtggctgttacagatggccctgctgctaacagtgca

SEQ ID NO: 78007 - DNA, 60 bp, Artificial
  Synthetic oligonucleotide
ggaaaccaccaacccacgacatacccaaccgcaacagcacccgcaataccaaactgcagc

SEQ ID NO: 78008 - DNA, 60 bp, Artificial
  Synthetic oligonucleotide
tgatgtgtactgcatatgcagagacaactggaaaggctcaaacaggccttggatgaggat

SEQ ID NO: 78009 - DNA, 60 bp, Artificial
  Synthetic oligonucleotide
caccaacccacgacatacccaaccgcaacagcacccgcaataccaaactgcagcgacacc

SEQ ID NO: 78010 - DNA, 60 bp, Artificial
  Synthetic oligonucleotide
gaacctggatcgggtaattggccggatggttccaacattgggttcatgcccaagtaatag

SEQ ID NO: 78011 - DNA, 60 bp, Artificial
  Synthetic oligonucleotide
cttttatgttgaactcatacgagggagacctaataagaatgatgatgtctcttggacgag

SEQ ID NO: 78012 - DNA, 60 bp, Artificial
  Synthetic oligonucleotide
gctactcaggtagcttcatcgtccaaactggtggatgtttccaaccgtgcttttatgttg

SEQ ID NO: 78013 - DNA, 60 bp, Artificial
  Synthetic oligonucleotide
ggcagtgacgtgtggctgggcagaacggtgtcaaccagtggtagatcaggctttgaagtc

SEQ ID NO: 78014 - DNA, 60 bp, Artificial
  Synthetic oligonucleotide
gatcaggctttgaagtcatcaaagtcactgagggatggatcaactcacccagtcaagcca

SEQ ID NO: 78015 - DNA, 60 bp, Artificial
  Synthetic oligonucleotide
ctgaggcagagaggcctttcaagccttcattaccactctgcccctttcaagggtttttcc

SEQ ID NO: 78016 - DNA, 60 bp, Artificial
  Synthetic oligonucleotide
caaagttggcagtgacgtgtggctgggcagaacggtgtcaaccagtggtagatcaggctt

SEQ ID NO: 78017 - DNA, 60 bp, Artificial
  Synthetic oligonucleotide
ctgcatatgcagagacaactggaaaggctcaaacaggccttggatgaggattaacaacga

SEQ ID NO: 78018 - DNA, 60 bp, Artificial
  Synthetic oligonucleotide
ccctacattagctgcgataacgatcactgctggtcctttgctcttgctcaaggagcgcta

SEQ ID NO: 78019 - DNA, 60 bp, Artificial
  Synthetic oligonucleotide
tttgctcttgctcaaggagcgctattagggaccaaacatagcaatggaaccatcaaagac

SEQ ID NO: 78020 - DNA, 60 bp, Artificial
  Synthetic oligonucleotide
catcaaagacagaacgccgtataggtcgttaatccggttcccaataggaacagccccggt

SEQ ID NO: 78021 - DNA, 60 bp, Artificial
  Synthetic oligonucleotide
gacagaacgccgtataggtcgttaatccggttcccaataggaacagccccggtccttgga

SEQ ID NO: 78022 - DNA, 60 bp, Artificial
  Synthetic oligonucleotide
cagccccggtccttggaaattacagggaaatatgcattgcttggtcgagcagtagctgtt

SEQ ID NO: 78023 - DNA, 60 bp, Artificial
  Synthetic oligonucleotide
acccaaccgcaacagcacccgcaataccaaactgcagcgacaccattataacatataaca

SEQ ID NO: 78024 - DNA, 60 bp, Artificial
  Synthetic oligonucleotide
ccgcaacagcacccgcaataccaaactgcagcgacaccattataacatataacaaaacgg

SEQ ID NO: 78025 - DNA, 60 bp, Artificial
  Synthetic oligonucleotide
acgaaaccatattagagacaggatacgtgtgtagcaaatttcactcagacactcccagac

SEQ ID NO: 78026 - DNA, 60 bp, Artificial
  Synthetic oligonucleotide
tagtcacaagggaaccctacattagctgcgataacgatcactgctggtcctttgctcttg

SEQ ID NO: 78027 - DNA, 60 bp, Artificial
  Synthetic oligonucleotide
ggatgaggattaacaacgaaaccatattagagacaggatacgtgtgtagcaaatttcact

SEQ ID NO: 78028 - DNA, 60 bp, Artificial
  Synthetic oligonucleotide
ggaggaaacaccaaccaacagagagcatctgcaggacaaatcagtgtgcagcctactttc

SEQ ID NO: 78029 - DNA, 60 bp, Artificial
  Synthetic oligonucleotide
gtggaggaaacaccaaccaacagagagcatctgcaggacaaatcagtgtgcagcctactt

SEQ ID NO: 78030 - DNA, 58 bp, Artificial
  Synthetic oligonucleotide
gcttgccgaccaaagtctcccaccgaacttctccaaccttgaaaactttagagcctat

SEQ ID NO: 78031 - DNA, 60 bp, Artificial
  Synthetic oligonucleotide
acaagcggatcatctgtcaaaaaggaggaagaagtccttaccggtaatcttcaaacactg

SEQ ID NO: 78032 - DNA, 60 bp, Artificial
  Synthetic oligonucleotide
ccctggttcctaaggcagcccgaggccagtacagcggctttgtaaggacattgttccagc

SEQ ID NO: 78033 - DNA, 55 bp, Artificial
  Synthetic oligonucleotide
tgagagactgaaacacggaacctttgggcctgtccacttccggaatcaagtcaaa

SEQ ID NO: 78034 - DNA, 60 bp, Artificial
  Synthetic oligonucleotide
cgagggaacgtgcttttgtcacctgaggaagtaagtgaaacacaagggacggagaaactg

SEQ ID NO: 78035 - DNA, 60 bp, Artificial
  Synthetic oligonucleotide
aggcatttccagaaggatgcaaaagttctatttcaaagttggggggctgaacagattgac

SEQ ID NO: 78036 - DNA, 60 bp, Artificial
  Synthetic oligonucleotide
tgggagcaaatgtacaccccaggtggtgaagtgaggaatgatgacatcgaccaaagtcta

SEQ ID NO: 78037 - DNA, 60 bp, Artificial
  Synthetic oligonucleotide
ggaggggtaagaatggtggacatactcaggcagaatccaacggaggaacaggctgttgac

SEQ ID NO: 78038 - DNA, 60 bp, Artificial
  Synthetic oligonucleotide
gctcaaaatatcagcaatcattcaccccaagtccgggagcacggccacaagtaaatggac

SEQ ID NO: 78039 - DNA, 60 bp, Artificial
  Synthetic oligonucleotide
gcccaaaatatcagcaatcattcaccccaagtccgggagcacggccacaagtaaatggac

SEQ ID NO: 78040 - DNA, 60 bp, Artificial
  Synthetic oligonucleotide
tgataacagtagaaagcccaaaatatcagcaatcattcaccccaagtccgggagcacggc

SEQ ID NO: 78041 - DNA, 60 bp, Artificial
  Synthetic oligonucleotide
tgataacagtagaaagctcaaaatatcagcaatcattcaccccaagtccgggagcacggc

SEQ ID NO: 78042 - DNA, 60 bp, Artificial
  Synthetic oligonucleotide
tgataacagtagggagctcgaaataccagcaatcattcaccccaagtccgggagcacggc

SEQ ID NO: 78043 - DNA, 60 bp, Artificial
  Synthetic oligonucleotide
aatggatgtcaatccgactttacttttcttgaaagttccagcgcaaaatgccataagtac

SEQ ID NO: 78044 - DNA, 60 bp, Artificial
  Synthetic oligonucleotide
ggatgtcaatccgactttacttttcttgaaagttccagcgcaaaatgccataagtaccac

SEQ ID NO: 78045 - DNA, 60 bp, Artificial
  Synthetic oligonucleotide
gtagataatcactcactgagtgacattcacatcatggcgtctcaaggcaccaaacgatct

SEQ ID NO: 78046 - DNA, 60 bp, Artificial
  Synthetic oligonucleotide
catactggtgggatggactccaatcctctgatgatttcgccctcatagtgaatgcaccga

SEQ ID NO: 78047 - DNA, 60 bp, Artificial
  Synthetic oligonucleotide
catactggtgggatggactccaatcctctgatgatttcaccctcatagtgaatgcaccga

SEQ ID NO: 78048 - DNA, 60 bp, Artificial
  Synthetic oligonucleotide
atttatagagaatggatgggaaggtctcattgacgggtggtatggttttcggcaccaaaa

SEQ ID NO: 78049 - DNA, 60 bp, Artificial
  Synthetic oligonucleotide
atttatagagaatggatgggaaggtctcattgacgggtggtatggttttcggcatcaaaa

SEQ ID NO: 78050 - DNA, 60 bp, Artificial
  Synthetic oligonucleotide
ccaagtccaggagcgagaccacaagtgaatggccaatctggaagaattgattttcattgg

SEQ ID NO: 78051 - DNA, 60 bp, Artificial
  Synthetic oligonucleotide
catcacaagaaatcaacctgaatggtttaggaatgtcttgagcattgctcctataatgtt

SEQ ID NO: 78052 - DNA, 60 bp, Artificial
  Synthetic oligonucleotide
atctgagtgccaatgtattgacgggacctgtgttgtcgctgttacagatggccctgcggc

SEQ ID NO: 78053 - DNA, 60 bp, Artificial
  Synthetic oligonucleotide
ctgtgggttagacaatgaacctggatcgggaaattggccggatggttccaacattgggtt

SEQ ID NO: 78054 - DNA, 60 bp, Artificial
  Synthetic oligonucleotide
gccaagtggatatgcacaaacagactgtgtcctggaagcaatggctttccttgaagagtc

SEQ ID NO: 78055 - DNA, 60 bp, Artificial
  Synthetic oligonucleotide
gaggacaactgtccaccagaggagttcaaattgcttcaaatgagaacatggaaacaatgg

SEQ ID NO: 78056 - DNA, 60 bp, Artificial
  Synthetic oligonucleotide
caagcctccttttggctacaggaatgagaaatgtcccagagaacccaaagaccagaggac

SEQ ID NO: 78057 - DNA, 60 bp, Artificial
  Synthetic oligonucleotide
caagcctccttttggctacaggaatgagaaatgtcccagagaatccaaagaccagaggac

SEQ ID NO: 78058 - DNA, 60 bp, Artificial
  Synthetic oligonucleotide
gaatcaattcatccttcagctttggaggcttcactttcaaaaggacaagtgggtcatctg

SEQ ID NO: 78059 - DNA, 60 bp, Artificial
  Synthetic oligonucleotide
tagtgaatgctccgaatcatgagggaatacaagcaggagtagatagattctataggacct

SEQ ID NO: 78060 - DNA, 60 bp, Artificial
  Synthetic oligonucleotide
tccttttggctacaggaatgagaaatgtcccggaaaatccaaagactagaggactcttcg

SEQ ID NO: 78061 - DNA, 60 bp, Artificial
  Synthetic oligonucleotide
aataagaggggctacttaataagagcactgacactgaacacaatgacaaaagatgcagaa

SEQ ID NO: 78062 - DNA, 60 bp, Artificial
  Synthetic oligonucleotide
catggaatggctaaagacaagaccaatcctgtcacctctgactaaagggattttagggtt

SEQ ID NO: 78063 - DNA, 60 bp, Artificial
  Synthetic oligonucleotide
cgtcgccttaaatacggtttgaaaagagggccttctacggaaggagtgcctgaatctatg

SEQ ID NO: 78064 - DNA, 60 bp, Artificial
  Synthetic oligonucleotide
cgtcgtcttaaatacggtttgaaaagagggccttctacggaaggagtgcctgagtctatg

SEQ ID NO: 78065 - DNA, 60 bp, Artificial
  Synthetic oligonucleotide
tcgtcgccttaaatacggtttgaaaagagggccttctacggaaggagtgcctgagtctat

SEQ ID NO: 78066 - DNA, 60 bp, Artificial
  Synthetic oligonucleotide
cgtcgccttaaatacggtttgaaaagagggccttctacggaaggagtgcctgagtttatg

SEQ ID NO: 78067 - DNA, 60 bp, Artificial
  Synthetic oligonucleotide
tgcttcaaatgagaacatggaaacaatggactccaatactcttgaactgagaagcagata

SEQ ID NO: 78068 - DNA, 60 bp, Artificial
  Synthetic oligonucleotide
gctgagtaatcttgcaaaaggagagaaggctaatgttctaattggacaaggagacgtagt

SEQ ID NO: 78069 - DNA, 60 bp, Artificial
  Synthetic oligonucleotide
gtggccatggaaaatcagcacacaatagatcttgcggattcagaaatgaacaaactttat

SEQ ID NO: 78070 - DNA, 60 bp, Artificial
  Synthetic oligonucleotide
aaaatgcaattggggtcctcatcggagggcttgaatggaatgataacacagttcgagtct

SEQ ID NO: 78071 - DNA, 60 bp, Artificial
  Synthetic oligonucleotide
aaaatgcaattggggtccttatcggaggacttgaatggaatgataacacagttcgagtct

SEQ ID NO: 78072 - DNA, 60 bp, Artificial
  Synthetic oligonucleotide
ggcttatttggtgccatagcgggtttcattgaaaatggatgggaaggtctggttgatgga

SEQ ID NO: 78073 - DNA, 60 bp, Artificial
  Synthetic oligonucleotide
tgccaggaacatagtaagaagagcaacagtatcagcagacccactagcatctctattgga

SEQ ID NO: 78074 - DNA, 60 bp, Artificial
  Synthetic oligonucleotide
caaacagcagcacaacgagcaatgatggaccaggtgcgggaaagcaggaatcctgggaat

SEQ ID NO: 78075 - DNA, 60 bp, Artificial
  Synthetic oligonucleotide
aatattgttaggagagcaacagtatcagcagacccgttggcttcgctcttggagatgtgc

SEQ ID NO: 78076 - DNA, 54 bp, Artificial
  Synthetic oligonucleotide
cattgacgggtggtatggttttcggcatcaaaatgcacaaggagaaggaactgc

SEQ ID NO: 78077 - DNA, 60 bp, Artificial
  Synthetic oligonucleotide
ctggattcatagagaatggatgggaaggtctcattgatggatggtatggtttcagacatc

SEQ ID NO: 78078 - DNA, 60 bp, Artificial
  Synthetic oligonucleotide
cgaagatctgttccaccattgaagagctcagacggcaaaagcagtgaatttagcttgtcc

SEQ ID NO: 78079 - DNA, 60 bp, Artificial
  Synthetic oligonucleotide
gcgtactgggatggaccccagaatgtgctctctgatgcaaggatcaactctcccaaggag

SEQ ID NO: 78080 - DNA, 60 bp, Artificial
  Synthetic oligonucleotide
ccactgagcagaccaaactctatggaagtggaaacaagttgataacagtaggaagctcga

SEQ ID NO: 78081 - DNA, 60 bp, Artificial
  Synthetic oligonucleotide
tggaaacaagttgataacagtaggaagctcgaaataccagcaatcattcaccccaagtcc

SEQ ID NO: 78082 - DNA, 60 bp, Artificial
  Synthetic oligonucleotide
aacatacataacaagaaatcaacctgaatggtttaggaatgtcttgagcattgcgcccat

SEQ ID NO: 78083 - DNA, 60 bp, Artificial
  Synthetic oligonucleotide
tcttctttctatgcagagatgaagtggttgctgtcgaattcagacaatgcggcattcccc

SEQ ID NO: 78084 - DNA, 60 bp, Artificial
  Synthetic oligonucleotide
aaccatgccaaatcaattacacaaacactggtgtccaacaatgattggtcaggctattca

SEQ ID NO: 78085 - DNA, 60 bp, Artificial
  Synthetic oligonucleotide
gccaaatcaattacacaaacactggtgtccaacaatgattggtcaggctattcaggtagt

SEQ ID NO: 78086 - DNA, 60 bp, Artificial
  Synthetic oligonucleotide
cggaaggagtgcctgagtctatgagggaagaatatcggcaggaacagcagaatgctgtgg

SEQ ID NO: 78087 - DNA, 60 bp, Artificial
  Synthetic oligonucleotide
gaatttgaatcagatttgataattgaacgaagagaagggaacgatatatgctatcccggg

SEQ ID NO: 78088 - DNA, 60 bp, Artificial
  Synthetic oligonucleotide
tgttttcacagtgggggtacgatagtcagttctctgccattccaaaacatcaactctaga

SEQ ID NO: 78089 - DNA, 56 bp, Artificial
  Synthetic oligonucleotide
tgttttcacagtgggggtacgatagtcagttctctgccattccaaaacatcaactc

SEQ ID NO: 78090 - DNA, 60 bp, Artificial
  Synthetic oligonucleotide
tataatgctgagttgttggtggccatggaaaaccagcacacaatagatcttgcggattca

SEQ ID NO: 78091 - DNA, 60 bp, Artificial
  Synthetic oligonucleotide
tggtcatataatgctgagttgttggtggccatggaaaaccagcacacaatagatcttgcg

SEQ ID NO: 78092 - DNA, 57 bp, Artificial
  Synthetic oligonucleotide
cttatggtttagcttcggggcatcatgtttcctccttctcgccattgcaatgggatt

SEQ ID NO: 78093 - DNA, 60 bp, Artificial
  Synthetic oligonucleotide
gctgagttgttggtggccatggaaaaccagcacacaatagatcttgcggattcagaaatg

SEQ ID NO: 78094 - DNA, 57 bp, Artificial
  Synthetic oligonucleotide
cttatggtttagcttcggggcatcatgtttcctccttcttgccattgcaatggggtt

SEQ ID NO: 78095 - DNA, 60 bp, Artificial
  Synthetic oligonucleotide
tactttggtttagcttcggggcatcatgtttcatacttctggccattgcaatgggccttg

SEQ ID NO: 78096 - DNA, 50 bp, Artificial
  Synthetic oligonucleotide
aatggaaccattaaagacagaacaccatataggtctctaattcgtttccc

SEQ ID NO: 78097 - DNA, 54 bp, Artificial
  Synthetic oligonucleotide
ttggcatgtccgcaaacgatttgcagaccaagaaatgggtgatgccccattcct

SEQ ID NO: 78098 - DNA, 60 bp, Artificial
  Synthetic oligonucleotide
ttggcatgtccgcaaacgatttgcagaccaagaaatgggtgatgccccattccttgaccg

SEQ ID NO: 78099 - DNA, 60 bp, Artificial
  Synthetic oligonucleotide
gaggagtgcctgattaacgatccctgggttttgcttaatgcatcttggttcaactccttc

SEQ ID NO: 78100 - DNA, 60 bp, Artificial
  Synthetic oligonucleotide
tctgttccaccattgaagagctcagacggcagaaatagtgaatttagcttgtccttcatg

SEQ ID NO: 78101 - DNA, 60 bp, Artificial
  Synthetic oligonucleotide
atctgttccaccattgaagagctcagacggcagaaatagtgaatttaacttgtccttcat

SEQ ID NO: 78102 - DNA, 60 bp, Artificial
  Synthetic oligonucleotide
ccgagtccaggagcgagaccacaagtgaatggccaatctggaaggattgacttccattgg

SEQ ID NO: 78103 - DNA, 60 bp, Artificial
  Synthetic oligonucleotide
cgagtccaggagcgagaccacaagtgaatggccaatctggaaggattgacttccattggc

SEQ ID NO: 78104 - DNA, 60 bp, Artificial
  Synthetic oligonucleotide
gtccctaagaggaagaggcagcactcttggtctggacatcgaaacagctactcgtgcggg

SEQ ID NO: 78105 - DNA, 60 bp, Artificial
  Synthetic oligonucleotide
cggaggatttaaatggaatgataacacagttcgagtctctgaaaatctacagagattcgc

SEQ ID NO: 78106 - DNA, 57 bp, Artificial
  Synthetic oligonucleotide
cggaggatttaaatggaatgataacacagttcgagtctctgaaaatctacagagatt

SEQ ID NO: 78107 - DNA, 60 bp, Artificial
  Synthetic oligonucleotide
gcccttgtgcgtactgggatggaccccagaatgtgctctctgatgcaaggttcaactctc

SEQ ID NO: 78108 - DNA, 60 bp, Artificial
  Synthetic oligonucleotide
ttccttctgtggtgtgaacagcgatactgtaggttggtcttggccagacggtgctgagtt

SEQ ID NO: 78109 - DNA, 60 bp, Artificial
  Synthetic oligonucleotide
atacagattgacccagtcaaactaagcagcggctacaaagatgtgatactttggtttagc

SEQ ID NO: 78110 - DNA, 60 bp, Artificial
  Synthetic oligonucleotide
gcatggccagtattagaaacaacacttatgatcacagcaaatacagagaagaagcaatgc

SEQ ID NO: 78111 - DNA, 60 bp, Artificial
  Synthetic oligonucleotide
gccagaatgctactgagatcagagcatctgttgggagaatggtcggtggaatcgggagat

SEQ ID NO: 78112 - DNA, 59 bp, Artificial
  Synthetic oligonucleotide
ggcctttttggagcgattgctggattcatagagaatggatgggaaggtctcattgatgg

SEQ ID NO: 78113 - DNA, 60 bp, Artificial
  Synthetic oligonucleotide
agcaaaagcagggtagataatcactcactgagtgacatccacatcatggcgtcccaaggc

SEQ ID NO: 78114 - DNA, 60 bp, Artificial
  Synthetic oligonucleotide
aataatatatgcagggagaatgacagactccatcaaatcatggagaaaggacatactaag

SEQ ID NO: 78115 - DNA, 60 bp, Artificial
  Synthetic oligonucleotide
aataatatatgcagggagaatgacagactccatcaaatcatggagaaaggacatattaag

SEQ ID NO: 78116 - DNA, 60 bp, Artificial
  Synthetic oligonucleotide
tggttgggcaggacagtgtcaactagtggtagatcgggctttgaaatcatcaaagttaca

SEQ ID NO: 78117 - DNA, 60 bp, Artificial
  Synthetic oligonucleotide
gccccttccgaggtttcttcccctttcacaaggacaatgcaatacgattgggtgaaaaca

SEQ ID NO: 78118 - DNA, 60 bp, Artificial
  Synthetic oligonucleotide
ggtttcttcccctttcacaaggacaatgcaatacgattgggtgagaataaagacgtaata

SEQ ID NO: 78119 - DNA, 60 bp, Artificial
  Synthetic oligonucleotide
gccactgtgccccttccgaggtttcttcccctttcacaaggacaatgcaatacgattggg

SEQ ID NO: 78120 - DNA, 60 bp, Artificial
  Synthetic oligonucleotide
gaatggtttaggaatgtcttgagcattgctcccataatgttctcaaacaaaatggcgaga

SEQ ID NO: 78121 - DNA, 54 bp, Artificial
  Synthetic oligonucleotide
tatgaacagatggaaactggtgaacgccagaatgctactgagatcagagcatct

SEQ ID NO: 78122 - DNA, 60 bp, Artificial
  Synthetic oligonucleotide
cttatgaacagatggaaactggtgaacgccagaatgctactgagatcagagcatctgttg

SEQ ID NO: 78123 - DNA, 56 bp, Artificial
  Synthetic oligonucleotide
cttatgaacagatggaaactggtgaacgccagaatgctactgagatcagagcatct

SEQ ID NO: 78124 - DNA, 60 bp, Artificial
  Synthetic oligonucleotide
tcttatgaacagatggaaactggtgaacgccagaatgctactgagatcagagcatctgtt

SEQ ID NO: 78125 - DNA, 57 bp, Artificial
  Synthetic oligonucleotide
tcttatgaacagatggaaactggtgaacgccagaatgctactgagatcagagcatct

SEQ ID NO: 78126 - DNA, 60 bp, Artificial
  Synthetic oligonucleotide
cgatcttatgaacagatggaaactggtgaacgccagaatgctactgagatcagagcatct

SEQ ID NO: 78127 - DNA, 60 bp, Artificial
  Synthetic oligonucleotide
acgatcttatgaacagatggaaactggtgaacgccagaatgctactgagatcagagcatc

SEQ ID NO: 78128 - DNA, 60 bp, Artificial
  Synthetic oligonucleotide
aatgaaacggaaacgggactctagcatacttactgacagccagacagcgaccaaaaggat

SEQ ID NO: 78129 - DNA, 58 bp, Artificial
  Synthetic oligonucleotide
gaaacgggactctagcatacttactgacagccagacagcgaccaaaagaattcggatg

SEQ ID NO: 78130 - DNA, 53 bp, Artificial
  Synthetic oligonucleotide
cgggactctagcatacttactgacagccagacagcgaccaaagggattcagga

SEQ ID NO: 78131 - DNA, 60 bp, Artificial
  Synthetic oligonucleotide
gtgagttgcgacaatgacggttgctggtcttttgctctcgctcaaggggctctactgggg

SEQ ID NO: 78132 - DNA, 60 bp, Artificial
  Synthetic oligonucleotide
gacagaacaccttataggtcactgattcggtttccaatagggacagccccagtgttaggg

SEQ ID NO: 78133 - DNA, 60 bp, Artificial
  Synthetic oligonucleotide
cagatggccctgcggctaatagtgcagaccaccgggtttactggatacgagaaggaaggg

SEQ ID NO: 78134 - DNA, 60 bp, Artificial
  Synthetic oligonucleotide
gatcaggctttgaaatcatcagagttgcggaggggtggattaactctcccaatcatgcca

SEQ ID NO: 78135 - DNA, 60 bp, Artificial
  Synthetic oligonucleotide
agacatgtgtgatgctccctttgatgacaggctccgacgagaccaaaaggcattaaaggg

SEQ ID NO: 78136 - DNA, 60 bp, Artificial
  Synthetic oligonucleotide
agacatgtgtgatgctccctttgatgacaggctccgaagagaccaaaaggcattaaaggg

SEQ ID NO: 78137 - DNA, 51 bp, Artificial
  Synthetic oligonucleotide
gaatccaaatcagaagataataacaatcggggtagtgaataccactctgtc

SEQ ID NO: 78138 - DNA, 60 bp, Artificial
  Synthetic oligonucleotide
tcacctctggctgtgacatggtggaataggaatggaccaacaacaagtacagttcactac

SEQ ID NO: 78139 - DNA, 60 bp, Artificial
  Synthetic oligonucleotide
tagccgtaacatggtggaataggaatggaccaacaacaagtacagttcactacccaaagg

SEQ ID NO: 78140 - DNA, 60 bp, Artificial
  Synthetic oligonucleotide
gccgtaacatggtggaataggaatggaccaacaacaagtacagttcactacccaaaggta

SEQ ID NO: 78141 - DNA, 60 bp, Artificial
  Synthetic oligonucleotide
cctctggctgtgacatggtggaataggaatggaccaacaacaagtacagttcactaccca

SEQ ID NO: 78142 - DNA, 60 bp, Artificial
  Synthetic oligonucleotide
tacataaacaggacaggaacatttgaattcacaagctttttctatcgctatgggttcgtg

SEQ ID NO: 78143 - DNA, 60 bp, Artificial
  Synthetic oligonucleotide
gcccagcattgagcatcaacgaactgagcaatcttgcaaaaggagagaaggctaatgtgc

SEQ ID NO: 78144 - DNA, 60 bp, Artificial
  Synthetic oligonucleotide
atggcccagcattgagcatcaacgaactgagcaatcttgcaaaaggagagaaggctaatg

SEQ ID NO: 78145 - DNA, 60 bp, Artificial
  Synthetic oligonucleotide
gctctcgtgcgtactgggatggaccccagaatgtgctctctgatgcaaggatcaactctc

SEQ ID NO: 78146 - DNA, 60 bp, Artificial
  Synthetic oligonucleotide
ctctcgtgcgtactgggatggaccccagaatgtgctctctgatgcaaggatcaactctcc

SEQ ID NO: 78147 - DNA, 60 bp, Artificial
  Synthetic oligonucleotide
gagagacgagcagtcaattgctgaagcaataatcgtggccatggtattttcacaagagga

SEQ ID NO: 78148 - DNA, 60 bp, Artificial
  Synthetic oligonucleotide
ctgagtctatgagggaagagtatcggcaggaacagcagagtgctgtggatgttgacgatg

SEQ ID NO: 78149 - DNA, 60 bp, Artificial
  Synthetic oligonucleotide
aaattgcttcaaatgagaacatggaaacaatggactccggtactcttgaactgagaagca

SEQ ID NO: 78150 - DNA, 60 bp, Artificial
  Synthetic oligonucleotide
catatgtagggacaattggaaaggttccaacagaccttggatgagaatcaacaacgagac

SEQ ID NO: 78151 - DNA, 60 bp, Artificial
  Synthetic oligonucleotide
agatttgatgtcgcagtctcgcactcgcgagatactgacaaaaaccactgtggaccatat

SEQ ID NO: 78152 - DNA, 60 bp, Artificial
  Synthetic oligonucleotide
tgagtagtggctacaaagatgtgatactttggtttagcttcggggcatcatgctttttgc

SEQ ID NO: 78153 - DNA, 60 bp, Artificial
  Synthetic oligonucleotide
cagcaatcattcaccccaagtccgggagcacggccacaggtgaatggacaatcaggaagg

SEQ ID NO: 78154 - DNA, 60 bp, Artificial
  Synthetic oligonucleotide
ggactcttcggggcaattgctggatttatagagaatggatgggaaggtctcattgacggg

SEQ ID NO: 78155 - DNA, 60 bp, Artificial
  Synthetic oligonucleotide
gaataagagtacatgaaggatatgaggaattcacaatggttgggcggagagcaacagcca

SEQ ID NO: 78156 - DNA, 60 bp, Artificial
  Synthetic oligonucleotide
ctgaaaataagagtacatgaaggatatgaggaattcacaatggttgggcggagagcaaca

SEQ ID NO: 78157 - DNA, 60 bp, Artificial
  Synthetic oligonucleotide
caaacattcccaggatctgctcaaaagggaaaaggacaatcgaccttggccaatgtggac

SEQ ID NO: 78158 - DNA, 60 bp, Artificial
  Synthetic oligonucleotide
taagaggagctacttaataagagcactgacactgaacacaatgacaaaagatgcagaaag

SEQ ID NO: 78159 - DNA, 60 bp, Artificial
  Synthetic oligonucleotide
taagaggagctacttaataagagcactgacactgaacacaatgacaaaggatgcagaaag

SEQ ID NO: 78160 - DNA, 60 bp, Artificial
  Synthetic oligonucleotide
catggtggaggccatggtgtctagggcccgaattgacgcacgaattgacttcgagtctgg

SEQ ID NO: 78161 - DNA, 60 bp, Artificial
  Synthetic oligonucleotide
catggtggaggccatggtgtctagggcccgaattgatgcacgcatcgatttcgaatctgg

SEQ ID NO: 78162 - DNA, 60 bp, Artificial
  Synthetic oligonucleotide
tggggatttccagcatggtggaggccatggtgtctagggcccgaattgatgcacgaattg

SEQ ID NO: 78163 - DNA, 60 bp, Artificial
  Synthetic oligonucleotide
gttgggatttccagcatggtggaggccatggtgtctagggcccgaattgatgcacgaatt

SEQ ID NO: 78164 - DNA, 60 bp, Artificial
  Synthetic oligonucleotide
catggtggaggccatggtgtctagggcccgaattgatgcacggatcgacttcgaatctgg

SEQ ID NO: 78165 - DNA, 60 bp, Artificial
  Synthetic oligonucleotide
ttgggatttccagcatggtggaggccatggtgtctagggcccgaattgatgcacgaattg

SEQ ID NO: 78166 - DNA, 60 bp, Artificial
  Synthetic oligonucleotide
ttggaatatccagcatggtggaggccatggtgtctagggcccgaattgatgcacggatcg

SEQ ID NO: 78167 - DNA, 53 bp, Artificial
  Synthetic oligonucleotide
aagctgctcagcatgagagacatgtgtgatgctccctttgatgacaggctcag

SEQ ID NO: 78168 - DNA, 60 bp, Artificial
  Synthetic oligonucleotide
gaatttctccgtattatttgatcaattggaaacgctagtctcattgagggcattcacaga

SEQ ID NO: 78169 - DNA, 60 bp, Artificial
  Synthetic oligonucleotide
atttgatcaattggaaacgctagtctcattgagggcattcacagaggatggtgccattgt

SEQ ID NO: 78170 - DNA, 60 bp, Artificial
  Synthetic oligonucleotide
gaagtttgaagagatcaggtggctgatttctgaatgcaggaacgtattgaccaaaacaga

SEQ ID NO: 78171 - DNA, 60 bp, Artificial
  Synthetic oligonucleotide
caggtggctgatttctgaatgcaggaacgtattgaccaaaacagaaaacagctttgagca

SEQ ID NO: 78172 - DNA, 60 bp, Artificial
  Synthetic oligonucleotide
ccaaaacagaaaacagctttgagcaaataacgttcttacaagcattgcaactttactcga

SEQ ID NO: 78173 - DNA, 60 bp, Artificial
  Synthetic oligonucleotide
gaaggcaaaaagattgtggaggatatcctcaaaagcgaaacagatgaaaacctcaaaatt

SEQ ID NO: 78174 - DNA, 60 bp, Artificial
  Synthetic oligonucleotide
cattgaggaaataagcagagaatggtacatgttgatgcccaggcaaaagattactggggg

SEQ ID NO: 78175 - DNA, 57 bp, Artificial
  Synthetic oligonucleotide
aaaagcgaaacagatgaaaacctcaaaattgcaattgcgtctagccctgctcctcga

SEQ ID NO: 78176 - DNA, 60 bp, Artificial
  Synthetic oligonucleotide
taaaggggagaggcagcacacttgggctcgatttgagagtggctacaatggaaggcaaaa

SEQ ID NO: 78177 - DNA, 60 bp, Artificial
  Synthetic oligonucleotide
ggcattaaaggggagaggcagcacacttgggctcgatttgagagtggctacaatggaagg

SEQ ID NO: 78178 - DNA, 60 bp, Artificial
  Synthetic oligonucleotide
atttgagagtggctacaatggaaggcaaaaagattgtggaggatattctcaaaagcgaaa

SEQ ID NO: 78179 - DNA, 60 bp, Artificial
  Synthetic oligonucleotide
gccattcaattcagacagggaaccagtaccagcctgaaccatgcaaccaaagcatcactg

SEQ ID NO: 78180 - DNA, 60 bp, Artificial
  Synthetic oligonucleotide
gcaggcgaaatcatgtgtgtgtgcagggataactggcatggctcgaatcggccgtgggta

SEQ ID NO: 78181 - DNA, 60 bp, Artificial
  Synthetic oligonucleotide
tctagcatacttactgacagccagacagcgaccaaaaggattcggatggccatcaattag

SEQ ID NO: 78182 - DNA, 60 bp, Artificial
  Synthetic oligonucleotide
taggagacaatccacgccccaatgatggaacaggcagttgcggtccgatgtcctctaacg

SEQ ID NO: 78183 - DNA, 60 bp, Artificial
  Synthetic oligonucleotide
tcggagacaatccacgccccaatgatggaacaggcagttgcggtccgatgtcctctaacg

SEQ ID NO: 78184 - DNA, 60 bp, Artificial
  Synthetic oligonucleotide
cccagtgaaattgagtagtggatacaaggacataatcttatggtttagcttcggggcatc

SEQ ID NO: 78185 - DNA, 60 bp, Artificial
  Synthetic oligonucleotide
cccagtgaaattgagtggcgggtacaaggacataatcttatggtttagcttcggggcatc

SEQ ID NO: 78186 - DNA, 60 bp, Artificial
  Synthetic oligonucleotide
gtggcgggtacaaggacataatcttatggtttagcttcggggcatcatgcttccttcttc

SEQ ID NO: 78187 - DNA, 60 bp, Artificial
  Synthetic oligonucleotide
tgagtggcgggtacaaggacataatcttatggtttagcttcggggcatcatgcttccttc

SEQ ID NO: 78188 - DNA, 60 bp, Artificial
  Synthetic oligonucleotide
cgtccgcaaacgatttgcagaccaagaactgggtgatgccccattccttgaccggcttcg

SEQ ID NO: 78189 - DNA, 60 bp, Artificial
  Synthetic oligonucleotide
cctttaatggtggcatacatgttggaaagagaactggttcgcaaaaccagattcctacca

SEQ ID NO: 78190 - DNA, 50 bp, Artificial
  Synthetic oligonucleotide
ccccaaatgaccaagtcatatagaaatcccagaaacagaccagctctgat

SEQ ID NO: 78191 - DNA, 53 bp, Artificial
  Synthetic oligonucleotide
aagggggatgtatttgttataagagagccattcatctcgtgctcccatttgga

SEQ ID NO: 78192 - DNA, 60 bp, Artificial
  Synthetic oligonucleotide
ataccactctgtcaacaatagcccttctcatcggagtgggaaacttgattttcaacacag

SEQ ID NO: 78193 - DNA, 60 bp, Artificial
  Synthetic oligonucleotide
tccctttgatgacaggctccgaagagaccaaaaggcattaaaggggagaggcagcacact

SEQ ID NO: 78194 - DNA, 60 bp, Artificial
  Synthetic oligonucleotide
caggctccgaagagaccaaaaggcattaaaggggagaggcagcacacttggactcgatct

SEQ ID NO: 78195 - DNA, 60 bp, Artificial
  Synthetic oligonucleotide
aaccatttgaatggatgtcaatccgactttacttttcttaaaaatgccagtgcaaaatgc

SEQ ID NO: 78196 - DNA, 60 bp, Artificial
  Synthetic oligonucleotide
tgttatgtggacatcgatgtgtactgcatatgtagggacaattggaaaggttccaacagg

SEQ ID NO: 78197 - DNA, 60 bp, Artificial
  Synthetic oligonucleotide
tgcagaccaagaactgggtgatgccccattcctcgaccggcttcgccgagatcagaagtc

SEQ ID NO: 78198 - DNA, 60 bp, Artificial
  Synthetic oligonucleotide
aaaagatttgcagaccaagaactgggtgatgccccattcctcgaccggcttcgccgagat

SEQ ID NO: 78199 - DNA, 60 bp, Artificial
  Synthetic oligonucleotide
tgtggacttctgggaacaaccactgggccaccccaatgtgaccaattcctagaattttca

SEQ ID NO: 78200 - DNA, 60 bp, Artificial
  Synthetic oligonucleotide
tcagcagtttgagctgatagacaacgagttcagtgagatagaacaacaaattggaaatgt

SEQ ID NO: 78201 - DNA, 60 bp, Artificial
  Synthetic oligonucleotide
cagcagtttgagctgatagacaacgagttcagtgagatagaacaacaaattggaaatgtt

SEQ ID NO: 78202 - DNA, 60 bp, Artificial
  Synthetic oligonucleotide
cactgatctcgaggctctcatggaatggctaaagacaagaccaatcctgtcacctctgac

SEQ ID NO: 78203 - DNA, 60 bp, Artificial
  Synthetic oligonucleotide
gagtggatgcatgtatgcatgacagggaacgataatgatgcaagtgctcaaataatatat

SEQ ID NO: 78204 - DNA, 60 bp, Artificial
  Synthetic oligonucleotide
gaatggatgcatgtatgcatgacagggaacgataatgatgcaagtgctcaaataatatac

SEQ ID NO: 78205 - DNA, 60 bp, Artificial
  Synthetic oligonucleotide
caatgtggacttctgggaacaatcactgggccaccccaatgtgaccaattcctagaattt

SEQ ID NO: 78206 - DNA, 60 bp, Artificial
  Synthetic oligonucleotide
tgtggacttctgggaacaatcactgggccaccccaatgtgaccaattcctagaattttcg

SEQ ID NO: 78207 - DNA, 60 bp, Artificial
  Synthetic oligonucleotide
tgtggacttctgggaacaatcactgggccaccccaatgtgaccaattcctagaattttca

SEQ ID NO: 78208 - DNA, 60 bp, Artificial
  Synthetic oligonucleotide
gggaagaacaccgatcttgaggcactcatggaatggctaaagacaagaccaatcctgtca

SEQ ID NO: 78209 - DNA, 60 bp, Artificial
  Synthetic oligonucleotide
ggcggcccaaagagaacacaatttggactagtgggagcagcatatctttctgtggtgtaa

SEQ ID NO: 78210 - DNA, 60 bp, Artificial
  Synthetic oligonucleotide
agattgcttcaaatgagaacatggaaacaatggactccagcactcttgaactgagaagca

SEQ ID NO: 78211 - DNA, 60 bp, Artificial
  Synthetic oligonucleotide
cttcaaatgagaacatggaaacaatggactccagcactcttgaactgagaagcagatatt

SEQ ID NO: 78212 - DNA, 60 bp, Artificial
  Synthetic oligonucleotide
gtcccgcactcgcgagatactaacaaaaaccactgtggaccatatggccataatcaagaa

SEQ ID NO: 78213 - DNA, 60 bp, Artificial
  Synthetic oligonucleotide
gcttcggggcatcatgttttattcttctagccattgcaatgggattggttttcatttgca

SEQ ID NO: 78214 - DNA, 60 bp, Artificial
  Synthetic oligonucleotide
gcttcggggcatcatgttttcttcttctagccattgcaatgggattggttttcatttgca

SEQ ID NO: 78215 - DNA, 60 bp, Artificial
  Synthetic oligonucleotide
gggcttgaggatcagttcgtcctttagctttggaggcttcactttcaaaaggacaagtgg

SEQ ID NO: 78216 - DNA, 60 bp, Artificial
  Synthetic oligonucleotide
atgggtctaagaatcaattcatccttcagctttggaggcttcactttcaaaaggacaagt

SEQ ID NO: 78217 - DNA, 60 bp, Artificial
  Synthetic oligonucleotide
aataatatacgcagggagaatgacagactccattaaatcatggagaaaggacatattgag

SEQ ID NO: 78218 - DNA, 60 bp, Artificial
  Synthetic oligonucleotide
atctcaatatgggttagccattcaattcaaactggaggtcagaaccaccccgaaacatgc

SEQ ID NO: 78219 - DNA, 60 bp, Artificial
  Synthetic oligonucleotide
gggttagccattcaattcaaactggaggtcagaaccaccccgaaacatgcaatcaaagtg

SEQ ID NO: 78220 - DNA, 60 bp, Artificial
  Synthetic oligonucleotide
ggctatatacagcaaggataatggtataaggataggttccaagggagatgtatttgtcat

SEQ ID NO: 78221 - DNA, 60 bp, Artificial
  Synthetic oligonucleotide
tgcttgtcatgatggcattagttggttgacagttggtatttccggcccagacaatggggc

SEQ ID NO: 78222 - DNA, 60 bp, Artificial
  Synthetic oligonucleotide
ggcattagttggttgacagttggtatttccggcccagacaatggggcggtggctgtattg

SEQ ID NO: 78223 - DNA, 60 bp, Artificial
  Synthetic oligonucleotide
ctcctgttatcctgatgctagcgaggtaatgtgtgtgtgcagagacaactggcatggttc

SEQ ID NO: 78224 - DNA, 60 bp, Artificial
  Synthetic oligonucleotide
tgctagcgaggtaatgtgtgtgtgcagagacaactggcatggttcaaatcgaccatgggt

SEQ ID NO: 78225 - DNA, 60 bp, Artificial
  Synthetic oligonucleotide
gaagttttgttcagcatccagaactgacggggttggactgcatgaggccttgtttctggg

SEQ ID NO: 78226 - DNA, 60 bp, Artificial
  Synthetic oligonucleotide
gatggaactgggtgttttgaaatattccataagtgtgatgaccaatgtatggcgagtata

SEQ ID NO: 78227 - DNA, 60 bp, Artificial
  Synthetic oligonucleotide
ggaactgggtgttttgaaatattccataagtgtgatgaccaatgtatggcgagtataagg

SEQ ID NO: 78228 - DNA, 53 bp, Artificial
  Synthetic oligonucleotide
tgggttggtcttggccagacggtgctgagttgccattcaccattgacaagtag

SEQ ID NO: 78229 - DNA, 59 bp, Artificial
  Synthetic oligonucleotide
ggttggtcttggccagacggtgctgagttgccattcaccattgacaagtagtttgttca

SEQ ID NO: 78230 - DNA, 60 bp, Artificial
  Synthetic oligonucleotide
ggttggtcttggccagacggtgctgagttgccattcaccattgacaagtagtttgttcaa

SEQ ID NO: 78231 - DNA, 60 bp, Artificial
  Synthetic oligonucleotide
ggagaatgacagactccatcaaatcatggagaaaggacatattaagaacccaagagtccg

SEQ ID NO: 78232 - DNA, 60 bp, Artificial
  Synthetic oligonucleotide
ggagaatgacagactccatcaaatcatggagaaaggacatactaaggacccaagagtccg

SEQ ID NO: 78233 - DNA, 60 bp, Artificial
  Synthetic oligonucleotide
ctgtggactagacaatgaacctggatcgggaaattggccagatggttctaacattgggtt

SEQ ID NO: 78234 - DNA, 60 bp, Artificial
  Synthetic oligonucleotide
ctgtggactagacaatgaacctggatcgggaaattggccggacggttctaatattgggtt

SEQ ID NO: 78235 - DNA, 60 bp, Artificial
  Synthetic oligonucleotide
ctgtggactagacaatgaacctggatcgggaaattggccggatggttctgacattgggtt

SEQ ID NO: 78236 - DNA, 60 bp, Artificial
  Synthetic oligonucleotide
catataagaaaactactcagtatgagagacatgtgtgatgctccctttgatgacaggctc

SEQ ID NO: 78237 - DNA, 60 bp, Artificial
  Synthetic oligonucleotide
cataagaaagatactcagtatgagagacatgtgtgatgctccctttgatgacaggctccg

SEQ ID NO: 78238 - DNA, 60 bp, Artificial
  Synthetic oligonucleotide
cataagaaagctactcagtatgagagacatgtgtgatgctccctttgatgacaggcttcg

SEQ ID NO: 78239 - DNA, 60 bp, Artificial
  Synthetic oligonucleotide
ggcacataagaaagctactcagtatgagagacatgtgtgatgctccctttgatgacaggc

SEQ ID NO: 78240 - DNA, 60 bp, Artificial
  Synthetic oligonucleotide
gaacggctgcattgagggcaagctttctcaaatgtcaaaagacgtgaacgccaggattga

SEQ ID NO: 78241 - DNA, 60 bp, Artificial
  Synthetic oligonucleotide
gaacggctgcattgagggcaagctttctcaaatgtcaaaagacgtgaacgctaggattga

SEQ ID NO: 78242 - DNA, 60 bp, Artificial
  Synthetic oligonucleotide
cggctgcattgagggcaagctttctcaaatgtcaaaagacgtgaacgccaggattgagcc

SEQ ID NO: 78243 - DNA, 60 bp, Artificial
  Synthetic oligonucleotide
cggctgcattgagggcaagctttctcaaatgtcaaaagaagtgaatgccaggattgagcc

SEQ ID NO: 78244 - DNA, 60 bp, Artificial
  Synthetic oligonucleotide
tggaccatatggccataatcaaaaagtacacatcaggaagacaagagaagaaccccgcac

SEQ ID NO: 78245 - DNA, 60 bp, Artificial
  Synthetic oligonucleotide
ttagtgggtgggctatatacagtaaggacaacggtataagaattggttccaagggggatg

SEQ ID NO: 78246 - DNA, 60 bp, Artificial
  Synthetic oligonucleotide
ctggatcgaccactgagcagaccaaactctatggaagtggaaacaagttgataacagtag

SEQ ID NO: 78247 - DNA, 60 bp, Artificial
  Synthetic oligonucleotide
cacaatggtcgggcgaagagcaacagccattctaaggaaagcaaccagaaggctgattca

SEQ ID NO: 78248 - DNA, 60 bp, Artificial
  Synthetic oligonucleotide
gggtcctcatcggagggcttgaatggaatgataacacagttcgagtctctgaaactctac

SEQ ID NO: 78249 - DNA, 60 bp, Artificial
  Synthetic oligonucleotide
gggaggctgatccagaacagcataacaatagaaagaatggttctctctgcatttgatgag

SEQ ID NO: 78250 - DNA, 60 bp, Artificial
  Synthetic oligonucleotide
cagtgtatggagagcataaggaacaacacttatgaccatacccaatacaggacagagtca

SEQ ID NO: 78251 - DNA, 60 bp, Artificial
  Synthetic oligonucleotide
cagtgtatggagagcataaggaacaacacttatgaccatacccaatacagaacagagtca

SEQ ID NO: 78252 - DNA, 60 bp, Artificial
  Synthetic oligonucleotide
cagtgtatggagagcataaggaacaacacttatgaccatactcaatacagaacagagtca

SEQ ID NO: 78253 - DNA, 60 bp, Artificial
  Synthetic oligonucleotide
tgtatggagagcataaggaacaacacttatgatcatacccaatacagagcagagtcattg

SEQ ID NO: 78254 - DNA, 60 bp, Artificial
  Synthetic oligonucleotide
ggagagcataaggaacaacacttatgaccatacccaatacagagcagagtcattgcagaa

SEQ ID NO: 78255 - DNA, 60 bp, Artificial
  Synthetic oligonucleotide
gataacatacataacaagaaatcaacctgaatggtttaggaatgtcttgagcattgcgcc

SEQ ID NO: 78256 - DNA, 60 bp, Artificial
  Synthetic oligonucleotide
gaggatttctaattctgggcaaagaagacaaaagatatgggccagcattgagcatcaacg

SEQ ID NO: 78257 - DNA, 60 bp, Artificial
  Synthetic oligonucleotide
aaataagagtacatgaaggatatgaggaattcacaatggttgggcgaagagcaacagcca

SEQ ID NO: 78258 - DNA, 60 bp, Artificial
  Synthetic oligonucleotide
tctgcggtattaagaggatttctaattctgggcaaagaagacaaaagatatgggccagca

SEQ ID NO: 78259 - DNA, 60 bp, Artificial
  Synthetic oligonucleotide
tcatgtttcatacttctggccattgcaatgggccttgtcttcatatgtgtgaagaatgga

SEQ ID NO: 78260 - DNA, 60 bp, Artificial
  Synthetic oligonucleotide
gcatcatgtttcatacttctggccattgcaatgggccttgtcttcatatgtgtgaagaat

SEQ ID NO: 78261 - DNA, 60 bp, Artificial
  Synthetic oligonucleotide
cttcctttgacatgagtaacgaaggatcttatttcttcggagacaatgcagaggactatg

SEQ ID NO: 78262 - DNA, 60 bp, Artificial
  Synthetic oligonucleotide
aagtgctacacctaacccagggaacatgctgggagcaaatgtacactccaggtggtgaag

SEQ ID NO: 78263 - DNA, 60 bp, Artificial
  Synthetic oligonucleotide
tgcttctcattgttcaggcacttagggacaacctggaacctggaactttcgatcttgggg

SEQ ID NO: 78264 - DNA, 60 bp, Artificial
  Synthetic oligonucleotide
tgaatccaaatcagaagataataacaatcggggtagtgaataccactctgtcaacaatag

SEQ ID NO: 78265 - DNA, 54 bp, Artificial
  Synthetic oligonucleotide
atgaatccaaatcagaagataataacaatcggggtagtgaataccactctgtca

SEQ ID NO: 78266 - DNA, 60 bp, Artificial
  Synthetic oligonucleotide
ggcccttcaagcctccactaccgctgtgccccttcagaggattcttcccttttcacaagg

SEQ ID NO: 78267 - DNA, 60 bp, Artificial
  Synthetic oligonucleotide
tttcaatcagaatctggagtatcaaataggatatatatgcagtggagttttcggagacaa

SEQ ID NO: 78268 - DNA, 50 bp, Artificial
  Synthetic oligonucleotide
ttcacgagctttttctaccgctatggatttgtagccaatttcagtatgga

SEQ ID NO: 78269 - DNA, 52 bp, Artificial
  Synthetic oligonucleotide
agttcacaagctttttctaccgctatggatttgtagccaatttcagtatgga

SEQ ID NO: 78270 - DNA, 54 bp, Artificial
  Synthetic oligonucleotide
gccaaagaggcgcaggatgtaatcatggaagttgttttcccaaatgaagtgggg

SEQ ID NO: 78271 - DNA, 60 bp, Artificial
  Synthetic oligonucleotide
ccgagtccaggagcgagaccacaagtgaatggccaatctggaagaattgactttcactgg

SEQ ID NO: 78272 - DNA, 60 bp, Artificial
  Synthetic oligonucleotide
aggtgctgcatttaacccagggaacatgctgggagcaaatgtacactccaggaggggaag

SEQ ID NO: 78273 - DNA, 60 bp, Artificial
  Synthetic oligonucleotide
tttcaatcaaaatctggagtatcaaataggatatatatgcagtggagttttcggagacaa

SEQ ID NO: 78274 - DNA, 60 bp, Artificial
  Synthetic oligonucleotide
cctggagtatcaaataggatatatatgcagtggagttttcggagacaatccacgccccaa

SEQ ID NO: 78275 - DNA, 60 bp, Artificial
  Synthetic oligonucleotide
tgcttcaaatgagaacatggaaacaatggactccagtactcttgaactgagaagcagata

SEQ ID NO: 78276 - DNA, 60 bp, Artificial
  Synthetic oligonucleotide
cttggagggctatacgaagcaattgaggagtgcctgattaatgatccctgggttttgctc

SEQ ID NO: 78277 - DNA, 60 bp, Artificial
  Synthetic oligonucleotide
tcggagacaatccacgccccaatgatggaacaggtagttgcggtccaatgtcctctaacg

SEQ ID NO: 78278 - DNA, 60 bp, Artificial
  Synthetic oligonucleotide
cagaagataataacaattggtgttgtgaacactactctatcaacaatagcccttctcatt

SEQ ID NO: 78279 - DNA, 60 bp, Artificial
  Synthetic oligonucleotide
gaagataataacaatcggggtagtgaacactactctatcaacaatagcccttctcattgg

SEQ ID NO: 78280 - DNA, 60 bp, Artificial
  Synthetic oligonucleotide
ccggatgagggtactgctggggtggaatctgctgtgctaagaggctttctgatcttgggg

SEQ ID NO: 78281 - DNA, 60 bp, Artificial
  Synthetic oligonucleotide
aaaattgcaccgttgatggttgcctacatgctggagagggagctagtgagaaaaacacgg

SEQ ID NO: 78282 - DNA, 60 bp, Artificial
  Synthetic oligonucleotide
tgaggaagtaagtgaaacacaagggacggagaaactgacaataacatattcatcatcaat

SEQ ID NO: 78283 - DNA, 60 bp, Artificial
  Synthetic oligonucleotide
acagattgacaatgtaatgggaatgattgggatactgcctgacatgacccccagcacaga

SEQ ID NO: 78284 - DNA, 60 bp, Artificial
  Synthetic oligonucleotide
atactcaggcagaacccaacggaggagcaggctgttgacatatgcaaagcagcaatgggc

SEQ ID NO: 78285 - DNA, 60 bp, Artificial
  Synthetic oligonucleotide
tgagaggaatgaacaaggccagacactgtggagcaaaacaaacgatgcagggtccgacag

SEQ ID NO: 78286 - DNA, 60 bp, Artificial
  Synthetic oligonucleotide
gaagtggttttcccaaatgaagtgggcgcaagaatactgacttctgaatcacaactggcc

SEQ ID NO: 78287 - DNA, 60 bp, Artificial
  Synthetic oligonucleotide
acacatcagggaggcaagagaaaaacccagcactcagaatgaaatggatgatggcaatga

SEQ ID NO: 78288 - DNA, 60 bp, Artificial
  Synthetic oligonucleotide
gagatgaatccaaatcagaagataataacaattggtgtagtgaacactactctatcaaca

SEQ ID NO: 78289 - DNA, 51 bp, Artificial
  Synthetic oligonucleotide
gcacccaatcagcaattgatcaaataacagggaaattaaaccggcttatag

SEQ ID NO: 78290 - DNA, 60 bp, Artificial
  Synthetic oligonucleotide
aagcacccaatcagcaattgatcaaataacagggaaattaaaccggcttatagaaaaaac

SEQ ID NO: 78291 - DNA, 60 bp, Artificial
  Synthetic oligonucleotide
gcttggtcggcaagtgcttgtcatgatggcatcagttggttgacaattggaatttctggt

SEQ ID NO: 78292 - DNA, 60 bp, Artificial
  Synthetic oligonucleotide
cttggtcggcaagtgcttgtcatgatggcatcagttggttgacaattggaatttctggtc

SEQ ID NO: 78293 - DNA, 60 bp, Artificial
  Synthetic oligonucleotide
aacggggcatatggagtaaaagggttttcatttaaatacggcaatggtgtttggatcgga

SEQ ID NO: 78294 - DNA, 59 bp, Artificial
  Synthetic oligonucleotide
acggggcatatggagtaaaagggttttcatttaaatacggcaatggtgtttggatcgga

SEQ ID NO: 78295 - DNA, 60 bp, Artificial
  Synthetic oligonucleotide
tgagtctgtcgcttggtcggcaagtgcttgtcatgatggcattagttggctgacaattgg

SEQ ID NO: 78296 - DNA, 60 bp, Artificial
  Synthetic oligonucleotide
gagtctgttgcttggtcggcaagtgcttgtcatgatggcatcagttggttgacaattgga

SEQ ID NO: 78297 - DNA, 60 bp, Artificial
  Synthetic oligonucleotide
gagtcggttgcttggtcggcaagtgcttgtcatgatggcattagttggctgacagttgga

SEQ ID NO: 78298 - DNA, 60 bp, Artificial
  Synthetic oligonucleotide
gtctgttgcttggtcggcaagtgcttgtcatgatggcatcagttggttgacaattggaat

SEQ ID NO: 78299 - DNA, 60 bp, Artificial
  Synthetic oligonucleotide
actcaaggtttgagtcggttgcttggtcggcaagtgcttgtcatgatggcattagttggc

SEQ ID NO: 78300 - DNA, 60 bp, Artificial
  Synthetic oligonucleotide
tccaatcctctgatgatttcgccctcatagtgaatgcaccaaatcatgagggaatacaag

SEQ ID NO: 78301 - DNA, 60 bp, Artificial
  Synthetic oligonucleotide
agtggatatgcacaaacagactgtgtccttgaagcaatggctttccttgaagagtcccac

SEQ ID NO: 78302 - DNA, 60 bp, Artificial
  Synthetic oligonucleotide
cccagggatctttgaaaactcgtgtcttgagacgatggaagttgttcagcaaacaagagt

SEQ ID NO: 78303 - DNA, 60 bp, Artificial
  Synthetic oligonucleotide
cagggatctttgaaaactcgtgtcttgagacgatggaagttgttcagcaaacaagagtgg

SEQ ID NO: 78304 - DNA, 60 bp, Artificial
  Synthetic oligonucleotide
ataccagcaatcattcaccccaagtccgggagcacggccacaggtgaatggacaatcagg

SEQ ID NO: 78305 - DNA, 60 bp, Artificial
  Synthetic oligonucleotide
gtagatgaatactccagcacagagagggtggtagtgagcattgaccgatttttaagagtt

SEQ ID NO: 78306 - DNA, 60 bp, Artificial
  Synthetic oligonucleotide
tggtaggtcgggctttgaaatcatcaaagtcacagaggggtggatcaactctcccaatca

SEQ ID NO: 78307 - DNA, 60 bp, Artificial
  Synthetic oligonucleotide
gtcccgcacccgcgagatactcactaagaccactgtggaccatatggccataatcaaaaa

SEQ ID NO: 78308 - DNA, 59 bp, Artificial
  Synthetic oligonucleotide
gtcccgcacccgcgagatactcactaagaccactgtggaccatatggccataatcaaaa

SEQ ID NO: 78309 - DNA, 60 bp, Artificial
  Synthetic oligonucleotide
cccctttgatggtagcatacatgctagaaagagagttggtccgcaaaacgaggttcctcc

SEQ ID NO: 78310 - DNA, 60 bp, Artificial
  Synthetic oligonucleotide
ccaacagaagaacaagctgtggacatatgcaaggcagcaatgggcttaaggattagctca

SEQ ID NO: 78311 - DNA, 60 bp, Artificial
  Synthetic oligonucleotide
gagctatttaataagagcactgacactgaacacaatgacaaaagatgcagaaagaggcaa

SEQ ID NO: 78312 - DNA, 60 bp, Artificial
  Synthetic oligonucleotide
gacaatgaacctggatcgggacattggccagatggttccaacattgggtttatgcccaag

SEQ ID NO: 78313 - DNA, 60 bp, Artificial
  Synthetic oligonucleotide
gacttctgggaacaatcactgggccaccccaatgtgaccaattcctagaattttcagccg

SEQ ID NO: 78314 - DNA, 60 bp, Artificial
  Synthetic oligonucleotide
gcttctgggaacaatcactgggccaccccaatgtgaccaattcctagaattttcagccga

SEQ ID NO: 78315 - DNA, 60 bp, Artificial
  Synthetic oligonucleotide
ctgggaacaatcactgggccaccccaatgtgaccaattcctagaattttcagccgaccta

SEQ ID NO: 78316 - DNA, 60 bp, Artificial
  Synthetic oligonucleotide
gtttcatacttctggccattgcaatgggccttgtcttcatatgtgtgagaaatggaaaca

SEQ ID NO: 78317 - DNA, 60 bp, Artificial
  Synthetic oligonucleotide
ggaggaagaatgacagactccattaaatcatggaggaaggacatactaagaacccaggag

SEQ ID NO: 78318 - DNA, 60 bp, Artificial
  Synthetic oligonucleotide
ggaggaagaatgacagactccattaaatcatggaggaaagacatactaagaacccaggag

SEQ ID NO: 78319 - DNA, 60 bp, Artificial
  Synthetic oligonucleotide
tggaatggatcctaggatgtgctctctgatgcaaggatcaactctcccgagaaggtctgg

SEQ ID NO: 78320 - DNA, 60 bp, Artificial
  Synthetic oligonucleotide
acatcgaagtgctgcatctaacccagggaacatgctgggagcaaatgtacaccccaggtg

SEQ ID NO: 78321 - DNA, 60 bp, Artificial
  Synthetic oligonucleotide
ctctcccacggagatctggagctgcaggtgctgcagtgaaaggtgttgggacaatggtga

SEQ ID NO: 78322 - DNA, 60 bp, Artificial
  Synthetic oligonucleotide
cccacggagatctggagctgcaggtgctgcagtgaaaggtgttgggacaatggtgatgga

SEQ ID NO: 78323 - DNA, 60 bp, Artificial
  Synthetic oligonucleotide
atttggcactccaatctcaatgacaccacctatcaaagaacaagggctcttgttcggacc

SEQ ID NO: 78324 - DNA, 54 bp, Artificial
  Synthetic oligonucleotide
atttggcactccaatctcaatgacaccacctatcaaagaacaagggctcttgtt

SEQ ID NO: 78325 - DNA, 60 bp, Artificial
  Synthetic oligonucleotide
gagaatggtgctctcagcattcgatgaaagaaggaacaagtacttagaagagcatcccag

SEQ ID NO: 78326 - DNA, 56 bp, Artificial
  Synthetic oligonucleotide
ggaggcccaatatacagaaggagagatgggaaatggatgagagaactcatcctcta

SEQ ID NO: 78327 - DNA, 60 bp, Artificial
  Synthetic oligonucleotide
acaatggtgatggaactcatcaggatgatcaagcgtgggataaacgaccgaaatttctgg

SEQ ID NO: 78328 - DNA, 60 bp, Artificial
  Synthetic oligonucleotide
ggtgatggaactcatcaggatgatcaagcgtgggataaacgaccgaaatttctggagagg

SEQ ID NO: 78329 - DNA, 60 bp, Artificial
  Synthetic oligonucleotide
gagagagcaaccattatggctgcattcactggaaacacagaagggaggacttctgatatg

SEQ ID NO: 78330 - DNA, 60 bp, Artificial
  Synthetic oligonucleotide
catttgaagacctgagagtttcaagtttcatcagaggaaccagagtagttcccagaggac

SEQ ID NO: 78331 - DNA, 60 bp, Artificial
  Synthetic oligonucleotide
cagcataacaatagagagaatggtgctctcagcattcgatgaaagaaggaacaagtactt

SEQ ID NO: 78332 - DNA, 60 bp, Artificial
  Synthetic oligonucleotide
gagcatccgtcggaaggatggtgggaggaattggtcgcttctacattcaaatgtgtactg

SEQ ID NO: 78333 - DNA, 60 bp, Artificial
  Synthetic oligonucleotide
caacgagcaatgatggaccaagtaagagagagccgtaaccctggaaatgctgagattgag

SEQ ID NO: 78334 - DNA, 60 bp, Artificial
  Synthetic oligonucleotide
gcaatgatggaccaagtaagagagagccgtaaccctggaaatgctgagattgaggatctc

SEQ ID NO: 78335 - DNA, 60 bp, Artificial
  Synthetic oligonucleotide
ccattatggctgcattcactggaaacacagaagggaggacttctgatatgaggactgaga

SEQ ID NO: 78336 - DNA, 60 bp, Artificial
  Synthetic oligonucleotide
agtcgggagttccaattaccaacaatcctttgtaccgagtccaggagcgagaccacaagt

SEQ ID NO: 78337 - DNA, 60 bp, Artificial
  Synthetic oligonucleotide
gtcgggagttccaattaccaacaatcctttgtaccgagtccaggagcgagaccacaagtg

SEQ ID NO: 78338 - DNA, 60 bp, Artificial
  Synthetic oligonucleotide
taggatatatatgcagtggagttttcggagacaatccacgccccaatgatggaacaggca

SEQ ID NO: 78339 - DNA, 60 bp, Artificial
  Synthetic oligonucleotide
gcagtggagttttcggagacaatccacgccccaatgatggaacaggcagttgcggtccga

SEQ ID NO: 78340 - DNA, 57 bp, Artificial
  Synthetic oligonucleotide
gaggaacaagctgtggacatatgcaaggcagcaatgggcttaaggattagctcatct

SEQ ID NO: 78341 - DNA, 60 bp, Artificial
  Synthetic oligonucleotide
gtttctaattctgggcaaagaagacaaaagatatggaccagcattgagcatcaatgaact

SEQ ID NO: 78342 - DNA, 60 bp, Artificial
  Synthetic oligonucleotide
aacgggactctagcatacttactgacagccagacagcgaccaaaaggattcggatggcca

SEQ ID NO: 78343 - DNA, 60 bp, Artificial
  Synthetic oligonucleotide
gtattggaagcaatggctttccttgaagaatcccacccaggaatctttgaaaactcgtgt

SEQ ID NO: 78344 - DNA, 60 bp, Artificial
  Synthetic oligonucleotide
gttttggaagcaatggctttccttgaagaatcccacccaggaatctttgaaaactcgtgt

SEQ ID NO: 78345 - DNA, 60 bp, Artificial
  Synthetic oligonucleotide
gcatggccagtattagaaacaacacttatgatcacagcaaatacagagaagaagcgatgc

SEQ ID NO: 78346 - DNA, 60 bp, Artificial
  Synthetic oligonucleotide
ctggccattgcaatgggccttgtcttcatgtgtgtgaagaacggaaacatgcggtgcact

SEQ ID NO: 78347 - DNA, 60 bp, Artificial
  Synthetic oligonucleotide
gtcaatgggtttcacctatagtggaataagaaccaatggagcaacaagtgcctgcagaag

SEQ ID NO: 78348 - DNA, 60 bp, Artificial
  Synthetic oligonucleotide
gtcgatgggtttcacctatagtggaataagaaccaatggggcaacaagtgcctgcagaag

SEQ ID NO: 78349 - DNA, 60 bp, Artificial
  Synthetic oligonucleotide
ataaagagtcaatgggtttcacctatagtggaataagaaccaatggagcaacaagtgcct

SEQ ID NO: 78350 - DNA, 60 bp, Artificial
  Synthetic oligonucleotide
gggtttcacctatagtggaataagaaccaatggagcaacaagtgcctgcagaagatcagg

SEQ ID NO: 78351 - DNA, 60 bp, Artificial
  Synthetic oligonucleotide
gacttctgggaacaaccactgggccaccccaatgtgaccaattcctagaattttcagccg

SEQ ID NO: 78352 - DNA, 60 bp, Artificial
  Synthetic oligonucleotide
gacttctgggaacaatcactgggccgccccaatgtgaccaattcctagaattttcagccg

SEQ ID NO: 78353 - DNA, 60 bp, Artificial
  Synthetic oligonucleotide
tgtggacttctgggaacaatcactgggccgccccaatgtgaccaattcctagaattttca

SEQ ID NO: 78354 - DNA, 60 bp, Artificial
  Synthetic oligonucleotide
agaaagctgctcagtatgagagacatgtgtgatgctccctttgatgatagactcaggaga

SEQ ID NO: 78355 - DNA, 60 bp, Artificial
  Synthetic oligonucleotide
aatggaatggctaaagacaagaccaatcctgtcacctctgactaaggggattttaggatt

SEQ ID NO: 78356 - DNA, 60 bp, Artificial
  Synthetic oligonucleotide
cagagatgaacaggctgtatgagcgagtgaggaaacaattaagggaaaatgctgaagagg

SEQ ID NO: 78357 - DNA, 60 bp, Artificial
  Synthetic oligonucleotide
gagaatcagctctgatagtctggggaatccaccattcaggatcaaccaccgaacagacca

SEQ ID NO: 78358 - DNA, 60 bp, Artificial
  Synthetic oligonucleotide
atgtgacgatgattgtatggctagtataaggaacaatacttatgatcacagcaaatacag

SEQ ID NO: 78359 - DNA, 60 bp, Artificial
  Synthetic oligonucleotide
ggtgggattgacaaagaaacaatgggattcacatatagtggaataaggaccaacggaaca

SEQ ID NO: 78360 - DNA, 60 bp, Artificial
  Synthetic oligonucleotide
gaggggaaagtccatggggatccagagcgatgtgcaggttgatgccaattgcgaagggga

SEQ ID NO: 78361 - DNA, 60 bp, Artificial
  Synthetic oligonucleotide
gcccaagatatgtaaaacaggaaagtttattattggcaactgggatgaagaacgttcccg

SEQ ID NO: 78362 - DNA, 60 bp, Artificial
  Synthetic oligonucleotide
ctgtggattagacaatgaacctggatcgggaaattggccagatggttccaacattgggtt

SEQ ID NO: 78363 - DNA, 60 bp, Artificial
  Synthetic oligonucleotide
gatgcaagtgctcaaataatatatgcagggaaaatgacagactccatcaaatcatggaga

SEQ ID NO: 78364 - DNA, 60 bp, Artificial
  Synthetic oligonucleotide
aactaagcagcggctacaaagatgtgatactttggtttagcttcggggcatcatgtttca

SEQ ID NO: 78365 - DNA, 60 bp, Artificial
  Synthetic oligonucleotide
aacggctgcattgagggcaagctttctcaaatgtcaaaagaagtgaacgccagaatagag

SEQ ID NO: 78366 - DNA, 60 bp, Artificial
  Synthetic oligonucleotide
ccccatacaactcaaggtttgagtctgttgcttggtcggcaagtgcttgtcatgatggca

SEQ ID NO: 78367 - DNA, 60 bp, Artificial
  Synthetic oligonucleotide
ggctacaaagatgtgatactttggtttagcttcggggcgtcatgttttatacttctggcc

SEQ ID NO: 78368 - DNA, 60 bp, Artificial
  Synthetic oligonucleotide
gctacaaagatgtgatactttggtttagcttcggggcatcatgtttcatacttctggcca

SEQ ID NO: 78369 - DNA, 60 bp, Artificial
  Synthetic oligonucleotide
gcagcggctacaaagatgtgatactttggtttagcttcggggcatcatgtttcatacttc

SEQ ID NO: 78370 - DNA, 60 bp, Artificial
  Synthetic oligonucleotide
agcggctacaaagatgtgatactttggtttagcttcggggcatcatgtttcatacttctg

SEQ ID NO: 78371 - DNA, 60 bp, Artificial
  Synthetic oligonucleotide
gagcagtggctacaaagatgtgatactttggtttagcttcggggcgtcatgttttatact

SEQ ID NO: 78372 - DNA, 59 bp, Artificial
  Synthetic oligonucleotide
aaaattcaaacgaggagatcattcgagctgaagaagctgtgggagcagacccgttcaaa

SEQ ID NO: 78373 - DNA, 60 bp, Artificial
  Synthetic oligonucleotide
ttcaaacgaggagatcattcgagctgaagaagctgtgggagcagacccgttcaaaggcag

SEQ ID NO: 78374 - DNA, 60 bp, Artificial
  Synthetic oligonucleotide
gcacaaattcaaacgaggagatcattcgagctgaagaagctgtgggagcagacccgttca

SEQ ID NO: 78375 - DNA, 60 bp, Artificial
  Synthetic oligonucleotide
gggacggaaaagttgacaataacttactcatcatcaatgatgtgggagatcaatggtcct

SEQ ID NO: 78376 - DNA, 60 bp, Artificial
  Synthetic oligonucleotide
aggaacagagaaattgacaatcacttattcatcatcaatgatgtgggagatcaatggtcc

SEQ ID NO: 78377 - DNA, 60 bp, Artificial
  Synthetic oligonucleotide
tgtcgcagtctcgcactcgcgagatactgacaaaaaccactgtagaccatatggccataa

SEQ ID NO: 78378 - DNA, 60 bp, Artificial
  Synthetic oligonucleotide
cgggtttgagatgatttgggatcccaatggatggacagagacggacaacagtttctctgt

SEQ ID NO: 78379 - DNA, 60 bp, Artificial
  Synthetic oligonucleotide
gggtttgagatgatttgggatcccaatggatggacagagacggacaacagtttctctgtg

SEQ ID NO: 78380 - DNA, 60 bp, Artificial
  Synthetic oligonucleotide
ggagcaccccaactcaacccaattgatggaccattacctgaggacaacgagccaagcgga

SEQ ID NO: 78381 - DNA, 60 bp, Artificial
  Synthetic oligonucleotide
ggagcaccccaactcaacccaattgatggaccattacctgaggacaacgagccaagtgga

SEQ ID NO: 78382 - DNA, 60 bp, Artificial
  Synthetic oligonucleotide
gagactggagcaccccaactcaacccaattgatggaccattacctgaggacaacgagcca

SEQ ID NO: 78383 - DNA, 60 bp, Artificial
  Synthetic oligonucleotide
gcagggagaatgacagactccattaaatcatggagaaaggacatactaagaacccaggag

SEQ ID NO: 78384 - DNA, 60 bp, Artificial
  Synthetic oligonucleotide
ccagctaagagcatggaatatgatgctgttgcgactacacactcatggatccctaagagg

SEQ ID NO: 78385 - DNA, 60 bp, Artificial
  Synthetic oligonucleotide
ggattcttcccttttcacaaggacaatgcaatacgactgggtgagaacaaggacgtcata

SEQ ID NO: 78386 - DNA, 60 bp, Artificial
  Synthetic oligonucleotide
ggattcttcccttttcacaaggacaatgcaatacggctgggtgagaacagggatgtcata

SEQ ID NO: 78387 - DNA, 60 bp, Artificial
  Synthetic oligonucleotide
agagaaattgacaataacatattcatcatcaatgatgtgggaaatcaacggtcctgagtc

SEQ ID NO: 78388 - DNA, 60 bp, Artificial
  Synthetic oligonucleotide
ggagaaactgacaataacatattcatcatcaatgatgtgggaaattaatggaccagaatc

SEQ ID NO: 78389 - DNA, 60 bp, Artificial
  Synthetic oligonucleotide
acctccaaacattgagaataagagtacatgaaggatatgaggaattcacaatggttgggc

SEQ ID NO: 78390 - DNA, 60 bp, Artificial
  Synthetic oligonucleotide
ggcaacctccaaacactgaaaataagagtacatgaaggatatgaggaattcacaatggtt

SEQ ID NO: 78391 - DNA, 60 bp, Artificial
  Synthetic oligonucleotide
aaataagagtacatgaaggatatgaggaattcacaatggttgggcaaagagcaacagcca

SEQ ID NO: 78392 - DNA, 60 bp, Artificial
  Synthetic oligonucleotide
agatggcacagcctcattgagccctggaatgatgatgggtatgttcaacatgctgagtac

SEQ ID NO: 78393 - DNA, 60 bp, Artificial
  Synthetic oligonucleotide
ggcacagcctcattgagccctggaatgatgatgggtatgttcaacatgctgagtacagtc

SEQ ID NO: 78394 - DNA, 60 bp, Artificial
  Synthetic oligonucleotide
gaaccaatggaacctccaaaatcaagatgaaatggggtatggagatgagacgttgccttc

SEQ ID NO: 78395 - DNA, 60 bp, Artificial
  Synthetic oligonucleotide
aatgcaccgaatcatgagggaatacaagcaggagtagataggttctataggacctgcaaa

SEQ ID NO: 78396 - DNA, 55 bp, Artificial
  Synthetic oligonucleotide
gttttgcttaatgcatcttggttcaactccttcctcacacatgcactgaagtagt

SEQ ID NO: 78397 - DNA, 60 bp, Artificial
  Synthetic oligonucleotide
tgggttttgcttaatgcatcttggttcaactccttcctcacacatgcactgagatagttg

SEQ ID NO: 78398 - DNA, 60 bp, Artificial
  Synthetic oligonucleotide
ggaatgatgatgggcatgttcaacatgctaagtacggttttgggagtctcgattctaaat

SEQ ID NO: 78399 - DNA, 53 bp, Artificial
  Synthetic oligonucleotide
gttgctgtcgaattcagacaatgcggcattcccccaaatgaccaagtcatata

SEQ ID NO: 78400 - DNA, 60 bp, Artificial
  Synthetic oligonucleotide
gcatgtatgcatgacagggaacgataatgatgcaagtgctcaaataatatatgcagggag

SEQ ID NO: 78401 - DNA, 60 bp, Artificial
  Synthetic oligonucleotide
atggattccaacactgtgtcaagctttcaggtagactgctttctttggcacgtccgcaaa

SEQ ID NO: 78402 - DNA, 60 bp, Artificial
  Synthetic oligonucleotide
gaccaaaagaattcggatggccatcaattagtgtcgaattgtttaaaaacgaccttgttt

SEQ ID NO: 78403 - DNA, 60 bp, Artificial
  Synthetic oligonucleotide
ccaaaaggattcggatggccatcaattagtgtcgaattgtttaaaaacgaccttgtttct

SEQ ID NO: 78404 - DNA, 60 bp, Artificial
  Synthetic oligonucleotide
gccctcgatatgtcagacagccaagcctccttttggctacaggaatgagaaatgtcccgg

SEQ ID NO: 78405 - DNA, 51 bp, Artificial
  Synthetic oligonucleotide
acgaggaatcaatgatcggaatttctggagaggtgaaaatggacggaggac

SEQ ID NO: 78406 - DNA, 60 bp, Artificial
  Synthetic oligonucleotide
tcactcactgagtgacatccacatcatggcgtctcaaggcaccaaacgatcttatgaaca

SEQ ID NO: 78407 - DNA, 60 bp, Artificial
  Synthetic oligonucleotide
actcactgagtgacatccacatcatggcgtctcaaggcaccaaacgatcttatgaacaga

SEQ ID NO: 78408 - DNA, 60 bp, Artificial
  Synthetic oligonucleotide
ctgagtgacattcacatcatggcgtctcaaggcaccaaacgatcttatgagcagatggag

SEQ ID NO: 78409 - DNA, 60 bp, Artificial
  Synthetic oligonucleotide
ctgagtgacatccacatcatggcgtctcaaggcaccaaacgatcttatgagcagatggag

SEQ ID NO: 78410 - DNA, 60 bp, Artificial
  Synthetic oligonucleotide
atcactcactgagtgacatccacatcatggcgtctcaaggcaccaaacgatcttatgaac

SEQ ID NO: 78411 - DNA, 60 bp, Artificial
  Synthetic oligonucleotide
atcttggttcaactccttcctcacacatgcactgaaatagttgtggcaatgctactattt

SEQ ID NO: 78412 - DNA, 60 bp, Artificial
  Synthetic oligonucleotide
ggagactggagcaccccaactcaacccaattgatggaccactacctgaggacaatgagcc

SEQ ID NO: 78413 - DNA, 60 bp, Artificial
  Synthetic oligonucleotide
attgacaatcacttattcatcatcaatgatgtgggagatcaatggtcctgagtcggtgtt

SEQ ID NO: 78414 - DNA, 60 bp, Artificial
  Synthetic oligonucleotide
catgcgcaggcttgccgaccaaagtctcccaccgaacttctccagccttgaaaactttag

SEQ ID NO: 78415 - DNA, 60 bp, Artificial
  Synthetic oligonucleotide
tccaccagaggagttcagattgcttcaaatgagaacatggaaacaatggactccagcact

SEQ ID NO: 78416 - DNA, 60 bp, Artificial
  Synthetic oligonucleotide
ccaccagaggagttcagattgcttcaaatgagaacatggaaacaatggactccagcactc

SEQ ID NO: 78417 - DNA, 51 bp, Artificial
  Synthetic oligonucleotide
gatgcaagtgcccaaataatatatgcagggaaaatgacagactccatcaaa

SEQ ID NO: 78418 - DNA, 53 bp, Artificial
  Synthetic oligonucleotide
atgatgcaagtgcccaaataatatatgcagggaaaatgacagactccatcaaa

SEQ ID NO: 78419 - DNA, 60 bp, Artificial
  Synthetic oligonucleotide
tgtttcatacttctggccattgcaatgggccttgtcttcatatgtgtgaagaatggaaac

SEQ ID NO: 78420 - DNA, 60 bp, Artificial
  Synthetic oligonucleotide
cttctggccattgcaatgggccttgtcttcatatgtgtgaagaatggaaacatgcggtgc

SEQ ID NO: 78421 - DNA, 60 bp, Artificial
  Synthetic oligonucleotide
catacttctggccattgcaatgggccttgtcttcatatgtgtgaagaatggaaacatgcg

SEQ ID NO: 78422 - DNA, 60 bp, Artificial
  Synthetic oligonucleotide
cagtaggaagctcgaaatatcagcaatcgttcaccccaagtccgggagcacggccacagg

SEQ ID NO: 78423 - DNA, 60 bp, Artificial
  Synthetic oligonucleotide
ccagtagctcatacaggaggccagttggaatttccagcatggtggaggccatggtgtcta

SEQ ID NO: 78424 - DNA, 60 bp, Artificial
  Synthetic oligonucleotide
acctgaatggtttaggaatgtcttgagcattgctcctataatgttctcaaacaaaatggc

SEQ ID NO: 78425 - DNA, 60 bp, Artificial
  Synthetic oligonucleotide
cacaagaaaccaacctgaatggtttaggaatgtcttgagcattgctcctataatgttctc

SEQ ID NO: 78426 - DNA, 60 bp, Artificial
  Synthetic oligonucleotide
ggtcgggctttgaaatcatcaaagttacagaggggtggatcaactctcccaatcatgcca

SEQ ID NO: 78427 - DNA, 60 bp, Artificial
  Synthetic oligonucleotide
ataccactctgtcaacaatagcccttctcattggagtggggaacttagtcttcaacacag

SEQ ID NO: 78428 - DNA, 60 bp, Artificial
  Synthetic oligonucleotide
cagatcagaggattcgtgtactttgtcgaaacattagcgaggagcatctgcgagaaactt

SEQ ID NO: 78429 - DNA, 60 bp, Artificial
  Synthetic oligonucleotide
cattccagaggtctgcttgaagtgggaactaatggatgaagattaccagggcaggctgtg

SEQ ID NO: 78430 - DNA, 60 bp, Artificial
  Synthetic oligonucleotide
gtcaaattaagtagtggctacaaagatgtgatactttggtttagcttcggggcatcatgc

SEQ ID NO: 78431 - DNA, 60 bp, Artificial
  Synthetic oligonucleotide
tgcaatgggccttgtcttcatatgtgtgaagaatggaaacatgcggtgcactatttgtat

SEQ ID NO: 78432 - DNA, 60 bp, Artificial
  Synthetic oligonucleotide
gtggcaatggttttctcacaagaggattgcatgataaaagcagtacgaggtgatctgaat

SEQ ID NO: 78433 - DNA, 60 bp, Artificial
  Synthetic oligonucleotide
tcgaattcagacaatgcggcattcccccaaatgaccaagtcatatagaaatcccagaaac

SEQ ID NO: 78434 - DNA, 60 bp, Artificial
  Synthetic oligonucleotide
gacttctgggaataatcactgggccaccccaatgtgaccaattcctagaattttcagccg

SEQ ID NO: 78435 - DNA, 52 bp, Artificial
  Synthetic oligonucleotide
ggattcttcccttttcacaaggacaatgcaatacgactgggtgagaacaaag

SEQ ID NO: 78436 - DNA, 60 bp, Artificial
  Synthetic oligonucleotide
ggattcttcccttttcacaaggacaatgcaatacgactgggtgagaacaaaaatgtcata

SEQ ID NO: 78437 - DNA, 52 bp, Artificial
  Synthetic oligonucleotide
ggattcttcccttttcacaaggacaatgcaatacgactgggtgagaacaaaa

SEQ ID NO: 78438 - DNA, 60 bp, Artificial
  Synthetic oligonucleotide
tgcttgaagtagaacatgagataagaactttctcgtttcagcttatttaatgataaaaaa

SEQ ID NO: 78439 - DNA, 60 bp, Artificial
  Synthetic oligonucleotide
ggactacacccttgatgaagagagcagagcaagaatcaaaaccaggctgttcactataag

SEQ ID NO: 78440 - DNA, 60 bp, Artificial
  Synthetic oligonucleotide
ggtgccatagcgggtttcattgaaaatggatgggaaggtctgattgacggatggtatggc

SEQ ID NO: 78441 - DNA, 60 bp, Artificial
  Synthetic oligonucleotide
tagcgggtttcattgaaaatggatgggaaggtctgatcaacgggtggtatggcttcaggc

SEQ ID NO: 78442 - DNA, 60 bp, Artificial
  Synthetic oligonucleotide
ggtgctatagcgggtttcattgaaaatggatgggaaggtctgattgacgggtggtatggc

SEQ ID NO: 78443 - DNA, 60 bp, Artificial
  Synthetic oligonucleotide
ggtgccatagcgggtttcattgaaaatggatgggaaggtctgattgacgggtggtatggc

SEQ ID NO: 78444 - DNA, 60 bp, Artificial
  Synthetic oligonucleotide
ggtgccatagcgggtttcattgaaaatggatgggaaggcctgattgatggatggtatggc

SEQ ID NO: 78445 - DNA, 60 bp, Artificial
  Synthetic oligonucleotide
cgcttggggagtccgtgatgagaatgagggacctccactccctccaaagcagaaacgcta

SEQ ID NO: 78446 - DNA, 60 bp, Artificial
  Synthetic oligonucleotide
acaggcttcgaagagaccaaaaggcattaaagggaagaggcagcacacttggactcgatc

SEQ ID NO: 78447 - DNA, 60 bp, Artificial
  Synthetic oligonucleotide
gggatcctccatacagccatggaacgggaacaggatacaccatggacacagtcaacagaa

SEQ ID NO: 78448 - DNA, 60 bp, Artificial
  Synthetic oligonucleotide
ggatcctccatacagccatggaacgggaacaggatacaccatggacacagtcaacagaac

SEQ ID NO: 78449 - DNA, 60 bp, Artificial
  Synthetic oligonucleotide
tgaataagaagagctatttaataagagcactgacactgaacacaatgacaaaagatgcag

SEQ ID NO: 78450 - DNA, 60 bp, Artificial
  Synthetic oligonucleotide
cagggatctttgaaaactcatgtcttgaaacgatggaagttgttcagcaaacaagagtgg

SEQ ID NO: 78451 - DNA, 60 bp, Artificial
  Synthetic oligonucleotide
ccagggatctttgaaaactcatgtcttgaaacgatggaagttgttcagcaaacaagagtg

SEQ ID NO: 78452 - DNA, 60 bp, Artificial
  Synthetic oligonucleotide
gggaggttctacatacagatgtgcactgaactcaaactcagtgactatgaagggaggatg

SEQ ID NO: 78453 - DNA, 60 bp, Artificial
  Synthetic oligonucleotide
cttcctttgacatgagtaacgagggatcttatttcttcggagacaatgcagaggaatacg

SEQ ID NO: 78454 - DNA, 60 bp, Artificial
  Synthetic oligonucleotide
aagaactaatggagcaaccagttcatgtaggagatcaggatcttcattctatgcagagat

SEQ ID NO: 78455 - DNA, 60 bp, Artificial
  Synthetic oligonucleotide
atggtgccattgtagctgaaatatctcccattccttctatgccaggacattctacagagg

SEQ ID NO: 78456 - DNA, 53 bp, Artificial
  Synthetic oligonucleotide
ccggctgcaactgctttggccaacactatagaggtcttcagatcgaacggtct

SEQ ID NO: 78457 - DNA, 60 bp, Artificial
  Synthetic oligonucleotide
ctgagccctggaatgatgatgggcatgttcaacatgctaagtacagttttgggagtctcg

SEQ ID NO: 78458 - DNA, 60 bp, Artificial
  Synthetic oligonucleotide
aaactggcaaatgttgtgagaaagatgatgactaactcacaagacacagagctctccttc

SEQ ID NO: 78459 - DNA, 60 bp, Artificial
  Synthetic oligonucleotide
aggcccatgttcttgtatgtgagaaccaatggaacctccaaaatcaagatgaaatggggc

SEQ ID NO: 78460 - DNA, 60 bp, Artificial
  Synthetic oligonucleotide
agcaaaagcaggtgcgagatgaatccaaatcagaagataataacaattggggtagtgaat

SEQ ID NO: 78461 - DNA, 60 bp, Artificial
  Synthetic oligonucleotide
gcaggtgcgagatgaatccaaatcagaagataataacaattggggtagtgaatactactc

SEQ ID NO: 78462 - DNA, 60 bp, Artificial
  Synthetic oligonucleotide
gatccagtcaaattaagtagtggctacaaagatgtgatactttggtttagcttcggggca

SEQ ID NO: 78463 - DNA, 60 bp, Artificial
  Synthetic oligonucleotide
agattgacccagtcaaactaagcagcggctacaaagatgtgatactttggtttagcttcg

SEQ ID NO: 78464 - DNA, 60 bp, Artificial
  Synthetic oligonucleotide
ccctcaaagccgagatcgcgcagagacttgaagatgtgtttgcagggaagaacaccgatc

SEQ ID NO: 78465 - DNA, 60 bp, Artificial
  Synthetic oligonucleotide
tcaggccccctcaaagccgagatcgcgcagagacttgaagatgtctttgcagggaagaac

SEQ ID NO: 78466 - DNA, 60 bp, Artificial
  Synthetic oligonucleotide
cgtcaggccccctcaaagccgagatcgcgcagagacttgaagatgtctttgcagggaaga

SEQ ID NO: 78467 - DNA, 60 bp, Artificial
  Synthetic oligonucleotide
tgtcccgtcaggccccctcaaagccgagatcgcgcagagacttgaagatgtgtttgcagg

SEQ ID NO: 78468 - DNA, 60 bp, Artificial
  Synthetic oligonucleotide
tgttatcatggaggtcgttttcccaaatgaagtgggggctagaatattgacgtcagagtc

SEQ ID NO: 78469 - DNA, 60 bp, Artificial
  Synthetic oligonucleotide
caaacacagacaatgccgcattcccacagacaaccaagtcttacaggaatcccaaaagca

SEQ ID NO: 78470 - DNA, 60 bp, Artificial
  Synthetic oligonucleotide
gccttacaactaccgcttgaagtggagcaagagataagaactttctcgtttcagcttatt

SEQ ID NO: 78471 - DNA, 60 bp, Artificial
  Synthetic oligonucleotide
agaccatactagaaacagggtatgtatgtagcaaatttcattcagacactcctagaccag

SEQ ID NO: 78472 - DNA, 60 bp, Artificial
  Synthetic oligonucleotide
aacaatgagaccatactagaaacagggtatgtatgtagcaaatttcattcagacactcct

SEQ ID NO: 78473 - DNA, 60 bp, Artificial
  Synthetic oligonucleotide
gaaaacattcccaaaacaaagatacaacatttggaggagtgttcttgttatgtagacatc

SEQ ID NO: 78474 - DNA, 60 bp, Artificial
  Synthetic oligonucleotide
agggtaataaagtatgagaacgtccccaaaacaaagatacaacatttggaggagtgttcc

SEQ ID NO: 78475 - DNA, 60 bp, Artificial
  Synthetic oligonucleotide
gggagggtaataaagtatgagaacgtccccaaaacaaagatacaacatttggaggagtgt

SEQ ID NO: 78476 - DNA, 60 bp, Artificial
  Synthetic oligonucleotide
tggatacgagaagggagggtaataaagtatgagaacgtccccaaaacaaagatacaacat

SEQ ID NO: 78477 - DNA, 60 bp, Artificial
  Synthetic oligonucleotide
ttgagagatctaatgtcgcagtctcgcactcgcgagatactaacaaaaaccactgtggac

SEQ ID NO: 78478 - DNA, 60 bp, Artificial
  Synthetic oligonucleotide
gggaccttcgatcttggggggctatatgaagcaattgaggagtgcctgattaatgatccc

SEQ ID NO: 78479 - DNA, 60 bp, Artificial
  Synthetic oligonucleotide
cgagtccagaagcgaggccacaagtgaatggccaatctggaagaattgactttcattggc

SEQ ID NO: 78480 - DNA, 60 bp, Artificial
  Synthetic oligonucleotide
cgtcgccttaaatacggtttgaaaagagggccttctacggaaggggtgcctgagtctatg

SEQ ID NO: 78481 - DNA, 52 bp, Artificial
  Synthetic oligonucleotide
gccttgtcttcatatgtgtgaagaatggaaacatgcggtgcactatttgtat

SEQ ID NO: 78482 - DNA, 60 bp, Artificial
  Synthetic oligonucleotide
tgtcataatggaagttgttttcccaaatgaagtgggtgccagaatactaacatcggaatc

SEQ ID NO: 78483 - DNA, 60 bp, Artificial
  Synthetic oligonucleotide
tgtgatcatggaagttgttttcccaaatgaagtgggagcaagaatactaacatcggagtc

SEQ ID NO: 78484 - DNA, 60 bp, Artificial
  Synthetic oligonucleotide
tttgaaatattccataagtgtgatgaccaatgtatggagagcataaggaacaacacttat

SEQ ID NO: 78485 - DNA, 60 bp, Artificial
  Synthetic oligonucleotide
agattccaaaaacaaagaacatgaagaaaacaagccaattgaagtgggcacttggtgaaa

SEQ ID NO: 78486 - DNA, 60 bp, Artificial
  Synthetic oligonucleotide
atacaactcaaggtttgagtctgtcgcttggtcggcaagtgcttgtcatgatggcattag

SEQ ID NO: 78487 - DNA, 60 bp, Artificial
  Synthetic oligonucleotide
atggcattagttggctgacaattggaatttccggcccagacaatggggctgtggctgtat

SEQ ID NO: 78488 - DNA, 60 bp, Artificial
  Synthetic oligonucleotide
gagctgtcctgttggtgaggctccctctccatacaactcaaggtttgagtcggttgcttg

SEQ ID NO: 78489 - DNA, 60 bp, Artificial
  Synthetic oligonucleotide
tggtagttgggatagtcagcttaatgttacaaattggaaacataatctcaatatgggtta

SEQ ID NO: 78490 - DNA, 60 bp, Artificial
  Synthetic oligonucleotide
aaagaaattgaatccgtaaacaatgctgtggtaatgccagctcatggtccagccaagagc

SEQ ID NO: 78491 - DNA, 60 bp, Artificial
  Synthetic oligonucleotide
caaagaaattgaatccgtaaacaatgctgtggtaatgccagctcatggtccagccaagag

SEQ ID NO: 78492 - DNA, 60 bp, Artificial
  Synthetic oligonucleotide
aaagaaattgaatccgtaaacaatgctgtggtaatgccagctcatggtccagctaagagc

SEQ ID NO: 78493 - DNA, 60 bp, Artificial
  Synthetic oligonucleotide
cagaccaagaactgggtgatgccccattccttgaccggcttcgccgagatcagaaatctc

SEQ ID NO: 78494 - DNA, 60 bp, Artificial
  Synthetic oligonucleotide
ggattccaacacgataacctcgtttcaggtagattgttatctatggcacataagaaagct

SEQ ID NO: 78495 - DNA, 60 bp, Artificial
  Synthetic oligonucleotide
ataacaagaaatcaacctgaatggtttaggaacgtcttgagcattgcgcccataatgttt

SEQ ID NO: 78496 - DNA, 60 bp, Artificial
  Synthetic oligonucleotide
attacaagaaatcaacctgaatggtttaggaacgtcctgagcattgcccctataatgttt

SEQ ID NO: 78497 - DNA, 60 bp, Artificial
  Synthetic oligonucleotide
gacccagtgaaattgagtagtgggtacaaagacataatcttatggtttagcttcggggca

SEQ ID NO: 78498 - DNA, 60 bp, Artificial
  Synthetic oligonucleotide
cccagtgaaattgagtagtgggtacaaagacataatcttatggtttagcttcggggcatc

SEQ ID NO: 78499 - DNA, 60 bp, Artificial
  Synthetic oligonucleotide
cagcacacaatagatcttgcggattcagaaatgaacaaactttatgagcgtgtcagaaaa

SEQ ID NO: 78500 - DNA, 60 bp, Artificial
  Synthetic oligonucleotide
gggaaatttcaaacagcagcacaacgagcaatgatggaccaggtgagagaaagcaggaat

SEQ ID NO: 78501 - DNA, 60 bp, Artificial
  Synthetic oligonucleotide
aagaactaatggaacaaccagtgcatgtaggagatcaggatcttcattctatgcagagat

SEQ ID NO: 78502 - DNA, 60 bp, Artificial
  Synthetic oligonucleotide
gaactaatggaacaaccagtgcatgtaggagatcaggatcttcattctatgcagagatga

SEQ ID NO: 78503 - DNA, 60 bp, Artificial
  Synthetic oligonucleotide
ggtggatatcctaaggcaaaatccaactgaggagcaagctgtggatatatgcaaagcagc

SEQ ID NO: 78504 - DNA, 60 bp, Artificial
  Synthetic oligonucleotide
ggccgtgggtatctttcaatcaaaatctggagtatcaaataggatatatatgcagtggag

SEQ ID NO: 78505 - DNA, 60 bp, Artificial
  Synthetic oligonucleotide
gaactgacaggattagattgcatgagaccttgtttctgggttgagctaatcagagggcgg

SEQ ID NO: 78506 - DNA, 60 bp, Artificial
  Synthetic oligonucleotide
tagtgggtgggctatatacagtaaggataacggtataagaattggttccaagggggatgt

SEQ ID NO: 78507 - DNA, 60 bp, Artificial
  Synthetic oligonucleotide
agagtgcatgaggggtatgaggaattcacaatggttggacggagagcaacagctattctg

SEQ ID NO: 78508 - DNA, 60 bp, Artificial
  Synthetic oligonucleotide
aagagtacatgaggggtatgaggaattcacaatggttgggaggagagcaactgctatcct

SEQ ID NO: 78509 - DNA, 60 bp, Artificial
  Synthetic oligonucleotide
taagagtacatgaggggtatgaggaattcacaatggttgggaggagagcaactgctatcc

SEQ ID NO: 78510 - DNA, 60 bp, Artificial
  Synthetic oligonucleotide
caacaggccttggatgaggatcaacaatgagaccatattggaaacagggtatgtatgtag

SEQ ID NO: 78511 - DNA, 60 bp, Artificial
  Synthetic oligonucleotide
ttccaacaggccttggatgaggatcaacaatgagaccatattggaaacagggtatgtatg

SEQ ID NO: 78512 - DNA, 60 bp, Artificial
  Synthetic oligonucleotide
ttccaacaggccttggatgaggatcaacaatgagaccatattagaaacagggtatgtatg

SEQ ID NO: 78513 - DNA, 60 bp, Artificial
  Synthetic oligonucleotide
gatgtgatactttggtttagcttcggggcatcatgtttcatacttctggccattgcaatg

SEQ ID NO: 78514 - DNA, 60 bp, Artificial
  Synthetic oligonucleotide
gtgatactttggtttagcttcggggcatcatgtttcatacttctggccattgcaatgggc

SEQ ID NO: 78515 - DNA, 60 bp, Artificial
  Synthetic oligonucleotide
gtgatactttggtttagcttcggggcatcatgtttaatacttctggccattgcaatgggc

SEQ ID NO: 78516 - DNA, 60 bp, Artificial
  Synthetic oligonucleotide
gggacttgtgttgttgctgtcacagatggccctgctgctaatagtgcagatcacagggtt

SEQ ID NO: 78517 - DNA, 60 bp, Artificial
  Synthetic oligonucleotide
gttgttgctgtcacagatggccctgctgctaatagtgcagatcacagggtttactggata

SEQ ID NO: 78518 - DNA, 60 bp, Artificial
  Synthetic oligonucleotide
ggattcttcccttttcacaaggacaatgcaatacgactgggtgaaaacaaagacgtcata

SEQ ID NO: 78519 - DNA, 60 bp, Artificial
  Synthetic oligonucleotide
ggggacctccactccctccaaagcagaaacggaaaatggcgagaacaattgagtcagaaa

SEQ ID NO: 78520 - DNA, 60 bp, Artificial
  Synthetic oligonucleotide
cccaaggggacaactgtccaccagaggagttcagattgcttcaaatgagaacatggaaac

SEQ ID NO: 78521 - DNA, 60 bp, Artificial
  Synthetic oligonucleotide
ggtgtgaacagcgatactgtaggttggtcttggccagacggtgctgagttgccattcacc

SEQ ID NO: 78522 - DNA, 60 bp, Artificial
  Synthetic oligonucleotide
tgtggtgtaaatagtgacactgtgggttggtcttggccagacggtgctgagttgccattc

SEQ ID NO: 78523 - DNA, 60 bp, Artificial
  Synthetic oligonucleotide
tggtgtaaatagtgacactgtgggttggtcttggccagacggtgctgagttgccattcac

SEQ ID NO: 78524 - DNA, 60 bp, Artificial
  Synthetic oligonucleotide
aaattgcttcaaatgagaacatggaaacaatggattccagcactcttgaactgagaagca

SEQ ID NO: 78525 - DNA, 60 bp, Artificial
  Synthetic oligonucleotide
atcggacagggacatttgagttcacaagctttttctaccgctatggatttgtagccaatt

SEQ ID NO: 78526 - DNA, 60 bp, Artificial
  Synthetic oligonucleotide
gctttgaacagataacattcttgcaagcattgcaactcttacttgaagttgagagtgaga

SEQ ID NO: 78527 - DNA, 60 bp, Artificial
  Synthetic oligonucleotide
ccaagaactgggtgatgccccattccttgaccggcttcgccgagaccagaggtccctaaa

SEQ ID NO: 78528 - DNA, 60 bp, Artificial
  Synthetic oligonucleotide
cataagaaagctgctcagcatgagagacatgtgtgatgctccctttgatgataggctcag

SEQ ID NO: 78529 - DNA, 60 bp, Artificial
  Synthetic oligonucleotide
ggattcttcccttttcacaaggacaatgcaatacgattgggtgagaacaaggacgtcata

SEQ ID NO: 78530 - DNA, 60 bp, Artificial
  Synthetic oligonucleotide
tggaaaggttccaacaggccttggatgagaatcaacaacgagactatactggagacagga

SEQ ID NO: 78531 - DNA, 60 bp, Artificial
  Synthetic oligonucleotide
gtgccattgtagctgaaatatctcccattccttctatgccaggacattctacagaggatg

SEQ ID NO: 78532 - DNA, 60 bp, Artificial
  Synthetic oligonucleotide
cgtcgccttatatacggtttgaaaagagggccttctacggaaggagtgcctgagtctatg

SEQ ID NO: 78533 - DNA, 53 bp, Artificial
  Synthetic oligonucleotide
acatgcactgaaatagttgtggcaatgctactatttgctatccatactgtcca

SEQ ID NO: 78534 - DNA, 56 bp, Artificial
  Synthetic oligonucleotide
tgcttgaagtggagcaagagataagaactttctcatttcagcttatttaatgataa

SEQ ID NO: 78535 - DNA, 60 bp, Artificial
  Synthetic oligonucleotide
attcatcatcaatgatgtgggagatcaatggtcctgagtcagtgttggtcaatacttacc

SEQ ID NO: 78536 - DNA, 60 bp, Artificial
  Synthetic oligonucleotide
cacttatgatcacagcaaatacagagaagaagcaatgcaaaatagaatacagattgaccc

SEQ ID NO: 78537 - DNA, 60 bp, Artificial
  Synthetic oligonucleotide
gaacggctgcattgagggcaagctttctcaaatgtccaaagaagtaaatgctagaattga

SEQ ID NO: 78538 - DNA, 60 bp, Artificial
  Synthetic oligonucleotide
gaacggctgcattgagggcaagctttctcaaatgtccaaagaagtgaatgccagaattga

SEQ ID NO: 78539 - DNA, 60 bp, Artificial
  Synthetic oligonucleotide
gaacggctgcattgagggcaagctttctcaaatgtcccaagaagtgaatgccagaattga

SEQ ID NO: 78540 - DNA, 60 bp, Artificial
  Synthetic oligonucleotide
gaacggctgcattgagggcaagctttctcaaatgtccaaagaagtgaatgcaaggataga

SEQ ID NO: 78541 - DNA, 60 bp, Artificial
  Synthetic oligonucleotide
cggctgcattgagggcaagctttctcaaatgtccaaagaagtgaatgcaaggatagaacc

SEQ ID NO: 78542 - DNA, 60 bp, Artificial
  Synthetic oligonucleotide
cggctgcattgagggcaagctttctcaaatgtccaaagaagtgaatgccagaattgaacc

SEQ ID NO: 78543 - DNA, 57 bp, Artificial
  Synthetic oligonucleotide
ccgaacggctgcattgagggcaagctttctcaaatgtccaaagaagtgaatgcaaga

SEQ ID NO: 78544 - DNA, 60 bp, Artificial
  Synthetic oligonucleotide
ccggttggaatttccagtatggtggaggccatggtgtctagggcccgaattgatgcacga

SEQ ID NO: 78545 - DNA, 60 bp, Artificial
  Synthetic oligonucleotide
gacgaagagttgacataaaccctggccacgcagacctcagtgccaaagaggcacaggatg

SEQ ID NO: 78546 - DNA, 60 bp, Artificial
  Synthetic oligonucleotide
gacggagagttgacataaaccctggccacgcagacctcagtgccaaagaggcacaggatg

SEQ ID NO: 78547 - DNA, 60 bp, Artificial
  Synthetic oligonucleotide
ggtggaattgggagattctacatacagatgtgcactgaactcaaactcagcgactatgaa

SEQ ID NO: 78548 - DNA, 52 bp, Artificial
  Synthetic oligonucleotide
acatgcactgaaatagttgtggcaatgctactatttgctatccatactgtcc

SEQ ID NO: 78549 - DNA, 54 bp, Artificial
  Synthetic oligonucleotide
cacatgcactgaaatagttgtggcaatgctactatttgctatccatactgtcca

SEQ ID NO: 78550 - DNA, 60 bp, Artificial
  Synthetic oligonucleotide
gaaccatgcgcaggctcgccgaccaaagcctcccaccgaacttctccagccttgaaaact

SEQ ID NO: 78551 - DNA, 60 bp, Artificial
  Synthetic oligonucleotide
atgaatccaaatcagaagataataacaattggtgttgtgaacactactctatcaacaata

SEQ ID NO: 78552 - DNA, 60 bp, Artificial
  Synthetic oligonucleotide
atgaatccaaatcagaagataataacaattggtgcagtgaatactactctatcaacaata

SEQ ID NO: 78553 - DNA, 60 bp, Artificial
  Synthetic oligonucleotide
ggagatgtgccatagtacacaaattggcggaataaggatggtggacatccttagacaaaa

SEQ ID NO: 78554 - DNA, 60 bp, Artificial
  Synthetic oligonucleotide
ctcatacaggaggccagttggaatttccagcatggtggaggccatggtgtctagggcccg

SEQ ID NO: 78555 - DNA, 60 bp, Artificial
  Synthetic oligonucleotide
tgctcacaggcaacctccaaacattgaaaataagagtacatgaaggatatgaggaattca

SEQ ID NO: 78556 - DNA, 60 bp, Artificial
  Synthetic oligonucleotide
cacaggcaacctccaaacattgaaaataagagtacatgaaggatatgaggaattcacaat

SEQ ID NO: 78557 - DNA, 60 bp, Artificial
  Synthetic oligonucleotide
cttcattctatgcggagatgaaatggttgctgtcgaattcagacaatgcggcattccctc

SEQ ID NO: 78558 - DNA, 60 bp, Artificial
  Synthetic oligonucleotide
ggttcttcattctatgcggagatgaaatggttgctgtcgaattcagacaatgcggcattc

SEQ ID NO: 78559 - DNA, 60 bp, Artificial
  Synthetic oligonucleotide
atcaggttcttccttctatgcagagatgaaatggttgctgtcgaattcagacaatgcggc

SEQ ID NO: 78560 - DNA, 51 bp, Artificial
  Synthetic oligonucleotide
tgctgtcgaattcagacaatgcggcattccctcaaatgaccaagtcatata

SEQ ID NO: 78561 - DNA, 60 bp, Artificial
  Synthetic oligonucleotide
ggtgcttcattctatgcggagatgaaatggttgctgtcgaattcagacaatgcggcattc

SEQ ID NO: 78562 - DNA, 60 bp, Artificial
  Synthetic oligonucleotide
cagatgcgtgatgtgctggggacatttgacactgtccaaataataaagctcctaccattt

SEQ ID NO: 78563 - DNA, 60 bp, Artificial
  Synthetic oligonucleotide
tctcttctctaactgtgagcgtaaggggttcaggaatgagaatacttgtgagaggcaact

SEQ ID NO: 78564 - DNA, 60 bp, Artificial
  Synthetic oligonucleotide
cgaggtgatttgaattttgtcaacagagcgaaccagcggctaaatcccatgcatcaactc

SEQ ID NO: 78565 - DNA, 60 bp, Artificial
  Synthetic oligonucleotide
aacatattcatcgtccatgatgtgggaaatcaatggcccggaatcagtgctggtcaacac

SEQ ID NO: 78566 - DNA, 60 bp, Artificial
  Synthetic oligonucleotide
ttcacaatggtcgggcgaagagcaacagccattctaaggaaagcaaccagaaggctgatt

SEQ ID NO: 78567 - DNA, 60 bp, Artificial
  Synthetic oligonucleotide
gtacacaaattggcgggataagaatggtggacatccttagacaaaacccaacagaagagc

SEQ ID NO: 78568 - DNA, 60 bp, Artificial
  Synthetic oligonucleotide
tgggccagcattgagcatcaacgaattgagcaatcttgcgaaaggggagaaggcaaatgt

SEQ ID NO: 78569 - DNA, 60 bp, Artificial
  Synthetic oligonucleotide
tcaagactgtaagattgctcccttgatggtggcatacatgttggagagagaactggttcg

SEQ ID NO: 78570 - DNA, 60 bp, Artificial
  Synthetic oligonucleotide
aaaaggataatggagatgatccctgaaagaaatgagcaaggtcaaactctttggagcaaa

SEQ ID NO: 78571 - DNA, 60 bp, Artificial
  Synthetic oligonucleotide
ctgcatcgactactgagcagaccaaactctatggaagtggaaacaagttgataacagtag

SEQ ID NO: 78572 - DNA, 60 bp, Artificial
  Synthetic oligonucleotide
atgaacatccaaattctggtagccatcgcttgtgcactcatcggaactaaagcagacaaa

SEQ ID NO: 78573 - DNA, 60 bp, Artificial
  Synthetic oligonucleotide
tcttatggtttagcttcggggcatcatgcttccttcttcttgccattgcaatgggattgg

SEQ ID NO: 78574 - DNA, 60 bp, Artificial
  Synthetic oligonucleotide
tccacaaatgtgatgatcaatgcatggagagcataaggaacaacacctatgatcacactc

SEQ ID NO: 78575 - DNA, 60 bp, Artificial
  Synthetic oligonucleotide
tacaaaagcactcaatctgcaatagaccagatcacaggcaaactgaaccgtttaattgac

SEQ ID NO: 78576 - DNA, 60 bp, Artificial
  Synthetic oligonucleotide
caagcccactgccatttcaaaacattaaccccaggactgttgggaaatgccccagatatg

SEQ ID NO: 78577 - DNA, 60 bp, Artificial
  Synthetic oligonucleotide
gggaaatgccccagatatgttaggcaaccaagtctcctattggcaacagggatgaggaat

SEQ ID NO: 78578 - DNA, 60 bp, Artificial
  Synthetic oligonucleotide
gccccagatatgttaggcaaccaagtctcctattggcaacagggatgaggaatgttccag

SEQ ID NO: 78579 - DNA, 60 bp, Artificial
  Synthetic oligonucleotide
gctccagacagagcaactttcctgaagggaaaatccctcggggttcaaagtaatgtgcct

SEQ ID NO: 78580 - DNA, 60 bp, Artificial
  Synthetic oligonucleotide
gattccaattgtgtgggagactgtttccacagtggaggcaccattacaagcccactgcca

SEQ ID NO: 78581 - DNA, 60 bp, Artificial
  Synthetic oligonucleotide
ggaatgtcataaattggacaagagactcaataactgaattgtggtcatacaatgctgaat

SEQ ID NO: 78582 - DNA, 60 bp, Artificial
  Synthetic oligonucleotide
gaatcaacacacaatagatcttgcagattcagaaatgaacaaactctatgaacgtgtcag

SEQ ID NO: 78583 - DNA, 60 bp, Artificial
  Synthetic oligonucleotide
catcgacggctggtatggtttcagacatcagaatgcacagggagaggggactgcagctga

SEQ ID NO: 78584 - DNA, 65 bp, Artificial
  Synthetic oligonucleotide
caggcaaactgaaccgtttaattgacaagacaaatcaacaatttgaacttatcgataatgagttc

SEQ ID NO: 78585 - DNA, 60 bp, Artificial
  Synthetic oligonucleotide
ggcaattgctggttttatagagaatgggtgggaaggtctcatcgacggctggtatggttt

SEQ ID NO: 78586 - DNA, 60 bp, Artificial
  Synthetic oligonucleotide
ttgctggttttatagagaatgggtgggaaggtctcatcgacggctggtacggcttcagac

SEQ ID NO: 78587 - DNA, 60 bp, Artificial
  Synthetic oligonucleotide
gacaatgccgcattcccacagacaaccaagtcttacaggaatcccaaaagcaaacctgcc

SEQ ID NO: 78588 - DNA, 60 bp, Artificial
  Synthetic oligonucleotide
ccgcattcccacagacaaccaagtcttacaggaatcccaaaagcaaacctgccttaatag

SEQ ID NO: 78589 - DNA, 60 bp, Artificial
  Synthetic oligonucleotide
gcaccattacaagcccactgccatttcaaaacattaaccccaggactgttgggaaatgcc

SEQ ID NO: 78590 - DNA, 60 bp, Artificial
  Synthetic oligonucleotide
ggatgtgtgctaccctggcaaattctcgaatgaagagtcattaagacagatcctccgaga

SEQ ID NO: 78591 - DNA, 60 bp, Artificial
  Synthetic oligonucleotide
gcggaattctgggaatattgacgggtccaccacagtgcgatcaatttctggaatttgagt

SEQ ID NO: 78592 - DNA, 60 bp, Artificial
  Synthetic oligonucleotide
gatgatcaatgcatggagagcataaggaacaacacctatgatcacactcaatacagagcc

SEQ ID NO: 78593 - DNA, 60 bp, Artificial
  Synthetic oligonucleotide
gacacagtgactttcagtttcaatggggcattcatagctccagacagagcaactttcctg

SEQ ID NO: 78594 - DNA, 60 bp, Artificial
  Synthetic oligonucleotide
gcatggagagcataaggaacaacacctatgatcacactcaatacagagccgaatcgctac

SEQ ID NO: 78595 - DNA, 60 bp, Artificial
  Synthetic oligonucleotide
ccgaacgacacagtgactttcagtttcaatggggcattcatagctccagacagagcaact

SEQ ID NO: 78596 - DNA, 60 bp, Artificial
  Synthetic oligonucleotide
atacagagccgaatcgctacagaacagaatacagatagacccagtgaaattgagtggcgg

SEQ ID NO: 78597 - DNA, 60 bp, Artificial
  Synthetic oligonucleotide
cctatgatcacactcaatacagagccgaatcgctacagaacagaatacagatagacccag

SEQ ID NO: 78598 - DNA, 60 bp, Artificial
  Synthetic oligonucleotide
aggaacaacacctatgatcacactcaatacagagccgaatcgctacagaacagaatacag

SEQ ID NO: 78599 - DNA, 60 bp, Artificial
  Synthetic oligonucleotide
agccaatgaacagaccaaactttatgggagtggagctaaactgataacagtaggaagctc

SEQ ID NO: 78600 - DNA, 60 bp, Artificial
  Synthetic oligonucleotide
gagcactcaagctgcaatagaccaaatcacaggcaaactgaaccgtttaattgacaagac

SEQ ID NO: 78601 - DNA, 60 bp, Artificial
  Synthetic oligonucleotide
tacttgatccgaacgacacagtgactttcagtttcaatggggcattcatagctccagaca

SEQ ID NO: 78602 - DNA, 60 bp, Artificial
  Synthetic oligonucleotide
ggtgttttgaaatattccacaaatgtgatgatcaatgcatggagagcataaggaacaaca

SEQ ID NO: 78603 - DNA, 60 bp, Artificial
  Synthetic oligonucleotide
agatcttgcagattcagaaatgaacaaactctatgaacgtgtcaggaaacagttgaggga

SEQ ID NO: 78604 - DNA, 60 bp, Artificial
  Synthetic oligonucleotide
ggcttcagacatcagaatgcacagggagaggggactgcagctgattacaagagcactcaa

SEQ ID NO: 78605 - DNA, 60 bp, Artificial
  Synthetic oligonucleotide
ggtatggtttcagacatcagaatgcacagggagaggggactgcagctgattacaaaagca

SEQ ID NO: 78606 - DNA, 60 bp, Artificial
  Synthetic oligonucleotide
cagacatcagaatgcacagggagaggggactgcagctgattacaaaagcactcaatctgc

SEQ ID NO: 78607 - DNA, 60 bp, Artificial
  Synthetic oligonucleotide
ccgaatcgctacagaacagaatacagatagacccagtgaaattgagtggcgggtacaagg

SEQ ID NO: 78608 - DNA, 60 bp, Artificial
  Synthetic oligonucleotide
agaatgggtgggaaggtctcatcgacggctggtacggcttcagacatcagaatgcacagg

SEQ ID NO: 78609 - DNA, 60 bp, Artificial
  Synthetic oligonucleotide
tatagagaatgggtgggaaggtctcatcgacggctggtatggtttcagacatcagaatgc

SEQ ID NO: 78610 - DNA, 60 bp, Artificial
  Synthetic oligonucleotide
cagaatacagatagacccagtgaaattgagtggcgggtacaaggacataatcttatggtt

SEQ ID NO: 78611 - DNA, 60 bp, Artificial
  Synthetic oligonucleotide
ggtctcatcgacggctggtatggtttcagacatcagaatgcacagggagaggggactgca

SEQ ID NO: 78612 - DNA, 60 bp, Artificial
  Synthetic oligonucleotide
gggcaaaagaggtacaccaaaaccacatactggtgggatggactccaatcctctgatgat

SEQ ID NO: 78613 - DNA, 60 bp, Artificial
  Synthetic oligonucleotide
ccccttctccatacaactcaaggtttgagtctgttgcttggtcggcaagtgcttgtcatg

SEQ ID NO: 78614 - DNA, 60 bp, Artificial
  Synthetic oligonucleotide
gtgaagccccttctccatacaactcaaggtttgagtctgttgcttggtcggcaagtgctt

SEQ ID NO: 78615 - DNA, 60 bp, Artificial
  Synthetic oligonucleotide
ggggattcctaatcctaggcaaggaggacaaaagatatggaccagcattgagcatcaacg

SEQ ID NO: 78616 - DNA, 60 bp, Artificial
  Synthetic oligonucleotide
aacatacataacaagaaaccaacctgaatggtttaggaatgtcttgagcattgcacctat

SEQ ID NO: 78617 - DNA, 60 bp, Artificial
  Synthetic oligonucleotide
cctttgacatgagtaacgagggatcttatttcttcggagacaatgcagaggaatacgaca

SEQ ID NO: 78618 - DNA, 60 bp, Artificial
  Synthetic oligonucleotide
ccgtttgtcagtcacaaagaaattgaatccgtaaacaatgctgtggtaatgccagctcat

SEQ ID NO: 78619 - DNA, 60 bp, Artificial
  Synthetic oligonucleotide
ccgtttgtcagtcataaagaaattgaatccgtaaacaatgctgtggtaatgccagctcat

SEQ ID NO: 78620 - DNA, 60 bp, Artificial
  Synthetic oligonucleotide
ttcctgtatgtgagaaccaatggaacctccaaaatcaagatgaaatggggtatggagatg

SEQ ID NO: 78621 - DNA, 60 bp, Artificial
  Synthetic oligonucleotide
atggatgtcaatccgaccttacttttcttgaaagtgccagcgcaaaatgctataagtact

SEQ ID NO: 78622 - DNA, 60 bp, Artificial
  Synthetic oligonucleotide
ggatgtcaatccgaccttacttttcttgaaagtgccagcgcaaaatgctataagtactac

SEQ ID NO: 78623 - DNA, 60 bp, Artificial
  Synthetic oligonucleotide
caacaggccttggatgaggatcaacaatgagaccatattagaaacagggtatgtatgtag

SEQ ID NO: 78624 - DNA, 60 bp, Artificial
  Synthetic oligonucleotide
ataccactctgtcaacaatagcccttctcattggagtgggaaacttagttttcaacacag

SEQ ID NO: 78625 - DNA, 60 bp, Artificial
  Synthetic oligonucleotide
tcccgggaagttcacaaatgaagaatcactgaggcagatccttcgagggtcaggaggaat

SEQ ID NO: 78626 - DNA, 60 bp, Artificial
  Synthetic oligonucleotide
aataacgttcttgcaggcattgcaactcttacttgaagttgagagtgagataaggacttt

SEQ ID NO: 78627 - DNA, 60 bp, Artificial
  Synthetic oligonucleotide
gataacattcttgcaggcattgcaactcttacttgaagttgagagtgagataaggacttt

SEQ ID NO: 78628 - DNA, 60 bp, Artificial
  Synthetic oligonucleotide
acagataacattcttgcaggcattgcaactcttacttgaagttgagagtgagataaggac

SEQ ID NO: 78629 - DNA, 60 bp, Artificial
  Synthetic oligonucleotide
gtatgaggaattcacaatggttgggcggagagcaacagctatcctaaggaaagcaactag

SEQ ID NO: 78630 - DNA, 60 bp, Artificial
  Synthetic oligonucleotide
ccaaacgttgaaaataaaagtatatgaggggtatgaggaattcacaatggttgggcggag

SEQ ID NO: 78631 - DNA, 60 bp, Artificial
  Synthetic oligonucleotide
aggaattcacaatggttgggcggagagcaaccgccatcctaagaaaagcaaccagaaggc

SEQ ID NO: 78632 - DNA, 60 bp, Artificial
  Synthetic oligonucleotide
ccaaacattgaaaataggagtacatgaggggtatgaggaattcacaatggttgggcggag

SEQ ID NO: 78633 - DNA, 60 bp, Artificial
  Synthetic oligonucleotide
gagtgacatccacatcatggcgtctcaaggcaccaaacgatcttatgaacagatggaaac

SEQ ID NO: 78634 - DNA, 60 bp, Artificial
  Synthetic oligonucleotide
actcaatgagtgacatccacatcatggcgtctcaaggcaccaaacgatcttatgaacaga

SEQ ID NO: 78635 - DNA, 60 bp, Artificial
  Synthetic oligonucleotide
gataatcactcaatgagtgacatccacatcatggcgtctcaaggcaccaaacgatcttat

SEQ ID NO: 78636 - DNA, 60 bp, Artificial
  Synthetic oligonucleotide
gagagacgaacagtcaattgctgaagcaataattgtggccatggtattttcacaagaaga

SEQ ID NO: 78637 - DNA, 60 bp, Artificial
  Synthetic oligonucleotide
gacgaacagtcaattgctgaagcaataattgtggccatggtattttcacaagaagattgc

SEQ ID NO: 78638 - DNA, 60 bp, Artificial
  Synthetic oligonucleotide
gagaccggagcaccccaactcaacccaattgatggaccattgcctgaggacaacgagcca

SEQ ID NO: 78639 - DNA, 60 bp, Artificial
  Synthetic oligonucleotide
agagaccggagcaccccaactcaacccaattgatggaccattgcctgaggacaacgagcc

SEQ ID NO: 78640 - DNA, 60 bp, Artificial
  Synthetic oligonucleotide
cggagcaccccaactcaacccaattgatggaccattgcctgaggacaacgagccaagcgg

SEQ ID NO: 78641 - DNA, 60 bp, Artificial
  Synthetic oligonucleotide
aagaactaatggaacaaccagtacatgtaggagatcaggatcttcattctatgcagagat

SEQ ID NO: 78642 - DNA, 60 bp, Artificial
  Synthetic oligonucleotide
taagaactaatggagtaaccagttcatgtaagagatcaggatcttcattctatgcagaga

SEQ ID NO: 78643 - DNA, 50 bp, Artificial
  Synthetic oligonucleotide
ggttactcagggagcttcattgttgagaacaatggctgttttcagccctg

SEQ ID NO: 78644 - DNA, 60 bp, Artificial
  Synthetic oligonucleotide
aggggctctactggggactaaacacagcaatggaaccatcaaagacagaacaccttatag

SEQ ID NO: 78645 - DNA, 60 bp, Artificial
  Synthetic oligonucleotide
cccaaggggctctactggggactaaacacagcaatggaaccatcaaagacaggacaccat

SEQ ID NO: 78646 - DNA, 60 bp, Artificial
  Synthetic oligonucleotide
ggggctctactggggactaaacacagcaatggaaccatcaaagacagaacaccttataga

SEQ ID NO: 78647 - DNA, 60 bp, Artificial
  Synthetic oligonucleotide
tctcgctcaaggggctctactggggactaaacacagcaatggaaccatcaaagacagaac

SEQ ID NO: 78648 - DNA, 60 bp, Artificial
  Synthetic oligonucleotide
cccaacagaagagcaagctgtggatatatgcaaagcagcaatgggtctaagaatcagttc

SEQ ID NO: 78649 - DNA, 60 bp, Artificial
  Synthetic oligonucleotide
cccaacagaggagcaagctgtggatatatgcaaagcagcaatgggtctaaggatcagttc

SEQ ID NO: 78650 - DNA, 60 bp, Artificial
  Synthetic oligonucleotide
cccaacagaagagcaagctgtggatatatgcaaagcagcaatgggtctaagaatcaattc

SEQ ID NO: 78651 - DNA, 60 bp, Artificial
  Synthetic oligonucleotide
gatcatggagatctgttccaccattgaagagctcagacggcaaaaacagtgaatttagct

SEQ ID NO: 78652 - DNA, 60 bp, Artificial
  Synthetic oligonucleotide
gatcatggggatctgttccaccattgaagagctcagacggcaaaaacagtgaatttagct

SEQ ID NO: 78653 - DNA, 60 bp, Artificial
  Synthetic oligonucleotide
tacttctcattgttcaggcacttagggacaacctggaacctggaaccttcgatcttgggg

SEQ ID NO: 78654 - DNA, 57 bp, Artificial
  Synthetic oligonucleotide
ccgagtccaggagcgagaccacaagtgaatggccaatctggaagaattgactttcac

SEQ ID NO: 78655 - DNA, 60 bp, Artificial
  Synthetic oligonucleotide
ccgagtccaggagcgagaccacaagtgaatggccaatctggaagaattgactttcattgg

SEQ ID NO: 78656 - DNA, 60 bp, Artificial
  Synthetic oligonucleotide
cgagtccaggagcgagaccacaagtgaatggccaatctggaagaattgactttcattggc

SEQ ID NO: 78657 - DNA, 60 bp, Artificial
  Synthetic oligonucleotide
ccaagtccaggagcgagaccacaagtgaatggccaatctggaagaattgactttcattgg

SEQ ID NO: 78658 - DNA, 60 bp, Artificial
  Synthetic oligonucleotide
gccctcgtgcgtactgggatggaccccagaatgtgctctctgatgcaaggatcaaccctc

SEQ ID NO: 78659 - DNA, 60 bp, Artificial
  Synthetic oligonucleotide
gagccctcgtgcgtactgggatggaccccagaatgtgctctctgatgcaaggatcaaccc

SEQ ID NO: 78660 - DNA, 60 bp, Artificial
  Synthetic oligonucleotide
gcatgtgtgcatgacagggaacgataatgatgcaagtgcccagataatatatgcagggag

SEQ ID NO: 78661 - DNA, 60 bp, Artificial
  Synthetic oligonucleotide
ctttgacatgagtaatgaaggatcttatttcttcggagacaatgcagaggagtatgacag

SEQ ID NO: 78662 - DNA, 60 bp, Artificial
  Synthetic oligonucleotide
tgtccgcaaacgatttgcagaccaagaactgggtgatgccccattcctcgaccggcttcg

SEQ ID NO: 78663 - DNA, 60 bp, Artificial
  Synthetic oligonucleotide
tcagctgagtcaaggaagctgcttcttattgttcaggcacttagggacaacctggaacct

SEQ ID NO: 78664 - DNA, 60 bp, Artificial
  Synthetic oligonucleotide
atcaagaaaattgcttctcattgttcaggcacttagggacaacctggaacctggaacttt

SEQ ID NO: 78665 - DNA, 60 bp, Artificial
  Synthetic oligonucleotide
gctgagtcaaggaagctgcttcttattgttcaggcacttagggacaacctggaacctggt

SEQ ID NO: 78666 - DNA, 60 bp, Artificial
  Synthetic oligonucleotide
cttctagccattgcaatgggccttgtcttcatatgtgtgaagaatggaaacatgcagtgc

SEQ ID NO: 78667 - DNA, 55 bp, Artificial
  Synthetic oligonucleotide
ctgaaatcataagaatgatggaaagtgccagaccagaagatgtgtctttccaggg

SEQ ID NO: 78668 - DNA, 60 bp, Artificial
  Synthetic oligonucleotide
caacatttggaggagtgttcctgttatgtggacatcgatgtgtactgtgtatgtagggac

SEQ ID NO: 78669 - DNA, 60 bp, Artificial
  Synthetic oligonucleotide
gatacaacatttggaggagtgttcctgttatgtggacatcgatgtgtactgtgtatgtag

SEQ ID NO: 78670 - DNA, 60 bp, Artificial
  Synthetic oligonucleotide
aaatttctggagaggtgaaaatggtcggagaaccagaattgcctatgaaaggatgtgcaa

SEQ ID NO: 78671 - DNA, 60 bp, Artificial
  Synthetic oligonucleotide
aggaagaggcctatttggtgccatagcgggtttcattgaaaatggatgggaaggtctggt

SEQ ID NO: 78672 - DNA, 57 bp, Artificial
  Synthetic oligonucleotide
ggtaaggaccaatggaacaaccagtgcatgtagaagatcagggtcttcattctatgc

SEQ ID NO: 78673 - DNA, 60 bp, Artificial
  Synthetic oligonucleotide
ttgtcttcatatgtgtgaagaatggaaacatgcggtgcactatttgtatataagtttgga

SEQ ID NO: 78674 - DNA, 60 bp, Artificial
  Synthetic oligonucleotide
gcatcttggttcaactccttcctcacacatgcactgaagtagttgtggcaatgctactgt

SEQ ID NO: 78675 - DNA, 60 bp, Artificial
  Synthetic oligonucleotide
gactaaacacagcaatggaaccatcaaagacaggacgccatatagatcgctaatccggtt

SEQ ID NO: 78676 - DNA, 60 bp, Artificial
  Synthetic oligonucleotide
ggctctagtggggactaaacacagcaatggaaccatcaaagacaggacgccatatagatc

SEQ ID NO: 78677 - DNA, 60 bp, Artificial
  Synthetic oligonucleotide
gggactaaacacagcaatggaaccatcaaagacaggacgccatatagatcgctaatccgg

SEQ ID NO: 78678 - DNA, 60 bp, Artificial
  Synthetic oligonucleotide
tgcacaaacagactgtgtccttgaagcaatggctttccttgaagagtcccacccaggaat

SEQ ID NO: 78679 - DNA, 60 bp, Artificial
  Synthetic oligonucleotide
tgataaagatgcaagtgctcaaataatatatgcagggaaaatgacagactccatcaaatc

SEQ ID NO: 78680 - DNA, 58 bp, Artificial
  Synthetic oligonucleotide
attcaaggtttgagtctgttgcttggtcggcaagtgcttgccacgatggcattagttg

SEQ ID NO: 78681 - DNA, 60 bp, Artificial
  Synthetic oligonucleotide
ccccttccccatacaactcaaggtttgagtctgttgcttggtcggcaagtgcttgtcatg

SEQ ID NO: 78682 - DNA, 60 bp, Artificial
  Synthetic oligonucleotide
tgaagccccttccccatacaactcaaggtttgagtctgttgcttggtcggcaagtgcttg

SEQ ID NO: 78683 - DNA, 60 bp, Artificial
  Synthetic oligonucleotide
cccgtgggtgaagccccttccccatacaactcaaggtttgagtctgttgcttggtcggca

SEQ ID NO: 78684 - DNA, 60 bp, Artificial
  Synthetic oligonucleotide
cgggtttcattgaaaatggatgggaaggtctgattgatgggtggtatggcttcaggcatc

SEQ ID NO: 78685 - DNA, 60 bp, Artificial
  Synthetic oligonucleotide
gacaatgaacctggatcgggaaattggcctgatggttccaacattgggtttatgcccaag

SEQ ID NO: 78686 - DNA, 60 bp, Artificial
  Synthetic oligonucleotide
ttgggcaaaagaggtacaccaaaactacatactggtgggatggactccaatcctctgatg

SEQ ID NO: 78687 - DNA, 60 bp, Artificial
  Synthetic oligonucleotide
cagagggcggcccaaagagaacacaatttggactagtgggagtagcatatccttttgtgg

SEQ ID NO: 78688 - DNA, 60 bp, Artificial
  Synthetic oligonucleotide
gagggcggcccaaagagaacacaatttggactagtgggagtagcatatccttttgtggtg

SEQ ID NO: 78689 - DNA, 60 bp, Artificial
  Synthetic oligonucleotide
ctagtgggagtagcatatccttttgtggtgtaaatagtgacactgtgggttggtcttggc

SEQ ID NO: 78690 - DNA, 60 bp, Artificial
  Synthetic oligonucleotide
gcctatgaaaggatgtgcaacatcctcaaagggaaatttcaaacagctgcacaacgagca

SEQ ID NO: 78691 - DNA, 58 bp, Artificial
  Synthetic oligonucleotide
tgcctatgaaaggatgtgcaacatcctcaaagggaaatttcaaacagctgcacaacga

SEQ ID NO: 78692 - DNA, 60 bp, Artificial
  Synthetic oligonucleotide
agaaccagaattgcctatgaaaggatgtgcaacatcctcaaagggaaatttcaaacagct

SEQ ID NO: 78693 - DNA, 60 bp, Artificial
  Synthetic oligonucleotide
caagaaaccaacctgaatggtttaggaatgtcttgagcattgcacctataatgttctcga

SEQ ID NO: 78694 - DNA, 60 bp, Artificial
  Synthetic oligonucleotide
caagaaaccaacctgaatggtttaggaatgtcttgagcattgcacctataatgttctcaa

SEQ ID NO: 78695 - DNA, 60 bp, Artificial
  Synthetic oligonucleotide
acctccaaacattgaaaataagagtacatgaaggatctgaggaattcacaatggttgggc

SEQ ID NO: 78696 - DNA, 60 bp, Artificial
  Synthetic oligonucleotide
acaaggggcattgctaggaactaaacatagcaatggaaccattaaagacagaacaccata

SEQ ID NO: 78697 - DNA, 60 bp, Artificial
  Synthetic oligonucleotide
ggggcattgctaggaactaaacatagcaatggaaccattaaagacagaacaccatatagg

SEQ ID NO: 78698 - DNA, 60 bp, Artificial
  Synthetic oligonucleotide
agaagtacacatcaggaagacaagagaagaaccccgctctcagaatgaagtggatgatgg

SEQ ID NO: 78699 - DNA, 60 bp, Artificial
  Synthetic oligonucleotide
ggagcaccccaactcaacccaattgatggaccattacccgaggacaacgagccaagcgga

SEQ ID NO: 78700 - DNA, 60 bp, Artificial
  Synthetic oligonucleotide
taggtagaacagtgtcaactagtggtagatcgggctttgaaattatcaaagttacagaag

SEQ ID NO: 78701 - DNA, 60 bp, Artificial
  Synthetic oligonucleotide
gcccaaggggcattactgggaaccaaacacagcaatggaaccattaaagacagaacaccc

SEQ ID NO: 78702 - DNA, 60 bp, Artificial
  Synthetic oligonucleotide
aagagccctcgtgcgtactgggatggaccccagaatgtgctctctgatgcaaggatcaac

SEQ ID NO: 78703 - DNA, 52 bp, Artificial
  Synthetic oligonucleotide
caagagctcttgtgcgtactgggatggaccccagaatgtgctctctgatgca

SEQ ID NO: 78704 - DNA, 60 bp, Artificial
  Synthetic oligonucleotide
ctggccattgcaatgggccttgtcttcatatgtgtgaagaatggaaacatgcggtgcact

SEQ ID NO: 78705 - DNA, 60 bp, Artificial
  Synthetic oligonucleotide
agaccagaaggcattaaagggaagaggcagcacacttggactcgatctaagagtggccac

SEQ ID NO: 78706 - DNA, 60 bp, Artificial
  Synthetic oligonucleotide
cacagaggatggtgccattgtagctgaaatatctcccattccttccatgccaggacattc

SEQ ID NO: 78707 - DNA, 60 bp, Artificial
  Synthetic oligonucleotide
cattcacagaggatggtgccattgtagctgaaatatctcccattccttccatgccaggac

SEQ ID NO: 78708 - DNA, 60 bp, Artificial
  Synthetic oligonucleotide
gggttggactgcatgaggccttgtttctgggttgaactgatcaggggacggcccaaccac

SEQ ID NO: 78709 - DNA, 60 bp, Artificial
  Synthetic oligonucleotide
gggttggactgcatgaggccttgtttctgggttgaactgatcaggggacggcccaaggag

SEQ ID NO: 78710 - DNA, 60 bp, Artificial
  Synthetic oligonucleotide
ctgaattaacagggttggactgcatgaggccttgtttctgggttgaactgatcaggggac

SEQ ID NO: 78711 - DNA, 60 bp, Artificial
  Synthetic oligonucleotide
gcatccagaactgacggggttggactgcatgaggccttgtttctgggttgagctgatcag

SEQ ID NO: 78712 - DNA, 60 bp, Artificial
  Synthetic oligonucleotide
ctgacagttggaatttccggcccagacaatggggctgtggctgtattgaaatacaatggc

SEQ ID NO: 78713 - DNA, 60 bp, Artificial
  Synthetic oligonucleotide
agaaagctactcagtatgagagacatgtgtgatgctccctttgatgacaggctccgaaga

SEQ ID NO: 78714 - DNA, 60 bp, Artificial
  Synthetic oligonucleotide
agaaagatactcagtatgagagacatgtgtgatgctccctttgatgacaggctccgaaga

SEQ ID NO: 78715 - DNA, 60 bp, Artificial
  Synthetic oligonucleotide
tagtgaatgctccgaatcatgagggaatacaagcaggagtagacagattctatagaacct

SEQ ID NO: 78716 - DNA, 60 bp, Artificial
  Synthetic oligonucleotide
atatgcacaaacagattgtgtgttggaagcaatggctttccttgaagagtcccacccagg

SEQ ID NO: 78717 - DNA, 60 bp, Artificial
  Synthetic oligonucleotide
ttggggggctatatgaagcaattgaggagtgcctgattaatgatccctgggttttgctta

SEQ ID NO: 78718 - DNA, 58 bp, Artificial
  Synthetic oligonucleotide
ggggctatatgaagcaattgaggagtgcctgattaatgatccctgggttttgcttaat

SEQ ID NO: 78719 - DNA, 60 bp, Artificial
  Synthetic oligonucleotide
aatattgttaggagagcaacagtatcagcagacccgttggcctcgctcttggagatgtgc

SEQ ID NO: 78720 - DNA, 60 bp, Artificial
  Synthetic oligonucleotide
atctgttccaccattgaagagctcagacggcaaaaatattgaatttagcttgtccttcat

SEQ ID NO: 78721 - DNA, 58 bp, Artificial
  Synthetic oligonucleotide
atctgttccaccattgaagagctcagacggcaaaaatagtgaatttagcttgtccttc

SEQ ID NO: 78722 - DNA, 60 bp, Artificial
  Synthetic oligonucleotide
atctgttccaccattgaagagctcagacggcaaaaacggtgaatttagcttgtccttcat

SEQ ID NO: 78723 - DNA, 60 bp, Artificial
  Synthetic oligonucleotide
caagaaagttacttctcattgttcaggcacttagggacaacctggaacctggaaccttcg

SEQ ID NO: 78724 - DNA, 60 bp, Artificial
  Synthetic oligonucleotide
ggtcgggctttgaaatcatcaaagtcacagaggggtggatcaactctcccaatcatgcca

SEQ ID NO: 78725 - DNA, 60 bp, Artificial
  Synthetic oligonucleotide
agataataacaatcggggtagtgaataccactctgtcaacaatagcccttctcattggag

SEQ ID NO: 78726 - DNA, 60 bp, Artificial
  Synthetic oligonucleotide
gatttcgccctcatagtgaatgcaccaaatcatgagggaatacaagcaggagtggatagg

SEQ ID NO: 78727 - DNA, 60 bp, Artificial
  Synthetic oligonucleotide
gacttcgccctcatagtgaatgcaccaaatcatgagggaatacaagcaggagtggatagg

SEQ ID NO: 78728 - DNA, 60 bp, Artificial
  Synthetic oligonucleotide
gtcaatgtattgacgggacctgtgttgtcgctgttacagatggacctgcagctaatagtg

SEQ ID NO: 78729 - DNA, 60 bp, Artificial
  Synthetic oligonucleotide
gacttctggggacaatcactgggccaccccaatgtgaccaattcctagaattttcagccg

SEQ ID NO: 78730 - DNA, 60 bp, Artificial
  Synthetic oligonucleotide
ttggttcaactccttcctcacacatgcactgagatagttgtggcaatgctactatttgct

SEQ ID NO: 78731 - DNA, 60 bp, Artificial
  Synthetic oligonucleotide
gcatcttggttcaactccttcctcacacatgcactgagatagttgtggcaatgctactat

SEQ ID NO: 78732 - DNA, 58 bp, Artificial
  Synthetic oligonucleotide
ttcatcatcaatgatgtgggagatcaatggtcctgaatcggtgttggtcaatacttat

SEQ ID NO: 78733 - DNA, 60 bp, Artificial
  Synthetic oligonucleotide
gattgcatgagaccttgcttttgggttgaactaatcagagggcggcccaaagagaacaca

SEQ ID NO: 78734 - DNA, 56 bp, Artificial
  Synthetic oligonucleotide
acagaacagagtcactgcagaatagaatacagatagacccagtgaaattgagtagt

SEQ ID NO: 78735 - DNA, 57 bp, Artificial
  Synthetic oligonucleotide
tacagaacagagtcactacagaatagaatacagatagacccagtgaaattgagtagt

SEQ ID NO: 78736 - DNA, 60 bp, Artificial
  Synthetic oligonucleotide
ccaatacagaacagagtcattgcagaatagaatacagatagacccagtgaaattgagtag

SEQ ID NO: 78737 - DNA, 60 bp, Artificial
  Synthetic oligonucleotide
ccaatacaggacagagtcattgcagaatagaatacagatagacccagtgaaattgagtag

SEQ ID NO: 78738 - DNA, 60 bp, Artificial
  Synthetic oligonucleotide
tattgtagcaataactgattggtcaggatatagcggaagttttgttcagcatccagaact

SEQ ID NO: 78739 - DNA, 60 bp, Artificial
  Synthetic oligonucleotide
aagctgacaataacttattcatcatcaatgatgtgggagatcaatggtcctgaatcggtg

SEQ ID NO: 78740 - DNA, 60 bp, Artificial
  Synthetic oligonucleotide
gacaatgaacctggatcgggaaattggccagatggttccaacattgggtttatgcccaag

SEQ ID NO: 78741 - DNA, 60 bp, Artificial
  Synthetic oligonucleotide
caaatgcatttatcgtcgccttaaatacggtttgaaaagagggccttctacggaaggagt

SEQ ID NO: 78742 - DNA, 60 bp, Artificial
  Synthetic oligonucleotide
caaatgtatttatcgtcgccttaaatacggtttgaaaagagggccttctacggaaggagt

SEQ ID NO: 78743 - DNA, 60 bp, Artificial
  Synthetic oligonucleotide
caaatgtacttatcgtcgccttaaatacggtttgaaaagagggccttctacggaaggagt

SEQ ID NO: 78744 - DNA, 60 bp, Artificial
  Synthetic oligonucleotide
aatgtatttatcgtcgccttaaatacggtttgaaaagagggccttctacggaaggagtgc

SEQ ID NO: 78745 - DNA, 60 bp, Artificial
  Synthetic oligonucleotide
ggagatgtgccatagtacacaaattggcgggataagaatggtggacatccttagacaaaa

SEQ ID NO: 78746 - DNA, 60 bp, Artificial
  Synthetic oligonucleotide
aagaactaatggagcaaccagtgcatgtaggagatcaggatcttcattctatgcagagat

SEQ ID NO: 78747 - DNA, 60 bp, Artificial
  Synthetic oligonucleotide
aagcagcggctacaaagatgtgatactttggtttagcttcggggcatcatgtttcatact

SEQ ID NO: 78748 - DNA, 59 bp, Artificial
  Synthetic oligonucleotide
cagctcatggcccagccaagagcatggaatatgatgctgttgctaccacgcactcctgg

SEQ ID NO: 78749 - DNA, 60 bp, Artificial
  Synthetic oligonucleotide
aagagacgagcagtcaattgctgaagcaataattgtggccatggtattctcacaagagga

SEQ ID NO: 78750 - DNA, 60 bp, Artificial
  Synthetic oligonucleotide
gagagacgagcagtcaattgctgaagcaataattgtggccatggtattctcacaagaaga

SEQ ID NO: 78751 - DNA, 60 bp, Artificial
  Synthetic oligonucleotide
gacgagcagtcaattgctgaagcaataattgtggccatggtattctcacaagaggactgc

SEQ ID NO: 78752 - DNA, 60 bp, Artificial
  Synthetic oligonucleotide
gacgagcagtcaattgctgaagcaataattgtggccatggtattctcacaagaagattgc

SEQ ID NO: 78753 - DNA, 60 bp, Artificial
  Synthetic oligonucleotide
gtgaatgcaccgaatcatgagggaatacaagcaggagtggataggttctataggacctgc

SEQ ID NO: 78754 - DNA, 60 bp, Artificial
  Synthetic oligonucleotide
cttcctttgacatgagtaatgaaggatcttatttcttcggagacaatgctgaggagtttg

SEQ ID NO: 78755 - DNA, 60 bp, Artificial
  Synthetic oligonucleotide
cctttgacatgagtaatgaaggatcttatttcttcggagacaatgctgaggagtttgaca

SEQ ID NO: 78756 - DNA, 60 bp, Artificial
  Synthetic oligonucleotide
gcttggagaagcagtaatgaggatgggggacctccactccctccaaagcagaaacggaaa

SEQ ID NO: 78757 - DNA, 60 bp, Artificial
  Synthetic oligonucleotide
ctcactgccactgtgccccttccgaggtttcttcccctttcacaaggacaatgcaatacg

SEQ ID NO: 78758 - DNA, 60 bp, Artificial
  Synthetic oligonucleotide
actgaggggattcctaatcctaggcaaggaggacaaaagatatggaccagcattgagcat

SEQ ID NO: 78759 - DNA, 59 bp, Artificial
  Synthetic oligonucleotide
ccccaaccatgccaaatcaattacacaaacactggtgtccaacaatgattggtcaggct

SEQ ID NO: 78760 - DNA, 60 bp, Artificial
  Synthetic oligonucleotide
ctcccaatcatgccaaatcaattacacaaacactggtgtccaacaatgattggtcaggct

SEQ ID NO: 78761 - DNA, 60 bp, Artificial
  Synthetic oligonucleotide
tctcccaatcatgccaaatcaattacacaaacactggtgtccaacaatgattggtcaggc

SEQ ID NO: 78762 - DNA, 60 bp, Artificial
  Synthetic oligonucleotide
ggatcaactctcccaaccatgccaaatcaattacacaaacactggtgtccaacaatgatt

SEQ ID NO: 78763 - DNA, 60 bp, Artificial
  Synthetic oligonucleotide
cccaatcatgccaaatcaattacacaaacactggtgtccaacaatgattggtcaggctat

SEQ ID NO: 78764 - DNA, 60 bp, Artificial
  Synthetic oligonucleotide
gccaaatcaattacacaaacactggtgtccaacaatgattggtcaggctattcaggcagt

SEQ ID NO: 78765 - DNA, 60 bp, Artificial
  Synthetic oligonucleotide
aaccctgctctcagaatgaaatggatgatggcaatgaaatacccaatcacagcagacaag

SEQ ID NO: 78766 - DNA, 60 bp, Artificial
  Synthetic oligonucleotide
aaaacccagcactcagaatgaaatggatgatggcaatgaagtaccctataacagctgaca

SEQ ID NO: 78767 - DNA, 60 bp, Artificial
  Synthetic oligonucleotide
ccctgctctcagaatgaaatggatgatggcaatgaaatacccaatcacagcagacaagag

SEQ ID NO: 78768 - DNA, 60 bp, Artificial
  Synthetic oligonucleotide
cccagcactcagaatgaaatggatgatggcaatgaagtaccctataacagctgacaagag

SEQ ID NO: 78769 - DNA, 60 bp, Artificial
  Synthetic oligonucleotide
cctgccctcagaatgaaatggatgatggcaatgaaatacccaatcacagcagacaagagg

SEQ ID NO: 78770 - DNA, 60 bp, Artificial
  Synthetic oligonucleotide
gaaccctgccctcagaatgaaatggatgatggcaatgaaatacccaatcacagcagacaa

SEQ ID NO: 78771 - DNA, 60 bp, Artificial
  Synthetic oligonucleotide
catcaggaaggcaggagaaaaacccagcactcagaatgaaatggatgatggcaatgaagt

SEQ ID NO: 78772 - DNA, 60 bp, Artificial
  Synthetic oligonucleotide
aacaatgctgtggtaatgccagctcatggtccagccaaaagcatggaatatgatgctgtt

SEQ ID NO: 78773 - DNA, 60 bp, Artificial
  Synthetic oligonucleotide
caggaaccatacgcaggcttgccgaccaaagtctcccaccgaacttctccagccttgaaa

SEQ ID NO: 78774 - DNA, 60 bp, Artificial
  Synthetic oligonucleotide
atgaatccaaatcagaagataataacaatcggggtagtgaacactactctatcaacaata

SEQ ID NO: 78775 - DNA, 60 bp, Artificial
  Synthetic oligonucleotide
tgctcccttgatggtggcatacatgttggagagagaactggttcgcaaaaccagattcct

SEQ ID NO: 78776 - DNA, 60 bp, Artificial
  Synthetic oligonucleotide
ctttgatggtggcatacatgttggagagagaactggttcgcaaaaccagattcctacctg

SEQ ID NO: 78777 - DNA, 60 bp, Artificial
  Synthetic oligonucleotide
gaaatgatgtgtgctatcctggaaaattcacaaatgaagaatcactgaggcagatccttc

SEQ ID NO: 78778 - DNA, 60 bp, Artificial
  Synthetic oligonucleotide
gaaacgatgtgtgctatcctggaaaattcacaaatgaagaatcactgaggcagatccttc

SEQ ID NO: 78779 - DNA, 57 bp, Artificial
  Synthetic oligonucleotide
acaactgtccaccagaggagttcagattgcttcaaatgagaacatggaaacaatgga

SEQ ID NO: 78780 - DNA, 60 bp, Artificial
  Synthetic oligonucleotide
aggctaatgtgctaattgggcaaggagacgtagtgttggtaatgaaacggaaacgggact

SEQ ID NO: 78781 - DNA, 60 bp, Artificial
  Synthetic oligonucleotide
gggacaattggaaaggttccaacaggccttggatgagaatcaacaatgagaccatactag

SEQ ID NO: 78782 - DNA, 60 bp, Artificial
  Synthetic oligonucleotide
gtatggctagtataaggaacaatacttatgatcacagcaaatacagagaagaagcgatgc

SEQ ID NO: 78783 - DNA, 60 bp, Artificial
  Synthetic oligonucleotide
gtatggctagtataaggaacaatatttatgatcacagcaaatacagagaagaagcgatgc

SEQ ID NO: 78784 - DNA, 60 bp, Artificial
  Synthetic oligonucleotide
aaggacaatgcaatacgattgggtgagaacaaagacgtaatagtcacaagggagccttat

SEQ ID NO: 78785 - DNA, 60 bp, Artificial
  Synthetic oligonucleotide
catgcgcaggctcgccgaccaaagtctcccaccgaacttctccagccttgaaaactttag

SEQ ID NO: 78786 - DNA, 60 bp, Artificial
  Synthetic oligonucleotide
gatacaccaaaacaacatactggtgggatggactccaatcctctgatgattttgctctca

SEQ ID NO: 78787 - DNA, 60 bp, Artificial
  Synthetic oligonucleotide
gagatacaccaaaacaacatactggtgggatggactccaatcctctgatgattttgctct

SEQ ID NO: 78788 - DNA, 60 bp, Artificial
  Synthetic oligonucleotide
aaatcaacctgaatggtttaggaatgtcttgagcattgcacctataatgttctcgaataa

SEQ ID NO: 78789 - DNA, 60 bp, Artificial
  Synthetic oligonucleotide
cgaccgtgggtgtctttcaatcagaatctggagtatcaaataggatacatatgcagcggg

SEQ ID NO: 78790 - DNA, 57 bp, Artificial
  Synthetic oligonucleotide
tgagtagtggctacaaagatgtgatactttggtttagcttcggggcatcatgctttt

SEQ ID NO: 78791 - DNA, 60 bp, Artificial
  Synthetic oligonucleotide
aaactctacagagattcgcttggagaagcagtaatgaggatgggagacctccactccctc

SEQ ID NO: 78792 - DNA, 60 bp, Artificial
  Synthetic oligonucleotide
ggattccaacacgataacctcgtttcaggtagattgttatctatggcaaataagaaagct

SEQ ID NO: 78793 - DNA, 60 bp, Artificial
  Synthetic oligonucleotide
acaagtgggtcatctgtcaaaagagaagaagaagtgcttacaggcaacctccaaacattg

SEQ ID NO: 78794 - DNA, 60 bp, Artificial
  Synthetic oligonucleotide
caagtgggtcatctgtcaaaagagaagaagaagtgcttacaggcaacctccaaacattga

SEQ ID NO: 78795 - DNA, 60 bp, Artificial
  Synthetic oligonucleotide
cggcagaatccaacagaggaacaagctgtggacatatgcaaagcagcaatgggcttaagg

SEQ ID NO: 78796 - DNA, 60 bp, Artificial
  Synthetic oligonucleotide
cgtttatgcaagccttacaactattgcttgaagtggagcaagagataagaactttctcgt

SEQ ID NO: 78797 - DNA, 60 bp, Artificial
  Synthetic oligonucleotide
caagtcctcactgccactgtgccccttccgaggtttcttcccctttcacaaggacaatgc

SEQ ID NO: 78798 - DNA, 60 bp, Artificial
  Synthetic oligonucleotide
tgactgggaacgacaatgatgcaagtggccaaataatgtatgcagggaaaatgacagact

SEQ ID NO: 78799 - DNA, 60 bp, Artificial
  Synthetic oligonucleotide
aatgatgtatggttgggaaggactgtatcaactagtggaagatcgggctttgaaatcatc

SEQ ID NO: 78800 - DNA, 60 bp, Artificial
  Synthetic oligonucleotide
tgaaatcatcaaagtcacagaggggtggattaactcccccaatcatgccaaatcagttac

SEQ ID NO: 78801 - DNA, 60 bp, Artificial
  Synthetic oligonucleotide
tggaaccatcaaagacaggacgccatatagatcgctaatccggttcccaatagggactgc

SEQ ID NO: 78802 - DNA, 60 bp, Artificial
  Synthetic oligonucleotide
tgcatggccagtattagaaacaacacttatgatcacagcaaatacagagaagaagcaatg

SEQ ID NO: 78803 - DNA, 60 bp, Artificial
  Synthetic oligonucleotide
gctatgtggacatcgatgtttactgcatatgtagggacaattggaaaggttccaacagac

SEQ ID NO: 78804 - DNA, 60 bp, Artificial
  Synthetic oligonucleotide
gtggacatcgatgtttactgcatatgtagggacaattggaaaggttccaacagaccttgg

SEQ ID NO: 78805 - DNA, 60 bp, Artificial
  Synthetic oligonucleotide
gatgtttactgcatatgtagggacaattggaaaggttccaacagaccttggatgagaatc

SEQ ID NO: 78806 - DNA, 60 bp, Artificial
  Synthetic oligonucleotide
caggattgcaaaattgctcccttgatggttgcatacatgctagaaagagagttggtccgc

SEQ ID NO: 78807 - DNA, 56 bp, Artificial
  Synthetic oligonucleotide
ccccttgatggttgcatacatgctagaaagagagttggtccgcaaaacgaggttcc

SEQ ID NO: 78808 - DNA, 60 bp, Artificial
  Synthetic oligonucleotide
caggaggaattgataaggagtcaatgggtttcacctatagtggaataagaaccaatgggg

SEQ ID NO: 78809 - DNA, 60 bp, Artificial
  Synthetic oligonucleotide
aacagtaggaagctcgaaataccagcaatcattcaccccaagtccgggagcacggccaca

SEQ ID NO: 78810 - DNA, 60 bp, Artificial
  Synthetic oligonucleotide
gtcttcatatgtgtgaagaatggaaacatgcggtgcactatttgtatataagtttggaaa

SEQ ID NO: 78811 - DNA, 60 bp, Artificial
  Synthetic oligonucleotide
aagaactaatggagtaaccagtgcatgtaagagatcaggatcttcattctatgcagagat

SEQ ID NO: 78812 - DNA, 60 bp, Artificial
  Synthetic oligonucleotide
tgtatggagagcataaggaacaacacttatgaccatacccaatacagagcagagtcattg

SEQ ID NO: 78813 - DNA, 60 bp, Artificial
  Synthetic oligonucleotide
tacttctggccattgcaatgggccttgtcttcatgtgtgtgaagaatggaaacatgcggt

SEQ ID NO: 78814 - DNA, 60 bp, Artificial
  Synthetic oligonucleotide
ggctaaacaatgaacctggatcgggtaattggccggatggttccaacattgggttcatgc

SEQ ID NO: 78815 - DNA, 60 bp, Artificial
  Synthetic oligonucleotide
gctcaaggagcgctattagggaccaaacatagcaatggaaccatcaaagacagaacgccg

SEQ ID NO: 78816 - DNA, 60 bp, Artificial
  Synthetic oligonucleotide
atgcagcggggttttcggagacaatccacgccccaatgatggaacaggcagttgtggtcc

SEQ ID NO: 78817 - DNA, 60 bp, Artificial
  Synthetic oligonucleotide
atgatcagtgtatggagagcataaggaacaacacttatgaccatacccaatacagaacag

SEQ ID NO: 78818 - DNA, 60 bp, Artificial
  Synthetic oligonucleotide
agcaaaagcagggtagataatcactcactgagtgacatccacaacatggcgtctcaaggc

SEQ ID NO: 78819 - DNA, 60 bp, Artificial
  Synthetic oligonucleotide
caactccttcctcacacatgcactgaaatagttgtggcaatgctactatttgctatccat

SEQ ID NO: 78820 - DNA, 60 bp, Artificial
  Synthetic oligonucleotide
gcacaaacagactgtgtcctggaagcaatggctttccttgaagagtcccacccagggatc

SEQ ID NO: 78821 - DNA, 60 bp, Artificial
  Synthetic oligonucleotide
tacctggttcacgctacctaactgacatgactcttgaagagatgtcaagagactggttca

SEQ ID NO: 78822 - DNA, 60 bp, Artificial
  Synthetic oligonucleotide
ccttttgtggtgtaaatagtgacactgtgggttggtcttggccagacggtgctgagttgc

SEQ ID NO: 78823 - DNA, 60 bp, Artificial
  Synthetic oligonucleotide
atgatggaacaggcagttgtggtccagtgtcttctaacggagcatatggagtaaaagggt

SEQ ID NO: 78824 - DNA, 60 bp, Artificial
  Synthetic oligonucleotide
ggaacaggcagttgtggtccagtgtcttctaacggagcatatggagtaaaagggttttca

SEQ ID NO: 78825 - DNA, 60 bp, Artificial
  Synthetic oligonucleotide
gggacaggcagttgtggtccagtgtcttctaatggggcatatggggtaaaagggttttcg

SEQ ID NO: 78826 - DNA, 60 bp, Artificial
  Synthetic oligonucleotide
agacaaaagatatggaccagcattgagcatcaacgaattgagcaatcttgcgaaagggga

SEQ ID NO: 78827 - DNA, 60 bp, Artificial
  Synthetic oligonucleotide
aagcctccactgccgctgtgccccttcagaggattcttcccttttcacaaggacaatgca

SEQ ID NO: 78828 - DNA, 60 bp, Artificial
  Synthetic oligonucleotide
gccgctgtgccccttcagaggattcttcccttttcacaaggacaatgcaatacgactggg

SEQ ID NO: 78829 - DNA, 60 bp, Artificial
  Synthetic oligonucleotide
ctggatcggctaacgagcagaccaaactctatggaagtggaaacaagttgataacagtag

SEQ ID NO: 78830 - DNA, 60 bp, Artificial
  Synthetic oligonucleotide
ctggatcgactaccgagcagaccaaactctatggaagtggaaacaagttgataacagtag

SEQ ID NO: 78831 - DNA, 60 bp, Artificial
  Synthetic oligonucleotide
ccccgggaagttcacaaatgaagaatcactgaggcagatccttcgaggatcaggaggaat

SEQ ID NO: 78832 - DNA, 60 bp, Artificial
  Synthetic oligonucleotide
tgtgtgctatcccggaaaattcacaaatgaagaatcactgaggcagatccttcgagggtc

SEQ ID NO: 78833 - DNA, 60 bp, Artificial
  Synthetic oligonucleotide
atgaatccaaatcagaagataataacaattggggtagtgaatactactctatcaacaata

SEQ ID NO: 78834 - DNA, 60 bp, Artificial
  Synthetic oligonucleotide
tgctttttgcttcttgccattgcaatgggccttgttttcatatgtgtgaagaacggaaac

SEQ ID NO: 78835 - DNA, 60 bp, Artificial
  Synthetic oligonucleotide
gggcctatttggtgccatagcgggtttcattgaaaatggatgggaaggtctgattgacgg

SEQ ID NO: 78836 - DNA, 60 bp, Artificial
  Synthetic oligonucleotide
ggggcctatttggtgccatagcgggtttcattgaaaatggatgggaaggtctgattgacg

SEQ ID NO: 78837 - DNA, 60 bp, Artificial
  Synthetic oligonucleotide
gggactatttggtgccatagcgggtttcattgaaaatggatgggaaggtctgattgacgg

SEQ ID NO: 78838 - DNA, 54 bp, Artificial
  Synthetic oligonucleotide
cgcaaaatgctataagtactacattcccttatactggagatcctccatacagcc

SEQ ID NO: 78839 - DNA, 60 bp, Artificial
  Synthetic oligonucleotide
gtttcaatggggctttcatagctccaaatcgtgctagcttcttgagaggaaaatctatag

SEQ ID NO: 78840 - DNA, 60 bp, Artificial
  Synthetic oligonucleotide
tggtcgacgggtggtacggtttcaggcatcagaatgcacaaggagaaggaactgcagcag

SEQ ID NO: 78841 - DNA, 60 bp, Artificial
  Synthetic oligonucleotide
gatgggtggtacggtttcaggcatcagaatgcacaaggagaaggaactgcagcggactac

SEQ ID NO: 78842 - DNA, 60 bp, Artificial
  Synthetic oligonucleotide
aggtctagttgatgggtggtacggtttcaggcatcagaatgcacaaggagaaggaactgc

SEQ ID NO: 78843 - DNA, 60 bp, Artificial
  Synthetic oligonucleotide
aggtctggtcgacgggtggtacggtttcaggcatcagaatgcacaaggagaaggaactgc

SEQ ID NO: 78844 - DNA, 60 bp, Artificial
  Synthetic oligonucleotide
cggaaggagtgcctgagtctatgagggaagaatatcgacaggaacagcagagtgctgtgg

SEQ ID NO: 78845 - DNA, 60 bp, Artificial
  Synthetic oligonucleotide
ggcaggacagtgtcaactagtggtagatcgggctttgaaatcatcaaagttacagagggg

SEQ ID NO: 78846 - DNA, 60 bp, Artificial
  Synthetic oligonucleotide
ggttccaacagaccttggatgaggatcaacaatgagaccatattagaaacagggtatgtg

SEQ ID NO: 78847 - DNA, 60 bp, Artificial
  Synthetic oligonucleotide
gagcggaggaaacaccaaccaacagagagcatctgcgggacaaatcagtgtgcaacccac

SEQ ID NO: 78848 - DNA, 60 bp, Artificial
  Synthetic oligonucleotide
gcatgtatgcatgacagggaacgataatgatgcaagtgctcaaataatatacgcagggag

SEQ ID NO: 78849 - DNA, 60 bp, Artificial
  Synthetic oligonucleotide
gctaacgagcagaccaaactctatggaagtggaaacaaattgataacagtaggaagctcg

SEQ ID NO: 78850 - DNA, 60 bp, Artificial
  Synthetic oligonucleotide
gtggacatcgatgtgtactgtatatgcagggacaattggaaaggttccaacaggccttgg

SEQ ID NO: 78851 - DNA, 60 bp, Artificial
  Synthetic oligonucleotide
tggcatggctcgaatcgaccgtgggtgtctttcaatcagaatctggagtatcaaatagga

SEQ ID NO: 78852 - DNA, 60 bp, Artificial
  Synthetic oligonucleotide
ggggctacttaataagagcactgacactgaacacaatgacaaaagatgcagaaagaggca

SEQ ID NO: 78853 - DNA, 60 bp, Artificial
  Synthetic oligonucleotide
ggagagacgaacagtcaattgctgaagcaataattgtggccatggtattttcacaagagg

SEQ ID NO: 78854 - DNA, 60 bp, Artificial
  Synthetic oligonucleotide
gagagatgaacagtcaattgctgaagcaataattgtggccatggtattttcacaagagga

SEQ ID NO: 78855 - DNA, 60 bp, Artificial
  Synthetic oligonucleotide
gaaagaagagttcgctgagatcatgaagatctgttccaccattgaagagctcagacggca

SEQ ID NO: 78856 - DNA, 60 bp, Artificial
  Synthetic oligonucleotide
aatgcaccgaatcatgagggaatacaagcaggagtggataggttctataggacctgcaaa

SEQ ID NO: 78857 - DNA, 58 bp, Artificial
  Synthetic oligonucleotide
acacatgcactgaaatagttgtggcaatgctactatttgctatccatactgtccaaaa

SEQ ID NO: 78858 - DNA, 60 bp, Artificial
  Synthetic oligonucleotide
aaccatttgaatggatgtcaatccgactttacttttcttaaaagtgccagtgcaaaatgc

SEQ ID NO: 78859 - DNA, 60 bp, Artificial
  Synthetic oligonucleotide
cgtaaacaatgctgtggtaatgccagctcatggtccagccaagagcatggaatatgatgc

SEQ ID NO: 78860 - DNA, 60 bp, Artificial
  Synthetic oligonucleotide
gccctcgatatgtcaaacagacaagcctccttttggctacaggaatgagaaatgtcccag

SEQ ID NO: 78861 - DNA, 60 bp, Artificial
  Synthetic oligonucleotide
cttgccattgcaatgggccttgttttcatatgtgtgaagaacggaaacatgcggtgcact

SEQ ID NO: 78862 - DNA, 60 bp, Artificial
  Synthetic oligonucleotide
gcatgtatgtatgacagggaacgataatgatgcaagtgctcaaataatatatgcagggag

SEQ ID NO: 78863 - DNA, 60 bp, Artificial
  Synthetic oligonucleotide
cggctgcattgagggcaagctttctcaaatgtcccaagaagtgaatgccagaattgaacc

SEQ ID NO: 78864 - DNA, 60 bp, Artificial
  Synthetic oligonucleotide
ggctgcattgagggcaagctttctcaaatgtccaaagaagtaaatgctagaattgaaccc

SEQ ID NO: 78865 - DNA, 60 bp, Artificial
  Synthetic oligonucleotide
cagttcatccttcagctttggaggcttcactttcaaaaggacaagtgggtcatctgtcaa

SEQ ID NO: 78866 - DNA, 60 bp, Artificial
  Synthetic oligonucleotide
atgggtctaagaatcagttcatccttcagctttggaggcttcactttcaaaaggacaagt

SEQ ID NO: 78867 - DNA, 60 bp, Artificial
  Synthetic oligonucleotide
ctgggaacgacaatgatgcaagtggccaaataatatatgcagggaaaatgacagactcca

SEQ ID NO: 78868 - DNA, 60 bp, Artificial
  Synthetic oligonucleotide
cagccaagagcatggaatatgatgctgttgcgactacacactcatggatccctaagagga

SEQ ID NO: 78869 - DNA, 60 bp, Artificial
  Synthetic oligonucleotide
cagcccatggcccagccaagagcatggaatatgatgctgttgcgactacacactcatggg

SEQ ID NO: 78870 - DNA, 60 bp, Artificial
  Synthetic oligonucleotide
cccaacagaagagcaagctgtggatatatgcaaagcagcaatgggactaagaatcagttc

SEQ ID NO: 78871 - DNA, 60 bp, Artificial
  Synthetic oligonucleotide
gggtccttatcggaggacttgaatggaatgataacacagttcgagtctctgaaactctac

SEQ ID NO: 78872 - DNA, 60 bp, Artificial
  Synthetic oligonucleotide
gaatgtgcaacatcctcaaaggaaaattccaaacagcagcacaacgagcaatgatggatc

SEQ ID NO: 78873 - DNA, 60 bp, Artificial
  Synthetic oligonucleotide
ggagaatgacagactccattaaatcatggagaaaggacatattgagaactcaggagtccg

SEQ ID NO: 78874 - DNA, 60 bp, Artificial
  Synthetic oligonucleotide
gtagtgtctatattgaggtgctgcatttaacccagggaacatgctgggagcaaatgtaca

SEQ ID NO: 78875 - DNA, 60 bp, Artificial
  Synthetic oligonucleotide
ccgaacggctgcattgagggcaagctttctcaaatgtcaaaagaagtaaacgccagaatt

SEQ ID NO: 78876 - DNA, 60 bp, Artificial
  Synthetic oligonucleotide
gttcatacaggaggccagttggaatttccagcatggtggaggccatggtgtctagggccc

SEQ ID NO: 78877 - DNA, 60 bp, Artificial
  Synthetic oligonucleotide
cagtatgagagacatgtgtgatgctccctttgatgacaggcttcgaagagaccaaaaggc

SEQ ID NO: 78878 - DNA, 60 bp, Artificial
  Synthetic oligonucleotide
ctcagtatgagagacatgtgtgatgctccctttgatgacaggctcagaagagaccagaag

SEQ ID NO: 78879 - DNA, 60 bp, Artificial
  Synthetic oligonucleotide
gctgctcagcatgagagacatgtgtgatgctccctttgatgataggctcagaagagatca

SEQ ID NO: 78880 - DNA, 60 bp, Artificial
  Synthetic oligonucleotide
cggctgcattgagggcaagctttctcaaatgtcaaaagaagtgaacgccagagttgagcc

SEQ ID NO: 78881 - DNA, 60 bp, Artificial
  Synthetic oligonucleotide
tgtggacttctgggaataatcactgggccaccccaatgtgaccaattcctagaattttca

SEQ ID NO: 78882 - DNA, 60 bp, Artificial
  Synthetic oligonucleotide
gggatcagtggctcataagtcctgcctgcctgcttgtgtatatggacttgctgtggccag

SEQ ID NO: 78883 - DNA, 54 bp, Artificial
  Synthetic oligonucleotide
aaaagtacacatcaggaagacaagagaagaaccccgcactcaggatgaagtgga

SEQ ID NO: 78884 - DNA, 60 bp, Artificial
  Synthetic oligonucleotide
ttggaatttccagcatggtggaggccatggtgtctagggcccgaattgatgcacgcatcg

SEQ ID NO: 78885 - DNA, 60 bp, Artificial
  Synthetic oligonucleotide
ctggtcctttgctctcgcacaaggagcacttttagggaccaaacatagcaatggaaccat

SEQ ID NO: 78886 - DNA, 60 bp, Artificial
  Synthetic oligonucleotide
taagcaagaggagctacttaataagagcactgacactgaacacaatgacaaaagatgcag

SEQ ID NO: 78887 - DNA, 60 bp, Artificial
  Synthetic oligonucleotide
tgaataagaggagctacttaataagagcactgacactgaacacaatgacaaaagatgcag

SEQ ID NO: 78888 - DNA, 60 bp, Artificial
  Synthetic oligonucleotide
gctgaacaagaggagctacttaataagagcactgacactgaacacaatgacaaaagatgc

SEQ ID NO: 78889 - DNA, 60 bp, Artificial
  Synthetic oligonucleotide
gtgaaacacaagggacggagaaactgacaataacatattcatcatcaatgatgtgggaaa

SEQ ID NO: 78890 - DNA, 60 bp, Artificial
  Synthetic oligonucleotide
taagtgtgatgatcagtgtatggagagcataaggaacaacacttatgaccatacccaata

SEQ ID NO: 78891 - DNA, 60 bp, Artificial
  Synthetic oligonucleotide
aagtgtgatgaccaatgtatggagagcataaggaacaacacttatgaccatacccaatac

SEQ ID NO: 78892 - DNA, 60 bp, Artificial
  Synthetic oligonucleotide
ccataagtgtgataaccaatgtatggagagcataaggaacaacacttatgaccataccca

SEQ ID NO: 78893 - DNA, 60 bp, Artificial
  Synthetic oligonucleotide
ccataagtgtgatgaccaatgtatggagagcataaggaacaacacttatgaccataccca

SEQ ID NO: 78894 - DNA, 60 bp, Artificial
  Synthetic oligonucleotide
taagtgtgatgatcagtgtatggagagcataaggaacaacacttatgaccatactcaata

SEQ ID NO: 78895 - DNA, 60 bp, Artificial
  Synthetic oligonucleotide
ggggcattcatagcccctgacagggcaagtttctttagaggagaatcgctaggagtccag

SEQ ID NO: 78896 - DNA, 60 bp, Artificial
  Synthetic oligonucleotide
gcatgtatgcatgacagggaacgataatgatgcaagtgcccaaataatatatgcagggag

SEQ ID NO: 78897 - DNA, 60 bp, Artificial
  Synthetic oligonucleotide
cattgcaatgggccttgtcttcatatgtgtgaagaatggaaacatgcggtgcactatttg

SEQ ID NO: 78898 - DNA, 60 bp, Artificial
  Synthetic oligonucleotide
cacagaggatggtgctattgtggctgagatctctcccattccctccatgccaggacattc

SEQ ID NO: 78899 - DNA, 60 bp, Artificial
  Synthetic oligonucleotide
atatgagcatagaggagataagccgagaatggtatatgctgatgcctaggcagaaaataa

SEQ ID NO: 78900 - DNA, 60 bp, Artificial
  Synthetic oligonucleotide
gatccctgggttttgcttaatgcgtcttggttcaactccttcctcacacatgcactgaaa

SEQ ID NO: 78901 - DNA, 60 bp, Artificial
  Synthetic oligonucleotide
gttttgcttaatgcatcttggttcaactccttcctcacacatgcactgaagtagttgtgg

SEQ ID NO: 78902 - DNA, 60 bp, Artificial
  Synthetic oligonucleotide
tgggttttgctcaatgcatcttggttcaactccttcctcacacatgcactgaaatagttg

SEQ ID NO: 78903 - DNA, 60 bp, Artificial
  Synthetic oligonucleotide
caggagcggaggaaacaccaaccaacagagagcatctgcagggcaaatcagcgtacaacc

SEQ ID NO: 78904 - DNA, 58 bp, Artificial
  Synthetic oligonucleotide
tgtcgcagtctcgcactcgcgagatactgacaaaaaccactgtggaccatatggccat

SEQ ID NO: 78905 - DNA, 60 bp, Artificial
  Synthetic oligonucleotide
cccaggggacatgctgggagcaaatgtacaccccaggaggggaagtgaggaatgatgatg

SEQ ID NO: 78906 - DNA, 60 bp, Artificial
  Synthetic oligonucleotide
ctctgtgaaacaagatattgtagcaataactgattggtcaggatatagcggaagttttgt

SEQ ID NO: 78907 - DNA, 60 bp, Artificial
  Synthetic oligonucleotide
aacgatccctgggttttgcttaatgcatcttggttcaactccttcctcacacatgcactg

SEQ ID NO: 78908 - DNA, 60 bp, Artificial
  Synthetic oligonucleotide
cgtctcaaggcaccaaacgatcttatgaacagatggagactggtggggaacgccagaatg

SEQ ID NO: 78909 - DNA, 60 bp, Artificial
  Synthetic oligonucleotide
gtctcaaggcaccaaacgatcttatgaacagatggaaactggaggagaacgccagaatgc

SEQ ID NO: 78910 - DNA, 60 bp, Artificial
  Synthetic oligonucleotide
gtctcaaggcaccaaacgatcttatgaacagatggaaactggtgaacgccagaatgctac

SEQ ID NO: 78911 - DNA, 60 bp, Artificial
  Synthetic oligonucleotide
tgcttgaagtggagcaagagataaggactttctcgtttcagcttatttaatgataaaaaa

SEQ ID NO: 78912 - DNA, 60 bp, Artificial
  Synthetic oligonucleotide
agcaaaagcaggtgcgagatgaatccgaatcagaagataataacaatcggggtagtgaat

SEQ ID NO: 78913 - DNA, 60 bp, Artificial
  Synthetic oligonucleotide
gcaggtgcgagatgaatccgaatcagaagataataacaatcggggtagtgaataccactc

SEQ ID NO: 78914 - DNA, 60 bp, Artificial
  Synthetic oligonucleotide
ctggaacctgggactttcgatcttggagggctatatgaagcaattgaggagtgcctgatt

SEQ ID NO: 78915 - DNA, 60 bp, Artificial
  Synthetic oligonucleotide
ctaatagatggcacagcctcattgagtcctggaatgatgatgggtatgttcaacatgctg

SEQ ID NO: 78916 - DNA, 60 bp, Artificial
  Synthetic oligonucleotide
cactccctccaaagcagaaacgctacatggcgagacgagttgagtcagaagtttgaagag

SEQ ID NO: 78917 - DNA, 60 bp, Artificial
  Synthetic oligonucleotide
tgcggacttctggggacaatcactgggccaccccaatgtgaccaattcctagaattttca

SEQ ID NO: 78918 - DNA, 60 bp, Artificial
  Synthetic oligonucleotide
aaaatgcaattggggtcctcatcggaggacttgaatggaatggtaacacagttcgagtct

SEQ ID NO: 78919 - DNA, 60 bp, Artificial
  Synthetic oligonucleotide
cggctgcattgagggcaagctttctcaaatgtcaaaagaagtaaacgccagaattgagcc

SEQ ID NO: 78920 - DNA, 60 bp, Artificial
  Synthetic oligonucleotide
ggagctacttaataagagcactgacactgaacacaatgacaaaggatgcagaaagaggca

SEQ ID NO: 78921 - DNA, 60 bp, Artificial
  Synthetic oligonucleotide
ggagctacttaataagagcactgacactgaacacaatgacaaaagatgcagagagaggca

SEQ ID NO: 78922 - DNA, 60 bp, Artificial
  Synthetic oligonucleotide
acagataacattcttgcaagcattgcaactcttacttgaagttgagagtgagataaggac

SEQ ID NO: 78923 - DNA, 60 bp, Artificial
  Synthetic oligonucleotide
caggcttcgaagagaccaaaaggcattaaagggaagaggcagcacacttggactcgatct

SEQ ID NO: 78924 - DNA, 56 bp, Artificial
  Synthetic oligonucleotide
aatggagtgataactcaattcgagcgtctgaaaatatacagagattcgcttgggga

SEQ ID NO: 78925 - DNA, 60 bp, Artificial
  Synthetic oligonucleotide
atcctcatcggtggacttgaatggagtgataactcaattcgagcgtctgaaaatatacag

SEQ ID NO: 78926 - DNA, 60 bp, Artificial
  Synthetic oligonucleotide
tggaatcctcatcggtggacttgaatggaatgataactcaattcgagcgtctgaaaatat

SEQ ID NO: 78927 - DNA, 60 bp, Artificial
  Synthetic oligonucleotide
gggatttgatgtcgcagtctcgcactcgcgagatactgacaaaaaccactgtggaccata

SEQ ID NO: 78928 - DNA, 60 bp, Artificial
  Synthetic oligonucleotide
gatgcaaaagtgctgtttcagaactggggaattgaacctattgataatgtcatggggatg

SEQ ID NO: 78929 - DNA, 60 bp, Artificial
  Synthetic oligonucleotide
ggggcctttgtggctccagaccgtgtgagcttctttaaagggaaatctacggggatccaa

SEQ ID NO: 78930 - DNA, 60 bp, Artificial
  Synthetic oligonucleotide
cagagaagaagcaatgcaaaatagagtgaaaattgatccggtcaaactgagcagtggtta

SEQ ID NO: 78931 - DNA, 60 bp, Artificial
  Synthetic oligonucleotide
ggtaatatatgcagggagaatgacagactccattaaatcatggagaaaggacatactaag

SEQ ID NO: 78932 - DNA, 60 bp, Artificial
  Synthetic oligonucleotide
tcggcaaaatccaacagaggaacaagccgtggacatatgcaaagcagcaatgggcttaag

SEQ ID NO: 78933 - DNA, 60 bp, Artificial
  Synthetic oligonucleotide
cggcaaaatccaacagaggaacaagccgtggacatatgcaaagcagcaatgggcttaagg

SEQ ID NO: 78934 - DNA, 60 bp, Artificial
  Synthetic oligonucleotide
ctgaatggtttaggaatgtcttgagcattgcacctgtaatgttctcaaataaaatggcaa

SEQ ID NO: 78935 - DNA, 60 bp, Artificial
  Synthetic oligonucleotide
catcacaagaaaccaacctgaatggtttaggaatgtcttgagcattgctcctataatgtt

SEQ ID NO: 78936 - DNA, 60 bp, Artificial
  Synthetic oligonucleotide
tggaaccttcgatcttggagggctatatggagcaattgaggagtgcctgattaatgatcc

SEQ ID NO: 78937 - DNA, 51 bp, Artificial
  Synthetic oligonucleotide
ggggctatacgaagcaattgaggagtgcctgattaatgatccctgggtttt

SEQ ID NO: 78938 - DNA, 60 bp, Artificial
  Synthetic oligonucleotide
ccttcgatcttggagggctatatggagcaattgaggagtgcctgattaatgatccctggg

SEQ ID NO: 78939 - DNA, 60 bp, Artificial
  Synthetic oligonucleotide
ttggtttagcttcggggcatcatgtttcatacttctggccattgcaatgggccttgtctt

SEQ ID NO: 78940 - DNA, 60 bp, Artificial
  Synthetic oligonucleotide
caggcaacctccaaacattgaaaataagagtacatgaaggatatgaggaattcacaatgg

SEQ ID NO: 78941 - DNA, 60 bp, Artificial
  Synthetic oligonucleotide
acctccaaacattgaaaataagagtacatgaaggatatgaggaattcacaatggttgggc

SEQ ID NO: 78942 - DNA, 60 bp, Artificial
  Synthetic oligonucleotide
ctactgagcagaccaaactctatggaagtggaaacaagttgataacagtaggaagctcga

SEQ ID NO: 78943 - DNA, 60 bp, Artificial
  Synthetic oligonucleotide
ctgccgaacagaccaaactctatggaagtggaaacaagttgataacagtaggaagctcga

SEQ ID NO: 78944 - DNA, 60 bp, Artificial
  Synthetic oligonucleotide
tgatcagtgtatggagagcataaggaacaacacttatgaccatacccaatacagaacaga

SEQ ID NO: 78945 - DNA, 60 bp, Artificial
  Synthetic oligonucleotide
ctaccgagcagaccaaactctatggaagtggaaacaagttgataacagtaggaagctcga

SEQ ID NO: 78946 - DNA, 60 bp, Artificial
  Synthetic oligonucleotide
gctaacgagcagaccaaactctatggaagtggaaacaagttgataacagtaggaagctcg

SEQ ID NO: 78947 - DNA, 60 bp, Artificial
  Synthetic oligonucleotide
ctgtgtcaagctttcaggtagactgctttctttggcacgtccgcaaacgatttgcagacc

SEQ ID NO: 78948 - DNA, 60 bp, Artificial
  Synthetic oligonucleotide
gacaatgaacctggatcgggaaattggccagatggttctaacattgggtttatgcccaag

SEQ ID NO: 78949 - DNA, 60 bp, Artificial
  Synthetic oligonucleotide
attgcttcaaatgagaacatggaaacaatggactccagtactcttgaactgaggagcaga

SEQ ID NO: 78950 - DNA, 60 bp, Artificial
  Synthetic oligonucleotide
caggctccgaagagaccaaaaggcattaaagggaagaggcagcacacttggactcgatct

SEQ ID NO: 78951 - DNA, 60 bp, Artificial
  Synthetic oligonucleotide
caggctccgaagagaccaaaaggcattaaagggaagaggcagcacacttggactcgacct

SEQ ID NO: 78952 - DNA, 60 bp, Artificial
  Synthetic oligonucleotide
acaggctccgaagagaccaaaaggcattaaagggaagaggcagcacacttggactcgatc

SEQ ID NO: 78953 - DNA, 60 bp, Artificial
  Synthetic oligonucleotide
ttgatgacaggctccgaagagaccaaaaggcattaaagggaagaggcagcacacttggac

SEQ ID NO: 78954 - DNA, 60 bp, Artificial
  Synthetic oligonucleotide
tccctttgatgacaggctccgaagagaccaaaaggcattaaagggaagaggcagcacact

SEQ ID NO: 78955 - DNA, 58 bp, Artificial
  Synthetic oligonucleotide
gtggatatatgcaaggcggcaatgggcctaagaatcagttcatccttcagctttggag

SEQ ID NO: 78956 - DNA, 60 bp, Artificial
  Synthetic oligonucleotide
tatgaggggaggctgatccagaacagcataacaatagaaagaatggttctctctgcattt

SEQ ID NO: 78957 - DNA, 60 bp, Artificial
  Synthetic oligonucleotide
gaattattacaggaccacctcaatgtgatcaattcctcgagttcacagccgatttgataa

SEQ ID NO: 78958 - DNA, 60 bp, Artificial
  Synthetic oligonucleotide
cacctcaatgtgatcaattcctcgagttcacagccgatttgataatcgagaggcgagagg

SEQ ID NO: 78959 - DNA, 60 bp, Artificial
  Synthetic oligonucleotide
ctcgaattctaatactcacccttgcggcagtcacccacacaaatgcagacaaaatctgcc

SEQ ID NO: 78960 - DNA, 60 bp, Artificial
  Synthetic oligonucleotide
acaaaatgaacactcgaattctaatactcacccttgcggcagtcacccacacaaatgcag

SEQ ID NO: 78961 - DNA, 58 bp, Artificial
  Synthetic oligonucleotide
gcttgccgaccaaagtctcccaccgaacttctccagccttgaaaactttagagcctat

SEQ ID NO: 78962 - DNA, 60 bp, Artificial
  Synthetic oligonucleotide
cgcaggctcgccgaccaaagtctcccaccgaacttctccagccttgaaaactttagagcc

SEQ ID NO: 78963 - DNA, 60 bp, Artificial
  Synthetic oligonucleotide
ggatatgcacaaacagactgtgtcctggaagcaatggctttccttgaagagtcccacccg

SEQ ID NO: 78964 - DNA, 60 bp, Artificial
  Synthetic oligonucleotide
atatgcacaaacagactgtgttcttgaggcaatggctttccttgaagagtcccacccagg

SEQ ID NO: 78965 - DNA, 60 bp, Artificial
  Synthetic oligonucleotide
gcacaaacagactgcgtcctggaagcaatggctttccttgaagagtcccacccagggatc

SEQ ID NO: 78966 - DNA, 60 bp, Artificial
  Synthetic oligonucleotide
gacagaatccgacagaagaacaagctgtggacatatgcaaggcagcaatgggcttgagaa

SEQ ID NO: 78967 - DNA, 60 bp, Artificial
  Synthetic oligonucleotide
cctgctgctaatagtgcagatcacagggtttattggatacgagagggaagaataatgaag

SEQ ID NO: 78968 - DNA, 60 bp, Artificial
  Synthetic oligonucleotide
gaatgggggacctccactccctccaaagcagaaacggaaaatggcgagaacaattgagtc

SEQ ID NO: 78969 - DNA, 60 bp, Artificial
  Synthetic oligonucleotide
cagtaggaagctcaaaatatcagcaatcattcaccccaagtccggaagcacggccacaag

SEQ ID NO: 78970 - DNA, 60 bp, Artificial
  Synthetic oligonucleotide
gccttggacaccatgctgtggcaaacggaacaaaagtgaacacactaacagagagaggga

SEQ ID NO: 78971 - DNA, 60 bp, Artificial
  Synthetic oligonucleotide
gctactgagcaaaccaaactctatggaagtggaaacaagttgataacagtaggaagctcg

SEQ ID NO: 78972 - DNA, 60 bp, Artificial
  Synthetic oligonucleotide
gctacacctaacccagggaacatgctgggagcaaatgtacactccaggtggtgaagtgag

SEQ ID NO: 78973 - DNA, 60 bp, Artificial
  Synthetic oligonucleotide
aataatcactcactgagtgacatcaacatcatggcgtctcaaggcaccaaacgatcttat

SEQ ID NO: 78974 - DNA, 60 bp, Artificial
  Synthetic oligonucleotide
ggggcatcatgtttcatacttctggccattgcaatgggccttgtcttcatatgtgtgaag

SEQ ID NO: 78975 - DNA, 60 bp, Artificial
  Synthetic oligonucleotide
cggggcatcatgtttcatacttctggccattgcaatgggccttgtcttcatatgtgtgag

SEQ ID NO: 78976 - DNA, 60 bp, Artificial
  Synthetic oligonucleotide
ttcggggcatcatgtttcatacttctggccattgcaatgggccttgtcttcatatgtgtg

SEQ ID NO: 78977 - DNA, 60 bp, Artificial
  Synthetic oligonucleotide
gcttcggggcatcatgtttcatacttctggccattgcaatgggccttgtcttcatatgtg

SEQ ID NO: 78978 - DNA, 60 bp, Artificial
  Synthetic oligonucleotide
agagactggagcaccccaactcaacccaattgatggaccattgcctgaggataacgagcc

SEQ ID NO: 78979 - DNA, 60 bp, Artificial
  Synthetic oligonucleotide
gagactggagcaccccaactcaacccaattgatggaccattacccgaggacaacgagcca

SEQ ID NO: 78980 - DNA, 60 bp, Artificial
  Synthetic oligonucleotide
aagatgagtcttctaaccgaggtcgaaacgtacgttctctctatcgttccgtcgggcccc

SEQ ID NO: 78981 - DNA, 60 bp, Artificial
  Synthetic oligonucleotide
taatgatccctgggttttgcttaatgcgtcttggttcaactccttcctcacacatgcact

SEQ ID NO: 78982 - DNA, 60 bp, Artificial
  Synthetic oligonucleotide
ctttccttgaagagtcccacccagggatctttgaaaactcatgtcttgaaacgatggaag

SEQ ID NO: 78983 - DNA, 60 bp, Artificial
  Synthetic oligonucleotide
cccaatatacagaaggagagatggaaaatggatgagagagctcatcctctatgataaaga

SEQ ID NO: 78984 - DNA, 60 bp, Artificial
  Synthetic oligonucleotide
agcgggtttcattgaaaatggatgggaaggtctgattgatgggtggtatggcttcaggca

SEQ ID NO: 78985 - DNA, 60 bp, Artificial
  Synthetic oligonucleotide
ttaatgcgtcttggttcaactccttcctcacacatgcactgaaatagttgtggcaatgct

SEQ ID NO: 78986 - DNA, 60 bp, Artificial
  Synthetic oligonucleotide
ctcaatgcatcttggttcaactccttcctcacacatgcactgaaatagttgtggcaatgc

SEQ ID NO: 78987 - DNA, 60 bp, Artificial
  Synthetic oligonucleotide
gcggtgctgagaggattcctaattctaggcaaagaagacaaaagatatggaccagcattg

SEQ ID NO: 78988 - DNA, 60 bp, Artificial
  Synthetic oligonucleotide
gcagtgttaagaggatttctaattctaggcaaagaagacaaaagatatggaccagcattg

SEQ ID NO: 78989 - DNA, 60 bp, Artificial
  Synthetic oligonucleotide
ataggacagggacatttgaattcacaagctttttctaccgctatggatttgtagccaatt

SEQ ID NO: 78990 - DNA, 60 bp, Artificial
  Synthetic oligonucleotide
aacagagtaggatgcaattctcttctctaactgtgaacgtaaggggttcaggaatgagaa

SEQ ID NO: 78991 - DNA, 60 bp, Artificial
  Synthetic oligonucleotide
gaggcagcacacttgggctcgacctgcgagtggctacaatggaaggcaaaaagattgtag

SEQ ID NO: 78992 - DNA, 60 bp, Artificial
  Synthetic oligonucleotide
tggttatgaaacggaaacgggactctagcatacttactgacagccagacagcgaccaaaa

SEQ ID NO: 78993 - DNA, 60 bp, Artificial
  Synthetic oligonucleotide
gtggtagatcgggctttgaaattatcaaagttacagaggggtggatcaactctcctaacc

SEQ ID NO: 78994 - DNA, 60 bp, Artificial
  Synthetic oligonucleotide
tgcatggccagtattagaaacaacacttatgatcacagcaaatacagagaagaagcgatg

SEQ ID NO: 78995 - DNA, 60 bp, Artificial
  Synthetic oligonucleotide
acaagtacttagaagagcatcccagtgccgggaaagaccccaagaagactggaggcccaa

SEQ ID NO: 78996 - DNA, 60 bp, Artificial
  Synthetic oligonucleotide
tcagcacacaatagatcttgcggattcagaaatgaacaaactttatgagcgtgtcagaaa

SEQ ID NO: 78997 - DNA, 60 bp, Artificial
  Synthetic oligonucleotide
aaaccagcacacaatagatcttgcggattcagaaatgaacaaactttatgaacgtgtcag

SEQ ID NO: 78998 - DNA, 60 bp, Artificial
  Synthetic oligonucleotide
ccagcacacaatagatcttgcggattcagaaatgaacaaactttatgaacgtgtcagaaa

SEQ ID NO: 78999 - DNA, 60 bp, Artificial
  Synthetic oligonucleotide
gatcttgcggattcagaaatgaacaaactttatgagcgtgtcagaaaacaactaagggag

SEQ ID NO: 79000 - DNA, 60 bp, Artificial
  Synthetic oligonucleotide
gatcttgcggattcagaaatgaacaaactttatgagcgtgtcagaaagcaactaagggag

SEQ ID NO: 79001 - DNA, 57 bp, Artificial
  Synthetic oligonucleotide
tagtggaagatcaggctttgaaatcatcaaagtcacagaggggtggattaactcccc

SEQ ID NO: 79002 - DNA, 60 bp, Artificial
  Synthetic oligonucleotide
ggaaggactgtatcaactagtggaagatcaggctttgaaatcatcaaagtcacagagggg

SEQ ID NO: 79003 - DNA, 60 bp, Artificial
  Synthetic oligonucleotide
tagtggaagatcaggctttgaaatcatcaaagtcacagaggggtggattaactcccccaa

SEQ ID NO: 79004 - DNA, 60 bp, Artificial
  Synthetic oligonucleotide
ggaaggactgtatcaactagtggaagatcgggctttgaaatcatcaaagtcacagagggg

SEQ ID NO: 79005 - DNA, 60 bp, Artificial
  Synthetic oligonucleotide
tacaccaaaaccacatactggtgggatggactccaatcctctgatgatttcgccctcata

SEQ ID NO: 79006 - DNA, 60 bp, Artificial
  Synthetic oligonucleotide
tacaccaaaaccacatactggtgggatggactccaatcctctgatgatttcaccctcata

SEQ ID NO: 79007 - DNA, 60 bp, Artificial
  Synthetic oligonucleotide
gcacaaacagactgtgtcctggaagcaatggctttccttgaagagtcccacccaggaatc

SEQ ID NO: 79008 - DNA, 60 bp, Artificial
  Synthetic oligonucleotide
gcttccaggtagactgctttctttggcacgtccgcaaacgatttgcagaccaagaactgg

SEQ ID NO: 79009 - DNA, 60 bp, Artificial
  Synthetic oligonucleotide
gctttcaggtagactgctttctttggcacgtccgcaaacgatttgcagaccaagaactgg

SEQ ID NO: 79010 - DNA, 60 bp, Artificial
  Synthetic oligonucleotide
caacaatgagaccatattagaaacagggtatgtatgtagcaaatttcattcggacactcc

SEQ ID NO: 79011 - DNA, 60 bp, Artificial
  Synthetic oligonucleotide
gaggtacaccaaaaccacatactggtgggatggactccaatcctctgatgatttcgccct

SEQ ID NO: 79012 - DNA, 59 bp, Artificial
  Synthetic oligonucleotide
gctggtcctttgctctagcccaaggggctctactggggactaaacacagcaatggaacc

SEQ ID NO: 79013 - DNA, 60 bp, Artificial
  Synthetic oligonucleotide
cggctgcattgagggcaagctttctcaaatgtcaaaagaagtgaacgcaagagttgagcc

SEQ ID NO: 79014 - DNA, 60 bp, Artificial
  Synthetic oligonucleotide
cggctgcattgagggcaagctttctcaaatgtcaaaagacgtgaacgctaggattgagcc

SEQ ID NO: 79015 - DNA, 57 bp, Artificial
  Synthetic oligonucleotide
catggagtggctaaagacaagaccaatcctgtcacctctgactaaggggattttagg

SEQ ID NO: 79016 - DNA, 60 bp, Artificial
  Synthetic oligonucleotide
gttcctagcaatgataacatacataacaagaaatcaacctgaatggtttaggaatgtctt

SEQ ID NO: 79017 - DNA, 60 bp, Artificial
  Synthetic oligonucleotide
caggcagaacccaacggaggagcaggctgttgacatatgcaaagcagcaatgggcttaag

SEQ ID NO: 79018 - DNA, 60 bp, Artificial
  Synthetic oligonucleotide
caaatgcatttatcgtcgtcttaaatacggtttgaaaagagggccttctacggaaggagt

SEQ ID NO: 79019 - DNA, 60 bp, Artificial
  Synthetic oligonucleotide
aatattgttaggagagcaacagtatcagcagacccattggcttcgctcttggagatgtgc

SEQ ID NO: 79020 - DNA, 58 bp, Artificial
  Synthetic oligonucleotide
ctaatggagcaaccagtgcatgtaggagatcaggatcttcattctatgcagagatgaa

SEQ ID NO: 79021 - DNA, 60 bp, Artificial
  Synthetic oligonucleotide
ctaatggagcaaccagtgcatgtaggagatcaggatcttcattctatgcagagatgaagt

SEQ ID NO: 79022 - DNA, 60 bp, Artificial
  Synthetic oligonucleotide
agcaaaagcaggtgcgagatgaatccgaatcagaagataataacacttggtgtagtgaat

SEQ ID NO: 79023 - DNA, 60 bp, Artificial
  Synthetic oligonucleotide
gcaggtgcgagatgaatccgaatcagaagataataacacttggtgtagtgaatacaaccc

SEQ ID NO: 79024 - DNA, 60 bp, Artificial
  Synthetic oligonucleotide
gcaggaacagcagagtgctgtggatgttgacgatggtcattttgtcaacatagagctgga

SEQ ID NO: 79025 - DNA, 60 bp, Artificial
  Synthetic oligonucleotide
gtgtatgtagggacaattggaaaggttccaacaggccttggatgagaatcaacaatgaga

SEQ ID NO: 79026 - DNA, 60 bp, Artificial
  Synthetic oligonucleotide
ttctaattggacaaggagacgtagtgttggtaatgaaacggaaacgggactctagcatac

SEQ ID NO: 79027 - DNA, 60 bp, Artificial
  Synthetic oligonucleotide
tgctgattgggcaaggagacgtagtgttggtaatgaaacggaaacgggactctagcatac

SEQ ID NO: 79028 - DNA, 60 bp, Artificial
  Synthetic oligonucleotide
aatgtgttgatagggcaaggagacgttgtgttggtaatgaaacggaaacgggactctagc

SEQ ID NO: 79029 - DNA, 60 bp, Artificial
  Synthetic oligonucleotide
ctaatgtgctaatcgggcaaggagacgtagtgttggtaatgaaacggaaacgggactcta

SEQ ID NO: 79030 - DNA, 60 bp, Artificial
  Synthetic oligonucleotide
ctaatgtgctgattgggcaaggagacgtagtgttggtaatgaaacggaaacgggactcta

SEQ ID NO: 79031 - DNA, 60 bp, Artificial
  Synthetic oligonucleotide
ggctaatgtgctaattgggcaaggagacgttgtgttggtaatgaaacggaaacgggactc

SEQ ID NO: 79032 - DNA, 60 bp, Artificial
  Synthetic oligonucleotide
cttggacaaaagagatacaccaaaacaacatactggtgggatggactccaatcctctgat

SEQ ID NO: 79033 - DNA, 60 bp, Artificial
  Synthetic oligonucleotide
tcaaactaagcagcggctacaaagatgtgatactttggtttagcttcggggcatcatgtt

SEQ ID NO: 79034 - DNA, 60 bp, Artificial
  Synthetic oligonucleotide
gctcctgacagggcaagtttctttagaggagaatcgctaggagtccagagtgatgttcct

SEQ ID NO: 79035 - DNA, 60 bp, Artificial
  Synthetic oligonucleotide
gctcctgacagggcaagtttctttagaggagaatcactaggaatccagagtgatgtgcct

SEQ ID NO: 79036 - DNA, 60 bp, Artificial
  Synthetic oligonucleotide
catagctcctgacagggcaagtttctttagaggagaatcgctaggagtccagagtgatgt

SEQ ID NO: 79037 - DNA, 60 bp, Artificial
  Synthetic oligonucleotide
ccccgacagggcaagtttctttagaggagaatcgctaggagtccagagtgatgttacttt

SEQ ID NO: 79038 - DNA, 51 bp, Artificial
  Synthetic oligonucleotide
tgtcgcagtctcgcactcgcgagatactgacaaaaaccactgtggaccata

SEQ ID NO: 79039 - DNA, 60 bp, Artificial
  Synthetic oligonucleotide
gagaaggatactctctggtcggaatagatcctttccgtctgctccaaaacagccaggtat

SEQ ID NO: 79040 - DNA, 60 bp, Artificial
  Synthetic oligonucleotide
tagacatccttagacagaatccgacagaagaacaagctgtggacatatgcaaggcagcaa

SEQ ID NO: 79041 - DNA, 60 bp, Artificial
  Synthetic oligonucleotide
ctgaagcagaaaggcccttcaagcctccactaccgctgtgccccttcagaggattcttcc

SEQ ID NO: 79042 - DNA, 60 bp, Artificial
  Synthetic oligonucleotide
ctgaagcagaaaggcctttcaagtccccactaccgctgtgccccttcagaggattcttcc

SEQ ID NO: 79043 - DNA, 60 bp, Artificial
  Synthetic oligonucleotide
ggcctttcaagtccccactaccgctgtgccccttcagaggattcttcccctttcacaagg

SEQ ID NO: 79044 - DNA, 60 bp, Artificial
  Synthetic oligonucleotide
gtcctggaagcaatggctttccttgaagagtcccacccaggaatctttgaaaactcgtgt

SEQ ID NO: 79045 - DNA, 60 bp, Artificial
  Synthetic oligonucleotide
ctggaggcaatggctttccttgaagagtcccacccaggaatctttgaaaactcgtgtctt

SEQ ID NO: 79046 - DNA, 60 bp, Artificial
  Synthetic oligonucleotide
ggaggcaatggctttccttgaagagtcccacccaggaatctttgaaaactcgtgtcttga

SEQ ID NO: 79047 - DNA, 60 bp, Artificial
  Synthetic oligonucleotide
cctggaagcaatggctttccttgaagagtcccacccaggaatctttgaaaactcgtgtct

SEQ ID NO: 79048 - DNA, 60 bp, Artificial
  Synthetic oligonucleotide
caacacttatgaccatacccaatacagagcagagtcattacagaataggatacagataga

SEQ ID NO: 79049 - DNA, 60 bp, Artificial
  Synthetic oligonucleotide
ggtcggagaaccagaattgcctatgaaaggatgtgcaacatcctcaaagggaaatttcaa

SEQ ID NO: 79050 - DNA, 60 bp, Artificial
  Synthetic oligonucleotide
tttgcttaatgcatcttggttcaactccttcctcacacatgcactgaagtagttgtggca

SEQ ID NO: 79051 - DNA, 60 bp, Artificial
  Synthetic oligonucleotide
ttgcttaatgcatcttggttcaactccttcctcacacatgcactgaagtagttgtggcaa

SEQ ID NO: 79052 - DNA, 60 bp, Artificial
  Synthetic oligonucleotide
gggagagacgagcagtcaattgctgaagcaataattgtggccatggtgttctcgcaagag

SEQ ID NO: 79053 - DNA, 60 bp, Artificial
  Synthetic oligonucleotide
aagccttacaactaccgcttgaagtggagcaagagataagaactttctcgtttcagctta

SEQ ID NO: 79054 - DNA, 60 bp, Artificial
  Synthetic oligonucleotide
cgcaaaatgctataagtaccacattcccttatactggagatcctccatacagccatggaa

SEQ ID NO: 79055 - DNA, 60 bp, Artificial
  Synthetic oligonucleotide
tgactgggaacgacaatgatgcaagtggccaaataatatatgcagggaaaatgacagact

SEQ ID NO: 79056 - DNA, 60 bp, Artificial
  Synthetic oligonucleotide
agagaatgtgcaacatcctcaaagggaaatttcaaacagcagcacaacgagcaatgatgg

SEQ ID NO: 79057 - DNA, 60 bp, Artificial
  Synthetic oligonucleotide
gagagaatgtgcaacatcctcaaagggaaatttcaaacagcagcacaacgagcaatgatg

SEQ ID NO: 79058 - DNA, 60 bp, Artificial
  Synthetic oligonucleotide
gaatcttgggcaaaagaggtacaccaaaaccacatactggtgggatggactccaatcctc

SEQ ID NO: 79059 - DNA, 60 bp, Artificial
  Synthetic oligonucleotide
caagagaagctatctaataagagcactgacactgaacacaatgacaaaagacgctgaaag

SEQ ID NO: 79060 - DNA, 58 bp, Artificial
  Synthetic oligonucleotide
agagaagctatctaataagagcactgacactgaacacaatgacaaaagacgctgaaag

SEQ ID NO: 79061 - DNA, 60 bp, Artificial
  Synthetic oligonucleotide
gattgtaagattgctcctttaatggtggcatacatgttggaaagagaactggttcgcaaa

SEQ ID NO: 79062 - DNA, 60 bp, Artificial
  Synthetic oligonucleotide
cttctagccattgcaatgggccttgtcttcatatgtgtgaagaatggaaacatgcggtgc

SEQ ID NO: 79063 - DNA, 60 bp, Artificial
  Synthetic oligonucleotide
tgtagcaataactgattggtcgggatatagcgggagtttcgtccaacaccctgaattaac

SEQ ID NO: 79064 - DNA, 60 bp, Artificial
  Synthetic oligonucleotide
gggcaattcctctctctgccctattagtgggtgggctatatacagtaaagacaatggtat

SEQ ID NO: 79065 - DNA, 60 bp, Artificial
  Synthetic oligonucleotide
cctctctttgtcccattagtgggtgggctatatacagtaaagacaatggtataagaattg

SEQ ID NO: 79066 - DNA, 60 bp, Artificial
  Synthetic oligonucleotide
gccagctcatggtccagccaagagcatggaatatgatgctgttgcgactacacactcatg

SEQ ID NO: 79067 - DNA, 60 bp, Artificial
  Synthetic oligonucleotide
tccacatcatggcgtctcaaggcaccaaacgatcttatgaacagatggaaactggtgaac

SEQ ID NO: 79068 - DNA, 60 bp, Artificial
  Synthetic oligonucleotide
tctgcggtattaagaggatttctaattctgggcaaagaagacaaaagatatggaccagca

SEQ ID NO: 79069 - DNA, 60 bp, Artificial
  Synthetic oligonucleotide
caatgtggactgctggggacaatcactggaccaccccaatgtgaccaattcctagaattc

SEQ ID NO: 79070 - DNA, 60 bp, Artificial
  Synthetic oligonucleotide
ctcctgaggcatttccaaaaggatgcaaaggtgctgtttcagaactggggaattgaacca

SEQ ID NO: 79071 - DNA, 60 bp, Artificial
  Synthetic oligonucleotide
ctcctgaggcatttccaaaaggatgcaaaggtgctgtttcagaactggggaattgaaccc

SEQ ID NO: 79072 - DNA, 60 bp, Artificial
  Synthetic oligonucleotide
tgccagcgcaaaatgctataagtaccacattcccttatactggagatcctccatacagcc

SEQ ID NO: 79073 - DNA, 60 bp, Artificial
  Synthetic oligonucleotide
gtggacatcgatgtgtactgcatatgtagggacaattggaaaggttccaacaggccttgg

SEQ ID NO: 79074 - DNA, 60 bp, Artificial
  Synthetic oligonucleotide
gcaggtgcgagatgaatccaaatcagaagataataacaatcggggtagtgaatactactc

SEQ ID NO: 79075 - DNA, 60 bp, Artificial
  Synthetic oligonucleotide
ggcaaagaagacaaaagatatggaccagcattgagcatcaatgaactgagcaatcttgcg

SEQ ID NO: 79076 - DNA, 60 bp, Artificial
  Synthetic oligonucleotide
gaggatttctaattctgggcaaggaagacaaaagatatggaccagcattgagcatcaacg

SEQ ID NO: 79077 - DNA, 60 bp, Artificial
  Synthetic oligonucleotide
acaaaagatatggaccagcattgagcatcaatgaactgagcaatcttgcgaaaggggaga

SEQ ID NO: 79078 - DNA, 60 bp, Artificial
  Synthetic oligonucleotide
gagggtttctaattctgggcaaggaagacaaaagatatggaccagcattgagcatcaacg

SEQ ID NO: 79079 - DNA, 60 bp, Artificial
  Synthetic oligonucleotide
ggagagcataaggaacaacacttatgaccatacccaatacagaacagagtcactgcagaa

SEQ ID NO: 79080 - DNA, 60 bp, Artificial
  Synthetic oligonucleotide
ggagagcataaggaacaacacttatgaccatacccaatacagaacagagtcactacagaa

SEQ ID NO: 79081 - DNA, 60 bp, Artificial
  Synthetic oligonucleotide
cacaggaaccatgcgcaggcttgccgaacaaagtctcccaccgaacttctccagccttga

SEQ ID NO: 79082 - DNA, 60 bp, Artificial
  Synthetic oligonucleotide
cacaggaacattgcgcaggcttgccgaccaaagtctcccaccgaacttctccagccttga

SEQ ID NO: 79083 - DNA, 60 bp, Artificial
  Synthetic oligonucleotide
cacagggacaatgcgcaggcttgccgaccaaagtctcccaccgaacttctccagccttga

SEQ ID NO: 79084 - DNA, 60 bp, Artificial
  Synthetic oligonucleotide
cacaggaaccatgtgtaggcttgcaaaccaaagtctcccaccgaacttctccagccttga

SEQ ID NO: 79085 - DNA, 60 bp, Artificial
  Synthetic oligonucleotide
cacagaccttgaggttctcatggaatggctaaagacaagaccaatcctgtcacctctgac

SEQ ID NO: 79086 - DNA, 60 bp, Artificial
  Synthetic oligonucleotide
acaccgatcttgaggcgctcatggaatggctaaagacaagaccaatcctgtcacctctga

SEQ ID NO: 79087 - DNA, 60 bp, Artificial
  Synthetic oligonucleotide
atgaatccaaatcagaagataataacaattggttctgtctctctaaccattgcaacagta

SEQ ID NO: 79088 - DNA, 60 bp, Artificial
  Synthetic oligonucleotide
atgaatccaaatcagaagataataacaattggctccatctctctaaccattgcaacagta

SEQ ID NO: 79089 - DNA, 57 bp, Artificial
  Synthetic oligonucleotide
atgaatccaaatcagaagataataacaattggttctgtctctctaaccattgcaaca

SEQ ID NO: 79090 - DNA, 57 bp, Artificial
  Synthetic oligonucleotide
atgaatccaaatcagaagataataacaattggttccgtctctctaaccattgcaaca

SEQ ID NO: 79091 - DNA, 54 bp, Artificial
  Synthetic oligonucleotide
atgaatccaaatcagaagataataacaattggctctgtctccctaaccattgca

SEQ ID NO: 79092 - DNA, 57 bp, Artificial
  Synthetic oligonucleotide
atgaatccaaatcagaagataataacaattggttccatctctctaaccattgcaaca

SEQ ID NO: 79093 - DNA, 53 bp, Artificial
  Synthetic oligonucleotide
atggaacaggctcatggcctgatggggcgaatatcaacttcatgcctatataa

SEQ ID NO: 79094 - DNA, 60 bp, Artificial
  Synthetic oligonucleotide
gcaacgggtgctttgaattctaccacaagtgtgacaatgaatgcatggaaagtgtgagaa

SEQ ID NO: 79095 - DNA, 60 bp, Artificial
  Synthetic oligonucleotide
gctgagtcaagaaagctgcttcttattgttcaggcacttagggacaacctggaacctggt

SEQ ID NO: 79096 - DNA, 60 bp, Artificial
  Synthetic oligonucleotide
atggaacaggctcatggcctgatggggcgaacatcaacttcatgcctctataagctttcg

SEQ ID NO: 79097 - DNA, 60 bp, Artificial
  Synthetic oligonucleotide
agcaaaagtatgaaattgagaactcagataccagccgaaatgcttgcaagcattgatctg

SEQ ID NO: 79098 - DNA, 60 bp, Artificial
  Synthetic oligonucleotide
gaactctctttcaccatcactggggacaataccaaatggaatgaaaatcagaacccacgc

SEQ ID NO: 79099 - DNA, 58 bp, Artificial
  Synthetic oligonucleotide
cagatcaaatgatctgacttccaatgagtcagggagattaatggacttcctcaaagat

SEQ ID NO: 79100 - DNA, 60 bp, Artificial
  Synthetic oligonucleotide
aatacaattgaagtgttcagatcaaatgatctgacttccaatgagtcagggagattaatg

SEQ ID NO: 79101 - DNA, 56 bp, Artificial
  Synthetic oligonucleotide
caaactaacacaaggtcgacaaacttacgattggaccttgaataggaatcaacctg

SEQ ID NO: 79102 - DNA, 60 bp, Artificial
  Synthetic oligonucleotide
attcccaagacactgaactctctttcaccatcactggggacaataccaaatggaatgaaa

SEQ ID NO: 79103 - DNA, 60 bp, Artificial
  Synthetic oligonucleotide
cagaacccacgcatgttcctggcaatgatcacatacataactagaaaccagccagaatgg

SEQ ID NO: 79104 - DNA, 60 bp, Artificial
  Synthetic oligonucleotide
gtcaacagaacacaccaatactcagaaaaggggaaatggacaacaaacactgagattgga

SEQ ID NO: 79105 - DNA, 60 bp, Artificial
  Synthetic oligonucleotide
tacaccatggatactgtcaacagaacacaccaatactcagaaaaggggaaatggacaaca

SEQ ID NO: 79106 - DNA, 60 bp, Artificial
  Synthetic oligonucleotide
aactagaaaccagccagaatggttcagaaatgttctaagccttgcaccgattatgttctc

SEQ ID NO: 79107 - DNA, 60 bp, Artificial
  Synthetic oligonucleotide
aaatggcaagactggggaagggatatatgtttgaaagcaaaagtatgaaattgagaactc

SEQ ID NO: 79108 - DNA, 60 bp, Artificial
  Synthetic oligonucleotide
ttatgttctcaaataaaatggcaagactggggaagggatatatgtttgaaagcaaaagta

SEQ ID NO: 79109 - DNA, 60 bp, Artificial
  Synthetic oligonucleotide
ggccgctgcctgaagacaatgaaccaagcggatacgcccaaacagattgtgtattggaag

SEQ ID NO: 79110 - DNA, 60 bp, Artificial
  Synthetic oligonucleotide
tccagggcccgcattgacgcacggattgacttcgaatctggacggataaagaaggaggag

SEQ ID NO: 79111 - DNA, 60 bp, Artificial
  Synthetic oligonucleotide
tggaatgaaaatcagaacccacgcatgttcctggcaatgatcacatacataactagaaac

SEQ ID NO: 79112 - DNA, 60 bp, Artificial
  Synthetic oligonucleotide
atctacacatcccggaagtctgtttgaaatggaggctgatggatgaagattataagggga

SEQ ID NO: 79113 - DNA, 60 bp, Artificial
  Synthetic oligonucleotide
tatacaacatcagaaatctacacatcccggaagtctgtttgaaatggaggctgatggatg

SEQ ID NO: 79114 - DNA, 60 bp, Artificial
  Synthetic oligonucleotide
cgacacccagatacaaaccaggagatcttttgagctgaagaagctgtgggaacagactcg

SEQ ID NO: 79115 - DNA, 60 bp, Artificial
  Synthetic oligonucleotide
agaggcgacacccagatacaaaccaggagatcttttgagctgaagaagctgtgggaacag

SEQ ID NO: 79116 - DNA, 60 bp, Artificial
  Synthetic oligonucleotide
gtccatactgaacacgagccaaaggggagtactcgaagatgagcagatgtaccagaaatg

SEQ ID NO: 79117 - DNA, 60 bp, Artificial
  Synthetic oligonucleotide
gcaacaacacactcttggatccccaagagaaaccggtccatactgaacacgagccaaagg

SEQ ID NO: 79118 - DNA, 60 bp, Artificial
  Synthetic oligonucleotide
gagtatgatgctgttgcaacaacacactcttggatccccaagagaaaccggtccatactg

SEQ ID NO: 79119 - DNA, 52 bp, Artificial
  Synthetic oligonucleotide
caaaatgctataagcacaacattcccttatactggagatcctccctacagtc

SEQ ID NO: 79120 - DNA, 60 bp, Artificial
  Synthetic oligonucleotide
tgggccgctgcctgaagacaatgaaccaagcggatacgcccaaacagattgtgtattgga

SEQ ID NO: 79121 - DNA, 60 bp, Artificial
  Synthetic oligonucleotide
caatcatccgatgattttgctttgatagtgaatgcgcccaatcatgagggaatacaagct

SEQ ID NO: 79122 - DNA, 60 bp, Artificial
  Synthetic oligonucleotide
ccgatgattttgctttgatagtgaatgcgcccaatcatgagggaatacaagctggagtag

SEQ ID NO: 79123 - DNA, 60 bp, Artificial
  Synthetic oligonucleotide
cctaggtcaaaggaaatacacaaagaccacatactggtgggatggtctgcaatcatccga

SEQ ID NO: 79124 - DNA, 60 bp, Artificial
  Synthetic oligonucleotide
gatggggatgttcaacatgttaagcactgtactaggtgtatccatattaaacctaggtca

SEQ ID NO: 79125 - DNA, 60 bp, Artificial
  Synthetic oligonucleotide
gggatgttcaacatgttaagcactgtactaggtgtatccatattaaacctaggtcaaagg

SEQ ID NO: 79126 - DNA, 60 bp, Artificial
  Synthetic oligonucleotide
atacgaccacttctaatcgatgggactgcttcactgagtcctggcatgatgatggggatg

SEQ ID NO: 79127 - DNA, 60 bp, Artificial
  Synthetic oligonucleotide
cgaccacttctaatcgatgggactgcttcactgagtcctggcatgatgatggggatgttc

SEQ ID NO: 79128 - DNA, 55 bp, Artificial
  Synthetic oligonucleotide
ttttctaccgctacggttttgttgccaatttcagcatggagctacccagttttgg

SEQ ID NO: 79129 - DNA, 60 bp, Artificial
  Synthetic oligonucleotide
tggcactccaactcttcatcaaggattatcggtatacataccgatgccatagaggcgaca

SEQ ID NO: 79130 - DNA, 60 bp, Artificial
  Synthetic oligonucleotide
ctgaacacgagccaaaggggagtactcgaagatgagcagatgtaccagaaatgttgcaac

SEQ ID NO: 79131 - DNA, 60 bp, Artificial
  Synthetic oligonucleotide
taatgagaagaaggccaaactggctaatgtcgtcagaaagatgatgactaattcccaaga

SEQ ID NO: 79132 - DNA, 60 bp, Artificial
  Synthetic oligonucleotide
ggccaaactggctaatgtcgtcagaaagatgatgactaattcccaagacactgaactctc

SEQ ID NO: 79133 - DNA, 60 bp, Artificial
  Synthetic oligonucleotide
gagctatctgatcagggcattaaccctgaacacaatgaccaaggatgctgagagagggaa

SEQ ID NO: 79134 - DNA, 60 bp, Artificial
  Synthetic oligonucleotide
aggatgctgagagagggaaattgaaacgacgagcaattgcaaccccaggaatgcagataa

SEQ ID NO: 79135 - DNA, 60 bp, Artificial
  Synthetic oligonucleotide
gctgagagagggaaattgaaacgacgagcaattgcaaccccaggaatgcagataagaggg

SEQ ID NO: 79136 - DNA, 51 bp, Artificial
  Synthetic oligonucleotide
atgcagataagagggtttgtatactttgttgaaacattggcccgaaggata

SEQ ID NO: 79137 - DNA, 60 bp, Artificial
  Synthetic oligonucleotide
tggaaataacaacacacttccaacggaagaggagagtgagagacaacatgacaaagaaaa

SEQ ID NO: 79138 - DNA, 60 bp, Artificial
  Synthetic oligonucleotide
caacacacttccaacggaagaggagagtgagagacaacatgacaaagaaaatggtgacac

SEQ ID NO: 79139 - DNA, 60 bp, Artificial
  Synthetic oligonucleotide
acaaagaaaatggtgacacaaagaaccatagggaagaaaaaacaacgattgaacagaaag

SEQ ID NO: 79140 - DNA, 60 bp, Artificial
  Synthetic oligonucleotide
gaacagaaagagctatctgatcagggcattaaccctgaacacaatgaccaaggatgctga

SEQ ID NO: 79141 - DNA, 60 bp, Artificial
  Synthetic oligonucleotide
ccagggcccgcattgacgcacggattgacttcgaatctggacggataaagaaggaggagt

SEQ ID NO: 79142 - DNA, 51 bp, Artificial
  Synthetic oligonucleotide
ctgatggatgaagattataaggggagactatgtaatccactgaatcctttc

SEQ ID NO: 79143 - DNA, 60 bp, Artificial
  Synthetic oligonucleotide
gggtgttccgtttcacttgggaaccaaacaagtgtgcatagcatggtccagctcaagttg

SEQ ID NO: 79144 - DNA, 60 bp, Artificial
  Synthetic oligonucleotide
ggcatcatgtttcatacttctggccattgcaatgggccttgtcttcatatgtgtgaagaa

SEQ ID NO: 79145 - DNA, 60 bp, Artificial
  Synthetic oligonucleotide
taggcccgttatagatataaatatggcagattatagcattgattccagttatgtgtgctc

SEQ ID NO: 79146 - DNA, 60 bp, Artificial
  Synthetic oligonucleotide
ctctaataggcccgttatagatataaatatggcagattatagcattgattccagttatgt

SEQ ID NO: 79147 - DNA, 54 bp, Artificial
  Synthetic oligonucleotide
gccacaatggcacatgtgcagttgtaatgactgacggatcggctagtagtcaag

SEQ ID NO: 79148 - DNA, 60 bp, Artificial
  Synthetic oligonucleotide
acagtatcggttcttggtctcaaaatatcctcagaactcaggagtcagagtgcgtttgca

SEQ ID NO: 79149 - DNA, 60 bp, Artificial
  Synthetic oligonucleotide
tacaaagatgtaatactttggtttagcttcggggcatcatgtttcttatttcttgccatt

SEQ ID NO: 79150 - DNA, 60 bp, Artificial
  Synthetic oligonucleotide
tacaaagatataatactttggtttagcttcggggcatcatgtttcttatttcttgccatt

SEQ ID NO: 79151 - DNA, 60 bp, Artificial
  Synthetic oligonucleotide
ctaatgtcacagtcccgcacccgcgagatactcaccaaaaccactgtggaccatatggcc

SEQ ID NO: 79152 - DNA, 60 bp, Artificial
  Synthetic oligonucleotide
acagataccagcagaccaggggacaagcctagtggtgactgttccaatccaataactggg

SEQ ID NO: 79153 - DNA, 60 bp, Artificial
  Synthetic oligonucleotide
gagcacacaagcaggtatgtatgcactggagtcttaacagataccagcagaccaggggac

SEQ ID NO: 79154 - DNA, 60 bp, Artificial
  Synthetic oligonucleotide
atatgaccactttggagcacacaagcaggtatgtatgcactggagtcttaacagatacca

SEQ ID NO: 79155 - DNA, 60 bp, Artificial
  Synthetic oligonucleotide
ctcctgttatggacacaaccagaagataacttgtgtgtgcagagataactggcagggtgc

SEQ ID NO: 79156 - DNA, 60 bp, Artificial
  Synthetic oligonucleotide
atattgaagaatgctcctgttatggacacaaccagaagataacttgtgtgtgcagagata

SEQ ID NO: 79157 - DNA, 60 bp, Artificial
  Synthetic oligonucleotide
cctaatcagaaactatttgctctatctggagtagcaatagcgcttagtgtactgaactta

SEQ ID NO: 79158 - DNA, 60 bp, Artificial
  Synthetic oligonucleotide
acatgtgcagttgtgatgaccgatgggtcagccagtagtcaggcctacacgaaagtaatg

SEQ ID NO: 79159 - DNA, 60 bp, Artificial
  Synthetic oligonucleotide
ggacccaggaatcagaatgtgtatgccataatggcacatgtgcagttgtgatgaccgatg

SEQ ID NO: 79160 - DNA, 60 bp, Artificial
  Synthetic oligonucleotide
ctcaaatgttggattgaacgtatctctacacttgaagggagcaggaaccaaacaagaaga

SEQ ID NO: 79161 - DNA, 60 bp, Artificial
  Synthetic oligonucleotide
attgataggaatctcaaatgttggattgaacgtatctctacacttgaagggagcaggaac

SEQ ID NO: 79162 - DNA, 60 bp, Artificial
  Synthetic oligonucleotide
aataactgggagccctggtgctccgggagtgaagggattcgggttcctaaatggagacaa

SEQ ID NO: 79163 - DNA, 60 bp, Artificial
  Synthetic oligonucleotide
ccaggggacaagcctagtggtgactgttccaatccaataactgggagccctggtgctccg

SEQ ID NO: 79164 - DNA, 60 bp, Artificial
  Synthetic oligonucleotide
gatgaccgatgggtcagccagtagtcaggcctacacgaaagtaatgtactttcacaaggg

SEQ ID NO: 79165 - DNA, 55 bp, Artificial
  Synthetic oligonucleotide
aagggaataatgataatgctacagcgacagtttattataataggagacttaccac

SEQ ID NO: 79166 - DNA, 60 bp, Artificial
  Synthetic oligonucleotide
ctaggaatatactaaggacccaggaatcagaatgtgtatgccataatggcacatgtgcag

SEQ ID NO: 79167 - DNA, 60 bp, Artificial
  Synthetic oligonucleotide
atctctacacttgaagggagcaggaaccaaacaagaagagaacttgacatgcacaaccat

SEQ ID NO: 79168 - DNA, 60 bp, Artificial
  Synthetic oligonucleotide
ccaaagaaccagaatttagagctcctagctatctgctattaaataaaagtctatgcaatg

SEQ ID NO: 79169 - DNA, 60 bp, Artificial
  Synthetic oligonucleotide
ttagagctcctagctatctgctattaaataaaagtctatgcaatgttgaaggatgggtag

SEQ ID NO: 79170 - DNA, 60 bp, Artificial
  Synthetic oligonucleotide
gcaatgttgaaggatgggtagtggtggccaaagacaatgcaataagatttggagaaagcg

SEQ ID NO: 79171 - DNA, 60 bp, Artificial
  Synthetic oligonucleotide
caaatgggaccatccatgatagaacggcttttcgaggtctcatatctacccacttgggca

SEQ ID NO: 79172 - DNA, 60 bp, Artificial
  Synthetic oligonucleotide
gaccatccatgatagaacggcttttcgaggtctcatatctacccacttgggcaccccacc

SEQ ID NO: 79173 - DNA, 56 bp, Artificial
  Synthetic oligonucleotide
aaaatacccaatgcaggaactgaccccaattccaaaatagtagaacgacaggaaat

SEQ ID NO: 79174 - DNA, 60 bp, Artificial
  Synthetic oligonucleotide
ggtaatgagtgctacaatccatgtttttatgtggagctaattagagggagacctgaggaa

SEQ ID NO: 79175 - DNA, 60 bp, Artificial
  Synthetic oligonucleotide
gggagccctggtgctccgggagtgaagggattcgggttcctaaatggagacaatacatgg

SEQ ID NO: 79176 - DNA, 60 bp, Artificial
  Synthetic oligonucleotide
ggtttcgaaatgttaaaaatacccaatgcaggaactgaccccaattccaaaatagtagaa

SEQ ID NO: 79177 - DNA, 60 bp, Artificial
  Synthetic oligonucleotide
caaattgcttcaaatgagaacatggaaacaatggactccagcactcttgaactgagaagc

SEQ ID NO: 79178 - DNA, 60 bp, Artificial
  Synthetic oligonucleotide
ggaaggttctacatacagatgtgcactgaactcaaactcagcgaccatgaagggagactg

SEQ ID NO: 79179 - DNA, 60 bp, Artificial
  Synthetic oligonucleotide
atgaatccaaatcagaagataataacaattggctccgtctctctgaccattgcaacagta

SEQ ID NO: 79180 - DNA, 60 bp, Artificial
  Synthetic oligonucleotide
atgaatccaaatcagaagataataacaattggctccgtgtctctaaccattgcaacagta

SEQ ID NO: 79181 - DNA, 60 bp, Artificial
  Synthetic oligonucleotide
aggcaaagaagacaaaagatatggaccagcattgagcatcaacgaattgagcaatcttgc

SEQ ID NO: 79182 - DNA, 60 bp, Artificial
  Synthetic oligonucleotide
ttctgggcaaagaagacaaaagatatggaccagcattgagcatcaacgaattgagcaatc

SEQ ID NO: 79183 - DNA, 60 bp, Artificial
  Synthetic oligonucleotide
taagaggatttctaattctgggcaaagaagacaaaagatatggaccagcattgagcatca

SEQ ID NO: 79184 - DNA, 60 bp, Artificial
  Synthetic oligonucleotide
ggcttatcaaaaagaacaatgcatacccaacaataaagaggagttacaataataccaatc

SEQ ID NO: 79185 - DNA, 56 bp, Artificial
  Synthetic oligonucleotide
ggcttatcaaaaagaacaatgcatacccaacaataaagaggagttacaataatacc

SEQ ID NO: 79186 - DNA, 60 bp, Artificial
  Synthetic oligonucleotide
aatgtggtatggcttatcaaaaagagcaatgcatacccaacaataaagaggagttacaac

SEQ ID NO: 79187 - DNA, 60 bp, Artificial
  Synthetic oligonucleotide
ggcttatcaaaaagaacaatgcatacccaacaataaagaggagttacaataataccaacc

SEQ ID NO: 79188 - DNA, 60 bp, Artificial
  Synthetic oligonucleotide
aattgcttacgaaagaatgtgcaacatcctcaaggggaaattccaaacagcagcacaacg

SEQ ID NO: 79189 - DNA, 60 bp, Artificial
  Synthetic oligonucleotide
gaattgcttatgaaagaatgtgcaacatcctcaaggggaaattccaaacagcagcacaac

SEQ ID NO: 79190 - DNA, 60 bp, Artificial
  Synthetic oligonucleotide
gattgcttatgaaagaatgtgcaacatcctcaaggggaaattccaaacagcagcacaacg

SEQ ID NO: 79191 - DNA, 60 bp, Artificial
  Synthetic oligonucleotide
aaacgatttgcagaccaagaactgggtgatgccccattccttgaccggcttcgccgggat

SEQ ID NO: 79192 - DNA, 60 bp, Artificial
  Synthetic oligonucleotide
aaacgatttgcagaccaagaactgggtgatgccccattccttgaccggcttcgccgcgat

SEQ ID NO: 79193 - DNA, 61 bp, Artificial
  Synthetic oligonucleotide
gcaatagatggaatcactaataaggtcaactcaatcattgacaaaatgaacactcagtttg

SEQ ID NO: 79194 - DNA, 60 bp, Artificial
  Synthetic oligonucleotide
ttgagttaatagacaatgaattcactgaggttgaaaagcaaattggcaatgtgataaatt

SEQ ID NO: 79195 - DNA, 60 bp, Artificial
  Synthetic oligonucleotide
ggctacaaagatgtgatactttggtttagcttcggggcatcatgcttcatacttctggcc

SEQ ID NO: 79196 - DNA, 60 bp, Artificial
  Synthetic oligonucleotide
gcagcggctacaaagatgtgatactttggtttagcttcggggcatcatgcttcatacttc

SEQ ID NO: 79197 - DNA, 60 bp, Artificial
  Synthetic oligonucleotide
catggtggctggtctatctttctggatgtgctccaatggatcattgcagtgcagaatttg

SEQ ID NO: 79198 - DNA, 60 bp, Artificial
  Synthetic oligonucleotide
gtcgtattttgtggcacttcaggcacatatggaacaggctcatggcctgatggggcgaat

SEQ ID NO: 79199 - DNA, 60 bp, Artificial
  Synthetic oligonucleotide
tgacccagtcaaactgagcagtggctacaaagatgtgatactttggtttagcttcggggc

SEQ ID NO: 79200 - DNA, 60 bp, Artificial
  Synthetic oligonucleotide
gatgtaatcatggaagttgttttcccaaatgaagtgggagctagaatactaacatcggaa

SEQ ID NO: 79201 - DNA, 60 bp, Artificial
  Synthetic oligonucleotide
gtaatcatggaagttgttttcccaaatgaagtgggagctagaatactaacatcggaatca

SEQ ID NO: 79202 - DNA, 60 bp, Artificial
  Synthetic oligonucleotide
gatgtaatcatggaagttgttttcccaaatgaagtgggagctagaatattgacatcggaa

SEQ ID NO: 79203 - DNA, 50 bp, Artificial
  Synthetic oligonucleotide
gctcaccgtgcccagtgagcggggactgcagcgtagacgctttgtccaaa

SEQ ID NO: 79204 - DNA, 51 bp, Artificial
  Synthetic oligonucleotide
cgctcaccgtgcccagtgagcggggactgcagcgtagacgctttgtccaaa

SEQ ID NO: 79205 - DNA, 60 bp, Artificial
  Synthetic oligonucleotide
cttagcactggcaatcatggtagctggtctatctttctggatgtgctccaatggatcatt

SEQ ID NO: 79206 - DNA, 60 bp, Artificial
  Synthetic oligonucleotide
ccagcatgccatttcacaacatacaccctctcaccattggggaatgccccaaatacgtga

SEQ ID NO: 79207 - DNA, 60 bp, Artificial
  Synthetic oligonucleotide
acggaaacgggactctagcatacttactgacagccagacagcgaccaaaagaatccggat

SEQ ID NO: 79208 - DNA, 58 bp, Artificial
  Synthetic oligonucleotide
caatgggccttgtcttcatatgtgtgaagaatggaaacatgcggtgcactatttgtat

SEQ ID NO: 79209 - DNA, 60 bp, Artificial
  Synthetic oligonucleotide
tgtggacttctgggaacaatcattgggccaccccaatgtgaccaattcctagaattttca

SEQ ID NO: 79210 - DNA, 60 bp, Artificial
  Synthetic oligonucleotide
ggtggacatccttaggcaaaacccaacagaagagcaagctgtggatatatgcaaagcagc

SEQ ID NO: 79211 - DNA, 60 bp, Artificial
  Synthetic oligonucleotide
cctccaaacattgaaaataagggtacatgaaggatatgaggaattcacaatggttggacg

SEQ ID NO: 79212 - DNA, 60 bp, Artificial
  Synthetic oligonucleotide
tacattcgaattcacaagctttttctaccgctacggttttgttgccaatttcagcatgga

SEQ ID NO: 79213 - DNA, 60 bp, Artificial
  Synthetic oligonucleotide
ccagcccatggcccagccaagagcatggaatatgatgctgttgcgactacacactcatgg

SEQ ID NO: 79214 - DNA, 60 bp, Artificial
  Synthetic oligonucleotide
caatcctctgatgactttgccctcatagtgaatgcaccgaatcatgagggaatacaagca

SEQ ID NO: 79215 - DNA, 60 bp, Artificial
  Synthetic oligonucleotide
ggacggactccaatcctctgatgactttgccctcatagtgaatgcaccgaatcatgaggg

SEQ ID NO: 79216 - DNA, 60 bp, Artificial
  Synthetic oligonucleotide
acttctggaggggtgagaatggacgaaaaacaaggattgcttatgagagaatgtgcaaca

SEQ ID NO: 79217 - DNA, 60 bp, Artificial
  Synthetic oligonucleotide
gatcaggatgatcaaacgtgggatcaatgatcgaaacttctggaggggtgagaatggacg

SEQ ID NO: 79218 - DNA, 60 bp, Artificial
  Synthetic oligonucleotide
cctaggaggtctggagccgcaggtgctgcagtcaaaggagttgggacaatggtgatggag

SEQ ID NO: 79219 - DNA, 60 bp, Artificial
  Synthetic oligonucleotide
ctcatctttctggcacggtctgcactcatattgagagggtcagttgctcacaagtcttgc

SEQ ID NO: 79220 - DNA, 60 bp, Artificial
  Synthetic oligonucleotide
ggcgccaagctaataatggtgatgatgcaacggctggtctgactcacatgatgatctggc

SEQ ID NO: 79221 - DNA, 60 bp, Artificial
  Synthetic oligonucleotide
cccagcgcggggaaagatcctaagaaaactggaggacccatatacaagagagtaaatgga

SEQ ID NO: 79222 - DNA, 60 bp, Artificial
  Synthetic oligonucleotide
tggtgctctctgcttttgacgagaggaggaataaatatctggaagaacatcccagcgcgg

SEQ ID NO: 79223 - DNA, 60 bp, Artificial
  Synthetic oligonucleotide
ttcaaatgaaaacatggatactatggaatcaagtactcttgaactgagaagcaggtactg

SEQ ID NO: 79224 - DNA, 60 bp, Artificial
  Synthetic oligonucleotide
cagagggcctctgcaggccaaatcagcatacaacctacgttttctgtgcagagaaacctc

SEQ ID NO: 79225 - DNA, 60 bp, Artificial
  Synthetic oligonucleotide
atggggatcgccagaatgcaactgaaatcagagcatccgtcggaaaaatgattgatggaa

SEQ ID NO: 79226 - DNA, 60 bp, Artificial
  Synthetic oligonucleotide
ctcggacgaaaaggcagcgaacccgatcgtgccctcctttgacatgagtaatgaaggatc

SEQ ID NO: 79227 - DNA, 60 bp, Artificial
  Synthetic oligonucleotide
tttattcaacagtggcgagttccctagcactggcaatcatgatagctggtctatctttct

SEQ ID NO: 79228 - DNA, 60 bp, Artificial
  Synthetic oligonucleotide
gggaaagttgttcacattagcccattgtcgggaagtgctcagcatatagaggaatgttcc

SEQ ID NO: 79229 - DNA, 60 bp, Artificial
  Synthetic oligonucleotide
cttgtcttcatatgtgtgaagaatggaaacatgcggtgcactatttgtatataagtttgg

SEQ ID NO: 79230 - DNA, 60 bp, Artificial
  Synthetic oligonucleotide
taagtagcggctacaaagatgtgatactttggtttagcttcggggcatcatgtttcacac

SEQ ID NO: 79231 - DNA, 60 bp, Artificial
  Synthetic oligonucleotide
taatcactcactgagtgacatcaacatcatggcgtctcaaggcaccaaacgatcttatga

SEQ ID NO: 79232 - DNA, 60 bp, Artificial
  Synthetic oligonucleotide
caaacagcagcacaacgggcaatgatggaccaagtgagggagagccgcaatcctggaaat

SEQ ID NO: 79233 - DNA, 60 bp, Artificial
  Synthetic oligonucleotide
aggaccttctacaggggggatacctgaatctatgagggaagaatatcggcaggaacagca

SEQ ID NO: 79234 - DNA, 60 bp, Artificial
  Synthetic oligonucleotide
cagattgcttcaaatgaaaacatggagacaatggactccagcactcttgaattgaggagc

SEQ ID NO: 79235 - DNA, 60 bp, Artificial
  Synthetic oligonucleotide
ccaataaagtaaactcaatcattgacaaaatgaacactcaattcgaagccgttgggaaag

SEQ ID NO: 79236 - DNA, 60 bp, Artificial
  Synthetic oligonucleotide
cgctcttggagatgtgccatagcacacaaattggcgggataagaatggtggacatcctta

SEQ ID NO: 79237 - DNA, 60 bp, Artificial
  Synthetic oligonucleotide
cagcatcacaacgggcaatgatggaccaagtgagggaaagccggaatcctgggaatgctg

SEQ ID NO: 79238 - DNA, 60 bp, Artificial
  Synthetic oligonucleotide
cagctatacaacgggcaatgatggaccaagtgagggaaagccggaatcctgggaatgctg

SEQ ID NO: 79239 - DNA, 60 bp, Artificial
  Synthetic oligonucleotide
ttgtgttcacgctcaccgtgcccagtgagcggggactgcagcgtagacgatttgtccaaa

SEQ ID NO: 79240 - DNA, 60 bp, Artificial
  Synthetic oligonucleotide
tttgctgctgaataaaagtctatgcagtgtggaaggatgggtcgtgatagccaaagacaa

SEQ ID NO: 79241 - DNA, 60 bp, Artificial
  Synthetic oligonucleotide
gcaatgttgaaggatgggtcgtgatagccaaagacaacgcagtaagatttggagaaagcg

SEQ ID NO: 79242 - DNA, 60 bp, Artificial
  Synthetic oligonucleotide
ggcaatcatggtagctggtctatctttctggatgtgctccaatggatcattgcagtgcag

SEQ ID NO: 79243 - DNA, 60 bp, Artificial
  Synthetic oligonucleotide
ggggccttgttttcatgtgtgtgaagaatggaaacatgcggtgcactatttgtatataag

SEQ ID NO: 79244 - DNA, 60 bp, Artificial
  Synthetic oligonucleotide
atctcatctttctggcacggtctgcactcatattgagagggtcagttgctcacaagtctt

SEQ ID NO: 79245 - DNA, 60 bp, Artificial
  Synthetic oligonucleotide
tggagatgatccctgaaagaaatgagcaaggtcagactctctggagcagaacaaatgatg

SEQ ID NO: 79246 - DNA, 60 bp, Artificial
  Synthetic oligonucleotide
cgatcatagtggcaatggtgttctcacaagaggattgcatgataaaagcagtacgaggtg

SEQ ID NO: 79247 - DNA, 55 bp, Artificial
  Synthetic oligonucleotide
tgagggattgtagtgtagctggatggctcctcggaaaccccatgtgtgacgaatt

SEQ ID NO: 79248 - DNA, 60 bp, Artificial
  Synthetic oligonucleotide
gatgacagactcagaagagaccaaaaggcattaaagggaagaggcagcacacttggactc

SEQ ID NO: 79249 - DNA, 60 bp, Artificial
  Synthetic oligonucleotide
cttgccattgcaatgggccttgtcttcatatgtgtgaagaatggaaacatgcggtgcact

SEQ ID NO: 79250 - DNA, 60 bp, Artificial
  Synthetic oligonucleotide
ttcaatctattcaacagtagcgagttccctggcactggcaatcatggtagctggtctatc

SEQ ID NO: 79251 - DNA, 60 bp, Artificial
  Synthetic oligonucleotide
caatctattcaacagtagcgagttccctggcactggcaatcatggtagctggtctatctt

SEQ ID NO: 79252 - DNA, 60 bp, Artificial
  Synthetic oligonucleotide
cctatgtggaagcccattcccagttgggcctggttccttccccgatggggcacaaatcca

SEQ ID NO: 79253 - DNA, 60 bp, Artificial
  Synthetic oligonucleotide
agagaatgtgcaacatcctcaaaggaaaattccaaacagcagcacaacgagcaatgatgg

SEQ ID NO: 79254 - DNA, 60 bp, Artificial
  Synthetic oligonucleotide
ccctatgtggaagcccattcccagttgggtccggttccttccctgatggggcacaaatcc

SEQ ID NO: 79255 - DNA, 60 bp, Artificial
  Synthetic oligonucleotide
gaagatcaggatcttcattctatgcagaaatgaaatggcttctgtcaaatacagacaatg

SEQ ID NO: 79256 - DNA, 60 bp, Artificial
  Synthetic oligonucleotide
gatctccatgattcaaatgtcaagaacttatacgataaggtccgactccagctgagagac

SEQ ID NO: 79257 - DNA, 60 bp, Artificial
  Synthetic oligonucleotide
gatttccatgattcaaatgtcaagaacttatacgataaggtccgactccagctgagagac

SEQ ID NO: 79258 - DNA, 60 bp, Artificial
  Synthetic oligonucleotide
gaactcaggagtcagaatgtgtttgcatcaacggaacttgcacagtagtaatgactgatg

SEQ ID NO: 79259 - DNA, 60 bp, Artificial
  Synthetic oligonucleotide
ccacaggtgtgacgataaatgcatggaaagtgtgagaaatggaacgtatgactatccaca

SEQ ID NO: 79260 - DNA, 60 bp, Artificial
  Synthetic oligonucleotide
ttcatacaggaggccagttggaatctccagcatggtggaggccatggtgtctagggcccg

SEQ ID NO: 79261 - DNA, 60 bp, Artificial
  Synthetic oligonucleotide
gactatgaagggagactgatccagaacagcataacaatagagagaatggtcctctctgca

SEQ ID NO: 79262 - DNA, 60 bp, Artificial
  Synthetic oligonucleotide
tgactatgaagggagactgatccagaacagcataacaatagagagaatggtcctctctgc

SEQ ID NO: 79263 - DNA, 60 bp, Artificial
  Synthetic oligonucleotide
gagactagggtatggtggacctcaaacagtattgtcgtattttgcggcacttcaggcacc

SEQ ID NO: 79264 - DNA, 60 bp, Artificial
  Synthetic oligonucleotide
cgaaagaactctggatttccatgattcaaatgtcaagaacttatacgataaggtccgact

SEQ ID NO: 79265 - DNA, 60 bp, Artificial
  Synthetic oligonucleotide
acgaaagaactctggatttccatgattcaaatgtcaagaacttatacgataaggtccgac

SEQ ID NO: 79266 - DNA, 60 bp, Artificial
  Synthetic oligonucleotide
gacaatggagatgatgtttggatgggaagaacaatcagtaaagattctcgctcaggctat

SEQ ID NO: 79267 - DNA, 60 bp, Artificial
  Synthetic oligonucleotide
ggatgtgctccaatggatcattgcagtgcagaatttgcatctaaaattgtgagttcagat

SEQ ID NO: 79268 - DNA, 54 bp, Artificial
  Synthetic oligonucleotide
aaaattgtccatatcagcccattgtcaggaagtgctcagcatatagaggaatgt

SEQ ID NO: 79269 - DNA, 60 bp, Artificial
  Synthetic oligonucleotide
tggggacctcatcggaggacttgaatggaatgataacacagttagagtctctgaaactct

SEQ ID NO: 79270 - DNA, 60 bp, Artificial
  Synthetic oligonucleotide
agtgcctgattaatgatccctgggttttgcttaatgcgtcttggttcaactccttcctta

SEQ ID NO: 79271 - DNA, 57 bp, Artificial
  Synthetic oligonucleotide
gccttgtcttcatgtgtgtgaagaatggaaacatgcggtgcactatttgtatataag

SEQ ID NO: 79272 - DNA, 60 bp, Artificial
  Synthetic oligonucleotide
ggggatatgctcctgaggactgcaataggccaagtgtcaaggcccatgttcctgtacgtt

SEQ ID NO: 79273 - DNA, 60 bp, Artificial
  Synthetic oligonucleotide
ggagatatgctcctgaggactgcaataggccaagtgtcaaggcccatgttcctgtacgtt

SEQ ID NO: 79274 - DNA, 60 bp, Artificial
  Synthetic oligonucleotide
ggagatatgctcctgaggactgcaataggccaagtgtcaaggcccatgttcctgtatgtt

SEQ ID NO: 79275 - DNA, 60 bp, Artificial
  Synthetic oligonucleotide
catggtggaggccatggtgtctagggcccgaattgatgcacggattgacttcgaatctgg

SEQ ID NO: 79276 - DNA, 60 bp, Artificial
  Synthetic oligonucleotide
gtatggccagtattaggaacaacacttatgatcacagcaaatacagagaagaagcaatgc

SEQ ID NO: 79277 - DNA, 60 bp, Artificial
  Synthetic oligonucleotide
tgatagaaatgcaactgctagtttcatttatgacgggaggcttgctgacagcattggttc

SEQ ID NO: 79278 - DNA, 60 bp, Artificial
  Synthetic oligonucleotide
tcatgcttcatacttctggccattgcaatgggccttgtcttcatgtgtgtgaagaatgga

SEQ ID NO: 79279 - DNA, 60 bp, Artificial
  Synthetic oligonucleotide
aaaatggaagacgggtttctagatgtttggacttataatgctgaacttctggttctcatg

SEQ ID NO: 79280 - DNA, 60 bp, Artificial
  Synthetic oligonucleotide
agaaaatggaagacgggtttctagatgtttggacttataatgctgaacttctggttctca

SEQ ID NO: 79281 - DNA, 60 bp, Artificial
  Synthetic oligonucleotide
caaattgcctcaaatgagaacatggaaacaatggactccagtactcttgaactgaggagc

SEQ ID NO: 79282 - DNA, 60 bp, Artificial
  Synthetic oligonucleotide
acaactgtccaccagaggagttcagattgcatcaaatgagaacatggaaacaatggactc

SEQ ID NO: 79283 - DNA, 60 bp, Artificial
  Synthetic oligonucleotide
caaattgcctcaaatgagaacatggaaacaatggactccaacactcttgaactgaggagt

SEQ ID NO: 79284 - DNA, 60 bp, Artificial
  Synthetic oligonucleotide
gccacagtacacaaattggcgggataaggatggtggacatccttagacaaaacccaacag

SEQ ID NO: 79285 - DNA, 60 bp, Artificial
  Synthetic oligonucleotide
aaaatgcaattggggtcctcatcggaggacttaaatggaatgataacacagttcgagtct

SEQ ID NO: 79286 - DNA, 60 bp, Artificial
  Synthetic oligonucleotide
tggtctgtctttttggatgtgttccaatggatcattgcagtgcagaatttgcatctagga

SEQ ID NO: 79287 - DNA, 60 bp, Artificial
  Synthetic oligonucleotide
cagatggaaactggtggagaacgccagaatgccactgagatcagagcatctgttgggaga

SEQ ID NO: 79288 - DNA, 60 bp, Artificial
  Synthetic oligonucleotide
ccttgaattctaccacaaatgtgacaatgaatgcatggaaagtgtgagaaatggaacgta

SEQ ID NO: 79289 - DNA, 60 bp, Artificial
  Synthetic oligonucleotide
ctcaaggcaccaaacgatcttatgaacagatggaaactggtggagaacgccagaatgcta

SEQ ID NO: 79290 - DNA, 60 bp, Artificial
  Synthetic oligonucleotide
gtggcgagttccctagcactggcaatcatggtagctggtctatctttctggatgtgctcc

SEQ ID NO: 79291 - DNA, 60 bp, Artificial
  Synthetic oligonucleotide
ttgcatcagtgggacttgcgcagtagtaatgactgatggaagtgcatcaggaaaggccga

SEQ ID NO: 79292 - DNA, 60 bp, Artificial
  Synthetic oligonucleotide
gcatcagtgggacttgcgcagtagtaatgactgatggaagtgcatcaggaaaggccgata

SEQ ID NO: 79293 - DNA, 60 bp, Artificial
  Synthetic oligonucleotide
ttgcatcagtgggacttgtgcagtagtaatgactgatggaagtgcatcaggaaaggccga

SEQ ID NO: 79294 - DNA, 60 bp, Artificial
  Synthetic oligonucleotide
gcatcagtgggacttgtgcagtagtaatgactgatggaagtgcatcaggaaaggccgata

SEQ ID NO: 79295 - DNA, 60 bp, Artificial
  Synthetic oligonucleotide
cccattcgagagagcaaccattatggcggcatttacaggaaacactgaaggcagaacttc

SEQ ID NO: 79296 - DNA, 60 bp, Artificial
  Synthetic oligonucleotide
cccgttcgagagagcaaccattatggcggcatttacaggaaacactgaaggcaggacttc

SEQ ID NO: 79297 - DNA, 60 bp, Artificial
  Synthetic oligonucleotide
cctcccgttcgagagagcaaccattatggcggcatttacaggaaacactgaaggcagaac

SEQ ID NO: 79298 - DNA, 60 bp, Artificial
  Synthetic oligonucleotide
gggagattctacatacagatgtgcactgaactcaaactcagtgactatgaggggagactg

SEQ ID NO: 79299 - DNA, 60 bp, Artificial
  Synthetic oligonucleotide
ggtagattctacatacagatgtgcactgaactcaaactcagtgactatgaggggagactg

SEQ ID NO: 79300 - DNA, 60 bp, Artificial
  Synthetic oligonucleotide
cacaaatgtgatgacgactgtatggccagtattagaaacaacacctatgatcacagcaag

SEQ ID NO: 79301 - DNA, 60 bp, Artificial
  Synthetic oligonucleotide
gcagaacatctgacatgagaactgagatcataagaatgatggaaagtgccagaccagaag

SEQ ID NO: 79302 - DNA, 60 bp, Artificial
  Synthetic oligonucleotide
ttccagaggtctgcttgaagtgggaactaatggatgaagattaccagggcaggctgtgta

SEQ ID NO: 79303 - DNA, 60 bp, Artificial
  Synthetic oligonucleotide
catcccagaggtctgcttgaagtgggaactaatggatgaagattaccagggcaggctgtg

SEQ ID NO: 79304 - DNA, 60 bp, Artificial
  Synthetic oligonucleotide
gaatctccacatcccagaggtctgcttgaagtgggaactaatggatgaagactacaaggg

SEQ ID NO: 79305 - DNA, 60 bp, Artificial
  Synthetic oligonucleotide
aaggtccgactccagctgagagacaatgcaaaagaactaggcaatgggtgttttgagttc

SEQ ID NO: 79306 - DNA, 56 bp, Artificial
  Synthetic oligonucleotide
aaaacttatatgataaggtccgactccagctgagagacaatgcaaaagaactgggc

SEQ ID NO: 79307 - DNA, 60 bp, Artificial
  Synthetic oligonucleotide
ggtccgactccagctgagagacaatgcaaaagaactaggcaatgggtgttttgagttcta

SEQ ID NO: 79308 - DNA, 60 bp, Artificial
  Synthetic oligonucleotide
tgtggacttctgggaacaatcactgggcccccccaatgtgaccaattcctagaattttca

SEQ ID NO: 79309 - DNA, 60 bp, Artificial
  Synthetic oligonucleotide
tgtggatttctgggaacaatcactgggcccccccaatgtgaccaattcctagaattttca

SEQ ID NO: 79310 - DNA, 60 bp, Artificial
  Synthetic oligonucleotide
ctggtctgtctttttggatgtgctccaatggatcattgcagtgcagagtttgcatctagg

SEQ ID NO: 79311 - DNA, 60 bp, Artificial
  Synthetic oligonucleotide
caggaagtgctcagcatatagaggaatgttcctgttatcctcgatatcccgacgtcaggt

SEQ ID NO: 79312 - DNA, 60 bp, Artificial
  Synthetic oligonucleotide
gacagtatcggttcatggtctcaaaatatcctcagaactcaggagtcagagtgcgtttgc

SEQ ID NO: 79313 - DNA, 60 bp, Artificial
  Synthetic oligonucleotide
gacagtataggttcatggtctcaaaatatcctcagaactcaggagtcagagtgcgtttgc

SEQ ID NO: 79314 - DNA, 60 bp, Artificial
  Synthetic oligonucleotide
cagtattggttcatggtctcaaaatatcctcagaactcaggagtcagagtgcgtttgcat

SEQ ID NO: 79315 - DNA, 60 bp, Artificial
  Synthetic oligonucleotide
acagtatcggttcatggtctcaaaatatcctcagaactcaggagtcagagtgcgtttgca

SEQ ID NO: 79316 - DNA, 60 bp, Artificial
  Synthetic oligonucleotide
caaggggccttgttttcatgtgtgtgaagaatggaaacatgcggtgcactatttgtatat

SEQ ID NO: 79317 - DNA, 60 bp, Artificial
  Synthetic oligonucleotide
atccctaaggggaagaggcagcactcttggtctggacatcgagacagctactcgtgcggg

SEQ ID NO: 79318 - DNA, 60 bp, Artificial
  Synthetic oligonucleotide
ccaaaaagatgctaaggtgctttttcagaactggggaattgaacccattgacaatgtgat

SEQ ID NO: 79319 - DNA, 57 bp, Artificial
  Synthetic oligonucleotide
tactcaacagtggcgagttccctagcactggcaatcatgatagctggtctatctttt

SEQ ID NO: 79320 - DNA, 60 bp, Artificial
  Synthetic oligonucleotide
tactcaacagtggcgagttccctagcactggcaatcatgatagctggtctatctttttgg

SEQ ID NO: 79321 - DNA, 60 bp, Artificial
  Synthetic oligonucleotide
ttattcaacagtggcgagttccctagcactggcaatcatgatagctggtctatctttctg

SEQ ID NO: 79322 - DNA, 60 bp, Artificial
  Synthetic oligonucleotide
ttcaactccttcctcacacatgcactgaaatagttgtggcaatgctactatttgctatcc

SEQ ID NO: 79323 - DNA, 60 bp, Artificial
  Synthetic oligonucleotide
tgcccaagacatactggaaaagacacacaatgggaagctctgcagtctaaatggagtgaa

SEQ ID NO: 79324 - DNA, 58 bp, Artificial
  Synthetic oligonucleotide
tcaaagccgcagtgtcaaatcacaggatttgcacctttctctaaggacaattcaattc

SEQ ID NO: 79325 - DNA, 60 bp, Artificial
  Synthetic oligonucleotide
gggaaaattgttcacattagtccattgtcagggagtgctcaacacatagaggagtgttcc

SEQ ID NO: 79326 - DNA, 60 bp, Artificial
  Synthetic oligonucleotide
ctcaaaatattctcagaacacaggagtcggaatgtgtttgtatcaacggaacttgcacag

SEQ ID NO: 79327 - DNA, 60 bp, Artificial
  Synthetic oligonucleotide
tgaatgcaattcccctgcaatcaaccaagtgaccccatgtgagccaatcataatagagag

SEQ ID NO: 79328 - DNA, 60 bp, Artificial
  Synthetic oligonucleotide
tggtccggttactctggtatcttctctgttgagagcaaaagctgcgtcaataggtgtttc

SEQ ID NO: 79329 - DNA, 60 bp, Artificial
  Synthetic oligonucleotide
ggcacaatacacgatagaatccctcatcggacccttttgatgaacgaattgggtgttccg

SEQ ID NO: 79330 - DNA, 60 bp, Artificial
  Synthetic oligonucleotide
ccatttaggaaccaaacaagtatgcatagcatggtctagttcaagctgccacgatggaag

SEQ ID NO: 79331 - DNA, 60 bp, Artificial
  Synthetic oligonucleotide
gcaactgctagtttcatttatgacgggaggcttgctgacagcattggttcgtggtctcaa

SEQ ID NO: 79332 - DNA, 60 bp, Artificial
  Synthetic oligonucleotide
gttggtgacacacccagaaatgacgacagctctagcagtagcaattgcagagatcctaat

SEQ ID NO: 79333 - DNA, 60 bp, Artificial
  Synthetic oligonucleotide
agaacaattagcaaagattcacgttcaggttatgagaccttcaaggtcattggtggctgg

SEQ ID NO: 79334 - DNA, 60 bp, Artificial
  Synthetic oligonucleotide
ttatcagtttgcactcgggcaggggaccacgctagacaacaaacattcaaatggcacaat

SEQ ID NO: 79335 - DNA, 60 bp, Artificial
  Synthetic oligonucleotide
gtgtctgcagagacaactggaaaggctctaacaggcccattatagacatagatatggtag

SEQ ID NO: 79336 - DNA, 60 bp, Artificial
  Synthetic oligonucleotide
gctcaacacatagaggagtgttcctgttaccctcgataccctgatgtcaggtgtgtctgc

SEQ ID NO: 79337 - DNA, 60 bp, Artificial
  Synthetic oligonucleotide
caaaagctgcgtcaataggtgtttctatgtggagttgataagggggagaccacaggagac

SEQ ID NO: 79338 - DNA, 60 bp, Artificial
  Synthetic oligonucleotide
ccaccatagagagagagatttgccctgaaatagcggaatatagaaattggtcaaagccgc

SEQ ID NO: 79339 - DNA, 60 bp, Artificial
  Synthetic oligonucleotide
tcgatctattcaactgtggcgagttccctagcactggcaatcatggtagctggtctgtct

SEQ ID NO: 79340 - DNA, 60 bp, Artificial
  Synthetic oligonucleotide
cgatctattcaactgtggcgagttccctagcactggcaatcatggtagctggtctgtctt

SEQ ID NO: 79341 - DNA, 60 bp, Artificial
  Synthetic oligonucleotide
agaacaacaacgaccaagacaaaaattggacgtgcacaagtataacacagaacaacacga

SEQ ID NO: 79342 - DNA, 60 bp, Artificial
  Synthetic oligonucleotide
catgtgtagtagtaatgaccgatggatcagcaagtagccaggcatatacaaaggttttgt

SEQ ID NO: 79343 - DNA, 60 bp, Artificial
  Synthetic oligonucleotide
gacctgtgtagtagtaatgaccgatggatcagcaagtagccaggcatatacaaagatttt

SEQ ID NO: 79344 - DNA, 60 bp, Artificial
  Synthetic oligonucleotide
aacatgtgtagtagtaatgaccgatggatcagcaagtagccaggcatatacaaaggtttt

SEQ ID NO: 79345 - DNA, 60 bp, Artificial
  Synthetic oligonucleotide
cgacttcctttgtgtgggatggtccagcactagttgccatgacggcatcggacgaatgac

SEQ ID NO: 79346 - DNA, 60 bp, Artificial
  Synthetic oligonucleotide
gactgcaaagcaaaattacctaatgctgaacaaaagcttatgcaaagttgaaggatgggt

SEQ ID NO: 79347 - DNA, 60 bp, Artificial
  Synthetic oligonucleotide
atactactgtcatcaataaagaaacagagactgcgaagcagaattatctaatgctgaaca

SEQ ID NO: 79348 - DNA, 60 bp, Artificial
  Synthetic oligonucleotide
aaaggtaacttgtgtatgcagggacaactggcaaggggctaacagaccagtgatcgaaat

SEQ ID NO: 79349 - DNA, 60 bp, Artificial
  Synthetic oligonucleotide
cctgtgtagtagtaatgaccgatggatcagcaagtagccaggcatatacaaagattttgt

SEQ ID NO: 79350 - DNA, 60 bp, Artificial
  Synthetic oligonucleotide
aataggaatatccaatgtggggctgaatgtctcactacacttaaagaacaacaatgacca

SEQ ID NO: 79351 - DNA, 60 bp, Artificial
  Synthetic oligonucleotide
cctactgataggaatatccaatgtggggctgaatgtctcattacacttaaagaacaacaa

SEQ ID NO: 79352 - DNA, 60 bp, Artificial
  Synthetic oligonucleotide
acacatatgtcaacaatactactgtcatcaataaagaaacagagactgcgaagcagaatt

SEQ ID NO: 79353 - DNA, 60 bp, Artificial
  Synthetic oligonucleotide
gggacaactggcaaggggctaacagaccagtgattgaaatagatatgaatgccatggagc

SEQ ID NO: 79354 - DNA, 60 bp, Artificial
  Synthetic oligonucleotide
gtggacgagcaacagcttagttgcactatgtggaagcccagtcccagttgggtccggttc

SEQ ID NO: 79355 - DNA, 60 bp, Artificial
  Synthetic oligonucleotide
tatgtttggtggacgagcaacagcttagttgcactatgtggaagcccagtcccagttggg

SEQ ID NO: 79356 - DNA, 60 bp, Artificial
  Synthetic oligonucleotide
agcaacagcttagttgcactatgtggaagcccagtcccagttgggtccggttccttcccc

SEQ ID NO: 79357 - DNA, 60 bp, Artificial
  Synthetic oligonucleotide
gtatgcagggacaactggcaaggggctaacagaccagtgatcgaaatagatatgagtgcc

SEQ ID NO: 79358 - DNA, 60 bp, Artificial
  Synthetic oligonucleotide
tgtgtgtgcagggacaactggcaaggggctaacagaccagtgattgaaatagatatgaat

SEQ ID NO: 79359 - DNA, 60 bp, Artificial
  Synthetic oligonucleotide
ggtagtggtagctaaggacaatgctataagatttggtgaaagtgaacaaataatagtgac

SEQ ID NO: 79360 - DNA, 60 bp, Artificial
  Synthetic oligonucleotide
gctaaggacaatgctataagatttggtgaaagtgaacaaataatagtgacaagggagcca

SEQ ID NO: 79361 - DNA, 60 bp, Artificial
  Synthetic oligonucleotide
agatttggtgaaagtgaacaaataatagtgacaagggagccgtatgtgtcatgtgaccca

SEQ ID NO: 79362 - DNA, 60 bp, Artificial
  Synthetic oligonucleotide
tattgttagcaatagcgacttcctttgtgtgggatggtccagcactagttgccatgacgg

SEQ ID NO: 79363 - DNA, 60 bp, Artificial
  Synthetic oligonucleotide
aagcagaattatctaatgctgaacaaaagcttatgcaaagttgaaggatgggtagtggta

SEQ ID NO: 79364 - DNA, 60 bp, Artificial
  Synthetic oligonucleotide
gcttatgcaaagttgaaggatgggtagtggtagctaaggacaatgctataagatttggtg

SEQ ID NO: 79365 - DNA, 60 bp, Artificial
  Synthetic oligonucleotide
gcaaagttgaaggatgggtagtggtagctaaggacaatgctataagatttggtgaaagtg

SEQ ID NO: 79366 - DNA, 60 bp, Artificial
  Synthetic oligonucleotide
tatagttagcaatagtgactttctttgtgtgggatggtccagcactagttgccatgacgg

SEQ ID NO: 79367 - DNA, 60 bp, Artificial
  Synthetic oligonucleotide
tgactttctttgtgtgggatggtccagcactagttgccatgacggcatcggacgaatgac

SEQ ID NO: 79368 - DNA, 60 bp, Artificial
  Synthetic oligonucleotide
gagactgtaacaacccgatcactgggagtccgggagcccctggggtcaaaggattcggtt

SEQ ID NO: 79369 - DNA, 60 bp, Artificial
  Synthetic oligonucleotide
tgagtgccatggagcatacaagtcagtatctgtgtacaggggtcctcacagacacgagca

SEQ ID NO: 79370 - DNA, 60 bp, Artificial
  Synthetic oligonucleotide
tgccatggagcatacaagtcagtatctgtgcacaggggtcctcacagacacgagcagacc

SEQ ID NO: 79371 - DNA, 60 bp, Artificial
  Synthetic oligonucleotide
ggagtggttttgagatgttgaagatacctaatgctgagacagatccaaattctagaatca

SEQ ID NO: 79372 - DNA, 60 bp, Artificial
  Synthetic oligonucleotide
ggagtggttttgagatgttgaagatacctaatgctgagacagatccaaattccagaatca

SEQ ID NO: 79373 - DNA, 60 bp, Artificial
  Synthetic oligonucleotide
ccgatcactgggagtccgggagcccctggggtcaaaggattcggtttcctagatagtagc

SEQ ID NO: 79374 - DNA, 60 bp, Artificial
  Synthetic oligonucleotide
gatgttgaagatacctaatgctgagacagatccaaattctagaatcactgaaaggcaaga

SEQ ID NO: 79375 - DNA, 60 bp, Artificial
  Synthetic oligonucleotide
gatgttgaagatacctaatgctgagacagatccaaattccagaatcactgaaaggcagga

SEQ ID NO: 79376 - DNA, 60 bp, Artificial
  Synthetic oligonucleotide
agatatgaatgccatggagcatacaagtcagtatctgtgcacaggggtcctcacagacac

SEQ ID NO: 79377 - DNA, 59 bp, Artificial
  Synthetic oligonucleotide
tttggcatgtccgcaaacgatttgcagaccaagaactgggtgatgccccattccttgat

SEQ ID NO: 79378 - DNA, 60 bp, Artificial
  Synthetic oligonucleotide
tttggcatgtccgcaaacgatttgcagaccaagaactgggtgatgccccattccttgatc

SEQ ID NO: 79379 - DNA, 60 bp, Artificial
  Synthetic oligonucleotide
ttcaatctattcaacagtagcgagttccctagcactggcaatcatggtagctggtctatc

SEQ ID NO: 79380 - DNA, 60 bp, Artificial
  Synthetic oligonucleotide
caatctattcaacagtagcgagttccctagcactggcaatcatggtagctggtctatctt

SEQ ID NO: 79381 - DNA, 60 bp, Artificial
  Synthetic oligonucleotide
caatctattcaacagtagtgagttccctagcactggcaatcatggtagctggtctatctt

SEQ ID NO: 79382 - DNA, 60 bp, Artificial
  Synthetic oligonucleotide
tttaattgccctatgtggaagcccattcccagttgggtccggttccttccccgatggggc

SEQ ID NO: 79383 - DNA, 60 bp, Artificial
  Synthetic oligonucleotide
tctaattgccctatgtggaagcccattcccagttgggtccggttccttccccgatggggc

SEQ ID NO: 79384 - DNA, 60 bp, Artificial
  Synthetic oligonucleotide
cctatgtggaagcccattcccagttgggtccggttccttccccgatggggcacaaatcca

SEQ ID NO: 79385 - DNA, 60 bp, Artificial
  Synthetic oligonucleotide
gtcaaactaagcagcggctacaaagatgtgatactttggtttagcttcggggcatcatgt

SEQ ID NO: 79386 - DNA, 60 bp, Artificial
  Synthetic oligonucleotide
agtgagaaccaatggagagactagcgcatgtagaaggtcaagatcttccttttatgcaga

SEQ ID NO: 79387 - DNA, 53 bp, Artificial
  Synthetic oligonucleotide
ttaatgctagcaacaggaatgaaaaatgttcctgaaaattctacacacaaaca

SEQ ID NO: 79388 - DNA, 60 bp, Artificial
  Synthetic oligonucleotide
cagagatgaacaaattatatgaaaaggtaagaagacaactgagagaaaatgctgaggaag

SEQ ID NO: 79389 - DNA, 60 bp, Artificial
  Synthetic oligonucleotide
ggagaatatgggattcacatataccggagtgagaaccgatggagagactagcgcctgtag

SEQ ID NO: 79390 - DNA, 60 bp, Artificial
  Synthetic oligonucleotide
ggagaatatgggattcacatataccggagtgagaaccaatggagagactagcgcctgtag

SEQ ID NO: 79391 - DNA, 60 bp, Artificial
  Synthetic oligonucleotide
ggagaatatgggattcacatataccggagtgagaaccaatggagagactagcgcatgtag

SEQ ID NO: 79392 - DNA, 60 bp, Artificial
  Synthetic oligonucleotide
agtgagaaccaatggagagactagcgcctgtagaaggtcaagatcttccttttatgcaga

SEQ ID NO: 79393 - DNA, 60 bp, Artificial
  Synthetic oligonucleotide
cgtgcagataaaatctgcctaggacatcatgctgtgtctaatggaaccaaagtagacacc

SEQ ID NO: 79394 - DNA, 60 bp, Artificial
  Synthetic oligonucleotide
gtgcagataaaatctgcctaggacatcatgctgtgtctaatggaaccaaagtagacaccc

SEQ ID NO: 79395 - DNA, 60 bp, Artificial
  Synthetic oligonucleotide
aaatgaacactcaaattctaatattagccacttcggcattcctctgtgtacgtgcagata

SEQ ID NO: 79396 - DNA, 60 bp, Artificial
  Synthetic oligonucleotide
atgaacactcaaattctaatattagccacttcggcattcctctgtgtacgtgcagataaa

SEQ ID NO: 79397 - DNA, 60 bp, Artificial
  Synthetic oligonucleotide
ttcggcattcctctgtgtacgtgcagataaaatctgcctaggacatcatgctgtgtctaa

SEQ ID NO: 79398 - DNA, 60 bp, Artificial
  Synthetic oligonucleotide
ggcattcctctgtgtacgtgcagataaaatctgcctaggacatcatgctgtgtctaatgg

SEQ ID NO: 79399 - DNA, 60 bp, Artificial
  Synthetic oligonucleotide
ttctaatattagccacttcggcattcctctgtgtacgtgcagataaaatctgcctaggac

SEQ ID NO: 79400 - DNA, 60 bp, Artificial
  Synthetic oligonucleotide
ttctaatattagccatttcggcattcctctgtgtacgtgcagataaaatctgcctaggac

SEQ ID NO: 79401 - DNA, 55 bp, Artificial
  Synthetic oligonucleotide
aaaagagaatatgggattcacatataccggagtgagaaccaatggagagactagc

SEQ ID NO: 79402 - DNA, 60 bp, Artificial
  Synthetic oligonucleotide
gaattaaaaaggagaatatgggattcacatataccggagtgagaaccaatggagagacta

SEQ ID NO: 79403 - DNA, 60 bp, Artificial
  Synthetic oligonucleotide
tagggaccgttattggtcctccccaatgtgaccaatttcttgaattctctgctaatttaa

SEQ ID NO: 79404 - DNA, 60 bp, Artificial
  Synthetic oligonucleotide
tagggaccattattggtcccccccaatgcgaccaatttcttgaattctctgctaatttaa

SEQ ID NO: 79405 - DNA, 60 bp, Artificial
  Synthetic oligonucleotide
tagggaccactattggtcccccccaatgcgaccaatttcttgaattctctgctaatttaa

SEQ ID NO: 79406 - DNA, 60 bp, Artificial
  Synthetic oligonucleotide
ctgcctaggacatcatgctgtgtctaatggaaccaaagtagacacccttactgaaaaggg

SEQ ID NO: 79407 - DNA, 60 bp, Artificial
  Synthetic oligonucleotide
gaattaaaaaggagaatatgggattcacatataccggagtgagaaccgatggagagacta

SEQ ID NO: 79408 - DNA, 60 bp, Artificial
  Synthetic oligonucleotide
agaaaatccggaggaattaaaaaagagaatatgggattcacatataccggagtgagaacc

SEQ ID NO: 79409 - DNA, 60 bp, Artificial
  Synthetic oligonucleotide
caaatttgacaatgaagaaacattgagacaaatactcagaaaatccggaggaattaaaaa

SEQ ID NO: 79410 - DNA, 60 bp, Artificial
  Synthetic oligonucleotide
ggaccgttattggtcctccccaatgtgaccaatttcttgaattctctgctaatttaatag

SEQ ID NO: 79411 - DNA, 60 bp, Artificial
  Synthetic oligonucleotide
tctaattgccctatgtggaagcccattcccagttgggcctggttccttccccgatggggc

SEQ ID NO: 79412 - DNA, 60 bp, Artificial
  Synthetic oligonucleotide
agtctaattgccctatgtggaagcccattcccagttgggtctggttccttccccgatggg

SEQ ID NO: 79413 - DNA, 60 bp, Artificial
  Synthetic oligonucleotide
tctaattgccctatgtggaagcccattcccagttgggtccggttccttccctgatggggc

SEQ ID NO: 79414 - DNA, 60 bp, Artificial
  Synthetic oligonucleotide
tccggtcaaactgagcagtggttacaaagatgtgatactttggtttagcttgggggcatc

SEQ ID NO: 79415 - DNA, 60 bp, Artificial
  Synthetic oligonucleotide
tccatgattcaaatgtcaagaacttatacgataaggtccgactccagctgagagacaatg

SEQ ID NO: 79416 - DNA, 60 bp, Artificial
  Synthetic oligonucleotide
cctctcctaatagatggcacagcctcattgagtcctggaatgatgatgggcatgttcaac

SEQ ID NO: 79417 - DNA, 60 bp, Artificial
  Synthetic oligonucleotide
gcaggcaaaccatttgaatggatgtcaatccgactttacttttcttgaaggttccagcgc

SEQ ID NO: 79418 - DNA, 60 bp, Artificial
  Synthetic oligonucleotide
gggtgatacacaaattcaaacgaggagatcattcgagctgaagaagctgtgggagcagac

SEQ ID NO: 79419 - DNA, 60 bp, Artificial
  Synthetic oligonucleotide
ggggtgatacacaaattcaaacgaggagatcattcgagctgaagaagctgtgggagcaga

SEQ ID NO: 79420 - DNA, 60 bp, Artificial
  Synthetic oligonucleotide
gcaatgcaaaataggatacagattgatccagtcaaactgagcagtggttacaaagatgtg

SEQ ID NO: 79421 - DNA, 60 bp, Artificial
  Synthetic oligonucleotide
cttgccattgcaatgggccttgtcttcatatgtgtgaagtatggaaacatgcggtgcact

SEQ ID NO: 79422 - DNA, 60 bp, Artificial
  Synthetic oligonucleotide
ctggccattgcaatgggccttgtcttcatatgtgtgaagaatggaaacatgcagtgcact

SEQ ID NO: 79423 - DNA, 60 bp, Artificial
  Synthetic oligonucleotide
aaactcgtgtcttgaaacgatggaagttgttcagcaaacaagggtggataaactgaccca

SEQ ID NO: 79424 - DNA, 60 bp, Artificial
  Synthetic oligonucleotide
aactaagcagcggctacaaagatgtgatactttggtttagcttcggggcatcatgcttca

SEQ ID NO: 79425 - DNA, 60 bp, Artificial
  Synthetic oligonucleotide
aatcatggtagctggtctatctttttggatgtgctccaatgggtcattgcagtgcagaat

SEQ ID NO: 79426 - DNA, 60 bp, Artificial
  Synthetic oligonucleotide
tagctggtctgtctttttggatgtgttccaatggatcattgcagtgcagaatttgcatct

SEQ ID NO: 79427 - DNA, 58 bp, Artificial
  Synthetic oligonucleotide
agatcctaataatgaaagagggaacccaggagtgaaaggttgggcctttgacaatgga

SEQ ID NO: 79428 - DNA, 60 bp, Artificial
  Synthetic oligonucleotide
ctagcatgccattccacaacatacatcctctcaccattggggaatgccccaaatacgtga

SEQ ID NO: 79429 - DNA, 60 bp, Artificial
  Synthetic oligonucleotide
cctagcactggcaatcatgatagctggtctatctttttggatgtgctccaatggatcatt

SEQ ID NO: 79430 - DNA, 60 bp, Artificial
  Synthetic oligonucleotide
aaaagaataatggagatgatccctgaaagaaatgagcaaggtcaaactctttggagcaag

SEQ ID NO: 79431 - DNA, 60 bp, Artificial
  Synthetic oligonucleotide
aaagaataatggagatgatccctgaaagaaatgagcaaggtcaaactctttggagcaaga

SEQ ID NO: 79432 - DNA, 60 bp, Artificial
  Synthetic oligonucleotide
aaaaggataatggagatgatccctgaaagaaatgagcaaggtcagactctctggagcaga

SEQ ID NO: 79433 - DNA, 60 bp, Artificial
  Synthetic oligonucleotide
cacagggacaatgcgcaggcttgccgattacagtctcccaccgaacttctccagccttga

SEQ ID NO: 79434 - DNA, 60 bp, Artificial
  Synthetic oligonucleotide
cacaggaaccatgcgcaggcttgccgatcaaagtctcccaccgaacttctccagccttga

SEQ ID NO: 79435 - DNA, 60 bp, Artificial
  Synthetic oligonucleotide
cacaggaaccatgcgtaggcttgcagaccaaagtctcccaccgaacttctccagccttga

SEQ ID NO: 79436 - DNA, 60 bp, Artificial
  Synthetic oligonucleotide
attaagaatgaaatggatgatggcaatgaaatacccaatcacagcggacaaaagaataat

SEQ ID NO: 79437 - DNA, 60 bp, Artificial
  Synthetic oligonucleotide
cccgtcaggccccctcaaagccgagatcgcgcagagacttgaagatgtctttgcagggaa

SEQ ID NO: 79438 - DNA, 60 bp, Artificial
  Synthetic oligonucleotide
ctatcatcccgtcaggccccctcaaagccgagatcgcgcagagacttgaagatgtctttg

SEQ ID NO: 79439 - DNA, 60 bp, Artificial
  Synthetic oligonucleotide
gtcccgtcaggccccctcaaagccgagatcgcgcagagacttgaagatgtctttgcaggg

SEQ ID NO: 79440 - DNA, 60 bp, Artificial
  Synthetic oligonucleotide
cgtcaggccccctcaaagccgagatcgcgcagagacttgaagatgtctttgcagggaaaa

SEQ ID NO: 79441 - DNA, 60 bp, Artificial
  Synthetic oligonucleotide
gtaatggttgtttcgagttctatcacaaatgtgataatgaatgtatggaaagtgtaagaa

SEQ ID NO: 79442 - DNA, 60 bp, Artificial
  Synthetic oligonucleotide
ggtaatggttgtttcgagttctatcacaaatgtgataatgaatgtatggaaagtgtaaga

SEQ ID NO: 79443 - DNA, 60 bp, Artificial
  Synthetic oligonucleotide
gttcttgaaataggagatatgctcctgaggactgcaataggccaagtgtcaaggcccatg

SEQ ID NO: 79444 - DNA, 60 bp, Artificial
  Synthetic oligonucleotide
gttcttgaaataggggatatgctcctgaggactgcaataggccaagtgtcaaggcccatg

SEQ ID NO: 79445 - DNA, 56 bp, Artificial
  Synthetic oligonucleotide
aaaatctctgagaggaagaggcagcactcttggtctggacatcgaaacagccactc

SEQ ID NO: 79446 - DNA, 60 bp, Artificial
  Synthetic oligonucleotide
cattagagaggggaaaattgttcacattagtccattgtcgggaagtgctcagcatataga

SEQ ID NO: 79447 - DNA, 60 bp, Artificial
  Synthetic oligonucleotide
atcgaggaaactactactcattgttcaggcacttagggacaacctggaacctggaacctt

SEQ ID NO: 79448 - DNA, 60 bp, Artificial
  Synthetic oligonucleotide
atcgagaaaattgctcctaattgttcaggcacttagggacaacctggaacctggaacctt

SEQ ID NO: 79449 - DNA, 60 bp, Artificial
  Synthetic oligonucleotide
ggaaggcaagagaagaaccccgcactcagaatgaagtggatgatggcaatgaaataccca

SEQ ID NO: 79450 - DNA, 60 bp, Artificial
  Synthetic oligonucleotide
aagagtacatgaagggtacgaggaattcacaatggttgggcgaagagcaacagctatcct

SEQ ID NO: 79451 - DNA, 60 bp, Artificial
  Synthetic oligonucleotide
aagagtgcatgaggggtatgaggaattcacaatggttgggcgaagagcaacagctatcct

SEQ ID NO: 79452 - DNA, 60 bp, Artificial
  Synthetic oligonucleotide
catacgaaagctactcagcatgagagacatgtgtgatgctccctttgatgacagactcag

SEQ ID NO: 79453 - DNA, 60 bp, Artificial
  Synthetic oligonucleotide
ggcacatacgaaagctactcagcatgagagacatgtgtgatgctccctttgatgacaggc

SEQ ID NO: 79454 - DNA, 60 bp, Artificial
  Synthetic oligonucleotide
ggcacatacgaaaactactcagcatgagagacatgtgtgatgctccctttgatgacagac

SEQ ID NO: 79455 - DNA, 60 bp, Artificial
  Synthetic oligonucleotide
gcaacggatgctttgagttctaccacaagtgtgacaatgaatgcatggaaagtgtgagaa

SEQ ID NO: 79456 - DNA, 60 bp, Artificial
  Synthetic oligonucleotide
tgaatcctaatcagaaactatttgcactatctggagtagcgatagcacttagtgtactga

SEQ ID NO: 79457 - DNA, 60 bp, Artificial
  Synthetic oligonucleotide
acattctaaggactcaagagtcagaatgtgtgtgccataatggcacatgtgcagttgtaa

SEQ ID NO: 79458 - DNA, 60 bp, Artificial
  Synthetic oligonucleotide
cattctaaggacccaggagtcggaatgtgtgtgccataatggcacatgtgcagttgtaat

SEQ ID NO: 79459 - DNA, 51 bp, Artificial
  Synthetic oligonucleotide
gcttgaagtggagcaagagataagaactttctcgtttcagcttatttagtg

SEQ ID NO: 79460 - DNA, 58 bp, Artificial
  Synthetic oligonucleotide
gctcgccgaccaaagtctcccaccgaacttctccagccttgaaaactttagagcctat

SEQ ID NO: 79461 - DNA, 60 bp, Artificial
  Synthetic oligonucleotide
tggttacaaagatgtgatactttggtttagcttcggggcgtcatgtttcatacttctggc

SEQ ID NO: 79462 - DNA, 60 bp, Artificial
  Synthetic oligonucleotide
gcagtggttacaaagatgtgatactttggtttagcttcggggcgtcatgtttcttacttc

SEQ ID NO: 79463 - DNA, 60 bp, Artificial
  Synthetic oligonucleotide
acaaagatgtgatactttggtttagcttcggggcgtcatgtttcatacttctggccattg

SEQ ID NO: 79464 - DNA, 60 bp, Artificial
  Synthetic oligonucleotide
ggctacaaagatgtgatactttggtttagcttcggggcgtcatgtttcatacttctggcc

SEQ ID NO: 79465 - DNA, 50 bp, Artificial
  Synthetic oligonucleotide
gcgaccaaaaggattcggatggccatcaattagtgtcgaattgtttaaaa

SEQ ID NO: 79466 - DNA, 51 bp, Artificial
  Synthetic oligonucleotide
gcttgaagcggagcaagagataagaactttctcgtttcagcttatttaatg

SEQ ID NO: 79467 - DNA, 60 bp, Artificial
  Synthetic oligonucleotide
ctgaggactgcaataggccaagtgtcaaggcccatgttcctgtatgtgagaaccaatgga

SEQ ID NO: 79468 - DNA, 60 bp, Artificial
  Synthetic oligonucleotide
cacaacgagcaatgatggaccaagtgcgagaaagcaggaatcctgggaatgctgagattg

SEQ ID NO: 79469 - DNA, 60 bp, Artificial
  Synthetic oligonucleotide
gatccaaaacagcataacaatagagagaatggttctctcggcatttgatgagagaagaaa

SEQ ID NO: 79470 - DNA, 60 bp, Artificial
  Synthetic oligonucleotide
ggcctatttggtgctatagcgggtttcattgaaaatggatgggaaggtctgattgatggg

SEQ ID NO: 79471 - DNA, 60 bp, Artificial
  Synthetic oligonucleotide
agaaccaatggagtaaccagtgcatgcagaagatcaggatcttcattctatgcagagatg

SEQ ID NO: 79472 - DNA, 60 bp, Artificial
  Synthetic oligonucleotide
ccgcaggagactagggtatggtggacctcaaacagtattgtcgtattttgcggcacttca

SEQ ID NO: 79473 - DNA, 56 bp, Artificial
  Synthetic oligonucleotide
aaaagagcaatgcatacccaacaataaagaggagttacaacaacaccaaccaagaa

SEQ ID NO: 79474 - DNA, 60 bp, Artificial
  Synthetic oligonucleotide
cgggcaggggaccacgctagacaacaaacattcaaatggcacaatacacgatagaatccc

SEQ ID NO: 79475 - DNA, 60 bp, Artificial
  Synthetic oligonucleotide
ccctttgatggtagcatacatgctagaaagagagttagtccgcaaaacaagattcctccc

SEQ ID NO: 79476 - DNA, 60 bp, Artificial
  Synthetic oligonucleotide
cctgccctcagaatgaaatggatgatggcaatgaaatacccaataacggcagacaagagg

SEQ ID NO: 79477 - DNA, 60 bp, Artificial
  Synthetic oligonucleotide
gaaccctgccctcagaatgaaatggatgatggcaatgaaatacccaataacggcagacaa

SEQ ID NO: 79478 - DNA, 60 bp, Artificial
  Synthetic oligonucleotide
ccgtttcacttgggaaccaaacaagtgtgcatagcatggtccagttcaagttgccatgac

SEQ ID NO: 79479 - DNA, 60 bp, Artificial
  Synthetic oligonucleotide
ccatttcacttgggaaccaaacaagtgtgcatagcatggtccagttcaagttgccatgac

SEQ ID NO: 79480 - DNA, 60 bp, Artificial
  Synthetic oligonucleotide
ctgtcaatttattcaacagtggcgagttccctagcactggcaatcatgatagctggtcta

SEQ ID NO: 79481 - DNA, 60 bp, Artificial
  Synthetic oligonucleotide
aggggtatgaagagttcacaatggttgggagaagagcaacagctattctcagaaaggcaa

SEQ ID NO: 79482 - DNA, 60 bp, Artificial
  Synthetic oligonucleotide
cggatatgcacaaacagattgcgtgttggaagcaatggctttccttgaagaatcccaccc

SEQ ID NO: 79483 - DNA, 60 bp, Artificial
  Synthetic oligonucleotide
ccaagtggatatgcacaaacagactgcgttttggaagcaatggctttccttgaagaatcc

SEQ ID NO: 79484 - DNA, 60 bp, Artificial
  Synthetic oligonucleotide
cttcctttgacatgaataacgagggatcttatttcttcggagacaatgcagaggaatatg

SEQ ID NO: 79485 - DNA, 60 bp, Artificial
  Synthetic oligonucleotide
tcatgatagctggtctatctttttggatgtgctccaatggatcattacagtgcagaattt

SEQ ID NO: 79486 - DNA, 60 bp, Artificial
  Synthetic oligonucleotide
ctagccattgcaatgggccttgtcttcatgtgtgtgaagaatggaaacatgcggtgcact

SEQ ID NO: 79487 - DNA, 60 bp, Artificial
  Synthetic oligonucleotide
ctggccattgcaatgggccttgtcttcatgtgtgtgaagaatggaaacatgcggtgcact

SEQ ID NO: 79488 - DNA, 60 bp, Artificial
  Synthetic oligonucleotide
tcatattatttaactgacatgactcttgaagaaatgtcaagggcctggttcatgcttata

SEQ ID NO: 79489 - DNA, 60 bp, Artificial
  Synthetic oligonucleotide
atcaagccataatggataaggaaatcacactgaaggcaaactttagtgtggtctttaaca

SEQ ID NO: 79490 - DNA, 60 bp, Artificial
  Synthetic oligonucleotide
ctagcagggaggcaaatagtaaagcggattctaaaagaagaatctgatagtgaaccaaaa

SEQ ID NO: 79491 - DNA, 60 bp, Artificial
  Synthetic oligonucleotide
gctcaacactagcagggaggcaaatagtaaagcggattctaaaagaagaatctgatagtg

SEQ ID NO: 79492 - DNA, 60 bp, Artificial
  Synthetic oligonucleotide
tccttaaaaggaagaagcagcactcttggtctagacattgaaagctcaacactagcaggg

SEQ ID NO: 79493 - DNA, 60 bp, Artificial
  Synthetic oligonucleotide
caaaaaagagtaggatcactctgcatcagaatggatcaagccataatggataaggaaatc

SEQ ID NO: 79494 - DNA, 60 bp, Artificial
  Synthetic oligonucleotide
ggataaggaaatcacactgaaggcaaactttagtgtggtctttaacaaactggagactct

SEQ ID NO: 79495 - DNA, 60 bp, Artificial
  Synthetic oligonucleotide
aaaaatgggtgatgccccgtttcttgaccgacttcgcagagatcaaaagtccttaaaagg

SEQ ID NO: 79496 - DNA, 60 bp, Artificial
  Synthetic oligonucleotide
acatgactcttgaagaaatgtcaagggcctggttcatgcttatacccaaccaaaaaagag

SEQ ID NO: 79497 - DNA, 60 bp, Artificial
  Synthetic oligonucleotide
aagaagaatctgatagtgaaccaaaagggactattacctcagtacccacttcatattatt

SEQ ID NO: 79498 - DNA, 60 bp, Artificial
  Synthetic oligonucleotide
gcagggaggcaaatagtaaagcggattctaaaagaagaatctgatagtgaaccaaaaggg

SEQ ID NO: 79499 - DNA, 60 bp, Artificial
  Synthetic oligonucleotide
ccttaaaaggaagaagcagcactcttggtctagacattgaaagctcaacactagcaggga

SEQ ID NO: 79500 - DNA, 60 bp, Artificial
  Synthetic oligonucleotide
ggatcactctgcatcagaatggatcaagccataatggataaggaaatcacactgaaggca

SEQ ID NO: 79501 - DNA, 60 bp, Artificial
  Synthetic oligonucleotide
cattgaaagctcaacactagcagggaggcaaatagtaaagcggattctaaaagaagaatc

SEQ ID NO: 79502 - DNA, 60 bp, Artificial
  Synthetic oligonucleotide
gcagcactcttggtctagacattgaaagctcaacactagcagggaggcaaatagtaaagc

SEQ ID NO: 79503 - DNA, 60 bp, Artificial
  Synthetic oligonucleotide
ctgaaggcaaactttagtgtggtctttaacaaactggagactctaacacttttacgagca

SEQ ID NO: 79504 - DNA, 60 bp, Artificial
  Synthetic oligonucleotide
cgcagagatcaaaagtccttaaaaggaagaagcagcactcttggtctagacattgaaagc

SEQ ID NO: 79505 - DNA, 60 bp, Artificial
  Synthetic oligonucleotide
tgaaccaaaagggactattacctcagtacccacttcatattatttaactgacatgactct

SEQ ID NO: 79506 - DNA, 60 bp, Artificial
  Synthetic oligonucleotide
agaaataaggcataaactaaaaataacagagaacagttttgaacaaataacatttattca

SEQ ID NO: 79507 - DNA, 60 bp, Artificial
  Synthetic oligonucleotide
ccccgtttcttgaccgacttcgcagagatcaaaagtccttaaaaggaagaagcagcactc

SEQ ID NO: 79508 - DNA, 60 bp, Artificial
  Synthetic oligonucleotide
ggagaaatcttaccaataccttctcttccaggacatactaacgaggatgtcaaaaatgca

SEQ ID NO: 79509 - DNA, 60 bp, Artificial
  Synthetic oligonucleotide
ataaagtcaactcaatcattgacaaaatgaacactcaattcgaagccgttgggaaagaat

SEQ ID NO: 79510 - DNA, 60 bp, Artificial
  Synthetic oligonucleotide
tcgccgagatcaaaagtccctgggaggaagaggcagcactcttggtctggacatcgagac

SEQ ID NO: 79511 - DNA, 60 bp, Artificial
  Synthetic oligonucleotide
gaagatggcactggttgcttcgaaatatttcacaagtgtgatgacgactgtatggccagt

SEQ ID NO: 79512 - DNA, 60 bp, Artificial
  Synthetic oligonucleotide
acatccccaggatctgctcaaaagggaaaaggacagttgacctcggtcaatgtggacttc

SEQ ID NO: 79513 - DNA, 60 bp, Artificial
  Synthetic oligonucleotide
acgttcccaggatctgctcaaaagggaaaaggacagttgacctcggtcaatgtggacttc

SEQ ID NO: 79514 - DNA, 60 bp, Artificial
  Synthetic oligonucleotide
gcggatgggagtgcaaatgcagcgattcaagtgatcctctcgttattgccgcaagcatca

SEQ ID NO: 79515 - DNA, 60 bp, Artificial
  Synthetic oligonucleotide
atgggagtgcaaatgcagcgattcaagtgatcctctcgttattgccgcaagcatcattgg

SEQ ID NO: 79516 - DNA, 60 bp, Artificial
  Synthetic oligonucleotide
gacttctgggaacaatcattgggccaccccaatgtgaccaattcctagaattttcagccg

SEQ ID NO: 79517 - DNA, 60 bp, Artificial
  Synthetic oligonucleotide
tcattgggccaccccaatgtgaccaattcctagaattttcagccgatttaatcattgaaa

SEQ ID NO: 79518 - DNA, 60 bp, Artificial
  Synthetic oligonucleotide
ggccaccccaatgtgaccaattcctagaattttcagccgatttaatcattgaaaggcggg

SEQ ID NO: 79519 - DNA, 60 bp, Artificial
  Synthetic oligonucleotide
tggactccaacacgataacctcgtttcaggtagattgctatctatggcacataaggaatc

SEQ ID NO: 79520 - DNA, 53 bp, Artificial
  Synthetic oligonucleotide
attgatgggtggtatggattcaggcatcaaaatgcacaaggagaaggaactgc

SEQ ID NO: 79521 - DNA, 60 bp, Artificial
  Synthetic oligonucleotide
cacaagtgtgacaatgaatgcatggaaagtgtgagaaatggaacgtatgactatccgcaa

SEQ ID NO: 79522 - DNA, 56 bp, Artificial
  Synthetic oligonucleotide
acaagtgtgacaatgaatgcatggaaagtgtgagaaatggaacgtatgactatccg

SEQ ID NO: 79523 - DNA, 60 bp, Artificial
  Synthetic oligonucleotide
ccacaagtgtgacaatgaatgcatggaaagtgtgagaaatggaacgtatgactatccaca

SEQ ID NO: 79524 - DNA, 53 bp, Artificial
  Synthetic oligonucleotide
caaatgagaacatggaaacaatggactccagtactctggaattgaggagcaaa

SEQ ID NO: 79525 - DNA, 60 bp, Artificial
  Synthetic oligonucleotide
ggctaatgtgctaattggacagggagacgtggtgttagtaatgaaacggaaacgggactc

SEQ ID NO: 79526 - DNA, 60 bp, Artificial
  Synthetic oligonucleotide
gcaaatgtgttaataggacaaggagatgtagtgttagtaatgaaacggaaacgggactct

SEQ ID NO: 79527 - DNA, 60 bp, Artificial
  Synthetic oligonucleotide
cactgagtgacatccatatcatggcgtctcaaggcaccaaacgatcttatgaacagatgg

SEQ ID NO: 79528 - DNA, 60 bp, Artificial
  Synthetic oligonucleotide
ggcacctatcagatactatcaatctactcaacagtggcgagttccctagcactggcaatc

SEQ ID NO: 79529 - DNA, 60 bp, Artificial
  Synthetic oligonucleotide
gaccaaatctgcattggttatcatgcaaacaattcaacagaacaggttgacacaatcatg

SEQ ID NO: 79530 - DNA, 60 bp, Artificial
  Synthetic oligonucleotide
ccaaatctgcattggttatcatgcaaacaattcaacagaacaggttgacacaatcatgga

SEQ ID NO: 79531 - DNA, 60 bp, Artificial
  Synthetic oligonucleotide
ctttgaattctatcacaggtgtgacgataaatgcatggaaagtgtgagaaatggaacgta

SEQ ID NO: 79532 - DNA, 60 bp, Artificial
  Synthetic oligonucleotide
ctttgaattctaccacaggtgtgacgataaatgcatggaaagtgtgagaaatggaacgta

SEQ ID NO: 79533 - DNA, 60 bp, Artificial
  Synthetic oligonucleotide
tagatatggtagattacagcattgattccagttatgtatgctcagggctcgttggtgaca

SEQ ID NO: 79534 - DNA, 60 bp, Artificial
  Synthetic oligonucleotide
ggacaaggagatgtagtgttagtaatgaaacggaaacgggactctagcatacttactgac

SEQ ID NO: 79535 - DNA, 60 bp, Artificial
  Synthetic oligonucleotide
ttgagccctggaatgatgatgggcatgttcaacatgctaagtacagttttgggagtctct

SEQ ID NO: 79536 - DNA, 60 bp, Artificial
  Synthetic oligonucleotide
aagggtgtatgaaggatatgaggaattcacaatggttggacgacgagcaacagccattct

SEQ ID NO: 79537 - DNA, 60 bp, Artificial
  Synthetic oligonucleotide
aagggtgtatgaaggatatgaggaattcacaatggttggacgacgagcaacagccatcct

SEQ ID NO: 79538 - DNA, 60 bp, Artificial
  Synthetic oligonucleotide
cttaccaaatactgtcaatttattcaacagtggcgagttccctagcactggcaatcatgg

SEQ ID NO: 79539 - DNA, 60 bp, Artificial
  Synthetic oligonucleotide
ggactccaacacgataacctcgtttcaggtagattgctatctatggcacatacgaaagct

SEQ ID NO: 79540 - DNA, 60 bp, Artificial
  Synthetic oligonucleotide
gcttcggggcatcatgtttcatacttctggccattgcaatgggccttgttttcatgtgtg

SEQ ID NO: 79541 - DNA, 60 bp, Artificial
  Synthetic oligonucleotide
cttcctttgacatgagtaatgagggatcttatttcttcggagacaatgctgaggagtatg

SEQ ID NO: 79542 - DNA, 60 bp, Artificial
  Synthetic oligonucleotide
gcaatggatgttttgagttctatcacaagtgtgacaatgaatgcatggaaagtgtgagaa

SEQ ID NO: 79543 - DNA, 60 bp, Artificial
  Synthetic oligonucleotide
ggcaatgggtgttttgagttctatcacaagtgtgacaatgaatgcatggaaagtgtgaga

SEQ ID NO: 79544 - DNA, 60 bp, Artificial
  Synthetic oligonucleotide
ggcaatgggtggtttgagttctatcacaagtgtgacaatgaatgcatggaaagtgtgaga

SEQ ID NO: 79545 - DNA, 60 bp, Artificial
  Synthetic oligonucleotide
tgaatggaatgataactcaattcgagcgtctgaaaatatacagagattcgcttggggaat

SEQ ID NO: 79546 - DNA, 60 bp, Artificial
  Synthetic oligonucleotide
aatgagctgagcaatcttgcaaaaggggagaaggctaatgtgctaattgggcaaggagat

SEQ ID NO: 79547 - DNA, 60 bp, Artificial
  Synthetic oligonucleotide
aatgagctgagcaatcttgcaaaaggagagaaggctaatgtgctaattgggcaaggagac

SEQ ID NO: 79548 - DNA, 60 bp, Artificial
  Synthetic oligonucleotide
catcaatgaactgagcaatcttgcaaaaggagagaaggctaatgtgctaattgggcaagg

SEQ ID NO: 79549 - DNA, 60 bp, Artificial
  Synthetic oligonucleotide
aatgaactgagcaatcttgcaaaaggagagaaggctaatgtgctaattgggcaaggagac

SEQ ID NO: 79550 - DNA, 60 bp, Artificial
  Synthetic oligonucleotide
aatgaattgagcagtcttgcaaaaggagagaaggctaatgtgctaattgggcaaggagac

SEQ ID NO: 79551 - DNA, 60 bp, Artificial
  Synthetic oligonucleotide
ctcgttgacagtatcggttcatggtctcaaaatatcctcagaactcaggagtcagagtgc

SEQ ID NO: 79552 - DNA, 60 bp, Artificial
  Synthetic oligonucleotide
cttgttgacagtataggttcatggtctcaaaatatcctcagaactcaggagtcagagtgc

SEQ ID NO: 79553 - DNA, 60 bp, Artificial
  Synthetic oligonucleotide
ctcgttgacagtataggttcatggtctcaaaatatcctcagaactcaggagtcagagtgc

SEQ ID NO: 79554 - DNA, 60 bp, Artificial
  Synthetic oligonucleotide
ggcacatacgaaagctgctcagtatgagagacatgtgtgatgctccctttgatgacagac

SEQ ID NO: 79555 - DNA, 60 bp, Artificial
  Synthetic oligonucleotide
aagctgctcaatatgagagacatgtgtgatgctccctttgatgacagactcagaagagat

SEQ ID NO: 79556 - DNA, 60 bp, Artificial
  Synthetic oligonucleotide
tgcacttgggcaaggaaccacgctggacaacaaacattcaaatggcacaatacatgatag

SEQ ID NO: 79557 - DNA, 60 bp, Artificial
  Synthetic oligonucleotide
gaaataggggacatgctcctgcggactgcaataggccaagtgtcaaggcccatgttcctg

SEQ ID NO: 79558 - DNA, 60 bp, Artificial
  Synthetic oligonucleotide
atggccataatcaagaaatacacatcaggaagacaggagaagaatcctgctctcagaatg

SEQ ID NO: 79559 - DNA, 60 bp, Artificial
  Synthetic oligonucleotide
tgatactttggtttagcttcggggcatcatgtttcatacttctggccattgcaatgggcc

SEQ ID NO: 79560 - DNA, 60 bp, Artificial
  Synthetic oligonucleotide
gggtgtgcaaatgcagcgattcaagtgatcctctcgttattgccgcaagtatcattggga

SEQ ID NO: 79561 - DNA, 56 bp, Artificial
  Synthetic oligonucleotide
tgcttgaagtggagcaagagataagaactttctcgtttcagcttatttagtgataa

SEQ ID NO: 79562 - DNA, 60 bp, Artificial
  Synthetic oligonucleotide
tgcttgaagtggagcaagagataagaactttctcgtttcagcttatttagtgataaaaaa

SEQ ID NO: 79563 - DNA, 60 bp, Artificial
  Synthetic oligonucleotide
gaatgctgaagaagatggcactggttgcttcgaaatatttcacaagtgtgatgacgactg

SEQ ID NO: 79564 - DNA, 60 bp, Artificial
  Synthetic oligonucleotide
agaatgctgaagaagatggcactggttgcttcgaaatatttcacaagtgtgatgacgact

SEQ ID NO: 79565 - DNA, 60 bp, Artificial
  Synthetic oligonucleotide
atcctcatcggtggacttgaatggaatgataactcaattcgagcgtctgaaaacatacag

SEQ ID NO: 79566 - DNA, 60 bp, Artificial
  Synthetic oligonucleotide
cgggtgctttgaattctaccacaagtgtgacaatgaatgcatggaaagtgtgagaaatgg

SEQ ID NO: 79567 - DNA, 60 bp, Artificial
  Synthetic oligonucleotide
atgtcgcagtcccgcactcgcgagatactaacaaaaaccactgtggaccatatggccata

SEQ ID NO: 79568 - DNA, 60 bp, Artificial
  Synthetic oligonucleotide
ggcagcactcttggtctggacatcgaaacagccactagtgctggaaagcagatagtggag

SEQ ID NO: 79569 - DNA, 60 bp, Artificial
  Synthetic oligonucleotide
gaggcagcactcttggtctggacatcgaaacagccactagtgctggaaagcagatagtgg

SEQ ID NO: 79570 - DNA, 60 bp, Artificial
  Synthetic oligonucleotide
accaataccttctcttccaggacatactaatgaggatgtcaaaaatgcaattgagatcct

SEQ ID NO: 79571 - DNA, 60 bp, Artificial
  Synthetic oligonucleotide
cacggtctgcactcatactacgaggatcagtagcccacaaatcctgcctgcctgcatgtg

SEQ ID NO: 79572 - DNA, 53 bp, Artificial
  Synthetic oligonucleotide
agaatgtgctctctaatgcaaggttctaccctcccgaggagatctggagcagc

SEQ ID NO: 79573 - DNA, 59 bp, Artificial
  Synthetic oligonucleotide
gacaagggctcttgtccgaactggaatggaccccagaatgtgctctctaatgcaaggtt

SEQ ID NO: 79574 - DNA, 60 bp, Artificial
  Synthetic oligonucleotide
atgccacttatcaaaggacaagggctcttgtccgaactggaatggaccccagaatgtgct

SEQ ID NO: 79575 - DNA, 60 bp, Artificial
  Synthetic oligonucleotide
gctggccttacccacttgatgatttggcattcaaatctgaacgatgccacttatcaaagg

SEQ ID NO: 79576 - DNA, 60 bp, Artificial
  Synthetic oligonucleotide
tgcaacagctggccttacccacttgatgatttggcattcaaatctgaacgatgccactta

SEQ ID NO: 79577 - DNA, 60 bp, Artificial
  Synthetic oligonucleotide
gccagaatgccactgagatcagagcatccgttggaaaaatggttggtggaataggaagat

SEQ ID NO: 79578 - DNA, 54 bp, Artificial
  Synthetic oligonucleotide
cactcactgagtgacatcaaagtcatggcgtctcaaggcaccaaacgaccttat

SEQ ID NO: 79579 - DNA, 54 bp, Artificial
  Synthetic oligonucleotide
cactcactgagtgacatccacaacatggcgtctcaaggcaccaaacgaccttat

SEQ ID NO: 79580 - DNA, 53 bp, Artificial
  Synthetic oligonucleotide
tgacgaaaaggcaactaaccctatagtgccttcttttgacatgagtaaagaag

SEQ ID NO: 79581 - DNA, 60 bp, Artificial
  Synthetic oligonucleotide
catctgctggacaaataagtgtacaaccaacattctcagttcaaagaaaccttccttttg

SEQ ID NO: 79582 - DNA, 60 bp, Artificial
  Synthetic oligonucleotide
gctctcggacgaaaaggcaactaaccctatagtgccttcttttgacatgagtaaagaagg

SEQ ID NO: 79583 - DNA, 60 bp, Artificial
  Synthetic oligonucleotide
tgacgaaaaggcaactaaccctatagtgccttcttttgacatgagtaaagaagggtctta

SEQ ID NO: 79584 - DNA, 58 bp, Artificial
  Synthetic oligonucleotide
gactccaacactcttgaactaagaagtagatactgggcaattagaactaaaagtgggg

SEQ ID NO: 79585 - DNA, 60 bp, Artificial
  Synthetic oligonucleotide
ccagaggaatccagattgcatccaatgagaacatggagaccatagactccaacactcttg

SEQ ID NO: 79586 - DNA, 60 bp, Artificial
  Synthetic oligonucleotide
agcatctgctggacaaataagtgtacaaccaacattctcagttcaaagaaaccttccttt

SEQ ID NO: 79587 - DNA, 60 bp, Artificial
  Synthetic oligonucleotide
gactccaacactcttgaactaagaagtagatactgggcaattagaactaaaagtggggga

SEQ ID NO: 79588 - DNA, 59 bp, Artificial
  Synthetic oligonucleotide
gctctcggacgaaaaggcaactaaccctatagtgccttcttttgacatgagtaaagaag

SEQ ID NO: 79589 - DNA, 60 bp, Artificial
  Synthetic oligonucleotide
tatctaccagaggaatccagattgcatccaatgagaacatggagaccatagactccaaca

SEQ ID NO: 79590 - DNA, 56 bp, Artificial
  Synthetic oligonucleotide
tatccaccagaggaatccagattgcatccaatgagaacatggagaccatggactcc

SEQ ID NO: 79591 - DNA, 60 bp, Artificial
  Synthetic oligonucleotide
cggtctgcactcatactacgaggatcagtagcccacaaatcctgcctgcctgcatgtgtg

SEQ ID NO: 79592 - DNA, 60 bp, Artificial
  Synthetic oligonucleotide
agagggatactcattggttggggtagacccttttaaactacttcaaaacagtcaaatatt

SEQ ID NO: 79593 - DNA, 60 bp, Artificial
  Synthetic oligonucleotide
ggttggggtagacccttttaaactacttcaaaacagtcaaatattcagccttattaggcc

SEQ ID NO: 79594 - DNA, 60 bp, Artificial
  Synthetic oligonucleotide
gtcaaatattcagccttattaggcctaatgaaaatccagcacacaaaagccagttggtat

SEQ ID NO: 79595 - DNA, 60 bp, Artificial
  Synthetic oligonucleotide
gccttattaggcctaatgaaaatccagcacacaaaagccagttggtatggatggcatgcc

SEQ ID NO: 79596 - DNA, 60 bp, Artificial
  Synthetic oligonucleotide
cagttggtatggatggcatgccactctgcagcattcgaggatctaagagtatcaagcttt

SEQ ID NO: 79597 - DNA, 60 bp, Artificial
  Synthetic oligonucleotide
gatggcatgccactctgcagcattcgaggatctaagagtatcaagctttatcaggggaac

SEQ ID NO: 79598 - DNA, 60 bp, Artificial
  Synthetic oligonucleotide
tatccaccagaggaatccagattgcatccaatgagaacatggagaccatggactccaaca

SEQ ID NO: 79599 - DNA, 60 bp, Artificial
  Synthetic oligonucleotide
ctggccattgcaatgggacttatcttcatgtgtgtgaagaatggaaacatgcggtgcact

SEQ ID NO: 79600 - DNA, 60 bp, Artificial
  Synthetic oligonucleotide
gactgctgggcacaatcactggaccaccccaatgtgaccaattcctagaattttcagctg

SEQ ID NO: 79601 - DNA, 60 bp, Artificial
  Synthetic oligonucleotide
gactgctgggaacaatcactggaccaccccaatgtgaccaattcctagaattttcagctg

SEQ ID NO: 79602 - DNA, 60 bp, Artificial
  Synthetic oligonucleotide
agactcagaagagatcaaaaggcattaaagggaagaggcagcacacttggactcgacctg

SEQ ID NO: 79603 - DNA, 60 bp, Artificial
  Synthetic oligonucleotide
caggctcagaagagatcaaaaggcattaaagggaagaggcagcacacttggactcgacct

SEQ ID NO: 79604 - DNA, 60 bp, Artificial
  Synthetic oligonucleotide
ccgactgaggagcaagctgtggatatatgcaaagcagcaatgggcttgaggatcagttct

SEQ ID NO: 79605 - DNA, 60 bp, Artificial
  Synthetic oligonucleotide
catacgaaagctgctcagcatgagagacatgtgtgatgctccctttgatgacagactcag

SEQ ID NO: 79606 - DNA, 56 bp, Artificial
  Synthetic oligonucleotide
tttgagttcacaagctttttctaccgctatggatttgtagccaatttcagtatgga

SEQ ID NO: 79607 - DNA, 60 bp, Artificial
  Synthetic oligonucleotide
tggagggctatatgaagcaattgaggagtgcctgattaatgatccctgggttttgcttaa

SEQ ID NO: 79608 - DNA, 60 bp, Artificial
  Synthetic oligonucleotide
aatggggataacacatggcttggtaggaccatcagcccccgatcaagaagtggattcgaa

SEQ ID NO: 79609 - DNA, 60 bp, Artificial
  Synthetic oligonucleotide
gacacaatcaaaaggtgacctgtgtgtgcagagataactggcagggagcaaacaggccta

SEQ ID NO: 79610 - DNA, 60 bp, Artificial
  Synthetic oligonucleotide
gcctgtgcaatgttgaagggtgggtcgtgatagcaaaagacaatgcagtaagatttgggg

SEQ ID NO: 79611 - DNA, 60 bp, Artificial
  Synthetic oligonucleotide
cagtgactttatgtgtgttggatggtcaagcacaacttgccatgatgggattgctaggat

SEQ ID NO: 79612 - DNA, 60 bp, Artificial
  Synthetic oligonucleotide
actggcagggagcaaacaggcctattatagaaattgatatgaacacattggagcacacga

SEQ ID NO: 79613 - DNA, 60 bp, Artificial
  Synthetic oligonucleotide
cgctacagcaacggtttattataacggaaggctgaccactaccattaagacctgggccag

SEQ ID NO: 79614 - DNA, 60 bp, Artificial
  Synthetic oligonucleotide
catgcgacccaacaggatgcaaaatgtatgccttgcaccaagggactaccattaggaaca

SEQ ID NO: 79615 - DNA, 60 bp, Artificial
  Synthetic oligonucleotide
catgacagaacagctttcagaggtctcatctccactccattgggcactccaccaaccgta

SEQ ID NO: 79616 - DNA, 60 bp, Artificial
  Synthetic oligonucleotide
gccacaatggcacatgtgcagttgtaatgaccgacggatcggctagtagtcaagcctata

SEQ ID NO: 79617 - DNA, 60 bp, Artificial
  Synthetic oligonucleotide
ggagtcctggcgctccgggagtgaagggattcgggtttctaaatggggataacacatggc

SEQ ID NO: 79618 - DNA, 60 bp, Artificial
  Synthetic oligonucleotide
atacgtgtgcactggaattctcacagacaccagcagacctggggacaaatctagtggtga

SEQ ID NO: 79619 - DNA, 54 bp, Artificial
  Synthetic oligonucleotide
ccatgcttttacgtagagttaattagaggaagacccgaagaggctaaatacgta

SEQ ID NO: 79620 - DNA, 60 bp, Artificial
  Synthetic oligonucleotide
taattaccaagggaactgatttgaaaacaccaagctatctgctgttgaacaagagcctgt

SEQ ID NO: 79621 - DNA, 60 bp, Artificial
  Synthetic oligonucleotide
cacatgcactgaaatagttgtggcaatgctactatttgctatccatactgtccaaaaaaa

SEQ ID NO: 79622 - DNA, 60 bp, Artificial
  Synthetic oligonucleotide
cctggaacctgggactttcgatcttggagggctatatgaagcaattgaggagtgcctgat

SEQ ID NO: 79623 - DNA, 50 bp, Artificial
  Synthetic oligonucleotide
aaccaggagtggaggaaacaccaaccaacagagagcatctgcaggacaga

SEQ ID NO: 79624 - DNA, 60 bp, Artificial
  Synthetic oligonucleotide
cctagcactggcaatcatggtagctggtctatctttttggatgtgctccaatggatcatt

SEQ ID NO: 79625 - DNA, 60 bp, Artificial
  Synthetic oligonucleotide
gtctcaaggcaccaaacgaccttatgaacaaatggaaactggtggagaacgccagaatgc

SEQ ID NO: 79626 - DNA, 60 bp, Artificial
  Synthetic oligonucleotide
ggcaccaaacgaccttatgaacaaatggaaactggtggagaacgccagaatgccactgag

SEQ ID NO: 79627 - DNA, 60 bp, Artificial
  Synthetic oligonucleotide
gagcattcatagcccctaatagggcaagtttctttagaggagaatcactaggagtccaga

SEQ ID NO: 79628 - DNA, 60 bp, Artificial
  Synthetic oligonucleotide
ggtggaaactgcgaatatcgagaaaatctgcacccaagggaaaaggccaacagacctggg

SEQ ID NO: 79629 - DNA, 60 bp, Artificial
  Synthetic oligonucleotide
agacggtggaaactgcgaatatcgagaaaatctgcacccaagggaaaaggccaacagacc

SEQ ID NO: 79630 - DNA, 60 bp, Artificial
  Synthetic oligonucleotide
gcccctaatagggcaagtttctttagaggagaatcactaggagtccagagtgatgtgcct

SEQ ID NO: 79631 - DNA, 60 bp, Artificial
  Synthetic oligonucleotide
cagactcagaagagatcaaaaggcattaaagggaagaggcagcacacttggactcgatcc

SEQ ID NO: 79632 - DNA, 60 bp, Artificial
  Synthetic oligonucleotide
ggagtggcaatagcacttagtgtactgaacttattgataggaatctcaaacgtcggattg

SEQ ID NO: 79633 - DNA, 60 bp, Artificial
  Synthetic oligonucleotide
tatctggagtggcaatagcacttagtgtactgaacttattgataggaatctcaaacgtcg

SEQ ID NO: 79634 - DNA, 60 bp, Artificial
  Synthetic oligonucleotide
tctcctaataggaatatccaatatgagtttaaatatatctctatactcaaaaggagaaaa

SEQ ID NO: 79635 - DNA, 60 bp, Artificial
  Synthetic oligonucleotide
ggtggctggtctatctttctggatgtgctccaatggatcattgcagtgcagaatttgcat

SEQ ID NO: 79636 - DNA, 60 bp, Artificial
  Synthetic oligonucleotide
acgttaacagagagggggattgaagtagtgaatgctacggagacggtagaaactgcgagt

SEQ ID NO: 79637 - DNA, 60 bp, Artificial
  Synthetic oligonucleotide
gtggcaaatggaacaaaggtgaacacgctaacagagagggggattgaagtagtgaatgcc

SEQ ID NO: 79638 - DNA, 60 bp, Artificial
  Synthetic oligonucleotide
ccaacagacctgggacaatgtggactcctaggaaccctaataggacctccccaatgtgat

SEQ ID NO: 79639 - DNA, 60 bp, Artificial
  Synthetic oligonucleotide
ggccaacagacttgggacaatgtgggctcctaggaaccctaataggacctccccaatgtg

SEQ ID NO: 79640 - DNA, 60 bp, Artificial
  Synthetic oligonucleotide
caacagacctgggacaatgtggactcctaggaaccctaataggacctccccaatgtgatc

SEQ ID NO: 79641 - DNA, 60 bp, Artificial
  Synthetic oligonucleotide
ttccctagcactggcaatcatggtagctggtctatctttctggatgtgctccaatggatc

SEQ ID NO: 79642 - DNA, 60 bp, Artificial
  Synthetic oligonucleotide
gtggcacttcaggtacctatggaacaggctcatggcctgatgggggaaatatcaacttca

SEQ ID NO: 79643 - DNA, 60 bp, Artificial
  Synthetic oligonucleotide
gtcgcattttgtggcacttcaggcacctatggaacaggctcatggcctgatggggcgaat

SEQ ID NO: 79644 - DNA, 60 bp, Artificial
  Synthetic oligonucleotide
tgtcgtattttgtggcacttcaggcacctatggaacaggctcatggcctgatggggcgaa

SEQ ID NO: 79645 - DNA, 60 bp, Artificial
  Synthetic oligonucleotide
atcctcatcgatggacttgaatggaatgataactcaattcgagcgtctgaaaatatacag

SEQ ID NO: 79646 - DNA, 60 bp, Artificial
  Synthetic oligonucleotide
cctcatcgatggacttgaatggaatgataactcaattcgagcgtctgaaaatatacagag

SEQ ID NO: 79647 - DNA, 60 bp, Artificial
  Synthetic oligonucleotide
gcttccaggtagactgttttctttggcatgtccgcaaacgatttgcagaccaagaactgg

SEQ ID NO: 79648 - DNA, 60 bp, Artificial
  Synthetic oligonucleotide
accctcggatgtttctggcaatgataacatacatcacaagaaatcaacctgaatggttta

SEQ ID NO: 79649 - DNA, 60 bp, Artificial
  Synthetic oligonucleotide
cagaaccctcggatgtttctggcaatgataacatacatcacaagaaatcaacctgaatgg

SEQ ID NO: 79650 - DNA, 60 bp, Artificial
  Synthetic oligonucleotide
cctcggatgtttctggcaatgataacatacatcacaagaaatcaacctgaatggtttagg

SEQ ID NO: 79651 - DNA, 60 bp, Artificial
  Synthetic oligonucleotide
atcagaaccctcggatgtttctggcaatgataacatacatcacaagaaatcaacctgaat

SEQ ID NO: 79652 - DNA, 60 bp, Artificial
  Synthetic oligonucleotide
ggggagactgatccaaaacagcataacaatagagagaatggttctctcagcatttgatga

SEQ ID NO: 79653 - DNA, 60 bp, Artificial
  Synthetic oligonucleotide
caatgtggactgctgggcacaatcactggaccaccccaatgtgaccaattcctagaattt

SEQ ID NO: 79654 - DNA, 60 bp, Artificial
  Synthetic oligonucleotide
ttggccaatgcggactactggggaccattaccggaccacctcaatgcgaccaatttctag

SEQ ID NO: 79655 - DNA, 60 bp, Artificial
  Synthetic oligonucleotide
cccggggaagtttgtgaatggagaggcattgcggcaaatcctcagaaaatcaggtgggat

SEQ ID NO: 79656 - DNA, 60 bp, Artificial
  Synthetic oligonucleotide
aagtaaatggccagtccggacgaattgattttcactggttgatactggattccaatgaca

SEQ ID NO: 79657 - DNA, 60 bp, Artificial
  Synthetic oligonucleotide
tgctttttacttcttgccattgcaatgggccttgttttcatatgtgtgaagaacggaaac

SEQ ID NO: 79658 - DNA, 60 bp, Artificial
  Synthetic oligonucleotide
gaagggaaagtccatgggaatccaaagcgatgtgcaggttgatgccaattgcgaagggga

SEQ ID NO: 79659 - DNA, 60 bp, Artificial
  Synthetic oligonucleotide
gtgatgatgattgtatggctagtataaggaacaatacttatgatcacagcaaatacagag

SEQ ID NO: 79660 - DNA, 60 bp, Artificial
  Synthetic oligonucleotide
ctgagagaggagtagaagttgtcaatgcaacagaaacagtggagcggacaaacatcccca

SEQ ID NO: 79661 - DNA, 60 bp, Artificial
  Synthetic oligonucleotide
tgcagaaatgaagtggctcctgtcagatacagacaatgctgctttcccacaaatgacgaa

SEQ ID NO: 79662 - DNA, 60 bp, Artificial
  Synthetic oligonucleotide
ggaactgcagcagactacaaaagcacccagtcggcaattgatcagataaccggaaaatta

SEQ ID NO: 79663 - DNA, 60 bp, Artificial
  Synthetic oligonucleotide
cctggtattcgcccttgtggcagtcatccacacaaatgcagacaaaatttgccttggaca

SEQ ID NO: 79664 - DNA, 60 bp, Artificial
  Synthetic oligonucleotide
gcaggcaaaccatttgaatggatgtcaatccgactttactgttcttgaaagttcctgcgc

SEQ ID NO: 79665 - DNA, 60 bp, Artificial
  Synthetic oligonucleotide
ccttgaagagtcccacccaggaatctttgaaaactcgtgtcttgaaacgatggaaattgt

SEQ ID NO: 79666 - DNA, 60 bp, Artificial
  Synthetic oligonucleotide
ctttccttgaagagtcccacccaggaatctttgaaaactcgtgtcttgaaacgatggaaa

SEQ ID NO: 79667 - DNA, 60 bp, Artificial
  Synthetic oligonucleotide
ggccttccttgaagagtcccacccaggaatctttgaaaactcgtgtcttgaaacgatgga

SEQ ID NO: 79668 - DNA, 60 bp, Artificial
  Synthetic oligonucleotide
gctttccttgaagagtcccacccaggaatctttgaaaactcgtgtcttgaaacgatggaa

SEQ ID NO: 79669 - DNA, 60 bp, Artificial
  Synthetic oligonucleotide
tgaagaatcccacccaggaatctttgaaaactcgtgtcttgaaacgatggaagttgttca

SEQ ID NO: 79670 - DNA, 60 bp, Artificial
  Synthetic oligonucleotide
ggacgaagagcaacagccattctaaggaaagcaaccaggaggctgattcaactgatagtg

SEQ ID NO: 79671 - DNA, 60 bp, Artificial
  Synthetic oligonucleotide
ttggacgacgagcaacagccattctaaggaaagcaaccaggaggctgattcaactgatag

SEQ ID NO: 79672 - DNA, 50 bp, Artificial
  Synthetic oligonucleotide
tgcttgaagtagaacaagagataagaactttctcgtttcagcttatttaa

SEQ ID NO: 79673 - DNA, 60 bp, Artificial
  Synthetic oligonucleotide
ataaatatggcagattatagcattgattccagttatgtatgctcaggacttgttggagac

SEQ ID NO: 79674 - DNA, 60 bp, Artificial
  Synthetic oligonucleotide
gcctatgagagaatgtgcaacattctcaaaggaaaattccaaacagcagcacaaagagca

SEQ ID NO: 79675 - DNA, 60 bp, Artificial
  Synthetic oligonucleotide
atagcattgattccagttatgtgtgctcaggacttgttggagacacaccaaggaatgatg

SEQ ID NO: 79676 - DNA, 57 bp, Artificial
  Synthetic oligonucleotide
tgagtggtggctacaaagatgtgatactttggtttagcttcggggcgtcatgctttt

SEQ ID NO: 79677 - DNA, 60 bp, Artificial
  Synthetic oligonucleotide
tacatacagatgtgcactgaactcaaactcagtgactatgaaggaaggctgatccaaaac

SEQ ID NO: 79678 - DNA, 60 bp, Artificial
  Synthetic oligonucleotide
ttacaactactgcttgaagtggagcaagagataagaactttctcgtttcagctcatttaa

SEQ ID NO: 79679 - DNA, 60 bp, Artificial
  Synthetic oligonucleotide
ccagatgagggcacagctggagtggagtctgctgttctgagaggattcctcattttgggc

SEQ ID NO: 79680 - DNA, 60 bp, Artificial
  Synthetic oligonucleotide
ggatgtgcaacattctcaaagggaaattccaaacagcagcacaacgagcaatgatggatc

SEQ ID NO: 79681 - DNA, 60 bp, Artificial
  Synthetic oligonucleotide
gtccctaagaggaagaggcagcactcttggtctggacatcgagacagctactcgtgcggg

SEQ ID NO: 79682 - DNA, 60 bp, Artificial
  Synthetic oligonucleotide
atccctaagaggaagaggcagcactcttggtctggacatcgagacagctactcgtgcggg

SEQ ID NO: 79683 - DNA, 60 bp, Artificial
  Synthetic oligonucleotide
ttttgagggattgtagtgtagctggatggctcctcggaaaccccatgtgtgatgaattcc

SEQ ID NO: 79684 - DNA, 60 bp, Artificial
  Synthetic oligonucleotide
gcgaccaaaaggattcggatggccatcaattagtgtcgaattgtttaaaaacgaccttgt

SEQ ID NO: 79685 - DNA, 60 bp, Artificial
  Synthetic oligonucleotide
cggattgcgtgttggaagcaatggctttccttgaagaatcccacccagggatctttgaaa

SEQ ID NO: 79686 - DNA, 56 bp, Artificial
  Synthetic oligonucleotide
tcatgaagatctgttccaccattgaagagctcagacggcaaaaatagtgaatttag

SEQ ID NO: 79687 - DNA, 57 bp, Artificial
  Synthetic oligonucleotide
tcatgaagatctgttccaccattgaagagctcagacggcaaaaatagtgaatttagc

SEQ ID NO: 79688 - DNA, 60 bp, Artificial
  Synthetic oligonucleotide
tccttcttcagaaatgtggtatggcttatcaaaaagaacaatgcatacccaacaataaag

SEQ ID NO: 79689 - DNA, 60 bp, Artificial
  Synthetic oligonucleotide
ggaacaacacttatgatcacagcaaatacagagaagaagcaatgcaaaataggatacaga

SEQ ID NO: 79690 - DNA, 60 bp, Artificial
  Synthetic oligonucleotide
acgatcttatgaacagatggaaactggtggagaacgccagaatgccactgagatcagagc

SEQ ID NO: 79691 - DNA, 60 bp, Artificial
  Synthetic oligonucleotide
gcgataaactctagcatgccattccacaacatacatcctctcaccattggggaatgcccc

SEQ ID NO: 79692 - DNA, 60 bp, Artificial
  Synthetic oligonucleotide
tgtgctcaggacttgttggagacacaccaaggaacgatgatagctctagcagcagcaatt

SEQ ID NO: 79693 - DNA, 60 bp, Artificial
  Synthetic oligonucleotide
ccaataaggtcaactcaatcattgacaaaatgaacacccagtttgaggccgttgggaagg

SEQ ID NO: 79694 - DNA, 50 bp, Artificial
  Synthetic oligonucleotide
ccaatggatcattgcagtgcagaatttgcatttaaacttgtgagttcaga

SEQ ID NO: 79695 - DNA, 60 bp, Artificial
  Synthetic oligonucleotide
ctggatgtgttccaatggatcattgcagtgcagaatttgcatttaaacttgtgagttcag

SEQ ID NO: 79696 - DNA, 52 bp, Artificial
  Synthetic oligonucleotide
gggtggtatggtttcaggcatcaaaatgcacaaggagaaggaactgcggctg

SEQ ID NO: 79697 - DNA, 60 bp, Artificial
  Synthetic oligonucleotide
acgaaagaactctggatttccatgattcaaatgtcaagaacctatatgataaggtccgac

SEQ ID NO: 79698 - DNA, 60 bp, Artificial
  Synthetic oligonucleotide
aaggtccgactccagctgagagacaatgcaaaagaattgggcaacggatgccttgaattc

SEQ ID NO: 79699 - DNA, 60 bp, Artificial
  Synthetic oligonucleotide
aaggtccgactccagctgagagacaatgcaaaagaattgggcaacggatgctttgaattc

SEQ ID NO: 79700 - DNA, 60 bp, Artificial
  Synthetic oligonucleotide
ggtgttctcacaagaggattgcatgataaaagcagtccgaggtgatctgaatttcgtaaa

SEQ ID NO: 79701 - DNA, 60 bp, Artificial
  Synthetic oligonucleotide
ctaataaggtcaactcaatcattgacaaaatgaacactcaatttgaggccgttggaaagg

SEQ ID NO: 79702 - DNA, 60 bp, Artificial
  Synthetic oligonucleotide
ctaataaggtcaactcaatcattgacaaaatgaacactcagtttgaagccgttggaaagg

SEQ ID NO: 79703 - DNA, 54 bp, Artificial
  Synthetic oligonucleotide
cacaatcatggagaagaatgtgacggtcacacatgctcaggacatactggaaaa

SEQ ID NO: 79704 - DNA, 60 bp, Artificial
  Synthetic oligonucleotide
attgcccctttgatggtagcatacatgctagaaagagagttggtccgcaaaacgaggttc

SEQ ID NO: 79705 - DNA, 60 bp, Artificial
  Synthetic oligonucleotide
gacccctgggttttgcttaatgcgtcttggttcaactccttcctcacacatgcactgaaa

SEQ ID NO: 79706 - DNA, 60 bp, Artificial
  Synthetic oligonucleotide
tcccacccaggaatctttgaaaactcgtgtcttgaaacgatggaagttgttcagcaaaca

SEQ ID NO: 79707 - DNA, 60 bp, Artificial
  Synthetic oligonucleotide
ccacccaggaatctttgaaaactcgtgtcttgaaacgatggaagttgttcagcaaacaag

SEQ ID NO: 79708 - DNA, 60 bp, Artificial
  Synthetic oligonucleotide
ccggttggaatttccagcatggtggaggccatggtgtctagggcccgaattgatgcgcga

SEQ ID NO: 79709 - DNA, 57 bp, Artificial
  Synthetic oligonucleotide
atgagtcttctaaccgaggtcgaaacgtacgttctctctatcgtaccgtcaggcccc

SEQ ID NO: 79710 - DNA, 60 bp, Artificial
  Synthetic oligonucleotide
atgagtcttctaaccgaggtcgaaacgtacgttctctctatcgtaccgtcaggccccctc

SEQ ID NO: 79711 - DNA, 60 bp, Artificial
  Synthetic oligonucleotide
caatctactcaacagtggcaagttccctagcactggcaatcatggtagctggtctgtctt

SEQ ID NO: 79712 - DNA, 60 bp, Artificial
  Synthetic oligonucleotide
atcaatctactcaacagtggcaagttccctagcactggcaatcatggtagctggtctgtc

SEQ ID NO: 79713 - DNA, 60 bp, Artificial
  Synthetic oligonucleotide
agagatcaaaaggcattaaagggaagaggcagcacacttggactcgacctgcgagtggcc

SEQ ID NO: 79714 - DNA, 60 bp, Artificial
  Synthetic oligonucleotide
gctctcctttacaattactggagacaacaccaaatggaatgagaatcaaaatcctcggat

SEQ ID NO: 79715 - DNA, 60 bp, Artificial
  Synthetic oligonucleotide
caagagatgagaactttctcgtttcagcttatttaatgataaaaaacacccttgtttcta

SEQ ID NO: 79716 - DNA, 60 bp, Artificial
  Synthetic oligonucleotide
tcaaggaaattgcttctcattgttcaggcacttagggacaacctggaacctggaaccttc

SEQ ID NO: 79717 - DNA, 60 bp, Artificial
  Synthetic oligonucleotide
cgttcaggcacttagggacaacctggaacctggaaccttcgatcttggagggctatacga

SEQ ID NO: 79718 - DNA, 50 bp, Artificial
  Synthetic oligonucleotide
catgcggtgcactatttgtatataagtttgaaaaaacacccttgtttcta

SEQ ID NO: 79719 - DNA, 60 bp, Artificial
  Synthetic oligonucleotide
tttcacaagtgtgatgacgactgtatggccagtattagaaacaacacctatgatcacagc

SEQ ID NO: 79720 - DNA, 60 bp, Artificial
  Synthetic oligonucleotide
tataaatatggcagattatagcattgattccagttatgtgtgctcagggcttgttggaga

SEQ ID NO: 79721 - DNA, 57 bp, Artificial
  Synthetic oligonucleotide
gccttgttttcatgtgtgtgaagaatggaaacatgcggtgcactatttgtatataag

SEQ ID NO: 79722 - DNA, 60 bp, Artificial
  Synthetic oligonucleotide
taagagtgcatgaggggtatgaagaattcacaatggttgggagaagagcaacagctattt

SEQ ID NO: 79723 - DNA, 60 bp, Artificial
  Synthetic oligonucleotide
cacaaagggcaatgatggaccaagtgcgagaaagcagaaatcctggtaatgccgaaatcg

SEQ ID NO: 79724 - DNA, 60 bp, Artificial
  Synthetic oligonucleotide
ttttgggttttgtgttcacgctcaccgtgcccagtgagcgaggactgcagcgtagacgct

SEQ ID NO: 79725 - DNA, 60 bp, Artificial
  Synthetic oligonucleotide
gaacggctgcattgagggcaagctttctcaaatgtccaaagaagtgaacgccagaattga

SEQ ID NO: 79726 - DNA, 60 bp, Artificial
  Synthetic oligonucleotide
cgtgcagataaaatctgcctaggacatcatgctgcgtccaatggaaccaaagtagacacc

SEQ ID NO: 79727 - DNA, 60 bp, Artificial
  Synthetic oligonucleotide
cgtgcagataaaatctgcctaggacatcatgctgtgtctaatggaatcaaagtagacacc

SEQ ID NO: 79728 - DNA, 60 bp, Artificial
  Synthetic oligonucleotide
cgtgcagataaaatctgcctaggacatcatgccgagtccaatggaaccaaagtagacacc

SEQ ID NO: 79729 - DNA, 60 bp, Artificial
  Synthetic oligonucleotide
aacgctgtagtgatgccagctcatggcccagccaagagcatggaatatgatgctgttgct

SEQ ID NO: 79730 - DNA, 60 bp, Artificial
  Synthetic oligonucleotide
ggagatatgcttctgaggactgcaataggccaagtgtcaaggcccatgttcctgtacgtt

SEQ ID NO: 79731 - DNA, 60 bp, Artificial
  Synthetic oligonucleotide
ataggagacatgctcctacgaactgcaataggccaagtgtcaaggcccatgttcttgtat

SEQ ID NO: 79732 - DNA, 60 bp, Artificial
  Synthetic oligonucleotide
aataggagacatgctcctgagaactgcaataggccaagtgtcaaggcccatgttcctgta

SEQ ID NO: 79733 - DNA, 60 bp, Artificial
  Synthetic oligonucleotide
cagaaatcctgggaatgctgaaattgaagatctcatctttctggcacggtctgcactcat

SEQ ID NO: 79734 - DNA, 60 bp, Artificial
  Synthetic oligonucleotide
ctggcaatcatgatagctggtctatctttttggatgtgctccaatggatcattgcagtgc

SEQ ID NO: 79735 - DNA, 60 bp, Artificial
  Synthetic oligonucleotide
tgagtagtggctacaaagatgtgatactttggtttagcttcggggcatcatgctttttac

SEQ ID NO: 79736 - DNA, 60 bp, Artificial
  Synthetic oligonucleotide
ggtgattgagaatgaatccaaatcagaaactatttgcactatctggagtggcaatagcac

SEQ ID NO: 79737 - DNA, 60 bp, Artificial
  Synthetic oligonucleotide
gattgagaatgaatccaaatcagaaactatttgcattatctggagtggcaatagcactta

SEQ ID NO: 79738 - DNA, 60 bp, Artificial
  Synthetic oligonucleotide
ggagccatatgtatcatgcgacccaacaggatgcaaaatgtatgccttgcaccaagggac

SEQ ID NO: 79739 - DNA, 60 bp, Artificial
  Synthetic oligonucleotide
aacaggcctattatagaaattgatatgaacacattggagcacacaagtagatacgtgtgc

SEQ ID NO: 79740 - DNA, 60 bp, Artificial
  Synthetic oligonucleotide
gaaattgatatgaacacattggagcacacaagtagatacgtgtgcactggaattctcaca

SEQ ID NO: 79741 - DNA, 60 bp, Artificial
  Synthetic oligonucleotide
aatcgatatgaacacattggagcacacaagtagatacgtgtgcactggaattctcacaga

SEQ ID NO: 79742 - DNA, 60 bp, Artificial
  Synthetic oligonucleotide
gatatgaacacattggagcacacgagtagatacgtgtgcactggaattctcacagacacc

SEQ ID NO: 79743 - DNA, 60 bp, Artificial
  Synthetic oligonucleotide
attggagcacacaagtagatacgtgtgcactggaattctcacagacactagcagacctgg

SEQ ID NO: 79744 - DNA, 60 bp, Artificial
  Synthetic oligonucleotide
gagcacacgagtagatacgtgtgcactggaattctcacagacaccagcagacctggggac

SEQ ID NO: 79745 - DNA, 60 bp, Artificial
  Synthetic oligonucleotide
cacagacaccagcagacctggggacaaatctagtggtgattgttccaatccaataactgg

SEQ ID NO: 79746 - DNA, 60 bp, Artificial
  Synthetic oligonucleotide
ctagtggtgattgttccaatccaataactgggagtcccggcgttccgggagtgaagggat

SEQ ID NO: 79747 - DNA, 60 bp, Artificial
  Synthetic oligonucleotide
ctagtggtgattgttccaatccaataactgggagtcccggcgctccgggagtgaagggat

SEQ ID NO: 79748 - DNA, 60 bp, Artificial
  Synthetic oligonucleotide
ggagccatatgtatcatgcgacccaacaggatgtaagatgtatgccttacaccaaggaac

SEQ ID NO: 79749 - DNA, 60 bp, Artificial
  Synthetic oligonucleotide
ttaccagggagccatatgtatcatgcgacccaacaggatgcaaaatgtatgccttgcacc

SEQ ID NO: 79750 - DNA, 60 bp, Artificial
  Synthetic oligonucleotide
gtgaacaaatcattgttaccagggagccatatgtatcatgcgacccaacaggatgcaaaa

SEQ ID NO: 79751 - DNA, 60 bp, Artificial
  Synthetic oligonucleotide
ggggaaagtgaacaaatcattgttaccagggagccatatgtatcatgcgacccaacagga

SEQ ID NO: 79752 - DNA, 60 bp, Artificial
  Synthetic oligonucleotide
gtcaccagggagccatatgtatcatgcgacccaacaggatgcaaaatgtatgccttgcac

SEQ ID NO: 79753 - DNA, 60 bp, Artificial
  Synthetic oligonucleotide
catcgttactagggagccatatgtatcatgcgacccaacaggatgtaagatgtatgcctt

SEQ ID NO: 79754 - DNA, 60 bp, Artificial
  Synthetic oligonucleotide
ccaaatcagaaactatttgcattatctggagtggcaatagcacttagtgtactgaactta

SEQ ID NO: 79755 - DNA, 58 bp, Artificial
  Synthetic oligonucleotide
cgagaatgaatccaaatcagaaactatttgcattatctggagtggcaatagcacttag

SEQ ID NO: 79756 - DNA, 60 bp, Artificial
  Synthetic oligonucleotide
ggagtggcaatagcacttagtgtactgaacttgttaataggaatttcaaatgtcggattg

SEQ ID NO: 79757 - DNA, 60 bp, Artificial
  Synthetic oligonucleotide
tatctggagtggcaatagcacttagtgtactgaacttgttaataggaatttcaaatgtcg

SEQ ID NO: 79758 - DNA, 50 bp, Artificial
  Synthetic oligonucleotide
actttctcgtttcagcttatttaatgataaaaaacacccttgtttctact

SEQ ID NO: 79759 - DNA, 60 bp, Artificial
  Synthetic oligonucleotide
ggtctgcttgaagtgggaactaatggatgaagattaccagggcaggctgtgtaatcctct

SEQ ID NO: 79760 - DNA, 60 bp, Artificial
  Synthetic oligonucleotide
gaagtctgcttgaagtgggaactaatggatgaagactatcagggaaggctttgcaacccc

SEQ ID NO: 79761 - DNA, 60 bp, Artificial
  Synthetic oligonucleotide
cccagaggtctgcttgaagtgggaactaatggatgaagactaccagggtaggctttgtaa

SEQ ID NO: 79762 - DNA, 60 bp, Artificial
  Synthetic oligonucleotide
atcccagaggtctgcttgaagtgggaactaatggatgaagactaccagggtaggctttgt

SEQ ID NO: 79763 - DNA, 60 bp, Artificial
  Synthetic oligonucleotide
ccacatcccagaggtctgcttgaagtgggaactaatggatgaagactacaagggtaggct

SEQ ID NO: 79764 - DNA, 60 bp, Artificial
  Synthetic oligonucleotide
aggttattctggaagcttcatcgactgttgggatgaggctaatgaatgttacaacccctg

SEQ ID NO: 79765 - DNA, 60 bp, Artificial
  Synthetic oligonucleotide
caacagtaactggtcaggttattctggaagcttcatcgactgttgggatgaggctaatga

SEQ ID NO: 79766 - DNA, 60 bp, Artificial
  Synthetic oligonucleotide
tatctatggcacataagaaagttactcagtatgagagacatgtgtgatgctccctttgat

SEQ ID NO: 79767 - DNA, 60 bp, Artificial
  Synthetic oligonucleotide
atgaatccaaatcagaagataataacaattggctctgtctctctaaccattgcaatagta

SEQ ID NO: 79768 - DNA, 60 bp, Artificial
  Synthetic oligonucleotide
cacaaatgaagaatcactgaggcagatccttcgagggtcaggaggaatcgataaagagtc

SEQ ID NO: 79769 - DNA, 60 bp, Artificial
  Synthetic oligonucleotide
caaatgaagaatcactgaggcagatccttcgggggtcaggaggagtcgataaagagtcaa

SEQ ID NO: 79770 - DNA, 60 bp, Artificial
  Synthetic oligonucleotide
ccataagtgtgatgatcggtgtatggagagcataaggaacaacacttatgaccatactca

SEQ ID NO: 79771 - DNA, 60 bp, Artificial
  Synthetic oligonucleotide
ttgaaatatttcataagtgtgacgaccaatgtatggagagcataaggaacaacacttatg

SEQ ID NO: 79772 - DNA, 60 bp, Artificial
  Synthetic oligonucleotide
acaagtgcctgcagaagatcaggttcttccttctatgcggagatgaagtggttgctgtcg

SEQ ID NO: 79773 - DNA, 60 bp, Artificial
  Synthetic oligonucleotide
gagcgtgtcagaaaacaactaagggagaatgctgaagaagatgggactggatgttttgaa

SEQ ID NO: 79774 - DNA, 60 bp, Artificial
  Synthetic oligonucleotide
caaactttatgagcgtgtcagaaaacaactaagggagaatgctgaagaagatgggactgg

SEQ ID NO: 79775 - DNA, 60 bp, Artificial
  Synthetic oligonucleotide
gaatgtcccagagagcccaaagaccagaggactttttggagcaattgctggattcataga

SEQ ID NO: 79776 - DNA, 60 bp, Artificial
  Synthetic oligonucleotide
cctgcagaagatcaggttcttccttctatgcggagatgaagtggttgctgtcgaactcag

SEQ ID NO: 79777 - DNA, 60 bp, Artificial
  Synthetic oligonucleotide
caagtgcctgcagaagatcaggttcttccttctatgcggaaatgaagtggttgctgtcga

SEQ ID NO: 79778 - DNA, 60 bp, Artificial
  Synthetic oligonucleotide
gcctgcagaagatcaggttcttccttctatgcggagatgaagtggttgctgtcaaattca

SEQ ID NO: 79779 - DNA, 60 bp, Artificial
  Synthetic oligonucleotide
tttgagatattccataagtgtgatgatcggtgtatggagagcataaggaacaacacttat

SEQ ID NO: 79780 - DNA, 50 bp, Artificial
  Synthetic oligonucleotide
agaatgataccaccatggtaaacacatacatcaataacgcaacaataatt

SEQ ID NO: 79781 - DNA, 60 bp, Artificial
  Synthetic oligonucleotide
atgtcttgaaacgatggaagttgttcagcaaacaagagtggacaaactgacccaaggtcg

SEQ ID NO: 79782 - DNA, 50 bp, Artificial
  Synthetic oligonucleotide
caggaaggcaagagaagaaccccgcactcagaatgaagtggatgatggca

SEQ ID NO: 79783 - DNA, 60 bp, Artificial
  Synthetic oligonucleotide
caagcattacaactattgcttgaagtggagcaagagataagaactttctcgtttcagctt

SEQ ID NO: 79784 - DNA, 60 bp, Artificial
  Synthetic oligonucleotide
gggagattttacatacagatgtgcactgaactcaaactcagcgactacgaaggaaggctg

SEQ ID NO: 79785 - DNA, 60 bp, Artificial
  Synthetic oligonucleotide
gtcttggaagcaatggctttccttgaagaatcccacccagggatctttgaaaactcgtgt

SEQ ID NO: 79786 - DNA, 54 bp, Artificial
  Synthetic oligonucleotide
catatgtgtgagaaatggaaacatgcggtgcactatttgtatataagtttggaa

SEQ ID NO: 79787 - DNA, 60 bp, Artificial
  Synthetic oligonucleotide
tgaaaggaatgaacagggacaaaccctctggagcaaaacaaacgatgccggctcagaccg

SEQ ID NO: 79788 - DNA, 60 bp, Artificial
  Synthetic oligonucleotide
cgaaagaaatgaacagggacaaaccctctggagcaaaacaaacgatgccggctcagaccg

SEQ ID NO: 79789 - DNA, 60 bp, Artificial
  Synthetic oligonucleotide
gaggaatgaacagggacaaaccctctggagcaaaacaaacgatgccggctcagaccgagt

SEQ ID NO: 79790 - DNA, 60 bp, Artificial
  Synthetic oligonucleotide
gctttcatatgcataaaaaatggaaacatgcggtgcactatttgtatataagtttgaaaa

SEQ ID NO: 79791 - DNA, 59 bp, Artificial
  Synthetic oligonucleotide
gaccacgaagggagactgatccaaaacagcataaccatagagagaatggttctctcggc

SEQ ID NO: 79792 - DNA, 60 bp, Artificial
  Synthetic oligonucleotide
tggagtaaaattggaatcaatgggaacttaccaaatactgtcaatttattcaacagtggc

SEQ ID NO: 79793 - DNA, 60 bp, Artificial
  Synthetic oligonucleotide
gagtaaaattggaatcaatgggaacttaccaaatactgtcaatttattcaacagtggcga

SEQ ID NO: 79794 - DNA, 60 bp, Artificial
  Synthetic oligonucleotide
caatatgagagacatgtgtgatgctccctttgatgacagactcagaagagatcagaaggc

SEQ ID NO: 79795 - DNA, 60 bp, Artificial
  Synthetic oligonucleotide
cagcccattgacaggaagtgctcagcatatagaggaatgttcctgttatcctcgataccc

SEQ ID NO: 79796 - DNA, 60 bp, Artificial
  Synthetic oligonucleotide
agatacctaatgctgggactgacccagattccaaaataaaagaaagacaagaaatagttg

SEQ ID NO: 79797 - DNA, 60 bp, Artificial
  Synthetic oligonucleotide
ggctagggagaacaatcagccccagattgaggagtggatttgaaatgctgaagataccta

SEQ ID NO: 79798 - DNA, 60 bp, Artificial
  Synthetic oligonucleotide
acaaccactattaaaacatgggctaaaaacattttaagaacccaagagtctgaatgtgtt

SEQ ID NO: 79799 - DNA, 60 bp, Artificial
  Synthetic oligonucleotide
gtggtaatgactgatgggcccgcaaataaccaggcgttcacaaaagtaatatactttcat

SEQ ID NO: 79800 - DNA, 60 bp, Artificial
  Synthetic oligonucleotide
agataaagcaataggggaatgcttcaatcctattactgggagtcctggtgcaccaggaat

SEQ ID NO: 79801 - DNA, 55 bp, Artificial
  Synthetic oligonucleotide
cggaagtttcattgattattggaatgacaacagtgaatgctacaatccatgtttc

SEQ ID NO: 79802 - DNA, 60 bp, Artificial
  Synthetic oligonucleotide
cataggaatatccaatatgagtttaaatatatctctatattcaaaaggggaaagccacaa

SEQ ID NO: 79803 - DNA, 60 bp, Artificial
  Synthetic oligonucleotide
agatacctaatgctgggactgacccaaattccaaaataaaagaaagacaagaaatagttg

SEQ ID NO: 79804 - DNA, 60 bp, Artificial
  Synthetic oligonucleotide
gatacctaatgctgggactgacccaaattccaaaataaaagaaagacaagaaatagttgg

SEQ ID NO: 79805 - DNA, 60 bp, Artificial
  Synthetic oligonucleotide
tagtggtaatgactgatgggcccgcaaataaccaggcgttcacaaaagtaatatactttc

SEQ ID NO: 79806 - DNA, 60 bp, Artificial
  Synthetic oligonucleotide
ttgaaatgctgaagatacctaatgctgggactgacccagagtccaaaataaaagaaagac

SEQ ID NO: 79807 - DNA, 60 bp, Artificial
  Synthetic oligonucleotide
cagccccaaattgaggagtggatttgaaatgctgaagatacctaatgctgggactgaccc

SEQ ID NO: 79808 - DNA, 60 bp, Artificial
  Synthetic oligonucleotide
gatacctaatgctgggactgacccagattccaaaataaaagaaagacaagaaatagttgg

SEQ ID NO: 79809 - DNA, 60 bp, Artificial
  Synthetic oligonucleotide
gctgaagatacctaatgctgggactgacccagagtccaaaataaaagaaagacaagaaat

SEQ ID NO: 79810 - DNA, 55 bp, Artificial
  Synthetic oligonucleotide
cggaagtttcattgattattggaatgacaacagtgaatgctacaatccatgcttc

SEQ ID NO: 79811 - DNA, 56 bp, Artificial
  Synthetic oligonucleotide
agataaagcaataggggaatgcttcaatcctattactgggagtcctggtgcaccag

SEQ ID NO: 79812 - DNA, 60 bp, Artificial
  Synthetic oligonucleotide
aatcttctcataggaatatccaatatgagtttaaatatatctctatattcaaaaggagaa

SEQ ID NO: 79813 - DNA, 60 bp, Artificial
  Synthetic oligonucleotide
gctactgcaacggtgtattacaacaagaggcttacaaccactattaaaacatgggctaaa

SEQ ID NO: 79814 - DNA, 60 bp, Artificial
  Synthetic oligonucleotide
gctggggagaacaatcagccccaaattgaggagtggatttgaaatgctgaagatacctaa

SEQ ID NO: 79815 - DNA, 60 bp, Artificial
  Synthetic oligonucleotide
tatcagatactttcaatctattcaacagtagcgagttccctagcactggcaatcatggta

SEQ ID NO: 79816 - DNA, 60 bp, Artificial
  Synthetic oligonucleotide
actaagcaatcttgcaaaaggagagaaggctaatgtgctaattgggcaaggagatgtagt

SEQ ID NO: 79817 - DNA, 60 bp, Artificial
  Synthetic oligonucleotide
gattgcagtgtagctggatggcttcttggaaacccaatgtgtgatgaattcctgaatgta

SEQ ID NO: 79818 - DNA, 60 bp, Artificial
  Synthetic oligonucleotide
ctcattgtccaggcacttagggacaacctggaacctggaaccttcgatcttggagggcta

SEQ ID NO: 79819 - DNA, 60 bp, Artificial
  Synthetic oligonucleotide
cctaattgttcaggcacttagggacaacctggaacctggaaccttcgatcttggagggct

SEQ ID NO: 79820 - DNA, 60 bp, Artificial
  Synthetic oligonucleotide
tgcccgcttcacgctacctaactgacatgactcttgaagaaatgtcaagggactggttca

SEQ ID NO: 79821 - DNA, 60 bp, Artificial
  Synthetic oligonucleotide
gcaatgggccttgttttcatgtgtgtgaagaatggaaacatgcggtgcaccatttgtata

SEQ ID NO: 79822 - DNA, 60 bp, Artificial
  Synthetic oligonucleotide
agaatgccactgagatcagagcatctgttgggagaatggttggtggaatcggaaggttct

SEQ ID NO: 79823 - DNA, 57 bp, Artificial
  Synthetic oligonucleotide
agagagaggggtactctctggtcggaatagatcctttccgtctgcttcaaaacagcc

SEQ ID NO: 79824 - DNA, 60 bp, Artificial
  Synthetic oligonucleotide
ccagtcaaactgagcagtggctacaaagatgtgatactttggtttagcttcggggcatca

SEQ ID NO: 79825 - DNA, 57 bp, Artificial
  Synthetic oligonucleotide
atgagccttctaaccgaggtcgaaacgtacgttctctctatcataccatcaggcccc

SEQ ID NO: 79826 - DNA, 60 bp, Artificial
  Synthetic oligonucleotide
aagatgagtcttctaaccgaggtcgaaacgtacgttctctccatcgtcccgtcaggcccc

SEQ ID NO: 79827 - DNA, 57 bp, Artificial
  Synthetic oligonucleotide
atgagtcttctaaccgaggtcgaaacgtacgttctctctatcataccgtcaggcccc

SEQ ID NO: 79828 - DNA, 60 bp, Artificial
  Synthetic oligonucleotide
atgagtcttctaaccgaggtcgaaacgtacgttctctccatcgtcccgtcaggccccctc

SEQ ID NO: 79829 - DNA, 60 bp, Artificial
  Synthetic oligonucleotide
atgagccttctaaccgaggtcgaaacgtacgttctctctatcataccatcaggccccctc

SEQ ID NO: 79830 - DNA, 60 bp, Artificial
  Synthetic oligonucleotide
atgagtcttctaaccgaggtcgaaacgtacgttctctccatcgttccgtcaggccccctc

SEQ ID NO: 79831 - DNA, 57 bp, Artificial
  Synthetic oligonucleotide
atgagtcttctaaccgaggtcgaaacgtacgttctctccatcgttccgtcaggcccc

SEQ ID NO: 79832 - DNA, 60 bp, Artificial
  Synthetic oligonucleotide
atgagtcttctaaccgaggtcgaaacgtacgttctctctatcataccgtcaggccccctc

SEQ ID NO: 79833 - DNA, 57 bp, Artificial
  Synthetic oligonucleotide
atgagtcttctaaccgaggtcgaaacgtacgttctctccatcgtcccgtcaggcccc

SEQ ID NO: 79834 - DNA, 57 bp, Artificial
  Synthetic oligonucleotide
cgactacgaaggaaggctgatccagaacagcataacaatagagagaatggttctctc

SEQ ID NO: 79835 - DNA, 60 bp, Artificial
  Synthetic oligonucleotide
cgctgaaagaggcaaattaaagagaagagcaattgcaacacccgggatgcagatcagagg

SEQ ID NO: 79836 - DNA, 60 bp, Artificial
  Synthetic oligonucleotide
tcctaggagctcttggtccaatcatgatgcctcatcaggagtgagctcagcatgcccata

SEQ ID NO: 79837 - DNA, 60 bp, Artificial
  Synthetic oligonucleotide
ggcaatcatggtagctggtctatctttctggatgtgctccaatggatcattgcaatgcag

SEQ ID NO: 79838 - DNA, 60 bp, Artificial
  Synthetic oligonucleotide
ctggcaatcatggtagctggtctatctttctggatgtgctccaatggatcattgcaatgc

SEQ ID NO: 79839 - DNA, 60 bp, Artificial
  Synthetic oligonucleotide
caaatattgtcaatttattcaacagtggcgagttccttagcactggcaatcatggtggct

SEQ ID NO: 79840 - DNA, 60 bp, Artificial
  Synthetic oligonucleotide
acttctggccattgcaatgggccttgtcttcatatgtgtgaagaatggaaacatgcggtg

SEQ ID NO: 79841 - DNA, 60 bp, Artificial
  Synthetic oligonucleotide
ccgagtctaggagcgagaccacaagtgaatggccaatctggaagaattgactttcattgg

SEQ ID NO: 79842 - DNA, 60 bp, Artificial
  Synthetic oligonucleotide
cgagtctaggagcgagaccacaagtgaatggccaatctggaagaattgactttcattggc

SEQ ID NO: 79843 - DNA, 56 bp, Artificial
  Synthetic oligonucleotide
tgagtcttctaaccgaggtcgaaacgtacgttctctctatcgtcccgtcaggcccc

SEQ ID NO: 79844 - DNA, 60 bp, Artificial
  Synthetic oligonucleotide
tgagtcttctaaccgaggtcgaaacgtacgttctctctatcgtcccgtcaggccccctca

SEQ ID NO: 79845 - DNA, 60 bp, Artificial
  Synthetic oligonucleotide
gagatttaatgtcacagtctcgcactcgcgagatacttacgaaaaccacagtggaccata

SEQ ID NO: 79846 - DNA, 60 bp, Artificial
  Synthetic oligonucleotide
cactgagatagttgtggcaatgctactatttgctatccatactgtccaaaaaagtacctt

SEQ ID NO: 79847 - DNA, 60 bp, Artificial
  Synthetic oligonucleotide
cccagtcaaactaagtagcggctacaaagatgtgatactttggtttagcttcggggcatc

SEQ ID NO: 79848 - DNA, 60 bp, Artificial
  Synthetic oligonucleotide
gacccagtcaaactgagcagcggctacaaagatgtgatactttggtttagcttcggggca

SEQ ID NO: 79849 - DNA, 60 bp, Artificial
  Synthetic oligonucleotide
cacttagtgtactgaacttattgataggaatctcaaatgtcggattgaatgtatctctac

SEQ ID NO: 79850 - DNA, 60 bp, Artificial
  Synthetic oligonucleotide
ctctatctggagtagcaatagcgcttagtgtactgaacttattgataggaatctcaaatg

SEQ ID NO: 79851 - DNA, 60 bp, Artificial
  Synthetic oligonucleotide
cttagtgtactgaacttattgataggaatctcaaatgttggattgaacgtatctctacac

SEQ ID NO: 79852 - DNA, 60 bp, Artificial
  Synthetic oligonucleotide
atagcacttagtgtactgaacttattgataggaatctcaaatgtcggattgaatgtatct

SEQ ID NO: 79853 - DNA, 60 bp, Artificial
  Synthetic oligonucleotide
tagtgtactgaacttattgataggaatctcaaatgttggattgaacgtatctctacactt

SEQ ID NO: 79854 - DNA, 60 bp, Artificial
  Synthetic oligonucleotide
cttaatgcatcttggttcaactccttcctcacacatgcactgaaatagctgtggcaatgc

SEQ ID NO: 79855 - DNA, 59 bp, Artificial
  Synthetic oligonucleotide
cagatgcgtgatgtgctggggacatttgacactgttcaaataataaagctactaccatt

SEQ ID NO: 79856 - DNA, 60 bp, Artificial
  Synthetic oligonucleotide
ccaacactgtgtcaagctttcaggtagactgttttctttggcatgtccgcaaacggtttg

SEQ ID NO: 79857 - DNA, 52 bp, Artificial
  Synthetic oligonucleotide
agtgctgtggatgttgacgatggtcattttgtcaacatagagctggagtaaa

SEQ ID NO: 79858 - DNA, 60 bp, Artificial
  Synthetic oligonucleotide
ggcagattatagcattgattccagttatgtatgctcagggctcgttggtgacacacccag

SEQ ID NO: 79859 - DNA, 60 bp, Artificial
  Synthetic oligonucleotide
tgaagacctcatctttctggcacggtctgcactcattctgagaggatcagtggctcataa

SEQ ID NO: 79860 - DNA, 60 bp, Artificial
  Synthetic oligonucleotide
acagcagcacaacgagcaatgatggaccaagtgcgagaaagcaggaatcctgggaatgct

SEQ ID NO: 79861 - DNA, 60 bp, Artificial
  Synthetic oligonucleotide
cagcagcacaacgagcaatgatggaccaagtgcgagaaagcaggaatcctgggaatgctg

SEQ ID NO: 79862 - DNA, 60 bp, Artificial
  Synthetic oligonucleotide
gcaaaatgctataagtactacattcccttatactggagatcctccatacagccatgggac

SEQ ID NO: 79863 - DNA, 60 bp, Artificial
  Synthetic oligonucleotide
ggaagacgggtttctagatgtttggacttataatgctgaacttctggttctcatggaaaa

SEQ ID NO: 79864 - DNA, 60 bp, Artificial
  Synthetic oligonucleotide
atgaatccaaatcagaagataataacaattggctctgtctccctaaccattgcaatagta

SEQ ID NO: 79865 - DNA, 60 bp, Artificial
  Synthetic oligonucleotide
actatcgatctattcaactgtggcgagttccctagcactggcaatcatggtagctggtct

SEQ ID NO: 79866 - DNA, 60 bp, Artificial
  Synthetic oligonucleotide
tggcgagttccctagcactggcaatcatggtagctggtctgtctttttggatgtgttcca

SEQ ID NO: 79867 - DNA, 52 bp, Artificial
  Synthetic oligonucleotide
aagaaatgagcaaggccaaactctttggagcaagacaaatgatgctggatca

SEQ ID NO: 79868 - DNA, 60 bp, Artificial
  Synthetic oligonucleotide
ggagacaatacatggttaggtaggaccattagcccgaggtcgagaagtggtttcgaaatg

SEQ ID NO: 79869 - DNA, 60 bp, Artificial
  Synthetic oligonucleotide
atggagacaatacatggttaggtaggaccattagcccgaggtcgagaagtggtttcgaaa

SEQ ID NO: 79870 - DNA, 60 bp, Artificial
  Synthetic oligonucleotide
gaatggagacaatacatggttaggtaggaccattagcccgaggtcaaggaatggattcga

SEQ ID NO: 79871 - DNA, 60 bp, Artificial
  Synthetic oligonucleotide
cgagcacaagttgccacgatggaattggcagaatgaccatttgtatacaggggaataatg

SEQ ID NO: 79872 - DNA, 60 bp, Artificial
  Synthetic oligonucleotide
caagcacaagttgccacgatggaattggcagaatgaccatttgcgtgcaagggaataatg

SEQ ID NO: 79873 - DNA, 60 bp, Artificial
  Synthetic oligonucleotide
gtcaagcacaagttgccacgatggaattggcagaatgaccatttgcgtgcaagggaataa

SEQ ID NO: 79874 - DNA, 60 bp, Artificial
  Synthetic oligonucleotide
gtcgagcacaagttgccacgatggaattggcagaatgaccatttgtatacaggggaataa

SEQ ID NO: 79875 - DNA, 60 bp, Artificial
  Synthetic oligonucleotide
gacaatacatggttaggtaggaccattagcccgaggtcaaggaatggattcgaaatgctg

SEQ ID NO: 79876 - DNA, 60 bp, Artificial
  Synthetic oligonucleotide
ccggtcaaactgagcagtggttacaaagatgtgatactttggtttagcttcggggcatca

SEQ ID NO: 79877 - DNA, 60 bp, Artificial
  Synthetic oligonucleotide
tccggtcaaactgagcagtggttacaaagatgtgatactttggtttagcttcggggcatc

SEQ ID NO: 79878 - DNA, 60 bp, Artificial
  Synthetic oligonucleotide
gtctcacccaggaatctttgaaaactcgtgtcttgaaacgatggaagttgttcaacaaac

SEQ ID NO: 79879 - DNA, 60 bp, Artificial
  Synthetic oligonucleotide
agagtctcacccaggaatctttgaaaactcgtgtcttgaaacgatggaagttgttcaaca

SEQ ID NO: 79880 - DNA, 60 bp, Artificial
  Synthetic oligonucleotide
gccatggaacgggaacaggatacaccatggacacagtcaacaggacacatcaatattcag

SEQ ID NO: 79881 - DNA, 60 bp, Artificial
  Synthetic oligonucleotide
atacaggagaccggttggaatttccagcatggtggaggccatggtgtctagggcccgaat

SEQ ID NO: 79882 - DNA, 60 bp, Artificial
  Synthetic oligonucleotide
gcctattatagaaattgatatgagcacattggagcacacaagtagatacgtgtgcactgg

SEQ ID NO: 79883 - DNA, 60 bp, Artificial
  Synthetic oligonucleotide
aacaggcctattatagaaattgatatgagcacattggagcacacaagtagatacgtgtgc

SEQ ID NO: 79884 - DNA, 60 bp, Artificial
  Synthetic oligonucleotide
gcaagccttacaactactgcttgaggtggagcaagagataagaactttctcgtttcagct

SEQ ID NO: 79885 - DNA, 60 bp, Artificial
  Synthetic oligonucleotide
tccattatccaaaggtctacaaaacctactttgaaaaggttgaaaggttaaaacatggga

SEQ ID NO: 79886 - DNA, 60 bp, Artificial
  Synthetic oligonucleotide
cacaatcatggagaagaatgtgacggtcacacatgctcaggacatactggaaaaagagca

SEQ ID NO: 79887 - DNA, 60 bp, Artificial
  Synthetic oligonucleotide
ggttgacacaatcatggagaagaatgtgacggtcacacatgctcaggacatactggaaaa

SEQ ID NO: 79888 - DNA, 60 bp, Artificial
  Synthetic oligonucleotide
ccagaacagcataacaatagagagaatggttctctctgcatttgatgaaaggaggaacaa

SEQ ID NO: 79889 - DNA, 60 bp, Artificial
  Synthetic oligonucleotide
tttagcttcggggcatcatgtttcatacttctggccattgcaatgggccttgtcttcata

SEQ ID NO: 79890 - DNA, 60 bp, Artificial
  Synthetic oligonucleotide
cgactacagcttagggataatgcaaaggagctgggtaatggttgtttcgagttctaccat

SEQ ID NO: 79891 - DNA, 60 bp, Artificial
  Synthetic oligonucleotide
tcgactacagcttagggataatgcaaaggagctgggtaatggttgtttcgagttctacca

SEQ ID NO: 79892 - DNA, 60 bp, Artificial
  Synthetic oligonucleotide
ttttgagggattgtagtgtagctggatggctcctcggaaatcccatgtgtgatgaattcc

SEQ ID NO: 79893 - DNA, 60 bp, Artificial
  Synthetic oligonucleotide
gggattcacatacagcggaataagaactaatggagcaaccagtgcatgtaggagatcagg

SEQ ID NO: 79894 - DNA, 58 bp, Artificial
  Synthetic oligonucleotide
tgacagcatcggttcatggtctcaaaatatcctcagaactcaggagtcagagtgtgtt

SEQ ID NO: 79895 - DNA, 60 bp, Artificial
  Synthetic oligonucleotide
tgacagtatcggttcatggtctcaaaatatcctcagaactcaggagtcagagtgtgtttg

SEQ ID NO: 79896 - DNA, 60 bp, Artificial
  Synthetic oligonucleotide
ccgccgtattaagaggatttctaattctaggcaaagaagacaaaagatatgggccagcat

SEQ ID NO: 79897 - DNA, 53 bp, Artificial
  Synthetic oligonucleotide
gatttctaattctaggcaaagaagacaaaagatatgggccagcattgagcatc

SEQ ID NO: 79898 - DNA, 51 bp, Artificial
  Synthetic oligonucleotide
tttctaattctaggcaaagaagacaaaagatatgggccagcattgagcatc

SEQ ID NO: 79899 - DNA, 60 bp, Artificial
  Synthetic oligonucleotide
ggaaggtctggttgatggatggtatggcttcaggcatcaaaatgcacaaggggagggaac

SEQ ID NO: 79900 - DNA, 60 bp, Artificial
  Synthetic oligonucleotide
tcagatactatcaatctactcaacagtggcgagttccctagcactggcaatcatgatagc

SEQ ID NO: 79901 - DNA, 60 bp, Artificial
  Synthetic oligonucleotide
cagatactatcaatctactcaacagtggcgagttccctagcactggcaatcatgatagct

SEQ ID NO: 79902 - DNA, 60 bp, Artificial
  Synthetic oligonucleotide
gcccattgtcaggaagtgctcagcatatagaggaatgttcttgttaccctcgatatccag

SEQ ID NO: 79903 - DNA, 60 bp, Artificial
  Synthetic oligonucleotide
gttgatagggcaaggagacgtagtgttggtaatgaaacggaaacgggactctagcatact

SEQ ID NO: 79904 - DNA, 60 bp, Artificial
  Synthetic oligonucleotide
ttggaagcaatggctttccttgaagagtcccacccagggatctttgaaaactcatgtctt

SEQ ID NO: 79905 - DNA, 60 bp, Artificial
  Synthetic oligonucleotide
gaagaaccctgcactcagaatgaaatggatgatggcaatgaaatacccaattacggcgga

SEQ ID NO: 79906 - DNA, 58 bp, Artificial
  Synthetic oligonucleotide
ggggattatatgaagcaattgaggagtgcctgattaacgatccctgggttttgcttaa

SEQ ID NO: 79907 - DNA, 60 bp, Artificial
  Synthetic oligonucleotide
aaatttcaccattgccttctcttccaggacatactaatgaggatgtcaaaaatgcaattg

SEQ ID NO: 79908 - DNA, 60 bp, Artificial
  Synthetic oligonucleotide
ccaaaacagcataacaatagagagaatggttctttctgcatttgatgaaaggaggaacaa

SEQ ID NO: 79909 - DNA, 60 bp, Artificial
  Synthetic oligonucleotide
ctttgaattctaccacaagtgtgacaatgaatgcatggaaagtgtgagaaatggaacgta

SEQ ID NO: 79910 - DNA, 60 bp, Artificial
  Synthetic oligonucleotide
gagttctatcacaagtgtgacaatgaatgcatggaaagtgtgagaaatggaacgtatgac

SEQ ID NO: 79911 - DNA, 60 bp, Artificial
  Synthetic oligonucleotide
tttgaattctaccacaagtgtgacaatgaatgcatggaaagtgtgagaaatggaacgtat

SEQ ID NO: 79912 - DNA, 60 bp, Artificial
  Synthetic oligonucleotide
gttcttgaaataggagatatgctcctgagaactgcaataggccaagtgtcaaggcccatg

SEQ ID NO: 79913 - DNA, 60 bp, Artificial
  Synthetic oligonucleotide
gttcttgaaataggagatatgcttctgaggactgcaataggccaagtgtcaaggcccatg

SEQ ID NO: 79914 - DNA, 60 bp, Artificial
  Synthetic oligonucleotide
gttcttgaaataggagacatgctcctgagaactgcaataggccaagtgtcaaggcccatg

SEQ ID NO: 79915 - DNA, 60 bp, Artificial
  Synthetic oligonucleotide
gcatgggcctcatatacaacagaatgggaactgtaactactgaagtggcgtttggcctgg

SEQ ID NO: 79916 - DNA, 60 bp, Artificial
  Synthetic oligonucleotide
agaactctggatttccatgattcaaatgtcaagaacctgtacgataaggtccgactccag

SEQ ID NO: 79917 - DNA, 60 bp, Artificial
  Synthetic oligonucleotide
agaactctggatttccatgattcaaatgtcaagaacctatacgataaggtccggctccag

SEQ ID NO: 79918 - DNA, 60 bp, Artificial
  Synthetic oligonucleotide
acgaaagaactctggatttccatgattcaaatgtcaagaacctatataataaggtccgac

SEQ ID NO: 79919 - DNA, 60 bp, Artificial
  Synthetic oligonucleotide
ggaaagaactctggatttccatgattcaaatgtcaagaacttatacgacaaggtccgact

SEQ ID NO: 79920 - DNA, 60 bp, Artificial
  Synthetic oligonucleotide
acgaaagaactctggatttccatgattcaaatgtcaagaacctgtacgataaggtccgac

SEQ ID NO: 79921 - DNA, 60 bp, Artificial
  Synthetic oligonucleotide
taggcccgttatagacataaatatggcagattacagcattgattccagttatgtatgttc

SEQ ID NO: 79922 - DNA, 60 bp, Artificial
  Synthetic oligonucleotide
acagtggcaagttccctgacactggcaatcatgatagctggtctatctttttggatgtgc

SEQ ID NO: 79923 - DNA, 60 bp, Artificial
  Synthetic oligonucleotide
gccttgtcttcatatgtgtgaagaatggaaacatgcggtgcactatttgtatataagttt

SEQ ID NO: 79924 - DNA, 60 bp, Artificial
  Synthetic oligonucleotide
ctaccataaatgtgacaatgaatgcatggaaagtgtgagaaacggaacgtataactatcc

SEQ ID NO: 79925 - DNA, 60 bp, Artificial
  Synthetic oligonucleotide
gggcaaaagaagtacaccaaaaccacatactggtgggatggactccaatcctctgatgat

SEQ ID NO: 79926 - DNA, 60 bp, Artificial
  Synthetic oligonucleotide
ggtacaccaaaaccacatactggtgggatggactccaatcctctgatgatttcgccctca

SEQ ID NO: 79927 - DNA, 60 bp, Artificial
  Synthetic oligonucleotide
aagaggtacaccaaaaccacatactggtgggatggactccaatcctctgatgatttcgcc

SEQ ID NO: 79928 - DNA, 60 bp, Artificial
  Synthetic oligonucleotide
gggcaggacatctgatatgaggactgaaatcataagaatgatggaaagtgccagaccaga

SEQ ID NO: 79929 - DNA, 60 bp, Artificial
  Synthetic oligonucleotide
gggcagaacatctgacatgagaactgaaatcataagaatgatggaaagtgccagaccaga

SEQ ID NO: 79930 - DNA, 60 bp, Artificial
  Synthetic oligonucleotide
tgagggcagaacatctgacatgagaactgaaatcataagaatgatggaaagtgccagacc

SEQ ID NO: 79931 - DNA, 60 bp, Artificial
  Synthetic oligonucleotide
aacatttgagttcacaagctttttctaccgctatggatttgtagccaacttcagtatgga

SEQ ID NO: 79932 - DNA, 50 bp, Artificial
  Synthetic oligonucleotide
ttcacgagctttttctaccgctatggatttgtagccaacttcagtatgga

SEQ ID NO: 79933 - DNA, 60 bp, Artificial
  Synthetic oligonucleotide
tataaaccggacgggaacatttgagttcacaagctttttctaccgctatggatttgtagc

SEQ ID NO: 79934 - DNA, 50 bp, Artificial
  Synthetic oligonucleotide
cacaagctttttctaccgctatggatttgtagccaacttcagtatggagt

SEQ ID NO: 79935 - DNA, 60 bp, Artificial
  Synthetic oligonucleotide
ttcacgctacctaactgacatgactcttgaagaaatgtcaagggactggttcatgctcat

SEQ ID NO: 79936 - DNA, 55 bp, Artificial
  Synthetic oligonucleotide
acattagtccattgtcaggaagtgctcagcatatagaggaatgttcctgttatcc

SEQ ID NO: 79937 - DNA, 60 bp, Artificial
  Synthetic oligonucleotide
cgatttgcagaccaagaactgggtgatgccccattccttgaccggcttcgccgggatcag

SEQ ID NO: 79938 - DNA, 60 bp, Artificial
  Synthetic oligonucleotide
aaacggtttgcagaccaagaactgggtgatgccccattccttgaccggcttcgccgagac

SEQ ID NO: 79939 - DNA, 52 bp, Artificial
  Synthetic oligonucleotide
ttcattctatgcagaaatgaagtggctcctgtcagatacagacaatgctgct

SEQ ID NO: 79940 - DNA, 60 bp, Artificial
  Synthetic oligonucleotide
gatcttcattctatgcagaaatgaagtggctcctgtcagatacagacaatgctgctttcc

SEQ ID NO: 79941 - DNA, 60 bp, Artificial
  Synthetic oligonucleotide
gggtatgaagaattcacaatggttgggagaagagcaacagctattctcagaaaggcaacc

SEQ ID NO: 79942 - DNA, 60 bp, Artificial
  Synthetic oligonucleotide
tatctatggcacataagaaaactgctcagcatgagagacatgtgtgatgctccctttgat

SEQ ID NO: 79943 - DNA, 60 bp, Artificial
  Synthetic oligonucleotide
cgactttccgtggtctcttatccaccccattgggcaccccaccgacagtgagtaacagtg

SEQ ID NO: 79944 - DNA, 60 bp, Artificial
  Synthetic oligonucleotide
acagaacgactttccgtggtctcttatccaccccattgggcaccccaccgacagtgagta

SEQ ID NO: 79945 - DNA, 60 bp, Artificial
  Synthetic oligonucleotide
atcctcatcggtggacttgaatggaatgataactcaattcgagtgtctgaaaatatacag

SEQ ID NO: 79946 - DNA, 60 bp, Artificial
  Synthetic oligonucleotide
cacatggccataatcaagaaatacacatcaggaaggcaagagaagaaccccgcactcagg

SEQ ID NO: 79947 - DNA, 60 bp, Artificial
  Synthetic oligonucleotide
acagggacaaaccctctggagcaaaacaaatgatgccggctcagaccgagtgatggtatc

SEQ ID NO: 79948 - DNA, 60 bp, Artificial
  Synthetic oligonucleotide
ggactccaacactgtatcaagctttcaggtagactgctttctttggcatgtccgcaaacg

SEQ ID NO: 79949 - DNA, 60 bp, Artificial
  Synthetic oligonucleotide
actaataaggtcaactcaatcattgacaaaatgaacactcaatttgaggccgttggaaag

SEQ ID NO: 79950 - DNA, 60 bp, Artificial
  Synthetic oligonucleotide
accaataaggtcaactcaatcattgacaaaatgaacacccagtttgaggccgttgggaag

SEQ ID NO: 79951 - DNA, 60 bp, Artificial
  Synthetic oligonucleotide
accaataaggtcaactcaatcattgacaaaatgaacactcagtttgaggcagttgggaag

SEQ ID NO: 79952 - DNA, 60 bp, Artificial
  Synthetic oligonucleotide
actaataaggtcaactcaatcattgacaaaatgaacactcaatttgaggccgttgggaag

SEQ ID NO: 79953 - DNA, 60 bp, Artificial
  Synthetic oligonucleotide
actaataaggtcaactcaatcattgacaaaatgaacactcagtttgaagccgttggaaag

SEQ ID NO: 79954 - DNA, 60 bp, Artificial
  Synthetic oligonucleotide
ctaataaggtcaactcaatcattgacaaaatgaacacccagtttaaagccgtcgggaagg

SEQ ID NO: 79955 - DNA, 60 bp, Artificial
  Synthetic oligonucleotide
ctaataaggtcaactcaatcattgacaaaatgaacacccagtttgaagccgtcgggaagg

SEQ ID NO: 79956 - DNA, 60 bp, Artificial
  Synthetic oligonucleotide
actaataaggtcaactcaatcattgacaaaatgaacactcagtttgaggccgttggaaag

SEQ ID NO: 79957 - DNA, 60 bp, Artificial
  Synthetic oligonucleotide
ggactccaacacgataacctcgtttcaggtagattgctatctatggcacatacgaaaact

SEQ ID NO: 79958 - DNA, 60 bp, Artificial
  Synthetic oligonucleotide
cataatggactccaacacgataacctcgtttcaggtagattgctatctatggcacatacg

SEQ ID NO: 79959 - DNA, 60 bp, Artificial
  Synthetic oligonucleotide
atggactccaacacgataacctcgtttcaggtagattgctatctatggcacatacgaaag

SEQ ID NO: 79960 - DNA, 60 bp, Artificial
  Synthetic oligonucleotide
ggagctgggtaatggttgtttcgagttctatcacaaatgtgataatgaatgtatggaaag

SEQ ID NO: 79961 - DNA, 60 bp, Artificial
  Synthetic oligonucleotide
acggaaaagggactctagcatacttactgacagccagacagcgaccaaaaggattcggat

SEQ ID NO: 79962 - DNA, 60 bp, Artificial
  Synthetic oligonucleotide
ggatgtcaatccgactttacttttcttgaaagtgccagcgcaaaatgctataagtactac

SEQ ID NO: 79963 - DNA, 60 bp, Artificial
  Synthetic oligonucleotide
ctcgaaaatttacaggcctatcaaaagcggatgggagtgcagatgcaacgattcaagtga

SEQ ID NO: 79964 - DNA, 60 bp, Artificial
  Synthetic oligonucleotide
aggccaggcaaatggtacaggcaatgagaacagttgggactcaccctaattccagcactg

SEQ ID NO: 79965 - DNA, 60 bp, Artificial
  Synthetic oligonucleotide
gctcatacaggcaaatggcaacaacaaccaatccgctaatcagacatgagaaccgaatgg

SEQ ID NO: 79966 - DNA, 60 bp, Artificial
  Synthetic oligonucleotide
gctcacacaggcaaatggcaacaacaaccaatccgctaatcagacatgagaaccgaatgg

SEQ ID NO: 79967 - DNA, 60 bp, Artificial
  Synthetic oligonucleotide
ttgcaaatcaggccaggcaaatggtacaggcaatgagaacagttgggactcaccctaatt

SEQ ID NO: 79968 - DNA, 60 bp, Artificial
  Synthetic oligonucleotide
caggcaaatggcaacaacaaccaatccgctaatcagacatgagaaccgaatggtgttagc

SEQ ID NO: 79969 - DNA, 60 bp, Artificial
  Synthetic oligonucleotide
atttggtttggtatgtgccacttgtgaacaaattgctgattcacagcatcgctcatacag

SEQ ID NO: 79970 - DNA, 60 bp, Artificial
  Synthetic oligonucleotide
atttggtttggtatgtgccacttgtgaacaaattgctgattcacagcatcgctcacacag

SEQ ID NO: 79971 - DNA, 60 bp, Artificial
  Synthetic oligonucleotide
ggtatgtgccacttgtgaacaaattgctgattcacagcatcgctcacacaggcaaatggc

SEQ ID NO: 79972 - DNA, 60 bp, Artificial
  Synthetic oligonucleotide
ggtatgtgccacttgtgaacaaattgctgattcacagcatcgctcatacaggcaaatggc

SEQ ID NO: 79973 - DNA, 53 bp, Artificial
  Synthetic oligonucleotide
ttgatattgtggatttttgatcgtcttttcttcaaatgtgcctaccgccgatt

SEQ ID NO: 79974 - DNA, 50 bp, Artificial
  Synthetic oligonucleotide
ggggatacctgaatctatgagggaagaatatcggcaggaacagcaaagcg

SEQ ID NO: 79975 - DNA, 60 bp, Artificial
  Synthetic oligonucleotide
ggcctatcaaaagcggatgggagtgcagatgcaacgattcaagtgatcttctcgttgcca

SEQ ID NO: 79976 - DNA, 60 bp, Artificial
  Synthetic oligonucleotide
attcaagtgatcttctcgttgccattgcaagtatcactgggatattgcacttgatattgt

SEQ ID NO: 79977 - DNA, 60 bp, Artificial
  Synthetic oligonucleotide
gggcctcatatacaacagaatgggaactgtcactactgaagtggcatttggtttggtatg

SEQ ID NO: 79978 - DNA, 60 bp, Artificial
  Synthetic oligonucleotide
ggataaggcaattaaactgtataaaaaactaaaaagagacgtaacatttcacggggccaa

SEQ ID NO: 79979 - DNA, 60 bp, Artificial
  Synthetic oligonucleotide
ttgaaagatgagccttctaaccgaggtcgaaacgtatgttctctctatcatcccatcagg

SEQ ID NO: 79980 - DNA, 60 bp, Artificial
  Synthetic oligonucleotide
gcaggtagatattgaaagatgagccttctaaccgaggtcgaaacgtatgttctctctatc

SEQ ID NO: 79981 - DNA, 60 bp, Artificial
  Synthetic oligonucleotide
caccgtgcccagtgagcggggactgcagcgtagacgatttgtccaaaatgccctcaatgg

SEQ ID NO: 79982 - DNA, 60 bp, Artificial
  Synthetic oligonucleotide
gcgcagagacttgagaatgtttttgcagggaaaaatacagatcttgaggctctcatggaa

SEQ ID NO: 79983 - DNA, 60 bp, Artificial
  Synthetic oligonucleotide
agcgaaagcaggtagatattgaaagatgagccttctaaccgaggtcgaaacgtatgttct

SEQ ID NO: 79984 - DNA, 60 bp, Artificial
  Synthetic oligonucleotide
agcaaaagcaggtagatgttgaaagatgagccttctaaccgaggtcgaaacgtatgttct

SEQ ID NO: 79985 - DNA, 60 bp, Artificial
  Synthetic oligonucleotide
gcaggtagatgttgaaagatgagccttctaaccgaggtcgaaacgtatgttctctctatc

SEQ ID NO: 79986 - DNA, 60 bp, Artificial
  Synthetic oligonucleotide
gcgaaagcaggtagatattgaaagatgagccttctaaccgaggtcgaaacgtatgttctc

SEQ ID NO: 79987 - DNA, 60 bp, Artificial
  Synthetic oligonucleotide
ggaacaccccaatgctggaaaggaccctaagaaaactggaggacctatctacagaaggag

SEQ ID NO: 79988 - DNA, 60 bp, Artificial
  Synthetic oligonucleotide
gctgggaacagatgtacactccaggaggggaagtgagaaatgatgatgttgaccaaagct

SEQ ID NO: 79989 - DNA, 60 bp, Artificial
  Synthetic oligonucleotide
gtccatattagcccattgtcaggaagtgctcagcatatagaggaatgttcctgttaccct

SEQ ID NO: 79990 - DNA, 60 bp, Artificial
  Synthetic oligonucleotide
ttcatatcagcccattgtcaggaagtgctcagcatatagaggaatgttcctgttatcccc

SEQ ID NO: 79991 - DNA, 60 bp, Artificial
  Synthetic oligonucleotide
atcaatctactcaacagtggcgagttccctagcactggcaatcatggtagctggtctatc

SEQ ID NO: 79992 - DNA, 60 bp, Artificial
  Synthetic oligonucleotide
caatctactcaacagtggcgagttccctagcactggcaatcatggtagctggtctatctt

SEQ ID NO: 79993 - DNA, 60 bp, Artificial
  Synthetic oligonucleotide
caatgtggactgctgggaacaatcactggaccaccccaatgtgaccaattcctagaattt

SEQ ID NO: 79994 - DNA, 60 bp, Artificial
  Synthetic oligonucleotide
ggctctgtctccctcaccattgcaataatatgcttcctcatgcagattgctatcctggca

SEQ ID NO: 79995 - DNA, 60 bp, Artificial
  Synthetic oligonucleotide
acagcattgattccagttatgtatgctcagggctcgttggtgacacacccagaaatgacg

SEQ ID NO: 79996 - DNA, 60 bp, Artificial
  Synthetic oligonucleotide
ggaacaggctcatggcctgatggggcgaacatcaacttcatgcctctataagctttcgca

SEQ ID NO: 79997 - DNA, 60 bp, Artificial
  Synthetic oligonucleotide
cttcctttgacatgagcaatgaagggtcttatttcttcggagacaatgctgaggagtttg

SEQ ID NO: 79998 - DNA, 60 bp, Artificial
  Synthetic oligonucleotide
acgaggggtcttatttcttcggagacaatgcagaggagtataacaattaaagaaaaatac

SEQ ID NO: 79999 - DNA, 60 bp, Artificial
  Synthetic oligonucleotide
cagcatcgtcgtattttgtggcacttcaggcacctatggaacaggctcatggcctgatgg

SEQ ID NO: 80000 - DNA, 60 bp, Artificial
  Synthetic oligonucleotide
cagtattgtcgtattttgtggcacttcaggtacctatggaacaggctcatggcctgatgg

SEQ ID NO: 80001 - DNA, 60 bp, Artificial
  Synthetic oligonucleotide
cagtattgtcgtattttgcggcacttcaggtacctatggaacaggctcatggcctgatgg

SEQ ID NO: 80002 - DNA, 60 bp, Artificial
  Synthetic oligonucleotide
tgaaagaggagtggaagtcgttaatgcaactgaaacggtggaacgaacaaacgtccccaa

SEQ ID NO: 80003 - DNA, 60 bp, Artificial
  Synthetic oligonucleotide
tgaaagaggagtggaagtcgttaatgcaactgaaacggtggaacgaacaaacgtccccag

SEQ ID NO: 80004 - DNA, 60 bp, Artificial
  Synthetic oligonucleotide
atagcaccattaatggtggcatacatgttggaaagagaattagtccgaaaaaccagattt

SEQ ID NO: 80005 - DNA, 60 bp, Artificial
  Synthetic oligonucleotide
ctggaaccttcgatcttggagggctatatgaagcaattgaggagtgcctgattaatgatc

SEQ ID NO: 80006 - DNA, 60 bp, Artificial
  Synthetic oligonucleotide
ggaaccttcgatcttggagggctatatgaagcaattgaggagtgcctgattaatgacccc

SEQ ID NO: 80007 - DNA, 60 bp, Artificial
  Synthetic oligonucleotide
ttcatatcagtccattgtcaggaagtgctcagcatatagaggaatgttcctgttatcccc

SEQ ID NO: 80008 - DNA, 60 bp, Artificial
  Synthetic oligonucleotide
ctggtctatctttttggatgtgctccaatggatcattgcagtgcagaatttgcatctaaa

SEQ ID NO: 80009 - DNA, 60 bp, Artificial
  Synthetic oligonucleotide
ctggtctatctttttggatgtgctccaatggatcattgcagtgcagaatttgcatctagg

SEQ ID NO: 80010 - DNA, 52 bp, Artificial
  Synthetic oligonucleotide
caaaatgctataagtactacattcccttatactggagatcctccatacagcc

SEQ ID NO: 80011 - DNA, 60 bp, Artificial
  Synthetic oligonucleotide
gccctgaatcaatactagtcaatacataccaatggatcattaagaattgggaaacagtga

SEQ ID NO: 80012 - DNA, 60 bp, Artificial
  Synthetic oligonucleotide
gaccagcattaagcatcagtgagctaggcaaccttgcaaaaggggagaaggcaaatgtgt

SEQ ID NO: 80013 - DNA, 60 bp, Artificial
  Synthetic oligonucleotide
ctagcacagaaatgtcgttgagaggaataaggatcagcaaaacaggagtggatgaatatt

SEQ ID NO: 80014 - DNA, 60 bp, Artificial
  Synthetic oligonucleotide
aggtacacatcaggaagacaagaaaagaacccagcattaagaatgaaatggatgatggca

SEQ ID NO: 80015 - DNA, 60 bp, Artificial
  Synthetic oligonucleotide
cccactggcatcgctattggagatgtgtcacagcacacaaattggtggaataagaatggt

SEQ ID NO: 80016 - DNA, 60 bp, Artificial
  Synthetic oligonucleotide
ctgaagaacaagctgtggacatatgcaaggcagcaatgggtctaaaaataagttcatcct

SEQ ID NO: 80017 - DNA, 60 bp, Artificial
  Synthetic oligonucleotide
ctttatgaatagagcaaaccaacgattgaaccccatgcaccaactcttaaggcatttcca

SEQ ID NO: 80018 - DNA, 60 bp, Artificial
  Synthetic oligonucleotide
gatgatccctgaaagaaatgaacaaggacagactctctggagcaaaacaaatgatgccgg

SEQ ID NO: 80019 - DNA, 60 bp, Artificial
  Synthetic oligonucleotide
ggatgatggcaatgaaatacccaatcacagcggacaaaagaataatggagatgatccctg

SEQ ID NO: 80020 - DNA, 60 bp, Artificial
  Synthetic oligonucleotide
ttcgaaaccagattaaaatacgccgtagagtagacacaaatcctggtcatgcagacctta

SEQ ID NO: 80021 - DNA, 60 bp, Artificial
  Synthetic oligonucleotide
tgtcacaatcccgcactcgcgagatactaacaacaaccaccgtggaccacatggccataa

SEQ ID NO: 80022 - DNA, 60 bp, Artificial
  Synthetic oligonucleotide
ccctgtagccggtggaacaagcagtgtgtatatcgaagtcttgcacttgacccagggaac

SEQ ID NO: 80023 - DNA, 60 bp, Artificial
  Synthetic oligonucleotide
ccaatttgcacttgggcaagggaccacgctggacaacaaacattcaaatggcacaataca

SEQ ID NO: 80024 - DNA, 60 bp, Artificial
  Synthetic oligonucleotide
gccagaatgctactgagatcagagcatctgttgggagaatggttggtggaattgggagat

SEQ ID NO: 80025 - DNA, 60 bp, Artificial
  Synthetic oligonucleotide
cggctgcattgagggcaagctttctcaaatgtcaaaagaagtgaacgccagaattgaacc

SEQ ID NO: 80026 - DNA, 60 bp, Artificial
  Synthetic oligonucleotide
caatgatcggaatttctggagaggtgaaaatggacgaagaacaaggattgcatatgagag

SEQ ID NO: 80027 - DNA, 60 bp, Artificial
  Synthetic oligonucleotide
aaaatgcaattggggtcctcatcggaggacttgaatggaatgataacacagttcgagact

SEQ ID NO: 80028 - DNA, 60 bp, Artificial
  Synthetic oligonucleotide
gcagcacaacgagcaatgatggaccaagtgagagagggccgcaatcctggaaatgctgag

SEQ ID NO: 80029 - DNA, 60 bp, Artificial
  Synthetic oligonucleotide
ctctaagaggaagaggcagcactcttggtctggacatcgaaacagccactagtgctggaa

SEQ ID NO: 80030 - DNA, 60 bp, Artificial
  Synthetic oligonucleotide
caaacagcagcacaacgagcaatgatggaccaggtgcgagaaagcagaaatcccgggaat

SEQ ID NO: 80031 - DNA, 60 bp, Artificial
  Synthetic oligonucleotide
caaacagcagcacaacgagcaatgatggaccaagtacgggaaagccggaatcctggaaat

SEQ ID NO: 80032 - DNA, 60 bp, Artificial
  Synthetic oligonucleotide
aacaatagagagaatggttctctcggcatttgatgagagaagaaacaaatacctggaaga

SEQ ID NO: 80033 - DNA, 60 bp, Artificial
  Synthetic oligonucleotide
gggaggctgatccaaaacagcataacaatagagagaatggttctttctgcatttgatgaa

SEQ ID NO: 80034 - DNA, 60 bp, Artificial
  Synthetic oligonucleotide
cctgtacgataaggtccgactccagctgagagacaatgcaaaagaattaggcaatggatg

SEQ ID NO: 80035 - DNA, 60 bp, Artificial
  Synthetic oligonucleotide
aaattgcttctcatcgttcaggcacttagggacaacctggaacctggaaccttcgatctt

SEQ ID NO: 80036 - DNA, 60 bp, Artificial
  Synthetic oligonucleotide
ttacgggcaacctccaaacattgaaaataagagtgcatgaggggtatgaagagttcacaa

SEQ ID NO: 80037 - DNA, 60 bp, Artificial
  Synthetic oligonucleotide
cagcatgagagacatgtgtgatgctccctttgatgacaggctcagaagagaccagaaggc

SEQ ID NO: 80038 - DNA, 60 bp, Artificial
  Synthetic oligonucleotide
ctgtaagattgctcctttgatggtggcatacatgttggagagagaactggtccgcaaaac

SEQ ID NO: 80039 - DNA, 60 bp, Artificial
  Synthetic oligonucleotide
acagtggggatgatgtttggatgggaagaacaatcagtagagactcgcgctcaggctatg

SEQ ID NO: 80040 - DNA, 60 bp, Artificial
  Synthetic oligonucleotide
ttctaatattagccacttcggcattcttctatgtacgtgcagataaaatctgcctaggac

SEQ ID NO: 80041 - DNA, 60 bp, Artificial
  Synthetic oligonucleotide
caaatttgacaatgaagaaacattgagaaaaatactcagaaaatccggaggaattaaaaa

SEQ ID NO: 80042 - DNA, 60 bp, Artificial
  Synthetic oligonucleotide
atcactgggccaccccaatgtgaccaattcctagaattctcagcagatttgatcattgaa

SEQ ID NO: 80043 - DNA, 60 bp, Artificial
  Synthetic oligonucleotide
ggacttacaatgcagaacttctagtgctcatggaaaacgaaagaactctggatctccatg

SEQ ID NO: 80044 - DNA, 60 bp, Artificial
  Synthetic oligonucleotide
gtgcttttccagaactggggaattgaacccattgacaatgtgatgggaatgatcggaata

SEQ ID NO: 80045 - DNA, 54 bp, Artificial
  Synthetic oligonucleotide
ttttcagaactggggaattgaacccattgacaatgtgatgggaatgatcggaat

SEQ ID NO: 80046 - DNA, 60 bp, Artificial
  Synthetic oligonucleotide
caaaactggggaattgaacccattgacaatgtgatggggatgatcggaatattacccgac

SEQ ID NO: 80047 - DNA, 60 bp, Artificial
  Synthetic oligonucleotide
aaatgccattgacgggattacaaacaaggtgaactctgtcatcgagaaaatgaacactca

SEQ ID NO: 80048 - DNA, 60 bp, Artificial
  Synthetic oligonucleotide
gattacaaacaaggtgaactctgtcatcgagaaaatgaacactcaattcacagctgtggg

SEQ ID NO: 80049 - DNA, 60 bp, Artificial
  Synthetic oligonucleotide
catcacctcaaacgcatcgatggatgaatgtgacacgaagtgtcaaacaccccagggagc

SEQ ID NO: 80050 - DNA, 60 bp, Artificial
  Synthetic oligonucleotide
tgcccaaaatacgtcaggagtacaaaattgaggatggttacaggactaaggaacatccca

SEQ ID NO: 80051 - DNA, 60 bp, Artificial
  Synthetic oligonucleotide
gaacatcccatccattcaatccagaggtctgtttggggccattgccggtttcattgaagg

SEQ ID NO: 80052 - DNA, 60 bp, Artificial
  Synthetic oligonucleotide
acatcccatccattcaatccagaggtctgtttggggccattgccggtttcattgaagggg

SEQ ID NO: 80053 - DNA, 60 bp, Artificial
  Synthetic oligonucleotide
tcattgaagggggatggactggaatgatagatggatggtatggttatcatcatcagaatg

SEQ ID NO: 80054 - DNA, 60 bp, Artificial
  Synthetic oligonucleotide
catcagaatgaacagggatctggctatgctgcggatcaaaaaagcacacaaaatgccatt

SEQ ID NO: 80055 - DNA, 60 bp, Artificial
  Synthetic oligonucleotide
gaggacagtcacaacggaaaactatgcagactaaaaggaatagccccactacaattgggg

SEQ ID NO: 80056 - DNA, 60 bp, Artificial
  Synthetic oligonucleotide
acaattggggaaatgcaacattgccggatggatcttaggaaacccagaatgcgaatcact

SEQ ID NO: 80057 - DNA, 60 bp, Artificial
  Synthetic oligonucleotide
acacagtactcgaaaagaacgtgacagtgacacactctgtcaacctactcgaggacagtc

SEQ ID NO: 80058 - DNA, 60 bp, Artificial
  Synthetic oligonucleotide
ctcgaaaagaacgtgacagtgacacactctgtcaacctactcgaggacagtcacaacgga

SEQ ID NO: 80059 - DNA, 60 bp, Artificial
  Synthetic oligonucleotide
ctaagaaatcatggtcctacattgcagaaacaccaaactctgagaatggaacatgttacc

SEQ ID NO: 80060 - DNA, 60 bp, Artificial
  Synthetic oligonucleotide
gcaattgagctcagtatcatcattcgagagattcgaaatattccccaaggaaaggtcatg

SEQ ID NO: 80061 - DNA, 60 bp, Artificial
  Synthetic oligonucleotide
ggggaaatgcaacattgccggatggatcttaggaaacccagaatgcgaatcactgttttc

SEQ ID NO: 80062 - DNA, 60 bp, Artificial
  Synthetic oligonucleotide
gcgaatcactgttttctaagaaatcatggtcctacattgcagaaacaccaaactctgaga

SEQ ID NO: 80063 - DNA, 60 bp, Artificial
  Synthetic oligonucleotide
gctcagtatcatcattcgagagattcgaaatattccccaaggaaaggtcatggcccaaac

SEQ ID NO: 80064 - DNA, 60 bp, Artificial
  Synthetic oligonucleotide
aaaggtcatggcccaaacacaacgtaaccagaggagtaacggcagcatgctcccataagg

SEQ ID NO: 80065 - DNA, 53 bp, Artificial
  Synthetic oligonucleotide
caatcagcttctggatgtgttctaatgggtctttgcagtgcagaatatgcatc

SEQ ID NO: 80066 - DNA, 60 bp, Artificial
  Synthetic oligonucleotide
aaaatgaaaggactttggattttcatgactcaaatgtgaagaatctgtatgagaaagtaa

SEQ ID NO: 80067 - DNA, 60 bp, Artificial
  Synthetic oligonucleotide
taatagcgccatggcatgctttcgcactgagtagaggctttgggtcaggaatcatcacct

SEQ ID NO: 80068 - DNA, 60 bp, Artificial
  Synthetic oligonucleotide
gtctctgtagtgtcttcaaattataacaggagattcaccccagaaatagcagaaagaccc

SEQ ID NO: 80069 - DNA, 60 bp, Artificial
  Synthetic oligonucleotide
gaaaatgcttatgtctctgtagtgtcttcaaattataacaggagattcaccccagaaata

SEQ ID NO: 80070 - DNA, 55 bp, Artificial
  Synthetic oligonucleotide
gaaagaagtccttgtactatggggtgttcatcacccgtctaacatagaggaacaa

SEQ ID NO: 80071 - DNA, 60 bp, Artificial
  Synthetic oligonucleotide
ctggtcctgttatgtgcactttcagctacagatgcagacacaatatgtataggctaccat

SEQ ID NO: 80072 - DNA, 60 bp, Artificial
  Synthetic oligonucleotide
atgaaagcaaaactactggtcctgttatgtgcactttcagctacagatgcagacacaata

SEQ ID NO: 80073 - DNA, 60 bp, Artificial
  Synthetic oligonucleotide
aggctaccatgcgaacaactcaaccgacactgttgacacagtactcgaaaagaacgtgac

SEQ ID NO: 80074 - DNA, 60 bp, Artificial
  Synthetic oligonucleotide
atcatcacctcaaacgcatcgatggatgaatgtgacacgaagtgtcaaacaccccaggga

SEQ ID NO: 80075 - DNA, 60 bp, Artificial
  Synthetic oligonucleotide
gccatggcatgctttcgcactgagtagaggctttgggtcaggaatcatcacctcaaacgc

SEQ ID NO: 80076 - DNA, 60 bp, Artificial
  Synthetic oligonucleotide
ggtcatggcccaaacacaacgtaaccagaggagtaacggcagcatgctcccataagggga

SEQ ID NO: 80077 - DNA, 60 bp, Artificial
  Synthetic oligonucleotide
atcactcaccgagtgacatccacatcatggcgtctcaaggcaccaaacgatcttatgagc

SEQ ID NO: 80078 - DNA, 60 bp, Artificial
  Synthetic oligonucleotide
tcactcaccgagtgacatccacatcatggcgtctcaaggcaccaaacgatcttatgaaca

SEQ ID NO: 80079 - DNA, 60 bp, Artificial
  Synthetic oligonucleotide
gacaaggagacaatgggattcacatacagcggaataagaactaatggagcaaccagtgca

SEQ ID NO: 80080 - DNA, 60 bp, Artificial
  Synthetic oligonucleotide
tggacatccttaggcagaatccaacagaggaacaagctgtggacatatgcaaggcagcaa

SEQ ID NO: 80081 - DNA, 60 bp, Artificial
  Synthetic oligonucleotide
gtcttcatatgtgtgaagaatggaaacatgcggtgcactatttgtatataagtttgggag

SEQ ID NO: 80082 - DNA, 60 bp, Artificial
  Synthetic oligonucleotide
gtacatgaaggatatgaggaattcacaatggttgggcgaagagcaacagctatcctgagg

SEQ ID NO: 80083 - DNA, 60 bp, Artificial
  Synthetic oligonucleotide
aacaatagagagaatggttctctcggcatttgatgagaggagaaacaaatatctggaaga

SEQ ID NO: 80084 - DNA, 60 bp, Artificial
  Synthetic oligonucleotide
gagggattttcagctgaatcgaggaaattgcttctcattgttcaggcacttagggacaac

SEQ ID NO: 80085 - DNA, 60 bp, Artificial
  Synthetic oligonucleotide
ttctctctgcatttgatgaaaggaggaacaaatacctggaagaacatcccagtgcgggga

SEQ ID NO: 80086 - DNA, 60 bp, Artificial
  Synthetic oligonucleotide
aatgctgtggtaatgccagcccatggcccagccaagagcatggaatatgatgctgttgcg

SEQ ID NO: 80087 - DNA, 60 bp, Artificial
  Synthetic oligonucleotide
caatgctgtggtaatgccggcccatggtccagccaagagcatggaatatgatgctgttgc

SEQ ID NO: 80088 - DNA, 60 bp, Artificial
  Synthetic oligonucleotide
agacacttccaaaaagatgctaaggtgctttttcagaactggggaattgaacccattgac

SEQ ID NO: 80089 - DNA, 60 bp, Artificial
  Synthetic oligonucleotide
gcaccgaatcatgagggaatacaagcaggagtagatagattctataggacctgcaagcta

SEQ ID NO: 80090 - DNA, 60 bp, Artificial
  Synthetic oligonucleotide
gtggcgagttccctagcactggcaatcatgatagctggtctatctttctggatgtgctcc

SEQ ID NO: 80091 - DNA, 60 bp, Artificial
  Synthetic oligonucleotide
gcataacaatagagagaatggttctctcggcatttgatgagagaagaaacaaatatctgg

SEQ ID NO: 80092 - DNA, 60 bp, Artificial
  Synthetic oligonucleotide
gttgatagacaatgaattcactgaggttgaaaagcaaattggcaatgtgataaattggac

SEQ ID NO: 80093 - DNA, 60 bp, Artificial
  Synthetic oligonucleotide
agacaatgaattcactgaggttgaaaagcaaattggcaatgtgataaattggaccagaga

SEQ ID NO: 80094 - DNA, 60 bp, Artificial
  Synthetic oligonucleotide
cgggactctagcatacttactgacagtcagacagcgaccaaaagaattcgaatggccacc

SEQ ID NO: 80095 - DNA, 60 bp, Artificial
  Synthetic oligonucleotide
acgggactctagcatacttactgacagtcagacagcgaccaaaagaattcgaatggccac

SEQ ID NO: 80096 - DNA, 60 bp, Artificial
  Synthetic oligonucleotide
tcttccttctatgcggagatgaagtggttgctgtcaaattcggacaacgcagcattcccc

SEQ ID NO: 80097 - DNA, 60 bp, Artificial
  Synthetic oligonucleotide
ggttcttccttctatgcggagatgaagtggttgctgtcaaattcggacaacgcagcattc

SEQ ID NO: 80098 - DNA, 58 bp, Artificial
  Synthetic oligonucleotide
ccccgatatgttaaacagccaagcctccttttggctacaggaatgaggaatgtcccag

SEQ ID NO: 80099 - DNA, 57 bp, Artificial
  Synthetic oligonucleotide
cttatggtttagcttcggggcatcatgttttcttcttctagccattgcaatgggatt

SEQ ID NO: 80100 - DNA, 60 bp, Artificial
  Synthetic oligonucleotide
gataacagtaggaagctcgaaatatcagcaatcgttcaccccaagtccgggagcacggcc

SEQ ID NO: 80101 - DNA, 60 bp, Artificial
  Synthetic oligonucleotide
tgataaccgtaggaagctcgaaatatcagcaatcgttcaccccgagcccgggagcacggc

SEQ ID NO: 80102 - DNA, 60 bp, Artificial
  Synthetic oligonucleotide
aaacagccaagcctccttttggctacaggaatgaggaatgtcccagagagcccaaagacc

SEQ ID NO: 80103 - DNA, 60 bp, Artificial
  Synthetic oligonucleotide
gggcattcatagcccctgacagggcaagtttcttcaaaggagaatcactaggagtccaga

SEQ ID NO: 80104 - DNA, 60 bp, Artificial
  Synthetic oligonucleotide
ggttcttccttctatgcggagatgaagtggttgctgtcaaattcagacaatgcggcattc

SEQ ID NO: 80105 - DNA, 60 bp, Artificial
  Synthetic oligonucleotide
gggcattcatagcccctgacagggcaagtttcttcagaggagaatcgctaggagtccaga

SEQ ID NO: 80106 - DNA, 60 bp, Artificial
  Synthetic oligonucleotide
tgataacagtaggaagctcgaaatatcagcaatcgttcaccccgagtccgggagcacggc

SEQ ID NO: 80107 - DNA, 60 bp, Artificial
  Synthetic oligonucleotide
tgccctcgatatgtcaaacagccaagcctccttttggctacaggaatgaggaatgtccca

SEQ ID NO: 80108 - DNA, 51 bp, Artificial
  Synthetic oligonucleotide
taatgcagaacttctagtgctcatggaaaacgaaagaactctggatttcca

SEQ ID NO: 80109 - DNA, 60 bp, Artificial
  Synthetic oligonucleotide
atggacttataatgcagaacttctagtgctcatggaaaacgaaagaactctggatttcca

SEQ ID NO: 80110 - DNA, 60 bp, Artificial
  Synthetic oligonucleotide
ttataatgcagaacttctagtgctcatggaaaacgaaagaactctggatttccatgattc

SEQ ID NO: 80111 - DNA, 60 bp, Artificial
  Synthetic oligonucleotide
tgtgaccaattcctagaattttcagccgatttaattattgagaggcgagaaggaagtgat

SEQ ID NO: 80112 - DNA, 60 bp, Artificial
  Synthetic oligonucleotide
tcatgatagctggtctatctttttggatgtgctccaatgggtcattgcagtgcagaattt

SEQ ID NO: 80113 - DNA, 60 bp, Artificial
  Synthetic oligonucleotide
ggagacatgctcctacggactgcaataggccaagtgtcaaggcccatgttcctgtatgtg

SEQ ID NO: 80114 - DNA, 60 bp, Artificial
  Synthetic oligonucleotide
tcgagataggagacatgctcctacggactgcaataggccaagtgtcaaggcccatgttcc

SEQ ID NO: 80115 - DNA, 60 bp, Artificial
  Synthetic oligonucleotide
cgagataggagacatgctcctacggactgcaataggccaagtgtcaaggcccatgttcct

SEQ ID NO: 80116 - DNA, 56 bp, Artificial
  Synthetic oligonucleotide
cttggacaaaagaggtacaccaaaacaacatactggtgggatggactccaatcctc

SEQ ID NO: 80117 - DNA, 60 bp, Artificial
  Synthetic oligonucleotide
cctttgacatgaataacgagggatcttatttcttcggagacaatgcagaggaatatgaca

SEQ ID NO: 80118 - DNA, 52 bp, Artificial
  Synthetic oligonucleotide
catttattcaagcattacaactattgcttgaagtggagcaagagataagaac

SEQ ID NO: 80119 - DNA, 60 bp, Artificial
  Synthetic oligonucleotide
ggtccgactccagctgagagacaatgcaaaagaattagggaacggatgctttgaattcta

SEQ ID NO: 80120 - DNA, 60 bp, Artificial
  Synthetic oligonucleotide
aggtccgactccagctgagagacaatgcaaaagaattaggcaacgggtgctttgaattct

SEQ ID NO: 80121 - DNA, 60 bp, Artificial
  Synthetic oligonucleotide
aggtccgactccagctgagagacaatgcaaaagaattaggcaacggatgctttgaattct

SEQ ID NO: 80122 - DNA, 60 bp, Artificial
  Synthetic oligonucleotide
aaggtccgactccagctgagagacaatgcaaaagaattaggcaacgggtgttttgagttc

SEQ ID NO: 80123 - DNA, 60 bp, Artificial
  Synthetic oligonucleotide
tccgactccagctgagagacaatgcaaaagaattaggcaacgggtgctttgaattctacc

SEQ ID NO: 80124 - DNA, 60 bp, Artificial
  Synthetic oligonucleotide
aaggtccgactccagctgagagacaatgcaaaagaattagggaacggatgctttgaattc

SEQ ID NO: 80125 - DNA, 60 bp, Artificial
  Synthetic oligonucleotide
aaggtccgactccagctgagagacaatgcaaaagaattaggcaacggatgctttgaattc

SEQ ID NO: 80126 - DNA, 60 bp, Artificial
  Synthetic oligonucleotide
cgataaggtccgactccagctgagagacaatgcaaaagaattaggcaatgggtggtttga

SEQ ID NO: 80127 - DNA, 60 bp, Artificial
  Synthetic oligonucleotide
aaggtccgactccagctgagagacaatgcaaaagaattaggcaacgggtgctttgaattc

SEQ ID NO: 80128 - DNA, 60 bp, Artificial
  Synthetic oligonucleotide
cgataaggtccgactccagctgagagacaatgcaaaagaattaggcaacgggtgctttga

SEQ ID NO: 80129 - DNA, 60 bp, Artificial
  Synthetic oligonucleotide
cggactgtgtcttggaagcaatggctttccttgaagaatcccacccagggatctttgaaa

SEQ ID NO: 80130 - DNA, 60 bp, Artificial
  Synthetic oligonucleotide
tgcttgaagcggagcaagagataagaactttctcgtttcagcttatttaatgataaaaaa

SEQ ID NO: 80131 - DNA, 60 bp, Artificial
  Synthetic oligonucleotide
aaagcaatcgatgggatcactaataaagtcaactcaatcattgacaaaatgaacactcaa

SEQ ID NO: 80132 - DNA, 60 bp, Artificial
  Synthetic oligonucleotide
agaactgggcaacggatgctttgaattctaccacaagtgtgacaatgaatgcatggaaag

SEQ ID NO: 80133 - DNA, 60 bp, Artificial
  Synthetic oligonucleotide
acccactggcatcgctattggagatgtgtcacagcacacaaattggtggaataagaatgg

SEQ ID NO: 80134 - DNA, 60 bp, Artificial
  Synthetic oligonucleotide
aagcgatttgcagaccaagaaatgggcgatgccccattccttgaccggcttcgccgagat

SEQ ID NO: 80135 - DNA, 60 bp, Artificial
  Synthetic oligonucleotide
gtatggccagtataaggaacaacacttatgatcacagcaaatacagagaagaagcaatgc

SEQ ID NO: 80136 - DNA, 60 bp, Artificial
  Synthetic oligonucleotide
gatgacagactcagaagagatcaaaaggcattaaagggaagaggcagcacacttggacta

SEQ ID NO: 80137 - DNA, 60 bp, Artificial
  Synthetic oligonucleotide
gatgacagactcagaagagatcaaaaggcattaaagggaagaggcagcacacttggactc

SEQ ID NO: 80138 - DNA, 60 bp, Artificial
  Synthetic oligonucleotide
gaaacaaatatctggaagagcatcccagtgctgggaaagaccccaagaagactggaggtc

SEQ ID NO: 80139 - DNA, 60 bp, Artificial
  Synthetic oligonucleotide
gggagtgcaaatgcagcgattcaagtgatcctctcgttattgccgcaagtatcattggaa

SEQ ID NO: 80140 - DNA, 60 bp, Artificial
  Synthetic oligonucleotide
atgggagtgcaaatgcagcgattcaagtgatcctctcgttattgccgcaagtatcattgg

SEQ ID NO: 80141 - DNA, 60 bp, Artificial
  Synthetic oligonucleotide
gggagtgcaaatgcagcgattcaagtgatcctctcgttattgccgcaagtatcattggga

SEQ ID NO: 80142 - DNA, 60 bp, Artificial
  Synthetic oligonucleotide
aatgggagtgcaaatgcagcgattcaagtgatcctctcgttattgccgcaagtatcattg

SEQ ID NO: 80143 - DNA, 60 bp, Artificial
  Synthetic oligonucleotide
ggggaagaggcagcactcttggtctggacatcgaaacagccactcgtgcagggaagcaga

SEQ ID NO: 80144 - DNA, 60 bp, Artificial
  Synthetic oligonucleotide
attgcttcaaatgagaacatggaaacaatggactccagtactcttgaactgagaagcaga

SEQ ID NO: 80145 - DNA, 60 bp, Artificial
  Synthetic oligonucleotide
tgtatgggcctcatatacaacagaatgggaactgtcactactgaagtggcatttggtttg

SEQ ID NO: 80146 - DNA, 60 bp, Artificial
  Synthetic oligonucleotide
tgtatgggcctcatatacaacagaatgggaactgtaactactgaagtggcatttggtttg

SEQ ID NO: 80147 - DNA, 60 bp, Artificial
  Synthetic oligonucleotide
aattgcttacgaaagaatgtgcaacattctcaaggggaaattccaaacagcagcacaacg

SEQ ID NO: 80148 - DNA, 60 bp, Artificial
  Synthetic oligonucleotide
aaaggctcaaataggcccattatagatataaatatggcagattatagcattgattctagt

SEQ ID NO: 80149 - DNA, 60 bp, Artificial
  Synthetic oligonucleotide
catagcgggtttcattgaaaatggatgggaaggtctggttgatggatggtatggcttcag

SEQ ID NO: 80150 - DNA, 60 bp, Artificial
  Synthetic oligonucleotide
taagagtacatgaggggtatgaagaattcacaatggttggaagaagagcaacagctattc

SEQ ID NO: 80151 - DNA, 60 bp, Artificial
  Synthetic oligonucleotide
ggcaagtcatagttgacaacaacaactggtctggttattctggtattttctctgttgaaa

SEQ ID NO: 80152 - DNA, 60 bp, Artificial
  Synthetic oligonucleotide
cacaggaaccatgcgcatgcttgccgaccaaagtctcccaccgaacttctccagccttga

SEQ ID NO: 80153 - DNA, 60 bp, Artificial
  Synthetic oligonucleotide
gagggaggaagaagtgctcacaggcaacctccaaacattgaaaataagagtacatgaagg

SEQ ID NO: 80154 - DNA, 60 bp, Artificial
  Synthetic oligonucleotide
gagaaccagctctgatagtctggggaatccatcattcaggatcaaccaccgagcagacca

SEQ ID NO: 80155 - DNA, 60 bp, Artificial
  Synthetic oligonucleotide
tgggtgcgataaactctagcatgccattccacaacatacaccctctcaccattggggaat

SEQ ID NO: 80156 - DNA, 60 bp, Artificial
  Synthetic oligonucleotide
gcgataaactctagcatgccattccacaacatacaccctctcaccattggggaatgcccc

SEQ ID NO: 80157 - DNA, 60 bp, Artificial
  Synthetic oligonucleotide
acggactgtgtcttggaagcaatggctttccttgaagaatcccacccagggatctttgaa

SEQ ID NO: 80158 - DNA, 60 bp, Artificial
  Synthetic oligonucleotide
gggattttaaaatgaatcctaatcagaaactctttgcatcatccggaatagcaatagcac

SEQ ID NO: 80159 - DNA, 60 bp, Artificial
  Synthetic oligonucleotide
agcaaaagcagggggattttaaaatgaatcctaatcagaaactctttgcatcatccggaa

SEQ ID NO: 80160 - DNA, 60 bp, Artificial
  Synthetic oligonucleotide
atgtgatactttggtttagcttcggggcgtcatgtttcttacttctagccattgcaatgg

SEQ ID NO: 80161 - DNA, 60 bp, Artificial
  Synthetic oligonucleotide
cagcacaacgagcaatgatggaccaagtgagagaaagccggaatcctgggaatgctgaaa

SEQ ID NO: 80162 - DNA, 60 bp, Artificial
  Synthetic oligonucleotide
ataaatatggcagattatagcattgattccagttatgtgtgctcaggacttgttggagac

SEQ ID NO: 80163 - DNA, 60 bp, Artificial
  Synthetic oligonucleotide
cgagcaaataacatttatgcaagccttacaactattgcttgaagtggagcaagagataag

SEQ ID NO: 80164 - DNA, 60 bp, Artificial
  Synthetic oligonucleotide
catacttactgacagccagacagcgaccaaaagaattcgaatggccatcaattagtgtcg

SEQ ID NO: 80165 - DNA, 60 bp, Artificial
  Synthetic oligonucleotide
cgggactctagcatacttactgacagccagacagcgaccaaaagaatccggatggccatc

SEQ ID NO: 80166 - DNA, 60 bp, Artificial
  Synthetic oligonucleotide
tctagcatacttactgacagccagacagcgaccaaaagaattcgaatggccatcaattag

SEQ ID NO: 80167 - DNA, 60 bp, Artificial
  Synthetic oligonucleotide
ctatgaagagctgaaacacctgttgagcagtacaaaccattttgagaaaattcaaatcat

SEQ ID NO: 80168 - DNA, 60 bp, Artificial
  Synthetic oligonucleotide
taccacaaatgtgacaatgaatgcatggaaagtgtgagaaatggaacgtatgactatcag

SEQ ID NO: 80169 - DNA, 60 bp, Artificial
  Synthetic oligonucleotide
cactgatcttgaggtgcttatggaatggctaaagacaagaccaatcctgtcacctctgac

SEQ ID NO: 80170 - DNA, 60 bp, Artificial
  Synthetic oligonucleotide
caccgatcttgaggcactaatggaatggctaaagacaagaccaatcctgtcacctctgac

SEQ ID NO: 80171 - DNA, 60 bp, Artificial
  Synthetic oligonucleotide
atgttcaacatgctgagtacagtattaggagtctcaatcctgaatcttgggcaaaagagg

SEQ ID NO: 80172 - DNA, 60 bp, Artificial
  Synthetic oligonucleotide
ccttcgatcttggagggctatatgaagcaattgaggagtgcctgattaatgacccctggg

SEQ ID NO: 80173 - DNA, 60 bp, Artificial
  Synthetic oligonucleotide
ggctttccttgaagagtcccacccagggatctttgaaaactcatgtcttgaaacgatgga

SEQ ID NO: 80174 - DNA, 58 bp, Artificial
  Synthetic oligonucleotide
cgagtgacattcacatcatggcgtctcaaggcaccaaacgatcttatgagcagatgga

SEQ ID NO: 80175 - DNA, 60 bp, Artificial
  Synthetic oligonucleotide
gagagcataaggaacaacacttatgaccatacccaatacagagcaaagtcattacagaat

SEQ ID NO: 80176 - DNA, 60 bp, Artificial
  Synthetic oligonucleotide
ccctaataggacctccccaatgtgatcaattcctggagttcgactctgatttgataattg

SEQ ID NO: 80177 - DNA, 60 bp, Artificial
  Synthetic oligonucleotide
ctaataggacctccccaatgtgatcaattcctggagtttgaatcaaatttgataatcgaa

SEQ ID NO: 80178 - DNA, 60 bp, Artificial
  Synthetic oligonucleotide
gacctccccaatgtgatcaattcctggagttcgactctgatttgataattgagcgaagag

SEQ ID NO: 80179 - DNA, 60 bp, Artificial
  Synthetic oligonucleotide
atcgttcaccccaagtccgggagcacggccacaagtgaatggacaatcagggagaatcga

SEQ ID NO: 80180 - DNA, 60 bp, Artificial
  Synthetic oligonucleotide
caatgggagtttaccaaatactgtcaatttattcaacagtggcaagttccctgacactgg

SEQ ID NO: 80181 - DNA, 60 bp, Artificial
  Synthetic oligonucleotide
gggtcaaattggaatcaatgggagtttaccaaatactgtcaatttattcaacagtggcaa

SEQ ID NO: 80182 - DNA, 60 bp, Artificial
  Synthetic oligonucleotide
ggggtgaaattggaatcaatgggaatttaccaaatactgtcaatttattcaacagtggcg

SEQ ID NO: 80183 - DNA, 60 bp, Artificial
  Synthetic oligonucleotide
agtcgatgggtttcacgtatagtggaataagaaccaatggagcaacaagtgcctgcagaa

SEQ ID NO: 80184 - DNA, 60 bp, Artificial
  Synthetic oligonucleotide
gggagattctacatacagatgtgcactgaactcaaactcagtgaccacgaagggagactg

SEQ ID NO: 80185 - DNA, 60 bp, Artificial
  Synthetic oligonucleotide
gaacggaaacatgcggtgcactatttgtatataagtttggaaaaaaacacccttgtttct

SEQ ID NO: 80186 - DNA, 60 bp, Artificial
  Synthetic oligonucleotide
gaagaatggaaacatgcggtgcactatttgtatataagtttggaaaaacacccttgtttc

SEQ ID NO: 80187 - DNA, 60 bp, Artificial
  Synthetic oligonucleotide
ataaagaatggaaacatgcggtgcactatttgtatataatttgagaaaaacacccttgtt

SEQ ID NO: 80188 - DNA, 60 bp, Artificial
  Synthetic oligonucleotide
aaccattagaaacaagcactcaaacggaacaatacacgacaggactgctttcagagggtt

SEQ ID NO: 80189 - DNA, 60 bp, Artificial
  Synthetic oligonucleotide
ggaatatccaatgtggggctgaatgtctcattacacttaaagaacaacaacgaccaagac

SEQ ID NO: 80190 - DNA, 60 bp, Artificial
  Synthetic oligonucleotide
ggggtcctcacagacacgagcagaccatcagacaaatcaataggagactgtaacaacccg

SEQ ID NO: 80191 - DNA, 60 bp, Artificial
  Synthetic oligonucleotide
cttcttttgacatgagtaacgagggatcttatttcttcggagacaatgcagaggaatatg

SEQ ID NO: 80192 - DNA, 60 bp, Artificial
  Synthetic oligonucleotide
cttaatgcatcttggttcaactccttcctcacacatgcactaaaatagttgtggcaatgc

SEQ ID NO: 80193 - DNA, 60 bp, Artificial
  Synthetic oligonucleotide
gcatcttggttcaactccttcctcacacatgcactaaaatagttgtggcaatgctactat

SEQ ID NO: 80194 - DNA, 60 bp, Artificial
  Synthetic oligonucleotide
ccttatgcatgcactgaaatagttgtggcaatgctactatttgctatccatactgtccaa

SEQ ID NO: 80195 - DNA, 60 bp, Artificial
  Synthetic oligonucleotide
gagatctaatgtcacagtcccgcacccgcgagatactcaccaaaaccactgtggaccata

SEQ ID NO: 80196 - DNA, 60 bp, Artificial
  Synthetic oligonucleotide
ggcctttgacaatggggatgatgtttggatgggaagaacaatcagtaaagactcgcgctc

SEQ ID NO: 80197 - DNA, 60 bp, Artificial
  Synthetic oligonucleotide
tttgacagtggggatgatgtttggatgggaagaacaatcagtaaagactcgcgctcaggc

SEQ ID NO: 80198 - DNA, 60 bp, Artificial
  Synthetic oligonucleotide
acactgagggcagaacatctgacatgaggactgaaatcataagaatgatggaaagtgcca

SEQ ID NO: 80199 - DNA, 60 bp, Artificial
  Synthetic oligonucleotide
ctttcaggtagactgctttctttggcatgtccgcaaacgatttgcagacctagaactggg

SEQ ID NO: 80200 - DNA, 60 bp, Artificial
  Synthetic oligonucleotide
ggcagattatagcattgattccagttatgtgtgctcaggacttgttggagacacaccaag

SEQ ID NO: 80201 - DNA, 60 bp, Artificial
  Synthetic oligonucleotide
acagattatagcattgattccagttatgtgtgctcaggacttgttggagacacaccaagg

SEQ ID NO: 80202 - DNA, 60 bp, Artificial
  Synthetic oligonucleotide
gtatcggttcatggtctcaaaatatcctcagaactcaggagtcagagtgcgtttgcatca

SEQ ID NO: 80203 - DNA, 60 bp, Artificial
  Synthetic oligonucleotide
atgggtggtatggcttcaggcatcaaaatgcacaaggggagggaactgctgcagattaca

SEQ ID NO: 80204 - DNA, 60 bp, Artificial
  Synthetic oligonucleotide
tgggaaggtctgattgatggatggtatggcttcaggcatcaaaatgcacaaggggaggga

SEQ ID NO: 80205 - DNA, 60 bp, Artificial
  Synthetic oligonucleotide
ggttgatggatggtatggcttcaggcatcaaaatgcacaaggggagggaactgctgctga

SEQ ID NO: 80206 - DNA, 60 bp, Artificial
  Synthetic oligonucleotide
gattgatgggtggtatggcttcaggcatcaaaatgcacaaggggagggaactgctgcaga

SEQ ID NO: 80207 - DNA, 60 bp, Artificial
  Synthetic oligonucleotide
gctacaggaatgaggaatgtcccagagaatccaaagaccagaggactttttggagcaatt

SEQ ID NO: 80208 - DNA, 60 bp, Artificial
  Synthetic oligonucleotide
gggcattcatagcccctgacagggcaagtttctttagaggagaatcactaggagtccaga

SEQ ID NO: 80209 - DNA, 60 bp, Artificial
  Synthetic oligonucleotide
ggaaatgatgtgtgctatcctgggaaattcacaaatgaagaatcactgaggcagatcctt

SEQ ID NO: 80210 - DNA, 60 bp, Artificial
  Synthetic oligonucleotide
ggcattcatagcccctgacagggcaagtttctttagaggagaatcactaggagtccagag

SEQ ID NO: 80211 - DNA, 60 bp, Artificial
  Synthetic oligonucleotide
tcagcacacaatagaccttgcagattcagaaatgaacaaactttatgagcgtgtcagaag

SEQ ID NO: 80212 - DNA, 60 bp, Artificial
  Synthetic oligonucleotide
gctacaggaatgagaaatgtcccagagaatccaaagaccagaggactttttggagcaatt

SEQ ID NO: 80213 - DNA, 60 bp, Artificial
  Synthetic oligonucleotide
gaccttgcagattcagaaatgaacaaactttatgagcgtgtcagaagacaactaagggag

SEQ ID NO: 80214 - DNA, 60 bp, Artificial
  Synthetic oligonucleotide
gtgtcagaaaacaactaagggagaatgctgaagaagatggaaccggatgttttgagatat

SEQ ID NO: 80215 - DNA, 60 bp, Artificial
  Synthetic oligonucleotide
gtgtcagaagacaactaagggagaatgctgaagaagatggaactggatgttttgaaatat

SEQ ID NO: 80216 - DNA, 60 bp, Artificial
  Synthetic oligonucleotide
cagaagacaactaagggagaatgctgaagaagatggaactggatgttttgaaatattcca

SEQ ID NO: 80217 - DNA, 60 bp, Artificial
  Synthetic oligonucleotide
gtgtcagaaaacaactaagggagaatgctgaagaagatggaactggatgttttgaaatat

SEQ ID NO: 80218 - DNA, 60 bp, Artificial
  Synthetic oligonucleotide
ccataagtgtgatgaccaatgtatggagagcataaggaacaacacttatgaccacaccca

SEQ ID NO: 80219 - DNA, 55 bp, Artificial
  Synthetic oligonucleotide
tggcctgatggggcgaatatcaatttcatgcctatataagctttcgcaattttag

SEQ ID NO: 80220 - DNA, 53 bp, Artificial
  Synthetic oligonucleotide
tggcctgatggggcgaatatcaatttcatgcctatataagctttcgcaatttt

SEQ ID NO: 80221 - DNA, 56 bp, Artificial
  Synthetic oligonucleotide
tggcctgatggggcgaatatcaatttcatgcctatataagctttcgcaatttttga

SEQ ID NO: 80222 - DNA, 60 bp, Artificial
  Synthetic oligonucleotide
gcggaaacgggactctagcatacttactgacagccagacagcgaccaaaaggattcggat

SEQ ID NO: 80223 - DNA, 60 bp, Artificial
  Synthetic oligonucleotide
gggaaagttgttcacattagcccattgtcaggaagtgctcagcatatagaggaatgttcc

SEQ ID NO: 80224 - DNA, 60 bp, Artificial
  Synthetic oligonucleotide
gggaaaattgtccacattagcccattgtcaggaagtgctcagcatatagaggaatgttcc

SEQ ID NO: 80225 - DNA, 60 bp, Artificial
  Synthetic oligonucleotide
gcagtgtggctggatggcttcttggaaacccaatgtgtgatgaattcctgaatgtaccgg

SEQ ID NO: 80226 - DNA, 60 bp, Artificial
  Synthetic oligonucleotide
cttttgacatgagtaacgagggatcttatttcttcggagacaatgcagaggaatatgaca

SEQ ID NO: 80227 - DNA, 60 bp, Artificial
  Synthetic oligonucleotide
caagtgcttgtcatgatggcatcagttggttgacaattggaatttctggtcccgacaatg

SEQ ID NO: 80228 - DNA, 60 bp, Artificial
  Synthetic oligonucleotide
cttcagtgacattagcgggcaattcatctctttgccctattagtgggtgggctatataca

SEQ ID NO: 80229 - DNA, 60 bp, Artificial
  Synthetic oligonucleotide
cttgtcatgatggcatcagttggttgacaattggaatttctggtcccgacaatgaggctg

SEQ ID NO: 80230 - DNA, 60 bp, Artificial
  Synthetic oligonucleotide
cctgaaccatgcaaccaaagcattactgaacaggctgtaacttcggtgacattagcgggc

SEQ ID NO: 80231 - DNA, 60 bp, Artificial
  Synthetic oligonucleotide
tcgataccagcctgaaccatgcaaccaaagcattactgaacaggctgtaacttcagtgac

SEQ ID NO: 80232 - DNA, 60 bp, Artificial
  Synthetic oligonucleotide
ttccagaagcggctttgagatgatttgggatccgaatgggtggactgaaacggacagtag

SEQ ID NO: 80233 - DNA, 60 bp, Artificial
  Synthetic oligonucleotide
gatggcatcagttggttgacaattggaatttctggtcccgacaatgaggctgtggctgta

SEQ ID NO: 80234 - DNA, 60 bp, Artificial
  Synthetic oligonucleotide
gtgacactgtgggttggtcttggccagacggtgctgagttgccattcaccactgacaagt

SEQ ID NO: 80235 - DNA, 60 bp, Artificial
  Synthetic oligonucleotide
gctatatacagtaaggataacggtataagaattggttccaagggggatgtatttgttatg

SEQ ID NO: 80236 - DNA, 60 bp, Artificial
  Synthetic oligonucleotide
gcgggcaattcatctctttgccctattagtgggtgggctatatacagtaaggataacggt

SEQ ID NO: 80237 - DNA, 55 bp, Artificial
  Synthetic oligonucleotide
cccgacaatgaggctgtggctgtattgaaatacaatggtataataacggacacta

SEQ ID NO: 80238 - DNA, 60 bp, Artificial
  Synthetic oligonucleotide
ccagcctgaaccatgcaaccaaagcattactgaacaggctgtaacttcggtgacattagc

SEQ ID NO: 80239 - DNA, 60 bp, Artificial
  Synthetic oligonucleotide
ggtcggcaagtgcttgtcatgatggcatcagttggttgacaattggaatttctggtcccg

SEQ ID NO: 80240 - DNA, 60 bp, Artificial
  Synthetic oligonucleotide
cgccccaatgatggaacaggcagttgcggtccgatgtcctctaacggggcatatggggta

SEQ ID NO: 80241 - DNA, 60 bp, Artificial
  Synthetic oligonucleotide
cacgacccaatgatggaacaggcagttgcggtccgatgtcctctaacggggcatatggag

SEQ ID NO: 80242 - DNA, 60 bp, Artificial
  Synthetic oligonucleotide
cggagacaatccacgccccaatgatggaacaggcagttgcggtccgatgtcctctaacgg

SEQ ID NO: 80243 - DNA, 60 bp, Artificial
  Synthetic oligonucleotide
atccacgacccaatgatggaacaggcagttgcggtccgatgtcctctaacggggcatatg

SEQ ID NO: 80244 - DNA, 60 bp, Artificial
  Synthetic oligonucleotide
ggagtatcaactaggatatatatgcagtggagttttcggagacaatccacgccccaatga

SEQ ID NO: 80245 - DNA, 60 bp, Artificial
  Synthetic oligonucleotide
tttcaatcaaaatctggagtatcaactaggatatatatgcagtggagttttcggagacaa

SEQ ID NO: 80246 - DNA, 60 bp, Artificial
  Synthetic oligonucleotide
ctgtaatgaccgatggaccgagtaatgggcaggcctcatataagatcttcaagatagaaa

SEQ ID NO: 80247 - DNA, 60 bp, Artificial
  Synthetic oligonucleotide
ttactgtaatgaccgatggaccgagtaatgggcaggcctcatacaagatcttcaagatag

SEQ ID NO: 80248 - DNA, 60 bp, Artificial
  Synthetic oligonucleotide
gagaccttgtttctgggttgagctaatcagagggcggcccaaagagaacacaatttggac

SEQ ID NO: 80249 - DNA, 60 bp, Artificial
  Synthetic oligonucleotide
tacagtaaggataacggtataagaattggttccaagggggatgtatttgttatgagagag

SEQ ID NO: 80250 - DNA, 60 bp, Artificial
  Synthetic oligonucleotide
tataagagagccgtttatctcatgctcccacttggaatgcagaaccttctttttgactca

SEQ ID NO: 80251 - DNA, 60 bp, Artificial
  Synthetic oligonucleotide
gcggctttgagatgatttgggatccgaatgggtggactgaaacggacagtagcttctcag

SEQ ID NO: 80252 - DNA, 60 bp, Artificial
  Synthetic oligonucleotide
gtagcttctcagtgaaacaagacatcgtagcaataactgactggtcaggatatagcggga

SEQ ID NO: 80253 - DNA, 60 bp, Artificial
  Synthetic oligonucleotide
ttgcatgagaccttgtttctgggttgagctaatcagagggcggcccaaagagaacacaat

SEQ ID NO: 80254 - DNA, 60 bp, Artificial
  Synthetic oligonucleotide
ctgacaggattagattgcatgagaccttgtttctgggttgagctaatcagagggcggccc

SEQ ID NO: 80255 - DNA, 60 bp, Artificial
  Synthetic oligonucleotide
ctaattatcactacgaggagtgctcctgttatcctgatgcaggcgaagtcatgtgtgtgt

SEQ ID NO: 80256 - DNA, 60 bp, Artificial
  Synthetic oligonucleotide
ggcatcagttggttgacaattggaatttctggtcccgacaatgaggctgtggctgtattg

SEQ ID NO: 80257 - DNA, 60 bp, Artificial
  Synthetic oligonucleotide
gcagggataactggcatggctcgaatcggccgtgggtatctttcaatcaaaatctggagt

SEQ ID NO: 80258 - DNA, 60 bp, Artificial
  Synthetic oligonucleotide
cggacagtagcttctcagtgaaacaagacatcgtagcaataactgactggtcaggatata

SEQ ID NO: 80259 - DNA, 60 bp, Artificial
  Synthetic oligonucleotide
actacgaggagtgctcctgttatcctgatgcaggcgaagtcatgtgtgtgtgcagggata

SEQ ID NO: 80260 - DNA, 60 bp, Artificial
  Synthetic oligonucleotide
tgtgtgtgtgcagggataactggcatggctcgaatcggccgtgggtatctttcaatcaaa

SEQ ID NO: 80261 - DNA, 60 bp, Artificial
  Synthetic oligonucleotide
ggagtgctcctgttatcctgatgcaggcgaaatcatgtgtgtgtgcagggataactggca

SEQ ID NO: 80262 - DNA, 60 bp, Artificial
  Synthetic oligonucleotide
cctgttatcctgatgcaggcgaagtcatgtgtgtgtgcagggataactggcatggctcga

SEQ ID NO: 80263 - DNA, 60 bp, Artificial
  Synthetic oligonucleotide
ctgtaagattgctcctttgatggtggcatacatgttggagagagaactggttcgcaaaac

SEQ ID NO: 80264 - DNA, 60 bp, Artificial
  Synthetic oligonucleotide
ccaggcacttagggacaacctggaacctggaaccttcgaccttggagggctatatgaagc

SEQ ID NO: 80265 - DNA, 60 bp, Artificial
  Synthetic oligonucleotide
ggaaccttcgatcttggggggctatatgaagcaattgaggagtgcctgattaacgatccc

SEQ ID NO: 80266 - DNA, 60 bp, Artificial
  Synthetic oligonucleotide
gccatatagaagaatgctcatgctaccccaatgaaggtaaagtggaatgcgtttgtaggg

SEQ ID NO: 80267 - DNA, 60 bp, Artificial
  Synthetic oligonucleotide
gtcatatagaagaatgctcatgctaccccaatgaaggtaaagtggaatgtgtttgtagag

SEQ ID NO: 80268 - DNA, 60 bp, Artificial
  Synthetic oligonucleotide
gacggatggaccagcaaacagacaagcacaatacagagcattcaaagccaagcagggaaa

SEQ ID NO: 80269 - DNA, 60 bp, Artificial
  Synthetic oligonucleotide
ccaagcaggggaaaataattgggcaaactgaaatcagtttcaatggaggtcatatagaag

SEQ ID NO: 80270 - DNA, 60 bp, Artificial
  Synthetic oligonucleotide
agccaagcaggggaaaataattgggcaaactgaaatcagtttcaatggaggtcatataga

SEQ ID NO: 80271 - DNA, 60 bp, Artificial
  Synthetic oligonucleotide
gctcatgctaccccaatgaaggtaaagtggaatgcgtttgtagggacaattggactggaa

SEQ ID NO: 80272 - DNA, 60 bp, Artificial
  Synthetic oligonucleotide
tgggagctgcaatgagacagtcattagggaatacaatgaaacagtaaggattgaaaaggt

SEQ ID NO: 80273 - DNA, 60 bp, Artificial
  Synthetic oligonucleotide
tgggaattgcaatgaaacagtcattagggaatacaatgaaacagtaaggattgagaaggt

SEQ ID NO: 80274 - DNA, 60 bp, Artificial
  Synthetic oligonucleotide
gggagctgcaatgagacagtcattagggaatacaatgaaacagtaaggattgaaaaggta

SEQ ID NO: 80275 - DNA, 60 bp, Artificial
  Synthetic oligonucleotide
ttctaatggcacagtgaaagaccggagcccctataggactctaatgagtgtagaaatagg

SEQ ID NO: 80276 - DNA, 60 bp, Artificial
  Synthetic oligonucleotide
ggggtcatgtttttgttataagggaaccatttgtttcttgctcgccaacagagtgcagga

SEQ ID NO: 80277 - DNA, 60 bp, Artificial
  Synthetic oligonucleotide
ttataagggaaccatttgtttcttgctcgccaacagagtgcaggacgttctttcttactc

SEQ ID NO: 80278 - DNA, 60 bp, Artificial
  Synthetic oligonucleotide
gagtgcaggacgttctttcttactcaaggttccctactcaatgacaaacattctaatggc

SEQ ID NO: 80279 - DNA, 60 bp, Artificial
  Synthetic oligonucleotide
ggtcagctactgcatgtcatgatgggaagaaatggatgacaattggagtaacgggccctg

SEQ ID NO: 80280 - DNA, 60 bp, Artificial
  Synthetic oligonucleotide
aaggggcaagccagaagagaaaacgatatggacctcaagtagctccattgtgatgtgtgg

SEQ ID NO: 80281 - DNA, 60 bp, Artificial
  Synthetic oligonucleotide
gaggtcatgtttttgttataagggaaccatttgtttcttgctcgccaacagagtgcagga

SEQ ID NO: 80282 - DNA, 56 bp, Artificial
  Synthetic oligonucleotide
tccagatttgtcttacagagtcggatacttatgtgcaggtctccccagtgacactc

SEQ ID NO: 80283 - DNA, 60 bp, Artificial
  Synthetic oligonucleotide
gttcactgggtcatgcactagtcccatgggaaaccaggggtatggagttaagggatttgg

SEQ ID NO: 80284 - DNA, 60 bp, Artificial
  Synthetic oligonucleotide
tgatgtgtggagtagaccatgagattgccgactggtcatggcacgatggagctattcttc

SEQ ID NO: 80285 - DNA, 60 bp, Artificial
  Synthetic oligonucleotide
tgatgtgtggagtagaccatgagattgccgactggtcgtggcaagatggagctattcttc

SEQ ID NO: 80286 - DNA, 60 bp, Artificial
  Synthetic oligonucleotide
ggggcaagccagaagagaaaacgatatggacctcaagtagctccattgtgatgtgtggag

SEQ ID NO: 80287 - DNA, 60 bp, Artificial
  Synthetic oligonucleotide
ttgaaaaggtaacacaatggcacaataccaatgtcattgagtatatagagaggccagaga

SEQ ID NO: 80288 - DNA, 60 bp, Artificial
  Synthetic oligonucleotide
gatgtgtggagtagaccatgagattgccgactggtcgtggcaagatggagctattcttcc

SEQ ID NO: 80289 - DNA, 60 bp, Artificial
  Synthetic oligonucleotide
aggccagagagtgatcatttcatgaacaatacagaaccattgtgtgatgctaagggtttt

SEQ ID NO: 80290 - DNA, 60 bp, Artificial
  Synthetic oligonucleotide
taagggttttgcacccttttccaaagacaacggaataagaattggatcgaggggtcatgt

SEQ ID NO: 80291 - DNA, 60 bp, Artificial
  Synthetic oligonucleotide
gagagtgatcatttcatgaacaatacagaaccattgtgtgatgctaagggttttgcaccc

SEQ ID NO: 80292 - DNA, 60 bp, Artificial
  Synthetic oligonucleotide
gacgtaatcaattcctgggcaggagatattctaagaactcaggaatcatcatgcacttgc

SEQ ID NO: 80293 - DNA, 60 bp, Artificial
  Synthetic oligonucleotide
cactgacgtaatcaattcctgggcaggagatattctaagaactcaggaatcatcatgcac

SEQ ID NO: 80294 - DNA, 60 bp, Artificial
  Synthetic oligonucleotide
tcccactgatgtaatcaattcctgggcaggagatattctgagaactcaggaatcatcatg

SEQ ID NO: 80295 - DNA, 60 bp, Artificial
  Synthetic oligonucleotide
ttcccactgatgtaatcaattcctgggcaggagatattctgagaactcaggaatcatcat

SEQ ID NO: 80296 - DNA, 60 bp, Artificial
  Synthetic oligonucleotide
acgggccctgatgccaaagcagtagcagtggtgcattatgggggaattcccactgacgta

SEQ ID NO: 80297 - DNA, 60 bp, Artificial
  Synthetic oligonucleotide
agtaacgggccctgatgccaaagcagtagcggtggtgcattatgggggaattcccactga

SEQ ID NO: 80298 - DNA, 60 bp, Artificial
  Synthetic oligonucleotide
gacggatggaccagcaaacagacaagcacaatacagagcattcaaagccaagcaggggaa

SEQ ID NO: 80299 - DNA, 60 bp, Artificial
  Synthetic oligonucleotide
gtccctaaaaggaagaggcagcactcttggtctggacatcgaaacagccactcgtgcagg

SEQ ID NO: 80300 - DNA, 60 bp, Artificial
  Synthetic oligonucleotide
ggcacttatcaaatactatcaatttactcaacagtggcgagttccctagcactggcaatc

SEQ ID NO: 80301 - DNA, 60 bp, Artificial
  Synthetic oligonucleotide
gggcacttaccagatactatcagtctactcaacagtggcgagttccctagcactggcaat

SEQ ID NO: 80302 - DNA, 60 bp, Artificial
  Synthetic oligonucleotide
agggagactgatccagaacagcataacaatagagagaatggttctctcggcatttgatga

SEQ ID NO: 80303 - DNA, 60 bp, Artificial
  Synthetic oligonucleotide
gggagactgatccagaacagcataacaatagagagaatggttctctcggcatttgatgag

SEQ ID NO: 80304 - DNA, 60 bp, Artificial
  Synthetic oligonucleotide
cagggcttgttggagacacaccaaggaacgatgatagctctagcagcagcaactgcagag

SEQ ID NO: 80305 - DNA, 60 bp, Artificial
  Synthetic oligonucleotide
aactgacatgactcttgaagaaatgtcaagggcctggttcatgcttatacccaaccaaaa

SEQ ID NO: 80306 - DNA, 60 bp, Artificial
  Synthetic oligonucleotide
taactgacatgactcttgaagaaatgtcaagggactggttcatgctaatgcccaaacaga

SEQ ID NO: 80307 - DNA, 60 bp, Artificial
  Synthetic oligonucleotide
taactgacatgactcttgaagaaatgtcaagggactggttcatgctcatgcccaagcaga

SEQ ID NO: 80308 - DNA, 60 bp, Artificial
  Synthetic oligonucleotide
gaatcaatgggaacttaccaaatactgtcaatttattcaacagtggcgagttccctagca

SEQ ID NO: 80309 - DNA, 60 bp, Artificial
  Synthetic oligonucleotide
ggagtaaaattggaatcgatgggaacttaccaaatactgtcaatttattcaacagtggcg

SEQ ID NO: 80310 - DNA, 60 bp, Artificial
  Synthetic oligonucleotide
caatgggaacttaccaaatactgtcaatttattcaacagtggcgagttccctagcactgg

SEQ ID NO: 80311 - DNA, 60 bp, Artificial
  Synthetic oligonucleotide
gcaatgggccttgttttcatgtgtgtgaaaaatggaaacatgcggtgcactatttgtata

SEQ ID NO: 80312 - DNA, 60 bp, Artificial
  Synthetic oligonucleotide
ccacattagcccactgtcaggaagtgctcagcatatagaggaatgttcctgttatccccg

SEQ ID NO: 80313 - DNA, 60 bp, Artificial
  Synthetic oligonucleotide
tacttggaggaacaccccaatactgggaaagaccctaagaaaacgggaggacctatctac

SEQ ID NO: 80314 - DNA, 60 bp, Artificial
  Synthetic oligonucleotide
cttggaggaacaccccaatactgggaaagaccctaagaaaacgggaggacctatctacag

SEQ ID NO: 80315 - DNA, 60 bp, Artificial
  Synthetic oligonucleotide
aattggaacaatggtaatggaattaatcagaatgataaaacgaggaattaatgatcgaaa

SEQ ID NO: 80316 - DNA, 60 bp, Artificial
  Synthetic oligonucleotide
tgctttttacttcttgccattgcaatgggccttgtcttcatatgtgtgaagtatggaaac

SEQ ID NO: 80317 - DNA, 60 bp, Artificial
  Synthetic oligonucleotide
acgtccccaggatctgctcaaaagggaaaaggacagttgaccttggtcaatgtggacttc

SEQ ID NO: 80318 - DNA, 60 bp, Artificial
  Synthetic oligonucleotide
cagggtagataatcactcaccgagtgacattcacatcatggcgtctcaaggcaccaaacg

SEQ ID NO: 80319 - DNA, 60 bp, Artificial
  Synthetic oligonucleotide
cagggtatataatcactcaccgagtgacatccacatcatggcgtctcaaggcaccaaacg

SEQ ID NO: 80320 - DNA, 60 bp, Artificial
  Synthetic oligonucleotide
gcagggatcccaataatgaaagagggaacccaggagtgaaaggatgggcctttgacattg

SEQ ID NO: 80321 - DNA, 60 bp, Artificial
  Synthetic oligonucleotide
cgatcttatgagcagatggaaactggtggagaacgccagaatgctactgagatcagagca

SEQ ID NO: 80322 - DNA, 60 bp, Artificial
  Synthetic oligonucleotide
caactactgcttgaagtggagcaagagataagaactttctcgtttcagctcatttaatga

SEQ ID NO: 80323 - DNA, 60 bp, Artificial
  Synthetic oligonucleotide
agtccctgggaggaagaggcagcactcttggtctggacatcgagacagctactcgtgctg

SEQ ID NO: 80324 - DNA, 60 bp, Artificial
  Synthetic oligonucleotide
agtgcatgtagaagatcaggatcttcattctatgcagaaatgaagtggctcctgtcagat

SEQ ID NO: 80325 - DNA, 60 bp, Artificial
  Synthetic oligonucleotide
agtgcgtgtagaagatcaggatcttcattctatgcagaaatgaagtggctcctgtcagat

SEQ ID NO: 80326 - DNA, 60 bp, Artificial
  Synthetic oligonucleotide
ttatattgaggtgttgcatttgacccagggaacatgctgggaacagatgtacactccagg

SEQ ID NO: 80327 - DNA, 60 bp, Artificial
  Synthetic oligonucleotide
cttgcacttgacccagggaacatgctgggaacagatgtacgccccgggtggagaagtaag

SEQ ID NO: 80328 - DNA, 60 bp, Artificial
  Synthetic oligonucleotide
gacaaggagacaatgggattcacctacagcggaataagaactaatggagcaaccagtgca

SEQ ID NO: 80329 - DNA, 60 bp, Artificial
  Synthetic oligonucleotide
ccatgattcaaatgtcaagaacctatacgataaggtccgactccagctgagagacaatgc

SEQ ID NO: 80330 - DNA, 60 bp, Artificial
  Synthetic oligonucleotide
tggaatcgggagattctacatacagatgtgcactgaactcaaactcagtgactacgaagg

SEQ ID NO: 80331 - DNA, 60 bp, Artificial
  Synthetic oligonucleotide
gtggaatcgggagattctacatacagatgtgcactgaactcaaactcagtgaccacgaag

SEQ ID NO: 80332 - DNA, 51 bp, Artificial
  Synthetic oligonucleotide
cactgaaatagctgtggcaatgctactatttgctatccatactgtccaaaa

SEQ ID NO: 80333 - DNA, 60 bp, Artificial
  Synthetic oligonucleotide
gctttgaacagataacgtttatgcaagccttacaactattgcttgaagtggagcaagaga

SEQ ID NO: 80334 - DNA, 60 bp, Artificial
  Synthetic oligonucleotide
gcatgggcctcatatacaacagaatgggaactgtgaccaccgaagtggcatttggcctgg

SEQ ID NO: 80335 - DNA, 60 bp, Artificial
  Synthetic oligonucleotide
cagagcgaaccaacgattgaaccccatgcaccaactcttgaggcacttccaaaaggatgc

SEQ ID NO: 80336 - DNA, 60 bp, Artificial
  Synthetic oligonucleotide
aacagagcgaaccaacgattgaaccccatgcaccaactcttgaggcacttccaaaaggat

SEQ ID NO: 80337 - DNA, 60 bp, Artificial
  Synthetic oligonucleotide
cagaaaattgctcctcattgttcaggcacttagggacaacctggaacctggaacctttga

SEQ ID NO: 80338 - DNA, 60 bp, Artificial
  Synthetic oligonucleotide
tgctcctcattgttcaggcacttagggacaacctggaacctggaacctttgatcttgggg

SEQ ID NO: 80339 - DNA, 60 bp, Artificial
  Synthetic oligonucleotide
actcattgttcaggcacttagggacaacctggaacctggaacctttgatctcggagggct

SEQ ID NO: 80340 - DNA, 60 bp, Artificial
  Synthetic oligonucleotide
ctggatgtgctccaatggatcattgcagtgcagaatttgcatttaaacttgtgagttcag

SEQ ID NO: 80341 - DNA, 60 bp, Artificial
  Synthetic oligonucleotide
ctttggtttagcttcggggcgtcatgtttcatacttctggccattgcaatgggccttgtc

SEQ ID NO: 80342 - DNA, 60 bp, Artificial
  Synthetic oligonucleotide
tcatgtttcatacttctggccattgcaatgggccttatcttcatgtgtgtgaagaatgga

SEQ ID NO: 80343 - DNA, 60 bp, Artificial
  Synthetic oligonucleotide
taggacaggaacattcgaattcacaagctttttctaccgctatggatttgtagccaattt

SEQ ID NO: 80344 - DNA, 55 bp, Artificial
  Synthetic oligonucleotide
acattagcccactgtcaggaagtgctcagcatatagaggaatgctcctgttatcc

SEQ ID NO: 80345 - DNA, 60 bp, Artificial
  Synthetic oligonucleotide
agggaggctgattcaaaacagcataacaatagagagaatggttctctcggcatttgatga

SEQ ID NO: 80346 - DNA, 60 bp, Artificial
  Synthetic oligonucleotide
gggaggctgattcaaaacagcataacaatagagagaatggttctctcggcatttgatgag

SEQ ID NO: 80347 - DNA, 60 bp, Artificial
  Synthetic oligonucleotide
atacagattgacccagtcaaactaagtagcggctacaaagatgtgatactttggtttagc

SEQ ID NO: 80348 - DNA, 60 bp, Artificial
  Synthetic oligonucleotide
gcacttgggcaggggaccacgctggacaacaaacattcaaatggcacaatacacgataga

SEQ ID NO: 80349 - DNA, 56 bp, Artificial
  Synthetic oligonucleotide
aaaatctctaagaggaagaggcagcactcttggtctggacatcgaaacagccactc

SEQ ID NO: 80350 - DNA, 60 bp, Artificial
  Synthetic oligonucleotide
gtcccacccaggaatctttgaaaactcgtgtcttgaaacgatggaagttgttcaacagac

SEQ ID NO: 80351 - DNA, 60 bp, Artificial
  Synthetic oligonucleotide
gttgggatttctagcatggtggaggccatggtgtctagggcccgaattgatgcgcgaatt

SEQ ID NO: 80352 - DNA, 60 bp, Artificial
  Synthetic oligonucleotide
gggaggctgatccaaaacagcataaccatagagagaatggttctctcggcatttgatgag

SEQ ID NO: 80353 - DNA, 60 bp, Artificial
  Synthetic oligonucleotide
cagatgtgcactgaactcaaactcagtgactatgaagggagactgatccaaaacagcata

SEQ ID NO: 80354 - DNA, 60 bp, Artificial
  Synthetic oligonucleotide
cagcagcacaacgagcaatgatggaccaagtacgggaaagccggaatcctggaaatgctg

SEQ ID NO: 80355 - DNA, 60 bp, Artificial
  Synthetic oligonucleotide
cgactgtatggccagcattagaaacaacacttatgatcacagcaaatacagagaagaagc

SEQ ID NO: 80356 - DNA, 60 bp, Artificial
  Synthetic oligonucleotide
gtatggctagtataaggaacaatacttatgatcacagcaaatacagagaagaagcaatgc

SEQ ID NO: 80357 - DNA, 60 bp, Artificial
  Synthetic oligonucleotide
ttgaccttggtcaatgtggacttctgggaacaatcactgggccaccccaatgtgaccaat

SEQ ID NO: 80358 - DNA, 60 bp, Artificial
  Synthetic oligonucleotide
ccttggtcaatgtggacttctgggaacaatcactgggccaccccaatgtgaccaattcct

SEQ ID NO: 80359 - DNA, 60 bp, Artificial
  Synthetic oligonucleotide
caatctactcaacagtggcaagttccctagcactggcaatcatgatagctggtctatctt

SEQ ID NO: 80360 - DNA, 60 bp, Artificial
  Synthetic oligonucleotide
agtgctcagcatatagaggaatgttcctgttatcctcgatacccaaacgtcagatgcgtc

SEQ ID NO: 80361 - DNA, 60 bp, Artificial
  Synthetic oligonucleotide
gatttccatgattcaaatgtcaagaacctgtacgataaggtccgactccagctgagagac

SEQ ID NO: 80362 - DNA, 60 bp, Artificial
  Synthetic oligonucleotide
tcaaggggaaattccaaacagcagcacaacgagcaatgatggaccaggtgagagaaagcc

SEQ ID NO: 80363 - DNA, 60 bp, Artificial
  Synthetic oligonucleotide
cccgttcgagagagcaaccattatggcggcatttacaggaaacactgaaggtaggacttc

SEQ ID NO: 80364 - DNA, 60 bp, Artificial
  Synthetic oligonucleotide
cccattcgagagagcaaccattatggcggcatttacaggaaatactgaaggaagaacttc

SEQ ID NO: 80365 - DNA, 60 bp, Artificial
  Synthetic oligonucleotide
gtgttccgtttcacttgggaaccaaacaagtgtgcatagcatggtccagttcaagttgcc

SEQ ID NO: 80366 - DNA, 60 bp, Artificial
  Synthetic oligonucleotide
gggcctcatatacaacagaatgggaactgtaactactgaagtggcatttggtttggtatg

SEQ ID NO: 80367 - DNA, 60 bp, Artificial
  Synthetic oligonucleotide
tgctttttacttcttgccattgcaatgggccttgtcttcatatgtgtgaagaatggaaac

SEQ ID NO: 80368 - DNA, 60 bp, Artificial
  Synthetic oligonucleotide
ggaccatatggccataatcaaaaagtacacatcaggaagacaggagaagaatcctgctct

SEQ ID NO: 80369 - DNA, 60 bp, Artificial
  Synthetic oligonucleotide
gtggaccatatggccataatcaaaaagtacacatcaggaagacaggagaagaatcctgct

SEQ ID NO: 80370 - DNA, 60 bp, Artificial
  Synthetic oligonucleotide
gggacaaacctaatggtgattgttccaatccaataactggaagtcctggtgcaccgggag

SEQ ID NO: 80371 - DNA, 60 bp, Artificial
  Synthetic oligonucleotide
gcagacctggggacaaacctagtggtgattgttccaatccaataactggaagtcccagtg

SEQ ID NO: 80372 - DNA, 60 bp, Artificial
  Synthetic oligonucleotide
accagtagacctggggacaaacctaatggtgattgttccaatccaataactggaagtcct

SEQ ID NO: 80373 - DNA, 60 bp, Artificial
  Synthetic oligonucleotide
tgtgtatgcagggataactggcaaggcgcaaatagacccattatagagattgatatgagc

SEQ ID NO: 80374 - DNA, 60 bp, Artificial
  Synthetic oligonucleotide
acttgtgtatgcagggataactggcaaggcgcaaataggcctattatagaaatcgatatg

SEQ ID NO: 80375 - DNA, 60 bp, Artificial
  Synthetic oligonucleotide
gatcagaaagtaagttgtgtatgcagggataactggcaaggcgcaaatagacccattata

SEQ ID NO: 80376 - DNA, 60 bp, Artificial
  Synthetic oligonucleotide
tcaggagtcagagtgcgtatgccacaacggcacatgtgcagttgtaatgactgatgggcc

SEQ ID NO: 80377 - DNA, 60 bp, Artificial
  Synthetic oligonucleotide
taagattcggagaaagtgaacaaatcatcgttactagggagccatatgtgtcatgcgatc

SEQ ID NO: 80378 - DNA, 60 bp, Artificial
  Synthetic oligonucleotide
gcaaaagacaatgcaataagatttggggaaagtgaacaaatcatcgttactagggagcca

SEQ ID NO: 80379 - DNA, 60 bp, Artificial
  Synthetic oligonucleotide
ccaaagacaatgcaataagattcggagaaagtgaacaaatcatcgttactagggagccat

SEQ ID NO: 80380 - DNA, 60 bp, Artificial
  Synthetic oligonucleotide
gcatgggcctcatatacaacagaatgggaactgtgaccaccgaagtggcgtttggcctgg

SEQ ID NO: 80381 - DNA, 60 bp, Artificial
  Synthetic oligonucleotide
tgaggactgcaataggccaagtgtcaaggcccatgttcctgtatgttagaaccaatggga

SEQ ID NO: 80382 - DNA, 60 bp, Artificial
  Synthetic oligonucleotide
ggatgtcaatccgactttacttttcttgaaagtgccagcgcaaaatgccataagtactac

SEQ ID NO: 80383 - DNA, 60 bp, Artificial
  Synthetic oligonucleotide
ggataatacttggctagggagaacaatcagccccagattgaggagtggatttgaaatgct

SEQ ID NO: 80384 - DNA, 52 bp, Artificial
  Synthetic oligonucleotide
ggaatgcttcaatcctattactggaagccctggtgcaccagggataaaaggt

SEQ ID NO: 80385 - DNA, 60 bp, Artificial
  Synthetic oligonucleotide
gacatgaataaattggaacatacaagtagatatatatgcacaggggtattaacagacacc

SEQ ID NO: 80386 - DNA, 60 bp, Artificial
  Synthetic oligonucleotide
ctattatagagattgacatgaataaattggaacatacaagtagatatatatgcacagggg

SEQ ID NO: 80387 - DNA, 60 bp, Artificial
  Synthetic oligonucleotide
gcacaggggtattaacagacaccagtagacccaaggataaaacaataggggaatgcttca

SEQ ID NO: 80388 - DNA, 60 bp, Artificial
  Synthetic oligonucleotide
tgcacaggggtattaacagacaccagtagacccaaggataaaacaataggggaatgcttc

SEQ ID NO: 80389 - DNA, 60 bp, Artificial
  Synthetic oligonucleotide
atatactttcataaaggaatgataataaaagaagaatcactaaaaggttcagccaaacac

SEQ ID NO: 80390 - DNA, 60 bp, Artificial
  Synthetic oligonucleotide
atgctactgcaacagtgtattacaacaagagacttacaaccactattaaaacatgggcta

SEQ ID NO: 80391 - DNA, 60 bp, Artificial
  Synthetic oligonucleotide
gtgtctgcagagacaactggcagggtgcaaatagacctattatagagattgacatgaata

SEQ ID NO: 80392 - DNA, 60 bp, Artificial
  Synthetic oligonucleotide
tcaaagagtgacttgtgtctgcagagacaactggcagggtgcaaatagacctattataga

SEQ ID NO: 80393 - DNA, 60 bp, Artificial
  Synthetic oligonucleotide
aaaaggagaaagccacaagaataataacctaacatgcacaaatatcaaccagaatgatac

SEQ ID NO: 80394 - DNA, 60 bp, Artificial
  Synthetic oligonucleotide
ggagaaagccacaagaataataacctaacatgcacaaatatcaaccagaatgataccacc

SEQ ID NO: 80395 - DNA, 60 bp, Artificial
  Synthetic oligonucleotide
gcccaatctcagttgggtctggatctttccctgatggggcacaaattaaatacttttcgt

SEQ ID NO: 80396 - DNA, 60 bp, Artificial
  Synthetic oligonucleotide
caagcacaagctgccatgatggggtaaacaggatgacaatttgtgtacaaggagacaatg

SEQ ID NO: 80397 - DNA, 60 bp, Artificial
  Synthetic oligonucleotide
aaggagacaatgaaaatgctactgcaacagtgtattacaacaagagacttacaaccacta

SEQ ID NO: 80398 - DNA, 60 bp, Artificial
  Synthetic oligonucleotide
cagccttccgagggctcatttctactccattaggtagccccccaacagtgagcaacagtg

SEQ ID NO: 80399 - DNA, 60 bp, Artificial
  Synthetic oligonucleotide
gtcaagcacaagctgccatgatggggtaaacaggatgacaatttgtgtacaaggagacaa

SEQ ID NO: 80400 - DNA, 60 bp, Artificial
  Synthetic oligonucleotide
aggtactacaatcagaaacaagcattcaaatagtaccacacacgacagaacagccttccg

SEQ ID NO: 80401 - DNA, 60 bp, Artificial
  Synthetic oligonucleotide
cagaaacaagcattcaaatagtaccacacacgacagaacagccttccgagggctcatttc

SEQ ID NO: 80402 - DNA, 60 bp, Artificial
  Synthetic oligonucleotide
ccttatgtctcatgtgatcctctaagttgcaaaatgtatgctctacaccaaggtactaca

SEQ ID NO: 80403 - DNA, 60 bp, Artificial
  Synthetic oligonucleotide
gtgatcctctaagttgcaaaatgtatgctctacaccaaggtactacaatcagaaacaagc

SEQ ID NO: 80404 - DNA, 60 bp, Artificial
  Synthetic oligonucleotide
aaagccacaagaataataacctaacatgcacaaatatcaaccagaatgataccaccatgg

SEQ ID NO: 80405 - DNA, 60 bp, Artificial
  Synthetic oligonucleotide
ataacctaacatgcacaaatatcaaccagaatgataccaccatggtaaacacgtacatca

SEQ ID NO: 80406 - DNA, 60 bp, Artificial
  Synthetic oligonucleotide
gaatctaggacagaagagatacaccaaaacaacatactggtgggatggactccaatcctc

SEQ ID NO: 80407 - DNA, 60 bp, Artificial
  Synthetic oligonucleotide
atcttggagggctatatgaagcaattgaggagtgcctgattaatgatccctgggttttgc

SEQ ID NO: 80408 - DNA, 60 bp, Artificial
  Synthetic oligonucleotide
cggcacttcaggcacctatggaacaggctcatggcctgatggggcgaatatcaatttcat

SEQ ID NO: 80409 - DNA, 60 bp, Artificial
  Synthetic oligonucleotide
gtagacatacttaggcagaatccaacagaggaacaagccgtggacatatgcaaggcagcg

SEQ ID NO: 80410 - DNA, 60 bp, Artificial
  Synthetic oligonucleotide
tgctaattgggcaaggagatgtagtgttggtaatgaaacggaaacgggactctagcatac

SEQ ID NO: 80411 - DNA, 60 bp, Artificial
  Synthetic oligonucleotide
tagtaatgaaacggaaacgggactctagcatacttactgacagccagacagcgaccaaaa

SEQ ID NO: 80412 - DNA, 60 bp, Artificial
  Synthetic oligonucleotide
ggagatgtagtgttggtaatgaaacggaaacgggactctagcatacttactgacagccag

SEQ ID NO: 80413 - DNA, 55 bp, Artificial
  Synthetic oligonucleotide
accatgaagggaggctgatccagaacagcataacaatagagagaatggttctctc

SEQ ID NO: 80414 - DNA, 60 bp, Artificial
  Synthetic oligonucleotide
gggcggctgattcagaacagcataacaatagagaggatggtgctttcggcattcgacgaa

SEQ ID NO: 80415 - DNA, 60 bp, Artificial
  Synthetic oligonucleotide
agggcggctgattcagaacagcataacaatagagaggatggtgctttcggcattcgacga

SEQ ID NO: 80416 - DNA, 60 bp, Artificial
  Synthetic oligonucleotide
ggctacaaagatgtgatactttggtttagcttcggggcatcatgtttcacacttctggcc

SEQ ID NO: 80417 - DNA, 60 bp, Artificial
  Synthetic oligonucleotide
caggactgtaagattgctcctttgatggtggcatacatgctggagagggaactggttcgc

SEQ ID NO: 80418 - DNA, 60 bp, Artificial
  Synthetic oligonucleotide
tgagtggtggctacaaagatgtgatactttggtttagcttcggggcgtcatgctttttac

SEQ ID NO: 80419 - DNA, 60 bp, Artificial
  Synthetic oligonucleotide
cctcccattcgagagagcaaccattatggcggcattcacaggaaacactgaaggcagaac

SEQ ID NO: 80420 - DNA, 60 bp, Artificial
  Synthetic oligonucleotide
ccctttcgagagagcaaccattatggcggcattcacaggaaacactgagggcaggacttc

SEQ ID NO: 80421 - DNA, 60 bp, Artificial
  Synthetic oligonucleotide
acctcccattcgagagagcaaccattatggcggcattcacaggaaacactgaaggcagaa

SEQ ID NO: 80422 - DNA, 60 bp, Artificial
  Synthetic oligonucleotide
tgtcaatttattcaacagtggcgagttccttagcactggcaatcatggtagctggtctat

SEQ ID NO: 80423 - DNA, 60 bp, Artificial
  Synthetic oligonucleotide
ttattcaacagtggcgagttccttagcactggcaatcatggtagctggtctatctttctg

SEQ ID NO: 80424 - DNA, 60 bp, Artificial
  Synthetic oligonucleotide
aactgagcagtggctacaaagatgtgatactttggtttagcttcggggcgtcatgtttca

SEQ ID NO: 80425 - DNA, 60 bp, Artificial
  Synthetic oligonucleotide
cttctgggaacaatcactgggccaccccaatgtgaccaattcctagaattttcggccgac

SEQ ID NO: 80426 - DNA, 60 bp, Artificial
  Synthetic oligonucleotide
gcgccaaaatgccactgaaatcagagcatctgttgggagaatggttggtggaatcgggag

SEQ ID NO: 80427 - DNA, 60 bp, Artificial
  Synthetic oligonucleotide
gagcgccagaatgccactgaaatcagagcatctgttgggagaatggttggtggaatcggg

SEQ ID NO: 80428 - DNA, 60 bp, Artificial
  Synthetic oligonucleotide
aagaactaatggagcaaccagtgcatgtagaagatcaggatcttcattctatgcagagat

SEQ ID NO: 80429 - DNA, 60 bp, Artificial
  Synthetic oligonucleotide
atcactaataaagtcaactcaatcattgacaaaatgaacactcaattcgaagccgttggg

SEQ ID NO: 80430 - DNA, 60 bp, Artificial
  Synthetic oligonucleotide
ggtgttccatttcacttgggaaccaaacaagtgtgcatagcatggtccagttcaagttgc

SEQ ID NO: 80431 - DNA, 60 bp, Artificial
  Synthetic oligonucleotide
agcctatgcaatgttgaaggatgggtcgtgatagccaaagacaacgcagtaagatttgga

SEQ ID NO: 80432 - DNA, 60 bp, Artificial
  Synthetic oligonucleotide
ccaaggaaccagattcgagaactccaagctacttactattaaataagagcctatgcaatg

SEQ ID NO: 80433 - DNA, 60 bp, Artificial
  Synthetic oligonucleotide
ttaccaaggaaccagattcgagaactccaagctacttactattaaataagagcctatgca

SEQ ID NO: 80434 - DNA, 60 bp, Artificial
  Synthetic oligonucleotide
gaggagaacttgacatgcacaaccattactcaaaacaacaccaccgtagtggaaaacaca

SEQ ID NO: 80435 - DNA, 60 bp, Artificial
  Synthetic oligonucleotide
acaagaggagaacttgacatgcacaaccattactcaaaacaacaccaccgtagtggaaaa

SEQ ID NO: 80436 - DNA, 60 bp, Artificial
  Synthetic oligonucleotide
cgggttgaatgtatctctacacctgaaagaaactgggaccaaacaagaggagaacttgac

SEQ ID NO: 80437 - DNA, 60 bp, Artificial
  Synthetic oligonucleotide
tcaaatgtcgggttgaatgtatctctacacctgaaagaaactgggaccaaacaagaggag

SEQ ID NO: 80438 - DNA, 60 bp, Artificial
  Synthetic oligonucleotide
gagaatgaatcctaatcagaaactatttgcactatctggagtagcgatagcacttagtgt

SEQ ID NO: 80439 - DNA, 60 bp, Artificial
  Synthetic oligonucleotide
gagagccatatgtatcatgcgacccatcaggatgtaaaatgtatgctctacaccaaggga

SEQ ID NO: 80440 - DNA, 60 bp, Artificial
  Synthetic oligonucleotide
gccatatgtatcatgcgacccatcaggatgtaaaatgtatgctctacaccaagggactac

SEQ ID NO: 80441 - DNA, 60 bp, Artificial
  Synthetic oligonucleotide
cgaatgggactatccatgatagaacagctttccgaggtcttatatccactcaattgggca

SEQ ID NO: 80442 - DNA, 60 bp, Artificial
  Synthetic oligonucleotide
ccatgatagaacagctttccgaggtcttatatccactcaattgggcactccaccgacggt

SEQ ID NO: 80443 - DNA, 60 bp, Artificial
  Synthetic oligonucleotide
gtttattataataggagactcaccaccaccattaaaacttgggctaggaacattctaagg

SEQ ID NO: 80444 - DNA, 60 bp, Artificial
  Synthetic oligonucleotide
ggagactcaccaccaccattaaaacttgggctaggaacattctaaggacccaggagtcgg

SEQ ID NO: 80445 - DNA, 60 bp, Artificial
  Synthetic oligonucleotide
cagttgtaatgactgacggatcagccagtagccgggcatacactaaagtagtgtattttc

SEQ ID NO: 80446 - DNA, 55 bp, Artificial
  Synthetic oligonucleotide
cagttgtaatgactgacggatcagccagtagccgggcatacactaaagtagtgta

SEQ ID NO: 80447 - DNA, 60 bp, Artificial
  Synthetic oligonucleotide
tgtgtgtgcagggataattggcagggtgcaaataggcccatcatagaaatcgacatgact

SEQ ID NO: 80448 - DNA, 60 bp, Artificial
  Synthetic oligonucleotide
gtgtgcagggataattggcagggtgcaaataggcccatcatagaaatcgacatgactacg

SEQ ID NO: 80449 - DNA, 51 bp, Artificial
  Synthetic oligonucleotide
cggcaagaaatagttgacaataacaattggtcaggttactctggaagcttc

SEQ ID NO: 80450 - DNA, 60 bp, Artificial
  Synthetic oligonucleotide
ccaataaccggaagccccggtgctccaggagtgaagggatttggattcctgaatggagac

SEQ ID NO: 80451 - DNA, 60 bp, Artificial
  Synthetic oligonucleotide
ggtagtgagtgctacaatccgtgtttttatgtggagctaattagaggtaggcctgaagag

SEQ ID NO: 80452 - DNA, 60 bp, Artificial
  Synthetic oligonucleotide
agagcacacgagcagatacatatgcactggaatcctgacagataccagcaggcccgggga

SEQ ID NO: 80453 - DNA, 60 bp, Artificial
  Synthetic oligonucleotide
cgacatgactacgttagagcacacgagcagatacatatgcactggaatcctgacagatac

SEQ ID NO: 80454 - DNA, 60 bp, Artificial
  Synthetic oligonucleotide
aggcccggggacaagcctaatggtgactgttccaatccaataaccggaagccccggtgct

SEQ ID NO: 80455 - DNA, 60 bp, Artificial
  Synthetic oligonucleotide
tgacagataccagcaggcccggggacaagcctaatggtgactgttccaatccaataaccg

SEQ ID NO: 80456 - DNA, 60 bp, Artificial
  Synthetic oligonucleotide
gtttttagatgtatggacttacaatgcagaacttctggtgctcatggaaaacgaaagaac

SEQ ID NO: 80457 - DNA, 60 bp, Artificial
  Synthetic oligonucleotide
aggctaatgaatgttacaacccctgcttttatgtagagttaattagagggaggcctgagg

SEQ ID NO: 80458 - DNA, 60 bp, Artificial
  Synthetic oligonucleotide
acaacccctgcttttatgtagagttaattagagggaggcctgaggaggcaaaatacgtct

SEQ ID NO: 80459 - DNA, 60 bp, Artificial
  Synthetic oligonucleotide
cttttatgtagagttaattagagggaggcctgaggaggcaaaatacgtctggtggacgag

SEQ ID NO: 80460 - DNA, 60 bp, Artificial
  Synthetic oligonucleotide
aattagagggaggcctgaggaggcaaaatacgtctggtggacgagcaacagtctaattgc

SEQ ID NO: 80461 - DNA, 60 bp, Artificial
  Synthetic oligonucleotide
ggctagggaggactatcagtcccagatctaggagtgggttcgagatgctgaaaataccca

SEQ ID NO: 80462 - DNA, 53 bp, Artificial
  Synthetic oligonucleotide
gagatgctgaaaatacccaatgcagaaaccgacccaaattctagaataataga

SEQ ID NO: 80463 - DNA, 60 bp, Artificial
  Synthetic oligonucleotide
ggaagcttcatcgactattgggatgaggctaatgaatgttacaacccctgcttttatgta

SEQ ID NO: 80464 - DNA, 60 bp, Artificial
  Synthetic oligonucleotide
gcttcatcgactattgggatgaggctaatgaatgttacaacccctgcttttatgtagagt

SEQ ID NO: 80465 - DNA, 60 bp, Artificial
  Synthetic oligonucleotide
aggcctgaggaggcaaaatacgtctggtggacgagcaacagtctaattgccttgtgtgga

SEQ ID NO: 80466 - DNA, 60 bp, Artificial
  Synthetic oligonucleotide
ggcaaaatacgtctggtggacgagcaacagtctaattgccttgtgtggaagcccagtctc

SEQ ID NO: 80467 - DNA, 60 bp, Artificial
  Synthetic oligonucleotide
atcaacaaggggacaaatctgaaggctccaaactatttgctgctgaataaaagtctatgc

SEQ ID NO: 80468 - DNA, 60 bp, Artificial
  Synthetic oligonucleotide
gctgctgaataaaagtctatgcagtgtggaaggatgggtcgtgatagccaaagacaatgc

SEQ ID NO: 80469 - DNA, 60 bp, Artificial
  Synthetic oligonucleotide
aataacacaacaataatcaacaaggggacaaatctgaaggctccaaactatttgctgctg

SEQ ID NO: 80470 - DNA, 60 bp, Artificial
  Synthetic oligonucleotide
atcaacaaggggacaaatttgaaggctccaaactatttgctgctgaataaaagtctatgc

SEQ ID NO: 80471 - DNA, 60 bp, Artificial
  Synthetic oligonucleotide
acaccaaggaactaccataaggaacaaacactcaaatggaaccatacatgacagaacgac

SEQ ID NO: 80472 - DNA, 60 bp, Artificial
  Synthetic oligonucleotide
accataaggaacaaacactcaaatggaaccatacatgacagaacgactttccgtggtctc

SEQ ID NO: 80473 - DNA, 60 bp, Artificial
  Synthetic oligonucleotide
agggagccatatgtgtcatgcgatccatcaggatgcaagatgtatgccctacaccaagga

SEQ ID NO: 80474 - DNA, 60 bp, Artificial
  Synthetic oligonucleotide
ggagccatatgtgtcatgcgatccatcaggatgcaagatgtatgccctacaccaaggaac

SEQ ID NO: 80475 - DNA, 60 bp, Artificial
  Synthetic oligonucleotide
ccataaggaacaaacactcaaatggaaccatacatgacagaacgactttccgtggtctct

SEQ ID NO: 80476 - DNA, 60 bp, Artificial
  Synthetic oligonucleotide
gtcgagtacaagctgccatgacggagttggtagaatgactatctgcatacaggggaataa

SEQ ID NO: 80477 - DNA, 58 bp, Artificial
  Synthetic oligonucleotide
ctgatgggcccgccagcagtcaagcctatacaaaaataatgtactttcataaagggct

SEQ ID NO: 80478 - DNA, 58 bp, Artificial
  Synthetic oligonucleotide
ctgatgggcccgctagcagccaagcctatacaaaaataatgtactttcataaagggct

SEQ ID NO: 80479 - DNA, 60 bp, Artificial
  Synthetic oligonucleotide
tcaggagtcagagtgcgtatgctacaacggcacatgtgcagttgtaatgactgatgggcc

SEQ ID NO: 80480 - DNA, 60 bp, Artificial
  Synthetic oligonucleotide
cgagtacaagctgccatgacggagttggtagaatgactatctgcatacaggggaataatg

SEQ ID NO: 80481 - DNA, 60 bp, Artificial
  Synthetic oligonucleotide
tggaagtcctggtgcaccgggagtgaaagggttcgggttcttaaatggggacaacacatg

SEQ ID NO: 80482 - DNA, 56 bp, Artificial
  Synthetic oligonucleotide
acccattatagagattgatatgagcacactagagcacacaagtagatacgtgtgca

SEQ ID NO: 80483 - DNA, 56 bp, Artificial
  Synthetic oligonucleotide
acccattatagagattgatatgagcacactagagcacacaagtagatgcgtgtgca

SEQ ID NO: 80484 - DNA, 60 bp, Artificial
  Synthetic oligonucleotide
cactcaggggatcagccaggcatattgaggaatgctcttgttatggacacgatcagaaag

SEQ ID NO: 80485 - DNA, 60 bp, Artificial
  Synthetic oligonucleotide
acaacacatggctagggaggactatcagtcccagatctaggagtgggttcgagatgctga

SEQ ID NO: 80486 - DNA, 60 bp, Artificial
  Synthetic oligonucleotide
ggtgcaccgggagtgaaagggttcgggttcttaaatggggacaacacatggctagggagg

SEQ ID NO: 80487 - DNA, 60 bp, Artificial
  Synthetic oligonucleotide
cagtctaattgccttgtgtggaagcccagtctcagttgggtccggttctttccccgatgg

SEQ ID NO: 80488 - DNA, 60 bp, Artificial
  Synthetic oligonucleotide
ggtggacgagcaacagtctaattgccttgtgtggaagcccagtctcagttgggtccggtt

SEQ ID NO: 80489 - DNA, 56 bp, Artificial
  Synthetic oligonucleotide
cctattgataggaatttcaaatgttggactgaatgtgtctctacacttaaaaggag

SEQ ID NO: 80490 - DNA, 60 bp, Artificial
  Synthetic oligonucleotide
caaaaactatttgcattatcaggagtggcaatagcacttagtgtattgaacctattgata

SEQ ID NO: 80491 - DNA, 60 bp, Artificial
  Synthetic oligonucleotide
aataacacaacaataatcaacaaggggacaaatttgaaggctccaaactatttgctgctg

SEQ ID NO: 80492 - DNA, 56 bp, Artificial
  Synthetic oligonucleotide
cctattgataggaatttcaaatgttggactgaatatgtctctacacttaaaaggag

SEQ ID NO: 80493 - DNA, 60 bp, Artificial
  Synthetic oligonucleotide
ggtcaactcaatcattgacaaaatgaacactcaatttgaggccgttgggaaggagtttaa

SEQ ID NO: 80494 - DNA, 60 bp, Artificial
  Synthetic oligonucleotide
ggatgcttgctgacagtatcggttcatggtctcaaaatatcctcagaactcaggagtcag

SEQ ID NO: 80495 - DNA, 60 bp, Artificial
  Synthetic oligonucleotide
tgatgggatgcttgttgacagtatcggttcatggtctcaaaatatcctcagaactcagga

SEQ ID NO: 80496 - DNA, 60 bp, Artificial
  Synthetic oligonucleotide
tgatgggatgcttgctgacagtatcggttcatggtctcaaaatatcctcagaactcagga

SEQ ID NO: 80497 - DNA, 51 bp, Artificial
  Synthetic oligonucleotide
cagcagacaagagaataatggagatgattcctgaaagaaatgaacaagggc

SEQ ID NO: 80498 - DNA, 55 bp, Artificial
  Synthetic oligonucleotide
tgccgaccaaagtctcccaccgaacttctccagccttgaaaactttagagcctat

SEQ ID NO: 80499 - DNA, 60 bp, Artificial
  Synthetic oligonucleotide
tggagggaacaactgggccagaagtttgaagaaataagatggctgattgaagaaataagg

SEQ ID NO: 80500 - DNA, 60 bp, Artificial
  Synthetic oligonucleotide
cagttcgaatctctgagattctacagagattcacttggagaaacagtgatgagaatgggg

SEQ ID NO: 80501 - DNA, 60 bp, Artificial
  Synthetic oligonucleotide
cagttcgaatctctgagattctacagagattcacttggagaaacagtaatgagaatgggg

SEQ ID NO: 80502 - DNA, 60 bp, Artificial
  Synthetic oligonucleotide
catgcttatacccaaccaaaaaagagtaggatcactctgcatcagaatggatcaagccat

SEQ ID NO: 80503 - DNA, 54 bp, Artificial
  Synthetic oligonucleotide
ccaaaaaagagtaggatcactctacatcagaatggatcaagccataatggataa

SEQ ID NO: 80504 - DNA, 60 bp, Artificial
  Synthetic oligonucleotide
aacgatttgcagaccaaaaaatgggtgatgccccgtttcttgaccgacttcgcagagatc

SEQ ID NO: 80505 - DNA, 60 bp, Artificial
  Synthetic oligonucleotide
gggactattacctcagtacccacttcatattatttaactgacatgactcttgaagaaatg

SEQ ID NO: 80506 - DNA, 51 bp, Artificial
  Synthetic oligonucleotide
tcaggtagattgttttctttggcacattcgcaaacgatttgcagaccaaaa

SEQ ID NO: 80507 - DNA, 50 bp, Artificial
  Synthetic oligonucleotide
ctctgagattctacagagattcacttggagaaacagtgatgagaatgggg

SEQ ID NO: 80508 - DNA, 60 bp, Artificial
  Synthetic oligonucleotide
cagtgtcaagctttcaggtagattgttttctttggcacattcgcaaacgatttgcagacc

SEQ ID NO: 80509 - DNA, 60 bp, Artificial
  Synthetic oligonucleotide
aaacgatttgcagaccaaaaaatgggtgatgccccgtttcttgaccggcttcgcagagat

SEQ ID NO: 80510 - DNA, 60 bp, Artificial
  Synthetic oligonucleotide
ccaacacagtgtcaagctttcaggtagattgttttctttggcacattcgcaaacgatttg

SEQ ID NO: 80511 - DNA, 60 bp, Artificial
  Synthetic oligonucleotide
ggagggaacaactgggccagaagtttgaagaaataagatggctgattgaagaaataaggc

SEQ ID NO: 80512 - DNA, 50 bp, Artificial
  Synthetic oligonucleotide
ctctgagattctacagagattcacttggagaaacagtaatgagaatgggg

SEQ ID NO: 80513 - DNA, 60 bp, Artificial
  Synthetic oligonucleotide
caacacagtgtcaagctttcaggtagattgttttctttggcacattcgcaaacgatttgc

SEQ ID NO: 80514 - DNA, 60 bp, Artificial
  Synthetic oligonucleotide
tttcaggtagattgttttctttggcacattcgcaaacgatttgcagaccaaaaaatgggt

SEQ ID NO: 80515 - DNA, 60 bp, Artificial
  Synthetic oligonucleotide
aaacaccagaaatgagcctgctttaatagtatggggaatccatcatcctggatcagctac

SEQ ID NO: 80516 - DNA, 57 bp, Artificial
  Synthetic oligonucleotide
aaaacaccagaaatgagcctgctttaatagtatggggaatccatcattctggatcag

SEQ ID NO: 80517 - DNA, 60 bp, Artificial
  Synthetic oligonucleotide
gacaaaatcgtacaaaaacaccagaaatgagcctgctttaatagtatggggaatccatca

SEQ ID NO: 80518 - DNA, 60 bp, Artificial
  Synthetic oligonucleotide
aaatgacaaaatcgtacaaaaacaccagaaatgagcctgctttaatagtatggggaatcc

SEQ ID NO: 80519 - DNA, 60 bp, Artificial
  Synthetic oligonucleotide
gaagtggctcctgtcaagtgcagacaacgctgctttcccgcaaatgacaaaatcgtacaa

SEQ ID NO: 80520 - DNA, 60 bp, Artificial
  Synthetic oligonucleotide
gagatgaagtggctcctgtcaaatacagataacgctgctttcccgcaaatgacaaaatcg

SEQ ID NO: 80521 - DNA, 60 bp, Artificial
  Synthetic oligonucleotide
gaaatgaagtggctcctgtcaagtgcagacaacgctgctttcccgcaaatgacaaaatcg

SEQ ID NO: 80522 - DNA, 60 bp, Artificial
  Synthetic oligonucleotide
gagatgaagtggctcctgtcaagtgcagacaacgctgctttcccgcaaatgacaaaatcg

SEQ ID NO: 80523 - DNA, 60 bp, Artificial
  Synthetic oligonucleotide
ggggaatccatcattctggatcagctactgaacagaccaaactatatgggagtgggaata

SEQ ID NO: 80524 - DNA, 60 bp, Artificial
  Synthetic oligonucleotide
tggggaatccatcattctggatcagctactgaacagaccaaactatatgggagtgggaat

SEQ ID NO: 80525 - DNA, 60 bp, Artificial
  Synthetic oligonucleotide
gagaagcaaattggcaatgtgatcaattggaccagagactccataacagaggtatggtcc

SEQ ID NO: 80526 - DNA, 60 bp, Artificial
  Synthetic oligonucleotide
ctgaagtggagaagcaaattggcaatgtgatcaattggaccagagactccataacagagg

SEQ ID NO: 80527 - DNA, 61 bp, Artificial
  Synthetic oligonucleotide
gactaatcaacaatttgaattaatagacaatgagttcactgaagtggagaagcaaattggc

SEQ ID NO: 80528 - DNA, 60 bp, Artificial
  Synthetic oligonucleotide
agattgatagagaagactaatcaacaatttgaattaatagacaatgagttcactgaagtg

SEQ ID NO: 80529 - DNA, 60 bp, Artificial
  Synthetic oligonucleotide
cactgaagtggagaagcaaattggcaatgtgatcaattggaccagagactccataacaga

SEQ ID NO: 80530 - DNA, 60 bp, Artificial
  Synthetic oligonucleotide
agacaatgagttcactgaagtggagaagcaaattggcaatgtgatcaattggaccagaga

SEQ ID NO: 80531 - DNA, 60 bp, Artificial
  Synthetic oligonucleotide
atttgtgaatgaagaagctctgcgccaaatcctcagggaatcaggagggattgacaagga

SEQ ID NO: 80532 - DNA, 60 bp, Artificial
  Synthetic oligonucleotide
agctctgcgccaaatcctcagggaatcaggagggattgacaaggaaacaacgggattcac

SEQ ID NO: 80533 - DNA, 60 bp, Artificial
  Synthetic oligonucleotide
gagagaggtgtagaagttgtcaatgcaactgaaacagtggaacggacgaacattcccagg

SEQ ID NO: 80534 - DNA, 60 bp, Artificial
  Synthetic oligonucleotide
gagagaggtgtagaagttgtcaatgcaactgaaacagtggaacgacgaacaattcccagg

SEQ ID NO: 80535 - DNA, 60 bp, Artificial
  Synthetic oligonucleotide
gagagaggtgtagaagttgtcaatgcaactgaaacagtagaacggatgaatgttcccaga

SEQ ID NO: 80536 - DNA, 60 bp, Artificial
  Synthetic oligonucleotide
ttatcctgggaagtttgtgaatgaagaagctctgcgccaaatcctcagggaatcaggagg

SEQ ID NO: 80537 - DNA, 60 bp, Artificial
  Synthetic oligonucleotide
cctgggaagtttgtgaatgaagaagctctgcgccaaatcctcagggaatcaggagggatt

SEQ ID NO: 80538 - DNA, 60 bp, Artificial
  Synthetic oligonucleotide
agagaagagaggtttatttggcgccatagctgggttcatcgaaaatggatgggaaggttt

SEQ ID NO: 80539 - DNA, 60 bp, Artificial
  Synthetic oligonucleotide
agagaagagaggtttatttggcgccatagctgggttcattgaaaatggatgggaaggttt

SEQ ID NO: 80540 - DNA, 60 bp, Artificial
  Synthetic oligonucleotide
gggatgaagaatgttcctgaaatcccgaagaagagagagaagagaggtttatttggcgcc

SEQ ID NO: 80541 - DNA, 60 bp, Artificial
  Synthetic oligonucleotide
gggatgaagaatgttcctgaaattccgaagaagagagagaagagaggtttatttggcgcc

SEQ ID NO: 80542 - DNA, 60 bp, Artificial
  Synthetic oligonucleotide
ctattgctggcaacagggatgaagaatgttcctgaaattccgaagaagagagagaagaga

SEQ ID NO: 80543 - DNA, 60 bp, Artificial
  Synthetic oligonucleotide
ctattgctggcaacagggatgaagaatgttcctgaaatcccgaagaagagagagaagaga

SEQ ID NO: 80544 - DNA, 60 bp, Artificial
  Synthetic oligonucleotide
gaatccatcatcctggatcagctactgaacagaccaaactatatgggaatgggagtaaac

SEQ ID NO: 80545 - DNA, 60 bp, Artificial
  Synthetic oligonucleotide
gaatccatcatcctggatcagctactgaacagaccaaactatatgggagtgggagtaaac

SEQ ID NO: 80546 - DNA, 60 bp, Artificial
  Synthetic oligonucleotide
atttggcgccatagctgggttcatcgaaaatggatgggaaggtttggttgatgggtggta

SEQ ID NO: 80547 - DNA, 60 bp, Artificial
  Synthetic oligonucleotide
atttggcgccatagctgggttcattgaaaatggatgggaaggtttggttgatgggtggta

SEQ ID NO: 80548 - DNA, 60 bp, Artificial
  Synthetic oligonucleotide
gggaggttttacatacagatgtgcactgaactcaaactcagtgactatgaagggagactg

SEQ ID NO: 80549 - DNA, 60 bp, Artificial
  Synthetic oligonucleotide
cggttcatggtctcaaaatatcctcagaactcaggagtcagagtgtgtttgcatcaacgg

SEQ ID NO: 80550 - DNA, 60 bp, Artificial
  Synthetic oligonucleotide
ggtcgggcgaagagcaacagccattctaaggaaagcaaccagaaggctgattcaactgat

SEQ ID NO: 80551 - DNA, 60 bp, Artificial
  Synthetic oligonucleotide
ctgcctaggacgtcatgctgtgtctaatggaaccaaagtagacacccttactgaaaaggg

SEQ ID NO: 80552 - DNA, 60 bp, Artificial
  Synthetic oligonucleotide
ctgcctagggcatcatgctgtgtctaatggaaccaaagtagacacccttactgaaaaggg

SEQ ID NO: 80553 - DNA, 60 bp, Artificial
  Synthetic oligonucleotide
gggcacttgtgcgtactgggatggaccccaggatgtgctctctgatgcaaggctcaactc

SEQ ID NO: 80554 - DNA, 60 bp, Artificial
  Synthetic oligonucleotide
tgttcaacatgctgagtacagtcttaggagtctcaatcctgaatcttgggcaaaagaggt

SEQ ID NO: 80555 - DNA, 60 bp, Artificial
  Synthetic oligonucleotide
gggatcccaataatgaaagagggaacccaggagtgaaaggatgggcctttgacattgggg

SEQ ID NO: 80556 - DNA, 60 bp, Artificial
  Synthetic oligonucleotide
tgcacttgggcaaggaaccacgctggacaacaaacattcaaatggcacaatacacgatag

SEQ ID NO: 80557 - DNA, 60 bp, Artificial
  Synthetic oligonucleotide
acaactaactcatcacatgcgcaaaaaaagaggtttatttggtgcaatagcaggattcat

SEQ ID NO: 80558 - DNA, 50 bp, Artificial
  Synthetic oligonucleotide
actgttaatttcagttttaatggggcctttatagcacctgaccgcgccag

SEQ ID NO: 80559 - DNA, 60 bp, Artificial
  Synthetic oligonucleotide
agatcccaatgatactgttactttcagttttaatggggcctttatagcacctgaccgcgc

SEQ ID NO: 80560 - DNA, 60 bp, Artificial
  Synthetic oligonucleotide
ctagatcccaatgatactgtcactttcagttttaatggggcctttatagcacctgaccgc

SEQ ID NO: 80561 - DNA, 60 bp, Artificial
  Synthetic oligonucleotide
tcccaatgatactgttactttcagttttaatggggcctttatagcacctgaccgcgccag

SEQ ID NO: 80562 - DNA, 60 bp, Artificial
  Synthetic oligonucleotide
tcccaatgatactgtcactttcagttttaatggggcctttatagcacctgaccgcgccag

SEQ ID NO: 80563 - DNA, 60 bp, Artificial
  Synthetic oligonucleotide
gatcccaatgatactgtcactttcagttttaatggggcctttatagcacctgaccgcgcc

SEQ ID NO: 80564 - DNA, 60 bp, Artificial
  Synthetic oligonucleotide
cccgaagaggttagtgaaacacagggaacagagaagttgacaataacatattcatcatca

SEQ ID NO: 80565 - DNA, 60 bp, Artificial
  Synthetic oligonucleotide
tctcccgaagaggttagtgaaacacagggaacagagaagttgacaataacatattcatca

SEQ ID NO: 80566 - DNA, 60 bp, Artificial
  Synthetic oligonucleotide
cagggagtttcatcgactactgggatgaaagcaatgagtgctacaacccctgtttctatg

SEQ ID NO: 80567 - DNA, 60 bp, Artificial
  Synthetic oligonucleotide
atgtacgcactgcaccaaggaacgaccattagaaacaagcactcaaatgggacaatacac

SEQ ID NO: 80568 - DNA, 60 bp, Artificial
  Synthetic oligonucleotide
gagccatatgtgtcatgtgacccattaggatgtaggatgtacgcactgcaccaaggaacg

SEQ ID NO: 80569 - DNA, 60 bp, Artificial
  Synthetic oligonucleotide
taatagtgacaagggagccatatgtgtcatgtgacccattaggatgtaggatgtacgcac

SEQ ID NO: 80570 - DNA, 60 bp, Artificial
  Synthetic oligonucleotide
ggaatatccaatgtggggctgaatgtctcactacacttaaagaacaacaatgaccaagac

SEQ ID NO: 80571 - DNA, 60 bp, Artificial
  Synthetic oligonucleotide
ggaatgttcgtgctatgggcacgattcaaaggcaacttgtgtgtgcagggacaactggca

SEQ ID NO: 80572 - DNA, 60 bp, Artificial
  Synthetic oligonucleotide
cagtatactatgaccgaagactcactaccacagtaaaaacatgggcagggaacattctta

SEQ ID NO: 80573 - DNA, 60 bp, Artificial
  Synthetic oligonucleotide
caccaaggaacgaccattagaaacaagcactcaaatgggacaatacacgacagggctgcc

SEQ ID NO: 80574 - DNA, 60 bp, Artificial
  Synthetic oligonucleotide
aggcaggaaatagttgacaataataactggtcaggatactcagggagtttcatcgactac

SEQ ID NO: 80575 - DNA, 60 bp, Artificial
  Synthetic oligonucleotide
atctcgggcaaaagaggtacaccaagaccacatactggtgggatggactccaatcctctg

SEQ ID NO: 80576 - DNA, 60 bp, Artificial
  Synthetic oligonucleotide
ccgttatagatataaatatggcagattatagcattgattccagttatgtgtgctcagggc

SEQ ID NO: 80577 - DNA, 60 bp, Artificial
  Synthetic oligonucleotide
gggaggctgattcaaaacagcataacaatagagagaatggttctctcagcatttgatgaa

SEQ ID NO: 80578 - DNA, 60 bp, Artificial
  Synthetic oligonucleotide
ttaacgatccctgggttttgcttaatgcatcttggttcaactccttcctcacacatgcac

SEQ ID NO: 80579 - DNA, 52 bp, Artificial
  Synthetic oligonucleotide
gaaattccaaacagcagcacaacgagcaatgatggaccaggtgagggaaagc

SEQ ID NO: 80580 - DNA, 60 bp, Artificial
  Synthetic oligonucleotide
ctttatagatgtatggacttacaatgcagaacttctagtgctcatggaaaacgaaagaac

SEQ ID NO: 80581 - DNA, 60 bp, Artificial
  Synthetic oligonucleotide
tgccagcgcaaaatgctataagtattacattcccttatactggagatcctccatacagcc

SEQ ID NO: 80582 - DNA, 60 bp, Artificial
  Synthetic oligonucleotide
ggcaatacaaaacagaattcagattgacgcagtaaagttgagcagcggttacaaagatgt

SEQ ID NO: 80583 - DNA, 60 bp, Artificial
  Synthetic oligonucleotide
ggcaatacaaaacagaattcagattgacgcagtaaagttgagcagcggttacaaagatat

SEQ ID NO: 80584 - DNA, 60 bp, Artificial
  Synthetic oligonucleotide
aggcaatacaaaacagaattcagattgacgcagtaaagttgagcagcggttacaaagatg

SEQ ID NO: 80585 - DNA, 60 bp, Artificial
  Synthetic oligonucleotide
aggcaatacaaaacagaattcagattgacgcagtaaagttgagcagcggttacaaagata

SEQ ID NO: 80586 - DNA, 56 bp, Artificial
  Synthetic oligonucleotide
ttttggatgtgctccaatggatcattgcagtgcagaatttgcatctagaattgtga

SEQ ID NO: 80587 - DNA, 57 bp, Artificial
  Synthetic oligonucleotide
aagtgctcagcatatagaggaatgttcctgttatccacgctacccagacgttaggtg

SEQ ID NO: 80588 - DNA, 51 bp, Artificial
  Synthetic oligonucleotide
tatggaatggctaaagacaagaccaatcctgtcacctctgactaaggggat

SEQ ID NO: 80589 - DNA, 60 bp, Artificial
  Synthetic oligonucleotide
atgaagtatccaattacagcagataaaagaataatggagatgattcctgaaagaaatgag

SEQ ID NO: 80590 - DNA, 60 bp, Artificial
  Synthetic oligonucleotide
ctagcatgccattccacaacatacaccctctcaccattggggaatgccccaaatacgtga

SEQ ID NO: 80591 - DNA, 60 bp, Artificial
  Synthetic oligonucleotide
gtggcgagttccttagcactggcaatcatggtagctggtctatctttctggatgtgctcc

SEQ ID NO: 80592 - DNA, 60 bp, Artificial
  Synthetic oligonucleotide
cacagagctctctttcacaatcactggagacaataccaaatggaatgaaaatcagaaccc

SEQ ID NO: 80593 - DNA, 60 bp, Artificial
  Synthetic oligonucleotide
caggcacttagggacaacctggaacctggaacctttgatcttggagggctatatgaagca

SEQ ID NO: 80594 - DNA, 60 bp, Artificial
  Synthetic oligonucleotide
caggcacttagggacaacctggaacctggaaccttcaatcttggagggctatatgaagca

SEQ ID NO: 80595 - DNA, 60 bp, Artificial
  Synthetic oligonucleotide
ctggaatgatgatgggcatgttcaacatgctgagtacagtattaggagtttcaatcctga

SEQ ID NO: 80596 - DNA, 60 bp, Artificial
  Synthetic oligonucleotide
acgtccccaggatctgctcaaaagggaaaaggacagttgacctcggtcaatgtggacttc

SEQ ID NO: 80597 - DNA, 60 bp, Artificial
  Synthetic oligonucleotide
catgatagctggtctatctttttggatgtgctccaatggatcattgcagtgcagaatttg

SEQ ID NO: 80598 - DNA, 60 bp, Artificial
  Synthetic oligonucleotide
ttcacaatcactggagacaacaccaaatggaatgagaatcagaaccctaggatgtttctg

SEQ ID NO: 80599 - DNA, 60 bp, Artificial
  Synthetic oligonucleotide
tcaaagggaaattccaaacagcagcacaacgagcaatgatggatcaagtgagggaaagcc

SEQ ID NO: 80600 - DNA, 60 bp, Artificial
  Synthetic oligonucleotide
taaacaatgctgtggtaatgccagctcatggcccagccaagagcatggaatatgatgctg

SEQ ID NO: 80601 - DNA, 60 bp, Artificial
  Synthetic oligonucleotide
catttattcaagcattacaactattgcttgaagtggagcaagagataagaactttctcgt

SEQ ID NO: 80602 - DNA, 60 bp, Artificial
  Synthetic oligonucleotide
acggtggcgagttccctagcactggcaatcatgatagctggtctatctttctggatgtgc

SEQ ID NO: 80603 - DNA, 60 bp, Artificial
  Synthetic oligonucleotide
aacagtggcgagttccctagcactggcaatcatgatagctggtctatccttttggatgtg

SEQ ID NO: 80604 - DNA, 60 bp, Artificial
  Synthetic oligonucleotide
aacagtggcgagttccctagcactggcaatcatgatagctggtctattcttttggatgtg

SEQ ID NO: 80605 - DNA, 60 bp, Artificial
  Synthetic oligonucleotide
gtgacaatgaatgcatggaaagtgtgagaaacggaacgtataactatccaaaatactcag

SEQ ID NO: 80606 - DNA, 60 bp, Artificial
  Synthetic oligonucleotide
gaaagaagggaaggtaatgacatttgttatccaggcaaatttgacaatgaagaaacattg

SEQ ID NO: 80607 - DNA, 60 bp, Artificial
  Synthetic oligonucleotide
gagagaagagaaggtgatgacatttgttatccaggcaaatttgacaatgaagaaacattg

SEQ ID NO: 80608 - DNA, 60 bp, Artificial
  Synthetic oligonucleotide
gctaatttaataattgagagaagagaaggtgatgacatttgttatccaggcaaatttgac

SEQ ID NO: 80609 - DNA, 60 bp, Artificial
  Synthetic oligonucleotide
gagagaagtgagggtgatgacatttgttatccaggcaaatttgacaatgaagaaacattg

SEQ ID NO: 80610 - DNA, 60 bp, Artificial
  Synthetic oligonucleotide
gagagaagagagggtgatgacatttgttatccaggcaaatttgacaatgaagaaacattg

SEQ ID NO: 80611 - DNA, 60 bp, Artificial
  Synthetic oligonucleotide
gagagaagagaaggtgatgatatttgttatccaggcaaatttgacaatgaagaaacattg

SEQ ID NO: 80612 - DNA, 60 bp, Artificial
  Synthetic oligonucleotide
tggtggaggccatggtgtctagggcccgaattgacgcacgaattgacttcgagtctggga

SEQ ID NO: 80613 - DNA, 60 bp, Artificial
  Synthetic oligonucleotide
gggtcggctaacgagcagaccaaactctatggaagtggaaacaagttgataacagtagga

SEQ ID NO: 80614 - DNA, 50 bp, Artificial
  Synthetic oligonucleotide
gctacaggaatgagaaatgtcccagagaatccaaagaccagaggactttt

SEQ ID NO: 80615 - DNA, 60 bp, Artificial
  Synthetic oligonucleotide
ttctggatcgactactgagcagaccaaactctatggaagtggaaacaagttgataaccgt

SEQ ID NO: 80616 - DNA, 60 bp, Artificial
  Synthetic oligonucleotide
tctgggtcggctaacgagcagaccaaactctatggaagtggaaacaagttgataacagta

SEQ ID NO: 80617 - DNA, 50 bp, Artificial
  Synthetic oligonucleotide
gctacaggaatgaggaatgtcccagagaatccaaagaccagaggactttt

SEQ ID NO: 80618 - DNA, 51 bp, Artificial
  Synthetic oligonucleotide
cactgagatagttgtggcaatgctactatttgctatccatactgtccaaaa

SEQ ID NO: 80619 - DNA, 60 bp, Artificial
  Synthetic oligonucleotide
caacacctatgaccatacccaatacagagcagagtcattacagaataggatacagataga

SEQ ID NO: 80620 - DNA, 60 bp, Artificial
  Synthetic oligonucleotide
gaaaatctgcacccaagggaaaaggccaaccgacctgggacaatgtggactcctaggaac

SEQ ID NO: 80621 - DNA, 59 bp, Artificial
  Synthetic oligonucleotide
aatgtcatcaattggacacgagactcaatgactgaggtatggtcgtataatgccgagct

SEQ ID NO: 80622 - DNA, 60 bp, Artificial
  Synthetic oligonucleotide
attgagcgaagggaaggagatgatgtgtgctatcctgggaaattcacaaatgaggagtca

SEQ ID NO: 80623 - DNA, 50 bp, Artificial
  Synthetic oligonucleotide
tctgggagaatcgatttccattggatgcttcttgatcccaacgacacagt

SEQ ID NO: 80624 - DNA, 60 bp, Artificial
  Synthetic oligonucleotide
taagggagaatgctgaagaagatggaactggatgttttgaaatattccataagtgtgatg

SEQ ID NO: 80625 - DNA, 60 bp, Artificial
  Synthetic oligonucleotide
ctcaaattctggtattcattgcttgtgtgctgattgaagctaagggagacaaaatatgcc

SEQ ID NO: 80626 - DNA, 57 bp, Artificial
  Synthetic oligonucleotide
cttatggtttagcttcggggcatcatgctttcttcttctagccattgcaatgggatt

SEQ ID NO: 80627 - DNA, 60 bp, Artificial
  Synthetic oligonucleotide
aaaggtgaacacgctaacggagagggggattgaagtagtgaatgctacggagacggtgga

SEQ ID NO: 80628 - DNA, 60 bp, Artificial
  Synthetic oligonucleotide
gagatcctccatacagccatggaacgggaacaggatacaccatggacacagtcaacagga

SEQ ID NO: 80629 - DNA, 60 bp, Artificial
  Synthetic oligonucleotide
cggagatcctccatacagccatggaacgggaacaggatacaccatggacacagtcaacag

SEQ ID NO: 80630 - DNA, 56 bp, Artificial
  Synthetic oligonucleotide
gtgaaccaaaagggactattgcctcagtacccacttcatattatttaactgatatg

SEQ ID NO: 80631 - DNA, 60 bp, Artificial
  Synthetic oligonucleotide
gtccttaaaaggaagaagtagcactcttggtttagacattgaaaactcaacacgagcagg

SEQ ID NO: 80632 - DNA, 60 bp, Artificial
  Synthetic oligonucleotide
tcgcagagatcagaagtccttaaaaggaagaagtagcactcttggtttagacattgaaaa

SEQ ID NO: 80633 - DNA, 57 bp, Artificial
  Synthetic oligonucleotide
aaaatgggtgatgccccgtttcttgaccggcttcgcagagatcagaagtccttaaaa

SEQ ID NO: 80634 - DNA, 56 bp, Artificial
  Synthetic oligonucleotide
gatatgactcttgaagaaatgtcaaggccctggtacatgcttatacccaaccaaaa

SEQ ID NO: 80635 - DNA, 60 bp, Artificial
  Synthetic oligonucleotide
gtgaaccaaaagggactattgcctcagtacccacttcatattatttaactgatatgactc

SEQ ID NO: 80636 - DNA, 60 bp, Artificial
  Synthetic oligonucleotide
gatatgactcttgaagaaatgtcaaggccctggtacatgcttatacccaaccaaaaaaga

SEQ ID NO: 80637 - DNA, 60 bp, Artificial
  Synthetic oligonucleotide
aattgggacaatggtaatggaattgaatcgaatgataaaacgaggaattaatgatcggaa

SEQ ID NO: 80638 - DNA, 60 bp, Artificial
  Synthetic oligonucleotide
tacttggaggaacaccccaatgctggaaaggaccctaagaaaactggaggacctatctac

SEQ ID NO: 80639 - DNA, 60 bp, Artificial
  Synthetic oligonucleotide
gggaaacaccaaccagcagaaagcatctgctggacaaataagtgtacaaccaacattctc

SEQ ID NO: 80640 - DNA, 60 bp, Artificial
  Synthetic oligonucleotide
aagtgggggaaacaccaaccagcagaaagcatctgctggacaaataagtgtacaaccaac

SEQ ID NO: 80641 - DNA, 60 bp, Artificial
  Synthetic oligonucleotide
gaaagtgcaaaaccagatgatgtgtccttccaaggacggggagttttcgagctctcggac

SEQ ID NO: 80642 - DNA, 60 bp, Artificial
  Synthetic oligonucleotide
ccagatgatgtgtccttccaaggacggggagttttcgagctctcggacgaaaaggcaact

SEQ ID NO: 80643 - DNA, 60 bp, Artificial
  Synthetic oligonucleotide
ggagtcagaatgtgtttgcatcaacggaacttgcacagtagtaatgactgatggaagtgc

SEQ ID NO: 80644 - DNA, 60 bp, Artificial
  Synthetic oligonucleotide
gaggaatgaacagggacaaaccctctggagcaaaacaaatgatgccggatcagaccgagt

SEQ ID NO: 80645 - DNA, 60 bp, Artificial
  Synthetic oligonucleotide
tgagaggaatgaacagggacaaaccctctggagcaaaacaaatgatgccggctcagaccg

SEQ ID NO: 80646 - DNA, 60 bp, Artificial
  Synthetic oligonucleotide
gaggaatgaacagggacaaaccctctggagcaaaacaaatgatgccggctcagaccgagt

SEQ ID NO: 80647 - DNA, 60 bp, Artificial
  Synthetic oligonucleotide
tgagaggaatgaacagggacaaaccctctggagcaaaacaaatgatgccggatcagaccg

SEQ ID NO: 80648 - DNA, 60 bp, Artificial
  Synthetic oligonucleotide
ccctgaaaggaatgaacagggacaaaccctctggagcaaaacaaatgatgccggctcaga

SEQ ID NO: 80649 - DNA, 60 bp, Artificial
  Synthetic oligonucleotide
gggaaaattgtacacattagtccactatcaggaagtgctcagcatatagaggaatgttcc

SEQ ID NO: 80650 - DNA, 60 bp, Artificial
  Synthetic oligonucleotide
agttgcatgggcctcatatacaacagaatgggaactgtaactactgaagtggcgtttggc

SEQ ID NO: 80651 - DNA, 60 bp, Artificial
  Synthetic oligonucleotide
agttgcatgggcctcatatacaacagaatgggaactgtgaccaccgaagtggcgtttggc

SEQ ID NO: 80652 - DNA, 60 bp, Artificial
  Synthetic oligonucleotide
ggtacaccaagaccacatactggtgggatggactccaatcctctgatgactttgccctca

SEQ ID NO: 80653 - DNA, 60 bp, Artificial
  Synthetic oligonucleotide
gtttttagatgtatggacttacaatgcagaacttcttgtgctcatggaaaacgaaagaac

SEQ ID NO: 80654 - DNA, 53 bp, Artificial
  Synthetic oligonucleotide
ttttggatgtatggacttacaatgcagaacttctagtgctcatggaaaacgag

SEQ ID NO: 80655 - DNA, 60 bp, Artificial
  Synthetic oligonucleotide
gaaactctacagagattcgcttggagaagcagtaatgagggtgggagacctccactccct

SEQ ID NO: 80656 - DNA, 60 bp, Artificial
  Synthetic oligonucleotide
gttcgagactctgaaactctacagagattcgcttggagaagcagtaatgaggataggaga

SEQ ID NO: 80657 - DNA, 60 bp, Artificial
  Synthetic oligonucleotide
cctagcactggcaatcatggtagctggtctgtctttttggatgtgctccaatggatcatt

SEQ ID NO: 80658 - DNA, 60 bp, Artificial
  Synthetic oligonucleotide
gctttcaggtagactgctttctttggcatatccgcaaacgatttgcagaccaagaactgg

SEQ ID NO: 80659 - DNA, 60 bp, Artificial
  Synthetic oligonucleotide
atgaggaattcacaatggttgggcgaagagcaacagccattctaaggaaagcaaccagaa

SEQ ID NO: 80660 - DNA, 60 bp, Artificial
  Synthetic oligonucleotide
ccaaacattgaaaataagagtgcatgaggggtatgaggaattcacaatggttgggcgaag

SEQ ID NO: 80661 - DNA, 60 bp, Artificial
  Synthetic oligonucleotide
tcaaaggaaaattccaaacagcggcacaacgagcaatgatggaccaagtgagagagagcc

SEQ ID NO: 80662 - DNA, 56 bp, Artificial
  Synthetic oligonucleotide
cgagttccttagcactggcaatcatggtagctggtctatctttttggatgtgctcc

SEQ ID NO: 80663 - DNA, 60 bp, Artificial
  Synthetic oligonucleotide
aaagtgataacctgacatgcacaaatatcaatcaaaacaataccaccatggtaaatacgt

SEQ ID NO: 80664 - DNA, 60 bp, Artificial
  Synthetic oligonucleotide
ggagaaaaccacaaaagtgataacctgacatgcacaaatatcaatcaaaacaataccacc

SEQ ID NO: 80665 - DNA, 61 bp, Artificial
  Synthetic oligonucleotide
catccggaatagcaatagcactaggaataataaatctcctaataggaatatccaatatgag

SEQ ID NO: 80666 - DNA, 60 bp, Artificial
  Synthetic oligonucleotide
tcatccggaatagcaatagcactaggaataataaatctcctaataggaatatccaatatg

SEQ ID NO: 80667 - DNA, 60 bp, Artificial
  Synthetic oligonucleotide
aaggagaaaaccacaaaagtgataacctgacatgcacaaatatcaatcaaaacaatacca

SEQ ID NO: 80668 - DNA, 60 bp, Artificial
  Synthetic oligonucleotide
atccaatatgagtttaaatatatctctatactcaaaaggagaaaaccacaaaagtgataa

SEQ ID NO: 80669 - DNA, 60 bp, Artificial
  Synthetic oligonucleotide
gaaactctttgcatcatccggaatagcaatagcactaggaataataaatctcctaatagg

SEQ ID NO: 80670 - DNA, 60 bp, Artificial
  Synthetic oligonucleotide
cagaaactctttgcatcatccggaatagcaatagcactaggaataataaatctcctaata

SEQ ID NO: 80671 - DNA, 56 bp, Artificial
  Synthetic oligonucleotide
agataaagcaataggggaatgcttcaatcctatcactgggagtcctggtgcaccag

SEQ ID NO: 80672 - DNA, 60 bp, Artificial
  Synthetic oligonucleotide
agataaagcaataggggaatgcttcaatcctatcactgggagtcctggtgcaccaggaat

SEQ ID NO: 80673 - DNA, 60 bp, Artificial
  Synthetic oligonucleotide
tgcacaggagtattaacagacaccagtagacccaaagataaagcaataggggaatgcttc

SEQ ID NO: 80674 - DNA, 60 bp, Artificial
  Synthetic oligonucleotide
acaagtagatatatatgcacaggagtattaacagacaccagtagacccaaagataaagca

SEQ ID NO: 80675 - DNA, 60 bp, Artificial
  Synthetic oligonucleotide
agggtgcaaatagacccgttatagaaattgacatgaataatttagaacacacaagtagat

SEQ ID NO: 80676 - DNA, 60 bp, Artificial
  Synthetic oligonucleotide
cagtacttgtgtagtggtgatgactgatgggcccgcaaataaccaggcattcacaaaggt

SEQ ID NO: 80677 - DNA, 60 bp, Artificial
  Synthetic oligonucleotide
taacagtacttgtgtagtggtgatgactgatgggcccgcaaataaccaggcattcacaaa

SEQ ID NO: 80678 - DNA, 60 bp, Artificial
  Synthetic oligonucleotide
acatgggctaaaaacattttaagaacccaagaatctgagtgtgtctgtcataacagtact

SEQ ID NO: 80679 - DNA, 60 bp, Artificial
  Synthetic oligonucleotide
attttaagaacccaagaatctgagtgtgtctgtcataacagtacttgtgtagtggtgatg

SEQ ID NO: 80680 - DNA, 60 bp, Artificial
  Synthetic oligonucleotide
ggtaccacccacgatagaacagccttcagaggacttatctctaccccattaggcaacccc

SEQ ID NO: 80681 - DNA, 60 bp, Artificial
  Synthetic oligonucleotide
atgctactgcaacggtgtattacaacaagaggcttacaaccactattaaaacatgggcta

SEQ ID NO: 80682 - DNA, 60 bp, Artificial
  Synthetic oligonucleotide
ggagaaccctggttatctactgctgaataaaagtctatgcaacgttgaggggtgggttgt

SEQ ID NO: 80683 - DNA, 60 bp, Artificial
  Synthetic oligonucleotide
aagcattcaaatggtaccacccacgatagaacagccttcagaggacttatctctacccca

SEQ ID NO: 80684 - DNA, 60 bp, Artificial
  Synthetic oligonucleotide
gtaaatacgtacatcaataacacaacaataattgacaaaaatacaaagatggagaaccct

SEQ ID NO: 80685 - DNA, 60 bp, Artificial
  Synthetic oligonucleotide
caaaaatacaaagatggagaaccctggttatctactgctgaataaaagtctatgcaacgt

SEQ ID NO: 80686 - DNA, 60 bp, Artificial
  Synthetic oligonucleotide
gataacctgacatgcacaaatatcaatcaaaacaataccaccatggtaaatacgtacatc

SEQ ID NO: 80687 - DNA, 60 bp, Artificial
  Synthetic oligonucleotide
aacaataccaccatggtaaatacgtacatcaataacacaacaataattgacaaaaataca

SEQ ID NO: 80688 - DNA, 60 bp, Artificial
  Synthetic oligonucleotide
tcaatgaattgagcagtcttgcaaaaggagagaaggctaatgtgctaattgggcaaggag

SEQ ID NO: 80689 - DNA, 60 bp, Artificial
  Synthetic oligonucleotide
aatgaactgagcaatcttacaaaaggggagaaggctaatgtgctaattgggcaaggggac

SEQ ID NO: 80690 - DNA, 51 bp, Artificial
  Synthetic oligonucleotide
ggattcggatggccatcaattagtgtcgaattgtttaaaaacgaccttgtt

SEQ ID NO: 80691 - DNA, 50 bp, Artificial
  Synthetic oligonucleotide
ggattcggatggccatcaattagtgtcgaattgtttaaaaacgaccttgt

SEQ ID NO: 80692 - DNA, 51 bp, Artificial
  Synthetic oligonucleotide
gaattcggatggccatcaattagtgtcgaattgtttaaaaacgaccttgtt

SEQ ID NO: 80693 - DNA, 60 bp, Artificial
  Synthetic oligonucleotide
caatggttgggagaagagcaacagctattctcagaaaggccaccaggagattgatccagc

SEQ ID NO: 80694 - DNA, 60 bp, Artificial
  Synthetic oligonucleotide
acgaaagaactctggatttccatgattcaaatgtcaggaacctatacgataaggtccgac

SEQ ID NO: 80695 - DNA, 60 bp, Artificial
  Synthetic oligonucleotide
ccaatggagtaaccagtgcatgcaggagatcaggatcttcattctatgcagagatgaagt

SEQ ID NO: 80696 - DNA, 60 bp, Artificial
  Synthetic oligonucleotide
taatgatccctgggttttgcttaatgcgtcttggttcaactccttccttacacatgcact

SEQ ID NO: 80697 - DNA, 60 bp, Artificial
  Synthetic oligonucleotide
gtggcgagttccctagcactggcaatcatggtagctggtctatctttctggatgtgttcc

SEQ ID NO: 80698 - DNA, 60 bp, Artificial
  Synthetic oligonucleotide
gaaagatgagtcttctaaccgaggtcgaaacgtacgttctctctatcgtcccgtcaggcc

SEQ ID NO: 80699 - DNA, 60 bp, Artificial
  Synthetic oligonucleotide
cgcaaaatgctataagtactacattcccttatactggagatcctccatacagccatggga

SEQ ID NO: 80700 - DNA, 60 bp, Artificial
  Synthetic oligonucleotide
cggttcatggtctcaaaatatcctcagaactcaggagtcggaatgtgtttgcatcaatgg

SEQ ID NO: 80701 - DNA, 54 bp, Artificial
  Synthetic oligonucleotide
cagctcatggcccagccaagagcatggaatatgatgctgttgcgaccacacact

SEQ ID NO: 80702 - DNA, 60 bp, Artificial
  Synthetic oligonucleotide
aaggaccttctacaggggggatacctgaatctatgagggaagaatatcggcaggaacagc

SEQ ID NO: 80703 - DNA, 60 bp, Artificial
  Synthetic oligonucleotide
tgaccacagcaagtacagggaagaggcaatgcaaaatagaatacagattgacccagtcaa

SEQ ID NO: 80704 - DNA, 60 bp, Artificial
  Synthetic oligonucleotide
acagcaagtacagagaagaagcgatgcaaaatagaatacagattgacccagtcaaactaa

SEQ ID NO: 80705 - DNA, 60 bp, Artificial
  Synthetic oligonucleotide
cctatacgataaggtccgactccagctgagagacaatgcaaaagaactaggcaatgggtg

SEQ ID NO: 80706 - DNA, 60 bp, Artificial
  Synthetic oligonucleotide
aggaacctatacgataaggtccgactccagctgagagacaatgcaaaagaactaggcaat

SEQ ID NO: 80707 - DNA, 56 bp, Artificial
  Synthetic oligonucleotide
gctttcatatgcataaaaaatggaaacatgcggtgcactatttgtatataagtttg

SEQ ID NO: 80708 - DNA, 60 bp, Artificial
  Synthetic oligonucleotide
tagtgaatgctccgaatcatgagggaatacaagcaggagtagatagattctatagaacct

SEQ ID NO: 80709 - DNA, 60 bp, Artificial
  Synthetic oligonucleotide
gctaatagtgagtgggagagacgagcagtcaattgctgaagcaataattgtggccatggt

SEQ ID NO: 80710 - DNA, 60 bp, Artificial
  Synthetic oligonucleotide
cgacaagtacagtccattatccaaaggtctacaaaacctactttgaaaaggtcgagaggt

SEQ ID NO: 80711 - DNA, 60 bp, Artificial
  Synthetic oligonucleotide
cgacaagtacagtccattatccaaaggtctacaaaacctactttgaaaaggtcgaaaggt

SEQ ID NO: 80712 - DNA, 60 bp, Artificial
  Synthetic oligonucleotide
ctggtcggaatcaacatgagcaaaaagaagtcctacataaatagaaccggtacattcgaa

SEQ ID NO: 80713 - DNA, 60 bp, Artificial
  Synthetic oligonucleotide
cacaatcactggagacaacaccaaatggaatgagaatcagaaccctaggatgtttctggc

SEQ ID NO: 80714 - DNA, 60 bp, Artificial
  Synthetic oligonucleotide
atcggaagattctacatacagatgtgcactgaactcaaactcagcgactatgaaggaagg

SEQ ID NO: 80715 - DNA, 60 bp, Artificial
  Synthetic oligonucleotide
gcttcggggcatcatgtttcatacttctggccattgcaatgggccttgtcttcatgtgtg

SEQ ID NO: 80716 - DNA, 60 bp, Artificial
  Synthetic oligonucleotide
cagaccaagaactgggtgatgccccattccttgaccggcttcgccgagatcagaaatccc

SEQ ID NO: 80717 - DNA, 60 bp, Artificial
  Synthetic oligonucleotide
gacaatggagatgatgtttggatgggaagaacaatcagtaaagattcgcgctcaggctat

SEQ ID NO: 80718 - DNA, 60 bp, Artificial
  Synthetic oligonucleotide
tatagcattgattccagttatgtgtgctcaggacttgttggagacacaccaaggagcgat

SEQ ID NO: 80719 - DNA, 60 bp, Artificial
  Synthetic oligonucleotide
tatagcattgattccagttatgtgtgctcaggacttgttggagacacaccaaggaatgat

SEQ ID NO: 80720 - DNA, 60 bp, Artificial
  Synthetic oligonucleotide
ccaataaggtcaactcaatcattgacaaaatgaacactcagtttgaggcagttgggaagg

SEQ ID NO: 80721 - DNA, 60 bp, Artificial
  Synthetic oligonucleotide
agttctaccacaagtgtaacaatgaatgcatggaaagtgtgaaaaatggaacgtatgact

SEQ ID NO: 80722 - DNA, 60 bp, Artificial
  Synthetic oligonucleotide
tgagagaggagtggaagtcgttaatgcaactgaaacggtggaacgaacaaatgtccccag

SEQ ID NO: 80723 - DNA, 60 bp, Artificial
  Synthetic oligonucleotide
tgaaagaggagtggaagtcgttaatgcaactgaaacggtggaaagaacaaacgtccccag

SEQ ID NO: 80724 - DNA, 60 bp, Artificial
  Synthetic oligonucleotide
tgaaagaggagtggaagtcgttaatgcaactgaaacggtggaacgaacaaatgtccccag

SEQ ID NO: 80725 - DNA, 60 bp, Artificial
  Synthetic oligonucleotide
tgaaagaggagtggaagtcgttaatgcaactgaaacggtggaacgaataaacgtccccaa

SEQ ID NO: 80726 - DNA, 60 bp, Artificial
  Synthetic oligonucleotide
tgaaagaggagtggaagtcgttaatgcaactgaaacggtggaacgaacaaacatccccag

SEQ ID NO: 80727 - DNA, 60 bp, Artificial
  Synthetic oligonucleotide
tgagagaggagtggaagtcgttaatgcaactgaaacggtggaacgaacaaacgttcccag

SEQ ID NO: 80728 - DNA, 60 bp, Artificial
  Synthetic oligonucleotide
gggccttctacggaaggagtgcctgagtctatgagggaagaatatcggcaggaacagcag

SEQ ID NO: 80729 - DNA, 60 bp, Artificial
  Synthetic oligonucleotide
ggagtgaggcccctcattctgaaggattgcagtgtagctgggtggcttcttggaaatcca

SEQ ID NO: 80730 - DNA, 60 bp, Artificial
  Synthetic oligonucleotide
ggagtgaggcccctcattctgaaggattgcagtgtagctgggtggcttcttggaaaccca

SEQ ID NO: 80731 - DNA, 60 bp, Artificial
  Synthetic oligonucleotide
aggagtgaggcccctcattctgaaggattgcagtgtagctgggtggcttcttggaaatcc

SEQ ID NO: 80732 - DNA, 60 bp, Artificial
  Synthetic oligonucleotide
aggagtgaggcccctcattctgaaggattgcagtgtagctgggtggcttcttggaaaccc

SEQ ID NO: 80733 - DNA, 60 bp, Artificial
  Synthetic oligonucleotide
cgggtttcattgaaaatggatgggaaggtttgattgatgggtggtatggcttcaggcatc

SEQ ID NO: 80734 - DNA, 60 bp, Artificial
  Synthetic oligonucleotide
ggcaggaacagcagagtgctgtggatgttgacgatggtcattttgtcaacatagagttgg

SEQ ID NO: 80735 - DNA, 60 bp, Artificial
  Synthetic oligonucleotide
cgtattttgtggcacttcagggacctatggaacaggctcatggcctgatggggcgaatat

SEQ ID NO: 80736 - DNA, 60 bp, Artificial
  Synthetic oligonucleotide
acagtggcgagttccctagcactggcaatcatggtagctggtctatctttctggatgtgc

SEQ ID NO: 80737 - DNA, 60 bp, Artificial
  Synthetic oligonucleotide
caacagtggcgagttccctagcactggcaatcatggtagctggtctatctttctggatgt

SEQ ID NO: 80738 - DNA, 60 bp, Artificial
  Synthetic oligonucleotide
ttattcaacagtggcgagttccctagcactggcaatcatggtagctggtctatctttctg

SEQ ID NO: 80739 - DNA, 60 bp, Artificial
  Synthetic oligonucleotide
tcagagcatctgttgggagaatggttggtggaatcggaagattctacattcagatgtgca

SEQ ID NO: 80740 - DNA, 60 bp, Artificial
  Synthetic oligonucleotide
caagccgtggatatatgcaaggcagcaatgggcataagaatcagttcatccttcagtttc

SEQ ID NO: 80741 - DNA, 60 bp, Artificial
  Synthetic oligonucleotide
caagccgtggatatatgcaaggcagcaatgggcatgagaatcagttcatccttcagtttc

SEQ ID NO: 80742 - DNA, 60 bp, Artificial
  Synthetic oligonucleotide
gacatcctcagacagaatccaacagaagaacaagccgtggatatatgcaaggcagcaatg

SEQ ID NO: 80743 - DNA, 60 bp, Artificial
  Synthetic oligonucleotide
aatccaacagaagaacaagccgtggatatatgcaaggcagcaatgggcctgaggatcagc

SEQ ID NO: 80744 - DNA, 60 bp, Artificial
  Synthetic oligonucleotide
taatgacccctgggttttgcttaatgcgtcttggttcaactccttcctcacacatgcact

SEQ ID NO: 80745 - DNA, 60 bp, Artificial
  Synthetic oligonucleotide
tagataatcactcactgagtgacatccatatcatggcgtctcaaggcaccaaacgatctt

SEQ ID NO: 80746 - DNA, 60 bp, Artificial
  Synthetic oligonucleotide
cgaggaaattgcttctcattgtccaggcacttagggacaacctggaacctggaaccttcg

SEQ ID NO: 80747 - DNA, 60 bp, Artificial
  Synthetic oligonucleotide
ggaatcaatgggaacttaccaaatactgtcaatttattcaacagtggcgagttccctagc

SEQ ID NO: 80748 - DNA, 60 bp, Artificial
  Synthetic oligonucleotide
ttggaatcaatgggaacttaccaaatactgtcaatttattcaacagtggcgagttcctta

SEQ ID NO: 80749 - DNA, 60 bp, Artificial
  Synthetic oligonucleotide
ttggaatcaatgggaacttaccaaatactgtcaatttattcaacagtggcgagttcccta

SEQ ID NO: 80750 - DNA, 60 bp, Artificial
  Synthetic oligonucleotide
ttgggatttccagcatggtggaggccatggtgtctagggcccgaattgacgcacgaattg

SEQ ID NO: 80751 - DNA, 55 bp, Artificial
  Synthetic oligonucleotide
gaggaacaagctgtggatatatgcaaagcagcaatggggttgagaattagctcat

SEQ ID NO: 80752 - DNA, 60 bp, Artificial
  Synthetic oligonucleotide
ttgaaaataagagtacatgaaggatatgaggaattcacaatggttgggcgaagagcaaca

SEQ ID NO: 80753 - DNA, 60 bp, Artificial
  Synthetic oligonucleotide
gggagtgcaaatgcagcgattcaagtgatcctctcgttattgccgcaagcatcattggga

SEQ ID NO: 80754 - DNA, 54 bp, Artificial
  Synthetic oligonucleotide
tgcaaaatgctataagtactacattcccttatactggagatcctccatacagcc

SEQ ID NO: 80755 - DNA, 60 bp, Artificial
  Synthetic oligonucleotide
ggttgggatttccagcatggtggaggccatggtgtctagggcccgaattgatgcgcgaat

SEQ ID NO: 80756 - DNA, 60 bp, Artificial
  Synthetic oligonucleotide
gttgggatttccagcatggtggaggccatggtgtctagggcccgaattgatgcgcggatt

SEQ ID NO: 80757 - DNA, 60 bp, Artificial
  Synthetic oligonucleotide
ccagccaagagcatggaatatgatgctgttgcgactacacactcatggatccctaagagg

SEQ ID NO: 80758 - DNA, 60 bp, Artificial
  Synthetic oligonucleotide
cagcatgagagacatgtgtgatgctccctttgatgacagactcagaagagatcaaaaggc

SEQ ID NO: 80759 - DNA, 60 bp, Artificial
  Synthetic oligonucleotide
ctactcagcatgagagacatgtgtgatgctccctttgatgacagactcagaagagaccaa

SEQ ID NO: 80760 - DNA, 60 bp, Artificial
  Synthetic oligonucleotide
gctactcagcatgagagacatgtgtgatgctccctttgatgacagactcagaagagacca

SEQ ID NO: 80761 - DNA, 60 bp, Artificial
  Synthetic oligonucleotide
attccaacacgataacctcgtttcaggtagattgctatctatggcacataagaaaactgc

SEQ ID NO: 80762 - DNA, 60 bp, Artificial
  Synthetic oligonucleotide
ggattccaacacgataacctcgtttcaggtagattgctatctatggcatataaggaagct

SEQ ID NO: 80763 - DNA, 60 bp, Artificial
  Synthetic oligonucleotide
gtcgcattttgtggcacttcaggtacctatggaacaggctcatggcctgatggggcgaac

SEQ ID NO: 80764 - DNA, 60 bp, Artificial
  Synthetic oligonucleotide
gtcgtgttttgtggcacttcaggcacctatggaacaggctcatggcctgatggggcgaat

SEQ ID NO: 80765 - DNA, 60 bp, Artificial
  Synthetic oligonucleotide
atcgtcgcattttgtggcacttcaggtacctatggaacaggctcatggcctgatggggcg

SEQ ID NO: 80766 - DNA, 60 bp, Artificial
  Synthetic oligonucleotide
agaaatccctgaggggaagaggcagcactcttggtctggacatcgaaacagccactcgtg

SEQ ID NO: 80767 - DNA, 54 bp, Artificial
  Synthetic oligonucleotide
cagctcatggcccagccaagagcatggaatatgatgctgttgcgactacacact

SEQ ID NO: 80768 - DNA, 60 bp, Artificial
  Synthetic oligonucleotide
gaagaggggaaagttgttcacattagcccattgtcaggaagtgctcagcatatagaggaa

SEQ ID NO: 80769 - DNA, 60 bp, Artificial
  Synthetic oligonucleotide
ggatccagatgaaggcacagctggagtggagtctgctgttctgagagggtttctcatctt

SEQ ID NO: 80770 - DNA, 55 bp, Artificial
  Synthetic oligonucleotide
atgaaggcacagctggagtggagtctgctgttctaagaggattcctcattttggg

SEQ ID NO: 80771 - DNA, 60 bp, Artificial
  Synthetic oligonucleotide
tccagatgaaggcacagctggagtggagtctgctgttctaagaggattcctcattttggg

SEQ ID NO: 80772 - DNA, 60 bp, Artificial
  Synthetic oligonucleotide
ccagatgaaggcacagctggagtggagtctgctgttctgagagggtttctcatcttggga

SEQ ID NO: 80773 - DNA, 60 bp, Artificial
  Synthetic oligonucleotide
tatctttctggatgtgctccaatggatcattgcagtgcagaatttgcatttaaacttgtg

SEQ ID NO: 80774 - DNA, 60 bp, Artificial
  Synthetic oligonucleotide
gacaactatccaccagaggagttcaaattgcttcaaatgagaacatggaaacaatggact

SEQ ID NO: 80775 - DNA, 60 bp, Artificial
  Synthetic oligonucleotide
attcaaatggcacaatacacgatagaatccctcaccggaccctcttgatgaatgagttgg

SEQ ID NO: 80776 - DNA, 60 bp, Artificial
  Synthetic oligonucleotide
attcaaatggcacaatacacgatagaatccctcaccggaccctcttgatgactgagttgg

SEQ ID NO: 80777 - DNA, 60 bp, Artificial
  Synthetic oligonucleotide
tatagagaaaactaatcaacaatttgagttgatagacaatgaattcactgaggttgaaaa

SEQ ID NO: 80778 - DNA, 60 bp, Artificial
  Synthetic oligonucleotide
atgggagtgcaaatgcagcgattcaagtgatcctctcgttattgccgcaaacatcattgg

SEQ ID NO: 80779 - DNA, 60 bp, Artificial
  Synthetic oligonucleotide
gggagtgcaaatgcagcgattcaagtgatcctctcgttattgccgcaaacatcattggga

SEQ ID NO: 80780 - DNA, 60 bp, Artificial
  Synthetic oligonucleotide
gcagattatagcattgattccagttatgtatgctcaggacttgttggagacacaccaagg

SEQ ID NO: 80781 - DNA, 60 bp, Artificial
  Synthetic oligonucleotide
actaataaagtcaactcaatcattgacaaaatgaacactcaattcgaagccgttggaaaa

SEQ ID NO: 80782 - DNA, 60 bp, Artificial
  Synthetic oligonucleotide
ataaagtcaactcaatcattgacaaaatgaacactcaattcgaagccgttggaaaagaat

SEQ ID NO: 80783 - DNA, 60 bp, Artificial
  Synthetic oligonucleotide
aaagaataatggagatgatccctgaaagaaatgaacaaggacagactctctggagcaaaa

SEQ ID NO: 80784 - DNA, 60 bp, Artificial
  Synthetic oligonucleotide
ggtccgactccagctgagagacaatgcaaaagaattaggcaatgggtgttttgagttcta

SEQ ID NO: 80785 - DNA, 60 bp, Artificial
  Synthetic oligonucleotide
gtgggcctttgacaatggggatgatgtttggatgggaagaacaatcagtaaagactcgcg

SEQ ID NO: 80786 - DNA, 52 bp, Artificial
  Synthetic oligonucleotide
acccaactgacatgactcttgaagaaatgtcaagggactggttcatgctcat

SEQ ID NO: 80787 - DNA, 50 bp, Artificial
  Synthetic oligonucleotide
agcgaaagcaggcaaaccatttgaatggatgtcaatccgactttactttt

SEQ ID NO: 80788 - DNA, 53 bp, Artificial
  Synthetic oligonucleotide
agcgaaagcaggcaaaccatttgaatggatgtcaatccgactttacttttttt

SEQ ID NO: 80789 - DNA, 60 bp, Artificial
  Synthetic oligonucleotide
gcagcacaacgggcaatgatggaccaagtgagggagagccgcaatcctggaaatgctgag

SEQ ID NO: 80790 - DNA, 57 bp, Artificial
  Synthetic oligonucleotide
gccttgtcttcatgtgtgtgaagaatggaaacatgcggtgcactagttgtatataag

SEQ ID NO: 80791 - DNA, 56 bp, Artificial
  Synthetic oligonucleotide
acgaggggtcttatttcttcggagacaatgcagaggagtataacaattaaagaaaa

SEQ ID NO: 80792 - DNA, 60 bp, Artificial
  Synthetic oligonucleotide
cggtggacttgaatggaatgataactcaattcgagcgtctgaaaatatacagaggttcgc

SEQ ID NO: 80793 - DNA, 60 bp, Artificial
  Synthetic oligonucleotide
ggacggaggacaagaattgcatacgaaagaatgtgcaacattctcaaagggaaattccaa

SEQ ID NO: 80794 - DNA, 60 bp, Artificial
  Synthetic oligonucleotide
cttatacgataaggtccgactccagctgagagacaatgcaaaagaattaggcaacgggtg

SEQ ID NO: 80795 - DNA, 60 bp, Artificial
  Synthetic oligonucleotide
gttctatcacaaatgtgataatgaatgtatggaaagtgtaagaaacggaacgtatgacta

SEQ ID NO: 80796 - DNA, 60 bp, Artificial
  Synthetic oligonucleotide
ctagactttcatgactcaaatgtcaagaacctttatgacaaggttcgactacagcttagg

SEQ ID NO: 80797 - DNA, 55 bp, Artificial
  Synthetic oligonucleotide
tccggtcaaactgagcagtggttacaaagatgtgatactttggtttagcttgggg

SEQ ID NO: 80798 - DNA, 60 bp, Artificial
  Synthetic oligonucleotide
tgtcaggaacttatacgataaggtccgactccagctgagagacaatgcaaaagaattagg

SEQ ID NO: 80799 - DNA, 60 bp, Artificial
  Synthetic oligonucleotide
gtcaagaacttatacgataaggtccgactccagctgagagacaatgcaaaagaattaggc

SEQ ID NO: 80800 - DNA, 60 bp, Artificial
  Synthetic oligonucleotide
atcggttcgtggtctcaaaatatcctcagaactcaggagtcagagtgcgtttgcatcagt

SEQ ID NO: 80801 - DNA, 60 bp, Artificial
  Synthetic oligonucleotide
ggttcttggtctcaaaatatcctcagaactcaggagtcagagtgcgtttgcatcaatggg

SEQ ID NO: 80802 - DNA, 60 bp, Artificial
  Synthetic oligonucleotide
ggttcgtggtctcaaaatatcctcagaactcaggagtcagagtgcgtttgcatcagtggg

SEQ ID NO: 80803 - DNA, 60 bp, Artificial
  Synthetic oligonucleotide
ttgatccagtcaaactgagcagcggctacaaagatgtgatactttggtttagcttcgggg

SEQ ID NO: 80804 - DNA, 60 bp, Artificial
  Synthetic oligonucleotide
tgaaaatgaatccaaatcagaagataataacaattggctctgtctccctaaccattgcaa

SEQ ID NO: 80805 - DNA, 60 bp, Artificial
  Synthetic oligonucleotide
aatgaatccaaatcagaagataataacaattggctctgtctccctaaccattgcaatagt

SEQ ID NO: 80806 - DNA, 60 bp, Artificial
  Synthetic oligonucleotide
ttgcaatgggccttgttttcatgtgtgtgaagaatggaaacatgcggtgcaccatttgta

SEQ ID NO: 80807 - DNA, 60 bp, Artificial
  Synthetic oligonucleotide
ggcaggaacagcagagtgctgtggatgttgacgatggtcattttgtcaacatagaactgg

SEQ ID NO: 80808 - DNA, 60 bp, Artificial
  Synthetic oligonucleotide
cgaaacttctggagaggtgaaaatggtcgaagaaccagaattgcttatgaaagaatgtgc

SEQ ID NO: 80809 - DNA, 60 bp, Artificial
  Synthetic oligonucleotide
tggtgatggaactcatcaggatgatcaaacgcgggataaatgatcgaaatttctggagag

SEQ ID NO: 80810 - DNA, 60 bp, Artificial
  Synthetic oligonucleotide
ggccggttctatgttcaaatgtgtactgagctcaaactcaacgaccacgaagggcggctg

SEQ ID NO: 80811 - DNA, 60 bp, Artificial
  Synthetic oligonucleotide
caactgaaatcagagcatctgttggaaggatggtgggaggaatcggccggttttatgttc

SEQ ID NO: 80812 - DNA, 60 bp, Artificial
  Synthetic oligonucleotide
cacatgatgatctggcactccaatctcaatgacaccacctaccaaagaacaagggctctt

SEQ ID NO: 80813 - DNA, 60 bp, Artificial
  Synthetic oligonucleotide
ggcgtcaggccaacaatggtgaagatgctactgctggtctgactcacatgatgatctggc

SEQ ID NO: 80814 - DNA, 60 bp, Artificial
  Synthetic oligonucleotide
caaccattatggctgcattcactggaaacactgaggggaggacttccgacatgagaacgg

SEQ ID NO: 80815 - DNA, 60 bp, Artificial
  Synthetic oligonucleotide
ggatctggcgtcaggccaacaatggtgaagatgctactgctggtctgactcacatgatga

SEQ ID NO: 80816 - DNA, 60 bp, Artificial
  Synthetic oligonucleotide
ctttgacatgagcaatgaagggtcttatttcttcggagacaatgctgaggagtttgacag

SEQ ID NO: 80817 - DNA, 60 bp, Artificial
  Synthetic oligonucleotide
aaagaccccaagaaaacgggaggcccaatatacagaaggagagatgggaaatggatgaga

SEQ ID NO: 80818 - DNA, 60 bp, Artificial
  Synthetic oligonucleotide
aaacgggaggcccaatatacagaaggagagatgggaaatggatgagagaactcatcctcc

SEQ ID NO: 80819 - DNA, 60 bp, Artificial
  Synthetic oligonucleotide
cattcgacgaaagaagaaacaagtacctggaggagcatcccagtgctggaaaagacccca

SEQ ID NO: 80820 - DNA, 60 bp, Artificial
  Synthetic oligonucleotide
gaaacaagtacctggaggagcatcccagtgctggaaaagaccccaagaaaacgggaggcc

SEQ ID NO: 80821 - DNA, 60 bp, Artificial
  Synthetic oligonucleotide
atagattctagcacactcgaactgaggagcagatattgggcaataaggaccaggagtggg

SEQ ID NO: 80822 - DNA, 60 bp, Artificial
  Synthetic oligonucleotide
gaaaacatggagacaatagattctagcacactcgaactgaggagcagatattgggcaata

SEQ ID NO: 80823 - DNA, 60 bp, Artificial
  Synthetic oligonucleotide
cccaagaggacagttggcaaccagaggagtgcaaattgcttcaaatgaaaacatggagac

SEQ ID NO: 80824 - DNA, 60 bp, Artificial
  Synthetic oligonucleotide
taatcccaagaggacagttggcaaccagaggagtgcaaattgcttcaaatgaaaacatgg

SEQ ID NO: 80825 - DNA, 59 bp, Artificial
  Synthetic oligonucleotide
ccagctggtgtggatggcatgccattctgcagcatttgaggacctgagagtttcgaatt

SEQ ID NO: 80826 - DNA, 60 bp, Artificial
  Synthetic oligonucleotide
cgggataaatgatcgaaacttctggagaggtgaaaatggtcgaagaaccagaattgctta

SEQ ID NO: 80827 - DNA, 60 bp, Artificial
  Synthetic oligonucleotide
agaatgcaactgaaatcagagcatctgttggaaggatggtgggaggaatcggccggtttt

SEQ ID NO: 80828 - DNA, 57 bp, Artificial
  Synthetic oligonucleotide
gaattcggatggccatcaattagtgttgaattgtttaaaaacgaccttgtttctact

SEQ ID NO: 80829 - DNA, 57 bp, Artificial
  Synthetic oligonucleotide
ggattcggatggccatcaattagtgtagaattgtttaaaaacgaccttgtttctact

SEQ ID NO: 80830 - DNA, 60 bp, Artificial
  Synthetic oligonucleotide
caggaaggcaagagaagaaccccgcactcagaatgaagtggatgatggcaatgaaatacc

SEQ ID NO: 80831 - DNA, 53 bp, Artificial
  Synthetic oligonucleotide
cacacatgcactgaaatagttgtggcaatgctactatttgctatccatactgt

SEQ ID NO: 80832 - DNA, 55 bp, Artificial
  Synthetic oligonucleotide
acacatgcactgaaatagttgtggcaatgctactatttgctatccatactgtcca

SEQ ID NO: 80833 - DNA, 53 bp, Artificial
  Synthetic oligonucleotide
cacatgcactgaaatagttgtggcaatgctactatttgctatccatactgtcc

SEQ ID NO: 80834 - DNA, 60 bp, Artificial
  Synthetic oligonucleotide
tccttccttatgcatgcactgaaatagttgtggcaatgctactatttgctatccatactg

SEQ ID NO: 80835 - DNA, 60 bp, Artificial
  Synthetic oligonucleotide
gggagtgcaaatgcagcgattcaagtgatcctctcgttattgcagcaagtatcattggga

SEQ ID NO: 80836 - DNA, 60 bp, Artificial
  Synthetic oligonucleotide
gggagtgcaaatgcagcgattcaagtgatcctctcgttatcgccgcaagtatcattggga

SEQ ID NO: 80837 - DNA, 60 bp, Artificial
  Synthetic oligonucleotide
aacagtggcgagttccctagcactggcaatcatgatagctggtctatctttctggatgtg

SEQ ID NO: 80838 - DNA, 60 bp, Artificial
  Synthetic oligonucleotide
tcaacagtggcgagttccctagcactggcaatcatgatagctggtctatctttctggatg

SEQ ID NO: 80839 - DNA, 60 bp, Artificial
  Synthetic oligonucleotide
cagtggcgagttccctagcactggcaatcatgatagctggtctatctttctggatgtgct

SEQ ID NO: 80840 - DNA, 60 bp, Artificial
  Synthetic oligonucleotide
ccaaatcagaagataataacaattggtgtagtgaacactactctatcaacaatagccctt

SEQ ID NO: 80841 - DNA, 60 bp, Artificial
  Synthetic oligonucleotide
cttcaagacgggcgatgatgtatggttggggaggactgtatcgactaatgggaggtcagg

SEQ ID NO: 80842 - DNA, 60 bp, Artificial
  Synthetic oligonucleotide
gggttcggcttcaaaacgggcgatgatgtatggttggggaggactgtatcaactagtgga

SEQ ID NO: 80843 - DNA, 58 bp, Artificial
  Synthetic oligonucleotide
tcacagaggggtggatcaattctcccaatcatgccaaatcagttacacaaacattagt

SEQ ID NO: 80844 - DNA, 52 bp, Artificial
  Synthetic oligonucleotide
aggggtggatcaattctcccaatcatgccaaatcagttacacaaacattagt

SEQ ID NO: 80845 - DNA, 60 bp, Artificial
  Synthetic oligonucleotide
ggagtcaaagggttcggcttcaaaacgggcgatgatgtatggttggggaggactgtatca

SEQ ID NO: 80846 - DNA, 60 bp, Artificial
  Synthetic oligonucleotide
gggacctgtgttgtcgctgttacagatggccctgcggctaatagtgcagaccatagagtc

SEQ ID NO: 80847 - DNA, 60 bp, Artificial
  Synthetic oligonucleotide
gtattgacgggacctgtattgtcgctgttacagatggccctgcggctaatagtgcagacc

SEQ ID NO: 80848 - DNA, 60 bp, Artificial
  Synthetic oligonucleotide
gtcaatgtattgatgggacctgtgttgtcgctgttacagatggccctgcggctaatagtg

SEQ ID NO: 80849 - DNA, 60 bp, Artificial
  Synthetic oligonucleotide
ctcaagcagccattgatcagatcaatgggaaattaaatcgtcttattgagaagacaaatg

SEQ ID NO: 80850 - DNA, 60 bp, Artificial
  Synthetic oligonucleotide
caagtcgaggggaggattcaggacctggaaaagtatgttgaggatacgaaaattgatcta

SEQ ID NO: 80851 - DNA, 60 bp, Artificial
  Synthetic oligonucleotide
cttgcaacaggaatgaggaacatccctgagaaagcatcaaaaggcctttttggagcaata

SEQ ID NO: 80852 - DNA, 50 bp, Artificial
  Synthetic oligonucleotide
cttgcaacaggaatgaggaacatccctgagaaagcatcaaaaggcctttt

SEQ ID NO: 80853 - DNA, 60 bp, Artificial
  Synthetic oligonucleotide
cagacaccagaactcagagggaacaggaaccgctgcagatcttaaatccactcaagcagc

SEQ ID NO: 80854 - DNA, 60 bp, Artificial
  Synthetic oligonucleotide
gacaccagaactcagagggaacaggaaccgctgcagatcttaaatccactcaagcagcca

SEQ ID NO: 80855 - DNA, 60 bp, Artificial
  Synthetic oligonucleotide
cctgggtgagaggacaaagtggccgaataagtttctactggaccattgtagaaccaggag

SEQ ID NO: 80856 - DNA, 60 bp, Artificial
  Synthetic oligonucleotide
gccccaagaggacattacaaactaatcaatcagaagaaaagcacaattataaatactcca

SEQ ID NO: 80857 - DNA, 60 bp, Artificial
  Synthetic oligonucleotide
aaagcacaattataaatactccaattccaattggttcatgtgtaagcaaatgtcacacag

SEQ ID NO: 80858 - DNA, 60 bp, Artificial
  Synthetic oligonucleotide
gcacaattataaatactccaattccaattggttcatgtgtaagcaaatgtcacacagaca

SEQ ID NO: 80859 - DNA, 60 bp, Artificial
  Synthetic oligonucleotide
cagaccctgggtgagaggacaaagtggccgaataagtttctactggaccattgtagaacc

SEQ ID NO: 80860 - DNA, 60 bp, Artificial
  Synthetic oligonucleotide
cggcaactcagggaaaatgctgaagacaaagggaatggatgttttgaaatattccatagg

SEQ ID NO: 80861 - DNA, 60 bp, Artificial
  Synthetic oligonucleotide
accgatttcagattcagggagtcagattgacccagggatacaaggacattattctttgga

SEQ ID NO: 80862 - DNA, 60 bp, Artificial
  Synthetic oligonucleotide
cataggtgtgacaacaactgcattgagagtattcgaaatgggacctataaccacaatatc

SEQ ID NO: 80863 - DNA, 60 bp, Artificial
  Synthetic oligonucleotide
ccgatttcagattcagggagtcagattgacccagggatacaaggacattattctttggat

SEQ ID NO: 80864 - DNA, 60 bp, Artificial
  Synthetic oligonucleotide
ggtaaggcggcaactcagggaaaatgctgaagacaaagggaatggatgttttgaaatatt

SEQ ID NO: 80865 - DNA, 60 bp, Artificial
  Synthetic oligonucleotide
cgaggggaggattcaggacctggaaaagtatgttgaggatacgaaaattgatctatggtc

SEQ ID NO: 80866 - DNA, 60 bp, Artificial
  Synthetic oligonucleotide
ttgaaatattccataggtgtgacaacaactgcattgagagtattcgaaatgggacctata

SEQ ID NO: 80867 - DNA, 60 bp, Artificial
  Synthetic oligonucleotide
actagccaaacaagtgtggttcccaatattggcagcagaccctgggtgagaggacaaagt

SEQ ID NO: 80868 - DNA, 60 bp, Artificial
  Synthetic oligonucleotide
actgtgtctactaaaactagccaaacaagtgtggttcccaatattggcagcagaccctgg

SEQ ID NO: 80869 - DNA, 60 bp, Artificial
  Synthetic oligonucleotide
cagacacagagcaaaccaatctgtataagaacaaccctgggcgagtcactgtgtctacta

SEQ ID NO: 80870 - DNA, 60 bp, Artificial
  Synthetic oligonucleotide
caacagacacagagcaaaccaatctgtataagaacaaccctgggcgagtcactgtgtcta

SEQ ID NO: 80871 - DNA, 60 bp, Artificial
  Synthetic oligonucleotide
ggcgattatgcgagactttacatttggggagttcaccacccctcaacagacacagagcaa

SEQ ID NO: 80872 - DNA, 60 bp, Artificial
  Synthetic oligonucleotide
gaacaatggcgattatgcgagactttacatttggggagttcaccacccctcaacagacac

SEQ ID NO: 80873 - DNA, 60 bp, Artificial
  Synthetic oligonucleotide
cggaaatgcatatccccttcaaaacttgacaaaggtgaacaatggcgattatgcgagact

SEQ ID NO: 80874 - DNA, 60 bp, Artificial
  Synthetic oligonucleotide
ctagtaaaatcagacggaaatgcatatccccttcaaaacttgacaaaggtgaacaatggc

SEQ ID NO: 80875 - DNA, 60 bp, Artificial
  Synthetic oligonucleotide
gcaaacgtgaatgatttcttccgcagactgaactggctagtaaaatcagacggaaatgca

SEQ ID NO: 80876 - DNA, 60 bp, Artificial
  Synthetic oligonucleotide
catagaaaggccaaccgcgatagacacttgctacccatttgatgtgccagactatcagag

SEQ ID NO: 80877 - DNA, 60 bp, Artificial
  Synthetic oligonucleotide
catcgcagaagaattccaatggaacacagtgaagcaaaatgggaagtcgagtgcttgtaa

SEQ ID NO: 80878 - DNA, 60 bp, Artificial
  Synthetic oligonucleotide
tggtggagtcacaaaacttcccggaactctgtccaagccccctcaggctggttgacggtc

SEQ ID NO: 80879 - DNA, 60 bp, Artificial
  Synthetic oligonucleotide
gaatgggatgttttcatagaaaggccaaccgcgatagacacttgctacccatttgatgtg

SEQ ID NO: 80880 - DNA, 60 bp, Artificial
  Synthetic oligonucleotide
ggtgaagaccctaaccgatgaccaagtagaagtggtcactgcacaagaactggtggagtc

SEQ ID NO: 80881 - DNA, 60 bp, Artificial
  Synthetic oligonucleotide
ccgatgaccaagtagaagtggtcactgcacaagaactggtggagtcacaaaacttcccgg

SEQ ID NO: 80882 - DNA, 60 bp, Artificial
  Synthetic oligonucleotide
ccaatggaacacagtgaagcaaaatgggaagtcgagtgcttgtaaaagagcaaacgtgaa

SEQ ID NO: 80883 - DNA, 60 bp, Artificial
  Synthetic oligonucleotide
gtgcttgtaaaagagcaaacgtgaatgatttcttccgcagactgaactggctagtaaaat

SEQ ID NO: 80884 - DNA, 60 bp, Artificial
  Synthetic oligonucleotide
acgtagtgttggtaatgaaacggaaacgggactctagcatacttactgacagccagacag

SEQ ID NO: 80885 - DNA, 60 bp, Artificial
  Synthetic oligonucleotide
actgggcaaggagacgtagtgttggtaatgaaacggaaacgggactctagcatacttact

SEQ ID NO: 80886 - DNA, 60 bp, Artificial
  Synthetic oligonucleotide
ggagacgtagtgttagtaatgaaacggaaacgggactctagcatacttactgacagccag

SEQ ID NO: 80887 - DNA, 60 bp, Artificial
  Synthetic oligonucleotide
ttgggcaaggagacgtagtgttggtaatgaaacggaaacgggactctagcatacttactg

SEQ ID NO: 80888 - DNA, 60 bp, Artificial
  Synthetic oligonucleotide
gctgcaagaggcctgtttggtgcaatagctggtttcatagagggtggttggccaggttta

SEQ ID NO: 80889 - DNA, 60 bp, Artificial
  Synthetic oligonucleotide
gctgcaagaggcctgtttggtgcaatagctggtttcatagagggtggttggccaggtctg

SEQ ID NO: 80890 - DNA, 60 bp, Artificial
  Synthetic oligonucleotide
atggtttccaacacagaaatgaagaaggtacagggattgctgcagacaaagagtcaaccc

SEQ ID NO: 80891 - DNA, 60 bp, Artificial
  Synthetic oligonucleotide
gatagtcttcaacacaatagggaatctaattgccccaagaggacattacaagctaaacaa

SEQ ID NO: 80892 - DNA, 58 bp, Artificial
  Synthetic oligonucleotide
gatgaggcaatcaacaaccgattccaaatccagggagtcaaattgacccagggataca

SEQ ID NO: 80893 - DNA, 60 bp, Artificial
  Synthetic oligonucleotide
agaagagcacaattctaaacactgcaattcccataggctcatgtgtcagcaaatgtcaca

SEQ ID NO: 80894 - DNA, 60 bp, Artificial
  Synthetic oligonucleotide
gcaaggctttacatctggggagttcatcacccttcgacaagcacagagcaaaccaacctg

SEQ ID NO: 80895 - DNA, 60 bp, Artificial
  Synthetic oligonucleotide
actatagatgtaactgactcagagatgaacaaactctttgaaagagtaaggcgtcaactt

SEQ ID NO: 80896 - DNA, 60 bp, Artificial
  Synthetic oligonucleotide
catcaatggagcattggggagcccagggtgtgaccatctgaatggcgcagaatgggacgt

SEQ ID NO: 80897 - DNA, 54 bp, Artificial
  Synthetic oligonucleotide
gatgaggcaatcaacaaccgattccaaatccagggagtcaaattgacccaggga

SEQ ID NO: 80898 - DNA, 60 bp, Artificial
  Synthetic oligonucleotide
tagcagagaactcttcccaaaactacacaggaaaccctgtgatatgcatgggacatcatg

SEQ ID NO: 80899 - DNA, 60 bp, Artificial
  Synthetic oligonucleotide
cccaaaactacacaggaaaccctgtgatatgcatgggacatcatgctgtggccaatggga

SEQ ID NO: 80900 - DNA, 60 bp, Artificial
  Synthetic oligonucleotide
cagaagaagagcacaattctaaatactgcaattcccataggctcatgtgtcagcaaatgt

SEQ ID NO: 80901 - DNA, 60 bp, Artificial
  Synthetic oligonucleotide
agctaaacaatcagaagaagagcacaattctaaacactgcaattcccataggctcatgtg

SEQ ID NO: 80902 - DNA, 60 bp, Artificial
  Synthetic oligonucleotide
caagaacaatcctggaagagtcactgtgtctaccaaaactagtcaaacaagtgtagtccc

SEQ ID NO: 80903 - DNA, 60 bp, Artificial
  Synthetic oligonucleotide
ttgcgatatcatcaatggagcattggggagcccagggtgtgaccatctgaatggcgcaga

SEQ ID NO: 80904 - DNA, 60 bp, Artificial
  Synthetic oligonucleotide
caacctatacaagaacaatcctggaagagtcactgtgtctaccaaaactagtcaaacaag

SEQ ID NO: 80905 - DNA, 60 bp, Artificial
  Synthetic oligonucleotide
gcacaattctaaatactgcaattcccataggctcatgtgtcagcaaatgtcacacagaca

SEQ ID NO: 80906 - DNA, 60 bp, Artificial
  Synthetic oligonucleotide
tatcaaaagtgctgcaatctattcgagaaattcttccctagcagttcatacaggagaccg

SEQ ID NO: 80907 - DNA, 60 bp, Artificial
  Synthetic oligonucleotide
atttggcttcaaaacgggtaatgatgtatggttgggaaggactgtatcaactagtggtag

SEQ ID NO: 80908 - DNA, 60 bp, Artificial
  Synthetic oligonucleotide
cttcaaggcaggtaatgatgtatggttgggaaggactgtatcaactagtgggagatcagg

SEQ ID NO: 80909 - DNA, 60 bp, Artificial
  Synthetic oligonucleotide
ccatggatgaggatcaacaatgagaccatactagaaacagggtacgtgtgtagcaaattc

SEQ ID NO: 80910 - DNA, 53 bp, Artificial
  Synthetic oligonucleotide
caaaagtgaccagatttgcattggttaccatgcaaacaactcgacagagcagg

SEQ ID NO: 80911 - DNA, 60 bp, Artificial
  Synthetic oligonucleotide
tacagcttagagataatgcaaaggagctgggtaatggttgtttcgagttctatcacaaat

SEQ ID NO: 80912 - DNA, 60 bp, Artificial
  Synthetic oligonucleotide
ttgtttcgaattctatcacaaatgtgataatgaatgtatggaaagtgtaagaaacggaac

SEQ ID NO: 80913 - DNA, 60 bp, Artificial
  Synthetic oligonucleotide
gagttccctagtactggcaatcatgatagctggtctatctttctggatgtgctccaatgg

SEQ ID NO: 80914 - DNA, 60 bp, Artificial
  Synthetic oligonucleotide
tagacaagtcatagttgacaataatacctggtctggttattctggcattttctctgttga

SEQ ID NO: 80915 - DNA, 60 bp, Artificial
  Synthetic oligonucleotide
gttattctggcattttctctgttgagggcagaagttgtatcaatagatgtttttatgtgg

SEQ ID NO: 80916 - DNA, 60 bp, Artificial
  Synthetic oligonucleotide
caggttatgagactttcagagtcattgacggttggaccacagctaattccaaatctcagg

SEQ ID NO: 80917 - DNA, 60 bp, Artificial
  Synthetic oligonucleotide
actatggaagtgacgtttggatgggaagaacaatcagcaaggattctcgctcaggttatg

SEQ ID NO: 80918 - DNA, 60 bp, Artificial
  Synthetic oligonucleotide
cgaacccttctgatgaacgagttgggtgttccatttcatttggggaccaaacaagtgtgc

SEQ ID NO: 80919 - DNA, 60 bp, Artificial
  Synthetic oligonucleotide
gagagggaacccaggggtgaaagggtgggcttttgactatggaagtgacgtttggatggg

SEQ ID NO: 80920 - DNA, 59 bp, Artificial
  Synthetic oligonucleotide
ttttatgtggagttgataaggggaaggccacaagagactagagtatggtggacttcaaa

SEQ ID NO: 80921 - DNA, 60 bp, Artificial
  Synthetic oligonucleotide
tgattctagttatgtgtgctcggggcttgttggcgacacaccaagaaacgatgatagctc

SEQ ID NO: 80922 - DNA, 60 bp, Artificial
  Synthetic oligonucleotide
ggattggtcgaagccacagtgtcagattacaggatttgctcctttctccaaagacaactc

SEQ ID NO: 80923 - DNA, 59 bp, Artificial
  Synthetic oligonucleotide
aagcatggttacatgtttgtgttaccggggatgatagaaatgcaactgctagtttcatt

SEQ ID NO: 80924 - DNA, 60 bp, Artificial
  Synthetic oligonucleotide
gccattctagcaacgactataacactgcacttcaagcaaaatggatgcaacattccctcg

SEQ ID NO: 80925 - DNA, 60 bp, Artificial
  Synthetic oligonucleotide
gatgcaacattccctcgaacaatcaagtaatgccatgtgagccaatcatagtagaaagga

SEQ ID NO: 80926 - DNA, 60 bp, Artificial
  Synthetic oligonucleotide
atactattcattagagagggaaaaattgtccatatcagcccattgtcaggaagtgctcag

SEQ ID NO: 80927 - DNA, 60 bp, Artificial
  Synthetic oligonucleotide
aaatattctcagaactcaggagtcagaatgcgtctgcatcaatggaacttgtgcagtagt

SEQ ID NO: 80928 - DNA, 60 bp, Artificial
  Synthetic oligonucleotide
tggcatggttcgaatcgaccatgggtgtctttcaatcagaatctagactaccaaatagga

SEQ ID NO: 80929 - DNA, 60 bp, Artificial
  Synthetic oligonucleotide
ttatcgaacattaatgagctgtcctgttggtgaagccccttccccatacaattcgagatt

SEQ ID NO: 80930 - DNA, 60 bp, Artificial
  Synthetic oligonucleotide
gtggttgatccaccaatcagggacatatcctgttatacggaggacattcaataacaccaa

SEQ ID NO: 80931 - DNA, 56 bp, Artificial
  Synthetic oligonucleotide
gtggttgatccaccaatcagggacatatcctgttatacggaggacattcaataaca

SEQ ID NO: 80932 - DNA, 54 bp, Artificial
  Synthetic oligonucleotide
atggttgatccaccaatcagggacatatcctgttatacggaggacattcaacaa

SEQ ID NO: 80933 - DNA, 60 bp, Artificial
  Synthetic oligonucleotide
ggggatccatcatccgcccgacacaaaagagcaaacgacactatataagaatgcaaacac

SEQ ID NO: 80934 - DNA, 60 bp, Artificial
  Synthetic oligonucleotide
ggttgctttgacatacttcacaaatgcgacaatgagtgtatggagactataaagaacgga

SEQ ID NO: 80935 - DNA, 60 bp, Artificial
  Synthetic oligonucleotide
agcaaaagcaggggtcacaatggagaaactcatcgtaatagcaatgctcttggcgagcac

SEQ ID NO: 80936 - DNA, 60 bp, Artificial
  Synthetic oligonucleotide
gtgactcgctctggaacaagcaaagcatgcaacgcatcaaccggtggtcaatctttctat

SEQ ID NO: 80937 - DNA, 60 bp, Artificial
  Synthetic oligonucleotide
gaacccagagggctgttcggagccattgctggtttcatcgaaggaggatggtctgggatg

SEQ ID NO: 80938 - DNA, 60 bp, Artificial
  Synthetic oligonucleotide
atggatgtcaatccgactttacttttcttgaaagttccagcacaaaatgccataagcacc

SEQ ID NO: 80939 - DNA, 60 bp, Artificial
  Synthetic oligonucleotide
aacggaaacgggactctagcatacttactgacagtcagacagcgaccaaaagaattcgga

SEQ ID NO: 80940 - DNA, 58 bp, Artificial
  Synthetic oligonucleotide
ttggacaatggaactggcctgatggggctaaaatagagtacttcctctaagacacaga

SEQ ID NO: 80941 - DNA, 60 bp, Artificial
  Synthetic oligonucleotide
ccttggacaatggaactggcctgatggggctaaaatagagtacttcctctaggatacaga

SEQ ID NO: 80942 - DNA, 60 bp, Artificial
  Synthetic oligonucleotide
ttccagtacagaattcctgggacaatggaactggcctgatggggctaaaatagagtactt

SEQ ID NO: 80943 - DNA, 60 bp, Artificial
  Synthetic oligonucleotide
ccagtacagaattcctgggacaatggaactggcctgatggggctaaaatagagtacttcc

SEQ ID NO: 80944 - DNA, 60 bp, Artificial
  Synthetic oligonucleotide
cagtgaaagaccggagtccctatagaactctaatgagtgtagaaatagggcaatcaccca

SEQ ID NO: 80945 - DNA, 60 bp, Artificial
  Synthetic oligonucleotide
ccattgtgatgtgtggagtagaccatgagattgccgactggtcatggcacgatggagcta

SEQ ID NO: 80946 - DNA, 60 bp, Artificial
  Synthetic oligonucleotide
tgatgtgtggagtagaccatgagattgccgattggtcatggcacgatggagctattcttc

SEQ ID NO: 80947 - DNA, 52 bp, Artificial
  Synthetic oligonucleotide
tgatgtgtggagtagaccatgagattgccgactggtcatggcacgatggagc

SEQ ID NO: 80948 - DNA, 52 bp, Artificial
  Synthetic oligonucleotide
tacaccatggacacagtcaacagaacacatcaatactcagagaaggggaggt

SEQ ID NO: 80949 - DNA, 60 bp, Artificial
  Synthetic oligonucleotide
cttgaagcaatggctttccttgaagagtcccacccaggaatctttgaaaactcgtgtctt

SEQ ID NO: 80950 - DNA, 60 bp, Artificial
  Synthetic oligonucleotide
ccctcatcgaatccttgatggaataaactgcacactgatagacgctctattgggggaccc

SEQ ID NO: 80951 - DNA, 60 bp, Artificial
  Synthetic oligonucleotide
gctagttcagagctcctcaacggggaaaatatgcaacaaccctcatcgaatccttgatgg

SEQ ID NO: 80952 - DNA, 60 bp, Artificial
  Synthetic oligonucleotide
aatgctactgagctagttcagagctcctcaacggggaaaatatgcaacaaccctcatcga

SEQ ID NO: 80953 - DNA, 60 bp, Artificial
  Synthetic oligonucleotide
ggggaccctcattgtgatgttttccaagatgagacatgggaccttttcgttgaacgcagc

SEQ ID NO: 80954 - DNA, 60 bp, Artificial
  Synthetic oligonucleotide
tgggggaccctcattgtgatgttttccaagatgagacatgggaccttttcgttgaacgca

SEQ ID NO: 80955 - DNA, 60 bp, Artificial
  Synthetic oligonucleotide
ctaaaatagatctctggtcttacaatgcggagcttcttgtcgctctggagaatcaacata

SEQ ID NO: 80956 - DNA, 60 bp, Artificial
  Synthetic oligonucleotide
ttatgcctcccttaggtcactagttgcctcgtcaggcactctggagtttatcactgaggg

SEQ ID NO: 80957 - DNA, 60 bp, Artificial
  Synthetic oligonucleotide
ctggctctcggccaagaccttccaggaaatgacaacagcacagcaacgctgtgcctggga

SEQ ID NO: 80958 - DNA, 60 bp, Artificial
  Synthetic oligonucleotide
tctgtctagtagaataagcatctattggacaatagtaaaaccgggagacgtactggtaat

SEQ ID NO: 80959 - DNA, 60 bp, Artificial
  Synthetic oligonucleotide
tactggtaattaatagtaatgggaacctaatcgctcctcgggggtatttcaaaacgcgca

SEQ ID NO: 80960 - DNA, 60 bp, Artificial
  Synthetic oligonucleotide
aaaacgcgcactgggaaaagctcaataatgaggtcagatgcccctattgatacctgtatt

SEQ ID NO: 80961 - DNA, 60 bp, Artificial
  Synthetic oligonucleotide
cgcgcactgggaaaagctcaataatgaggtcagatgcccctattgatacctgtatttctg

SEQ ID NO: 80962 - DNA, 60 bp, Artificial
  Synthetic oligonucleotide
acagggatgcggaatgtaccagagaaacaaactagaggcctattcggcgcaatagcaggc

SEQ ID NO: 80963 - DNA, 60 bp, Artificial
  Synthetic oligonucleotide
agggtaatcgagaagacgaacgagaaattccatcaaatcgaaaaggaattctctgaagta

SEQ ID NO: 80964 - DNA, 60 bp, Artificial
  Synthetic oligonucleotide
caaactatacatttggggggttcaccacccgagcacgaaccaagaacaaaccagcctgta

SEQ ID NO: 80965 - DNA, 59 bp, Artificial
  Synthetic oligonucleotide
ggggttcaccacccgagcacgaaccaagaacaaaccagcctgtatgttcaagcatcagg

SEQ ID NO: 80966 - DNA, 60 bp, Artificial
  Synthetic oligonucleotide
ccagcctgtatgttcaagcatcagggagagtcacagtctctaccaggagaagccagcaaa

SEQ ID NO: 80967 - DNA, 60 bp, Artificial
  Synthetic oligonucleotide
cagcctgtatgttcaagcatcagggagagtcacagtctctaccaggagaagccagcaaac

SEQ ID NO: 80968 - DNA, 60 bp, Artificial
  Synthetic oligonucleotide
gacctggtagcggttttttcagtagactgaactggttgaccaaatcaggaagcacatatc

SEQ ID NO: 80969 - DNA, 60 bp, Artificial
  Synthetic oligonucleotide
ttttcagtagactgaactggttgaccaaatcaggaagcacatatccagtgctgaacgtga

SEQ ID NO: 80970 - DNA, 60 bp, Artificial
  Synthetic oligonucleotide
agcacatatccagtgctgaacgtgactatgccaaacaatgacaattttgacaaactatac

SEQ ID NO: 80971 - DNA, 60 bp, Artificial
  Synthetic oligonucleotide
agccagcaaactataatcccgaatatcgggtccagaccctgggtaaggggtctgtctagt

SEQ ID NO: 80972 - DNA, 60 bp, Artificial
  Synthetic oligonucleotide
cagcacagcaacgctgtgcctgggacatcatgcggtgccaaacggaacactagtgaaaac

SEQ ID NO: 80973 - DNA, 60 bp, Artificial
  Synthetic oligonucleotide
gcaacgctgtgcctgggacatcatgcggtgccaaacggaacactagtgaaaacaatcaca

SEQ ID NO: 80974 - DNA, 60 bp, Artificial
  Synthetic oligonucleotide
agctacattttctgtctggctctcggccaagaccttccaggaaatgacaacagcacagca

SEQ ID NO: 80975 - DNA, 60 bp, Artificial
  Synthetic oligonucleotide
cgagaagacgaacgagaaattccatcaaatcgaaaaggaattctctgaagtagaagggag

SEQ ID NO: 80976 - DNA, 60 bp, Artificial
  Synthetic oligonucleotide
ccggagcatgcaaaagagcaaatgtgaatgactttttcaacagactgaactggctaacca

SEQ ID NO: 80977 - DNA, 60 bp, Artificial
  Synthetic oligonucleotide
actctacagagattcgcttggagaagcagtaatgagaatgggagacctccactccctcca

SEQ ID NO: 80978 - DNA, 60 bp, Artificial
  Synthetic oligonucleotide
cccaagggacatgctgggagcagatgtacactccaggaggggaagtgagaaacgatgacg

SEQ ID NO: 80979 - DNA, 60 bp, Artificial
  Synthetic oligonucleotide
ccagaacagcataacaatagagagaatggttctctctgcatttgatgaaaggaggaataa

SEQ ID NO: 80980 - DNA, 60 bp, Artificial
  Synthetic oligonucleotide
ggtcaactcaatcattgacaaaatgaacactcagtttgaggccgttggaaaggaattcaa

SEQ ID NO: 80981 - DNA, 60 bp, Artificial
  Synthetic oligonucleotide
gggaaaggatacatgttcgaaagtaagagcatgaagctacggacacaaataccagcagag

SEQ ID NO: 80982 - DNA, 60 bp, Artificial
  Synthetic oligonucleotide
gagtccagattgaacagacaagaaattgagggagtgaaactggattccagtggcaacgtc

SEQ ID NO: 80983 - DNA, 60 bp, Artificial
  Synthetic oligonucleotide
gagtccagacttaacagacaagaaattgagggagtgaaactggattccagtggcaacgtc

SEQ ID NO: 80984 - DNA, 60 bp, Artificial
  Synthetic oligonucleotide
gagtccagactgaacagacaagaaattgagggagtgaaactggattccagtggcaacgtc

SEQ ID NO: 80985 - DNA, 60 bp, Artificial
  Synthetic oligonucleotide
gcttcgaacagataacattcttgcaggcattgcaactcttacttgaagttgagagtgaga

SEQ ID NO: 80986 - DNA, 60 bp, Artificial
  Synthetic oligonucleotide
gaggtcatgtttttgttataagggaaccatttgtttcttgctctccaacagagtgcagga

SEQ ID NO: 80987 - DNA, 60 bp, Artificial
  Synthetic oligonucleotide
gttctatcacaaatgtgataatgaatgtatggaaagtgtgagaaacggaacgtatgacta

SEQ ID NO: 80988 - DNA, 60 bp, Artificial
  Synthetic oligonucleotide
cagttcccatagggtcatgtgtcagcaggtgtcacacagacaaaggctctctctccacaa

SEQ ID NO: 80989 - DNA, 60 bp, Artificial
  Synthetic oligonucleotide
ggctcatgtgtcagcaaatgtcacacagacaaaggctctctctccacaactaagcctttt

SEQ ID NO: 80990 - DNA, 60 bp, Artificial
  Synthetic oligonucleotide
agagcctggagatttaatagtcttcaatacaatagggaatctaattgccccaagaggaca

SEQ ID NO: 80991 - DNA, 60 bp, Artificial
  Synthetic oligonucleotide
gagcctggagatttaatagtcttcaatacaatagggaatctaattgccccaagaggacac

SEQ ID NO: 80992 - DNA, 60 bp, Artificial
  Synthetic oligonucleotide
caaagtggaaggataagtttctactggactattgtagagcctggagacctgatagtcttc

SEQ ID NO: 80993 - DNA, 60 bp, Artificial
  Synthetic oligonucleotide
ggaaggataagtttctactggactattgtagagcctggagacctgatagtcttcaacaca

SEQ ID NO: 80994 - DNA, 60 bp, Artificial
  Synthetic oligonucleotide
ccctgggtgagaggacaaagcggcagaataagtttctactggactattgtagagcctgga

SEQ ID NO: 80995 - DNA, 60 bp, Artificial
  Synthetic oligonucleotide
cctgggtgagaggacaaagcggcagaataagtttctactggactattgtagagcctggag

SEQ ID NO: 80996 - DNA, 60 bp, Artificial
  Synthetic oligonucleotide
ggtcatgtgtcagcaggtgtcacacagacaaaggctctctctccacaactaagccctttc

SEQ ID NO: 80997 - DNA, 60 bp, Artificial
  Synthetic oligonucleotide
gctcatgtgtcagcaaatgtcacacagacaaaggctctctctccacaactaagccttttc

SEQ ID NO: 80998 - DNA, 60 bp, Artificial
  Synthetic oligonucleotide
atagcagagagctcttctcaaaactacacaggaaaccctgtgatatgtatgggacaccat

SEQ ID NO: 80999 - DNA, 60 bp, Artificial
  Synthetic oligonucleotide
ctctccacaactaagccctttcaaaacatctcgagaatagcaattggagattgcccaaag

SEQ ID NO: 81000 - DNA, 60 bp, Artificial
  Synthetic oligonucleotide
tatcacaaatgtgataatgaatgtatggaaagtgtaagaaacggaacatatgactacccg

SEQ ID NO: 81001 - DNA, 60 bp, Artificial
  Synthetic oligonucleotide
tcacaaatgtgataatgaatgtatggaaagtgtaagaaacggaacatatgattacccgca

SEQ ID NO: 81002 - DNA, 60 bp, Artificial
  Synthetic oligonucleotide
gttctatcacaaatgtgataatgaatgtatggaaagtgtaagaaacggaacatatgacta

SEQ ID NO: 81003 - DNA, 55 bp, Artificial
  Synthetic oligonucleotide
gggaaagcaccgataagtcttggtgattgctcctttgctgggtggatccttggaa

SEQ ID NO: 81004 - DNA, 60 bp, Artificial
  Synthetic oligonucleotide
tgtgctcttagagaaccagaaaacgctagacgaacatgattccaatgtcaaaaacctttt

SEQ ID NO: 81005 - DNA, 60 bp, Artificial
  Synthetic oligonucleotide
gggcattctgaaaagaggggagactctgaagatcaggaccaacggaaatttaatcgcacc

SEQ ID NO: 81006 - DNA, 60 bp, Artificial
  Synthetic oligonucleotide
ccaggtggaatgtgactagatctggaacgagtaaagcatgcaatgcatcaacaggtggcc

SEQ ID NO: 81007 - DNA, 60 bp, Artificial
  Synthetic oligonucleotide
acatccatctgaaggatcaaggttggtcatacatagtggagaggcccagcgcaccagaag

SEQ ID NO: 81008 - DNA, 60 bp, Artificial
  Synthetic oligonucleotide
taggatatgcattgggtaccaatcaaacaactccacagacacagtgaacactctcataga

SEQ ID NO: 81009 - DNA, 60 bp, Artificial
  Synthetic oligonucleotide
tgtcgcagtctcgcactcgcgagatgctgacaaaaaccactgtggaccatatggccataa

SEQ ID NO: 81010 - DNA, 60 bp, Artificial
  Synthetic oligonucleotide
tacatacagatgtgcactgaactcaaactcagtgactacgaagggagactgatccaaaac

SEQ ID NO: 81011 - DNA, 60 bp, Artificial
  Synthetic oligonucleotide
gaattccttggacaatggaactggcctgatggggctaaaatagagtacttcctctaagac

SEQ ID NO: 81012 - DNA, 60 bp, Artificial
  Synthetic oligonucleotide
gtggccatggtattttcacaagaggattgcatgatcaaggcagttcgaggtgatttgaac

SEQ ID NO: 81013 - DNA, 60 bp, Artificial
  Synthetic oligonucleotide
cttgaagagtcccacccaggaatctttgaaaactcgtgtcttgagacgatggaagttgtt

SEQ ID NO: 81014 - DNA, 60 bp, Artificial
  Synthetic oligonucleotide
ctgatggggctaaaatagagtacttcctctaagacacagaaaaaagacccttgtttctac

SEQ ID NO: 81015 - DNA, 60 bp, Artificial
  Synthetic oligonucleotide
ctgatggggctaaaatagagtacttcctctaagatacagaaaaaagacccttgtatctac

SEQ ID NO: 81016 - DNA, 60 bp, Artificial
  Synthetic oligonucleotide
tggcctgatggggctaaaatagagtacttcctctaagatacagaaaaaagacccttgtat

SEQ ID NO: 81017 - DNA, 60 bp, Artificial
  Synthetic oligonucleotide
ggggataattctattaatcatgaagaccatcattgttctaagctatcttttctgtctggc

SEQ ID NO: 81018 - DNA, 60 bp, Artificial
  Synthetic oligonucleotide
agcaaaagcaggggataattctattaatcatgaagaccatcattgttctaagctatcttt

SEQ ID NO: 81019 - DNA, 60 bp, Artificial
  Synthetic oligonucleotide
agcaaaagcaggggataattctattaatcatgaagaccatcattgttctaaattatcttt

SEQ ID NO: 81020 - DNA, 60 bp, Artificial
  Synthetic oligonucleotide
atctgttccaccattgaagagctcagacggcaaaaatagtgaatttagcttgaccttcat

SEQ ID NO: 81021 - DNA, 60 bp, Artificial
  Synthetic oligonucleotide
agtgaatgcaccgaatcatgagggaatacaagcaggagtggataggttctataggacctg

SEQ ID NO: 81022 - DNA, 60 bp, Artificial
  Synthetic oligonucleotide
aaccatttgaatggatgtcaatccgactttactcttcttgaaagtgccagcgcaaaacgc

SEQ ID NO: 81023 - DNA, 60 bp, Artificial
  Synthetic oligonucleotide
aaccatttgaatggatgtcaatccgactttactcttcttgaaagtgccagcgcaaaatgc

SEQ ID NO: 81024 - DNA, 60 bp, Artificial
  Synthetic oligonucleotide
ccagcatgccatttcacaacatacatcctctcaccattggggaatgccccaaatacgtga

SEQ ID NO: 81025 - DNA, 60 bp, Artificial
  Synthetic oligonucleotide
aatgaattgggtgttccatttcacttgggaaccaaacaagtgtgcatagcatggtccagt

SEQ ID NO: 81026 - DNA, 60 bp, Artificial
  Synthetic oligonucleotide
acacatgcccaagacatactggaaaagacacacaatgggaagctctgcagtctaaatgga

SEQ ID NO: 81027 - DNA, 60 bp, Artificial
  Synthetic oligonucleotide
gttcttgcaagcattgcaactcttacttgaagttgagagtgagataaggacattttcttt

SEQ ID NO: 81028 - DNA, 60 bp, Artificial
  Synthetic oligonucleotide
attcttgcaagcattgcaactcttacttgaagttgagagtgagataaggacattttcttt

SEQ ID NO: 81029 - DNA, 60 bp, Artificial
  Synthetic oligonucleotide
gcaagcattgcaactcttacttgaagttgagagtgagataaggacattttcttttcagct

SEQ ID NO: 81030 - DNA, 60 bp, Artificial
  Synthetic oligonucleotide
ctccccagtgacactccaagaggagaagatagtcagttcacgggatcatgcaccagcccc

SEQ ID NO: 81031 - DNA, 60 bp, Artificial
  Synthetic oligonucleotide
tcccagtgacactccaagaggagaagatagtcagttcacgggatcatgcactagtccaat

SEQ ID NO: 81032 - DNA, 60 bp, Artificial
  Synthetic oligonucleotide
cagtgacactccaagaggagaagatagtcagttcacgggatcatgcactagtccaatggg

SEQ ID NO: 81033 - DNA, 60 bp, Artificial
  Synthetic oligonucleotide
tccctgggttttgcttaatgcatcttggttcaactccttcctcacacatgcactgagata

SEQ ID NO: 81034 - DNA, 60 bp, Artificial
  Synthetic oligonucleotide
gattaatgatccctgggttttgcttaatgcatcttggttcaactccttcctcacacatgc

SEQ ID NO: 81035 - DNA, 60 bp, Artificial
  Synthetic oligonucleotide
taatgatccttgggttttgcttaatgcatcttggttcaactccttcctcacacatgcact

SEQ ID NO: 81036 - DNA, 60 bp, Artificial
  Synthetic oligonucleotide
ccttgggttttgcttaatgcatcttggttcaactccttcctcacacatgcactgagatag

SEQ ID NO: 81037 - DNA, 60 bp, Artificial
  Synthetic oligonucleotide
actgtcaatttattcaacagtggcgagttccctagcactggcaatcatgatagctggtct

SEQ ID NO: 81038 - DNA, 60 bp, Artificial
  Synthetic oligonucleotide
ccagtagttcatacaggaggccagttggaatttccagcatggtggaggccatggtgtcta

SEQ ID NO: 81039 - DNA, 60 bp, Artificial
  Synthetic oligonucleotide
ggagtcccacccagggatctttgaaaactcgtgtcttgaaacgatggaagttgttcaaca

SEQ ID NO: 81040 - DNA, 60 bp, Artificial
  Synthetic oligonucleotide
atgactattgcctccgttcctgcttcacgctacctaactgacatgactcttgaagagatg

SEQ ID NO: 81041 - DNA, 60 bp, Artificial
  Synthetic oligonucleotide
aattggcagggctcaaatagaccagtaattcaaatagatccagtggcgatgacacatact

SEQ ID NO: 81042 - DNA, 60 bp, Artificial
  Synthetic oligonucleotide
gtagcagtgggttcagaaacttacaacagaagattcaccccagaaatcagcactaggccc

SEQ ID NO: 81043 - DNA, 60 bp, Artificial
  Synthetic oligonucleotide
gcttcaccttttaccacaagtgtgacaacgaatgcatcgaaaaggttagaaacggaacat

SEQ ID NO: 81044 - DNA, 60 bp, Artificial
  Synthetic oligonucleotide
gccacactgaaagagcaccaagacctatacaagaaagacagttcctatgtagcagtgggt

SEQ ID NO: 81045 - DNA, 60 bp, Artificial
  Synthetic oligonucleotide
tcaagaatcaatcgccaggagattgagggagtgagattagattctagtgggaatgtgtat

SEQ ID NO: 81046 - DNA, 60 bp, Artificial
  Synthetic oligonucleotide
cttccgaaacatggtatggcttatacatcaatcaggaacatatcctgtaataaagaggac

SEQ ID NO: 81047 - DNA, 60 bp, Artificial
  Synthetic oligonucleotide
gaaagtcagaaggatgctaaaggacaatgccaaagatgagggaaatggatgcttcacctt

SEQ ID NO: 81048 - DNA, 60 bp, Artificial
  Synthetic oligonucleotide
ggctcctagatatgcttttgagattgtctctgttggaaatgggaaattattcagaagcga

SEQ ID NO: 81049 - DNA, 60 bp, Artificial
  Synthetic oligonucleotide
ggtcatataacgcacaactcctcgtttggcttgaaaatgagaaaactctggatctccacg

SEQ ID NO: 81050 - DNA, 60 bp, Artificial
  Synthetic oligonucleotide
gaattcgggagcaggagtgactgctgcatgcaaattcggaagctccaattctttcttccg

SEQ ID NO: 81051 - DNA, 57 bp, Artificial
  Synthetic oligonucleotide
atggtacggttttcaacacagaaatgaggaaggaacaggcatagcagcagacaggga

SEQ ID NO: 81052 - DNA, 60 bp, Artificial
  Synthetic oligonucleotide
tcccaaatatgtgaatgtcaaatccctaaagcttgccacaggacttagaaatgttccagc

SEQ ID NO: 81053 - DNA, 60 bp, Artificial
  Synthetic oligonucleotide
atttgttaccctggaactttggaggatgaagaagaactgagactgaaattcagtggagtc

SEQ ID NO: 81054 - DNA, 60 bp, Artificial
  Synthetic oligonucleotide
cagaagcgaactgagtattgaatcatgctctaccaaatgccaaacagaagtaggagggat

SEQ ID NO: 81055 - DNA, 60 bp, Artificial
  Synthetic oligonucleotide
gtgatgatctaattggtaagacttcatggtcctacattgtggagaagcccaacccaacaa

SEQ ID NO: 81056 - DNA, 60 bp, Artificial
  Synthetic oligonucleotide
ctgctcaatcaatggaaaacaaccgataagtcttggagactgctcttttgctgggtggat

SEQ ID NO: 81057 - DNA, 60 bp, Artificial
  Synthetic oligonucleotide
gttccctagcactggcaatcatgatagctggtctatctttttggatgtgttccaatggat

SEQ ID NO: 81058 - DNA, 60 bp, Artificial
  Synthetic oligonucleotide
gatccggatacgagatgctaaaggtgccaaatgcattgaccgacgataggtcaaaaccca

SEQ ID NO: 81059 - DNA, 60 bp, Artificial
  Synthetic oligonucleotide
ccggatacgagatgctaaaggtgccaaatgcattgaccgacgataggtcaaaacccactc

SEQ ID NO: 81060 - DNA, 60 bp, Artificial
  Synthetic oligonucleotide
ccggatacgagatgctaaaggtgccaaatgcattgaccgacgataggtcaaaacccaccc

SEQ ID NO: 81061 - DNA, 60 bp, Artificial
  Synthetic oligonucleotide
ggaccagcattgagcatcaacgaattgagcaatcttgcgaaaggggagaaggctaacgtg

SEQ ID NO: 81062 - DNA, 60 bp, Artificial
  Synthetic oligonucleotide
gctgggagcagatgtacactccaggaggagaagtgagaaatgatgatgttgaccaaagct

SEQ ID NO: 81063 - DNA, 60 bp, Artificial
  Synthetic oligonucleotide
attcaaatggcacaatacatgatagaatccctcaccggacccttttgatgaatgaattgg

SEQ ID NO: 81064 - DNA, 60 bp, Artificial
  Synthetic oligonucleotide
cggacaggggaccacactagacaacaaacattcaaatggcacaatacatgatagaatccc

SEQ ID NO: 81065 - DNA, 60 bp, Artificial
  Synthetic oligonucleotide
ttccaatggatcattgcagtgcagaatttgcatttaaacttgtgagttcagattgtagtt

SEQ ID NO: 81066 - DNA, 60 bp, Artificial
  Synthetic oligonucleotide
caggaatctttgaaaactcgtgtcttgaaacgatggaagttgttcaacaaacaagggtgg

SEQ ID NO: 81067 - DNA, 60 bp, Artificial
  Synthetic oligonucleotide
cactcactgagtgacatccacatcatggcgtctcaaggcaccaaacgatcttatgaacag

SEQ ID NO: 81068 - DNA, 60 bp, Artificial
  Synthetic oligonucleotide
tgtttgccgagataattggaatggaatgaatagaccaattttgatttttaatgaggacct

SEQ ID NO: 81069 - DNA, 60 bp, Artificial
  Synthetic oligonucleotide
gacaaggcaatagtgtatgggcagggagaacagttagcatttcgtcccgaagtggttttg

SEQ ID NO: 81070 - DNA, 60 bp, Artificial
  Synthetic oligonucleotide
tgaaaggaaactgttattgggtaatgacggatggtcctgcgaacaatcaggctagttaca

SEQ ID NO: 81071 - DNA, 60 bp, Artificial
  Synthetic oligonucleotide
ggaaactgttattgggtaatgacggatggtcctgcgaacaatcaggctagttacaagatt

SEQ ID NO: 81072 - DNA, 60 bp, Artificial
  Synthetic oligonucleotide
ggcgagaagagttgagtcagaagtttgaagagatcagatggctaattgcagaatgcagaa

SEQ ID NO: 81073 - DNA, 60 bp, Artificial
  Synthetic oligonucleotide
ggggacctccactccctccaaaacagaaacgctacatggcgagaagagttgagtcagaag

SEQ ID NO: 81074 - DNA, 60 bp, Artificial
  Synthetic oligonucleotide
ctgttattgacatatggtcatacaatgcacagcttcttgttctattggaaaatgaaaaaa

SEQ ID NO: 81075 - DNA, 60 bp, Artificial
  Synthetic oligonucleotide
ctgcagtctcaaaggagtgaggcccctcattctgaaggattgcagtgtggctggatggct

SEQ ID NO: 81076 - DNA, 60 bp, Artificial
  Synthetic oligonucleotide
gagcacaatgggaagctttgcagtcttaaaggagtgaggcccctcattctgaaggattgc

SEQ ID NO: 81077 - DNA, 60 bp, Artificial
  Synthetic oligonucleotide
cacaacgggaaactctgcagtctcaaaggagtgaggcccctcattctgaaggattgcagt

SEQ ID NO: 81078 - DNA, 60 bp, Artificial
  Synthetic oligonucleotide
acaacgggaaactctgtagtctcaaaggagtgaggcccctcattctgaaggattgcagcg

SEQ ID NO: 81079 - DNA, 60 bp, Artificial
  Synthetic oligonucleotide
gcacaacgggaaactctgcagtctcaaaggagtgaggcccctcattctgaaggattgcag

SEQ ID NO: 81080 - DNA, 60 bp, Artificial
  Synthetic oligonucleotide
gagcacaatgggaaactctgcagtcttaaaggagtgaggcccctcattctgaaggattgc

SEQ ID NO: 81081 - DNA, 60 bp, Artificial
  Synthetic oligonucleotide
agagcacaacgggaaactctgcagtctcaaaggagtgaggcccctcattctgaaggattg

SEQ ID NO: 81082 - DNA, 60 bp, Artificial
  Synthetic oligonucleotide
gtagtctcaaaggagtgaggcccctcattctgaaggattgcagcgtggctggatggcttc

SEQ ID NO: 81083 - DNA, 60 bp, Artificial
  Synthetic oligonucleotide
tactttctgtgggctagacaatgaacctggatcgggaaattggcctgatggttccaacat

SEQ ID NO: 81084 - DNA, 60 bp, Artificial
  Synthetic oligonucleotide
aggtccggatacgagatgctaaaggtgccaaatgcattgaccgacgataggtcaaaaccc

SEQ ID NO: 81085 - DNA, 60 bp, Artificial
  Synthetic oligonucleotide
ggcaatcatgatagctggtctatctttctggatgtgctccaatggatcattgcagtgcag

SEQ ID NO: 81086 - DNA, 60 bp, Artificial
  Synthetic oligonucleotide
cttgaatggcgcagaatgggatgtcttcatagagcgacccaccgctgtggacacttgtta

SEQ ID NO: 81087 - DNA, 60 bp, Artificial
  Synthetic oligonucleotide
gaatggcgcagaatgggatgtcttcatagagcgacccaccgctgtggacacttgttatcc

SEQ ID NO: 81088 - DNA, 60 bp, Artificial
  Synthetic oligonucleotide
agcagagggctcctctcagaattacacagggaatcctgtgatatgcctgggacatcatgc

SEQ ID NO: 81089 - DNA, 60 bp, Artificial
  Synthetic oligonucleotide
cagagggctcctctcagaattacacagggaatcctgtgatatgcctgggacatcatgctg

SEQ ID NO: 81090 - DNA, 60 bp, Artificial
  Synthetic oligonucleotide
cagttctcctccctgactgtgaatgtgagaggatcaggaatgaggatactggtaaggggc

SEQ ID NO: 81091 - DNA, 60 bp, Artificial
  Synthetic oligonucleotide
gggagggtagtcaaatcggttgagttgaatgcccctaattaccactatgaggagtgctcc

SEQ ID NO: 81092 - DNA, 60 bp, Artificial
  Synthetic oligonucleotide
aaaggggagggtagtcaaatcggttgagttgaatgcccctaattaccactatgaggagtg

SEQ ID NO: 81093 - DNA, 60 bp, Artificial
  Synthetic oligonucleotide
atgaggccttgcttctgggttgagctgatcagaggaagacccaaggagaatacaatctgg

SEQ ID NO: 81094 - DNA, 60 bp, Artificial
  Synthetic oligonucleotide
ttcatgctctcacttggaatgcaggaccttctttctaactcaaggggccttgttgaatga

SEQ ID NO: 81095 - DNA, 60 bp, Artificial
  Synthetic oligonucleotide
aagggagatgtatttgtcatcagagagccttttatttcatgctctcacttggaatgcagg

SEQ ID NO: 81096 - DNA, 60 bp, Artificial
  Synthetic oligonucleotide
gctctcacttggaatgcaggaccttctttctaactcaaggggccttgttgaatgacaagc

SEQ ID NO: 81097 - DNA, 60 bp, Artificial
  Synthetic oligonucleotide
gtagctccagtaacactagcaggcaattcctctctctgccccatcagtggatgggctata

SEQ ID NO: 81098 - DNA, 60 bp, Artificial
  Synthetic oligonucleotide
aacataagtaataccaatttaattggaggacaggctgtagctccagtaacactagcaggc

SEQ ID NO: 81099 - DNA, 60 bp, Artificial
  Synthetic oligonucleotide
aatcagacatacatcaacataagtaataccaatttaattggaggacaggctgtagctcca

SEQ ID NO: 81100 - DNA, 60 bp, Artificial
  Synthetic oligonucleotide
atggattagccattcaatccaaactggaagtcagaactaccccgaaacatgcaatcaaag

SEQ ID NO: 81101 - DNA, 60 bp, Artificial
  Synthetic oligonucleotide
atttcaatatggattagccattcaatccaaactggaagtcagaactaccccgaaacatgc

SEQ ID NO: 81102 - DNA, 60 bp, Artificial
  Synthetic oligonucleotide
ggaccaagtaatggccaggcctcatacaagattttcaagatagaaaaggggagggtagtc

SEQ ID NO: 81103 - DNA, 60 bp, Artificial
  Synthetic oligonucleotide
actgatggaccaagtaatggccaggcctcatacaagattttcaagatagaaaaggggagg

SEQ ID NO: 81104 - DNA, 60 bp, Artificial
  Synthetic oligonucleotide
ggatacatatgcagcggagtttttggagacaacccgcgccccagtgatgggacaggcagt

SEQ ID NO: 81105 - DNA, 55 bp, Artificial
  Synthetic oligonucleotide
ttttggagacaacccgcgccccagtgatgggacaggcagttgtggtccagtgtct

SEQ ID NO: 81106 - DNA, 60 bp, Artificial
  Synthetic oligonucleotide
atgaggagtgctcctgttaccctgatgctagcgaggtaatgtgtgtgtgcagagacaact

SEQ ID NO: 81107 - DNA, 60 bp, Artificial
  Synthetic oligonucleotide
gtgctcctgttaccctgatgctagcgaggtaatgtgtgtgtgcagagacaactggcatgg

SEQ ID NO: 81108 - DNA, 60 bp, Artificial
  Synthetic oligonucleotide
gggtttgagatgatttgggatcccaatgggtgggcagagacagacagcagtttctctgtg

SEQ ID NO: 81109 - DNA, 60 bp, Artificial
  Synthetic oligonucleotide
cagcagtttctctgtgaaacaagatattgtagcaataactgattggtcaggatatagcgg

SEQ ID NO: 81110 - DNA, 60 bp, Artificial
  Synthetic oligonucleotide
gtgtttggataggaagaaccaaaagcactagctcaaggagtgggtttgagatgatttggg

SEQ ID NO: 81111 - DNA, 60 bp, Artificial
  Synthetic oligonucleotide
aggagtgggtttgagatgatttgggatcccaatgggtgggcagagacagacagcagtttc

SEQ ID NO: 81112 - DNA, 60 bp, Artificial
  Synthetic oligonucleotide
gatatagcggaagttttgttcagcatccagaactgacggggttggattgcatgaggcctt

SEQ ID NO: 81113 - DNA, 60 bp, Artificial
  Synthetic oligonucleotide
ttgttcagcatccagaactgacggggttggattgcatgaggccttgcttctgggttgagc

SEQ ID NO: 81114 - DNA, 60 bp, Artificial
  Synthetic oligonucleotide
gacggctaatgaatcaggaaggctaatagatttcctcaaggatgtgatggaatcaatgga

SEQ ID NO: 81115 - DNA, 60 bp, Artificial
  Synthetic oligonucleotide
cacagtcaagcaaaatgggaaatccggggcatgcaaaagagcaaatgtgaatgacttttt

SEQ ID NO: 81116 - DNA, 58 bp, Artificial
  Synthetic oligonucleotide
ttggacaatggaactggcctgatggggctaaaatagagtattttctctaagatacaga

SEQ ID NO: 81117 - DNA, 58 bp, Artificial
  Synthetic oligonucleotide
ttggacaatggaactggcctgatggggctaaaatagagtactttctctaagatacaga

SEQ ID NO: 81118 - DNA, 60 bp, Artificial
  Synthetic oligonucleotide
caataggagactgccccaaatatgtgaatgttaaatccctaaagcttgctaccgggctca

SEQ ID NO: 81119 - DNA, 60 bp, Artificial
  Synthetic oligonucleotide
ccacccaggaatctttgaaaactcgtgtcttgaaacgatggaggttgttcaacaaacaag

SEQ ID NO: 81120 - DNA, 55 bp, Artificial
  Synthetic oligonucleotide
gtttgtatcaacggaacctgcacagtagtaatgactgatggaagtgcatcaggaa

SEQ ID NO: 81121 - DNA, 60 bp, Artificial
  Synthetic oligonucleotide
gaatcaacccagaaagcaatagaccagataacatctaaagtcaataacattgttgatcgg

SEQ ID NO: 81122 - DNA, 60 bp, Artificial
  Synthetic oligonucleotide
ctgttcaatcgacgggaaagcaccgataagtcttggtgattgctcctttgctgggtggat

SEQ ID NO: 81123 - DNA, 60 bp, Artificial
  Synthetic oligonucleotide
cctcttctgatagatggcacagcttcattgagccctggaatgatgatgggcatgttcaac

SEQ ID NO: 81124 - DNA, 60 bp, Artificial
  Synthetic oligonucleotide
ccccttctgatagatggcacagcttcattgagccctggaatgatgatgggcatgttcaac

SEQ ID NO: 81125 - DNA, 60 bp, Artificial
  Synthetic oligonucleotide
ggcctctcctaatagatggcacagcctcactgagccctggaatgatgatgggcatgttca

SEQ ID NO: 81126 - DNA, 60 bp, Artificial
  Synthetic oligonucleotide
gcatcaatgaactgagcaatcttgcaaaaggagagaaggctaatgtgctaactgggcaag

SEQ ID NO: 81127 - DNA, 60 bp, Artificial
  Synthetic oligonucleotide
cttcgatcttggagggctatatgaagcaattgaggagtgcctgattaatgatccctgggt

SEQ ID NO: 81128 - DNA, 60 bp, Artificial
  Synthetic oligonucleotide
ccccagtagttcatacagaagaccggttggaatttccagcatggtggaggccatggtgtc

SEQ ID NO: 81129 - DNA, 60 bp, Artificial
  Synthetic oligonucleotide
ggctttatagagaatggctggcaaggcctaattgatgggtggtatgggtttaggcaccag

SEQ ID NO: 81130 - DNA, 60 bp, Artificial
  Synthetic oligonucleotide
gctgggttcatagagaatggctggcaaggcctaattgatggttggtatgggttcaggcac

SEQ ID NO: 81131 - DNA, 60 bp, Artificial
  Synthetic oligonucleotide
tgctggctttatagagaatggctggcaaggcctaattgatgggtggtatgggtttaggca

SEQ ID NO: 81132 - DNA, 60 bp, Artificial
  Synthetic oligonucleotide
ggatgtcaatccgactttacttttcttgaaagtgccggcgcaaaatgccataagtaccac

SEQ ID NO: 81133 - DNA, 60 bp, Artificial
  Synthetic oligonucleotide
tcggggactgtcccaagtatgtcaaacaggggtctttgaaactggctacaggaatgagga

SEQ ID NO: 81134 - DNA, 60 bp, Artificial
  Synthetic oligonucleotide
ccaggggacatgctgggaacagatgtacactccaggaggggaagtgagaaatgatgatgt

SEQ ID NO: 81135 - DNA, 60 bp, Artificial
  Synthetic oligonucleotide
cacacatgcccaagacatactggaaaagacacacaacgggaagctctgcagcctaaatgg

SEQ ID NO: 81136 - DNA, 60 bp, Artificial
  Synthetic oligonucleotide
ctcctgtgacccagatgagtgcaggttctatgctctcagccaagggacaacaatcagagg

SEQ ID NO: 81137 - DNA, 60 bp, Artificial
  Synthetic oligonucleotide
ggagccatgcgcaggcttgccgaccaaagtctcccaccgaacttctccagccttgaaaac

SEQ ID NO: 81138 - DNA, 60 bp, Artificial
  Synthetic oligonucleotide
gacaatggaatcagaatcgggtcaaggggacatgtgtttgtcataagagaaccatttgtg

SEQ ID NO: 81139 - DNA, 60 bp, Artificial
  Synthetic oligonucleotide
gaatcagaataggatcaaggggacatgtgtttgtcataagagaaccatttgtggcatgtg

SEQ ID NO: 81140 - DNA, 60 bp, Artificial
  Synthetic oligonucleotide
gacactccacgggttcaggacagtagtttcactggttcctgcactaatgctgttggaggg

SEQ ID NO: 81141 - DNA, 60 bp, Artificial
  Synthetic oligonucleotide
ctggaaatgataagaggaaaaccagaagagaggacaagcatttggacctctagtagctcc

SEQ ID NO: 81142 - DNA, 60 bp, Artificial
  Synthetic oligonucleotide
gacaccccacggattcaggacagtagtttcactggttcctgcactaatgctgttggaggg

SEQ ID NO: 81143 - DNA, 60 bp, Artificial
  Synthetic oligonucleotide
attgcatcaatagtcataggaataatatcagtgacaagagaaagcagtgtatcatcatcc

SEQ ID NO: 81144 - DNA, 60 bp, Artificial
  Synthetic oligonucleotide
agaacctctctgcaatgtatccggatttgcaatagtttccaaggacaatggaatcagaat

SEQ ID NO: 81145 - DNA, 60 bp, Artificial
  Synthetic oligonucleotide
cgtttgccgagataattggaatggaatgaatagaccaattttgatttttgatgaggacct

SEQ ID NO: 81146 - DNA, 60 bp, Artificial
  Synthetic oligonucleotide
tgtatccggatttgcaatagtttccaaggacaatggaatcagaataggatcaaggggaca

SEQ ID NO: 81147 - DNA, 60 bp, Artificial
  Synthetic oligonucleotide
tgaatggggactgttattgggtaatgacagatggtcctgcgaacaatcaggctagttaca

SEQ ID NO: 81148 - DNA, 60 bp, Artificial
  Synthetic oligonucleotide
ttccaaggacaatggaatcagaatagggtcaaggggacatgtgtttgtcataagagaacc

SEQ ID NO: 81149 - DNA, 60 bp, Artificial
  Synthetic oligonucleotide
aggacaatggaatcagaatcgggtcaaggggacatgtgtttgtcataagagaaccatttg

SEQ ID NO: 81150 - DNA, 60 bp, Artificial
  Synthetic oligonucleotide
cctctctgcaatgtatcagggtttgcaatagtttccaaggacaatggaatcagaatcggg

SEQ ID NO: 81151 - DNA, 60 bp, Artificial
  Synthetic oligonucleotide
gcaaattctaagaacacaagaatcgtcatgtgtatgtatgaaaggaaactgttattgggt

SEQ ID NO: 81152 - DNA, 60 bp, Artificial
  Synthetic oligonucleotide
cggatttgcaatagtttccaaggacaatggaatcagaatagggtcaaggggacatgtgtt

SEQ ID NO: 81153 - DNA, 60 bp, Artificial
  Synthetic oligonucleotide
gcaaattctaagaacacaagaatcgtcatgtgtatgtatgaatgggaactgttattgggt

SEQ ID NO: 81154 - DNA, 60 bp, Artificial
  Synthetic oligonucleotide
gcaaattctaagaacacaagaatcgtcatgtgtatgtatgaatggggactgttattgggt

SEQ ID NO: 81155 - DNA, 53 bp, Artificial
  Synthetic oligonucleotide
gacactccacgggttcaggacagtagtttcactggttcctgcactaatgctgt

SEQ ID NO: 81156 - DNA, 60 bp, Artificial
  Synthetic oligonucleotide
aggtcccagggtggtcctgggatgatggagcaattcttccctttgacatcgataagatgt

SEQ ID NO: 81157 - DNA, 56 bp, Artificial
  Synthetic oligonucleotide
tagtagctccacggtattttgtggtgtttcaagtgaggtcccaggatggtcctggg

SEQ ID NO: 81158 - DNA, 54 bp, Artificial
  Synthetic oligonucleotide
cctgggatgatggagcaattcttccctttgacatcgataagatgtaatttgtaa

SEQ ID NO: 81159 - DNA, 60 bp, Artificial
  Synthetic oligonucleotide
ggtcccagggtggtcctgggatgatggagcaattcttccctttgacatcgataagatgta

SEQ ID NO: 81160 - DNA, 60 bp, Artificial
  Synthetic oligonucleotide
aagcatttggacctctagtagctccacggtattttgtggtgtttcaagtgaggtcccagg

SEQ ID NO: 81161 - DNA, 60 bp, Artificial
  Synthetic oligonucleotide
ggaaaaccagaagagaggacaagcatttggacctctagtagctccacggtattttgtggt

SEQ ID NO: 81162 - DNA, 60 bp, Artificial
  Synthetic oligonucleotide
tagtagctccacggtattttgtggtgtttcaagtgaggtcccaggatggtcctgggatga

SEQ ID NO: 81163 - DNA, 60 bp, Artificial
  Synthetic oligonucleotide
cctctagtagctccacggtattttgtggtgtttcaagtgaggtcccagggtggtcctggg

SEQ ID NO: 81164 - DNA, 60 bp, Artificial
  Synthetic oligonucleotide
gtcatggagaaagcaaattctaagaacacaagaatcgtcatgtgtatgtatgaaaggaaa

SEQ ID NO: 81165 - DNA, 60 bp, Artificial
  Synthetic oligonucleotide
cacccaatgcctaccaggccaagtttgagtctgttgcatggtcagccacagcatgccatg

SEQ ID NO: 81166 - DNA, 60 bp, Artificial
  Synthetic oligonucleotide
tcttcacccaatgcctaccaggccaagtttgagtctgttgcatggtcagcaacagcatgc

SEQ ID NO: 81167 - DNA, 60 bp, Artificial
  Synthetic oligonucleotide
aggatcttcacccaatgcttaccaggccaagtttgagtctgttgcatggtcagccacagc

SEQ ID NO: 81168 - DNA, 60 bp, Artificial
  Synthetic oligonucleotide
cattaggatcttcacccaatgcctaccaggccaagtttgagtctgttgcatggtcagcca

SEQ ID NO: 81169 - DNA, 60 bp, Artificial
  Synthetic oligonucleotide
cattaggatcttcacccaatgcttaccaggccaagtttgagtctgttgcatggtcagcca

SEQ ID NO: 81170 - DNA, 60 bp, Artificial
  Synthetic oligonucleotide
gtccttaccgtgcattgatgagtgtgccattaggatcttcacccaatgcctaccaggcca

SEQ ID NO: 81171 - DNA, 60 bp, Artificial
  Synthetic oligonucleotide
cagtgaaagacagaagtccttaccgtgcattgatgagtgtgccattaggatcttcaccca

SEQ ID NO: 81172 - DNA, 60 bp, Artificial
  Synthetic oligonucleotide
gtcatggagaaagcaaattctaagaacacaagaatcgtcatgtgtatgtatgaatgggaa

SEQ ID NO: 81173 - DNA, 60 bp, Artificial
  Synthetic oligonucleotide
gtcatggagaaagcaaattctaagaacacaagaatcgtcatgtgtatgtatgaatgggga

SEQ ID NO: 81174 - DNA, 60 bp, Artificial
  Synthetic oligonucleotide
ggggactgttattgggtaatgacagatggtcctgcgaacaatcaggctagttacaagatt

SEQ ID NO: 81175 - DNA, 54 bp, Artificial
  Synthetic oligonucleotide
ccccttgatggtagcatacatgctagaaagagagttagtccgcaagacgaggtt

SEQ ID NO: 81176 - DNA, 60 bp, Artificial
  Synthetic oligonucleotide
ctgtgtcaagctttaaggtagactgctttctttggcatgtccgcaaacgatttgcagacc

SEQ ID NO: 81177 - DNA, 60 bp, Artificial
  Synthetic oligonucleotide
ggggaaacaatgctatcaatcacgattctgtttctgcttatagcagagggctcctctcag

SEQ ID NO: 81178 - DNA, 60 bp, Artificial
  Synthetic oligonucleotide
ggggaaacaatgctatcaatcacgattctgtttctgctcatagcagagggctcctcccag

SEQ ID NO: 81179 - DNA, 60 bp, Artificial
  Synthetic oligonucleotide
cagtatgtttcctcatgcagattgccatcctagcaacgactgtgacattgcacttcaagc

SEQ ID NO: 81180 - DNA, 60 bp, Artificial
  Synthetic oligonucleotide
cagtatgtttcctcatgcagattgccatcctagcaacgactatgacattgcacttcaagc

SEQ ID NO: 81181 - DNA, 60 bp, Artificial
  Synthetic oligonucleotide
agtgaaaatgaacccaaatcagaagataataacaattggctctgtctctttaaccattgc

SEQ ID NO: 81182 - DNA, 60 bp, Artificial
  Synthetic oligonucleotide
ccattgcaatagtatgcttcctcatgcagattgccatcctagcaacgactgtgacactgc

SEQ ID NO: 81183 - DNA, 60 bp, Artificial
  Synthetic oligonucleotide
aaaaggatgggcctttgactatggaaatgatgtttggatgggaagaactatcagcaagga

SEQ ID NO: 81184 - DNA, 60 bp, Artificial
  Synthetic oligonucleotide
ggcctttgactatggaaatgatgtttggatgggaagaactatcagcaaggattcacgttc

SEQ ID NO: 81185 - DNA, 60 bp, Artificial
  Synthetic oligonucleotide
ccacggctaattccaaatcacagataaatagacaagtcatagttgacaataataactggt

SEQ ID NO: 81186 - DNA, 60 bp, Artificial
  Synthetic oligonucleotide
ggcctttgactatggaaatgatgtttggatgggaagaacaatcagtaaggattcacgctc

SEQ ID NO: 81187 - DNA, 60 bp, Artificial
  Synthetic oligonucleotide
ctggtctgtctttttggatgtgctccaatggatcattgcagtgcagaatttgcatctagg

SEQ ID NO: 81188 - DNA, 60 bp, Artificial
  Synthetic oligonucleotide
catccttaggcaaaatccaacagaggaacaagccgtggatatatgcaaggcagcaatggg

SEQ ID NO: 81189 - DNA, 60 bp, Artificial
  Synthetic oligonucleotide
caatctctacaactaaaccctttcaaaacatctcgagaatatcaattggggactgtccca

SEQ ID NO: 81190 - DNA, 60 bp, Artificial
  Synthetic oligonucleotide
tgggagagacgaacagtcaattgctgaagcaataattgtggccatggtattctcacaaga

SEQ ID NO: 81191 - DNA, 60 bp, Artificial
  Synthetic oligonucleotide
aaccgcgtcattgagccctggaatgatgatgggcatgttcaatatgctgagcactgtctt

SEQ ID NO: 81192 - DNA, 60 bp, Artificial
  Synthetic oligonucleotide
gcaggagtgaaaatgaatccaaatcagaagataataacaattggctctgtctccctaacc

SEQ ID NO: 81193 - DNA, 60 bp, Artificial
  Synthetic oligonucleotide
tttcgatcttggagggctatatgaagcaatcgaggagtgcctgattaatgatccctgggt

SEQ ID NO: 81194 - DNA, 55 bp, Artificial
  Synthetic oligonucleotide
ggggctatatgaagcaatcgaggagtgcctgattaatgatccctgggttttgctt

SEQ ID NO: 81195 - DNA, 59 bp, Artificial
  Synthetic oligonucleotide
ggggctatatgaagcaatcgaggagtgcctgattaatgatccctgggttttgcttaatg

SEQ ID NO: 81196 - DNA, 60 bp, Artificial
  Synthetic oligonucleotide
ttttgagggattgtagtgtagctggatggctcctcgggaaccccatgtgtgatgaattcc

SEQ ID NO: 81197 - DNA, 60 bp, Artificial
  Synthetic oligonucleotide
tcattttgagggattgtagtgtagctggatggctcctcggaaaccccatgtgtgatgaat

SEQ ID NO: 81198 - DNA, 60 bp, Artificial
  Synthetic oligonucleotide
gggacatgtgttgttgctgtaacagatggccctgctgctaatagtgcagatcacaggatt

SEQ ID NO: 81199 - DNA, 60 bp, Artificial
  Synthetic oligonucleotide
ggagggacatgtgttgttgctgtaacagatggccctgctgctaatagtgcagatcacagg

SEQ ID NO: 81200 - DNA, 60 bp, Artificial
  Synthetic oligonucleotide
cgtcacagatggccctgctgctaatagtgcagatcacagggtttactggatacgggaagg

SEQ ID NO: 81201 - DNA, 60 bp, Artificial
  Synthetic oligonucleotide
tgttgccgtcacagatggccctgctgctaatagtgcagatcacagggtttactggatacg

SEQ ID NO: 81202 - DNA, 60 bp, Artificial
  Synthetic oligonucleotide
ggatacgggaaggaagaataataaggtatgaaaatgtccccaaaacaaagatacaacact

SEQ ID NO: 81203 - DNA, 60 bp, Artificial
  Synthetic oligonucleotide
actggatacgggaaggaagaataataaggtatgaaaatgtccccaaaacaaagatacaac

SEQ ID NO: 81204 - DNA, 60 bp, Artificial
  Synthetic oligonucleotide
gtcaactagtggtagatcgggctttgaaatcatcaaagttacagaggggtggatcaactc

SEQ ID NO: 81205 - DNA, 60 bp, Artificial
  Synthetic oligonucleotide
cacctagtggtagatcgggctttgaagtcatcaaagttacagaggggtggatcaactctc

SEQ ID NO: 81206 - DNA, 60 bp, Artificial
  Synthetic oligonucleotide
aatggggacttaccaaatactgtcaatttattcaacagtggcgagttccctagcactggc

SEQ ID NO: 81207 - DNA, 60 bp, Artificial
  Synthetic oligonucleotide
cttaccaaatactgtcaatttattcaacagtggcgagttccctagcactggcaatcatga

SEQ ID NO: 81208 - DNA, 60 bp, Artificial
  Synthetic oligonucleotide
gcaggcaaaccatttgaatggatgtcaatccgactttaatcttcttgaaagtgccagcgc

SEQ ID NO: 81209 - DNA, 60 bp, Artificial
  Synthetic oligonucleotide
cacaagtgtgacaatgaatgcatggaaagtgtgagaaacggaacatatgactatccacaa

SEQ ID NO: 81210 - DNA, 60 bp, Artificial
  Synthetic oligonucleotide
tcaataggcacttatcagatactatcaatctactcaacagtggcgagttccctagcactg

SEQ ID NO: 81211 - DNA, 60 bp, Artificial
  Synthetic oligonucleotide
cataagtgtgacaatgaatgcatggaaagtgtgagaaatggaacgtatgactatccacaa

SEQ ID NO: 81212 - DNA, 60 bp, Artificial
  Synthetic oligonucleotide
tcaaaaacttatacgataaggtccgactccagctgagagacaatgcaaaagaattgggca

SEQ ID NO: 81213 - DNA, 60 bp, Artificial
  Synthetic oligonucleotide
ggagtgaggcccctcattctgaaggattgcagtgtagctggatggcttcttggaaaccca

SEQ ID NO: 81214 - DNA, 60 bp, Artificial
  Synthetic oligonucleotide
taccacaagtgtgacaatgaatgcatggaaagtgtgagaaatggaacgtatgactatctg

SEQ ID NO: 81215 - DNA, 60 bp, Artificial
  Synthetic oligonucleotide
tgagagggtttctaattctaggcaaagaagacaaaagatatggaccagcattgagcatca

SEQ ID NO: 81216 - DNA, 60 bp, Artificial
  Synthetic oligonucleotide
tataaatatggcagattatagcattgattccagttatgtgtgctcaggacttgttggtga

SEQ ID NO: 81217 - DNA, 60 bp, Artificial
  Synthetic oligonucleotide
tatggcagattatagcattgattccagttatgtgtgctcagggcttgttggagacacacc

SEQ ID NO: 81218 - DNA, 60 bp, Artificial
  Synthetic oligonucleotide
tggggatgatgtttggatgggaagaacaatcagtaaagactcgcgctcaggctatgagac

SEQ ID NO: 81219 - DNA, 60 bp, Artificial
  Synthetic oligonucleotide
aagataataacaattggctctgtctctttaaccattgcaacagtatgtttcctcatgcag

SEQ ID NO: 81220 - DNA, 60 bp, Artificial
  Synthetic oligonucleotide
gctccgtctctctaaccattgcaacagtatgtttcctcatgcagattgccatcttaacaa

SEQ ID NO: 81221 - DNA, 60 bp, Artificial
  Synthetic oligonucleotide
ccattgcaacagtatgtttcctcatgcagattgccatcttaacaacgactgtgacactgc

SEQ ID NO: 81222 - DNA, 60 bp, Artificial
  Synthetic oligonucleotide
ggagactagagtatggtggacctcaaacagtatcgtcgtgttctgtggcacttcgggtac

SEQ ID NO: 81223 - DNA, 51 bp, Artificial
  Synthetic oligonucleotide
tgaagagctcagacggcagaaatagtgaatttagcttgtccttcatgaaaa

SEQ ID NO: 81224 - DNA, 54 bp, Artificial
  Synthetic oligonucleotide
cattgaagagctcagacggcagaaatagtgaatttagcttgtccttcatgaaaa

SEQ ID NO: 81225 - DNA, 60 bp, Artificial
  Synthetic oligonucleotide
gctacaaggggcctgtttggtgcaatagctggtttcatagaaggtggatggccaggttta

SEQ ID NO: 81226 - DNA, 60 bp, Artificial
  Synthetic oligonucleotide
ccaggaggagaagtgagaaatgatgatgttgaccaaagcttgattatcgctgcccggaac

SEQ ID NO: 81227 - DNA, 60 bp, Artificial
  Synthetic oligonucleotide
attcagagggaacaggaatggcagctgaccagaaatcaacacaggaagccatcgataaga

SEQ ID NO: 81228 - DNA, 60 bp, Artificial
  Synthetic oligonucleotide
ttcagagggaacaggaatggcagctgaccagaaatcaacacaggaagccatcgataagat

SEQ ID NO: 81229 - DNA, 60 bp, Artificial
  Synthetic oligonucleotide
atatagttgacaagatgaacagggagtttgaagttgtgaatcatgagttctctgaagttg

SEQ ID NO: 81230 - DNA, 60 bp, Artificial
  Synthetic oligonucleotide
agttgacaagatgaacagggagtttgaagttgtgaatcatgagttctctgaagttgaaaa

SEQ ID NO: 81231 - DNA, 60 bp, Artificial
  Synthetic oligonucleotide
gaatgcaagtaggcattacatgggagaatgtcccaaatatgtaaagaaggcaagcttgcg

SEQ ID NO: 81232 - DNA, 57 bp, Artificial
  Synthetic oligonucleotide
aggcattacatgggagaatgtcccaaatatgtgaagaaggcaagcttgcgacttgca

SEQ ID NO: 81233 - DNA, 60 bp, Artificial
  Synthetic oligonucleotide
tggaatgattgatgggtggtatggatttcatcacagcaattcagagggaacaggaatggc

SEQ ID NO: 81234 - DNA, 60 bp, Artificial
  Synthetic oligonucleotide
gatgggtggtatggatttcatcacagcaattcagagggaacaggaatggcagctgaccag

SEQ ID NO: 81235 - DNA, 60 bp, Artificial
  Synthetic oligonucleotide
cagtctttgcttggcaatcctgattgctggaggtttaatcctgggcatgcaaaatggatc

SEQ ID NO: 81236 - DNA, 60 bp, Artificial
  Synthetic oligonucleotide
tgcttggcaatcctgattgctggaggtttaatcctgggtatgcaaaatggatcttgtaga

SEQ ID NO: 81237 - DNA, 60 bp, Artificial
  Synthetic oligonucleotide
gcaatcctgattgctggaggtttaatcctgggtatgcaaaatggatcttgtagatgcatg

SEQ ID NO: 81238 - DNA, 60 bp, Artificial
  Synthetic oligonucleotide
tagaaaatcagaaaacgctagacgaacatgattccaatgtcaaaaacctttttgacgagg

SEQ ID NO: 81239 - DNA, 60 bp, Artificial
  Synthetic oligonucleotide
agaagagaacaccacttacaaaattcttagcatttacagtacagtggcggccagtctttg

SEQ ID NO: 81240 - DNA, 60 bp, Artificial
  Synthetic oligonucleotide
ttcttagcatttacagtacagtggcggccagtctttgcttggcaatcctgattgctggag

SEQ ID NO: 81241 - DNA, 60 bp, Artificial
  Synthetic oligonucleotide
ccagtctttgcttggcaatcctgattgctggaggtttaatcctgggcatgcaaaatggat

SEQ ID NO: 81242 - DNA, 60 bp, Artificial
  Synthetic oligonucleotide
ggtgccccattggaactgcgagactgcaagatcgaggcagtaatctatggaaaccctaaa

SEQ ID NO: 81243 - DNA, 60 bp, Artificial
  Synthetic oligonucleotide
accctaaatgtgacatccatctaaaagatcaaggttggtcatacatagtggagaggccta

SEQ ID NO: 81244 - DNA, 60 bp, Artificial
  Synthetic oligonucleotide
caatactgatttaggtgccccattggaactgcgagactgcaagatcgaggcagtaatcta

SEQ ID NO: 81245 - DNA, 60 bp, Artificial
  Synthetic oligonucleotide
ggtgccccattggaactgcgagactgcaagattgaggcagtaatctatgggaaccccaag

SEQ ID NO: 81246 - DNA, 60 bp, Artificial
  Synthetic oligonucleotide
cgcttattgtaacactgatttaggtgccccattggaactgcgagactgcaagattgaggc

SEQ ID NO: 81247 - DNA, 60 bp, Artificial
  Synthetic oligonucleotide
taacactgatttaggtgccccattggaactgcgagactgcaagattgaggcagtaatcta

SEQ ID NO: 81248 - DNA, 60 bp, Artificial
  Synthetic oligonucleotide
gagctcgtggaaacagagaaacatcccgcttattgtaacactgatttaggtgccccattg

SEQ ID NO: 81249 - DNA, 60 bp, Artificial
  Synthetic oligonucleotide
acagagaaacatcccgcttattgtaacactgatttaggtgccccattggaactgcgagac

SEQ ID NO: 81250 - DNA, 60 bp, Artificial
  Synthetic oligonucleotide
accccaagtgtgacatccatctgaaggatcaaggttggtcatacatagtggagaggccca

SEQ ID NO: 81251 - DNA, 60 bp, Artificial
  Synthetic oligonucleotide
ggatcaaggttggtcatacatagtggagaggcccagcgcaccagaagggatgtgttaccc

SEQ ID NO: 81252 - DNA, 60 bp, Artificial
  Synthetic oligonucleotide
cagcaaacccttccagaatgcaagtaggcattacatgggagaatgtcccaaatatgtaaa

SEQ ID NO: 81253 - DNA, 60 bp, Artificial
  Synthetic oligonucleotide
gcgggagcaatcaatagcagcaaaccctttcagaatgcaagtaggcattacatgggagaa

SEQ ID NO: 81254 - DNA, 60 bp, Artificial
  Synthetic oligonucleotide
ggtcccagaccattagtaagaggacagcaagggaggatggattactattggggcattctg

SEQ ID NO: 81255 - DNA, 60 bp, Artificial
  Synthetic oligonucleotide
tggtcccagaccattagtaagaggacagcaagggaggatggattactattggggcattct

SEQ ID NO: 81256 - DNA, 60 bp, Artificial
  Synthetic oligonucleotide
atattggtcccagaccattagtaagaggacagcaagggagaatggattactactggggta

SEQ ID NO: 81257 - DNA, 60 bp, Artificial
  Synthetic oligonucleotide
catcattttcttatgggggatccatcatccgccggacacaaaagagcagacaacactata

SEQ ID NO: 81258 - DNA, 60 bp, Artificial
  Synthetic oligonucleotide
atcgggaactgtaacacaaaatgtcaaacatacgcaggagcaattaatagcagcaaaccc

SEQ ID NO: 81259 - DNA, 60 bp, Artificial
  Synthetic oligonucleotide
ggatatacccatcgggaactgtaacacaaaatgtcaaacatatgcgggagcaatcaatag

SEQ ID NO: 81260 - DNA, 60 bp, Artificial
  Synthetic oligonucleotide
aataattcaaaatgaggatatacccatcgggaactgtaacacaaaatgtcaaacatatgc

SEQ ID NO: 81261 - DNA, 60 bp, Artificial
  Synthetic oligonucleotide
gggtgaaagccatggcagaataatccaaaatgaggatatacccatcgggaactgtaacac

SEQ ID NO: 81262 - DNA, 60 bp, Artificial
  Synthetic oligonucleotide
acaccacttacaaaattcttagcatttacagtacagtggcggccagtctttgcttggcaa

SEQ ID NO: 81263 - DNA, 60 bp, Artificial
  Synthetic oligonucleotide
ccacttacaaaattcttagcatttacagtacagtggcggccagtctttgcttggcaatcc

SEQ ID NO: 81264 - DNA, 60 bp, Artificial
  Synthetic oligonucleotide
tggcgagcacaaatgcatacgataggatatgcattggttaccaatcgaataactccacag

SEQ ID NO: 81265 - DNA, 60 bp, Artificial
  Synthetic oligonucleotide
tggcgagcacaaatgcatacgataggatatgcattgggtaccaatcaaacaactccacag

SEQ ID NO: 81266 - DNA, 60 bp, Artificial
  Synthetic oligonucleotide
gtcacccaaacaatggagctcgtggaaacagagaaacatcccgcttattgcaatactgat

SEQ ID NO: 81267 - DNA, 60 bp, Artificial
  Synthetic oligonucleotide
gcgagcacaaatgcatacgataggatatgcattgggtaccaatcaaacaactccacagac

SEQ ID NO: 81268 - DNA, 60 bp, Artificial
  Synthetic oligonucleotide
atggaaaaattcatcgcaatagcaaccttggcgagcacaaatgcatacgataggatatgc

SEQ ID NO: 81269 - DNA, 60 bp, Artificial
  Synthetic oligonucleotide
gagctcgtggaaacagagaaacatcccgcttattgcaatactgatttaggtgccccattg

SEQ ID NO: 81270 - DNA, 60 bp, Artificial
  Synthetic oligonucleotide
gtcacccaaacaatggagctcgtggaaacagagaaacatcccgcttattgtaacactgat

SEQ ID NO: 81271 - DNA, 60 bp, Artificial
  Synthetic oligonucleotide
gcagatctcgaggctctcatggaatggctgaagacaagaccaatcctgtcacctctgacc

SEQ ID NO: 81272 - DNA, 60 bp, Artificial
  Synthetic oligonucleotide
gttaagggattctcatacttagatggtgacaacacctggctaggaagaacaataagcaca

SEQ ID NO: 81273 - DNA, 60 bp, Artificial
  Synthetic oligonucleotide
caatacatatgcagtcctgtcctcacagacaatccacgtcccaatgaccccacagtagga

SEQ ID NO: 81274 - DNA, 60 bp, Artificial
  Synthetic oligonucleotide
gacgcacactagtcaatacatatgcagtcctgtcctcacagacaatccacgtcccaatga

SEQ ID NO: 81275 - DNA, 60 bp, Artificial
  Synthetic oligonucleotide
aataagcacagcttctagatctggatacgaaatgctgaaagtgcctaatgcattgacaga

SEQ ID NO: 81276 - DNA, 60 bp, Artificial
  Synthetic oligonucleotide
gaacgtaggactacacctgaaaccgagctgcaactgctctaactctccttctgaagccac

SEQ ID NO: 81277 - DNA, 60 bp, Artificial
  Synthetic oligonucleotide
gcacaataaattcatggcatatattcgggaaggacaatgctataagaataggggagaatt

SEQ ID NO: 81278 - DNA, 60 bp, Artificial
  Synthetic oligonucleotide
gcatgcttctatgttgagttgattcgtggaaggccaaaagaggacaaagtgtggtggacc

SEQ ID NO: 81279 - DNA, 60 bp, Artificial
  Synthetic oligonucleotide
ggcatatattcgggaaggacaatgctataagaataggggagaattctgatgttttagtca

SEQ ID NO: 81280 - DNA, 60 bp, Artificial
  Synthetic oligonucleotide
cagagtagagtgcattggatggtccagtacaagctgtcatgatgggaaagcacgaatgtc

SEQ ID NO: 81281 - DNA, 60 bp, Artificial
  Synthetic oligonucleotide
acagtgtacaataccagagtagagtgcattggatggtccagtacaagctgtcatgatggg

SEQ ID NO: 81282 - DNA, 60 bp, Artificial
  Synthetic oligonucleotide
aacttaggtttgaacgtaggactacacctgaaaccgagctgcaactgctctaactctcct

SEQ ID NO: 81283 - DNA, 60 bp, Artificial
  Synthetic oligonucleotide
aattggcaaggctcgaatagaccagtgatacaaataaatcccacaatgatgacgcacact

SEQ ID NO: 81284 - DNA, 60 bp, Artificial
  Synthetic oligonucleotide
actggtccagcagagactaggatatactatttcaaagaagggaaaatcctcaaatgggaa

SEQ ID NO: 81285 - DNA, 60 bp, Artificial
  Synthetic oligonucleotide
caaatgggaaccactaactgggaccgctaagcacattgaggaatgctcctgctatggaaa

SEQ ID NO: 81286 - DNA, 60 bp, Artificial
  Synthetic oligonucleotide
ggaaccactaactgggaccgctaagcacattgaggaatgctcctgctatggaaaagattc

SEQ ID NO: 81287 - DNA, 60 bp, Artificial
  Synthetic oligonucleotide
ccacagtgggatatgtccagtagtgttcactgacggttctgctactggtccagcagagac

SEQ ID NO: 81288 - DNA, 60 bp, Artificial
  Synthetic oligonucleotide
tcatgatgggaaagcacgaatgtctatatgtgtctcaggtcccaacaacaatgcatcagc

SEQ ID NO: 81289 - DNA, 60 bp, Artificial
  Synthetic oligonucleotide
gctatctatggcacatacgaaagctgctcagcatgagagacatgtgtgatgctccctttg

SEQ ID NO: 81290 - DNA, 60 bp, Artificial
  Synthetic oligonucleotide
gagagacgaacagtcaattgctgaagcaataattgtggcaatggtgttttcacaagagga

SEQ ID NO: 81291 - DNA, 60 bp, Artificial
  Synthetic oligonucleotide
cttgaagagtcccatccagggatctttgaaaactcgtgtcttgaaacgatggaagttgtt

SEQ ID NO: 81292 - DNA, 60 bp, Artificial
  Synthetic oligonucleotide
ggtcctacaatgctgaattattggtggcattagaaaatcaacatactatagatgtgacag

SEQ ID NO: 81293 - DNA, 60 bp, Artificial
  Synthetic oligonucleotide
attgacctgtggtcttacaatgctgaattattggtggcattagaaaatcaacatactata

SEQ ID NO: 81294 - DNA, 60 bp, Artificial
  Synthetic oligonucleotide
cctgtggtcttacaatgctgaattattggtggcattagaaaatcaacatactatagatgt

SEQ ID NO: 81295 - DNA, 60 bp, Artificial
  Synthetic oligonucleotide
tcaaacagggatccttgaaactagctacaggaatgaggaacatccctgagaaggcaacca

SEQ ID NO: 81296 - DNA, 60 bp, Artificial
  Synthetic oligonucleotide
gggatccttgaaactagctacaggaatgaggaacatccctgagaaggcaaccagaggtct

SEQ ID NO: 81297 - DNA, 60 bp, Artificial
  Synthetic oligonucleotide
aagatgagtcttctaaccgaggtcgaaacgtacgttctctctatcgtcccgtcgggcccc

SEQ ID NO: 81298 - DNA, 60 bp, Artificial
  Synthetic oligonucleotide
acgagggatcttatttcttcggagacaatgcagaggactatgacaattgaagaaaaatac

SEQ ID NO: 81299 - DNA, 60 bp, Artificial
  Synthetic oligonucleotide
attggggactgtcccaagtatgtcaaacagggatccttgaaactagctacaggaatgagg

SEQ ID NO: 81300 - DNA, 60 bp, Artificial
  Synthetic oligonucleotide
ccatcggggactgtcccaagtatgtcaaacagggatccttgaaactagctacaggaatga

SEQ ID NO: 81301 - DNA, 60 bp, Artificial
  Synthetic oligonucleotide
atcggggactgtcccaagtatgtcaaacagggatccttgaaattagctacaggaatgagg

SEQ ID NO: 81302 - DNA, 60 bp, Artificial
  Synthetic oligonucleotide
acatctcgagaatatcaatcggggactgtcccaagtatgtcaaacagggatccttgaaac

SEQ ID NO: 81303 - DNA, 60 bp, Artificial
  Synthetic oligonucleotide
atctcaagaatatcaatcggggactgtcccaagtatgtcaaacagggatccttgaaatta

SEQ ID NO: 81304 - DNA, 60 bp, Artificial
  Synthetic oligonucleotide
tcaatcggggactgtcccaagtatgtcaaacaggggtcgttgaaactggctacagggatg

SEQ ID NO: 81305 - DNA, 60 bp, Artificial
  Synthetic oligonucleotide
caatcggggactgtcccaagtatgtcaaacagggatccttgaaactagctacaggaatga

SEQ ID NO: 81306 - DNA, 60 bp, Artificial
  Synthetic oligonucleotide
cttgagtggtgcagaatgggatgtcttcatagagcgacccactgctgtggacacttgtta

SEQ ID NO: 81307 - DNA, 60 bp, Artificial
  Synthetic oligonucleotide
caatggttggtatggtttccaacacagaaatgaagaaggtacagggattgctgcagacaa

SEQ ID NO: 81308 - DNA, 60 bp, Artificial
  Synthetic oligonucleotide
atggttggtatggtttccaacacagaaatgaagaaggtacagggattgctgcagacaaag

SEQ ID NO: 81309 - DNA, 60 bp, Artificial
  Synthetic oligonucleotide
catagtgaaaccgggagaagcaataacatttgagtcaaatggtgcatttctcgcccctcg

SEQ ID NO: 81310 - DNA, 60 bp, Artificial
  Synthetic oligonucleotide
aagaccccttctgatagatggcacagcttcattgagccctggaatgatgatgggcatgtt

SEQ ID NO: 81311 - DNA, 60 bp, Artificial
  Synthetic oligonucleotide
gagttctaccacaaatgtgacaatgaatgcatggaaagtgtgagaaacggaacgtatgac

SEQ ID NO: 81312 - DNA, 60 bp, Artificial
  Synthetic oligonucleotide
aaacaatgctatcaatcacgattctgtttctgctcatagcagagggctcctcccagaatt

SEQ ID NO: 81313 - DNA, 60 bp, Artificial
  Synthetic oligonucleotide
aggataaagaaagaggagttcgctgagatcatgaagatctgttccaccattgaagagctc

SEQ ID NO: 81314 - DNA, 60 bp, Artificial
  Synthetic oligonucleotide
cggattaagaaggaggagttcgctgagatcatgaagatctgttccaccattgaagagctc

SEQ ID NO: 81315 - DNA, 60 bp, Artificial
  Synthetic oligonucleotide
atctggaaggataaagaaagaggagttcgctgagatcatgaagatctgttccaccattga

SEQ ID NO: 81316 - DNA, 60 bp, Artificial
  Synthetic oligonucleotide
ggaaggataaagaaagaggagttcgctgagatcatgaagatctgttccaccattgaagag

SEQ ID NO: 81317 - DNA, 60 bp, Artificial
  Synthetic oligonucleotide
tcgatcttggagggctatatgaagcaattgaggagtgcctgattaatgatccctgggttt

SEQ ID NO: 81318 - DNA, 60 bp, Artificial
  Synthetic oligonucleotide
ggggggctatatgaagcaattgaggagtgcctgattaatgatccctgggttttgcttaat

SEQ ID NO: 81319 - DNA, 60 bp, Artificial
  Synthetic oligonucleotide
gatcttggggggctatatgaagcaattgaggagtgcctgattaatgatccctgggttttg

SEQ ID NO: 81320 - DNA, 60 bp, Artificial
  Synthetic oligonucleotide
cttggagggctatatgaagcaattgaggagtgcctgattaatgatccctgggttttgctc

SEQ ID NO: 81321 - DNA, 60 bp, Artificial
  Synthetic oligonucleotide
actaataaggtcaactcaatcattgacaaaatgaacactcggtttgaggccgttggaaag

SEQ ID NO: 81322 - DNA, 60 bp, Artificial
  Synthetic oligonucleotide
actaataaggtcaactcaatcattgacaaaatgaacactcaatttgaggtcgttgggaag

SEQ ID NO: 81323 - DNA, 60 bp, Artificial
  Synthetic oligonucleotide
accaacaaggtcaactcaatcattgacaaaatgaacacccagtttgaggccgctgggaag

SEQ ID NO: 81324 - DNA, 60 bp, Artificial
  Synthetic oligonucleotide
ctaataaggtcaactcaatcattgacaaaatgaacactcaatttgagaccgttggaaagg

SEQ ID NO: 81325 - DNA, 60 bp, Artificial
  Synthetic oligonucleotide
actaataaggtcaactcaatcattgacaaaatgaacactcaatttgagaccgttggaaag

SEQ ID NO: 81326 - DNA, 60 bp, Artificial
  Synthetic oligonucleotide
ccaacaaggtcaactcaatcattgacaaaatgaacacccagtttgaggccgctgggaagg

SEQ ID NO: 81327 - DNA, 60 bp, Artificial
  Synthetic oligonucleotide
gcaatgatggaccaagtgagagaaagccggaatcctgggaatgctgaaattgaagatctc

SEQ ID NO: 81328 - DNA, 60 bp, Artificial
  Synthetic oligonucleotide
gcttccaggtagattgcttcctttggcatgtccgcaaacgatttgcagaccaagaaatgg

SEQ ID NO: 81329 - DNA, 60 bp, Artificial
  Synthetic oligonucleotide
atgaatccaaatcagaagattctatgcacttctgccactgctatcgtaataggcacaatt

SEQ ID NO: 81330 - DNA, 60 bp, Artificial
  Synthetic oligonucleotide
gatgaatccaaatcagaagattctatgcacttctgccactgctatcgtaataggcacaat

SEQ ID NO: 81331 - DNA, 60 bp, Artificial
  Synthetic oligonucleotide
aaaatgcaattggggttctcatcggaggacttgaatggaatgataacacagttcgagtct

SEQ ID NO: 81332 - DNA, 60 bp, Artificial
  Synthetic oligonucleotide
aaaatgcaattggggacctcatcggaggacttgaatggaatgataacacagttcgagtct

SEQ ID NO: 81333 - DNA, 60 bp, Artificial
  Synthetic oligonucleotide
aaaatgcaattgggatcctcatcgggggacttgaatggaatgataacacagttcgaatct

SEQ ID NO: 81334 - DNA, 60 bp, Artificial
  Synthetic oligonucleotide
aaaatgcaattgggggcctcatcggaggacttgaatggaatgataacacagttcgagtct

SEQ ID NO: 81335 - DNA, 60 bp, Artificial
  Synthetic oligonucleotide
tacagcttagggataatgcaaaggagctgggtaatggttgtttcgagttctatcacaaat

SEQ ID NO: 81336 - DNA, 60 bp, Artificial
  Synthetic oligonucleotide
gcttagagataatgcaaaggagctgggtaatggttgtttcgagttctatcacaaatgtga

SEQ ID NO: 81337 - DNA, 60 bp, Artificial
  Synthetic oligonucleotide
gcttagggataatgcaaaggagctgggtaatggttgtttcgagttctatcacaaatgtga

SEQ ID NO: 81338 - DNA, 60 bp, Artificial
  Synthetic oligonucleotide
ccattggttcagtgtccttaggattggtagtccttaatattctcctacatatagttagca

SEQ ID NO: 81339 - DNA, 60 bp, Artificial
  Synthetic oligonucleotide
ttcctgggcaggagatattctaagaactcaggaatcatcatgcacttgcattcaaggtga

SEQ ID NO: 81340 - DNA, 60 bp, Artificial
  Synthetic oligonucleotide
tgttcaatcgacgggaaagcaccgataagtcttggtgattgctcctttgctgggtggatc

SEQ ID NO: 81341 - DNA, 60 bp, Artificial
  Synthetic oligonucleotide
gctcaatcgacgggaaagcaccgataagtcttggtgattgctcctttgctgggtggatcc

SEQ ID NO: 81342 - DNA, 60 bp, Artificial
  Synthetic oligonucleotide
ctgttcactcgacgggaaagcaccgataagtcttggtgattgctcctttgctgggtggat

SEQ ID NO: 81343 - DNA, 60 bp, Artificial
  Synthetic oligonucleotide
gctcgccaacagagtgcaggacgttcttccttactcaaggttccctactcaatgacaaac

SEQ ID NO: 81344 - DNA, 60 bp, Artificial
  Synthetic oligonucleotide
aagtcaactcaatcattgacaaaatgaacactcaattcgaagccgttgggaaagaattca

SEQ ID NO: 81345 - DNA, 60 bp, Artificial
  Synthetic oligonucleotide
ctcgtacagaaggccagttgggatttccagtatggtggaggccatggtttctagggcccg

SEQ ID NO: 81346 - DNA, 60 bp, Artificial
  Synthetic oligonucleotide
gattaggtaaaggatacatgttcgaaagtaagagcatgaagctacggacacaaataccag

SEQ ID NO: 81347 - DNA, 60 bp, Artificial
  Synthetic oligonucleotide
gatgtgcgtctgtagggataattggcacggttcgaatcgaccatgggtgtctttcaatca

SEQ ID NO: 81348 - DNA, 60 bp, Artificial
  Synthetic oligonucleotide
cgtgcagggataattggcagggctcaaatagaccagtaattcaaatagatccagtggcga

SEQ ID NO: 81349 - DNA, 60 bp, Artificial
  Synthetic oligonucleotide
gtgcagggataattggcagggctcaaatagaccagtaattcaaatagatccagtagcgat

SEQ ID NO: 81350 - DNA, 60 bp, Artificial
  Synthetic oligonucleotide
gtgcagggataattggcagggctcaaatagaccagtaattcaaatagatccagtggcaat

SEQ ID NO: 81351 - DNA, 60 bp, Artificial
  Synthetic oligonucleotide
gggataattggcagggctcaaatagaccagtaattcaaatagatccagtggcgatgacac

SEQ ID NO: 81352 - DNA, 60 bp, Artificial
  Synthetic oligonucleotide
gaacacaataggagactgccccaaatatgtgaatgttaaatccctaaagcttgctaccgg

SEQ ID NO: 81353 - DNA, 60 bp, Artificial
  Synthetic oligonucleotide
gaatggtgcggaatgggatgtcttcatagagcgacccaccgctgtagacacttgttaccc

SEQ ID NO: 81354 - DNA, 60 bp, Artificial
  Synthetic oligonucleotide
cagggatctttgaaaactcgtgtcttgaaacgatggaagttgttcaacaaacaagagtag

SEQ ID NO: 81355 - DNA, 60 bp, Artificial
  Synthetic oligonucleotide
gatctttgaaaactcgtgtcttgaaacgatggaagttgttcaacaaacaagagtggacaa

SEQ ID NO: 81356 - DNA, 60 bp, Artificial
  Synthetic oligonucleotide
cgcagaggaattccaatggaacacagtcaagcagaatgggaaatccggagcatgcaaaag

SEQ ID NO: 81357 - DNA, 60 bp, Artificial
  Synthetic oligonucleotide
tggaccagcattgagcatcaacgaattgagcaatcttgcgaaaggggagaaggctaacgt

SEQ ID NO: 81358 - DNA, 60 bp, Artificial
  Synthetic oligonucleotide
ggaccatagtgaagcctgaagaggcaataacatttgagtcaaatggtgcatttctcgctc

SEQ ID NO: 81359 - DNA, 60 bp, Artificial
  Synthetic oligonucleotide
gccagaatgccactgaaatcagagcatctgttgggaggatggttggtggaatcgggagat

SEQ ID NO: 81360 - DNA, 60 bp, Artificial
  Synthetic oligonucleotide
gagtgacatcaacatcatggcgtctcaaggcaccaaacgatcttatgaacagatggagac

SEQ ID NO: 81361 - DNA, 60 bp, Artificial
  Synthetic oligonucleotide
gctaggaaaaggatacatgttcgaaagtaagagcatgaagcttcgaacacagataccagc

SEQ ID NO: 81362 - DNA, 60 bp, Artificial
  Synthetic oligonucleotide
tccaacaggccttggatgaggatcaacaatgagactatactagaaacagggtatgtgtgt

SEQ ID NO: 81363 - DNA, 60 bp, Artificial
  Synthetic oligonucleotide
caacaggccttggatgaggatcaacaatgagactatactagaaacagggtatgtgtgtag

SEQ ID NO: 81364 - DNA, 60 bp, Artificial
  Synthetic oligonucleotide
ggttccaacaggccttggatgaggatcaacaatgagactatactagaaacagggtatgta

SEQ ID NO: 81365 - DNA, 60 bp, Artificial
  Synthetic oligonucleotide
tgtgatcatggaagtcgttttcccaaatgaagtgggagctagaatactaacatcggagtc

SEQ ID NO: 81366 - DNA, 60 bp, Artificial
  Synthetic oligonucleotide
atatggactagtggtagtagtattgcgttctgtggtgttaactctgataccacaggttgg

SEQ ID NO: 81367 - DNA, 60 bp, Artificial
  Synthetic oligonucleotide
ggtgtgggatgctaatggatgggtgtcgacagacaaggattcaaatggtgtgcaggatat

SEQ ID NO: 81368 - DNA, 60 bp, Artificial
  Synthetic oligonucleotide
gaattggatcccgaggcgaagtatttgtcatacgggagcctttcatatcatgctccatta

SEQ ID NO: 81369 - DNA, 60 bp, Artificial
  Synthetic oligonucleotide
ggcgaagtatttgtcatacgggagcctttcatatcatgctccattagtgaatgcaggacc

SEQ ID NO: 81370 - DNA, 56 bp, Artificial
  Synthetic oligonucleotide
tgctccattagtgaatgcaggacctttttcttaactcagggagccctcctcaatga

SEQ ID NO: 81371 - DNA, 60 bp, Artificial
  Synthetic oligonucleotide
ccatcggcagtgctagtattatattaacaacaataggcctgctcctccaaataacaagtt

SEQ ID NO: 81372 - DNA, 60 bp, Artificial
  Synthetic oligonucleotide
ccaatgtgcaaaacaactataccacagtagttgaaccctcagcccccaatgtggttcact

SEQ ID NO: 81373 - DNA, 59 bp, Artificial
  Synthetic oligonucleotide
gtggttcactattctagtggaagaaacttgtgcccaataaaggggtgggcacctctgag

SEQ ID NO: 81374 - DNA, 60 bp, Artificial
  Synthetic oligonucleotide
gacacgttaaaaagctggaagggaaatattatgcgaacacaagagtctgagtgcgtatgc

SEQ ID NO: 81375 - DNA, 60 bp, Artificial
  Synthetic oligonucleotide
ctgaagatcagaaaggggaaaatagtaagtgtgaaagatgtggatgcaacagggttccat

SEQ ID NO: 81376 - DNA, 59 bp, Artificial
  Synthetic oligonucleotide
gtgcgtatgccaggatgagttttgttataccctgataacagacggaccgtccgacgcac

SEQ ID NO: 81377 - DNA, 60 bp, Artificial
  Synthetic oligonucleotide
ggacaaagagcttggaatccagaagcggctttgagatggtgtgggatgctaatggatggg

SEQ ID NO: 81378 - DNA, 60 bp, Artificial
  Synthetic oligonucleotide
cataaccatcggcagtgctagtattatattaacaacaataggcctgctcctccaaataac

SEQ ID NO: 81379 - DNA, 60 bp, Artificial
  Synthetic oligonucleotide
gcgatggacccggttggctaacactaggaatcactggcccagatgctactgctgtggcag

SEQ ID NO: 81380 - DNA, 60 bp, Artificial
  Synthetic oligonucleotide
ctggaagggaaatattatgcgaacacaagagtctgagtgcgtatgccaggatgagttttg

SEQ ID NO: 81381 - DNA, 60 bp, Artificial
  Synthetic oligonucleotide
ctgccactgcatgtagcgatggacccggttggctaacactaggaatcactggcccagatg

SEQ ID NO: 81382 - DNA, 60 bp, Artificial
  Synthetic oligonucleotide
gtttggataggaaggacaaagagcttggaatccagaagcggctttgagatggtgtgggat

SEQ ID NO: 81383 - DNA, 60 bp, Artificial
  Synthetic oligonucleotide
agtagtattgcgttctgtggtgttaactctgataccacaggttggtcatggcccgatggc

SEQ ID NO: 81384 - DNA, 57 bp, Artificial
  Synthetic oligonucleotide
agaatgccactgaaatcagagcatctgttgggagaatggttggtggaatcggaaggt

SEQ ID NO: 81385 - DNA, 60 bp, Artificial
  Synthetic oligonucleotide
actatgacattgcacttcaagcaaaatgaatgcagcatcccctcgaataatcaagtaatg

SEQ ID NO: 81386 - DNA, 60 bp, Artificial
  Synthetic oligonucleotide
tagagaggggaaaatcattcatatcagcccattatcaggaagtgctcagcatatagagga

SEQ ID NO: 81387 - DNA, 60 bp, Artificial
  Synthetic oligonucleotide
gtggacctcaaacagtatcgtcgtgttctgtggcacttcgggtacctatggaacaggctc

SEQ ID NO: 81388 - DNA, 60 bp, Artificial
  Synthetic oligonucleotide
ggcacaatacatgatagaattcctcatcgaacccttttgatgaacgagctgggtgttcca

SEQ ID NO: 81389 - DNA, 60 bp, Artificial
  Synthetic oligonucleotide
cgaccactattaatagatggaactgcgtcattgagccctggaatgatgatgggcatgttc

SEQ ID NO: 81390 - DNA, 60 bp, Artificial
  Synthetic oligonucleotide
aaaagatatggaccagcattgagcatcaacgaattgagcaatcttgcgaaaggggagaag

SEQ ID NO: 81391 - DNA, 60 bp, Artificial
  Synthetic oligonucleotide
atggaccagcattgagcatcaacgaattgagcaatcttgcgaagggggagaaagctaatg

SEQ ID NO: 81392 - DNA, 59 bp, Artificial
  Synthetic oligonucleotide
ggggtgcaaatgcagcgattcaagtgatcctctcgttattgccgcaagtatcattggaa

SEQ ID NO: 81393 - DNA, 60 bp, Artificial
  Synthetic oligonucleotide
atgggggtgcaaatgcagcgattcaagtgatcctctcgttattgccgcaagtatcattgg

SEQ ID NO: 81394 - DNA, 60 bp, Artificial
  Synthetic oligonucleotide
cagggaggcaagagaagaaccccgcactcaggatgaaatggatgatggcaatgaaatatc

SEQ ID NO: 81395 - DNA, 60 bp, Artificial
  Synthetic oligonucleotide
atgagtgcaggttctatgctctcagccaaggaacaacaattagagggaaacactcaaatg

SEQ ID NO: 81396 - DNA, 60 bp, Artificial
  Synthetic oligonucleotide
ggagagacgaacagtcaattgctgaagcaataattgtggccatggtattctcacaagagg

SEQ ID NO: 81397 - DNA, 60 bp, Artificial
  Synthetic oligonucleotide
gccagctgacccctcaacaatatcatgtgactccccaagcaacgtcaatggaggacccgg

SEQ ID NO: 81398 - DNA, 60 bp, Artificial
  Synthetic oligonucleotide
ggacaatgcaatacgactgggtgagaacaaggacatcatagtcacaagggagccttatgt

SEQ ID NO: 81399 - DNA, 60 bp, Artificial
  Synthetic oligonucleotide
gcaggtgcgaaatgaatccaaatcagaagataataacaatcggggtagtgaataccactc

SEQ ID NO: 81400 - DNA, 60 bp, Artificial
  Synthetic oligonucleotide
acgagagggaagaataatgaagtatgaaaacgtccctaaaacaaagatacaacacttaga

SEQ ID NO: 81401 - DNA, 60 bp, Artificial
  Synthetic oligonucleotide
ggtgtccaacaatgattggtcaggctattcaggcagtttcattgtcaaaaccaagggctg

SEQ ID NO: 81402 - DNA, 60 bp, Artificial
  Synthetic oligonucleotide
ccaataggaatgttgataggaacaccagcctgcgatctgcatcttactgggacatgggac

SEQ ID NO: 81403 - DNA, 60 bp, Artificial
  Synthetic oligonucleotide
gggcaactgccatccaataggaatgttgataggaacaccagcctgcgatctgcatcttac

SEQ ID NO: 81404 - DNA, 60 bp, Artificial
  Synthetic oligonucleotide
catgggacactctcatcgagcgtgagaatgccattgcttactgttaccctggggcgaccg

SEQ ID NO: 81405 - DNA, 60 bp, Artificial
  Synthetic oligonucleotide
tgcatcttactgggacatgggacactctcatcgagcgtgagaatgccattgcttactgtt

SEQ ID NO: 81406 - DNA, 60 bp, Artificial
  Synthetic oligonucleotide
gttaccctggggcgaccgtaaatgaagaggcactgaggcagaaaataatggaaagtgggg

SEQ ID NO: 81407 - DNA, 60 bp, Artificial
  Synthetic oligonucleotide
gcttactgttaccctggggcgaccgtaaatgaagaggcactgaggcagaaaataatggaa

SEQ ID NO: 81408 - DNA, 60 bp, Artificial
  Synthetic oligonucleotide
agagtaagggacaaaacttccctcagaccacgaacacctatagaaacacggacacagctg

SEQ ID NO: 81409 - DNA, 52 bp, Artificial
  Synthetic oligonucleotide
aataatggaaagtggggggatcagcaagataagcactggctttacttatggg

SEQ ID NO: 81410 - DNA, 60 bp, Artificial
  Synthetic oligonucleotide
gacacagctgaacatctcataatatggggaattcaccacccttccagcattcaggagaag

SEQ ID NO: 81411 - DNA, 60 bp, Artificial
  Synthetic oligonucleotide
ggacaaaacttccctcagaccacgaacacctatagaaacacggacacagctgaacatctc

SEQ ID NO: 81412 - DNA, 57 bp, Artificial
  Synthetic oligonucleotide
aacaggttgattgagaagaccaacactgagtttgagtcaatagagtctgaattcagt

SEQ ID NO: 81413 - DNA, 60 bp, Artificial
  Synthetic oligonucleotide
aacaggttgattgagaagaccaacactgagtttgagtcaatagagtctgaattcagtgag

SEQ ID NO: 81414 - DNA, 60 bp, Artificial
  Synthetic oligonucleotide
ctcaggcagctatcgaccaaatcactggaaagctgaacaggttgattgagaagaccaaca

SEQ ID NO: 81415 - DNA, 60 bp, Artificial
  Synthetic oligonucleotide
ctgattacaagagtactcaggcagctatcgaccaaatcactggaaagctgaacaggttga

SEQ ID NO: 81416 - DNA, 60 bp, Artificial
  Synthetic oligonucleotide
cagacaccaaaatgctcagggcacaggccaagctgctgattacaagagtactcaggcagc

SEQ ID NO: 81417 - DNA, 60 bp, Artificial
  Synthetic oligonucleotide
tggttggtatggtttcagacaccaaaatgctcagggcacaggccaagctgctgattacaa

SEQ ID NO: 81418 - DNA, 60 bp, Artificial
  Synthetic oligonucleotide
gagagagtgaggaagcaactcaggcagaatgcagaagaagacgggaaggggtgctttgag

SEQ ID NO: 81419 - DNA, 60 bp, Artificial
  Synthetic oligonucleotide
taaatctgtatgagagagtgaggaagcaactcaggcagaatgcagaagaagacgggaagg

SEQ ID NO: 81420 - DNA, 60 bp, Artificial
  Synthetic oligonucleotide
gaacaccaaattggtaacgtcatcaattggaccaaggattcaataaccgacatctggact

SEQ ID NO: 81421 - DNA, 60 bp, Artificial
  Synthetic oligonucleotide
attcagtgagattgaacaccaaattggtaacgtcatcaattggaccaaggattcaataac

SEQ ID NO: 81422 - DNA, 54 bp, Artificial
  Synthetic oligonucleotide
ttggagcagtgagaggtcttgacaaaatctgtctaggacatcatgcagtagcca

SEQ ID NO: 81423 - DNA, 60 bp, Artificial
  Synthetic oligonucleotide
ctcttacaaatgaacaggaagaggtgaccaatgctactgaaacagtggagagcacaagtt

SEQ ID NO: 81424 - DNA, 60 bp, Artificial
  Synthetic oligonucleotide
agcaaaagcaggggtcacaatgtacaaagtagcagtaataattgtgctccttggagcagt

SEQ ID NO: 81425 - DNA, 60 bp, Artificial
  Synthetic oligonucleotide
acagtaggtcaatgtcccaaatacgtgaataagaagagtttgatgcttgcaacagggatg

SEQ ID NO: 81426 - DNA, 60 bp, Artificial
  Synthetic oligonucleotide
gtaggtcaatgtcccaaatacgtgaataagaagagtttgatgcttgcaacagggatgagg

SEQ ID NO: 81427 - DNA, 60 bp, Artificial
  Synthetic oligonucleotide
ccaggcgataatatcaccttctcacacaatggaggtctgatagcgccgagtcgagttagc

SEQ ID NO: 81428 - DNA, 60 bp, Artificial
  Synthetic oligonucleotide
ccgagtcgagttagcaaactaattggaaggggattgggaatccaatcagaagcatcaata

SEQ ID NO: 81429 - DNA, 60 bp, Artificial
  Synthetic oligonucleotide
cgagtcgagttagcaaactaattggaaggggattgggaatccaatcagaagcatcaatag

SEQ ID NO: 81430 - DNA, 60 bp, Artificial
  Synthetic oligonucleotide
agcatcaatagacaatggttgtgaatctaaatgtttttggagaggaggctctataaatac

SEQ ID NO: 81431 - DNA, 60 bp, Artificial
  Synthetic oligonucleotide
gttgggagttccacatatcagaacaattttgttccagttgttggggcaagacctcaggtc

SEQ ID NO: 81432 - DNA, 60 bp, Artificial
  Synthetic oligonucleotide
acctcaggtcaatggacaaagtgggcgaattgtcttccactggacactagtacaaccagg

SEQ ID NO: 81433 - DNA, 60 bp, Artificial
  Synthetic oligonucleotide
agcacaagtttaaacaagttatgtatgaaaggaagaagctataaggacctgggcaactgc

SEQ ID NO: 81434 - DNA, 60 bp, Artificial
  Synthetic oligonucleotide
aagttatgtatgaaaggaagaagctataaggacctgggcaactgccatccaataggaatg

SEQ ID NO: 81435 - DNA, 60 bp, Artificial
  Synthetic oligonucleotide
ctcaggtcaatggacaaagtgggcgaattgtcttccactggacactagtacaaccaggcg

SEQ ID NO: 81436 - DNA, 60 bp, Artificial
  Synthetic oligonucleotide
tacaaccaggcgataatatcaccttctcacacaatggaggtctgatagcgccgagtcgag

SEQ ID NO: 81437 - DNA, 58 bp, Artificial
  Synthetic oligonucleotide
ggagagcataaggaacaacacctacgaccactcacaatacagagaagaagcccttttg

SEQ ID NO: 81438 - DNA, 60 bp, Artificial
  Synthetic oligonucleotide
ggggcatcatgctttgttcttctagccgttgtcatgggccttgttttcttctgtctgaaa

SEQ ID NO: 81439 - DNA, 60 bp, Artificial
  Synthetic oligonucleotide
gacgggaaggggtgctttgagatatatcatacttgtgacgattcgtgcatggagagcata

SEQ ID NO: 81440 - DNA, 60 bp, Artificial
  Synthetic oligonucleotide
gggaaggggtgctttgagatatatcatacttgtgacgattcgtgcatggagagcataagg

SEQ ID NO: 81441 - DNA, 57 bp, Artificial
  Synthetic oligonucleotide
aagccttacaactattgcttgaagtggagcaagagataagaactttctcgtttcagc

SEQ ID NO: 81442 - DNA, 60 bp, Artificial
  Synthetic oligonucleotide
ccctagtagttcatacagaaggccagttggaatttccagcatggtggaggccatggtgtc

SEQ ID NO: 81443 - DNA, 60 bp, Artificial
  Synthetic oligonucleotide
ccccagtagttcatacagaaggccagttggaatttccagcatggtggaggccatggtgtc

SEQ ID NO: 81444 - DNA, 60 bp, Artificial
  Synthetic oligonucleotide
gagggatggatcaactctcctaaccatgccaaatcaattacacaaacactggtgtccaac

SEQ ID NO: 81445 - DNA, 60 bp, Artificial
  Synthetic oligonucleotide
gttacagaggggtggatcaactctcccaatcatgccaaatcaattacacaaacactggtg

SEQ ID NO: 81446 - DNA, 60 bp, Artificial
  Synthetic oligonucleotide
ttgacgggaaagaatggatgcatgtatgcatgacagggaacgataatgatgcaagtgctc

SEQ ID NO: 81447 - DNA, 60 bp, Artificial
  Synthetic oligonucleotide
tttgatggaaaagagtggatgcacgtatgcatgacagggaacgataatgatgcaagtgcc

SEQ ID NO: 81448 - DNA, 60 bp, Artificial
  Synthetic oligonucleotide
gatggaaaagagtggatgcacgtatgcatgacagggaacgataatgatgcaagtgcccag

SEQ ID NO: 81449 - DNA, 60 bp, Artificial
  Synthetic oligonucleotide
gacgggaaagaatggatgcatgtatgcatgacagggaacgataatgatgcaagtgctcaa

SEQ ID NO: 81450 - DNA, 60 bp, Artificial
  Synthetic oligonucleotide
gaggggtggatcaactctcccaatcatgccaaatcaattacacaaacactggtgtccaac

SEQ ID NO: 81451 - DNA, 60 bp, Artificial
  Synthetic oligonucleotide
cactgtgtcaagctttcaggtagactgctttctttggcatgtccgcaaacgatttgcaga

SEQ ID NO: 81452 - DNA, 60 bp, Artificial
  Synthetic oligonucleotide
gtcccatccagggatctttgaaaactcgtgtcttgaaacgatggaagttgttcaacaaac

SEQ ID NO: 81453 - DNA, 60 bp, Artificial
  Synthetic oligonucleotide
caacacatgggcccgaaacatactaaggacacaagaatctgaatgcgtatgccacaacgg

SEQ ID NO: 81454 - DNA, 60 bp, Artificial
  Synthetic oligonucleotide
gtcaagtctctaaagcttgccacgggactcagaaatgtcccagcaatagcatcaagaggc

SEQ ID NO: 81455 - DNA, 60 bp, Artificial
  Synthetic oligonucleotide
ggatggtacgggtttcaacataggaatgaagaaggaacaggcatagcagcagacaaggag

SEQ ID NO: 81456 - DNA, 60 bp, Artificial
  Synthetic oligonucleotide
cacactgggtcattctgttcaatcaatgggaaacaaccaataagccttggagattgctcc

SEQ ID NO: 81457 - DNA, 60 bp, Artificial
  Synthetic oligonucleotide
agtctaatggtgcattcctggctcctagatatgcttttgagattgtctccgttgggaatg

SEQ ID NO: 81458 - DNA, 60 bp, Artificial
  Synthetic oligonucleotide
gagattcataccagaaatcagcactaggcccaaagttaatggacaggctggacggatgac

SEQ ID NO: 81459 - DNA, 60 bp, Artificial
  Synthetic oligonucleotide
gctccaattccttcttccgacacatggtatggctgatacaccaatcaggaacataccctg

SEQ ID NO: 81460 - DNA, 60 bp, Artificial
  Synthetic oligonucleotide
gtggagtcctggaattcagcaaattcgaagcattcacatcaaacggatggggtgctgtga

SEQ ID NO: 81461 - DNA, 60 bp, Artificial
  Synthetic oligonucleotide
cggatggggtgctgtgaattcaggagcaggagtgactgctgcatgcaagtttgggagctc

SEQ ID NO: 81462 - DNA, 60 bp, Artificial
  Synthetic oligonucleotide
ggaacaggcatagcagcagacaaggagtcaactcagaaggcaatagaccagataacgtcc

SEQ ID NO: 81463 - DNA, 60 bp, Artificial
  Synthetic oligonucleotide
agatgtgttggttgtttggggaattcaccaccctgccacactgaaagagcatcaggatct

SEQ ID NO: 81464 - DNA, 60 bp, Artificial
  Synthetic oligonucleotide
atcaatcgtcaggagatcgagggagtgaaattagactctagtgggaatgtgtataaaata

SEQ ID NO: 81465 - DNA, 60 bp, Artificial
  Synthetic oligonucleotide
gcaatacgaattcagtgaaatagaggagaggataaaccagttgtcgaaacatgtagatga

SEQ ID NO: 81466 - DNA, 60 bp, Artificial
  Synthetic oligonucleotide
ccataagtgtgataacgaatgcatcgaaagggttagaaatggaacatatgatcacaagga

SEQ ID NO: 81467 - DNA, 60 bp, Artificial
  Synthetic oligonucleotide
caatttacagctgcattgcaagcagtctcgtattggcagcactcatcatgggtttcatcc

SEQ ID NO: 81468 - DNA, 60 bp, Artificial
  Synthetic oligonucleotide
gagaagaccctggacctccacgattccaatgtcagaagtctccatgagaaggttagaagg

SEQ ID NO: 81469 - DNA, 60 bp, Artificial
  Synthetic oligonucleotide
gctctaccaaatgtcaaacagaaataggaggaattaatacaaacaaaagctttcacagtg

SEQ ID NO: 81470 - DNA, 60 bp, Artificial
  Synthetic oligonucleotide
gagaggcagttcaggaatcatgaaaacagaaggaacacttgagaactgtgagaccaaatg

SEQ ID NO: 81471 - DNA, 60 bp, Artificial
  Synthetic oligonucleotide
tcaaaatatcaaagagaggcagttcaggaatcatgaaaacagaaggaacacttgagaact

SEQ ID NO: 81472 - DNA, 60 bp, Artificial
  Synthetic oligonucleotide
ccaaggacatccttgagaaaacccataacggaaaattatgcaaactaaatggaatccctc

SEQ ID NO: 81473 - DNA, 60 bp, Artificial
  Synthetic oligonucleotide
ccgaaacggtcgacacaattctagagcggaatgtcactgtgacccatgccaaggacatcc

SEQ ID NO: 81474 - DNA, 60 bp, Artificial
  Synthetic oligonucleotide
taccgaaacggtcgacacaattctagagcggaatgtcactgtgacccatgccaaggacat

SEQ ID NO: 81475 - DNA, 60 bp, Artificial
  Synthetic oligonucleotide
gaaaggggaccagatatgcattgggtaccatgccaataactctaccgaaacggtcgacac

SEQ ID NO: 81476 - DNA, 60 bp, Artificial
  Synthetic oligonucleotide
acagtagtgaaaggggaccagatatgcattgggtaccatgccaataactctaccgaaacg

SEQ ID NO: 81477 - DNA, 60 bp, Artificial
  Synthetic oligonucleotide
caaccaatggccatcatttatttcattctcctactcacagtagtgaaaggggaccagata

SEQ ID NO: 81478 - DNA, 60 bp, Artificial
  Synthetic oligonucleotide
gcaaacaatggccatcatttatttcattctcctactcacagtagtgaaaggggaccagat

SEQ ID NO: 81479 - DNA, 60 bp, Artificial
  Synthetic oligonucleotide
ggtcgatccctgaaatagcaacacggcctaatgtgaatgggcagggaggtagaatggagt

SEQ ID NO: 81480 - DNA, 60 bp, Artificial
  Synthetic oligonucleotide
ttgccacccaaaagcaaacaatggccatcatttatttcattctcctactcacagtagtga

SEQ ID NO: 81481 - DNA, 60 bp, Artificial
  Synthetic oligonucleotide
ggatcaaattacccggttgccaaagggtcgtataacaatacaaatggagagcaaatactg

SEQ ID NO: 81482 - DNA, 60 bp, Artificial
  Synthetic oligonucleotide
ttgatggttggtatggatatcatcacagtaatgatcaagggtcaggatatgcagcagaca

SEQ ID NO: 81483 - DNA, 60 bp, Artificial
  Synthetic oligonucleotide
ggatatcatcacagtaatgatcaagggtcaggatatgcagcagacaaagaatccactcaa

SEQ ID NO: 81484 - DNA, 60 bp, Artificial
  Synthetic oligonucleotide
gcagcagacaaagaatccactcaaaaggcggttgacggaatcactaacaaggtgaattct

SEQ ID NO: 81485 - DNA, 60 bp, Artificial
  Synthetic oligonucleotide
gcagacaaagaatccactcaaaaggcggttgacggaatcactaacaaggtgaattctgtg

SEQ ID NO: 81486 - DNA, 60 bp, Artificial
  Synthetic oligonucleotide
ctggtcttagcaacaggattaaggaatgtcccacaaatggaatcaagagggttgtttggg

SEQ ID NO: 81487 - DNA, 60 bp, Artificial
  Synthetic oligonucleotide
ggtcttagcaacaggattaaggaatgtcccacaaatggaatcaagagggttgtttggggc

SEQ ID NO: 81488 - DNA, 60 bp, Artificial
  Synthetic oligonucleotide
tggatttcttgatgtgtggacatacaatgctgagctcttagttctgatggaaaatgagag

SEQ ID NO: 81489 - DNA, 60 bp, Artificial
  Synthetic oligonucleotide
ggatcaaattacccggttgcccaagggtcgtataacaatacaaatggagagcaaatactg

SEQ ID NO: 81490 - DNA, 60 bp, Artificial
  Synthetic oligonucleotide
gagaaaggatcaaattacccggttgccaaagggtcgtataacaatacaaatggagagcaa

SEQ ID NO: 81491 - DNA, 52 bp, Artificial
  Synthetic oligonucleotide
aaaacgggacatatgattatcccaagtatgaagaagagtctagattaaatag

SEQ ID NO: 81492 - DNA, 60 bp, Artificial
  Synthetic oligonucleotide
cattgaacaaaaggtcgatccctgaaatagcaacacggcctaatgtgaatgggcagggag

SEQ ID NO: 81493 - DNA, 60 bp, Artificial
  Synthetic oligonucleotide
aagaaaggatcaaattacccggttgccaaagggtcgtataacaatacaaatggagagcaa

SEQ ID NO: 81494 - DNA, 60 bp, Artificial
  Synthetic oligonucleotide
aagaaaggatcaaattacccggttgcccaagggtcgtataacaatacaaatggagagcaa

SEQ ID NO: 81495 - DNA, 60 bp, Artificial
  Synthetic oligonucleotide
atgtgacagactcctgaatgtaccagaatggtcctacataatggagaaagaaaatccaag

SEQ ID NO: 81496 - DNA, 60 bp, Artificial
  Synthetic oligonucleotide
gggcagggaggtagaatggagttttcttggacccttttggatatgtgggacaccataaat

SEQ ID NO: 81497 - DNA, 60 bp, Artificial
  Synthetic oligonucleotide
agaaaacccataacggaaaattatgcaaactaaatggaatccctccacttgaactagggg

SEQ ID NO: 81498 - DNA, 60 bp, Artificial
  Synthetic oligonucleotide
cagaatgtgacagactcctgaatgtaccagaatggtcctacataatggagaaagaaaatc

SEQ ID NO: 81499 - DNA, 60 bp, Artificial
  Synthetic oligonucleotide
gcaacccatcattcttcaggaacatggtctggctgacaaagaaaggatcaaattacccgg

SEQ ID NO: 81500 - DNA, 60 bp, Artificial
  Synthetic oligonucleotide
gcaacccatcattcttcaggaacatggtctggctgacagagaaaggatcaaattacccgg

SEQ ID NO: 81501 - DNA, 60 bp, Artificial
  Synthetic oligonucleotide
gtgcagtatctggcaacccatcattcttcaggaacatggtctggctgacaaagaaaggat

SEQ ID NO: 81502 - DNA, 60 bp, Artificial
  Synthetic oligonucleotide
ttgccacccaaaaacaaccaatggccatcatttatttcattctcctactcacagtagtga

SEQ ID NO: 81503 - DNA, 60 bp, Artificial
  Synthetic oligonucleotide
gtgcagtatctggcaacccatcattcttcaggaacatggtctggctgacagagaaaggat

SEQ ID NO: 81504 - DNA, 60 bp, Artificial
  Synthetic oligonucleotide
gcagttgagagacaatgctaaagaaataggaaacggatgttttgaattttaccacaaatg

SEQ ID NO: 81505 - DNA, 60 bp, Artificial
  Synthetic oligonucleotide
gataaagtcagaatgcagttgagagacaatgctaaagaaataggaaacggatgttttgaa

SEQ ID NO: 81506 - DNA, 60 bp, Artificial
  Synthetic oligonucleotide
ggacacttgactttcatgattctaatgtcaggaatctgtacgataaagtcagaatgcagt

SEQ ID NO: 81507 - DNA, 60 bp, Artificial
  Synthetic oligonucleotide
taaaattgagcaacatgggggtttaccaagtccttgccatttacgctacagtagcaggtt

SEQ ID NO: 81508 - DNA, 60 bp, Artificial
  Synthetic oligonucleotide
taaaattgagcaacatgggggtttaccaagtccttgctatttacgctacagtagcaggtt

SEQ ID NO: 81509 - DNA, 60 bp, Artificial
  Synthetic oligonucleotide
gcccagggatagatgggcacagcatacaacaactggaggttcacgagcctgtgcagtatc

SEQ ID NO: 81510 - DNA, 58 bp, Artificial
  Synthetic oligonucleotide
ggggtttaccaagtccttgctatttacgctacagtagcaggttccctgtcactggcaa

SEQ ID NO: 81511 - DNA, 58 bp, Artificial
  Synthetic oligonucleotide
ggggtttaccaagtccttgccatttacgctacagtagcaggttccctgtcactggcaa

SEQ ID NO: 81512 - DNA, 60 bp, Artificial
  Synthetic oligonucleotide
cacagattgagactagaggacttttcggagctatcgcagggtttattgaaggaggatgga

SEQ ID NO: 81513 - DNA, 60 bp, Artificial
  Synthetic oligonucleotide
cagctcaaaatgggatctgctacccaggaattttgaatgaagtagaagaactgaaggcac

SEQ ID NO: 81514 - DNA, 60 bp, Artificial
  Synthetic oligonucleotide
gagactagaggacttttcggagctatcgcagggtttattgaaggaggatggactggaatg

SEQ ID NO: 81515 - DNA, 60 bp, Artificial
  Synthetic oligonucleotide
ttctcaaggctcagggtatgcggcagacagagaaagcactcaaagggctatagacggaat

SEQ ID NO: 81516 - DNA, 60 bp, Artificial
  Synthetic oligonucleotide
tctgaacaaaagaatggaagatggatttctggacgtttggacatacaatgccgaactgtt

SEQ ID NO: 81517 - DNA, 60 bp, Artificial
  Synthetic oligonucleotide
acaaataaggtcaattccatcatagacaaaatgaacacacaattcgaagctgtagaccac

SEQ ID NO: 81518 - DNA, 60 bp, Artificial
  Synthetic oligonucleotide
tctcgatttaagaggatgtaccatagagggttggatcttggggaatccccaatgcgacct

SEQ ID NO: 81519 - DNA, 60 bp, Artificial
  Synthetic oligonucleotide
gtccgcagcatatccagtaattaagggaacctacaataacactggaagccagccaatcct

SEQ ID NO: 81520 - DNA, 60 bp, Artificial
  Synthetic oligonucleotide
gcagtggggtaacaaaggcttgcccttatactagtggttcgtctttctacagaaacctcc

SEQ ID NO: 81521 - DNA, 60 bp, Artificial
  Synthetic oligonucleotide
gtggagagatttgaaatgtttcccaaaagtacatgggcaggagtagacaccagcagtggg

SEQ ID NO: 81522 - DNA, 59 bp, Artificial
  Synthetic oligonucleotide
ctagacctgcatgacgcgaatgtgaagaacctgtatgaaaaggtcaaatcacaactacg

SEQ ID NO: 81523 - DNA, 60 bp, Artificial
  Synthetic oligonucleotide
tttggacatacaatgccgaactgttggttcttcttgaaaatgaaaggacactagacctgc

SEQ ID NO: 81524 - DNA, 60 bp, Artificial
  Synthetic oligonucleotide
gccgaactgttggttcttcttgaaaatgaaaggacactagacctgcatgacgcgaatgtg

SEQ ID NO: 81525 - DNA, 60 bp, Artificial
  Synthetic oligonucleotide
aataaaacatttcagaatgtaagtcctctgtggataggagaatgccccaaatatgtgaaa

SEQ ID NO: 81526 - DNA, 60 bp, Artificial
  Synthetic oligonucleotide
atatgtgaaaagtgaaagtttgaggcttgcaactggattaagaaatgttccacagattga

SEQ ID NO: 81527 - DNA, 60 bp, Artificial
  Synthetic oligonucleotide
gtgtatcaaattctcgccatttatagtacggtatcgagcagtctagtcttggtagggctg

SEQ ID NO: 81528 - DNA, 60 bp, Artificial
  Synthetic oligonucleotide
ggaatctaatggaaatctaatcgccccttggtatgcatacaaatttgtcagcaccaatag

SEQ ID NO: 81529 - DNA, 60 bp, Artificial
  Synthetic oligonucleotide
tcgagaactgtgatgccacatgccagactattgcaggagtcttaagaaccaataaaacat

SEQ ID NO: 81530 - DNA, 60 bp, Artificial
  Synthetic oligonucleotide
ggctctggtgatcgatatgtcaggatgggaactgaaagcatgaattttgccaagagccca

SEQ ID NO: 81531 - DNA, 60 bp, Artificial
  Synthetic oligonucleotide
aagcatgaattttgccaagagcccagaaattgcggcaaggcctgctgtgaatggtcaaag

SEQ ID NO: 81532 - DNA, 60 bp, Artificial
  Synthetic oligonucleotide
gccaagagcccagaaattgcggcaaggcctgctgtgaatggtcaaagaggcagaattgat

SEQ ID NO: 81533 - DNA, 60 bp, Artificial
  Synthetic oligonucleotide
atggtcaaagaggcagaattgattattactggtctgttttaaagccgggggaaaccttga

SEQ ID NO: 81534 - DNA, 60 bp, Artificial
  Synthetic oligonucleotide
atgattgcagtcattataatagcggtactggcaacggccggaaaatcagacaagatctgc

SEQ ID NO: 81535 - DNA, 60 bp, Artificial
  Synthetic oligonucleotide
tctggggtgtgcaccatcctcctgacaccaatgagcaaaacactttgtatggctctggtg

SEQ ID NO: 81536 - DNA, 54 bp, Artificial
  Synthetic oligonucleotide
cgatacttgagaagaatgtaaccgtcacacactcagttgaattgctagagaacc

SEQ ID NO: 81537 - DNA, 60 bp, Artificial
  Synthetic oligonucleotide
tgtcgcaatctcgcactcgcgagatactgacaaaaaccactgtggaccatatggccataa

SEQ ID NO: 81538 - DNA, 60 bp, Artificial
  Synthetic oligonucleotide
ccctagtactggcaatcatgatagctggtctatctttctggatgtgctccaatggatcac

SEQ ID NO: 81539 - DNA, 60 bp, Artificial
  Synthetic oligonucleotide
gacacgttaaaaagctggaagggtaatattatgcgaacacaagagtctgaatgcgtatgc

SEQ ID NO: 81540 - DNA, 53 bp, Artificial
  Synthetic oligonucleotide
aaaagctggaagggtaatattatgcgaacacaagagtctgaatgcgtatgcca

SEQ ID NO: 81541 - DNA, 60 bp, Artificial
  Synthetic oligonucleotide
ccccaatgtggttcactactctagtggaagagacttgtgcccagtaaaggggtgggcacc

SEQ ID NO: 81542 - DNA, 56 bp, Artificial
  Synthetic oligonucleotide
tagtgaatgcaggacttttttcttaactcagggagccctcctcaatgacaagcact

SEQ ID NO: 81543 - DNA, 60 bp, Artificial
  Synthetic oligonucleotide
gtgacccaaccgcatgaacaagcctgttcgaacaacacaacgaattactataatgagacc

SEQ ID NO: 81544 - DNA, 60 bp, Artificial
  Synthetic oligonucleotide
gaaccctcagcccccaatgtggttcactactctagtggaagagacttgtgcccagtaaag

SEQ ID NO: 81545 - DNA, 60 bp, Artificial
  Synthetic oligonucleotide
ccagataacaagtttatgctcaatatggtttagccattacaaccaagtgacccaaccgca

SEQ ID NO: 81546 - DNA, 60 bp, Artificial
  Synthetic oligonucleotide
acaaccaagtgacccaaccgcatgaacaagcctgttcgaacaacacaacgaattactata

SEQ ID NO: 81547 - DNA, 60 bp, Artificial
  Synthetic oligonucleotide
aatagtaagtgtgaaggatgtgaatgcaacagggtttcattttgaagaatgttcctgtta

SEQ ID NO: 81548 - DNA, 60 bp, Artificial
  Synthetic oligonucleotide
gtttggatagggaggacaaaaagcttggaatccagaagcggttttgagatggtctgggat

SEQ ID NO: 81549 - DNA, 60 bp, Artificial
  Synthetic oligonucleotide
gacaacaacaattggtctggttacagcggaagcttcagcattagatgggagacaacaggc

SEQ ID NO: 81550 - DNA, 60 bp, Artificial
  Synthetic oligonucleotide
tacaggatattatagacaacaacaattggtctggttacagcggaagcttcagcattagat

SEQ ID NO: 81551 - DNA, 60 bp, Artificial
  Synthetic oligonucleotide
ggtctgggatgctaatgggtgggtatcgacagacaaggattcaaatggtgtacaggatat

SEQ ID NO: 81552 - DNA, 57 bp, Artificial
  Synthetic oligonucleotide
aaaagcttggaatccagaagcggttttgagatggtctgggatgctaatgggtgggta

SEQ ID NO: 81553 - DNA, 60 bp, Artificial
  Synthetic oligonucleotide
tggaccagcattgagcatcaacgaattgagcaatcttgcgaaaggggagaaggctaatgt

SEQ ID NO: 81554 - DNA, 60 bp, Artificial
  Synthetic oligonucleotide
ctgttccaccattgaagagctcagacggcagaaatagtgaatttggcttgtccttcatga

SEQ ID NO: 81555 - DNA, 60 bp, Artificial
  Synthetic oligonucleotide
atgggttccaacatagaaatgaagaaggtacagggattgctgcagacaaagaatcaaccc

SEQ ID NO: 81556 - DNA, 60 bp, Artificial
  Synthetic oligonucleotide
gggttccaacatagaaatgaagaaggtacagggattgctgcagacaaagaatcaacccag

SEQ ID NO: 81557 - DNA, 60 bp, Artificial
  Synthetic oligonucleotide
gtgaggaaaatgatgactaattcacaagacacagagctctcctttacaattactggagac

SEQ ID NO: 81558 - DNA, 56 bp, Artificial
  Synthetic oligonucleotide
cattagatctccatgattctaatgttcgaaacctccatgaaaaggtcagacgaatg

SEQ ID NO: 81559 - DNA, 57 bp, Artificial
  Synthetic oligonucleotide
acattagatctccatgattctaatgttcgaaacctccatgaaaaggtcagacgaatg

SEQ ID NO: 81560 - DNA, 60 bp, Artificial
  Synthetic oligonucleotide
aaaacattggatctccatgattctaatgttcgaaacctccatgaaaaggtcagacgaatg

SEQ ID NO: 81561 - DNA, 60 bp, Artificial
  Synthetic oligonucleotide
ccaatggatcattgcagtgcagaatttgcatttaaacttgtgagttcagattgtagttaa

SEQ ID NO: 81562 - DNA, 60 bp, Artificial
  Synthetic oligonucleotide
atgctgtggtgatgccagctcatggcccagccaagagcatggaatatgatgctgttgcca

SEQ ID NO: 81563 - DNA, 60 bp, Artificial
  Synthetic oligonucleotide
atcagccggctgcaactgcattagctaatactatagaggtcttcagatcgaatggtctga

SEQ ID NO: 81564 - DNA, 60 bp, Artificial
  Synthetic oligonucleotide
ttctgttcttgacatatggtcatacaacgcacagcttcttgttctattggaaaatgaaaa

SEQ ID NO: 81565 - DNA, 60 bp, Artificial
  Synthetic oligonucleotide
atctgttccaccattgaagagctcagacggcagaaacagtgaatttagcttgtccttcat

SEQ ID NO: 81566 - DNA, 60 bp, Artificial
  Synthetic oligonucleotide
atctgttccaccattgaagagctcagacggcagaaatagtgaatttagctgtccttcatg

SEQ ID NO: 81567 - DNA, 60 bp, Artificial
  Synthetic oligonucleotide
ggatgtcaatccgactttactcttcttgaaagtgccagcgcaaaatgctataagtaccac

SEQ ID NO: 81568 - DNA, 60 bp, Artificial
  Synthetic oligonucleotide
ggatgtcaatccgactttactcttcttgaaagtgccagcgcaaaatgctataagtactac

SEQ ID NO: 81569 - DNA, 60 bp, Artificial
  Synthetic oligonucleotide
atggcccagcattgagcatcaatgaactgagcaatcttgcaaagggggagaaggctaacg

SEQ ID NO: 81570 - DNA, 60 bp, Artificial
  Synthetic oligonucleotide
ggaaggttctacatacagatgtgcactgaactcaaactcagcgattatgaagggaggctg

SEQ ID NO: 81571 - DNA, 60 bp, Artificial
  Synthetic oligonucleotide
attgggagattctacatacagatgtgcactgaactcaaactcagcgactatgaaggaagg

SEQ ID NO: 81572 - DNA, 60 bp, Artificial
  Synthetic oligonucleotide
gggagattctacatacagatgtgcactgaactcaaactcagcgactatgaaggaaggctg

SEQ ID NO: 81573 - DNA, 60 bp, Artificial
  Synthetic oligonucleotide
gggagattctacatacagatgtgcactgaactcaaactcagcgactatgaagggaggttg

SEQ ID NO: 81574 - DNA, 60 bp, Artificial
  Synthetic oligonucleotide
gggagattctacatacagatgtgcactgaactcaaactcagcgactatgaaggaagactg

SEQ ID NO: 81575 - DNA, 60 bp, Artificial
  Synthetic oligonucleotide
gagacgaagcaatcaataacagattccagatacaaggagttagattgactcaaggataca

SEQ ID NO: 81576 - DNA, 60 bp, Artificial
  Synthetic oligonucleotide
gacttcgagtctgggcggattaagaaagaagagttcgctgagatcatgaagatctgttcc

SEQ ID NO: 81577 - DNA, 60 bp, Artificial
  Synthetic oligonucleotide
cgagtctgggcggattaagaaagaagagttcgctgagatcatgaagatctgttccaccat

SEQ ID NO: 81578 - DNA, 60 bp, Artificial
  Synthetic oligonucleotide
ttcgaatctggaaggataaagaaagaggagttcgctgagatcatgaagatctgttccacc

SEQ ID NO: 81579 - DNA, 60 bp, Artificial
  Synthetic oligonucleotide
ccaatgggacaatggtgaaaaccttgactgatgaccaagtagaagttgtcactgcccagg

SEQ ID NO: 81580 - DNA, 60 bp, Artificial
  Synthetic oligonucleotide
ggctaacgtgctaattgggcaaggagacgtagtgttggtaatgaaacggaaacgggactc

SEQ ID NO: 81581 - DNA, 60 bp, Artificial
  Synthetic oligonucleotide
gaagaggagtccaaactgaatagacaagaaattgagggagtgaaactggattccaatggc

SEQ ID NO: 81582 - DNA, 60 bp, Artificial
  Synthetic oligonucleotide
gagtccaaactgaatagacaagaaattgagggagtgaaactggattccaatggcaacgtt

SEQ ID NO: 81583 - DNA, 60 bp, Artificial
  Synthetic oligonucleotide
gtcaactcaatcattgacaaaatgaacactcaattcgaagccgttgggaaagaattcaac

SEQ ID NO: 81584 - DNA, 60 bp, Artificial
  Synthetic oligonucleotide
aatggttgtttcgagttctatcacaaatgtgacaatgaatgtatggaaagtgtgaaaaac

SEQ ID NO: 81585 - DNA, 60 bp, Artificial
  Synthetic oligonucleotide
gccatatagaagaatgctcatgctaccccaatgaaggtaaagttgaatgtgtttgtagag

SEQ ID NO: 81586 - DNA, 60 bp, Artificial
  Synthetic oligonucleotide
ggaggccatatagaagaatgctcatgctaccccaatgaagggaaagtggagtgtgtttgc

SEQ ID NO: 81587 - DNA, 60 bp, Artificial
  Synthetic oligonucleotide
caatggaggccatatagaagaatgctcatgctaccccaatgaagggaaagtggagtgtgt

SEQ ID NO: 81588 - DNA, 60 bp, Artificial
  Synthetic oligonucleotide
tgtggacatcgatgtgtactgcatatgtagggacaattggaaaggttccaacagaccttg

SEQ ID NO: 81589 - DNA, 60 bp, Artificial
  Synthetic oligonucleotide
attggaaaggttccaacagaccttggatgaggatcaacaatgagaccatactagaaacag

SEQ ID NO: 81590 - DNA, 60 bp, Artificial
  Synthetic oligonucleotide
ggagtgttcctgctatgtggacatcgatgtttactgcatatgtagggacaattggaaagg

SEQ ID NO: 81591 - DNA, 60 bp, Artificial
  Synthetic oligonucleotide
gggagattctacatacagatgtgcactgaactcaagctcagcgactatgaagggaggcta

SEQ ID NO: 81592 - DNA, 60 bp, Artificial
  Synthetic oligonucleotide
attggaagattctacatacagatgtgcactgaactcaagctcagcgactatgaagggaga

SEQ ID NO: 81593 - DNA, 60 bp, Artificial
  Synthetic oligonucleotide
acactccaagaggagaagatagtcagttcacaggatcctgcactagccccgtgggaaacc

SEQ ID NO: 81594 - DNA, 60 bp, Artificial
  Synthetic oligonucleotide
cagagtcggatacttgtgtgcaggtctccccagtgacactccaagaggagaagatagtca

SEQ ID NO: 81595 - DNA, 60 bp, Artificial
  Synthetic oligonucleotide
gatgaatccaaatcagaagattctatgcacttcagccactgctatcgtaataggcacaat

SEQ ID NO: 81596 - DNA, 60 bp, Artificial
  Synthetic oligonucleotide
gtgcaatagctggtttcatagaaggtggttggccaggtttaatcaatggttggtatggat

SEQ ID NO: 81597 - DNA, 60 bp, Artificial
  Synthetic oligonucleotide
gggtggttggccaggtttaatcaatggttggtatgggttccaacatagaaatgaagaagg

SEQ ID NO: 81598 - DNA, 60 bp, Artificial
  Synthetic oligonucleotide
caccgatctagaggctctcatggaatggctaaagacaagaccaatcctgtcacctctgac

SEQ ID NO: 81599 - DNA, 55 bp, Artificial
  Synthetic oligonucleotide
gttgacggtcagacctgtgatatcatcaatggagcattaggaagtccaggatgcg

SEQ ID NO: 81600 - DNA, 60 bp, Artificial
  Synthetic oligonucleotide
caacgaattgagcaatcttgcgaaaggggagaaagctaatgtgttgatagggcaaggaga

SEQ ID NO: 81601 - DNA, 60 bp, Artificial
  Synthetic oligonucleotide
aacgaattgagcaatcttgcgaaaggggagaaagctaatgtgttgatagggcaaggagac

SEQ ID NO: 81602 - DNA, 60 bp, Artificial
  Synthetic oligonucleotide
tggaccacatggccataatcaagaaatacacatcaggaagacaggagaagaatcctgctc

SEQ ID NO: 81603 - DNA, 60 bp, Artificial
  Synthetic oligonucleotide
tcaaactttcaggtagactgctttctttggcatgtccgcaaacgatttgcagaccaagaa

SEQ ID NO: 81604 - DNA, 60 bp, Artificial
  Synthetic oligonucleotide
tcaggtagactgctttctttggcatgtccgcaaacgatttgcagaccaagaactgggtga

SEQ ID NO: 81605 - DNA, 60 bp, Artificial
  Synthetic oligonucleotide
gggttagccattcgatccagactggaagtcaaaaccatcctgaaacatgcaatcaaagtg

SEQ ID NO: 81606 - DNA, 60 bp, Artificial
  Synthetic oligonucleotide
atctcaatatgggttagccattcgatccagactggaagtcaaaaccatcctgaaacatgc

SEQ ID NO: 81607 - DNA, 60 bp, Artificial
  Synthetic oligonucleotide
cgagttgaatgctcctaattaccactatgaggagtgttcctgttatcctgatgctagcga

SEQ ID NO: 81608 - DNA, 60 bp, Artificial
  Synthetic oligonucleotide
ggtaatcaaatcagtcgagttgaatgctcctaattaccactatgaggagtgttcctgtta

SEQ ID NO: 81609 - DNA, 60 bp, Artificial
  Synthetic oligonucleotide
cctgatgctagcgaggtaatgtgtgtatgcagagacaactggcatggttcgaatcgacca

SEQ ID NO: 81610 - DNA, 60 bp, Artificial
  Synthetic oligonucleotide
ccaaataggatacatatgcagcggggtttttggagacaatccacgccccaatgatggaac

SEQ ID NO: 81611 - DNA, 60 bp, Artificial
  Synthetic oligonucleotide
cgaccatgggtgtctttcaatcagaatctagactaccaaataggatacatatgcagcggg

SEQ ID NO: 81612 - DNA, 60 bp, Artificial
  Synthetic oligonucleotide
aatcaaacatacatcaacataagtaatatcaatttggttgctgaacaagttgtagctccg

SEQ ID NO: 81613 - DNA, 60 bp, Artificial
  Synthetic oligonucleotide
aacataagtaatatcaatttggttgctgaacaagttgtagctccggtaacactagcaggc

SEQ ID NO: 81614 - DNA, 60 bp, Artificial
  Synthetic oligonucleotide
gactcaaggggccttgttgaatgacaagcattccaatggaaccgttaaagacagaagtcc

SEQ ID NO: 81615 - DNA, 60 bp, Artificial
  Synthetic oligonucleotide
atggaaccgttaaagacagaagtccctatagaacattaatgagctgtcctgttggtgaag

SEQ ID NO: 81616 - DNA, 60 bp, Artificial
  Synthetic oligonucleotide
gatgtatttgtcatcagagagccatttatttcgtgctctcacttggaatgcaggactttc

SEQ ID NO: 81617 - DNA, 60 bp, Artificial
  Synthetic oligonucleotide
agagagccatttatttcgtgctctcacttggaatgcaggactttctttctgactcaaggg

SEQ ID NO: 81618 - DNA, 60 bp, Artificial
  Synthetic oligonucleotide
gacagaagtccctatagaacattaatgagctgtcctgttggtgaagctccctctccatac

SEQ ID NO: 81619 - DNA, 60 bp, Artificial
  Synthetic oligonucleotide
tgcttggggaagcagtaatgagaatgggagacctccattcgctccaaaacaggaacggaa

SEQ ID NO: 81620 - DNA, 60 bp, Artificial
  Synthetic oligonucleotide
gggaggcaagagaagaaccccgcactcaggatgaaatggatgatggcaatgaaatatcca

SEQ ID NO: 81621 - DNA, 60 bp, Artificial
  Synthetic oligonucleotide
ttaagtcccggaatgatgatgggcatgttcaacatgctaagtacagttttgggagtctca

SEQ ID NO: 81622 - DNA, 53 bp, Artificial
  Synthetic oligonucleotide
ccagttggaatttccagcatggtggaggccatggtgtctagggcccgaattga

SEQ ID NO: 81623 - DNA, 60 bp, Artificial
  Synthetic oligonucleotide
cccaggggacatgctgggagcagatgtacactccaggaggggaagtgagaaatgacgatg

SEQ ID NO: 81624 - DNA, 60 bp, Artificial
  Synthetic oligonucleotide
tcaagatgaatccaaatcagaagattctatgcacttctgccactgctattgtaataggca

SEQ ID NO: 81625 - DNA, 60 bp, Artificial
  Synthetic oligonucleotide
caagatgaatccaaatcagaagattctatgcacttctgccactgctattgtaataggcat

SEQ ID NO: 81626 - DNA, 60 bp, Artificial
  Synthetic oligonucleotide
caccgagtgacatccatatcatggcgtctcaaggcaccaaacgatcttatgagcagatgg

SEQ ID NO: 81627 - DNA, 60 bp, Artificial
  Synthetic oligonucleotide
ctggcaatcatggtagctggtctatctttctggatgtgctccaatggatcattgcagtgc

SEQ ID NO: 81628 - DNA, 60 bp, Artificial
  Synthetic oligonucleotide
aatagggaatctaattgccccaagaggacattacaagctaaacaatcagaagaagagcac

SEQ ID NO: 81629 - DNA, 60 bp, Artificial
  Synthetic oligonucleotide
aggaaatctaattgccccaagaggacattacaaactaatcaatcagaagaaaagcacaat

SEQ ID NO: 81630 - DNA, 60 bp, Artificial
  Synthetic oligonucleotide
caggaaggctaatagatttcctcaaggatgtgatggaatcaatggataaagaggaaatgg

SEQ ID NO: 81631 - DNA, 60 bp, Artificial
  Synthetic oligonucleotide
ctctattggagatgtgccacagcacacagattggaggaataaggatggtagacattcttc

SEQ ID NO: 81632 - DNA, 60 bp, Artificial
  Synthetic oligonucleotide
gcgggtcatccatcaaaagagaagaagaagtgcttacaggcaacctccaaacattgaaaa

SEQ ID NO: 81633 - DNA, 60 bp, Artificial
  Synthetic oligonucleotide
tagctggtctatctttctggatgtgctccaatggatcattgcagtgcagaatttgcattt

SEQ ID NO: 81634 - DNA, 60 bp, Artificial
  Synthetic oligonucleotide
gctggtctatctttctggatgtgctccaatggatcattgcagtgcagaatttgcatttaa

SEQ ID NO: 81635 - DNA, 60 bp, Artificial
  Synthetic oligonucleotide
aaatctaggacaaaagaggtacaccaaaacaacatactggtgggatggactccaatcctc

SEQ ID NO: 81636 - DNA, 57 bp, Artificial
  Synthetic oligonucleotide
agaatgccactgaaatcagagcatctgttgggagaatggttggcggaatcgggagat

SEQ ID NO: 81637 - DNA, 60 bp, Artificial
  Synthetic oligonucleotide
cgatgtgttccagcacagaattccttggacaatggaactggcctgatggggctaaaatag

SEQ ID NO: 81638 - DNA, 60 bp, Artificial
  Synthetic oligonucleotide
tgtgttccagcacagaattccttggacaatggaactggcctgatggggctaaaatagagt

SEQ ID NO: 81639 - DNA, 60 bp, Artificial
  Synthetic oligonucleotide
gtatcgatgtgttccagcacagaattccttggacaatggaactggcctgatggggctaaa

SEQ ID NO: 81640 - DNA, 60 bp, Artificial
  Synthetic oligonucleotide
gttccagcacagaattccttggacaatggaactggcctgatggggctaaaatagagtact

SEQ ID NO: 81641 - DNA, 60 bp, Artificial
  Synthetic oligonucleotide
ccagcacagaattccttggacaatggaactggcctgatggggctaaaatagagtacttcc

SEQ ID NO: 81642 - DNA, 60 bp, Artificial
  Synthetic oligonucleotide
cagcacagaattccttggacaatggaactggcctgatggggctaaaatagagtacttcct

SEQ ID NO: 81643 - DNA, 60 bp, Artificial
  Synthetic oligonucleotide
gcatcttggttcaactccttcctcacacatgcactgaaatagttgtggcaatgctactgt

SEQ ID NO: 81644 - DNA, 60 bp, Artificial
  Synthetic oligonucleotide
gaatccaaatcagaagattctatgcacttctgccactgctatcgtaataggcacaattgc

SEQ ID NO: 81645 - DNA, 52 bp, Artificial
  Synthetic oligonucleotide
atgccacaacggtgtctgcccggtagtgttcacagatgggtctgccactgga

SEQ ID NO: 81646 - DNA, 58 bp, Artificial
  Synthetic oligonucleotide
aatgcgtatgccacaacggtgtctgcccggtagtgttcacagatgggtctgccactgg

SEQ ID NO: 81647 - DNA, 60 bp, Artificial
  Synthetic oligonucleotide
gcgtatgccacaacggtgtctgcccggtagtgttcacagatgggtctgccactggacctg

SEQ ID NO: 81648 - DNA, 60 bp, Artificial
  Synthetic oligonucleotide
aatctgaatgcgtatgccacaacggtgtctgcccggtagtgttcacagatgggtctgcca

SEQ ID NO: 81649 - DNA, 60 bp, Artificial
  Synthetic oligonucleotide
gaatgcgtatgccacaacggtgtctgcccggtagtgttcacagatgggtctgccactgga

SEQ ID NO: 81650 - DNA, 60 bp, Artificial
  Synthetic oligonucleotide
aaccatttgaatggatgtcaatccgactttacttttcttgaaagtgccggcgcaaaatgc

SEQ ID NO: 81651 - DNA, 60 bp, Artificial
  Synthetic oligonucleotide
gaatgtgtaacattctcaaagggaaatttcaaacagcagcacaacgagcaatgatggacc

SEQ ID NO: 81652 - DNA, 60 bp, Artificial
  Synthetic oligonucleotide
ccaaaagtgctgcaatctattcgagaaattcttccccagtagttcatacaggaggccagt

SEQ ID NO: 81653 - DNA, 50 bp, Artificial
  Synthetic oligonucleotide
ttgcgtcctggaagcaatggctttccttgaagaatcccacccaggaatct

SEQ ID NO: 81654 - DNA, 60 bp, Artificial
  Synthetic oligonucleotide
gtggaagagacgaacagtcaattgctgaagcaataattgtggccatggtattttcacaag

SEQ ID NO: 81655 - DNA, 60 bp, Artificial
  Synthetic oligonucleotide
agttccctagcactggcaatcatgatagctggtctatctttctggatgtgttccaatgga

SEQ ID NO: 81656 - DNA, 60 bp, Artificial
  Synthetic oligonucleotide
agtagcaatggtattttcacaagaggattgcatgataaaagcagtccgaggtgatctgaa

SEQ ID NO: 81657 - DNA, 60 bp, Artificial
  Synthetic oligonucleotide
tgtggcaatggtattttcacaagaggattgcatgataaaagcagtccgaggtgatctgaa

SEQ ID NO: 81658 - DNA, 60 bp, Artificial
  Synthetic oligonucleotide
cttttgacatgagtaatgaaggatcttatttcttcggagacaatgcagaggaatatgaca

SEQ ID NO: 81659 - DNA, 60 bp, Artificial
  Synthetic oligonucleotide
cctttgacatgagtaatgaaggatcttatttcttcggagacaatgcagaggaatatgacc

SEQ ID NO: 81660 - DNA, 60 bp, Artificial
  Synthetic oligonucleotide
caatagtcagtcttgttaaaagtgaccaaatttgcattggttaccatgcaaacaactcga

SEQ ID NO: 81661 - DNA, 60 bp, Artificial
  Synthetic oligonucleotide
agggagactgattcagaacagcataacaatagagagaatggttctctcagcatttgatga

SEQ ID NO: 81662 - DNA, 60 bp, Artificial
  Synthetic oligonucleotide
agggaggctaattcagaacagcataacaatagagagaatggttctctcagcatttgatga

SEQ ID NO: 81663 - DNA, 60 bp, Artificial
  Synthetic oligonucleotide
gttcgagtctctgaaactctacagagatttgcttggagaagcagtaatgaggatgggaga

SEQ ID NO: 81664 - DNA, 60 bp, Artificial
  Synthetic oligonucleotide
cgggaaagcaccgataagtcttggtgattgctcctttgctggatggatccttggaaaccc

SEQ ID NO: 81665 - DNA, 60 bp, Artificial
  Synthetic oligonucleotide
caaacttgtgacatcgtcaatggtgctctggggagcccaggctgtgatcacttgaatggc

SEQ ID NO: 81666 - DNA, 60 bp, Artificial
  Synthetic oligonucleotide
gacaaacttgtgacatcgtcaatggtgctctgggaagcccaggctgtgatcacttgaatg

SEQ ID NO: 81667 - DNA, 60 bp, Artificial
  Synthetic oligonucleotide
agaagagtgctcatgctaccccaatgaaggtaaagtggaatgtgtttgtagggacaactg

SEQ ID NO: 81668 - DNA, 60 bp, Artificial
  Synthetic oligonucleotide
ggctttccttgaagagtcccacccagggatctttgaaaactcgtgtcttgaaacgatgga

SEQ ID NO: 81669 - DNA, 60 bp, Artificial
  Synthetic oligonucleotide
gctttccttgaagagtcccacccagggatctttgaaaactcgtgtcttgaaacgatggaa

SEQ ID NO: 81670 - DNA, 60 bp, Artificial
  Synthetic oligonucleotide
ttacaggcaaccttcaaacattgaaaataagagtacatgaggggtatgaagagttcacaa

SEQ ID NO: 81671 - DNA, 60 bp, Artificial
  Synthetic oligonucleotide
ctcctaccgaagccacaaatgtaagccaaacagtaataaacaattactacaatgaaacga

SEQ ID NO: 81672 - DNA, 60 bp, Artificial
  Synthetic oligonucleotide
tgggacaatacatgatagatctcaatatcgtgccctagtgagttggcctttatcatcacc

SEQ ID NO: 81673 - DNA, 60 bp, Artificial
  Synthetic oligonucleotide
caccacccacagtgtacaataccagaatagaatgcattggatggtccagcacaagctgtc

SEQ ID NO: 81674 - DNA, 60 bp, Artificial
  Synthetic oligonucleotide
ctaatgtcgcagtcccgcactcgcgagatactcactaagaccactgtggaccatatggcc

SEQ ID NO: 81675 - DNA, 60 bp, Artificial
  Synthetic oligonucleotide
ttattcaacagtggcaagttccctagcactggcaatcatggtagctggtctatctttctg

SEQ ID NO: 81676 - DNA, 60 bp, Artificial
  Synthetic oligonucleotide
gggaaggacaacgccataagaataggggagaactctgatgttttagtcacaagagagcca

SEQ ID NO: 81677 - DNA, 60 bp, Artificial
  Synthetic oligonucleotide
aacgatgacgcacaccagtcaatacatatgcagccctgtcctcacagacaatccacgccc

SEQ ID NO: 81678 - DNA, 60 bp, Artificial
  Synthetic oligonucleotide
caatcggttctgtgtcattggcactagttatattcaacatattgcttcatattgcatcaa

SEQ ID NO: 81679 - DNA, 60 bp, Artificial
  Synthetic oligonucleotide
ttcaagtctcatgagggaatggtgacaaatgaaagggaagtgtcgtttcagggaggtcac

SEQ ID NO: 81680 - DNA, 60 bp, Artificial
  Synthetic oligonucleotide
cctgagttcttaaacaacacagaacctctctgcaatgtatccggatttgcaatagtttcc

SEQ ID NO: 81681 - DNA, 60 bp, Artificial
  Synthetic oligonucleotide
cacccaatgcctaccaggccaagtttgagtctgttgcatggtcagcaacagcatgccatg

SEQ ID NO: 81682 - DNA, 60 bp, Artificial
  Synthetic oligonucleotide
tgaatgggaactgttattgggtaatgacagatggtcctgcgaacagtcaggctagttaca

SEQ ID NO: 81683 - DNA, 60 bp, Artificial
  Synthetic oligonucleotide
acaatgaaactgtaaggctggaaactataacaattcctatcaacaacaccgtgtatatag

SEQ ID NO: 81684 - DNA, 60 bp, Artificial
  Synthetic oligonucleotide
ggagtgaaaggatttggcttcagacaaggtaatagtgtgtgggcaggaagaacagttagc

SEQ ID NO: 81685 - DNA, 56 bp, Artificial
  Synthetic oligonucleotide
tagtcaaaaaagtggaggtcctcaacaacaagaattggtcaggatacagcggggct

SEQ ID NO: 81686 - DNA, 60 bp, Artificial
  Synthetic oligonucleotide
ggatcaaggggacatgtgtttgtcataagagaaccatttgtggcatgtggccccacagaa

SEQ ID NO: 81687 - DNA, 60 bp, Artificial
  Synthetic oligonucleotide
ctatgaggtgggttatttatgtgctggaattccgacagacactccacgggttcaggacag

SEQ ID NO: 81688 - DNA, 57 bp, Artificial
  Synthetic oligonucleotide
atcaatagtcataggaataatatcagtgacaaaagaaagcagtgtatcatcaccctg

SEQ ID NO: 81689 - DNA, 60 bp, Artificial
  Synthetic oligonucleotide
gtggcatgtggccccacagaatgtagaacatttttcctaacgcaaggtgccttactgaat

SEQ ID NO: 81690 - DNA, 60 bp, Artificial
  Synthetic oligonucleotide
gacaaggtaatagtgtgtgggcaggaagaacagttagtatttcgtcccgaagtggttttg

SEQ ID NO: 81691 - DNA, 60 bp, Artificial
  Synthetic oligonucleotide
acaaagtatggtggaccagtaatagtatagtatcgatgtgttccagcacagaattccttg

SEQ ID NO: 81692 - DNA, 60 bp, Artificial
  Synthetic oligonucleotide
agtgctgcaatctattcgagaaattcttccctagcagttcatacaggagaccggttggga

SEQ ID NO: 81693 - DNA, 60 bp, Artificial
  Synthetic oligonucleotide
acatgctgggagcagatgtacactccaggaggggaagtgagaaatgatgatgttgaccaa

SEQ ID NO: 81694 - DNA, 60 bp, Artificial
  Synthetic oligonucleotide
cacaggaaccatgcgcaagcttgccgaccaaagtctcccaccgaacttctccagccttga

SEQ ID NO: 81695 - DNA, 60 bp, Artificial
  Synthetic oligonucleotide
cacaggcaccatgcgcagacttgccgaccaaagtctcccaccgaacttctccagccttga

SEQ ID NO: 81696 - DNA, 60 bp, Artificial
  Synthetic oligonucleotide
aattacaggaaccatgcgcaggcttgccgaccaaagtctcccaccgaacttctccagcct

SEQ ID NO: 81697 - DNA, 60 bp, Artificial
  Synthetic oligonucleotide
cacaggaaccatgcgcagacttgccgaccaaagtctcccaccgaacttctccagccttga

SEQ ID NO: 81698 - DNA, 60 bp, Artificial
  Synthetic oligonucleotide
tggattccaacataggaatgaagaaggtacagggattgctgcagacaaagaatcaaccca

SEQ ID NO: 81699 - DNA, 60 bp, Artificial
  Synthetic oligonucleotide
ccctagcagttcatacaggagaccagttggaatttccagcatggtggaggccatggtgtc

SEQ ID NO: 81700 - DNA, 60 bp, Artificial
  Synthetic oligonucleotide
gacacaatattagagaagaatgtgacagtgacgcactcagtggagctcctagaaagccag

SEQ ID NO: 81701 - DNA, 60 bp, Artificial
  Synthetic oligonucleotide
gatctgatccgtactcattgattaagggaacatataccaatactggctctcagccaatct

SEQ ID NO: 81702 - DNA, 60 bp, Artificial
  Synthetic oligonucleotide
tgcccctacactgatggatcgtccttttacaggaatctgttgtggataataaaaataaga

SEQ ID NO: 81703 - DNA, 60 bp, Artificial
  Synthetic oligonucleotide
gaattttgtcaaaggtcctgaaatagcagacagaccacctgtgaatgggcaacgaggaag

SEQ ID NO: 81704 - DNA, 60 bp, Artificial
  Synthetic oligonucleotide
aacttatatggcattggtaaccggtatgttaggatgggaactgaaagtatgaattttgtc

SEQ ID NO: 81705 - DNA, 60 bp, Artificial
  Synthetic oligonucleotide
gacaacacaagtggacacaatattagagaagaatgtgacagtgacgcactcagtggagct

SEQ ID NO: 81706 - DNA, 60 bp, Artificial
  Synthetic oligonucleotide
gcattggtaaccggtatgttaggatgggaactgaaagtatgaattttgtcaaaggtcctg

SEQ ID NO: 81707 - DNA, 60 bp, Artificial
  Synthetic oligonucleotide
aaccaggagaaaccttgaatgtggagtccaatggaaatttaatagctccttggtatgctt

SEQ ID NO: 81708 - DNA, 60 bp, Artificial
  Synthetic oligonucleotide
tggtatgcttacaagttcaccagttccagaaacaagggagctattttcaaatcagacctt

SEQ ID NO: 81709 - DNA, 60 bp, Artificial
  Synthetic oligonucleotide
ccaggagaaaccttgaatgtggagtccaatggaaatttaatagctccttggtatgcttac

SEQ ID NO: 81710 - DNA, 60 bp, Artificial
  Synthetic oligonucleotide
aatgttagtccagtctggattggagaatgtcccaaatatgttaaaagtaagagcctaaaa

SEQ ID NO: 81711 - DNA, 60 bp, Artificial
  Synthetic oligonucleotide
tggcacaaatgcgacaatgaatgcatcaactcagttaagaatggcacatatgactaccca

SEQ ID NO: 81712 - DNA, 60 bp, Artificial
  Synthetic oligonucleotide
gggtgttttgaattttggcacaaatgcgacaatgaatgcatcaactcagttaagaatggc

SEQ ID NO: 81713 - DNA, 60 bp, Artificial
  Synthetic oligonucleotide
gaggaccttggacatgcatgatgccaatgtaaagaatctatatgaaaaggtgaaatcaca

SEQ ID NO: 81714 - DNA, 60 bp, Artificial
  Synthetic oligonucleotide
gctcctagaaagccagaaggagaatagattctgcagagtcttgaataaagcgccactgga

SEQ ID NO: 81715 - DNA, 60 bp, Artificial
  Synthetic oligonucleotide
cagtggagctcctagaaagccagaaggagaatagattctgcagagtcttgaataaagcgc

SEQ ID NO: 81716 - DNA, 60 bp, Artificial
  Synthetic oligonucleotide
ggaaaatgagaggaccttggacatgcatgatgccaatgtaaagaatctatatgaaaaggt

SEQ ID NO: 81717 - DNA, 60 bp, Artificial
  Synthetic oligonucleotide
taagaatggcacatatgactacccaaagtaccaagacgagagcagacttaataggcagga

SEQ ID NO: 81718 - DNA, 60 bp, Artificial
  Synthetic oligonucleotide
cacgtggaccggagtagacactaatagcggagttacgagcgcttgcccctacactgatgg

SEQ ID NO: 81719 - DNA, 60 bp, Artificial
  Synthetic oligonucleotide
gtatgcttacaagttcaccagttccagaaacaagggagctattttcaaatcagaccttcc

SEQ ID NO: 81720 - DNA, 54 bp, Artificial
  Synthetic oligonucleotide
tgcccctacactgatggatcgtccttttacaggaatctgttgtggataataaaa

SEQ ID NO: 81721 - DNA, 60 bp, Artificial
  Synthetic oligonucleotide
gtcaaaggtcctgaaatagcagacagaccacctgtgaatgggcaacgaggaagaattgat

SEQ ID NO: 81722 - DNA, 60 bp, Artificial
  Synthetic oligonucleotide
aaaaataagatctgatccgtactcattgattaagggaacatataccaatactggctctca

SEQ ID NO: 81723 - DNA, 54 bp, Artificial
  Synthetic oligonucleotide
ttgcaatcataatacttgcaatagtggtctctaccagcaagtcagacaggatct

SEQ ID NO: 81724 - DNA, 60 bp, Artificial
  Synthetic oligonucleotide
gaatggcacatatgactacccaaagtaccaagacgagagcagacttaataggcaggaaat

SEQ ID NO: 81725 - DNA, 60 bp, Artificial
  Synthetic oligonucleotide
gatgtgataacttactcggtgatcgaagttggtcatacatagtagagaggcctgacgccc

SEQ ID NO: 81726 - DNA, 60 bp, Artificial
  Synthetic oligonucleotide
tagtagagaggcctgacgcccaaaatgggatatgttacccaggggtattgaaagagacgg

SEQ ID NO: 81727 - DNA, 60 bp, Artificial
  Synthetic oligonucleotide
tggaaacccccgatgtgataacttactcggtgatcgaagttggtcatacatagtagagag

SEQ ID NO: 81728 - DNA, 60 bp, Artificial
  Synthetic oligonucleotide
caatttgaggcagtagagcatgagttctcaaatctcgaaaggagaatagacaatctgaac

SEQ ID NO: 81729 - DNA, 60 bp, Artificial
  Synthetic oligonucleotide
ggcctgacgcccaaaatgggatatgttacccaggggtattgaaagagacggaagagctga

SEQ ID NO: 81730 - DNA, 60 bp, Artificial
  Synthetic oligonucleotide
ccaagagcacgtggaccggagtagacactaatagcggagttacgagcgcttgcccctaca

SEQ ID NO: 81731 - DNA, 60 bp, Artificial
  Synthetic oligonucleotide
ggagcaatagctgggtttatagaaggagggtggacaggtatgatagacggatggtacgga

SEQ ID NO: 81732 - DNA, 53 bp, Artificial
  Synthetic oligonucleotide
atgatagacggatggtacggataccaccatgagaattcacaagggtctggtta

SEQ ID NO: 81733 - DNA, 60 bp, Artificial
  Synthetic oligonucleotide
gcacccagaaagcaatagacgggatcaccaataaagtcaattcaatcattgacaaaatga

SEQ ID NO: 81734 - DNA, 60 bp, Artificial
  Synthetic oligonucleotide
gacaaaatgaacacacaatttgaggcagtagagcatgagttctcaaatctcgaaaggaga

SEQ ID NO: 81735 - DNA, 60 bp, Artificial
  Synthetic oligonucleotide
tggattggagaatgtcccaaatatgttaaaagtaagagcctaaaactagcaactggtctg

SEQ ID NO: 81736 - DNA, 60 bp, Artificial
  Synthetic oligonucleotide
gagcctaaaactagcaactggtctgaggaatgtcccacaggcagaaacaagaggattgtt

SEQ ID NO: 81737 - DNA, 60 bp, Artificial
  Synthetic oligonucleotide
aactggtctgaggaatgtcccacaggcagaaacaagaggattgtttggagcaatagctgg

SEQ ID NO: 81738 - DNA, 60 bp, Artificial
  Synthetic oligonucleotide
gaggattgtttggagcaatagctgggtttatagaaggagggtggacaggtatgatagacg

SEQ ID NO: 81739 - DNA, 60 bp, Artificial
  Synthetic oligonucleotide
ggcgagaagagttgagtcagaagtttgaagaaatcagatggttaattgctgaatgcagga

SEQ ID NO: 81740 - DNA, 60 bp, Artificial
  Synthetic oligonucleotide
ggggacctccactccctccaaagcagaaacgctacatggcgagaagagttgagtcagaag

SEQ ID NO: 81741 - DNA, 60 bp, Artificial
  Synthetic oligonucleotide
gatgaatccaaatcagaagattctatgcacttctgccactgctatcgtaataggcacgat

SEQ ID NO: 81742 - DNA, 60 bp, Artificial
  Synthetic oligonucleotide
tggacaatggaactggcctgatggggctaaaatagagtacttcctctaagatatagaaaa

SEQ ID NO: 81743 - DNA, 60 bp, Artificial
  Synthetic oligonucleotide
gtggccatggtattttcacaagaggattgcatgatcaaggcagttaggggcgatctgaac

SEQ ID NO: 81744 - DNA, 60 bp, Artificial
  Synthetic oligonucleotide
cgggaaggcaagagaagaaccccgcactcaggatgaaatggatgatggcaatgaaatatc

SEQ ID NO: 81745 - DNA, 60 bp, Artificial
  Synthetic oligonucleotide
attgcccctttgatggtagcatacatgctagaaagagagttagtccgcaaaacgaggttc

SEQ ID NO: 81746 - DNA, 60 bp, Artificial
  Synthetic oligonucleotide
tgtttggtgcaatagctggtttcatagaaggtggttggccagggttgatcaatggctggt

SEQ ID NO: 81747 - DNA, 60 bp, Artificial
  Synthetic oligonucleotide
gtttggtgcaatagctggtttcatagaaggtggatggccaggtttaatcaatggttggta

SEQ ID NO: 81748 - DNA, 60 bp, Artificial
  Synthetic oligonucleotide
gacaaaccctctggagcaaaacaaatgatgccggctcagaccgagtgatggtatcacctc

SEQ ID NO: 81749 - DNA, 60 bp, Artificial
  Synthetic oligonucleotide
agggcaaaccctctggagcaaaacaaatgatgccggctcagaccgagtgatggtatcacc

SEQ ID NO: 81750 - DNA, 60 bp, Artificial
  Synthetic oligonucleotide
ggtcaactcaatcattgacaaaatgaacactcaatttgaggtcgttgggaaggagtttaa

SEQ ID NO: 81751 - DNA, 60 bp, Artificial
  Synthetic oligonucleotide
ggtcaactcaatcattgacaaaatgaacactcaatttgaggccgttggaaaggaatttaa

SEQ ID NO: 81752 - DNA, 60 bp, Artificial
  Synthetic oligonucleotide
gatcccaatggctggacagagactgatggtagcttctctgtgaaacaggatattgtagcg

SEQ ID NO: 81753 - DNA, 60 bp, Artificial
  Synthetic oligonucleotide
tgtgaaacaggatattgtagcgattactgattggtcaggatatagtgggagcttcgtgca

SEQ ID NO: 81754 - DNA, 60 bp, Artificial
  Synthetic oligonucleotide
gtggcgtttggataggtagaaccaagagcactagttccaggagcgggtttgaaatgattt

SEQ ID NO: 81755 - DNA, 60 bp, Artificial
  Synthetic oligonucleotide
ggtagaaccaagagcactagttccaggagcgggtttgaaatgatttgggatcccaatggc

SEQ ID NO: 81756 - DNA, 60 bp, Artificial
  Synthetic oligonucleotide
gaaatgatttgggatcccaatggctggacagagactgatggtagcttctctgtgaaacag

SEQ ID NO: 81757 - DNA, 60 bp, Artificial
  Synthetic oligonucleotide
tgtagcgattactgattggtcaggatatagtgggagcttcgtgcagcatccagagctgac

SEQ ID NO: 81758 - DNA, 60 bp, Artificial
  Synthetic oligonucleotide
ccatgatggtgtgagctggttaacaattggggtttctgggccagataatggagcggtggc

SEQ ID NO: 81759 - DNA, 60 bp, Artificial
  Synthetic oligonucleotide
gtgagctggttaacaattggggtttctgggccagataatggggcggtggctgtactaaaa

SEQ ID NO: 81760 - DNA, 60 bp, Artificial
  Synthetic oligonucleotide
cattaatgagctgtcccgttggtgaagctccttccccatacaattcgagatttgaatcag

SEQ ID NO: 81761 - DNA, 60 bp, Artificial
  Synthetic oligonucleotide
atgccatgatggtgtgagctggttaacaattggggtttctgggccagataatggagcggt

SEQ ID NO: 81762 - DNA, 60 bp, Artificial
  Synthetic oligonucleotide
atgtgcctgcataaatggttcatgttttactgtgatgactgatggcccgagcaataggca

SEQ ID NO: 81763 - DNA, 60 bp, Artificial
  Synthetic oligonucleotide
gcctgcataaatggttcatgttttactgtgatgactgatggcccgagcaataggcaggct

SEQ ID NO: 81764 - DNA, 60 bp, Artificial
  Synthetic oligonucleotide
cctaattatcactacgaggaatgttcctgttaccctgattcagggaaagtgatgtgcgtc

SEQ ID NO: 81765 - DNA, 60 bp, Artificial
  Synthetic oligonucleotide
ctcgtcctaatgatggaacagggagctgtggcccggtgtcctctaatggagcatacgggg

SEQ ID NO: 81766 - DNA, 60 bp, Artificial
  Synthetic oligonucleotide
tttggtgataatcctcgtcctaatgatgggacagggagctgtggcccggtgtcctctaat

SEQ ID NO: 81767 - DNA, 60 bp, Artificial
  Synthetic oligonucleotide
gcgtctgtagggataattggcacggttcgaatcgaccatgggtgtctttcaatcaagacc

SEQ ID NO: 81768 - DNA, 60 bp, Artificial
  Synthetic oligonucleotide
agcatttccttttgtggtgtaagtggtgacactgtgggttggtcttggccagacggtgct

SEQ ID NO: 81769 - DNA, 60 bp, Artificial
  Synthetic oligonucleotide
cgtcctaatgatgggacagggagctgtggcccggtgtcctctaatggagcatacggagtg

SEQ ID NO: 81770 - DNA, 60 bp, Artificial
  Synthetic oligonucleotide
ctggactagtgggagtagcatttccttctgtggtgtaagtggtgacactgtgggttggtc

SEQ ID NO: 81771 - DNA, 60 bp, Artificial
  Synthetic oligonucleotide
cagagctgacagggctggactgcatgaggccttgcttctgggtggaactaataaggggac

SEQ ID NO: 81772 - DNA, 60 bp, Artificial
  Synthetic oligonucleotide
tagcatttccttctgtggtgtaagtggtgacactgtgggttggtcttggccagacggtgc

SEQ ID NO: 81773 - DNA, 60 bp, Artificial
  Synthetic oligonucleotide
tggactagtgggagtagcatttccttttgtggtgtaagtggtgacactgtgggttggtct

SEQ ID NO: 81774 - DNA, 60 bp, Artificial
  Synthetic oligonucleotide
aatcagagtatcattacctatgaaaataatacctgggtcaatcagacgtatttgaacatc

SEQ ID NO: 81775 - DNA, 60 bp, Artificial
  Synthetic oligonucleotide
cgcccagaaccatgtaaccagagtatcatcacctatgaaaataatacctgggtcaatcag

SEQ ID NO: 81776 - DNA, 60 bp, Artificial
  Synthetic oligonucleotide
gacagaaccccaaaagtattagccggtaactcctccctttgccccatcagtggatgggcc

SEQ ID NO: 81777 - DNA, 60 bp, Artificial
  Synthetic oligonucleotide
gctggtaactcctccctttgccccatcagtggatgggccatatacagtaaggacaacggc

SEQ ID NO: 81778 - DNA, 60 bp, Artificial
  Synthetic oligonucleotide
aagtattagctggtaactcctccctttgccccatcagtggatgggccatatacagtaagg

SEQ ID NO: 81779 - DNA, 60 bp, Artificial
  Synthetic oligonucleotide
tctcatctggaatgtagaacctttttcttgacccaaggtgccttgttaaatgacaagcat

SEQ ID NO: 81780 - DNA, 60 bp, Artificial
  Synthetic oligonucleotide
cataagagaaccatttatttcgtgttctcatctggaatgtagaacctttttcttgaccca

SEQ ID NO: 81781 - DNA, 59 bp, Artificial
  Synthetic oligonucleotide
agccagacagcgaccaaaagaattcggatggccatcaattagtgtcgaattgtttaaaa

SEQ ID NO: 81782 - DNA, 60 bp, Artificial
  Synthetic oligonucleotide
agccagacagcgaccaaaagaattcggatggccatcaattagtgtcgaattgtttaaaaa

SEQ ID NO: 81783 - DNA, 60 bp, Artificial
  Synthetic oligonucleotide
agcgaaagcaggcaaaccatttgaatggatgtcaatccgactttacttttcttgaaggtt

SEQ ID NO: 81784 - DNA, 60 bp, Artificial
  Synthetic oligonucleotide
agcgaaagcaggcaaaccatttgaatggatgtcaatccgactttactcttcttgaaagtg

SEQ ID NO: 81785 - DNA, 60 bp, Artificial
  Synthetic oligonucleotide
agcgaaagcaggcaaaccatttgaatggatgtcaatccgactttaatcttcttgaaagtg

SEQ ID NO: 81786 - DNA, 60 bp, Artificial
  Synthetic oligonucleotide
ggcacttaccagatactatcagtctactcaacagtggcgagttccctagcactggcaatc

SEQ ID NO: 81787 - DNA, 60 bp, Artificial
  Synthetic oligonucleotide
gcaggcaaaccatttgaatggatgtcaatccgactttactcttcttgaaagtgccagcgc

SEQ ID NO: 81788 - DNA, 60 bp, Artificial
  Synthetic oligonucleotide
tacatacagatgtgcactgaactcaaactcagcgactatgaagggaggctgatccagaac

SEQ ID NO: 81789 - DNA, 60 bp, Artificial
  Synthetic oligonucleotide
ccaccattgaagagctcagacggcagaaatagtgaatttagcttgtccttcatgaaaaaa

SEQ ID NO: 81790 - DNA, 60 bp, Artificial
  Synthetic oligonucleotide
ggagcaatagccggatttatagaaggtgggtggccagggcttatcaatggatggtacggt

SEQ ID NO: 81791 - DNA, 60 bp, Artificial
  Synthetic oligonucleotide
gtggcaagttccctagcactggcaatcatggtagctggtctatctttctggatgtgctcc

SEQ ID NO: 81792 - DNA, 60 bp, Artificial
  Synthetic oligonucleotide
cgggtaatgatgtatggttgggaaggactgtatcaactagtggtagatcaggctttgagg

SEQ ID NO: 81793 - DNA, 60 bp, Artificial
  Synthetic oligonucleotide
gcaggtaatgatgtatggttgggaaggactgtatcaactagtgggagatcaggctttgag

SEQ ID NO: 81794 - DNA, 60 bp, Artificial
  Synthetic oligonucleotide
cgggtaatgatgtatggttgggaaggactgtatccactagtggaagatcaggctttgaaa

SEQ ID NO: 81795 - DNA, 60 bp, Artificial
  Synthetic oligonucleotide
gtcgaaacgtacgttctctctatcgtcccgtcaggccccctcaaagccgagatcgcgcag

SEQ ID NO: 81796 - DNA, 60 bp, Artificial
  Synthetic oligonucleotide
gctctccaacagagtgcaggacgttcttccttactcaaggttccctactcaatgataaac

SEQ ID NO: 81797 - DNA, 60 bp, Artificial
  Synthetic oligonucleotide
tttgtttcttgctctccaacagagtgcaggacgttcttccttactcaaggttccctactc

SEQ ID NO: 81798 - DNA, 60 bp, Artificial
  Synthetic oligonucleotide
ttataagggaaccatttgtttcttgctctccaacagagtgcaggacgttcttccttaccc

SEQ ID NO: 81799 - DNA, 60 bp, Artificial
  Synthetic oligonucleotide
gtggccatggtattttcacaagaggattgcatgatcaaagcagttcggggtgatctgaac

SEQ ID NO: 81800 - DNA, 60 bp, Artificial
  Synthetic oligonucleotide
gtggccatggtattttcacaagaggattgcatgatcaaagcagttcgaggtgatttgaac

SEQ ID NO: 81801 - DNA, 51 bp, Artificial
  Synthetic oligonucleotide
ggtcaactcaatcattgacaaaatgaacactcaatttgagaccgttggaaa

SEQ ID NO: 81802 - DNA, 60 bp, Artificial
  Synthetic oligonucleotide
catacaggaggccagttggaatttccagcatggtggaggccatggtgtctagggcccgaa

SEQ ID NO: 81803 - DNA, 60 bp, Artificial
  Synthetic oligonucleotide
cataaacaggacaggaacatttgaattcacaagttttttctatcgctatggatttgtagc

SEQ ID NO: 81804 - DNA, 60 bp, Artificial
  Synthetic oligonucleotide
tatataaacaggacaggaacatttgaattcacaagttttttctatcgctatgggtttgtt

SEQ ID NO: 81805 - DNA, 60 bp, Artificial
  Synthetic oligonucleotide
gggttctcatcggaggacttgaatggaatgataacacagttcgagtctctgaaactctac

SEQ ID NO: 81806 - DNA, 60 bp, Artificial
  Synthetic oligonucleotide
gatatggaccagcattgagcatcaatgaactgagcaatcttgcaaaaggggagaaagcta

SEQ ID NO: 81807 - DNA, 60 bp, Artificial
  Synthetic oligonucleotide
tgattgctcctttgctgggtggatccttgggaacccaatgtgtgatgatttgattgggaa

SEQ ID NO: 81808 - DNA, 60 bp, Artificial
  Synthetic oligonucleotide
atcctcctcgggggacttgaatggaatgataacacagttcgaatctctgaaactctacag

SEQ ID NO: 81809 - DNA, 59 bp, Artificial
  Synthetic oligonucleotide
agatgagtcttctaaccgaggtcgaaacgtacgttctctctatcgttccgtcaggcccc

SEQ ID NO: 81810 - DNA, 60 bp, Artificial
  Synthetic oligonucleotide
agatgagtcttctaaccgaggtcgaaacgtacgttctctctatcgttccgtcaggccccc

SEQ ID NO: 81811 - DNA, 60 bp, Artificial
  Synthetic oligonucleotide
cagcgactatgaagggaggctgattcaaaacagcataacaatagagagaatggttctctc

SEQ ID NO: 81812 - DNA, 60 bp, Artificial
  Synthetic oligonucleotide
tcaagtggaagtggtcactgcacaggaactggtagaatcacaaaatctcccggaactatg

SEQ ID NO: 81813 - DNA, 60 bp, Artificial
  Synthetic oligonucleotide
ggaaaactatgttgaggacacaaagattgatttatggtcatataatgcagagctattagt

SEQ ID NO: 81814 - DNA, 60 bp, Artificial
  Synthetic oligonucleotide
caggggaaacaatgctatcaattgtgattttgtttctgctcatagcagagaactcttccc

SEQ ID NO: 81815 - DNA, 60 bp, Artificial
  Synthetic oligonucleotide
caatggggattatgcaaggctttacatctggggagttcatcacccttcgacaagcacaga

SEQ ID NO: 81816 - DNA, 60 bp, Artificial
  Synthetic oligonucleotide
caagcacagagcaaaccaacctgtacaagaataaccctggaagagtcactgtgtctacca

SEQ ID NO: 81817 - DNA, 60 bp, Artificial
  Synthetic oligonucleotide
ttcattgccgaagaattccaatggaacacggtgaagcaaaatggaaaatccggagcctgc

SEQ ID NO: 81818 - DNA, 60 bp, Artificial
  Synthetic oligonucleotide
ttcggaatgggacttatgatcatgatatttatagagatgaagcaatcaacaatcgattcc

SEQ ID NO: 81819 - DNA, 60 bp, Artificial
  Synthetic oligonucleotide
ggaatctaattgcctcgagagggcattacaagttaaacaatcagaagaagagcacaattc

SEQ ID NO: 81820 - DNA, 60 bp, Artificial
  Synthetic oligonucleotide
agcaaaagcaggtgcgaaatgaatccaaatcagaagataataacaatcggggtagtgaat

SEQ ID NO: 81821 - DNA, 60 bp, Artificial
  Synthetic oligonucleotide
agcaaaagcaggtgcgaaatgaatccaaatcagagaataatagcgattgggtctgtgaac

SEQ ID NO: 81822 - DNA, 60 bp, Artificial
  Synthetic oligonucleotide
acagagacgaagcaatcaataacagattccagatacaaggagttaaattgactcaagggt

SEQ ID NO: 81823 - DNA, 60 bp, Artificial
  Synthetic oligonucleotide
caggggaaacaatgctatcaatcacgattctgtttctgctcatagcagaggtatcctctc

SEQ ID NO: 81824 - DNA, 60 bp, Artificial
  Synthetic oligonucleotide
cttgaggagtcccacccagggatctttgaaaactcgtgtcttgaaacgatggaagttgtt

SEQ ID NO: 81825 - DNA, 60 bp, Artificial
  Synthetic oligonucleotide
cgcaaaatgctataagtactacattcccttatactggagatcctccatacagccatggaa

SEQ ID NO: 81826 - DNA, 60 bp, Artificial
  Synthetic oligonucleotide
gtggaccacatggccataatcaaaaagtacacatcaggaaggcaagagaagaaccctgca

SEQ ID NO: 81827 - DNA, 60 bp, Artificial
  Synthetic oligonucleotide
accgggctcagaaatgtccctgcgattgctacaagaggcctgtttggtgcaatagctggt

SEQ ID NO: 81828 - DNA, 60 bp, Artificial
  Synthetic oligonucleotide
aaaatgaaaaaacattggatctccatgattctaatgttcgaaacctccatgaaaaggtca

SEQ ID NO: 81829 - DNA, 60 bp, Artificial
  Synthetic oligonucleotide
aaacactgactggagtggttacagtggatctttcatggactattgggctgagggggactg

SEQ ID NO: 81830 - DNA, 60 bp, Artificial
  Synthetic oligonucleotide
atcgggagattctacatacagatgtgcactgaactcaaactcagtgactatgaagggagg

SEQ ID NO: 81831 - DNA, 60 bp, Artificial
  Synthetic oligonucleotide
attgggagattctacatacagatgtgcactgaactcaaactcagtgactatgaaggaagg

SEQ ID NO: 81832 - DNA, 60 bp, Artificial
  Synthetic oligonucleotide
ctgttccaccattgaagagctcagacggcagaagtagtgaatttagcttgtccttcatga

SEQ ID NO: 81833 - DNA, 60 bp, Artificial
  Synthetic oligonucleotide
cctttggagcaaaacaaatgatgccggctcagaccgagtgatggtatcacctctggctgt

SEQ ID NO: 81834 - DNA, 60 bp, Artificial
  Synthetic oligonucleotide
gacagaacaccctatagatcactgatcaggttcccaataggaacagccccagtactaggg

SEQ ID NO: 81835 - DNA, 60 bp, Artificial
  Synthetic oligonucleotide
gacagaacaccttatagatcactgattcggttcccaataggaacagccccagtactaggg

SEQ ID NO: 81836 - DNA, 60 bp, Artificial
  Synthetic oligonucleotide
atctgaatgtcaatgtattgacgggacctgtattgtcgctgttacagatggccctgcggc

SEQ ID NO: 81837 - DNA, 60 bp, Artificial
  Synthetic oligonucleotide
actaagaactcaagagtctgaatgtcaatgtattgacgggacctgtattgtcgttgttac

SEQ ID NO: 81838 - DNA, 60 bp, Artificial
  Synthetic oligonucleotide
gtctgaatgtcaatgtattgacgggacctgtattgtcgttgttactgatggccctgcggc

SEQ ID NO: 81839 - DNA, 60 bp, Artificial
  Synthetic oligonucleotide
ggggatgatgtttggatgggaagaacaatcagtaaagactcgcgctcaggctatgagact

SEQ ID NO: 81840 - DNA, 60 bp, Artificial
  Synthetic oligonucleotide
gctatgagacttttagggtcattggtggttgggccattgctaattccaagtcacagacca

SEQ ID NO: 81841 - DNA, 60 bp, Artificial
  Synthetic oligonucleotide
gagacacaccaaggaacgatgatggctctagcagcagcaactgcagagatcctaataatg

SEQ ID NO: 81842 - DNA, 60 bp, Artificial
  Synthetic oligonucleotide
tcacaggatttgctcctttttccaaggacaactcaatccgactttctgctggtgggaaca

SEQ ID NO: 81843 - DNA, 60 bp, Artificial
  Synthetic oligonucleotide
atggtccagttcaagttgccatgacgggaaagcatggttgcacgtctgtgttactgggga

SEQ ID NO: 81844 - DNA, 60 bp, Artificial
  Synthetic oligonucleotide
ggcacaatacatgatagaatccctcaccggacccttttgatgaatgaattgggtgttcca

SEQ ID NO: 81845 - DNA, 60 bp, Artificial
  Synthetic oligonucleotide
aggtgtttttatgtggaattgataagaggaaggccgcaggagactagagtatggtggacc

SEQ ID NO: 81846 - DNA, 60 bp, Artificial
  Synthetic oligonucleotide
agcatatagaggaatgttcctgttatcctcgatacccaaatgtcagatgtgtatgcaggg

SEQ ID NO: 81847 - DNA, 60 bp, Artificial
  Synthetic oligonucleotide
gcatcaatgggacttgtacagtggtaatgactgatgggagcgcatcagggaaagccgaca

SEQ ID NO: 81848 - DNA, 60 bp, Artificial
  Synthetic oligonucleotide
taaatgctatcaatttgcacttgggcaaggaaccacgctggacaacaaacattcaaatgg

SEQ ID NO: 81849 - DNA, 60 bp, Artificial
  Synthetic oligonucleotide
gccggctgcaactgcattagctaatactatagaggtcttcagatcgaatggtctgacagc

SEQ ID NO: 81850 - DNA, 60 bp, Artificial
  Synthetic oligonucleotide
gaggaatgaacaaggacaaaccctctggagcaaaacaaatgatgccggctcagaccgagt

SEQ ID NO: 81851 - DNA, 60 bp, Artificial
  Synthetic oligonucleotide
caatagtcagtcttgttaaaagtgaccagatttgcattggttaccatgcaaacaactcga

SEQ ID NO: 81852 - DNA, 60 bp, Artificial
  Synthetic oligonucleotide
tctagtactaatggaaaatgaaagaactctggatttccatgattcaaatgtcaaaaactt

SEQ ID NO: 81853 - DNA, 60 bp, Artificial
  Synthetic oligonucleotide
tcatggaaaatgaaagaactctggatttccatgattcaaatgtcaagaacctatacgata

SEQ ID NO: 81854 - DNA, 60 bp, Artificial
  Synthetic oligonucleotide
ggcccagcattgagcatcaatgaactgagcaatcttgcaaaaggggagaaggctaatgtg

SEQ ID NO: 81855 - DNA, 60 bp, Artificial
  Synthetic oligonucleotide
actaagattgacctgtggtcttacaatgctgaactgctggtggcattagaaaaccaacat

SEQ ID NO: 81856 - DNA, 60 bp, Artificial
  Synthetic oligonucleotide
actgagcaatcttgcaaaaggagagaaggctaatgtgctaattgggcaaggagacgtagt

SEQ ID NO: 81857 - DNA, 60 bp, Artificial
  Synthetic oligonucleotide
tgcaagtgcccagataatatatgcagggaaaatgacagactccattaaatcatggagaaa

SEQ ID NO: 81858 - DNA, 60 bp, Artificial
  Synthetic oligonucleotide
gcaagtgctcaaataatatacgcaggaagaatgacagactccattaaatcatggagaaag

SEQ ID NO: 81859 - DNA, 60 bp, Artificial
  Synthetic oligonucleotide
gtgcccagataatatatgcagggaaaatgacagactccattaaatcatggagaaaggaca

SEQ ID NO: 81860 - DNA, 54 bp, Artificial
  Synthetic oligonucleotide
gttccaacattgggtttatgcccaagtaacagaaaaaagcaccttgtttctact

SEQ ID NO: 81861 - DNA, 60 bp, Artificial
  Synthetic oligonucleotide
tgtagggacaattggaaaggttccaacagaccttggatgagaatcaacaacgagactata

SEQ ID NO: 81862 - DNA, 60 bp, Artificial
  Synthetic oligonucleotide
tatataaacaggacaggaacatttgaattcacaagctttttctatcgctatggatttgta

SEQ ID NO: 81863 - DNA, 56 bp, Artificial
  Synthetic oligonucleotide
acgagggatcttatttcttcggagacaatgcagaggactatgacaattgaagaaaa

SEQ ID NO: 81864 - DNA, 60 bp, Artificial
  Synthetic oligonucleotide
ccaaacaatcgtattaaacactgactggagtggctacagtgggtccttcatggactattg

SEQ ID NO: 81865 - DNA, 55 bp, Artificial
  Synthetic oligonucleotide
cagagtgctgtggatgttgacgatggtcattttgtcaacatagagctggagtaaa

SEQ ID NO: 81866 - DNA, 60 bp, Artificial
  Synthetic oligonucleotide
acactccaagaggagaagatagtcagttcacggggtcatgcactagtcccatgggaaatc

SEQ ID NO: 81867 - DNA, 60 bp, Artificial
  Synthetic oligonucleotide
acactccaagaggagaagatagtcagttcacggggtcatgcactagtcccatgggaaacc

SEQ ID NO: 81868 - DNA, 60 bp, Artificial
  Synthetic oligonucleotide
aagagtggtcccaagagggcaactgtccaccagaggagttcagattgcttcaaatgagaa

SEQ ID NO: 81869 - DNA, 60 bp, Artificial
  Synthetic oligonucleotide
gcaaaaccagattcctaccagtagctggcggaacaagcagcgtgtatatcgaggtgttgc

SEQ ID NO: 81870 - DNA, 60 bp, Artificial
  Synthetic oligonucleotide
ttcgcaaaaccagattcctaccagtagctggcggaacaagcagcgtgtatatcgaggtgt

SEQ ID NO: 81871 - DNA, 60 bp, Artificial
  Synthetic oligonucleotide
ttgagccctggaatgatgatgggcatgttcaacatgctgagtacagttttgggagtttcg

SEQ ID NO: 81872 - DNA, 60 bp, Artificial
  Synthetic oligonucleotide
ggtccttgcgactggacccagaaatgttcctcaaagagaaacaagaggactatttggggc

SEQ ID NO: 81873 - DNA, 60 bp, Artificial
  Synthetic oligonucleotide
attgctcccttgatggtagcatacatgctagaaagagagttggtccgcaaaacgaggttt

SEQ ID NO: 81874 - DNA, 60 bp, Artificial
  Synthetic oligonucleotide
aagcactcaaaaggctgtagacgggatcacaaataaggtcaattctatcatagacaaaat

SEQ ID NO: 81875 - DNA, 60 bp, Artificial
  Synthetic oligonucleotide
ctgtagacgggatcacaaataaggtcaattctatcatagacaaaatgaacacacagttcg

SEQ ID NO: 81876 - DNA, 60 bp, Artificial
  Synthetic oligonucleotide
cttcaagtcaaacttaccaatcgagaactgtgatgccacctgccaaactattgcaggagt

SEQ ID NO: 81877 - DNA, 60 bp, Artificial
  Synthetic oligonucleotide
aacttaccaatcgagaactgtgatgccacctgccaaactattgcaggagtactaaggaca

SEQ ID NO: 81878 - DNA, 60 bp, Artificial
  Synthetic oligonucleotide
cctggggaaaccttgaatgtagagtctaatggaaacctaatcgccccttggtatgcatac

SEQ ID NO: 81879 - DNA, 60 bp, Artificial
  Synthetic oligonucleotide
gccccttggtatgcatacaaattcgtcagcaccagtagaaaaggagccgtcttcaagtca

SEQ ID NO: 81880 - DNA, 60 bp, Artificial
  Synthetic oligonucleotide
ggctaccatcatgaaaattctcagggctcagggtatgcagcagacagagaaagcactcaa

SEQ ID NO: 81881 - DNA, 60 bp, Artificial
  Synthetic oligonucleotide
aattctcagggctcagggtatgcagcagacagagaaagcactcaaaaggctgtagacggg

SEQ ID NO: 81882 - DNA, 60 bp, Artificial
  Synthetic oligonucleotide
gtttgagacttgcgactggactaagaaatgttccacagattgaaactaggggactcttcg

SEQ ID NO: 81883 - DNA, 60 bp, Artificial
  Synthetic oligonucleotide
gactggactaagaaatgttccacagattgaaactaggggactcttcggagctatcgcagg

SEQ ID NO: 81884 - DNA, 60 bp, Artificial
  Synthetic oligonucleotide
caggcagaaaatagaatcagtgaaactagaaaaccttggtgtgtatcaaattcttgccat

SEQ ID NO: 81885 - DNA, 60 bp, Artificial
  Synthetic oligonucleotide
tatcaaattcttgccatttatagtacggtatcgagcagtctagttttggtagggctgatt

SEQ ID NO: 81886 - DNA, 60 bp, Artificial
  Synthetic oligonucleotide
tagacaaaatgaacacacagttcgaagctgtcgatcacgaattttctaatttggagagga

SEQ ID NO: 81887 - DNA, 60 bp, Artificial
  Synthetic oligonucleotide
gaacacacagttcgaagctgtcgatcacgaattttctaatttggagaggagaattgacaa

SEQ ID NO: 81888 - DNA, 60 bp, Artificial
  Synthetic oligonucleotide
ccttgaaaacgaaaggacactggacatgcatgatgcgaatgtgaaaaatctgtatgaaaa

SEQ ID NO: 81889 - DNA, 60 bp, Artificial
  Synthetic oligonucleotide
ggatgttttgaattttggcataagtgtgacaatgaatgcatagagtctgtcaagaatggt

SEQ ID NO: 81890 - DNA, 60 bp, Artificial
  Synthetic oligonucleotide
gtcaagaatggtacttataactatccaaaataccaggatgagagcaaattaaacaggcag

SEQ ID NO: 81891 - DNA, 60 bp, Artificial
  Synthetic oligonucleotide
aattaaacaggcagaaaatagaatcagtgaaactagaaaaccttggtgtgtatcaaattc

SEQ ID NO: 81892 - DNA, 60 bp, Artificial
  Synthetic oligonucleotide
ttttaaagcctggggaaaccttgaatgtagagtctaatggaaacctaatcgccccttggt

SEQ ID NO: 81893 - DNA, 60 bp, Artificial
  Synthetic oligonucleotide
ctgctgtgaatggacaaagaggtagaattgattattactggtctgttttaaagcctgggg

SEQ ID NO: 81894 - DNA, 60 bp, Artificial
  Synthetic oligonucleotide
gaaagacctacagcccaaaatgggatttgctacccaggaacgctgaatgaggttgaagaa

SEQ ID NO: 81895 - DNA, 60 bp, Artificial
  Synthetic oligonucleotide
cccctctcgatttaagagactgcaccatagaaggttggatattggggaatccccgatgcg

SEQ ID NO: 81896 - DNA, 60 bp, Artificial
  Synthetic oligonucleotide
caagtgcttgtccgtataccattggttcgtctttctacagaaacctgctgtggataataa

SEQ ID NO: 81897 - DNA, 60 bp, Artificial
  Synthetic oligonucleotide
gcccaaaatgggatttgctacccaggaacgctgaatgaggttgaagaactgaaggcactc

SEQ ID NO: 81898 - DNA, 60 bp, Artificial
  Synthetic oligonucleotide
agatcagcagcgtatccagtaatcaggggaacttacaataacactggaaaacagccaatc

SEQ ID NO: 81899 - DNA, 60 bp, Artificial
  Synthetic oligonucleotide
tggataataaaaactagatcagcagcgtatccagtaatcaggggaacttacaataacact

SEQ ID NO: 81900 - DNA, 60 bp, Artificial
  Synthetic oligonucleotide
ccggacaccaatgagcaaaacactctgtatggttccggtgatcgatatgtcaggatggga

SEQ ID NO: 81901 - DNA, 60 bp, Artificial
  Synthetic oligonucleotide
atgattgcaatcattatagtaacgatattggcaacgaccggaaaatcagacaagatctgc

SEQ ID NO: 81902 - DNA, 60 bp, Artificial
  Synthetic oligonucleotide
cacaagtagacacgatacttgaaaagaatgtaactgtcacgcactcagttgagttgctgg

SEQ ID NO: 81903 - DNA, 60 bp, Artificial
  Synthetic oligonucleotide
cgatacttgaaaagaatgtaactgtcacgcactcagttgagttgctggagaatcaaaggg

SEQ ID NO: 81904 - DNA, 60 bp, Artificial
  Synthetic oligonucleotide
gttgctggagaatcaaagggaagaaaggttctgcaaagtcttgaacaaagcccctctcga

SEQ ID NO: 81905 - DNA, 60 bp, Artificial
  Synthetic oligonucleotide
tctacgagaaagttcgactacagcttagggataatgcaaaggagctgggtaatggttgtt

SEQ ID NO: 81906 - DNA, 60 bp, Artificial
  Synthetic oligonucleotide
cgactacagcttagggataatgcaaaggagctgggtaatggttgtttcgagttctatcac

SEQ ID NO: 81907 - DNA, 60 bp, Artificial
  Synthetic oligonucleotide
cgattacagcttagggataatgcaaaggagctgggtaatggttgtttcgagttctatcac

SEQ ID NO: 81908 - DNA, 60 bp, Artificial
  Synthetic oligonucleotide
gcaggggtcacaatggagaaactcatcgtaatagcaatgctcttggcgagcacaaatgca

SEQ ID NO: 81909 - DNA, 60 bp, Artificial
  Synthetic oligonucleotide
ggcagggattacttgcacatgcagggataattggcagggctcaaatagaccagtaattca

SEQ ID NO: 81910 - DNA, 60 bp, Artificial
  Synthetic oligonucleotide
ggaccatatggccataatcaagaaatacacatcaggaagacaagagaagaaccctgcact

SEQ ID NO: 81911 - DNA, 60 bp, Artificial
  Synthetic oligonucleotide
gtggaccatatggccataatcaagaaatacacatcaggaagacaagagaagaaccctgca

SEQ ID NO: 81912 - DNA, 60 bp, Artificial
  Synthetic oligonucleotide
caacaatgagaccatactagaaacagggtacgtgtgtagcaaattccattcagacacccc

SEQ ID NO: 81913 - DNA, 60 bp, Artificial
  Synthetic oligonucleotide
ctgatggccctgcggctaatagtgccgatcatagaatttactggataagaaggggaaaag

SEQ ID NO: 81914 - DNA, 60 bp, Artificial
  Synthetic oligonucleotide
ccccagtactagggaattacaaagaaatatgtgtggcctggtcgagtagtagttgcttcg

SEQ ID NO: 81915 - DNA, 60 bp, Artificial
  Synthetic oligonucleotide
gatcaggctttgagatcatcaaggtcacagagggatggatcaattctcccaatcacgcca

SEQ ID NO: 81916 - DNA, 60 bp, Artificial
  Synthetic oligonucleotide
ctgaaacagaaaggcatttcaagccctcactaccactgtgccctttcagaggatttttcc

SEQ ID NO: 81917 - DNA, 60 bp, Artificial
  Synthetic oligonucleotide
gctggtcctttgctctcgctcaaggggcattactgggaactaagcatagcaatggaacca

SEQ ID NO: 81918 - DNA, 60 bp, Artificial
  Synthetic oligonucleotide
ctgttattgacatatggtcatacaacgcacagcttcttgttctattggaaaatgaaaaaa

SEQ ID NO: 81919 - DNA, 60 bp, Artificial
  Synthetic oligonucleotide
tacaacgcacagcttcttgttctattggaaaatgaaaaaacattagatctccatgattct

SEQ ID NO: 81920 - DNA, 60 bp, Artificial
  Synthetic oligonucleotide
gctgtgacgtggtggaacagaaatggaccaacgacaagtacagtccattatccaaaggtc

SEQ ID NO: 81921 - DNA, 60 bp, Artificial
  Synthetic oligonucleotide
gctgtgacgtggtggaacaggaatgggccaacgacaagtacagtccattatccaaaggtc

SEQ ID NO: 81922 - DNA, 59 bp, Artificial
  Synthetic oligonucleotide
ggccgtgacgtggtggaacaggaatggaccaacgacaagtacagtccattatccaaagg

SEQ ID NO: 81923 - DNA, 60 bp, Artificial
  Synthetic oligonucleotide
tggctgtgacgtggtggaacagaaatggaccaacgacaagtacagtccattatccaaagg

SEQ ID NO: 81924 - DNA, 60 bp, Artificial
  Synthetic oligonucleotide
ggcctcttctgatagatggtacagcctcattgagccctggaatgatgatgggcatgttca

SEQ ID NO: 81925 - DNA, 60 bp, Artificial
  Synthetic oligonucleotide
tgaacattgaatcttgctcaactaaatgccagtctgaaattggagggatcaacactaata

SEQ ID NO: 81926 - DNA, 60 bp, Artificial
  Synthetic oligonucleotide
ggaagattctacatacagatgtgcactgaactcaaactcagtgactatgaagggaggctg

SEQ ID NO: 81927 - DNA, 60 bp, Artificial
  Synthetic oligonucleotide
acacagatctcgaggcactcatggaatggctaaagacaagaccaatcctgtcacctctga

SEQ ID NO: 81928 - DNA, 60 bp, Artificial
  Synthetic oligonucleotide
gtgagtttctactggactattgtagagcctggagacttgatagtcttcaacacaataggg

SEQ ID NO: 81929 - DNA, 60 bp, Artificial
  Synthetic oligonucleotide
gctcttctcaaaactacacaggaaaccctgtgatatgtatgggacaccatgctgttgcca

SEQ ID NO: 81930 - DNA, 60 bp, Artificial
  Synthetic oligonucleotide
gctcgtagcagagaactcttctcaaaactacacaggaaaccctgtgatatgcatgggaca

SEQ ID NO: 81931 - DNA, 60 bp, Artificial
  Synthetic oligonucleotide
ctgctcgtagcagagaactcttctcaaaactacacaggaaaccctgtgatatgcatggga

SEQ ID NO: 81932 - DNA, 60 bp, Artificial
  Synthetic oligonucleotide
ggaggagtccagacttaacagacaagaaattgagggagtgaaactggattccagtggcaa

SEQ ID NO: 81933 - DNA, 60 bp, Artificial
  Synthetic oligonucleotide
ggaggagtccagactgaacagacaagaaattgagggagtgaaactggattccagtggcaa

SEQ ID NO: 81934 - DNA, 60 bp, Artificial
  Synthetic oligonucleotide
ggaggagtccagattgaacagacaagaaattgagggagtgaaactggattccagtggcaa

SEQ ID NO: 81935 - DNA, 60 bp, Artificial
  Synthetic oligonucleotide
ggaatttgaggaggagtccagactgaacagacaagaaattgagggagtgaaactggattc

SEQ ID NO: 81936 - DNA, 60 bp, Artificial
  Synthetic oligonucleotide
ggaatttgaggaggaatccaaactgaacagacaagaaattgagggagtgaaactggattc

SEQ ID NO: 81937 - DNA, 60 bp, Artificial
  Synthetic oligonucleotide
gaggaggagtccagactgaacagacaagaaattgagggagtgaaactggattccagtggc

SEQ ID NO: 81938 - DNA, 60 bp, Artificial
  Synthetic oligonucleotide
gagtccaaactgaatagacaagaaattgagggagtgaaactggattccagtggcaacgtt

SEQ ID NO: 81939 - DNA, 60 bp, Artificial
  Synthetic oligonucleotide
ttgagaaggtaacacaatggcacaataccaatgtcattgagtatatagaaagatcagagg

SEQ ID NO: 81940 - DNA, 60 bp, Artificial
  Synthetic oligonucleotide
gggaatacaatgaaacagtacgggttgagaaggtaacacaatggcacaataccaatgtca

SEQ ID NO: 81941 - DNA, 60 bp, Artificial
  Synthetic oligonucleotide
ttgagaaggtaacacaatggcacaataccaatgtcattgagtacatagaaagaccagaga

SEQ ID NO: 81942 - DNA, 60 bp, Artificial
  Synthetic oligonucleotide
ttgagagggtaacacaatggcacaataccaatgtcattgagtatatagaaaggccagaga

SEQ ID NO: 81943 - DNA, 60 bp, Artificial
  Synthetic oligonucleotide
ttgaaaaggtaacacaatggcacaataccaatgtcattgaatatatagagaggccagaga

SEQ ID NO: 81944 - DNA, 60 bp, Artificial
  Synthetic oligonucleotide
ggtaacacaatggcacaataccaatgtcattgaatatatagagaggccagagagtgatca

SEQ ID NO: 81945 - DNA, 60 bp, Artificial
  Synthetic oligonucleotide
ttgagaaggtaacacaatggcacaataccaatgtcattgagtatatagagagaccagaga

SEQ ID NO: 81946 - DNA, 60 bp, Artificial
  Synthetic oligonucleotide
ggtaacacaatggcacaataccaatgtcattgagtacatagaaagaccagagagtgatca

SEQ ID NO: 81947 - DNA, 60 bp, Artificial
  Synthetic oligonucleotide
ttctgttattgacatatggtcatacaacgcacagcttcttgttctattggaaaatgaaaa

SEQ ID NO: 81948 - DNA, 60 bp, Artificial
  Synthetic oligonucleotide
aagagagccttacgttagttgcgacaatgataactgctggtcctttgctcttgcccaagg

SEQ ID NO: 81949 - DNA, 60 bp, Artificial
  Synthetic oligonucleotide
agacgtcatagtcacaagagagccttacgttagttgcgacaatgataattgctggtcctt

SEQ ID NO: 81950 - DNA, 53 bp, Artificial
  Synthetic oligonucleotide
ttttaacaccgttatacatgagaaaataggggaccatcagacagtggtgtatc

SEQ ID NO: 81951 - DNA, 60 bp, Artificial
  Synthetic oligonucleotide
tgattttcaacaccgttatacatgagaaaataggggaccatcaaactgtggtgtatccaa

SEQ ID NO: 81952 - DNA, 60 bp, Artificial
  Synthetic oligonucleotide
agacgtaatagtcacaagagagccttacgttagttgcgacaatgataactgctggtcctt

SEQ ID NO: 81953 - DNA, 60 bp, Artificial
  Synthetic oligonucleotide
ggatttttcccttttcataaggacaatgcaataaggttaggtgagaacaaagacgtcata

SEQ ID NO: 81954 - DNA, 60 bp, Artificial
  Synthetic oligonucleotide
aagagagccttacgttagttgcgacaatgataattgctggtcctttgctctcgctcaagg

SEQ ID NO: 81955 - DNA, 60 bp, Artificial
  Synthetic oligonucleotide
aatggaaccatcaaagacagaacaccctatagatcactgatcaggttcccaataggaaca

SEQ ID NO: 81956 - DNA, 60 bp, Artificial
  Synthetic oligonucleotide
aaacctgatttttaacaccgttatacatgagaaaataggggaccatcagacagtggtgta

SEQ ID NO: 81957 - DNA, 60 bp, Artificial
  Synthetic oligonucleotide
tgtgattccccaagtaatgtcaatggaggaccaggagttaaagggtttggcttcaagacg

SEQ ID NO: 81958 - DNA, 60 bp, Artificial
  Synthetic oligonucleotide
tgtgattccccaagtaatgtcaatggaggacctggggtcaaaggatttggcttcaaggca

SEQ ID NO: 81959 - DNA, 60 bp, Artificial
  Synthetic oligonucleotide
aatggaaccatcaaagacagaacaccctatagatcactgattcgatttccaataggaaca

SEQ ID NO: 81960 - DNA, 60 bp, Artificial
  Synthetic oligonucleotide
cggaaaagcaccgataagtcttggtgattgctcttttgctggatggatccttggaaaccc

SEQ ID NO: 81961 - DNA, 60 bp, Artificial
  Synthetic oligonucleotide
tcttagcaaacaacggaaaatttgagttcattgctgaggaattccaatggaacacagtca

SEQ ID NO: 81962 - DNA, 60 bp, Artificial
  Synthetic oligonucleotide
aatgggaaatttgagttcattgctgaggaattccaatggaacacagtcaagcagaacggg

SEQ ID NO: 81963 - DNA, 60 bp, Artificial
  Synthetic oligonucleotide
catgggtgagaggccaaagcggcaggatcagcttctattggacaattgtagaaccaggag

SEQ ID NO: 81964 - DNA, 60 bp, Artificial
  Synthetic oligonucleotide
ctgagaaggcaaccagaggtctatttggtgcaattgctgggttcatagagaatggctggc

SEQ ID NO: 81965 - DNA, 60 bp, Artificial
  Synthetic oligonucleotide
aagtaatagcatagtgtcgatgtgttccagcacagaattccttggacaatggaactggcc

SEQ ID NO: 81966 - DNA, 60 bp, Artificial
  Synthetic oligonucleotide
atagtatagtatcgatgtgttccagcacagaattccttggacaatgggactggcctgatg

SEQ ID NO: 81967 - DNA, 60 bp, Artificial
  Synthetic oligonucleotide
tagtatagtatcgatgtgttccagcacagaattccttggacaatggaactggcctgatgg

SEQ ID NO: 81968 - DNA, 60 bp, Artificial
  Synthetic oligonucleotide
tggtggaccagtaatagtatagtgtcgatgtgttccagcacagaattccttggacaatgg

SEQ ID NO: 81969 - DNA, 60 bp, Artificial
  Synthetic oligonucleotide
ccagtaatagcatagtatcgatgtgttccagcacagaattccttggacaatggaactggc

SEQ ID NO: 81970 - DNA, 60 bp, Artificial
  Synthetic oligonucleotide
ccagtaatagtatagtatcgatgtgttccagcacagaattccttggacaatggaactggc

SEQ ID NO: 81971 - DNA, 60 bp, Artificial
  Synthetic oligonucleotide
tatagtatcaatgtgttccagcacagaattccttggacaatggaactggcctgatggggc

SEQ ID NO: 81972 - DNA, 60 bp, Artificial
  Synthetic oligonucleotide
atggtggaccagtaatagtatagtatcgatgtgttccagcacagaattccttggacaatg

SEQ ID NO: 81973 - DNA, 60 bp, Artificial
  Synthetic oligonucleotide
catagtatcgatgtgttccagcacagaattccttggacaatggaactggcctgatggggc

SEQ ID NO: 81974 - DNA, 60 bp, Artificial
  Synthetic oligonucleotide
tatagtatcgatgtgttccagcacagaattccttggacaatgggactggcctgatggggc

SEQ ID NO: 81975 - DNA, 60 bp, Artificial
  Synthetic oligonucleotide
catagtgtcgatgtgttccagcacagaattccttggacaatggaactggccggatggggc

SEQ ID NO: 81976 - DNA, 60 bp, Artificial
  Synthetic oligonucleotide
atagtatcgatgtgttccagcacagaattccttggacaatggaactggcctgatggggct

SEQ ID NO: 81977 - DNA, 60 bp, Artificial
  Synthetic oligonucleotide
cgatgtgttccagcacagaattccttggacaatgggactggcctgatggggctaaaatag

SEQ ID NO: 81978 - DNA, 60 bp, Artificial
  Synthetic oligonucleotide
gagggacaagagtagtcccaagaggacaactgtccaccagaggagttcagattgcttcaa

SEQ ID NO: 81979 - DNA, 60 bp, Artificial
  Synthetic oligonucleotide
agatgagtgcaggttctatgctctcagccaagggacaacgattagagggaaacactcaaa

SEQ ID NO: 81980 - DNA, 60 bp, Artificial
  Synthetic oligonucleotide
gaagatgaacagatgtatcaaaagtgctgcaatctattcgagaaattcttccctagcagt

SEQ ID NO: 81981 - DNA, 60 bp, Artificial
  Synthetic oligonucleotide
ataatgctgaacttctggttctcatggaaaatgaaagaactctagattttcatgactcaa

SEQ ID NO: 81982 - DNA, 60 bp, Artificial
  Synthetic oligonucleotide
ttgagtcccggaatgatgatgggcatgttcaacatgctaagcacagttttgggagtctca

SEQ ID NO: 81983 - DNA, 60 bp, Artificial
  Synthetic oligonucleotide
gcccagcactaagcatcaatgaactgagcaatcttgcaaaaggagagaaggctaatgtgc

SEQ ID NO: 81984 - DNA, 60 bp, Artificial
  Synthetic oligonucleotide
tttgtgtcactggggatgatagaaatgcgactgctagcttcatttatgatggattgcttg

SEQ ID NO: 81985 - DNA, 60 bp, Artificial
  Synthetic oligonucleotide
agcaaaagcaggagtgaagatgaatccaaatcagaagataataacaattggctccgtctc

SEQ ID NO: 81986 - DNA, 60 bp, Artificial
  Synthetic oligonucleotide
gcaggagtgaagatgaatccaaatcagaagataataacaattggctccgtctctctaacc

SEQ ID NO: 81987 - DNA, 60 bp, Artificial
  Synthetic oligonucleotide
cattgattccagttatgtgtgctcagggcttgttggagacacaccaaggaacgatgatgg

SEQ ID NO: 81988 - DNA, 60 bp, Artificial
  Synthetic oligonucleotide
tataaatatggcagactatagtattgactccagttatgtgtgctcagggcttgttggcga

SEQ ID NO: 81989 - DNA, 52 bp, Artificial
  Synthetic oligonucleotide
tgatggggcgaacatcaatttcatgcctatataagcttccgcaatttttgaa

SEQ ID NO: 81990 - DNA, 60 bp, Artificial
  Synthetic oligonucleotide
catagtgaaagcgggagaagcaataacatttgagtcaaatggtgcatttctcgctcctcg

SEQ ID NO: 81991 - DNA, 60 bp, Artificial
  Synthetic oligonucleotide
catagtgaaaccgggagaagcaataacatttgagtcaaatggtgcatttctcgctcctcg

SEQ ID NO: 81992 - DNA, 60 bp, Artificial
  Synthetic oligonucleotide
atgagggatcttatttcttcggagacaatgcagaggaatatgacaattaaagaaaaatac

SEQ ID NO: 81993 - DNA, 57 bp, Artificial
  Synthetic oligonucleotide
atgagtcttctaaccgaggtcgaaacgtacgttctctctatcgtcccttcaggcccc

SEQ ID NO: 81994 - DNA, 60 bp, Artificial
  Synthetic oligonucleotide
atgagtcttctaaccgaggtcgaaacgtacgttctctctatcgtcccttcaggccccctc

SEQ ID NO: 81995 - DNA, 58 bp, Artificial
  Synthetic oligonucleotide
gatgagccttctaaccgaggtcgaaacgtacgttctctctatcgtcccttcaggcccc

SEQ ID NO: 81996 - DNA, 60 bp, Artificial
  Synthetic oligonucleotide
atccccgatgcgacctattgattggtgatcaaagctggtcatatatagtggaaagaccta

SEQ ID NO: 81997 - DNA, 60 bp, Artificial
  Synthetic oligonucleotide
ataatagcggtactggcaacggccggaaaatcagacaagatctgcattgggtatcatgcc

SEQ ID NO: 81998 - DNA, 60 bp, Artificial
  Synthetic oligonucleotide
gcaatcattatagtaacgatattggcaacgaccggaaaatcagacaagatctgcattggg

SEQ ID NO: 81999 - DNA, 60 bp, Artificial
  Synthetic oligonucleotide
ctggaaaacagccaatcctctatttctggggtgtgcaccatcctccggacaccaatgagc

SEQ ID NO: 82000 - DNA, 60 bp, Artificial
  Synthetic oligonucleotide
aaggcctgctgtgaatggacaaagaggtagaattgattattactggtctgttttaaagcc

SEQ ID NO: 82001 - DNA, 60 bp, Artificial
  Synthetic oligonucleotide
agccaatcctctatttctggggtgtgcaccatcctcctgacaccaatgagcaaaacactt

SEQ ID NO: 82002 - DNA, 60 bp, Artificial
  Synthetic oligonucleotide
gatgcgacctattgattggtgatcaaagctggtcatatatagtggaaagacctacagccc

SEQ ID NO: 82003 - DNA, 60 bp, Artificial
  Synthetic oligonucleotide
gaaaccttgaatgtggaatctaatggaaatctaatcgccccttggtatgcatacaaattt

SEQ ID NO: 82004 - DNA, 60 bp, Artificial
  Synthetic oligonucleotide
aatgtaagtcctctgtggataggagaatgccccaaatatgtgaaaagtgaaagtttgagg

SEQ ID NO: 82005 - DNA, 60 bp, Artificial
  Synthetic oligonucleotide
atgtttcccaaaagtacatgggcaggagtagacaccagcagtggggtaacaaaggcttgc

SEQ ID NO: 82006 - DNA, 60 bp, Artificial
  Synthetic oligonucleotide
gatgttccccaaaagtacatgggcaggagtagacaccagcagtggggtatcaagtgcttg

SEQ ID NO: 82007 - DNA, 60 bp, Artificial
  Synthetic oligonucleotide
ccccaaaagtacatgggcaggagtagacaccagcagtggggtatcaagtgcttgtccgta

SEQ ID NO: 82008 - DNA, 60 bp, Artificial
  Synthetic oligonucleotide
caataacactggaaaacagccaatcctctatttctggggtgtgcaccatcctccggacac

SEQ ID NO: 82009 - DNA, 60 bp, Artificial
  Synthetic oligonucleotide
ccctctctggataggagaatgccccaaatatgtgaaaagtgaaagtttgagacttgcgac

SEQ ID NO: 82010 - DNA, 60 bp, Artificial
  Synthetic oligonucleotide
caaaacactttgtatggctctggtgatcgatatgtcaggatgggaactgaaagcatgaat

SEQ ID NO: 82011 - DNA, 60 bp, Artificial
  Synthetic oligonucleotide
ccatttatagtacggtatcgagcagtctagttttggtagggctgattttggcaatgggtg

SEQ ID NO: 82012 - DNA, 60 bp, Artificial
  Synthetic oligonucleotide
gcactcaagatgactattgcctctgtacctgcttcacgctacctaactgacatgactctt

SEQ ID NO: 82013 - DNA, 60 bp, Artificial
  Synthetic oligonucleotide
ctagtaacaagagaaccctatgtctcctgtgacccagatgagtgcaggttctatgctctc

SEQ ID NO: 82014 - DNA, 60 bp, Artificial
  Synthetic oligonucleotide
aataggaacagccccagtactagggaattacaaggagatatgtgtggcttggtcgagtag

SEQ ID NO: 82015 - DNA, 60 bp, Artificial
  Synthetic oligonucleotide
aataggaacagccccagtactagggaattacaaagaaatatgtgtggcctggtcgagtag

SEQ ID NO: 82016 - DNA, 50 bp, Artificial
  Synthetic oligonucleotide
tgacagggaacgacaatgatgcaagtgcccaaataatatatgcaggaaaa

SEQ ID NO: 82017 - DNA, 60 bp, Artificial
  Synthetic oligonucleotide
tgacagggaacgacaatgatgcaagtgcccaaataatatatgcaggaaaaatgacagatt

SEQ ID NO: 82018 - DNA, 60 bp, Artificial
  Synthetic oligonucleotide
tgactgggaacgacaatgatgcaagtgcccaaataatatatgcagggaaaatgacagact

SEQ ID NO: 82019 - DNA, 60 bp, Artificial
  Synthetic oligonucleotide
aataggaacagccccagtactagggaattacaaagagatatgtgtagcttggtcgagtag

SEQ ID NO: 82020 - DNA, 60 bp, Artificial
  Synthetic oligonucleotide
ctagcatacttactgacagtcagacagcgaccaaaagaattcggatggccatcaattagt

SEQ ID NO: 82021 - DNA, 60 bp, Artificial
  Synthetic oligonucleotide
catacttactgacagtcagacagcgaccaaaagaattcggatggccatcaattagtgtcg

SEQ ID NO: 82022 - DNA, 60 bp, Artificial
  Synthetic oligonucleotide
agatcacaggatttactggatacgagagggaagaataatgaagtatgaaaatgtccccaa

SEQ ID NO: 82023 - DNA, 60 bp, Artificial
  Synthetic oligonucleotide
cacaggatttactggatacgagagggaagaataatgaagtatgaaaatgtccccaaaaca

SEQ ID NO: 82024 - DNA, 60 bp, Artificial
  Synthetic oligonucleotide
tgagaatcaacaacgagactatattggaaacagggtatgtttgcagtaaattccattcag

SEQ ID NO: 82025 - DNA, 60 bp, Artificial
  Synthetic oligonucleotide
caacaacgagactatattggaaacagggtatgtttgcagtaaattccattcagatacccc

SEQ ID NO: 82026 - DNA, 50 bp, Artificial
  Synthetic oligonucleotide
ttccattcagatacccccaggccagctgacccctcaacaatgtcatgtga

SEQ ID NO: 82027 - DNA, 60 bp, Artificial
  Synthetic oligonucleotide
tgggtagaactgtgtcacctagtggtagatcgggctttgaagtcatcaaagttacagagg

SEQ ID NO: 82028 - DNA, 60 bp, Artificial
  Synthetic oligonucleotide
ggacatactgagaactcaggagtccgaatgtcaatgcattggagggacatgtgttgttgc

SEQ ID NO: 82029 - DNA, 60 bp, Artificial
  Synthetic oligonucleotide
catggagaaaggacatactgagaactcaggagtccgaatgtcaatgcattggagggacat

SEQ ID NO: 82030 - DNA, 60 bp, Artificial
  Synthetic oligonucleotide
ctggtcctttgccctcgcacagggagcactgctagggactaaacatagcaatggaaccat

SEQ ID NO: 82031 - DNA, 60 bp, Artificial
  Synthetic oligonucleotide
gaagcggaaagggctttcaagcctccactaccgctgtgccctttcagaggattcttccct

SEQ ID NO: 82032 - DNA, 60 bp, Artificial
  Synthetic oligonucleotide
ctgaagcggaaagggctttcaagcctccactaccgctgtgccctttcagaggattcttcc

SEQ ID NO: 82033 - DNA, 58 bp, Artificial
  Synthetic oligonucleotide
tggagtggggaatttagttttcaacacagtcatgacatacaataacactgtgataaac

SEQ ID NO: 82034 - DNA, 54 bp, Artificial
  Synthetic oligonucleotide
atgaatccaaattcgaagataataacaatcggggtagtgaacaccattttgtca

SEQ ID NO: 82035 - DNA, 60 bp, Artificial
  Synthetic oligonucleotide
ctgtggactagacaatgaacctggatcggggaattggccagatggttctaacattgggtt

SEQ ID NO: 82036 - DNA, 60 bp, Artificial
  Synthetic oligonucleotide
gacaatgaacctggatcggggaattggccagatggttctaacattgggtttatgcccaag

SEQ ID NO: 82037 - DNA, 51 bp, Artificial
  Synthetic oligonucleotide
ggactgttttcagccctgtttttatgtcgagcttataagagggaagcccaa

SEQ ID NO: 82038 - DNA, 60 bp, Artificial
  Synthetic oligonucleotide
aatgaaaaaacattagatctccatgattctaatgttcgaaacctccatgaaaaggtcaga

SEQ ID NO: 82039 - DNA, 60 bp, Artificial
  Synthetic oligonucleotide
aaaatgaaaaaacattagatctccatgattctaatgttcgaaacctccatgaaaaggtca

SEQ ID NO: 82040 - DNA, 60 bp, Artificial
  Synthetic oligonucleotide
gtcagacaagtgtggtccctaacatcggtagcaggccctgggtgagaggacaaagcggca

SEQ ID NO: 82041 - DNA, 50 bp, Artificial
  Synthetic oligonucleotide
cttgcaacaggaatgagaaacattcctgaaaaggcatcaaaagggctttt

SEQ ID NO: 82042 - DNA, 60 bp, Artificial
  Synthetic oligonucleotide
cacagagcaaaccaatctgtacaagaacaaccctggaagagttactgtatctactaagac

SEQ ID NO: 82043 - DNA, 60 bp, Artificial
  Synthetic oligonucleotide
tatctactaagactagtcagacaagtgtggtccctaacatcggtagcaggccctgggtga

SEQ ID NO: 82044 - DNA, 60 bp, Artificial
  Synthetic oligonucleotide
aatggtgattatgcgagactttacatctggggggtccatcacccctcaacagacacagag

SEQ ID NO: 82045 - DNA, 60 bp, Artificial
  Synthetic oligonucleotide
agacacagagcaaaccaatctgtacaagaacaaccctggaagagttactgtatctactaa

SEQ ID NO: 82046 - DNA, 60 bp, Artificial
  Synthetic oligonucleotide
ttgcaagagagcaaatataaacgatttctttaataggttaaattggctggtaaaatcaga

SEQ ID NO: 82047 - DNA, 60 bp, Artificial
  Synthetic oligonucleotide
taaaatcagatagtaatgcatacccccttcaaaacttgacaaaaataaacaatggtgatt

SEQ ID NO: 82048 - DNA, 60 bp, Artificial
  Synthetic oligonucleotide
cttgcaacaggaatgagaaacattcctgaaaaggcatcaaaagggctttttggagccata

SEQ ID NO: 82049 - DNA, 60 bp, Artificial
  Synthetic oligonucleotide
tggagccatagctggattcatagagaatggctggcaaggcctaattgatggatggtatgg

SEQ ID NO: 82050 - DNA, 60 bp, Artificial
  Synthetic oligonucleotide
gaattccaatggaataccgtaaagcagaacgggaaatccagtgcttgcaagagagcaaat

SEQ ID NO: 82051 - DNA, 60 bp, Artificial
  Synthetic oligonucleotide
gccgaggaattccaatggaataccgtaaagcagaacgggaaatccagtgcttgcaagaga

SEQ ID NO: 82052 - DNA, 60 bp, Artificial
  Synthetic oligonucleotide
gaagtggtcgccgcacaagaactggtggaatcacagaatttcccggaattatgcccgagc

SEQ ID NO: 82053 - DNA, 60 bp, Artificial
  Synthetic oligonucleotide
actgacgaccaagtagaagtggtcgccgcacaagaactggtggaatcacagaatttcccg

SEQ ID NO: 82054 - DNA, 60 bp, Artificial
  Synthetic oligonucleotide
gcaggggaaaacaatgctatcaattgtagttctgcttctgctcatagcagagagctcttc

SEQ ID NO: 82055 - DNA, 60 bp, Artificial
  Synthetic oligonucleotide
agcaaaagcaggggaaaacaatgctatcaattgtagttctgcttctgctcatagcagaga

SEQ ID NO: 82056 - DNA, 60 bp, Artificial
  Synthetic oligonucleotide
aagcctgagaagtatacttgccaacaatgggaaattcgaattcattgccgaggaattcca

SEQ ID NO: 82057 - DNA, 60 bp, Artificial
  Synthetic oligonucleotide
accaaagcctgagaagtatacttgccaacaatgggaaattcgaattcattgccgaggaat

SEQ ID NO: 82058 - DNA, 60 bp, Artificial
  Synthetic oligonucleotide
ggggagcccaggatgcgatcacttgggtggcacagagtgggacatcttcatagagagacc

SEQ ID NO: 82059 - DNA, 60 bp, Artificial
  Synthetic oligonucleotide
cgcagcattggggagcccaggatgcgatcacttgggtggcacagagtgggacatcttcat

SEQ ID NO: 82060 - DNA, 51 bp, Artificial
  Synthetic oligonucleotide
ggtaaggcgccaactcagagagaacgctgaagacaaagggaatggatgctt

SEQ ID NO: 82061 - DNA, 60 bp, Artificial
  Synthetic oligonucleotide
ctcaagcagccattgatcaaataaacgggaaactaaaccgtcttattgagaagacaaacg

SEQ ID NO: 82062 - DNA, 60 bp, Artificial
  Synthetic oligonucleotide
atttatagagatgaagcaatcaacaaccgatttcagattcagggagtcaaattgactcag

SEQ ID NO: 82063 - DNA, 60 bp, Artificial
  Synthetic oligonucleotide
gcgacaacaactgcattgagagtatccggaatggaacctataaccatgacatttatagag

SEQ ID NO: 82064 - DNA, 60 bp, Artificial
  Synthetic oligonucleotide
gatggtatgggttcagacaccaaaacgcagaggggacgggaacagcagcagatctcaaat

SEQ ID NO: 82065 - DNA, 60 bp, Artificial
  Synthetic oligonucleotide
ggagccatagctggattcatagagaatggctggcaaggcctaattgatggatggtatggg

SEQ ID NO: 82066 - DNA, 60 bp, Artificial
  Synthetic oligonucleotide
gatctcaaatctactcaagcagccattgatcaaataaacgggaaactaaaccgtcttatt

SEQ ID NO: 82067 - DNA, 60 bp, Artificial
  Synthetic oligonucleotide
gacaccaaaacgcagaggggacgggaacagcagcagatctcaaatctactcaagcagcca

SEQ ID NO: 82068 - DNA, 51 bp, Artificial
  Synthetic oligonucleotide
agagatgaagcaatcaacaaccgatttcagattcagggagtcaaattgact

SEQ ID NO: 82069 - DNA, 60 bp, Artificial
  Synthetic oligonucleotide
attaataaggtcaactcaatcattgacaaaatgaacactcaatttgaggccgttggaaag

SEQ ID NO: 82070 - DNA, 60 bp, Artificial
  Synthetic oligonucleotide
cgataaggtccgactccagctgagagacaatgcaaaagaattgggcaacgggtgctttga

SEQ ID NO: 82071 - DNA, 60 bp, Artificial
  Synthetic oligonucleotide
ctctagcatgccattccacaacatacatcctctcaccattggggaatgccccaaatacgt

SEQ ID NO: 82072 - DNA, 60 bp, Artificial
  Synthetic oligonucleotide
atcatcatcctgcaacaccaccgaggtttacaatgaaactgtaaggctggaaactataac

SEQ ID NO: 82073 - DNA, 60 bp, Artificial
  Synthetic oligonucleotide
caacaatacagtgaaagatagaagtccttatcgtgcattgatgagtgtgccattaggatc

SEQ ID NO: 82074 - DNA, 60 bp, Artificial
  Synthetic oligonucleotide
gcaacaccactgagatttacaatgaaactgtaaggctggaaactataacaattcctatca

SEQ ID NO: 82075 - DNA, 60 bp, Artificial
  Synthetic oligonucleotide
cctgcaacaccaccgaggtttacaatgaaactgtaaggctggaaactataacaattccta

SEQ ID NO: 82076 - DNA, 60 bp, Artificial
  Synthetic oligonucleotide
cattctgcaacaccactgagatttacaatgaaactgtaaggctggaaactataacaattc

SEQ ID NO: 82077 - DNA, 60 bp, Artificial
  Synthetic oligonucleotide
cgggttcaggacagtagtttcactggttcctgcactaatgctgttggagggagtgggacg

SEQ ID NO: 82078 - DNA, 60 bp, Artificial
  Synthetic oligonucleotide
cccacggattcaggacagtagtttcactggttcctgcactaatgctgttggagggagtgg

SEQ ID NO: 82079 - DNA, 60 bp, Artificial
  Synthetic oligonucleotide
tgtttgccgagataattggaacggaatgaatagaccaattttgatttttgatgaggatct

SEQ ID NO: 82080 - DNA, 60 bp, Artificial
  Synthetic oligonucleotide
caataacacagtgaaagacagaagtccttatcgtgcattgatgagtgtgccattaggatc

SEQ ID NO: 82081 - DNA, 60 bp, Artificial
  Synthetic oligonucleotide
ggcactcatggaatggctaaagacaagaccaatcctgtcacctctgactaaggggatttt

SEQ ID NO: 82082 - DNA, 60 bp, Artificial
  Synthetic oligonucleotide
caacgaatcaggaaggctaatagatttcctcaaggatgtgatggaatcaatggataaaga

SEQ ID NO: 82083 - DNA, 60 bp, Artificial
  Synthetic oligonucleotide
cagaccaagaactgggtgatgccccattcctcgaccggcttcgccgagatcagaagtctc

SEQ ID NO: 82084 - DNA, 60 bp, Artificial
  Synthetic oligonucleotide
cagaccaagaactgggtgatgccccattccttgaccgacttcgccgagaccagaagtctc

SEQ ID NO: 82085 - DNA, 60 bp, Artificial
  Synthetic oligonucleotide
ctaataaggtcaactcaatcattgacaaaatgaacactcggtttgaggccgttggaaagg

SEQ ID NO: 82086 - DNA, 60 bp, Artificial
  Synthetic oligonucleotide
ggatttttcccttttcataaggacaatgcaatacgattgggtgagaacaaagacgtaata

SEQ ID NO: 82087 - DNA, 60 bp, Artificial
  Synthetic oligonucleotide
agcagttcatacaggaggccggttgggatttccagcatggtggaggccatggtgtctcgg

SEQ ID NO: 82088 - DNA, 60 bp, Artificial
  Synthetic oligonucleotide
gtcaatgggcacctatcagatactatcaatctactcaacagtggcgagttccctagcact

SEQ ID NO: 82089 - DNA, 60 bp, Artificial
  Synthetic oligonucleotide
gaactctggatttccatgattcaaatgtcaagaacctatacgataaggtccgactccagc

SEQ ID NO: 82090 - DNA, 60 bp, Artificial
  Synthetic oligonucleotide
gtgatgatttgattgggaaaacatcatggtcctacatagtggagaaaccaaatcccgcca

SEQ ID NO: 82091 - DNA, 60 bp, Artificial
  Synthetic oligonucleotide
caacgagcaatgatggaccaagtgagagaaagccggaatcctgggaatgctgaaattgaa

SEQ ID NO: 82092 - DNA, 60 bp, Artificial
  Synthetic oligonucleotide
taagagtacatgaggggtatgaagaattcacaatggttgggagaagagcaacagctatcc

SEQ ID NO: 82093 - DNA, 60 bp, Artificial
  Synthetic oligonucleotide
taagagtacatgaggggtatgaagaattcacaatggttgggagaagagcaacagctattc

SEQ ID NO: 82094 - DNA, 60 bp, Artificial
  Synthetic oligonucleotide
gatttgcagaccaagaactgggtgatgccccattccttgaccggcttcgccgagatcaga

SEQ ID NO: 82095 - DNA, 60 bp, Artificial
  Synthetic oligonucleotide
ataacacagttcgagtctctgaaactctacagagattcgcttggagaagcagtaatgagg

SEQ ID NO: 82096 - DNA, 60 bp, Artificial
  Synthetic oligonucleotide
tctctgaaactctacagagattcgcttggagaagcagtaatgaggatgggagacctccac

SEQ ID NO: 82097 - DNA, 60 bp, Artificial
  Synthetic oligonucleotide
aaaaaacattagatctccatgattctaatgttcgaaacctccatgaaaaggtcagacgaa

SEQ ID NO: 82098 - DNA, 60 bp, Artificial
  Synthetic oligonucleotide
gttgggatttccagtatggtggaggccatggtgtctagggcccgaattgatgcgcgaatt

SEQ ID NO: 82099 - DNA, 51 bp, Artificial
  Synthetic oligonucleotide
actaataaggtcaactcaatcattgacaaaatgaacactcaatttgaggcc

SEQ ID NO: 82100 - DNA, 60 bp, Artificial
  Synthetic oligonucleotide
cctttgacatgagtaacgagggttcttatttcttcggagacaatgcagaggagtatgaca

SEQ ID NO: 82101 - DNA, 60 bp, Artificial
  Synthetic oligonucleotide
ggggcctcatcggaggacttgaatggaatgataacacagttcgagtctctgaaactctac

SEQ ID NO: 82102 - DNA, 60 bp, Artificial
  Synthetic oligonucleotide
cagcttcgagcagataacgttcttgcaagcattgcaactcttacttgaagttgagagtga

SEQ ID NO: 82103 - DNA, 60 bp, Artificial
  Synthetic oligonucleotide
caaattcaaacgaggagatcattcgagctgaagaagttgtgggaacaaacccgctcaaag

SEQ ID NO: 82104 - DNA, 60 bp, Artificial
  Synthetic oligonucleotide
tatctttctggatgtgctccaatggatcattgcagtgcagaatttgcatttaaacttgga

SEQ ID NO: 82105 - DNA, 60 bp, Artificial
  Synthetic oligonucleotide
cttccttcgacatgaataatgaaggatcttatttcttcggagacaatgcagaggagtatg

SEQ ID NO: 82106 - DNA, 60 bp, Artificial
  Synthetic oligonucleotide
cgtcattgagccctggaatgatgatgggcatgttcaatatgctgagcactgtcttgggcg

SEQ ID NO: 82107 - DNA, 59 bp, Artificial
  Synthetic oligonucleotide
caagtgatcctctcattattgccgcaagtatcattgggatcttgcacttgatattgtgg

SEQ ID NO: 82108 - DNA, 52 bp, Artificial
  Synthetic oligonucleotide
ggaactggccggatggggctaaaatagagtacttcctctaagatgtagaaaa

SEQ ID NO: 82109 - DNA, 60 bp, Artificial
  Synthetic oligonucleotide
accattgcctctgtacctgcttcacgctacctaactgacatgactcttgaagagatgtca

SEQ ID NO: 82110 - DNA, 60 bp, Artificial
  Synthetic oligonucleotide
agcaaaagcaggggaaacaatgctatcaatcacgattctgtttctgcttatagcagaggg

SEQ ID NO: 82111 - DNA, 60 bp, Artificial
  Synthetic oligonucleotide
agcaaaagcaggggaaacaatgctatcaatcacgattctgttcctgctcatagcagaggg

SEQ ID NO: 82112 - DNA, 60 bp, Artificial
  Synthetic oligonucleotide
ggggaaacaatgctatcaatcacgattctgttcctgctcatagcagagggctcctctcag

SEQ ID NO: 82113 - DNA, 60 bp, Artificial
  Synthetic oligonucleotide
agtgactacgaagggagactgatccaaaacagcataacaatagagagaatggttctctcg

SEQ ID NO: 82114 - DNA, 60 bp, Artificial
  Synthetic oligonucleotide
ctggatgtgctccaatggatcattgcagtgcagaatttgcatttaaacttggagttcaga

SEQ ID NO: 82115 - DNA, 58 bp, Artificial
  Synthetic oligonucleotide
agaattcggatggccatcaattagtgtcgaattgtttaaaaacgaccttgtttctact

SEQ ID NO: 82116 - DNA, 60 bp, Artificial
  Synthetic oligonucleotide
ccaaaagaattcggatggccatcaattagtgtcgaattgtttaaaaacgaccttgtttct

SEQ ID NO: 82117 - DNA, 60 bp, Artificial
  Synthetic oligonucleotide
agaatgccactgaaatcagagcatctgttgggaggatggttggtggaatcgggagattct

SEQ ID NO: 82118 - DNA, 60 bp, Artificial
  Synthetic oligonucleotide
ttcatacagaagaccggttgggatttctagcatggtggaggccatggtgtctagggcccg

SEQ ID NO: 82119 - DNA, 60 bp, Artificial
  Synthetic oligonucleotide
gggaggttctacatacagatgtgcactgaactcaaactcagcgactatgaagggaggttg

SEQ ID NO: 82120 - DNA, 55 bp, Artificial
  Synthetic oligonucleotide
tgagggattgtagtgtagctggatggctcctcggaaaccccatgtgtgatgaatt

SEQ ID NO: 82121 - DNA, 60 bp, Artificial
  Synthetic oligonucleotide
agggtagataatcactcaccgagtgacatccacatcatggcgtctcaaggcaccaaacga

SEQ ID NO: 82122 - DNA, 60 bp, Artificial
  Synthetic oligonucleotide
gctggatggatccttggaaacccaatgtgtgatgatttgattgggaaaacatcatggtcc

SEQ ID NO: 82123 - DNA, 60 bp, Artificial
  Synthetic oligonucleotide
ttggaaacccaatgtgtgatgatttgattgggaaaacatcatggtcctacatagtggaga

SEQ ID NO: 82124 - DNA, 60 bp, Artificial
  Synthetic oligonucleotide
tgctggatggatccttggaaacccaatgtgtgatgatttgattgggaaaacatcatggtc

SEQ ID NO: 82125 - DNA, 60 bp, Artificial
  Synthetic oligonucleotide
ttgaatggatgtcaatccgactttacttttcttgaaagtgccagcgcaaaatgctataag

SEQ ID NO: 82126 - DNA, 60 bp, Artificial
  Synthetic oligonucleotide
tccagccaagagcatggaatatgatgctgttgcaactacacactcctggattcctaaaag

SEQ ID NO: 82127 - DNA, 60 bp, Artificial
  Synthetic oligonucleotide
ccagccaagagcatggaatatgatgctgttgcaactacacactcctggattcctaaaagg

SEQ ID NO: 82128 - DNA, 60 bp, Artificial
  Synthetic oligonucleotide
tttctggatgtgctccaatggatcattgcaatgcagaatttgcatttaaacttgtgagtt

SEQ ID NO: 82129 - DNA, 60 bp, Artificial
  Synthetic oligonucleotide
ctggatgtgctccaatggatcattgcaatgcagaatttgcatttaaacttgtgagttcag

SEQ ID NO: 82130 - DNA, 60 bp, Artificial
  Synthetic oligonucleotide
taatatatgcagggagaatgacagactccattaaatcatggagaaaggacatactaagaa

SEQ ID NO: 82131 - DNA, 60 bp, Artificial
  Synthetic oligonucleotide
gtgctcaaataatatacgcaggaagaatgacagactccattaaatcatggagaaaggaca

SEQ ID NO: 82132 - DNA, 60 bp, Artificial
  Synthetic oligonucleotide
atgaatccaaatcagaagataataacaatcggggtagtgaataccactctgtcaacacta

SEQ ID NO: 82133 - DNA, 60 bp, Artificial
  Synthetic oligonucleotide
aagcccccactgccgctgtgccccttcagaggattcttcccttttcacaaggacaatgca

SEQ ID NO: 82134 - DNA, 60 bp, Artificial
  Synthetic oligonucleotide
gaagataataacaatcggggtagtgaataccactctgtcaacactagcccttctcattgg

SEQ ID NO: 82135 - DNA, 60 bp, Artificial
  Synthetic oligonucleotide
gggcaggacagtgtcaactagtggtagatctggctttgaaatcatcaaagttacagaggg

SEQ ID NO: 82136 - DNA, 60 bp, Artificial
  Synthetic oligonucleotide
aaatcagtacaaggcctaaagtaaatggtcaggctgggagaatgacattctactggacca

SEQ ID NO: 82137 - DNA, 60 bp, Artificial
  Synthetic oligonucleotide
ggtcaggaatggaacatatgaccacaaggaattcgaagaagagtccaaactgaatagaca

SEQ ID NO: 82138 - DNA, 55 bp, Artificial
  Synthetic oligonucleotide
aaaagttaggaatggaacatatgaccacaaggaatttgaggaggagtccagactg

SEQ ID NO: 82139 - DNA, 60 bp, Artificial
  Synthetic oligonucleotide
ggtcaggaatggaacatatgaccacaaggaattcgaagaggagtccaaactgaatagaca

SEQ ID NO: 82140 - DNA, 60 bp, Artificial
  Synthetic oligonucleotide
cacaaggacaatgcaatacgattgggtgagaacaaagacgtaatagtcacaagggagcct

SEQ ID NO: 82141 - DNA, 60 bp, Artificial
  Synthetic oligonucleotide
cataaggacaatgcaatacgattgggtgagaacaaagacgtaatagtcacaagggagcct

SEQ ID NO: 82142 - DNA, 60 bp, Artificial
  Synthetic oligonucleotide
ttccaacaggccttggatgaggatcaacaatgagaccatactagaaacagggtatgtatg

SEQ ID NO: 82143 - DNA, 60 bp, Artificial
  Synthetic oligonucleotide
ggtttcttcccttttcataaggacaatgcaatacgattgggtgagaacaaagacgtaata

SEQ ID NO: 82144 - DNA, 60 bp, Artificial
  Synthetic oligonucleotide
ggtttcttcccctttcacaaggacaatgcaatacgattgggtgagaacaaagacgtaata

SEQ ID NO: 82145 - DNA, 60 bp, Artificial
  Synthetic oligonucleotide
cataaggacaatgcaatacgattgggtgagaacaaagacgtaatagtcacaagagagcct

SEQ ID NO: 82146 - DNA, 60 bp, Artificial
  Synthetic oligonucleotide
tcacaaggacaatgcaatacgattgggtgagaacaaagacgtaatagtcacaagggagcc

SEQ ID NO: 82147 - DNA, 60 bp, Artificial
  Synthetic oligonucleotide
cgataaactctagcatgccattccacaacatacatcctctcaccattggggaatgcccca

SEQ ID NO: 82148 - DNA, 60 bp, Artificial
  Synthetic oligonucleotide
gtccttgaagcaatggctttccttgaagaatcccacccaggaatctttgaaaactcgtgt

SEQ ID NO: 82149 - DNA, 60 bp, Artificial
  Synthetic oligonucleotide
gctgcatcaataggtgtttttatgtggagttgataagaggaaggccacaagagactagag

SEQ ID NO: 82150 - DNA, 60 bp, Artificial
  Synthetic oligonucleotide
gtgtcaataggtgtttttatgtggagttgataagggggagaccacaggaaactagggtat

SEQ ID NO: 82151 - DNA, 56 bp, Artificial
  Synthetic oligonucleotide
aatattcttaaagggaagtttcagacagcagcacaacgagcaatgatggaccaagt

SEQ ID NO: 82152 - DNA, 60 bp, Artificial
  Synthetic oligonucleotide
tatcatcaccacccacagtgtacaataccagaatagaatgcattggatggtccagcacaa

SEQ ID NO: 82153 - DNA, 60 bp, Artificial
  Synthetic oligonucleotide
gatagatctcaatatcgtgccctagtgagttggcctttatcatcaccacccacagtgtac

SEQ ID NO: 82154 - DNA, 60 bp, Artificial
  Synthetic oligonucleotide
gcaagaggcctgtttggtgcaatagctggtttcatagaaggtggttggccaggtttaatc

SEQ ID NO: 82155 - DNA, 60 bp, Artificial
  Synthetic oligonucleotide
cggtttggcggctaatgaatcaggaaggctaatagatttcctcaaggatgtgatggaatc

SEQ ID NO: 82156 - DNA, 60 bp, Artificial
  Synthetic oligonucleotide
cggtttaacagctaatgaatcaggaaggctaatagatttcctcaaggatgtgatggaatc

SEQ ID NO: 82157 - DNA, 60 bp, Artificial
  Synthetic oligonucleotide
tcaagagcaaaccaacctatacgttcaagcatcaggaagggtaacagtttcaactagaag

SEQ ID NO: 82158 - DNA, 60 bp, Artificial
  Synthetic oligonucleotide
aacgggacctatgatcatgacatatacagagatgaagcattaaacaaccgattccaaatc

SEQ ID NO: 82159 - DNA, 60 bp, Artificial
  Synthetic oligonucleotide
catgacatatacagagatgaagcattaaacaaccgattccaaatcaagggtgtagagcta

SEQ ID NO: 82160 - DNA, 60 bp, Artificial
  Synthetic oligonucleotide
cactgtgatgtattccaagatgaaacctgggacctctatgtggaacgtagcagcgccttc

SEQ ID NO: 82161 - DNA, 59 bp, Artificial
  Synthetic oligonucleotide
ccaatcagggaggataagcatctactggacaatagtgaagccgggggatgtactagtaa

SEQ ID NO: 82162 - DNA, 60 bp, Artificial
  Synthetic oligonucleotide
ctgatcgctcctcgagggtacttcaaaatgcgcactggaaaaagctcaataatgagatca

SEQ ID NO: 82163 - DNA, 60 bp, Artificial
  Synthetic oligonucleotide
gaccagattaatgggaagttgaaccgagtaatcgagaaaacaaatgagaagtttcaccag

SEQ ID NO: 82164 - DNA, 60 bp, Artificial
  Synthetic oligonucleotide
gttggtccagagctcctcaacagggaaaatatgcaacaacccacatagaatccttgatgg

SEQ ID NO: 82165 - DNA, 60 bp, Artificial
  Synthetic oligonucleotide
tccttgatgggagggactgtacactgatagatgccctactgggagacccccactgtgatg

SEQ ID NO: 82166 - DNA, 60 bp, Artificial
  Synthetic oligonucleotide
agccaacaaaccataatcccgaatattggatccaggccttgggtcaggggccaatcaggg

SEQ ID NO: 82167 - DNA, 60 bp, Artificial
  Synthetic oligonucleotide
atcccgaatattggatccaggccttgggtcaggggccaatcagggaggataagcatctac

SEQ ID NO: 82168 - DNA, 60 bp, Artificial
  Synthetic oligonucleotide
gagctcctcgacagggaaaatatgcaacaacccacatagaatccttgatgggagggactg

SEQ ID NO: 82169 - DNA, 60 bp, Artificial
  Synthetic oligonucleotide
gtgttgtcctactggggttcattatgtgggcctgccaaagaggcaacattaggtgcaaca

SEQ ID NO: 82170 - DNA, 60 bp, Artificial
  Synthetic oligonucleotide
ccaaatcaagggtgtagagctaaaatctgggtacaaagattggatcttatggatttcctt

SEQ ID NO: 82171 - DNA, 60 bp, Artificial
  Synthetic oligonucleotide
attccaaatcaagggtgtagagctaaaatctgggtacaaagattggatcttatggatttc

SEQ ID NO: 82172 - DNA, 60 bp, Artificial
  Synthetic oligonucleotide
ccgattccaaatcaagggtgtagagctaaaatctgggtacaaagactggatcttatggat

SEQ ID NO: 82173 - DNA, 60 bp, Artificial
  Synthetic oligonucleotide
ttaaacaaccgattccaaatcaagggtgtagagctaaaatctgggtacaaagactggatc

SEQ ID NO: 82174 - DNA, 60 bp, Artificial
  Synthetic oligonucleotide
ccaagagcaaaccaacctatacgttcaggcatcaggaagggtaacagtttcaactagaag

SEQ ID NO: 82175 - DNA, 60 bp, Artificial
  Synthetic oligonucleotide
gcctgcaaaagagggcctgctagtggtttcttcagcagactaaattggctgaccaaatct

SEQ ID NO: 82176 - DNA, 60 bp, Artificial
  Synthetic oligonucleotide
gcaaaccaacctatacgttcaagcatcaggaagggtaacagtttcaactagaaggagcca

SEQ ID NO: 82177 - DNA, 60 bp, Artificial
  Synthetic oligonucleotide
gttcaggcatcaggaagggtaacagtttcaactagaaggagccaacaaaccataatcccg

SEQ ID NO: 82178 - DNA, 60 bp, Artificial
  Synthetic oligonucleotide
agctatcttttctgtctggctctcagccaagattactcagagaacaacaacagcactgca

SEQ ID NO: 82179 - DNA, 60 bp, Artificial
  Synthetic oligonucleotide
tgaccagattaatgggaagttgaaccgagtaatcgagaaaacaaatgagaagtttcacca

SEQ ID NO: 82180 - DNA, 60 bp, Artificial
  Synthetic oligonucleotide
ctggctctcagccaagattactcagagaacaacaacagcactgcaacactgtgcttgggg

SEQ ID NO: 82181 - DNA, 60 bp, Artificial
  Synthetic oligonucleotide
aattatcttttctgtctggctctcagccaagattactcagagaacaacaacagcactgca

SEQ ID NO: 82182 - DNA, 60 bp, Artificial
  Synthetic oligonucleotide
ctatggtcttacaatgcagagcttctggtggccttggaaaaccagcatacaattgatctg

SEQ ID NO: 82183 - DNA, 60 bp, Artificial
  Synthetic oligonucleotide
ccgacctatacgttcaggcatcaggaagggtaacagtttcaactagaaggagccaacaaa

SEQ ID NO: 82184 - DNA, 60 bp, Artificial
  Synthetic oligonucleotide
gcaaaccaacctatacgttcaggcatcaggaagggtaacagtttcaactagaaggagcca

SEQ ID NO: 82185 - DNA, 60 bp, Artificial
  Synthetic oligonucleotide
agccaagcagggaaaaataattgggcaaactgaaatcagtttcaatggaggccatataga

SEQ ID NO: 82186 - DNA, 60 bp, Artificial
  Synthetic oligonucleotide
aataattgggcaagctgaaatcagtttcaatggaggccatatagaagagtgctcatgcta

SEQ ID NO: 82187 - DNA, 60 bp, Artificial
  Synthetic oligonucleotide
agaccagagagtgatcatttcatgaacaatacagaagcattgtgtgatgccaaggggttt

SEQ ID NO: 82188 - DNA, 60 bp, Artificial
  Synthetic oligonucleotide
cagggtttgaaatcctgaaagtcagaaatggctgggtacaaaatagtaaagagcagatca

SEQ ID NO: 82189 - DNA, 60 bp, Artificial
  Synthetic oligonucleotide
ggcaagctgaaatcagtttcaatggaggccatatagaagagtgctcatgctaccccaatg

SEQ ID NO: 82190 - DNA, 60 bp, Artificial
  Synthetic oligonucleotide
ccaggaatctttgaaaactcgtgtcttgaaacgatggagattgttcaacaaacaagggtg

SEQ ID NO: 82191 - DNA, 60 bp, Artificial
  Synthetic oligonucleotide
cccaggaatctttgaaaactcgtgtcttgaaacgatggaggttgttcaacagacaagggt

SEQ ID NO: 82192 - DNA, 60 bp, Artificial
  Synthetic oligonucleotide
ccattggctccatatcattaggattggttgtattcaatgttctattgcatatcgtgagca

SEQ ID NO: 82193 - DNA, 60 bp, Artificial
  Synthetic oligonucleotide
tcaaaaaataataaccattggctccatatcattaggattggttgtattcaatgttctatt

SEQ ID NO: 82194 - DNA, 60 bp, Artificial
  Synthetic oligonucleotide
tcgtgagcatcatagtaacagtattagtccttgggagaggtggaaacaatgggatctgta

SEQ ID NO: 82195 - DNA, 60 bp, Artificial
  Synthetic oligonucleotide
atggggaataaggggtacggtgtaaaaggcttcggatttcgacagggaactgatgtatgg

SEQ ID NO: 82196 - DNA, 60 bp, Artificial
  Synthetic oligonucleotide
ggtggaaacaatgggatctgtaacgagacagtagtgagggaatacaatgagacagtcagg

SEQ ID NO: 82197 - DNA, 60 bp, Artificial
  Synthetic oligonucleotide
agaggtggaaacaatgggatctgtaacgagacagtagtgagggaatacaatgagacagtc

SEQ ID NO: 82198 - DNA, 60 bp, Artificial
  Synthetic oligonucleotide
gactgacggccccgccaataggcaggcacagtataggatatacaaagcaaatcaaggtaa

SEQ ID NO: 82199 - DNA, 60 bp, Artificial
  Synthetic oligonucleotide
gtaatgactgacggccccgccaataggcaggcacagtataggatatacaaagcaaatcaa

SEQ ID NO: 82200 - DNA, 60 bp, Artificial
  Synthetic oligonucleotide
ggaggggtgcctactgatgtcgttaattcctgggcaggggatatattgaggacacaagaa

SEQ ID NO: 82201 - DNA, 60 bp, Artificial
  Synthetic oligonucleotide
gggcggacaattagtcaaacctccaggtcaggatttgagatactaagagtaaagaacggc

SEQ ID NO: 82202 - DNA, 60 bp, Artificial
  Synthetic oligonucleotide
agatactaagagtaaagaacggctggacacagacaagtaaagagctggttaggaaacagg

SEQ ID NO: 82203 - DNA, 60 bp, Artificial
  Synthetic oligonucleotide
gagtaaagaacggctggacacagacaagtaaagagctggttaggaaacaggtagttgttg

SEQ ID NO: 82204 - DNA, 60 bp, Artificial
  Synthetic oligonucleotide
tttgggttgaaatgatcaggggcaagccagaagaggaaacaatctggacttccagcagct

SEQ ID NO: 82205 - DNA, 60 bp, Artificial
  Synthetic oligonucleotide
aatagttgcccaaacggatgtcagctttaatgaaggacatattgaagagtgttcttgcta

SEQ ID NO: 82206 - DNA, 60 bp, Artificial
  Synthetic oligonucleotide
agcaaatcaaggtaaaatagttgcccaaacggatgtcagctttaatgaaggacatattga

SEQ ID NO: 82207 - DNA, 54 bp, Artificial
  Synthetic oligonucleotide
aatggaacagtgaaagatagaagcccatttaggactctcatgagtgtcgaagtg

SEQ ID NO: 82208 - DNA, 60 bp, Artificial
  Synthetic oligonucleotide
gtatgtagagacaattggacaggaaccaacaggcctgtactggttatctcaccggacctc

SEQ ID NO: 82209 - DNA, 60 bp, Artificial
  Synthetic oligonucleotide
aggaaacaggtagttgttgataatttaaactggtcgggatacagtgggtctttcaccttg

SEQ ID NO: 82210 - DNA, 60 bp, Artificial
  Synthetic oligonucleotide
ggtagttgttgataatttaaactggtcgggatacagtgggtctttcaccttgccagtaga

SEQ ID NO: 82211 - DNA, 60 bp, Artificial
  Synthetic oligonucleotide
gcagaactttcttcttaactcaggggtccttgctcaatgacaaacactcaaatggaacag

SEQ ID NO: 82212 - DNA, 60 bp, Artificial
  Synthetic oligonucleotide
aatggaacagtgaaagatagaagcccatttaggactctcatgagtgtcgaagtgggccaa

SEQ ID NO: 82213 - DNA, 60 bp, Artificial
  Synthetic oligonucleotide
ggctttgcacctttctccaaggacaatggaataagaattggttccaggggacatgttttt

SEQ ID NO: 82214 - DNA, 52 bp, Artificial
  Synthetic oligonucleotide
tttcaccttgccagtagaattatctgggaaagattgcttggtcccttgtttt

SEQ ID NO: 82215 - DNA, 60 bp, Artificial
  Synthetic oligonucleotide
tgatgtatggatggggcggacaattagtcaaacctccaggtcaggatttgagatactaag

SEQ ID NO: 82216 - DNA, 60 bp, Artificial
  Synthetic oligonucleotide
ttatggaggggtgcctactgatgtcgttaattcctgggcaggggatatattgaggacaca

SEQ ID NO: 82217 - DNA, 60 bp, Artificial
  Synthetic oligonucleotide
gggaagatgcccaatttactgggtcatgcactagccccatggggaataaggggtacggtg

SEQ ID NO: 82218 - DNA, 60 bp, Artificial
  Synthetic oligonucleotide
atactccaagaggggaagatgcccaatttactgggtcatgcactagccccatggggaata

SEQ ID NO: 82219 - DNA, 58 bp, Artificial
  Synthetic oligonucleotide
accggacctctcttacagagttgggtacctatgtgcagggctgcccagtgatactcca

SEQ ID NO: 82220 - DNA, 60 bp, Artificial
  Synthetic oligonucleotide
accggacctctcttacagagttgggtacctatgtgcagggctgcccagtgatactccaag

SEQ ID NO: 82221 - DNA, 60 bp, Artificial
  Synthetic oligonucleotide
tggacaggaaccaacaggcctgtactggttatctcaccggacctctcttacagagttggg

SEQ ID NO: 82222 - DNA, 60 bp, Artificial
  Synthetic oligonucleotide
gtgttcttgctaccccaatgatgggaaagtagaatgcgtatgtagagacaattggacagg

SEQ ID NO: 82223 - DNA, 60 bp, Artificial
  Synthetic oligonucleotide
ttgaagctgtagcatggtcagcaactgcctgccacgatggaaagaagtggatgacaattg

SEQ ID NO: 82224 - DNA, 58 bp, Artificial
  Synthetic oligonucleotide
tcagcaactgcctgccacgatggaaagaagtggatgacaattggtgtcacagggccag

SEQ ID NO: 82225 - DNA, 60 bp, Artificial
  Synthetic oligonucleotide
gacatattgaagagtgttcttgctaccccaatgatgggaaagtagaatgcgtatgtagag

SEQ ID NO: 82226 - DNA, 59 bp, Artificial
  Synthetic oligonucleotide
ggctttgcacctttctccaaggacaatggaataagaattggttccaggggacatgtttt

SEQ ID NO: 82227 - DNA, 60 bp, Artificial
  Synthetic oligonucleotide
tttcaccttgccagtagaattatctgggaaagattgcttggtcccttgtttttgggttga

SEQ ID NO: 82228 - DNA, 60 bp, Artificial
  Synthetic oligonucleotide
taactcaggggtccttgctcaatgacaaacactcaaatggaacagtgaaagatagaagcc

SEQ ID NO: 82229 - DNA, 60 bp, Artificial
  Synthetic oligonucleotide
ccacaccgacaggggttcaatcactacaactaaaccctttcaaaacatctcgagaatatc

SEQ ID NO: 82230 - DNA, 60 bp, Artificial
  Synthetic oligonucleotide
ggtcaacaatggggactatgcaagactttacatatggggagttcaccatccttcaactga

SEQ ID NO: 82231 - DNA, 60 bp, Artificial
  Synthetic oligonucleotide
caggggatcactcactacaactaaaccctttcaaaacatctcgagaatatccatcgggga

SEQ ID NO: 82232 - DNA, 60 bp, Artificial
  Synthetic oligonucleotide
ctacaactaaaccctttcaaaacatctcgaggatatcaatcggggactgtcccaagtatg

SEQ ID NO: 82233 - DNA, 60 bp, Artificial
  Synthetic oligonucleotide
ttattcaacagtggcgagttccttagcactggcaatcatgatagctggtctatctttctg

SEQ ID NO: 82234 - DNA, 60 bp, Artificial
  Synthetic oligonucleotide
gatagggcaaggagacgtggtgttggtgatgaaacggaaacgggactctagcatacttac

SEQ ID NO: 82235 - DNA, 60 bp, Artificial
  Synthetic oligonucleotide
cctttgacatgagcaatgaaggatcttatttcttcggagacaatgcagaggaatatgaca

SEQ ID NO: 82236 - DNA, 60 bp, Artificial
  Synthetic oligonucleotide
ggttctacatacagatgtgcactgaactcaaactcagcgattatgaagggaggctgatcc

SEQ ID NO: 82237 - DNA, 50 bp, Artificial
  Synthetic oligonucleotide
ccccttaatggtagcatacatgctagaaagagagttggtccgcaaaacaa

SEQ ID NO: 82238 - DNA, 60 bp, Artificial
  Synthetic oligonucleotide
cgtcaggagatcgagggagtgaaattagactctagtgggaatgtgtataaaatactgtca

SEQ ID NO: 82239 - DNA, 60 bp, Artificial
  Synthetic oligonucleotide
gaatgtgtataaaatactgtcaatttacagctgcatcgcaagcagtcttgtattagcagc

SEQ ID NO: 82240 - DNA, 60 bp, Artificial
  Synthetic oligonucleotide
gtgtataaaatactgtcaatttacagctgcatcgcaagcagtcttgtattagcagcactc

SEQ ID NO: 82241 - DNA, 60 bp, Artificial
  Synthetic oligonucleotide
caaatttcgagtctgtgcaacacgaattcagtgaaatagaggagaggataaaccagttgt

SEQ ID NO: 82242 - DNA, 59 bp, Artificial
  Synthetic oligonucleotide
aatttcgagtctgtgcaacacgaattcagtgaaatagaggagaggataaaccaattgtc

SEQ ID NO: 82243 - DNA, 60 bp, Artificial
  Synthetic oligonucleotide
acaatggtcaaaccaggagagtcaataacatttgagtctaatggtgcattcttggctcct

SEQ ID NO: 82244 - DNA, 60 bp, Artificial
  Synthetic oligonucleotide
caaaccaggagagtcaataacatttgagtctaatggtgcattcttggctcctagatatgc

SEQ ID NO: 82245 - DNA, 60 bp, Artificial
  Synthetic oligonucleotide
tggacaggctggacggatgacattttattggacaatagtcaaaccaggagagtcaataac

SEQ ID NO: 82246 - DNA, 60 bp, Artificial
  Synthetic oligonucleotide
ggacaggctggacggatgacattttattggacaatagtcaaaccaggagagtcaataaca

SEQ ID NO: 82247 - DNA, 60 bp, Artificial
  Synthetic oligonucleotide
gcactaggcccaaagtcaatggacaggctggacggatgacattttattggacaatggtca

SEQ ID NO: 82248 - DNA, 60 bp, Artificial
  Synthetic oligonucleotide
gcccaaagtcaatggacaggctggacggatgacattttattggacaatggtcaaaccagg

SEQ ID NO: 82249 - DNA, 60 bp, Artificial
  Synthetic oligonucleotide
gtcacagtgactagctcagtggaactagtcgaaacagaacacactgggtcattctgctca

SEQ ID NO: 82250 - DNA, 60 bp, Artificial
  Synthetic oligonucleotide
gtcacggtaactagctcagtggaactagtcgaaacagaacacactgggtcattctgttca

SEQ ID NO: 82251 - DNA, 60 bp, Artificial
  Synthetic oligonucleotide
cgagaacaatgtcacggtaactagctcagtggaactagtcgaaacagaacacactgggtc

SEQ ID NO: 82252 - DNA, 60 bp, Artificial
  Synthetic oligonucleotide
atgtcacggtaactagctcagtggaactagtcgaaacagaacacactgggtcattctgtt

SEQ ID NO: 82253 - DNA, 60 bp, Artificial
  Synthetic oligonucleotide
tcgagaacaatgtcacagtgactagctcagtggaactagtcgaaacagaacacactgggt

SEQ ID NO: 82254 - DNA, 60 bp, Artificial
  Synthetic oligonucleotide
gacacaataatcgagaacaatgtcacggtaactagctcagtggaactagtcgaaacagaa

SEQ ID NO: 82255 - DNA, 60 bp, Artificial
  Synthetic oligonucleotide
cgagtctgtgcaacacgaattcagtgaaatagaggagaggataaaccagttgtcgaaaca

SEQ ID NO: 82256 - DNA, 60 bp, Artificial
  Synthetic oligonucleotide
cgccaggagattgagggagtgagattagattctagtgggaatgtgtataaaatactgtca

SEQ ID NO: 82257 - DNA, 60 bp, Artificial
  Synthetic oligonucleotide
ctatttaagcaacaactcaacagacaaagttgacacaataatcgagaacaatgtcacggt

SEQ ID NO: 82258 - DNA, 60 bp, Artificial
  Synthetic oligonucleotide
ctcaacagacaaagttgacacaataatcgagaacaatgtcacggtaactagctcagtgga

SEQ ID NO: 82259 - DNA, 60 bp, Artificial
  Synthetic oligonucleotide
cactattggagactgtcccaaatatgtgaatgtcaaatccctaaagcttgccacaggact

SEQ ID NO: 82260 - DNA, 60 bp, Artificial
  Synthetic oligonucleotide
cacagtgttcacagaaacactatcggagactgtcccaaatatgtgaatgtcaagtctcta

SEQ ID NO: 82261 - DNA, 60 bp, Artificial
  Synthetic oligonucleotide
cttggctcctagatatgcttttgagattgtctctgttggaaatgggaaattattcagaag

SEQ ID NO: 82262 - DNA, 60 bp, Artificial
  Synthetic oligonucleotide
agtcaataacatttgagtctaatggtgcattcctggctcctagatatgcttttgagattg

SEQ ID NO: 82263 - DNA, 60 bp, Artificial
  Synthetic oligonucleotide
tccaaagtaaataatatcgtcgacagaatgaatacaaatttcgagtctgtgcaatacgaa

SEQ ID NO: 82264 - DNA, 60 bp, Artificial
  Synthetic oligonucleotide
cgtccaaagtaaataatatcgtcgacagaatgaatacaaatttcgagtctgtgcaacacg

SEQ ID NO: 82265 - DNA, 60 bp, Artificial
  Synthetic oligonucleotide
tagaccagataacatccaaagtaaacaacatcgtcgacagaatgaatacaaatttcgagt

SEQ ID NO: 82266 - DNA, 60 bp, Artificial
  Synthetic oligonucleotide
aatagaccagataacgtccaaagtaaataatatcgtcgacagaatgaatacaaatttcga

SEQ ID NO: 82267 - DNA, 60 bp, Artificial
  Synthetic oligonucleotide
cggctacttaagcaacaactcaacagacaaagttgacacaataatcgagaacaatgtcac

SEQ ID NO: 82268 - DNA, 60 bp, Artificial
  Synthetic oligonucleotide
tcggctatttaagcaacaactcaacagacaaagttgacacaataatcgagaacaatgtca

SEQ ID NO: 82269 - DNA, 60 bp, Artificial
  Synthetic oligonucleotide
atcgtcgacagaatgaatacaaatttcgagtctgtgcaatacgaattcagtgaaatagag

SEQ ID NO: 82270 - DNA, 60 bp, Artificial
  Synthetic oligonucleotide
catccaaagtaaacaacatcgtcgacagaatgaatacaaatttcgagtctgtgcaacacg

SEQ ID NO: 82271 - DNA, 60 bp, Artificial
  Synthetic oligonucleotide
ctgtatcggctacttaagcaacaactcaacagacaaagttgacacaataatcgagaacaa

SEQ ID NO: 82272 - DNA, 60 bp, Artificial
  Synthetic oligonucleotide
tgtgtctgcagagataactggaaagggtctaacaggcccattatagacataaatatggca

SEQ ID NO: 82273 - DNA, 60 bp, Artificial
  Synthetic oligonucleotide
gtgtctgcagagataactggaaagggtctaacaggcccattatagacataaatatggcag

SEQ ID NO: 82274 - DNA, 60 bp, Artificial
  Synthetic oligonucleotide
aaatatggcagattacagcattgattccagttatgtatgctcagggctcgttggtgacac

SEQ ID NO: 82275 - DNA, 60 bp, Artificial
  Synthetic oligonucleotide
ggcagattacagcattgattccagttatgtatgctcagggctcgttggtgacacacccag

SEQ ID NO: 82276 - DNA, 60 bp, Artificial
  Synthetic oligonucleotide
gtattggttcgtggtcccaaaatattctcagaacacaggagtcggaatgtgtttgtatca

SEQ ID NO: 82277 - DNA, 60 bp, Artificial
  Synthetic oligonucleotide
cccaaaatattctcagaacacaggagtcggaatgtgtttgtatcaacggaacctgcacag

SEQ ID NO: 82278 - DNA, 60 bp, Artificial
  Synthetic oligonucleotide
attgtccacatcagtccattgtcaggaagtgctcaacatatagaagagtgttcctgttac

SEQ ID NO: 82279 - DNA, 60 bp, Artificial
  Synthetic oligonucleotide
tccacatcagtccattgtcaggaagtgctcaacatatagaagagtgttcctgttaccctc

SEQ ID NO: 82280 - DNA, 60 bp, Artificial
  Synthetic oligonucleotide
ttggtgacacacccagaaacgatgacagctctagcagtagcaattgcagagatcctaaca

SEQ ID NO: 82281 - DNA, 60 bp, Artificial
  Synthetic oligonucleotide
cccagaaacgatgacagctctagcagtagcaattgcagagatcctaacaatgaaagaggg

SEQ ID NO: 82282 - DNA, 60 bp, Artificial
  Synthetic oligonucleotide
ttgcaacaatatgcttcctcatgcagattgctatcctggcaactactgtgacattgcatt

SEQ ID NO: 82283 - DNA, 60 bp, Artificial
  Synthetic oligonucleotide
gcttcctcatgcagattgctatcctggcaactactgtgacattgcattttaagcaacacg

SEQ ID NO: 82284 - DNA, 60 bp, Artificial
  Synthetic oligonucleotide
acattgcattttaagcaacacgaatgcaattcccctgcaatcaatcaagtaaccccatgt

SEQ ID NO: 82285 - DNA, 60 bp, Artificial
  Synthetic oligonucleotide
ttatcagtttgcactcggacaggggaccacactagacaacaaacattcaaatggcacaat

SEQ ID NO: 82286 - DNA, 60 bp, Artificial
  Synthetic oligonucleotide
gccgatagcggaatatagaaattggtcaaagccgcagtgtcaaattacaggatttgcgcc

SEQ ID NO: 82287 - DNA, 60 bp, Artificial
  Synthetic oligonucleotide
aaccccatgtgagccgatagcggaatatagaaattggtcaaagccgcagtgtcaaattac

SEQ ID NO: 82288 - DNA, 60 bp, Artificial
  Synthetic oligonucleotide
gcaacacgaatgcaattcccctgcaatcaatcaagtaaccccatgtgagccgatagcgga

SEQ ID NO: 82289 - DNA, 60 bp, Artificial
  Synthetic oligonucleotide
gtgttccgttccatttaggaaccaaacaagtatgcatagcatggtctagctcaagttgcc

SEQ ID NO: 82290 - DNA, 60 bp, Artificial
  Synthetic oligonucleotide
ttgggtgttccgttccatttaggaaccaaacaagtatgcatagcatggtctagctcaagt

SEQ ID NO: 82291 - DNA, 52 bp, Artificial
  Synthetic oligonucleotide
ccccatcggacccttttgatgaacgaattgggtgttccgttccatttaggaa

SEQ ID NO: 82292 - DNA, 60 bp, Artificial
  Synthetic oligonucleotide
atggcacaatacatgatagaatcccccatcggacccttttgatgaacgaattgggtgttc

SEQ ID NO: 82293 - DNA, 60 bp, Artificial
  Synthetic oligonucleotide
caattggtccggttactctggtgtcttctctgttgagaacaaaagctgtgtcaataggtg

SEQ ID NO: 82294 - DNA, 60 bp, Artificial
  Synthetic oligonucleotide
gcaactgctagtttcatttacgacgggaggcttgctgacagtattggttcgtggtcccaa

SEQ ID NO: 82295 - DNA, 60 bp, Artificial
  Synthetic oligonucleotide
tgatagaaatgcaactgctagtttcatttacgacgggaggcttgctgacagtattggttc

SEQ ID NO: 82296 - DNA, 60 bp, Artificial
  Synthetic oligonucleotide
agaacaattagcaaagattcacgttcaggttatgagaccttcaaggtcattggtggttgg

SEQ ID NO: 82297 - DNA, 57 bp, Artificial
  Synthetic oligonucleotide
gatcctaacaatgaaagagggaacccaggagtgaagggatgggcctttgacaatgga

SEQ ID NO: 82298 - DNA, 60 bp, Artificial
  Synthetic oligonucleotide
caacaattggtccggttactctggtgtcttctctgttgagaacaaaagctgtgtcaatag

SEQ ID NO: 82299 - DNA, 60 bp, Artificial
  Synthetic oligonucleotide
gattcacgttcaggttatgagaccttcaaggtcattggtggttggtccacacctaactcc

SEQ ID NO: 82300 - DNA, 60 bp, Artificial
  Synthetic oligonucleotide
gaagagttcacaatggttgggagaagagcaacagctattctcagaaaggcaaccagaaga

SEQ ID NO: 82301 - DNA, 60 bp, Artificial
  Synthetic oligonucleotide
gaaagctactcagcatgagagacatgtgtgatgctccctttgatgacagactcaggagag

SEQ ID NO: 82302 - DNA, 60 bp, Artificial
  Synthetic oligonucleotide
gctgctcagcatgagagacatgtgtgatgctccctttgatgatagactcaggagagatca

SEQ ID NO: 82303 - DNA, 60 bp, Artificial
  Synthetic oligonucleotide
gctgctcagcatgagagacatgtgtgatgctccctttgatgatagactcagaaaagatca

SEQ ID NO: 82304 - DNA, 60 bp, Artificial
  Synthetic oligonucleotide
gctgctcagcatgagagacatgtgtgatgctccctttgatgacaggctcaggagagacca

SEQ ID NO: 82305 - DNA, 60 bp, Artificial
  Synthetic oligonucleotide
gcatgagagacatgtgtgatgctccctttgatgacagactcaggagagatcaaaaggcac

SEQ ID NO: 82306 - DNA, 60 bp, Artificial
  Synthetic oligonucleotide
agcaccgataagtcttggtgattgctcctttgctggttggatccttggaaacccaatgtg

SEQ ID NO: 82307 - DNA, 60 bp, Artificial
  Synthetic oligonucleotide
caccgataagtcttggtgattgctcctttgctggttggatccttggaaacccaatgtgtg

SEQ ID NO: 82308 - DNA, 60 bp, Artificial
  Synthetic oligonucleotide
tctcgaggccctcatggaatggctaaagacaagaccaatcctgtcacctctgactaaggg

SEQ ID NO: 82309 - DNA, 60 bp, Artificial
  Synthetic oligonucleotide
cagaccatggatgcgcgtaaacaatgaaactatattggaaactggttatatatgcagcaa

SEQ ID NO: 82310 - DNA, 60 bp, Artificial
  Synthetic oligonucleotide
aactggttatatatgcagcaaattccactcggacacacccaggcccagtgatccctctac

SEQ ID NO: 82311 - DNA, 60 bp, Artificial
  Synthetic oligonucleotide
gcatgagaagatcccagacgataagatacagcatttggaagaatgttcatgttacacaga

SEQ ID NO: 82312 - DNA, 60 bp, Artificial
  Synthetic oligonucleotide
gttcatgttacacagatgttgacatatactgcatctgtagagacaactggaaaggctcta

SEQ ID NO: 82313 - DNA, 60 bp, Artificial
  Synthetic oligonucleotide
atgttgacatatactgcatctgtagagacaactggaaaggctctaacagaccatggatgc

SEQ ID NO: 82314 - DNA, 60 bp, Artificial
  Synthetic oligonucleotide
aaaggctctaacagaccatggatgcgcgtaaacaatgaaactatattggaaactggttat

SEQ ID NO: 82315 - DNA, 60 bp, Artificial
  Synthetic oligonucleotide
cggggaatgacaatgacgccacagcacagataatatatgcagggacaatgcgagactcta

SEQ ID NO: 82316 - DNA, 60 bp, Artificial
  Synthetic oligonucleotide
cccaagagtcagaatgccagtgcttacacggaacttgtgttgtagcagtgacagatggac

SEQ ID NO: 82317 - DNA, 60 bp, Artificial
  Synthetic oligonucleotide
gccagtgcttacacggaacttgtgttgtagcagtgacagatggaccagcagacaataagg

SEQ ID NO: 82318 - DNA, 60 bp, Artificial
  Synthetic oligonucleotide
cataaagcatgagaagatcccagacgataagatacagcatttggaagaatgttcatgtta

SEQ ID NO: 82319 - DNA, 60 bp, Artificial
  Synthetic oligonucleotide
caactgttgtatttcaagatccagggaaacgcttcaggcttccattgccattatgcccct

SEQ ID NO: 82320 - DNA, 60 bp, Artificial
  Synthetic oligonucleotide
ggcttccattgccattatgccccttcaaaggattctttccttttcacaaagacaatgctc

SEQ ID NO: 82321 - DNA, 59 bp, Artificial
  Synthetic oligonucleotide
tagacaatgagcctggatcgggcaattggcctgatggtgctaatattgggtttatgccc

SEQ ID NO: 82322 - DNA, 60 bp, Artificial
  Synthetic oligonucleotide
aaatgagaatgtctcttggaccagcaatagcatagttactttctgtggactagacaatga

SEQ ID NO: 82323 - DNA, 60 bp, Artificial
  Synthetic oligonucleotide
cttggaccagcaatagcatagttactttctgtggactagacaatgagcctggatcgggca

SEQ ID NO: 82324 - DNA, 60 bp, Artificial
  Synthetic oligonucleotide
gcaggtgcgaaatgaatccaaatcagagaataatagcgattgggtctgtgaacacagcat

SEQ ID NO: 82325 - DNA, 60 bp, Artificial
  Synthetic oligonucleotide
catccaattcacaactgcagcgaaactgtaataacaaataatcacactacgatcaacaac

SEQ ID NO: 82326 - DNA, 60 bp, Artificial
  Synthetic oligonucleotide
gatcaacaacataacaactgttgtatttcaagatccagggaaacgcttcaggcttccatt

SEQ ID NO: 82327 - DNA, 60 bp, Artificial
  Synthetic oligonucleotide
gtctgtgaacacagcattatccacaatagcattgctagtggggataggtaacttagcgtt

SEQ ID NO: 82328 - DNA, 54 bp, Artificial
  Synthetic oligonucleotide
cacaatagcattgctagtggggataggtaacttagcgttcaatgcagttattca

SEQ ID NO: 82329 - DNA, 60 bp, Artificial
  Synthetic oligonucleotide
tgttttcagccttgtttttacgttgaactcacaaggggagtgccaaacaaaaatgagaat

SEQ ID NO: 82330 - DNA, 60 bp, Artificial
  Synthetic oligonucleotide
caaacaaccaattgaaagtgttcaatcagacacttgtttccaataatgactggtccgggt

SEQ ID NO: 82331 - DNA, 60 bp, Artificial
  Synthetic oligonucleotide
ggggtcaaaggattcggatttaaagttcagaatgatgtgtggcttggaaggacaatatca

SEQ ID NO: 82332 - DNA, 60 bp, Artificial
  Synthetic oligonucleotide
ccctctacaatttcgtgtaactctccaagtggaattgatggtagaagaggggtcaaagga

SEQ ID NO: 82333 - DNA, 60 bp, Artificial
  Synthetic oligonucleotide
atccctctacaatttcgtgtaactctccaagtggaattgatggtagaagaggggtcaaag

SEQ ID NO: 82334 - DNA, 60 bp, Artificial
  Synthetic oligonucleotide
cagcaaattccactcggacacacccaggcccagtgatccctctacaatttcgtgtaactc

SEQ ID NO: 82335 - DNA, 60 bp, Artificial
  Synthetic oligonucleotide
atggttggattaattcaaacaaccaattgaaagtgttcaatcagacacttgtttccaata

SEQ ID NO: 82336 - DNA, 60 bp, Artificial
  Synthetic oligonucleotide
gcagccggtcaggattcgaagtgatcaaagtttcaaatggttggattaattcaaacaacc

SEQ ID NO: 82337 - DNA, 60 bp, Artificial
  Synthetic oligonucleotide
gacaatatcatatagcagccggtcaggattcgaagtgatcaaagtttcaaatggttggat

SEQ ID NO: 82338 - DNA, 60 bp, Artificial
  Synthetic oligonucleotide
cggatttaaagttcagaatgatgtgtggcttggaaggacaatatcatatagcagccggtc

SEQ ID NO: 82339 - DNA, 60 bp, Artificial
  Synthetic oligonucleotide
gtttgtgttacggggaatgacaatgacgccacagcacagataatatatgcagggacaatg

SEQ ID NO: 82340 - DNA, 60 bp, Artificial
  Synthetic oligonucleotide
gcatggtctagcagcagttgctttgacggaaaagaatggctgcatgtttgtgttacgggg

SEQ ID NO: 82341 - DNA, 60 bp, Artificial
  Synthetic oligonucleotide
gacaatgctctgagactagctgaaaacaaagatgttttggtgaccagagaaccctatatc

SEQ ID NO: 82342 - DNA, 60 bp, Artificial
  Synthetic oligonucleotide
gccattatgccccttcaaaggattctttccttttcacaaagacaatgctctgagactagc

SEQ ID NO: 82343 - DNA, 60 bp, Artificial
  Synthetic oligonucleotide
tcttttgcactagctcaaggagcgcttttggggacaaagcacagcaatgggacaaataag

SEQ ID NO: 82344 - DNA, 60 bp, Artificial
  Synthetic oligonucleotide
ctctgagactagctgaaaacaaagatgttttggtgaccagagaaccctatatcagctgtg

SEQ ID NO: 82345 - DNA, 60 bp, Artificial
  Synthetic oligonucleotide
gacaaataaggatagaactccttacaggtccttaattaggttccccattggaacagctcc

SEQ ID NO: 82346 - DNA, 60 bp, Artificial
  Synthetic oligonucleotide
gctcaaggagcgcttttggggacaaagcacagcaatgggacaaataaggatagaactcct

SEQ ID NO: 82347 - DNA, 60 bp, Artificial
  Synthetic oligonucleotide
gtgctgcatggtctagcagcagttgctttgacggaaaagaatggctgcatgtttgtgtta

SEQ ID NO: 82348 - DNA, 60 bp, Artificial
  Synthetic oligonucleotide
ggatagaactccttacaggtccttaattaggttccccattggaacagctcctgtacttgg

SEQ ID NO: 82349 - DNA, 60 bp, Artificial
  Synthetic oligonucleotide
gggaaccctgtgatatgcatgggacatcatgctgtttccaatggaaccatggtgaagacc

SEQ ID NO: 82350 - DNA, 59 bp, Artificial
  Synthetic oligonucleotide
gggaaccctgtgatatgcatgggacatcatgctgtttccaatggaaccatggtgaagac

SEQ ID NO: 82351 - DNA, 60 bp, Artificial
  Synthetic oligonucleotide
gctttttgctcgctgcactgcttttagccttcattttgtgggcttgtcagaacggaaaca

SEQ ID NO: 82352 - DNA, 60 bp, Artificial
  Synthetic oligonucleotide
gctcgctgcactgcttttagccttcattttgtgggcttgtcagaacggaaacatccggtg

SEQ ID NO: 82353 - DNA, 60 bp, Artificial
  Synthetic oligonucleotide
gctttttgctcgttgcgctacttttagccttcattttgtgggcttgtcagaacggaaaca

SEQ ID NO: 82354 - DNA, 60 bp, Artificial
  Synthetic oligonucleotide
gttgcgctacttttagccttcattttgtgggcttgtcagaacggaaacatccggtgccag

SEQ ID NO: 82355 - DNA, 60 bp, Artificial
  Synthetic oligonucleotide
tcttcatagagcggcccactgctgtggacacttgttatccatttgatgtgccagattacc

SEQ ID NO: 82356 - DNA, 60 bp, Artificial
  Synthetic oligonucleotide
gttcatcgcagaggaattccaatggaacacagtcaagcagaatgggaaatccggagcatg

SEQ ID NO: 82357 - DNA, 60 bp, Artificial
  Synthetic oligonucleotide
cggcccactgctgtggacacttgttatccatttgatgtgccagattaccagagcctacgg

SEQ ID NO: 82358 - DNA, 60 bp, Artificial
  Synthetic oligonucleotide
gaaacacagggaacagaaaagctgacgataacatattcatcgtccatgatgtgggaaatc

SEQ ID NO: 82359 - DNA, 60 bp, Artificial
  Synthetic oligonucleotide
gaatcagttcatccttcagctttggaggtttcactttcaaaaggacaagcgggtcatctg

SEQ ID NO: 82360 - DNA, 60 bp, Artificial
  Synthetic oligonucleotide
caacaacggggactacgcaagactttacatatggggagttcatcatccttcaactgacac

SEQ ID NO: 82361 - DNA, 60 bp, Artificial
  Synthetic oligonucleotide
caacggggactacgcaagactttacatatggggagttcatcatccttcaactgacacaga

SEQ ID NO: 82362 - DNA, 60 bp, Artificial
  Synthetic oligonucleotide
tgactgggaacgacaatgatgcgagtggccaaataatgtatgcagggaaaatgacagact

SEQ ID NO: 82363 - DNA, 60 bp, Artificial
  Synthetic oligonucleotide
ccatcaaggacaggacaccatatagatcgctgatccggttcccaatagggacagctccag

SEQ ID NO: 82364 - DNA, 60 bp, Artificial
  Synthetic oligonucleotide
aagggagccttatgtcagttgtgacaatgatgattgctggtcttttgccctcgcccaagg

SEQ ID NO: 82365 - DNA, 60 bp, Artificial
  Synthetic oligonucleotide
gtctgaatgtcaatgcatcgacgggacctgtgttgtcgctgttacagatggtcctgcggc

SEQ ID NO: 82366 - DNA, 60 bp, Artificial
  Synthetic oligonucleotide
ggtatgtatgtagcaaattccattcagatacccccaggccagccgatccttcaacagtat

SEQ ID NO: 82367 - DNA, 60 bp, Artificial
  Synthetic oligonucleotide
gagaggggaaaattgttcatatcagcccattgtcaggaagtgctcagcatatagaggaat

SEQ ID NO: 82368 - DNA, 60 bp, Artificial
  Synthetic oligonucleotide
ggattgcttgttgacagtattggttcatggtctcaaaatattctcagaactcaggagtcg

SEQ ID NO: 82369 - DNA, 60 bp, Artificial
  Synthetic oligonucleotide
agcttcatttatgatggattgcttgttgacagtattggttcatggtctcaaaatattctc

SEQ ID NO: 82370 - DNA, 60 bp, Artificial
  Synthetic oligonucleotide
ccaaacaagtgtgcatagcatggtccagctcaagctgtcatgatggaaaagcatggttac

SEQ ID NO: 82371 - DNA, 60 bp, Artificial
  Synthetic oligonucleotide
ggtggagtgcttgttgacagtattggttcatggtctcaaaatattctcagaactcaggag

SEQ ID NO: 82372 - DNA, 60 bp, Artificial
  Synthetic oligonucleotide
agtttcatttatggtggagtgcttgttgacagtattggttcatggtctcaaaatattctc

SEQ ID NO: 82373 - DNA, 60 bp, Artificial
  Synthetic oligonucleotide
aaccaaacaagtgtgcatagcatggtccagctcaagctgccatgatgggaaggcatggtt

SEQ ID NO: 82374 - DNA, 51 bp, Artificial
  Synthetic oligonucleotide
gtagaaaggaatataacagagatagtgtatttgaataataccaccatagaa

SEQ ID NO: 82375 - DNA, 60 bp, Artificial
  Synthetic oligonucleotide
ccaaacaagtgtgcatagcatggtccagctcaagctgccatgatgggaaggcatggttac

SEQ ID NO: 82376 - DNA, 60 bp, Artificial
  Synthetic oligonucleotide
gaccaaacaagtgtgcatagcatggtccagctcaagctgtcatgatggaaaagcatggtt

SEQ ID NO: 82377 - DNA, 60 bp, Artificial
  Synthetic oligonucleotide
atggttgtttcgagttctatcacaaatgtgacaatgaatgtatggaaagtgtaagaaacg

SEQ ID NO: 82378 - DNA, 60 bp, Artificial
  Synthetic oligonucleotide
caattcgagcgtctgaaaatatacagagattcgcttggggagtccgtgatgagaatgggg

SEQ ID NO: 82379 - DNA, 60 bp, Artificial
  Synthetic oligonucleotide
ataactcaattcgagcgtctgaaaatatacagagattcgcttggggaattcgtgatgagg

SEQ ID NO: 82380 - DNA, 60 bp, Artificial
  Synthetic oligonucleotide
ataactcaattcgagcgtctgaaaatatacagagattcgcttggggagtccgtgatgaga

SEQ ID NO: 82381 - DNA, 60 bp, Artificial
  Synthetic oligonucleotide
tatatatggcacataagaaagctgctcagcatgagagacatgtgtgatgctccctttgat

SEQ ID NO: 82382 - DNA, 60 bp, Artificial
  Synthetic oligonucleotide
caattcgagcgtctgaaaatatacagagattcgcttggggaattcgtgatgaggatgggg

SEQ ID NO: 82383 - DNA, 60 bp, Artificial
  Synthetic oligonucleotide
aagctgctcagcatgagagacatgtgtgatgctccctttgatgacaggctcaggagagac

SEQ ID NO: 82384 - DNA, 60 bp, Artificial
  Synthetic oligonucleotide
cacataagaaagctgctcagcatgagagacatgtgtgatgctccctttgatgatagactc

SEQ ID NO: 82385 - DNA, 60 bp, Artificial
  Synthetic oligonucleotide
ctgctcagcatgagagacatgtgtgatgctccctttgatgatagactcagaagagatcag

SEQ ID NO: 82386 - DNA, 60 bp, Artificial
  Synthetic oligonucleotide
ccaacacagaaatgaagaaggtacagggattgctgcagacaaagaatcaacccagaaagc

SEQ ID NO: 82387 - DNA, 60 bp, Artificial
  Synthetic oligonucleotide
tccaacacagaaatgaagaaggtacagggattgctgcagacaaagaatcaacccagaagg

SEQ ID NO: 82388 - DNA, 60 bp, Artificial
  Synthetic oligonucleotide
tttccaacacagaaatgaagaaggtacagggattgctgcagacaaagaatcaacccagaa

SEQ ID NO: 82389 - DNA, 60 bp, Artificial
  Synthetic oligonucleotide
gggttccaacacagaaatgaagaaggtacagggattgctgcagacaaagaatcaacccag

SEQ ID NO: 82390 - DNA, 60 bp, Artificial
  Synthetic oligonucleotide
atgggttccaacacagaaatgaagaaggtacagggattgctgcagacaaagaatcaaccc

SEQ ID NO: 82391 - DNA, 60 bp, Artificial
  Synthetic oligonucleotide
atggtttccaacacagaaatgaagaaggtacagggattgctgcagacaaagaatcaaccc

SEQ ID NO: 82392 - DNA, 60 bp, Artificial
  Synthetic oligonucleotide
gccagattatcagagcctacggagtatcttagcaaacaacggaaaatttgagttcattgc

SEQ ID NO: 82393 - DNA, 60 bp, Artificial
  Synthetic oligonucleotide
ttggcagtagaccatgggtgagaggccaaagcggcaggatcagcttctactggacaattg

SEQ ID NO: 82394 - DNA, 60 bp, Artificial
  Synthetic oligonucleotide
caaaacagcataacaatagagagaatggttctctcagcattcgatgagaggagaaacaaa

SEQ ID NO: 82395 - DNA, 60 bp, Artificial
  Synthetic oligonucleotide
cttcctttgacatgagtaacgagggttcttatttcttcggagacaatgcagaggagtatg

SEQ ID NO: 82396 - DNA, 60 bp, Artificial
  Synthetic oligonucleotide
cggatttctagatgtctggacttataatgctgaacttctggttctcatggaaaatgagag

SEQ ID NO: 82397 - DNA, 60 bp, Artificial
  Synthetic oligonucleotide
aaggctaatagatttcctcaaggatgtgatggaatcaatggataaagaggaaatggaaat

SEQ ID NO: 82398 - DNA, 60 bp, Artificial
  Synthetic oligonucleotide
cccacccaaggtcagacaatcgtattaaacactgactggagtggctacagtgggtccttc

SEQ ID NO: 82399 - DNA, 58 bp, Artificial
  Synthetic oligonucleotide
ccaaacaatcgtattaaacactgactggagtggctacagtgggtccttcatggactat

SEQ ID NO: 82400 - DNA, 60 bp, Artificial
  Synthetic oligonucleotide
tatggaatggctaaagacaagaccaatcctgtcacctctgactaaggggattttaggatt

SEQ ID NO: 82401 - DNA, 60 bp, Artificial
  Synthetic oligonucleotide
gcttgctaccgggctcagaaatgtccctgcgattgctgcaagaggcctgtttggtgcaat

SEQ ID NO: 82402 - DNA, 60 bp, Artificial
  Synthetic oligonucleotide
ggacggttttacatacagatgtgcactgaactcaaactcagcgactatgaagggaggctg

SEQ ID NO: 82403 - DNA, 60 bp, Artificial
  Synthetic oligonucleotide
ccctagcactggcaatcatggtagctggtctgtctttttggatgtgctccaatggatcat

SEQ ID NO: 82404 - DNA, 60 bp, Artificial
  Synthetic oligonucleotide
tgagtctatgagggaggaatatcggcaggaacagcagagtgctgtggatgttgacgatgg

SEQ ID NO: 82405 - DNA, 60 bp, Artificial
  Synthetic oligonucleotide
gataatcactcaccgagtgacatccatatcatggcgtctcaaggcaccaaacgatcttat

SEQ ID NO: 82406 - DNA, 60 bp, Artificial
  Synthetic oligonucleotide
gggaaggcaagagaagaaccccgcactcaggatgaaatggatgatggcaatgaaatatcc

SEQ ID NO: 82407 - DNA, 60 bp, Artificial
  Synthetic oligonucleotide
caggccttggatgaggatcaacaatgagaccatactagaaacagggtatgtatgtagcaa

SEQ ID NO: 82408 - DNA, 60 bp, Artificial
  Synthetic oligonucleotide
gggaaattattcagaagtgacttgaatattgaatcttgctcaactaaatgccagtccgaa

SEQ ID NO: 82409 - DNA, 60 bp, Artificial
  Synthetic oligonucleotide
atgggaaattgttcaggagtgatttgaacattgaatcttgctcaactaaatgccagtccg

SEQ ID NO: 82410 - DNA, 60 bp, Artificial
  Synthetic oligonucleotide
gtagggacaattggaagggttctaacagaccttggatgagaatcaacaacgagactatat

SEQ ID NO: 82411 - DNA, 60 bp, Artificial
  Synthetic oligonucleotide
gcacgtgtgcatgacagggaacgataatgatgcaagcgcccagataatatatgcagggag

SEQ ID NO: 82412 - DNA, 60 bp, Artificial
  Synthetic oligonucleotide
ggaaaggttccaacagaccttggatgagaatcaacaacgagactatactggaaacagggt

SEQ ID NO: 82413 - DNA, 60 bp, Artificial
  Synthetic oligonucleotide
gcatcgacgggacctgtgttgtcgctgttacagatggtcctgcggctaatagtgcagacc

SEQ ID NO: 82414 - DNA, 60 bp, Artificial
  Synthetic oligonucleotide
gcattgacgggacctgtgttgtcgctgttacagatggtcctgcggctaatagtgcagacc

SEQ ID NO: 82415 - DNA, 60 bp, Artificial
  Synthetic oligonucleotide
attggaaaggttccaacaggccttggatgaggatcaacaatgagaccatactagaaacgg

SEQ ID NO: 82416 - DNA, 60 bp, Artificial
  Synthetic oligonucleotide
ggaaaggttccaacaggccttggatgaggatcaacaatgagaccatactagaaacggggt

SEQ ID NO: 82417 - DNA, 60 bp, Artificial
  Synthetic oligonucleotide
tcaacacatgggcccgaaacatactaagaacacaagaatctgaatgcgtatgccacaacg

SEQ ID NO: 82418 - DNA, 60 bp, Artificial
  Synthetic oligonucleotide
cgactatgaagggaggctgatccaaaacagcataacaatagagagaatggttctctctgc

SEQ ID NO: 82419 - DNA, 60 bp, Artificial
  Synthetic oligonucleotide
ccttgaagagtcccacccaggaatctttgaaaactcgtgtcttgaaacgatggaagtggt

SEQ ID NO: 82420 - DNA, 60 bp, Artificial
  Synthetic oligonucleotide
ggctttccttgaagaatcccacccaggaatctttgaaaactcgtgtcttgaaacgatgga

SEQ ID NO: 82421 - DNA, 60 bp, Artificial
  Synthetic oligonucleotide
gaaattcttccctagcagttcatacaggagaccagttggaatttccagcatggtggaggc

SEQ ID NO: 82422 - DNA, 60 bp, Artificial
  Synthetic oligonucleotide
cttcttttgacatgagtaatgaaggatcttatttcttcggagacaatgcagaggaatatg

SEQ ID NO: 82423 - DNA, 60 bp, Artificial
  Synthetic oligonucleotide
cctcgaagagtcccatccaggaatctttgaaaactcgtgtcttgaaacgatggaagttgt

SEQ ID NO: 82424 - DNA, 53 bp, Artificial
  Synthetic oligonucleotide
cgagttccctagcactggcaatcatgatagctggtctatctttctggatgtga

SEQ ID NO: 82425 - DNA, 60 bp, Artificial
  Synthetic oligonucleotide
attgacctgtggtcctacaatgctgaattattggtggcattagaaaatcaacatactata

SEQ ID NO: 82426 - DNA, 60 bp, Artificial
  Synthetic oligonucleotide
atggcccagcattgagcatcaatgagctgagcaatcttgcaaaaggagagaaggctaatg

SEQ ID NO: 82427 - DNA, 60 bp, Artificial
  Synthetic oligonucleotide
gcccagcattgagcatcaatgagctgagcaatcttgcaaaaggagagaaggctaatgttc

SEQ ID NO: 82428 - DNA, 60 bp, Artificial
  Synthetic oligonucleotide
attaagcatcaatgaactgagcaatcttgcaaaaggagagaaggctaatgtgctaattgg

SEQ ID NO: 82429 - DNA, 60 bp, Artificial
  Synthetic oligonucleotide
gcaggcaaaccatttgaatggatgtcaatccggctttacttttcttgaaagttccagcgc

SEQ ID NO: 82430 - DNA, 60 bp, Artificial
  Synthetic oligonucleotide
cgtgcagggataattggcagggctcaaatagaccagtaattcaaatagatccaatagcga

SEQ ID NO: 82431 - DNA, 50 bp, Artificial
  Synthetic oligonucleotide
ctggcaatcatgatagctggtctatctttctggatgtgctccaatggatc

SEQ ID NO: 82432 - DNA, 60 bp, Artificial
  Synthetic oligonucleotide
agcctcattgagtcctggaatgatgatgggcatgttcaatatgctgagtacagtattagg

SEQ ID NO: 82433 - DNA, 60 bp, Artificial
  Synthetic oligonucleotide
ccaagaccctacaatgctatacaataagatggaatttgagccctttcaatccttggtgcc

SEQ ID NO: 82434 - DNA, 60 bp, Artificial
  Synthetic oligonucleotide
aacgatttgcagaccaagaactgggtgatgccccattccttgaccgacttcgccgagacc

SEQ ID NO: 82435 - DNA, 60 bp, Artificial
  Synthetic oligonucleotide
gctggtcttttgctcttgcccaaggggctttactggggactaaacacagcaatggaacca

SEQ ID NO: 82436 - DNA, 60 bp, Artificial
  Synthetic oligonucleotide
tgagtctatgagggaagagtatcggcaggaacagcagagtgctgtggatgttgacgatgg

SEQ ID NO: 82437 - DNA, 60 bp, Artificial
  Synthetic oligonucleotide
ggaccagcattgagcatcaacgaattgagcaatcttgcgaaaggggagaaggctaatgtg

SEQ ID NO: 82438 - DNA, 60 bp, Artificial
  Synthetic oligonucleotide
gtggcacttcaggtacctatggaacaggctcatggcctgatggggcaaatatcaacttca

SEQ ID NO: 82439 - DNA, 60 bp, Artificial
  Synthetic oligonucleotide
gaaccctagactttcatgactcaaatgtcaagaacctttatgacaaggttcgactacagc

SEQ ID NO: 82440 - DNA, 60 bp, Artificial
  Synthetic oligonucleotide
gctttcctcgaagagtcccatccaggaatctttgaaaactcgtgtcttgaaacgatggaa

SEQ ID NO: 82441 - DNA, 57 bp, Artificial
  Synthetic oligonucleotide
tggacaatggaactggcctgatggggctaaaatagagtacttcctctaagatacaga

SEQ ID NO: 82442 - DNA, 56 bp, Artificial
  Synthetic oligonucleotide
tggacaatggaactggcctgatggggctaaaatagagtacttcctctaagatacag

SEQ ID NO: 82443 - DNA, 51 bp, Artificial
  Synthetic oligonucleotide
ggggacttgaatggaatgataacacagttcgaatctctgaaactctacaga

SEQ ID NO: 82444 - DNA, 54 bp, Artificial
  Synthetic oligonucleotide
ggggacttgaatggaatgataacacagttcgaatctctgaaactctacagagat

SEQ ID NO: 82445 - DNA, 60 bp, Artificial
  Synthetic oligonucleotide
taacttgaccaaagggctctgtactataaattcatggcacatatatgggaaagacaatgc

SEQ ID NO: 82446 - DNA, 60 bp, Artificial
  Synthetic oligonucleotide
ataacttgaccaaagggctctgcactataaattcatggcacatatatgggaaagacaatg

SEQ ID NO: 82447 - DNA, 60 bp, Artificial
  Synthetic oligonucleotide
ggtttcaataacttaaccaaagggctctgtactataaattcatggcacatatatgggaaa

SEQ ID NO: 82448 - DNA, 60 bp, Artificial
  Synthetic oligonucleotide
gaattcaataacttgaccaaagggctctgtactataaattcatggcacatatatgggaaa

SEQ ID NO: 82449 - DNA, 60 bp, Artificial
  Synthetic oligonucleotide
atctgaccaaagggctctgtactataaattcatggcacatatatgggaaagacaatgcga

SEQ ID NO: 82450 - DNA, 60 bp, Artificial
  Synthetic oligonucleotide
tgagaggaatgaacaaggacaaaccctctggagcaaaacaaatgatgccggctcggaccg

SEQ ID NO: 82451 - DNA, 60 bp, Artificial
  Synthetic oligonucleotide
ggtcagccactgcatgccatgatgggaagaaatggatgacaattggagtaacgggccctg

SEQ ID NO: 82452 - DNA, 60 bp, Artificial
  Synthetic oligonucleotide
accgggctcagaaatgtccctgcaattgctgcaagaggcctgtttggtgcaatagctggt

SEQ ID NO: 82453 - DNA, 60 bp, Artificial
  Synthetic oligonucleotide
ccggactcagaaatgtccctgcgattgctgcaagaggcctgtttggtgcaatagctggtt

SEQ ID NO: 82454 - DNA, 60 bp, Artificial
  Synthetic oligonucleotide
gattgctgcaagaggcctgtttggtgcaatagctggtttcatagagggtggttggccagg

SEQ ID NO: 82455 - DNA, 60 bp, Artificial
  Synthetic oligonucleotide
attgctgcaagaggcctgtttggtgcaatagctggtttcatagagggtggttggccaggt

SEQ ID NO: 82456 - DNA, 60 bp, Artificial
  Synthetic oligonucleotide
ccggatacgagatgctaaaggtgccaaatgcattgacagacgataggtcaaagcccactc

SEQ ID NO: 82457 - DNA, 60 bp, Artificial
  Synthetic oligonucleotide
gatccggatacgagatgctaaaggtgccaaatgcattgacagacgataggtcaaagccca

SEQ ID NO: 82458 - DNA, 60 bp, Artificial
  Synthetic oligonucleotide
gacaataacttattcatcatcaatgatgtgggagatcaatggccctgagtcagtgttggt

SEQ ID NO: 82459 - DNA, 60 bp, Artificial
  Synthetic oligonucleotide
gcaacatccttaaagggaaattccaaacagcagcacaacgagcaatgatggaccaggtgc

SEQ ID NO: 82460 - DNA, 60 bp, Artificial
  Synthetic oligonucleotide
cgggaaagcaccgataagtcttggtgattgctcctttgctggatggatccttgggaaccc

SEQ ID NO: 82461 - DNA, 60 bp, Artificial
  Synthetic oligonucleotide
cgggaaagcaccgataagtcttggtgattgctcctttgctggatggatacttggaaaccc

SEQ ID NO: 82462 - DNA, 60 bp, Artificial
  Synthetic oligonucleotide
gtacctgcttcacgctacctaactgacatgactcttgaagagatgtcaagagactggttc

SEQ ID NO: 82463 - DNA, 60 bp, Artificial
  Synthetic oligonucleotide
gcctctgtacctgcttcacgctacctaactgacatgactcttgaagagatgtcaagagac

SEQ ID NO: 82464 - DNA, 60 bp, Artificial
  Synthetic oligonucleotide
ggtggaatcgggagattctacatacagatgtgcactgaactcaaactcagcgactatgaa

SEQ ID NO: 82465 - DNA, 56 bp, Artificial
  Synthetic oligonucleotide
atggttgatacaccaatcagggacatatcctgttatacggaggacattcaacaaca

SEQ ID NO: 82466 - DNA, 60 bp, Artificial
  Synthetic oligonucleotide
tggtatggttgatacaccaatcagggacatatcctgttatacggaggacattcaacaaca

SEQ ID NO: 82467 - DNA, 60 bp, Artificial
  Synthetic oligonucleotide
atggtatggttgatacaccaatcagggacatatcctgttatacggaggacattcaacaac

SEQ ID NO: 82468 - DNA, 60 bp, Artificial
  Synthetic oligonucleotide
atagttagcattacaataacagtgttagttctccctggaaatggaaataatgggagttgc

SEQ ID NO: 82469 - DNA, 60 bp, Artificial
  Synthetic oligonucleotide
gagatatggcccagcattgagcatcaatgaactgagcaatcttgcaaaaggagagaaggc

SEQ ID NO: 82470 - DNA, 60 bp, Artificial
  Synthetic oligonucleotide
gttatccatttgatgtgccagattaccagagcctacggagtatcttagcaaacaatggga

SEQ ID NO: 82471 - DNA, 60 bp, Artificial
  Synthetic oligonucleotide
ccagattaccagagcctacggagtatcttagcaaacaatgggaaatttgagttcatcgca

SEQ ID NO: 82472 - DNA, 60 bp, Artificial
  Synthetic oligonucleotide
cggggactacgcaagactttacatatggggagttcaccatccttcaactgacacagaaca

SEQ ID NO: 82473 - DNA, 60 bp, Artificial
  Synthetic oligonucleotide
agttaggaatggaacatatgaccacaaggaatttgaggaggagtccagactaaacagaca

SEQ ID NO: 82474 - DNA, 60 bp, Artificial
  Synthetic oligonucleotide
gttaggaatggaacatatgaccacaaggaatttgaggaggagtccagattgaacagacaa

SEQ ID NO: 82475 - DNA, 60 bp, Artificial
  Synthetic oligonucleotide
gttaggaatggaacatatgaccacaaggaatttgaggaggagtccagacttaacagacaa

SEQ ID NO: 82476 - DNA, 60 bp, Artificial
  Synthetic oligonucleotide
gttaggaatggaacatatgaccacaaggaatttgaggaggagtccagactgaacagacaa

SEQ ID NO: 82477 - DNA, 60 bp, Artificial
  Synthetic oligonucleotide
ctgggaacgacaatgatgcaagtgcccaaataatatatgcagggaaaatgacagactcca

SEQ ID NO: 82478 - DNA, 60 bp, Artificial
  Synthetic oligonucleotide
cagggaacgacaatgatgcaagtgcccaaataatatatgcagggaaaatgacagactcca

SEQ ID NO: 82479 - DNA, 60 bp, Artificial
  Synthetic oligonucleotide
acagggaacgacaatgatgcaagtgcccaaataatatatgcagggaaaatgacagactcc

SEQ ID NO: 82480 - DNA, 60 bp, Artificial
  Synthetic oligonucleotide
ctagacaatgaacctggatcgggaaattggcctgatggttccaacattgggtttatgccc

SEQ ID NO: 82481 - DNA, 60 bp, Artificial
  Synthetic oligonucleotide
ctgtgggctagacaatgaacctggatcgggaaattggcctgatggttccaacattgggtt

SEQ ID NO: 82482 - DNA, 60 bp, Artificial
  Synthetic oligonucleotide
ctgtggattagacaatgaacctggatcgggaaattggccggatggttctaatattgggtt

SEQ ID NO: 82483 - DNA, 60 bp, Artificial
  Synthetic oligonucleotide
gtttcgagcagataacgttcttgcaagcattgcaactcttacttgaagttgagagtgaga

SEQ ID NO: 82484 - DNA, 60 bp, Artificial
  Synthetic oligonucleotide
atcataaagatctgttccaccattgaagagctcagacggcagaaatagtgaatttagctt

SEQ ID NO: 82485 - DNA, 60 bp, Artificial
  Synthetic oligonucleotide
aatagttgggcaaactgaaatcagtttcaatggaggccatatagaagaatgctcatgcta

SEQ ID NO: 82486 - DNA, 60 bp, Artificial
  Synthetic oligonucleotide
agccaagcaggggaaaataattgggcaaactgaaatcagtttcaatggaggccatataga

SEQ ID NO: 82487 - DNA, 60 bp, Artificial
  Synthetic oligonucleotide
ccaagcaggggaaaataattgggcaaactgaaatcagtttcaatggaggccatatagaag

SEQ ID NO: 82488 - DNA, 60 bp, Artificial
  Synthetic oligonucleotide
gttgggcaaactgaaatcagtttcaatggaggccatatagaagaatgctcatgctacccc

SEQ ID NO: 82489 - DNA, 60 bp, Artificial
  Synthetic oligonucleotide
gcaacatcctcaaggggaagttccaaacagcagcacaacgagcaatgatggaccaggtga

SEQ ID NO: 82490 - DNA, 60 bp, Artificial
  Synthetic oligonucleotide
cttcgggtacctatggaacaggctcatggcctgatggggcgaatatcaatttcatgccta

SEQ ID NO: 82491 - DNA, 60 bp, Artificial
  Synthetic oligonucleotide
cttcaggtacctatggaacaggctcatggcctgatggggcaaatatcaacttcatgcctg

SEQ ID NO: 82492 - DNA, 55 bp, Artificial
  Synthetic oligonucleotide
ccccttgatggtagcatacatgctagaaagagagttagtccgcaaaacgaggttc

SEQ ID NO: 82493 - DNA, 60 bp, Artificial
  Synthetic oligonucleotide
gggtcagtatccttaggattggtagtccttaatattctcctacatatagttagcatcaca

SEQ ID NO: 82494 - DNA, 60 bp, Artificial
  Synthetic oligonucleotide
agtggggtcctcgaattcagcaaatttgaagccttcacttcaaatggatggggatcagtg

SEQ ID NO: 82495 - DNA, 60 bp, Artificial
  Synthetic oligonucleotide
ctgtaagattgctcctttgatggtggcatacatgttggagagggaactggttcgcaaaac

SEQ ID NO: 82496 - DNA, 60 bp, Artificial
  Synthetic oligonucleotide
gtctatgagggaggaatatcggcaggaacagcagagtgctgtggatgttgacgatggtca

SEQ ID NO: 82497 - DNA, 60 bp, Artificial
  Synthetic oligonucleotide
ccttcgacatgaataatgaaggatcttatttcttcggagacaatgcagaggagtatgaca

SEQ ID NO: 82498 - DNA, 52 bp, Artificial
  Synthetic oligonucleotide
acctatttcgaaaaggttgaaaggttaaaacatgggacctttggccccgttc

SEQ ID NO: 82499 - DNA, 60 bp, Artificial
  Synthetic oligonucleotide
cttaaaagttccagcgcaaaatgccataagcaccacattcccatatactggagatcctcc

SEQ ID NO: 82500 - DNA, 60 bp, Artificial
  Synthetic oligonucleotide
cttgaaggttccagcgcaaaatgccataagcaccacattcccatatactggagatcctcc

SEQ ID NO: 82501 - DNA, 60 bp, Artificial
  Synthetic oligonucleotide
cttgaaagttccagcgcaaaatgccataagcaccacattcccatatactggagaccctcc

SEQ ID NO: 82502 - DNA, 60 bp, Artificial
  Synthetic oligonucleotide
gcactagttcaaggagtgggtttgagatgatttgggatcccaatggatggacagagacag

SEQ ID NO: 82503 - DNA, 60 bp, Artificial
  Synthetic oligonucleotide
ataagaataggttccaagggagatgtatttgtcatcagagagccttttatttcatgctct

SEQ ID NO: 82504 - DNA, 60 bp, Artificial
  Synthetic oligonucleotide
taaaagcactagttcaaggagtgggtttgagatgatttgggatcccaatggatggacaga

SEQ ID NO: 82505 - DNA, 60 bp, Artificial
  Synthetic oligonucleotide
ttaaatacggtaatggtgtttggataggaagaaccaaaagcactagctcaaggagtgggt

SEQ ID NO: 82506 - DNA, 60 bp, Artificial
  Synthetic oligonucleotide
tttaaatacggtaatggtgtttggataggaagaactaaaagcactagttcaaggagtggg

SEQ ID NO: 82507 - DNA, 53 bp, Artificial
  Synthetic oligonucleotide
ttaccataatgactgatggaccaagtaatggccaggcctcgtacaagattttc

SEQ ID NO: 82508 - DNA, 60 bp, Artificial
  Synthetic oligonucleotide
gtgcctgtattaatggttcttgctttaccataatgactgatggaccaagtaatggccagg

SEQ ID NO: 82509 - DNA, 60 bp, Artificial
  Synthetic oligonucleotide
cacaagagtctgaatgtgcctgtattaatggttcttgctttaccataatgactgatggac

SEQ ID NO: 82510 - DNA, 60 bp, Artificial
  Synthetic oligonucleotide
gcaggggaacaatgctatcaatcacgattctgtttctgctcatagcagagggctcctctc

SEQ ID NO: 82511 - DNA, 56 bp, Artificial
  Synthetic oligonucleotide
ggaaacaatgctatcaatcacgattctgtttctgctcatagcagaggtatcctctc

SEQ ID NO: 82512 - DNA, 51 bp, Artificial
  Synthetic oligonucleotide
gaatccaaatcagaagataataacaattggctctgtctccctaaccattgc

SEQ ID NO: 82513 - DNA, 60 bp, Artificial
  Synthetic oligonucleotide
atgaacccaaatcagaagataataacaattggctctgtctctttaaccattgcaacagta

SEQ ID NO: 82514 - DNA, 52 bp, Artificial
  Synthetic oligonucleotide
cacaagagagccatatgtttcttgtgacccagatgaatgcagattctatgct

SEQ ID NO: 82515 - DNA, 60 bp, Artificial
  Synthetic oligonucleotide
gagagccatatgtttcttgtgacccagatgaatgcagattctatgccctcagccaaggaa

SEQ ID NO: 82516 - DNA, 60 bp, Artificial
  Synthetic oligonucleotide
gagagccatatgtttcttgtgacccagatgagtgcaggttctatgccctcagccaaggaa

SEQ ID NO: 82517 - DNA, 60 bp, Artificial
  Synthetic oligonucleotide
ttgctatagagcatgcttctatgttgagttgattcgtggaaggccaaaagaggacaaagt

SEQ ID NO: 82518 - DNA, 60 bp, Artificial
  Synthetic oligonucleotide
atgttttagtcacaagagagccatatgtttcttgtgacccagatgaatgcagattctatg

SEQ ID NO: 82519 - DNA, 60 bp, Artificial
  Synthetic oligonucleotide
atgttttagtcacaagagagccatatgtttcttgtgacccagatgagtgcaggttctatg

SEQ ID NO: 82520 - DNA, 60 bp, Artificial
  Synthetic oligonucleotide
ggggagaattctgatgttttagtcacaagagagccatatgtttcttgtgacccagatgaa

SEQ ID NO: 82521 - DNA, 60 bp, Artificial
  Synthetic oligonucleotide
tggatgtgctccaatggatcattgcagtgcagaatttgcatttaaacttattagttcaga

SEQ ID NO: 82522 - DNA, 60 bp, Artificial
  Synthetic oligonucleotide
ggatgtgctccaatggatcattgcagtgcagaatttgcatttaaacttattagttcagat

SEQ ID NO: 82523 - DNA, 60 bp, Artificial
  Synthetic oligonucleotide
tccaatggatcattgcagtgcagaatttgcatttaaatttatgagttcagattgtagtta

SEQ ID NO: 82524 - DNA, 60 bp, Artificial
  Synthetic oligonucleotide
caaatctcaggtaaatagacaagtcatagttgacaataatacctggtctggttattctgg

SEQ ID NO: 82525 - DNA, 60 bp, Artificial
  Synthetic oligonucleotide
ttggaccacagctaattccaaatcccaggtaaatagacaagtcatagttgacaataataa

SEQ ID NO: 82526 - DNA, 60 bp, Artificial
  Synthetic oligonucleotide
tgtgcatagcatggtccagctcaagctgccatgatggaaaagcatggttacatgtttgtg

SEQ ID NO: 82527 - DNA, 60 bp, Artificial
  Synthetic oligonucleotide
ccacagctaattccaaatcccaggtaaatagacaagtcatagttgacaataataactggt

SEQ ID NO: 82528 - DNA, 60 bp, Artificial
  Synthetic oligonucleotide
tggaccacggctaattccaaatcacagataaatagacaagtcatagttgacaataataac

SEQ ID NO: 82529 - DNA, 60 bp, Artificial
  Synthetic oligonucleotide
gggatgtcttcatagagcgacccaccgctgtggacacttgttatccatttgatgtgccag

SEQ ID NO: 82530 - DNA, 60 bp, Artificial
  Synthetic oligonucleotide
gaatgggatgtcttcatagagcgacccaccgctgtggacacttgttatccatttgatgtg

SEQ ID NO: 82531 - DNA, 60 bp, Artificial
  Synthetic oligonucleotide
acaaaaggtatggaccagcattgagcatcaacgaattgagcaatcttgcaaagggggaga

SEQ ID NO: 82532 - DNA, 60 bp, Artificial
  Synthetic oligonucleotide
ggagatgtgccatagtacacaaattggcgggataaggatggtagacatccttagacaaaa

SEQ ID NO: 82533 - DNA, 56 bp, Artificial
  Synthetic oligonucleotide
acaaaaggtatggaccagcattgagcatcaacgaattgagcaatcttgcaaagggg

SEQ ID NO: 82534 - DNA, 54 bp, Artificial
  Synthetic oligonucleotide
gcactcgcgagatactcaccaagaccactgtggaccatatggccataatcaaaa

SEQ ID NO: 82535 - DNA, 60 bp, Artificial
  Synthetic oligonucleotide
gagtggtgcagaatgggatgtcttcatagagcgacccactgctgtggacacttgttatcc

SEQ ID NO: 82536 - DNA, 60 bp, Artificial
  Synthetic oligonucleotide
gacaaaccctctggagcaaaacaaacgatgccggctcagaccgagtgatggtatcacctc

SEQ ID NO: 82537 - DNA, 60 bp, Artificial
  Synthetic oligonucleotide
agggcaaaccctctggagcaaaacaaacgatgccggctcagaccgagtgatggtatcacc

SEQ ID NO: 82538 - DNA, 60 bp, Artificial
  Synthetic oligonucleotide
cctggaagcaatggctttccttgaagagtcccacccagggatctttgaaaactcgtgtct

SEQ ID NO: 82539 - DNA, 60 bp, Artificial
  Synthetic oligonucleotide
gtcttggaagcaatggctttccttgaagagtcccacccagggatctttgaaaactcgtgt

SEQ ID NO: 82540 - DNA, 60 bp, Artificial
  Synthetic oligonucleotide
ccacatggccataatcaagaaatacacatcaggaagacaggagaagaatcctgctctcag

SEQ ID NO: 82541 - DNA, 60 bp, Artificial
  Synthetic oligonucleotide
atgaaagaactctggatttccatgattcaaatgtcaagaacctgtacgataagatccgac

SEQ ID NO: 82542 - DNA, 60 bp, Artificial
  Synthetic oligonucleotide
ggagattctacatacagatgtgcactgaactcaagctcagcgactatgaagggaggctga

SEQ ID NO: 82543 - DNA, 60 bp, Artificial
  Synthetic oligonucleotide
agtttcaatggaggccatatagaagaatgctcatgctaccccaatgaaggtaaagtggaa

SEQ ID NO: 82544 - DNA, 60 bp, Artificial
  Synthetic oligonucleotide
gaaatcagtttcaatggaggccatatagaagaatgctcgtgctaccccaatgaaggtaaa

SEQ ID NO: 82545 - DNA, 60 bp, Artificial
  Synthetic oligonucleotide
atttgaaatcacaggaaccatgcgcagacttgccgaccaaagtctcccaccgaacttctc

SEQ ID NO: 82546 - DNA, 60 bp, Artificial
  Synthetic oligonucleotide
atttgaaattacaggaaccatgcgtaggcttgccgaccaaagtctcccaccgaacttctc

SEQ ID NO: 82547 - DNA, 60 bp, Artificial
  Synthetic oligonucleotide
ggaagtcgttttcccaaatgaagtgggagctagaatactaacatcggagtcacagctgac

SEQ ID NO: 82548 - DNA, 60 bp, Artificial
  Synthetic oligonucleotide
ccccttgatggtagcatacatgctagaaagagagttggtccgcaaaacgaggttcctccc

SEQ ID NO: 82549 - DNA, 60 bp, Artificial
  Synthetic oligonucleotide
ctcccctgatggtagcatacatgctagaaagagagttggtccgcaaaacgaggttcctcc

SEQ ID NO: 82550 - DNA, 60 bp, Artificial
  Synthetic oligonucleotide
atgactgatggaagtgcatcaggaaaggctgatactagaatactattcattagagagggg

SEQ ID NO: 82551 - DNA, 60 bp, Artificial
  Synthetic oligonucleotide
gtgcagtagtaatgactgatggaagtgcatcaggaagggctgatactagaatactattca

SEQ ID NO: 82552 - DNA, 60 bp, Artificial
  Synthetic oligonucleotide
acttgtacagtagtaatgactgatggaagtgcatcaggaaaggctgatactagaatacta

SEQ ID NO: 82553 - DNA, 60 bp, Artificial
  Synthetic oligonucleotide
gtggcacttcaggtacttatggaacaggctcatggcctgatggggcgaatatcaatttca

SEQ ID NO: 82554 - DNA, 60 bp, Artificial
  Synthetic oligonucleotide
gactgatggaagtgcatcaggaagggctgatactagaatactattcattagagagggaaa

SEQ ID NO: 82555 - DNA, 60 bp, Artificial
  Synthetic oligonucleotide
ggcacctatcagatactatcaatttactcaacagtggcgagttccctagcactggcaatc

SEQ ID NO: 82556 - DNA, 60 bp, Artificial
  Synthetic oligonucleotide
aaccatttgaatggatgtcaatccgactttacttttcttgaaagttccagcgcaaagtgc

SEQ ID NO: 82557 - DNA, 60 bp, Artificial
  Synthetic oligonucleotide
atccaaaacagcataacaatagagagaatggttctctcggcatttgatgagagaagaaac

SEQ ID NO: 82558 - DNA, 60 bp, Artificial
  Synthetic oligonucleotide
gagggtttctaattctaggcaaagaagacaaaagatatggaccagcattgagcatcaacg

SEQ ID NO: 82559 - DNA, 60 bp, Artificial
  Synthetic oligonucleotide
acaaggcctaaagtaaatggtcaggctgggagaatgacattctactggaccatagtgaaa

SEQ ID NO: 82560 - DNA, 60 bp, Artificial
  Synthetic oligonucleotide
gcctaaagtaaatggtcaggctgggagaatgacattctactggaccatagtgaaaccggg

SEQ ID NO: 82561 - DNA, 60 bp, Artificial
  Synthetic oligonucleotide
ttgcaatagtcagtcttgttaaaagtgaccagatttgcattggttaccatgcaaacaact

SEQ ID NO: 82562 - DNA, 57 bp, Artificial
  Synthetic oligonucleotide
cgactatgaagggaggctgatccaaaacagcataacaatagagagaatggttctctc

SEQ ID NO: 82563 - DNA, 60 bp, Artificial
  Synthetic oligonucleotide
actaatccaaaacagcataacaatagagagaatggttctctcagcatttgatgagaggag

SEQ ID NO: 82564 - DNA, 55 bp, Artificial
  Synthetic oligonucleotide
ttttgctcgattgacgggaaagcaccgataagtcttggtgattgctcctttgctg

SEQ ID NO: 82565 - DNA, 55 bp, Artificial
  Synthetic oligonucleotide
ttttgctcaattgacgggaaagcaccgataagtcttggtgattgctcctttgctg

SEQ ID NO: 82566 - DNA, 60 bp, Artificial
  Synthetic oligonucleotide
cattgaagagctcagacggcagaaatagtgaatttagcttgtccttcatgaaaaaatgcc

SEQ ID NO: 82567 - DNA, 60 bp, Artificial
  Synthetic oligonucleotide
ggggaggcaataacatttgagtcaaatggtgcatttctcgctcctcggtatgctttcgaa

SEQ ID NO: 82568 - DNA, 60 bp, Artificial
  Synthetic oligonucleotide
ggcaatcatgatagctggtctatctttctggatgtgttccaatggatcattgcagtgcag

SEQ ID NO: 82569 - DNA, 60 bp, Artificial
  Synthetic oligonucleotide
tgcaacagtatgtttcctcatgcagattgccatcctagcaacgactgtgacattgcactt

SEQ ID NO: 82570 - DNA, 60 bp, Artificial
  Synthetic oligonucleotide
gaaagggtgggcctttgactatggaaatgatgtttggatgggaagaacaatcagtaagga

SEQ ID NO: 82571 - DNA, 60 bp, Artificial
  Synthetic oligonucleotide
gaacccaaatcagaagataataacaattggctctgtctctttaaccattgcaacagtatg

SEQ ID NO: 82572 - DNA, 60 bp, Artificial
  Synthetic oligonucleotide
taaccattgcaacagtatgtttcctcatgcagattgccatcctagcaacgactatgacat

SEQ ID NO: 82573 - DNA, 60 bp, Artificial
  Synthetic oligonucleotide
ggagaccggttggaatttccagcatggtggaggccatggtgtctagggcccgaattgatg

SEQ ID NO: 82574 - DNA, 60 bp, Artificial
  Synthetic oligonucleotide
ttctaatggcacagtgaaagaccggagtccctatagaactctaatgagtgtagaaatagg

SEQ ID NO: 82575 - DNA, 60 bp, Artificial
  Synthetic oligonucleotide
gcccctatagaactctaatgagtgtagaaatagggcagtcacccaatgtgtaccaggcaa

SEQ ID NO: 82576 - DNA, 60 bp, Artificial
  Synthetic oligonucleotide
cctatagaactctaatgagtgtagaaatagggcagtcacccaatgtatatcaggcaagat

SEQ ID NO: 82577 - DNA, 60 bp, Artificial
  Synthetic oligonucleotide
caatgggtgttttgagttctaccacaaatgtgacaatgaatgcatggaaagtgtgagaaa

SEQ ID NO: 82578 - DNA, 60 bp, Artificial
  Synthetic oligonucleotide
ctgttccaccattgaagagctcagacggcagaaacagtgaatttagcttgtccttcatga

SEQ ID NO: 82579 - DNA, 60 bp, Artificial
  Synthetic oligonucleotide
ggttgtttcgagttctatcacaaatgtgacaatgaatgtatggaaagtgtaagaaacgga

SEQ ID NO: 82580 - DNA, 58 bp, Artificial
  Synthetic oligonucleotide
ccaccattgaagagctcagacggcagaaatagtgaatttagcttgtccttcatgaaaa

SEQ ID NO: 82581 - DNA, 60 bp, Artificial
  Synthetic oligonucleotide
cttgactaaagggctctgtactataaattcatggcacatatatgggaaagacaatgcggt

SEQ ID NO: 82582 - DNA, 60 bp, Artificial
  Synthetic oligonucleotide
gaccaaagggctctgtactataaattcatggcacatatatgggaaagacaatgcggtaag

SEQ ID NO: 82583 - DNA, 60 bp, Artificial
  Synthetic oligonucleotide
cttaaccaaagggctctgtactataaattcatggcacatatatgggaaagacaatgcagt

SEQ ID NO: 82584 - DNA, 60 bp, Artificial
  Synthetic oligonucleotide
aaaggactctgtactataaattcatggcacatatatgggaaagacaatgcggtaagaatt

SEQ ID NO: 82585 - DNA, 60 bp, Artificial
  Synthetic oligonucleotide
ggaactggccggatggggctaaaatagagtacttcctctaagatgtagaaaaagaccctt

SEQ ID NO: 82586 - DNA, 60 bp, Artificial
  Synthetic oligonucleotide
gcacaaacagactgtgtcctggaagcaatggctttccttgaagaatcccacccaggaatc

SEQ ID NO: 82587 - DNA, 60 bp, Artificial
  Synthetic oligonucleotide
tgacggatggaccagcaaacagacaagcacaatacagggcattcaaagctaaacagggga

SEQ ID NO: 82588 - DNA, 60 bp, Artificial
  Synthetic oligonucleotide
aaggggcaagccagaagaaatgacgatatggacctcaagtagctccattgtgatgtgtgg

SEQ ID NO: 82589 - DNA, 60 bp, Artificial
  Synthetic oligonucleotide
ggtagataatcactcatcgagtgacatccacatcatggcgtctcaaggcaccaaacgatc

SEQ ID NO: 82590 - DNA, 60 bp, Artificial
  Synthetic oligonucleotide
gctgggtggatccttgggaacccaatgtgtgatgatttgattgggaaaacatcatggtct

SEQ ID NO: 82591 - DNA, 60 bp, Artificial
  Synthetic oligonucleotide
ccgtagagaccaaaagtcattaaaggggagaagtatcactcttggtatcgacattgaggc

SEQ ID NO: 82592 - DNA, 60 bp, Artificial
  Synthetic oligonucleotide
gtcattaaaggggagaagtatcactcttggtatcgacattgaggcagccactcgcgctgg

SEQ ID NO: 82593 - DNA, 60 bp, Artificial
  Synthetic oligonucleotide
cgctatgtgactgacatgactcctgaggagatgtcaagggactggtttatgcttatgccc

SEQ ID NO: 82594 - DNA, 60 bp, Artificial
  Synthetic oligonucleotide
gtttgaagagataagatggttaattgaagaagtaagacataaactgaagataacagagag

SEQ ID NO: 82595 - DNA, 60 bp, Artificial
  Synthetic oligonucleotide
cattcgctccaaaacaggaacggaaaatggcgggaacagttgagtcagaagtttgaagag

SEQ ID NO: 82596 - DNA, 60 bp, Artificial
  Synthetic oligonucleotide
aactctacagagatttgcttggggaagcagtaatgagaatgggagacctccattcgctcc

SEQ ID NO: 82597 - DNA, 60 bp, Artificial
  Synthetic oligonucleotide
gacgaagaatccgatgaggcactaaagatgaatattgcctctgtacctgcttcacgctat

SEQ ID NO: 82598 - DNA, 60 bp, Artificial
  Synthetic oligonucleotide
aaacgatttgcagaccaagaaatgggcgacgccccattcctagatcggatccgtagagac

SEQ ID NO: 82599 - DNA, 60 bp, Artificial
  Synthetic oligonucleotide
gcttatgcccaaacagaaatttgctggtcccctttgcatcagaatggatcaggcaatctc

SEQ ID NO: 82600 - DNA, 60 bp, Artificial
  Synthetic oligonucleotide
caaacactgtatcaagcttccaggtagattgcttcctttggcatgtccgcaaacgatttg

SEQ ID NO: 82601 - DNA, 52 bp, Artificial
  Synthetic oligonucleotide
agcttttaaccggctggaaactctcgtactactgagggctttcaccagcgag

SEQ ID NO: 82602 - DNA, 60 bp, Artificial
  Synthetic oligonucleotide
acattgaggcagccactcgcgctggaaagcgaataattgagcggattctggacgaagaat

SEQ ID NO: 82603 - DNA, 51 bp, Artificial
  Synthetic oligonucleotide
agaaatagtgaatttagcttgtccttcatgaaaaaatgccttgtttctact

SEQ ID NO: 82604 - DNA, 60 bp, Artificial
  Synthetic oligonucleotide
gcccagccaagagcatggaatatgatgctgttgctaccacgcactcctggatccctaaga

SEQ ID NO: 82605 - DNA, 60 bp, Artificial
  Synthetic oligonucleotide
gtcccgcactcgcgggatactaacaaaaaccactgtggaccatatggccataatcaagaa

SEQ ID NO: 82606 - DNA, 60 bp, Artificial
  Synthetic oligonucleotide
tacagagacgaagcaatcaataacagattccagatacaaggagttaaattgactcaagga

SEQ ID NO: 82607 - DNA, 60 bp, Artificial
  Synthetic oligonucleotide
tacagagacgaagcaatcaataacagattccagatacaaggagttaaattgactcaaggg

SEQ ID NO: 82608 - DNA, 56 bp, Artificial
  Synthetic oligonucleotide
ttttgaaattttccaccagtgtgacaacaactgcattgaaagcataaggaacggga

SEQ ID NO: 82609 - DNA, 52 bp, Artificial
  Synthetic oligonucleotide
gaaattttccaccagtgtgacaacaactgcattgaaagcataaggaacggga

SEQ ID NO: 82610 - DNA, 60 bp, Artificial
  Synthetic oligonucleotide
cccattatagatataaatatggcagattatagcattgattctagttatgtgtgctcgggg

SEQ ID NO: 82611 - DNA, 60 bp, Artificial
  Synthetic oligonucleotide
aacattgaatcttgctcaactaaatgccagtccgaaattggagggatcaacactaacagg

SEQ ID NO: 82612 - DNA, 60 bp, Artificial
  Synthetic oligonucleotide
gacttgaatattgaatcttgctcaactaaatgccagtccgaaattggagggatcaacact

SEQ ID NO: 82613 - DNA, 60 bp, Artificial
  Synthetic oligonucleotide
gatttgaacattgaatcttgctcaactaaatgccagtctgaaattggaggaatcaacact

SEQ ID NO: 82614 - DNA, 60 bp, Artificial
  Synthetic oligonucleotide
aacattgaatcttgctcaactaaatgccagtctgaaattggaggaatcaacactaatagg

SEQ ID NO: 82615 - DNA, 60 bp, Artificial
  Synthetic oligonucleotide
ggatgtgctccaatggatcattgcagtgcagaatttgcatctagggttgtgagttcagat

SEQ ID NO: 82616 - DNA, 60 bp, Artificial
  Synthetic oligonucleotide
ggatgtgctccaatggatcattgcagtgcagaatttgcatctagaattgtgagttcagat

SEQ ID NO: 82617 - DNA, 60 bp, Artificial
  Synthetic oligonucleotide
attctacagagattcgcttggagaagcagtaatgaggatgggagacctccactccctcca

SEQ ID NO: 82618 - DNA, 60 bp, Artificial
  Synthetic oligonucleotide
tactcaaggacagacaattgtactaaccaccgactggagtggttacagtggatctttcat

SEQ ID NO: 82619 - DNA, 60 bp, Artificial
  Synthetic oligonucleotide
ctcagggtcagacaattgtactaaacaccgactggagtggttacagtggatctttcattg

SEQ ID NO: 82620 - DNA, 60 bp, Artificial
  Synthetic oligonucleotide
tactcagggtcagacaattgtactaaacaccgactggagtggttacagtggatctttcat

SEQ ID NO: 82621 - DNA, 60 bp, Artificial
  Synthetic oligonucleotide
tgtcttgaaacgatggaagttgttcaacaaacaagagtggacaaactaacccaaggtcgt

SEQ ID NO: 82622 - DNA, 60 bp, Artificial
  Synthetic oligonucleotide
ttgagactgaagtttagtggggtcctcgaattcagcaaatttgaagccttcacctcaaac

SEQ ID NO: 82623 - DNA, 60 bp, Artificial
  Synthetic oligonucleotide
cacactggatctttctgctcaatcgacgggaaagcaccgataagtcttggtgattgctcc

SEQ ID NO: 82624 - DNA, 60 bp, Artificial
  Synthetic oligonucleotide
actggatctttctgctcaatcgacgggaaagcaccgataagtcttggtgattgctccttt

SEQ ID NO: 82625 - DNA, 60 bp, Artificial
  Synthetic oligonucleotide
cgaccactcttaatagatggaaccgcgtcattgagccctggaatgatgatgggcatgttc

SEQ ID NO: 82626 - DNA, 60 bp, Artificial
  Synthetic oligonucleotide
cagcacatgtggatgattctgttattgacatatggtcatacaacgcacagcttcttgtcc

SEQ ID NO: 82627 - DNA, 60 bp, Artificial
  Synthetic oligonucleotide
ttgacggctaatgaatcaggaaggctaatagatttcctcaaggatgtgatggaatcaatg

SEQ ID NO: 82628 - DNA, 60 bp, Artificial
  Synthetic oligonucleotide
tctgataccacaggttggtcatggcccgatggcgctctgttgccctttgacatagacaag

SEQ ID NO: 82629 - DNA, 60 bp, Artificial
  Synthetic oligonucleotide
ggggtgaagggattcagctttagatatggggatggtgtttggataggaaggacaaagagc

SEQ ID NO: 82630 - DNA, 60 bp, Artificial
  Synthetic oligonucleotide
ggaagatatggagtgaagggattcagctttagatatggggatggtgtttggatagggagg

SEQ ID NO: 82631 - DNA, 60 bp, Artificial
  Synthetic oligonucleotide
gaaaaggaagatatggggtgaagggattcagctttagatatggggatggtgtttggatag

SEQ ID NO: 82632 - DNA, 59 bp, Artificial
  Synthetic oligonucleotide
cacaggttggtcatggcccgatggcgctctgttgccctttgacatagacaagtaatttt

SEQ ID NO: 82633 - DNA, 60 bp, Artificial
  Synthetic oligonucleotide
cacaggttggtcatggcccgatggcgctctgttgccctttgacatagacaagtaattttt

SEQ ID NO: 82634 - DNA, 60 bp, Artificial
  Synthetic oligonucleotide
ctgataccacaggttggtcatggcccgatggcgctctgttgccctttgacatagacaagt

SEQ ID NO: 82635 - DNA, 60 bp, Artificial
  Synthetic oligonucleotide
ctgttccaacaacacaacaaattactataatgagacctttgtcaatgtcaccaatgtgca

SEQ ID NO: 82636 - DNA, 50 bp, Artificial
  Synthetic oligonucleotide
tccaaataacaagtttatgctcaatatggtttagccattacaaccaggtg

SEQ ID NO: 82637 - DNA, 60 bp, Artificial
  Synthetic oligonucleotide
aggagttgccccctctcctagtaacagccgctttgaatctgtggcatggtctgccactgc

SEQ ID NO: 82638 - DNA, 60 bp, Artificial
  Synthetic oligonucleotide
gggagttgccccctctcctagcaacagccgctttgaatctgtggcatggtctgccactgc

SEQ ID NO: 82639 - DNA, 58 bp, Artificial
  Synthetic oligonucleotide
cccctctcctagcaacagccgctttgaatctgtggcatggtctgccactgcatgcagt

SEQ ID NO: 82640 - DNA, 60 bp, Artificial
  Synthetic oligonucleotide
cccctctcctagtaacagccgctttgaatctgtggcatggtctgccactgcatgtagcga

SEQ ID NO: 82641 - DNA, 60 bp, Artificial
  Synthetic oligonucleotide
agggttccattttgaagaatgttcctgttacccgagcgggacagatgttgaatgtgtctg

SEQ ID NO: 82642 - DNA, 60 bp, Artificial
  Synthetic oligonucleotide
ggatgtgaatgcaacagggtttcattttgaagaatgttcctgttacccgagcgggacaga

SEQ ID NO: 82643 - DNA, 58 bp, Artificial
  Synthetic oligonucleotide
gttcctgttacccgagcgggacagatgttgaatgtgtctgcagggacaattggcgggg

SEQ ID NO: 82644 - DNA, 60 bp, Artificial
  Synthetic oligonucleotide
agaatgttcctgttacccgagcgggacagatgttgaatgtgtctgtagggacaattggcg

SEQ ID NO: 82645 - DNA, 60 bp, Artificial
  Synthetic oligonucleotide
agggttgctcctccagataacaagtttatgctcaatatggtttagccattacaaccaagt

SEQ ID NO: 82646 - DNA, 60 bp, Artificial
  Synthetic oligonucleotide
gtgtctgtagggacaattggcggggaagcaatcgaccgtggataagattcaacagtgatc

SEQ ID NO: 82647 - DNA, 60 bp, Artificial
  Synthetic oligonucleotide
tggcgggggagcaatcgaccgtggataagattcaacagtgatcttgattaccaaattggc

SEQ ID NO: 82648 - DNA, 60 bp, Artificial
  Synthetic oligonucleotide
gttcctgttacccgagcgggacagatgttgaatgtgtctgcagggacaattggcggggga

SEQ ID NO: 82649 - DNA, 60 bp, Artificial
  Synthetic oligonucleotide
aatgtgtctgtagggacaattggcggggaagcaatcgaccgtggataagattcaacagtg

SEQ ID NO: 82650 - DNA, 60 bp, Artificial
  Synthetic oligonucleotide
gattaccaaattggctatgtatgtagtgggatatttggggacaatcccaggcctgtggat

SEQ ID NO: 82651 - DNA, 60 bp, Artificial
  Synthetic oligonucleotide
ccaaattggctatgtatgtagtgggatatttggggacaatcccaggcctgtggatggcat

SEQ ID NO: 82652 - DNA, 60 bp, Artificial
  Synthetic oligonucleotide
ggggagcaatcgaccgtggataagattcaacagtgatcttgattaccaaattggctatgt

SEQ ID NO: 82653 - DNA, 60 bp, Artificial
  Synthetic oligonucleotide
ttcaacagtgatcttgattaccaaattggctatgtatgtagtgggatatttggggacaat

SEQ ID NO: 82654 - DNA, 60 bp, Artificial
  Synthetic oligonucleotide
ggctatgtatgtagtgggatatttggggacaatcccaggcctgtggatggcataggctcg

SEQ ID NO: 82655 - DNA, 60 bp, Artificial
  Synthetic oligonucleotide
ggaaaggaagatatggagtgaagggattcagctttagatatggggatggtgtttggatag

SEQ ID NO: 82656 - DNA, 60 bp, Artificial
  Synthetic oligonucleotide
tttgtgttcacgctcaccgtgcccagtgagcgaggactgcagcgtagacgatttgtccag

SEQ ID NO: 82657 - DNA, 60 bp, Artificial
  Synthetic oligonucleotide
gtggcgagttccttagcactggcaatcatgatagctggtctatctttctggatgtgctcc

SEQ ID NO: 82658 - DNA, 60 bp, Artificial
  Synthetic oligonucleotide
tccattatccaaaggtctacaaaacctactttgaaaaggtcgaaaggttaaaacatggaa

SEQ ID NO: 82659 - DNA, 60 bp, Artificial
  Synthetic oligonucleotide
gtatcaaaaatgctgcaatctattcgagaaattcttccctagcagttcatacaggagacc

SEQ ID NO: 82660 - DNA, 60 bp, Artificial
  Synthetic oligonucleotide
ggagaccaccaaacagtgacccacccaacaataacgacccctgcagtaccgaactgcagt

SEQ ID NO: 82661 - DNA, 50 bp, Artificial
  Synthetic oligonucleotide
gtcaacactagcccttctcattggagtaggaaacttagttttcaacacag

SEQ ID NO: 82662 - DNA, 58 bp, Artificial
  Synthetic oligonucleotide
ggagaccaccaaacagtgacccacccaacaataacgacccctgcagtaccgaactgca

SEQ ID NO: 82663 - DNA, 60 bp, Artificial
  Synthetic oligonucleotide
ctggtcctttgctctcgcacaaggagcattgctagggactagacatagcaatgggaccat

SEQ ID NO: 82664 - DNA, 60 bp, Artificial
  Synthetic oligonucleotide
gtggatgcacgtgtgcatgacagggaacgataatgatgcaagcgcccagataatatatgc

SEQ ID NO: 82665 - DNA, 52 bp, Artificial
  Synthetic oligonucleotide
ctggtcctttgctctcgcacaaggagcattgctagggactagacatagcaat

SEQ ID NO: 82666 - DNA, 60 bp, Artificial
  Synthetic oligonucleotide
atactaagaacccaggagtctgaatgtcaatgcattgacgggacttgtgttgttgccgtc

SEQ ID NO: 82667 - DNA, 60 bp, Artificial
  Synthetic oligonucleotide
ggagtgaaggggtttggtttcaaagccggcaatgatgtgtggttaggtagaacagtgtca

SEQ ID NO: 82668 - DNA, 60 bp, Artificial
  Synthetic oligonucleotide
ggggtttggtttcaaagccggcaatgatgtgtggttaggtagaacagtgtcaactagtgg

SEQ ID NO: 82669 - DNA, 58 bp, Artificial
  Synthetic oligonucleotide
caattacacaaacactggtgtccaacaacgactggtcaggctactcaggtagcttcat

SEQ ID NO: 82670 - DNA, 60 bp, Artificial
  Synthetic oligonucleotide
agaactcaggaatcatcatgcacttgcattcaaggtgagtgttactgggtaatgacggat

SEQ ID NO: 82671 - DNA, 60 bp, Artificial
  Synthetic oligonucleotide
ggcaaagaggacaaaagatatggaccagcattgagcatcaatgaactgagcaatcttgcg

SEQ ID NO: 82672 - DNA, 60 bp, Artificial
  Synthetic oligonucleotide
acatacagatgtgcactgaactcaaactcagtgactatgaaggaaggctgatccaaaaca

SEQ ID NO: 82673 - DNA, 60 bp, Artificial
  Synthetic oligonucleotide
acaggctcagaagagaccaaaaggcattaaagggaagaggcagcacacttggactcgatc

SEQ ID NO: 82674 - DNA, 60 bp, Artificial
  Synthetic oligonucleotide
caggctcagaagagaccaaaaggcattaaagggaagaggcagcacacttggactcgatct

SEQ ID NO: 82675 - DNA, 60 bp, Artificial
  Synthetic oligonucleotide
atagactcagaaaagatcaaaaggcattaaagggaagaggcagcacacttggactcgacc

SEQ ID NO: 82676 - DNA, 60 bp, Artificial
  Synthetic oligonucleotide
caggagagaccaaaaggcattaaagggaagaggcagcacacttggactcgacctaagagt

SEQ ID NO: 82677 - DNA, 60 bp, Artificial
  Synthetic oligonucleotide
agatcagaaggcattaaagggaagaggcagcacacttggactcgacctgcgagtggccac

SEQ ID NO: 82678 - DNA, 60 bp, Artificial
  Synthetic oligonucleotide
acccaatgtgtgatgatttgattgggaaaacatcgtggtcctacatcgtggagaaaccaa

SEQ ID NO: 82679 - DNA, 60 bp, Artificial
  Synthetic oligonucleotide
ttgggaacccaatgtgtgatgatttgattgggaaaacatcctggtcctacatagtggaga

SEQ ID NO: 82680 - DNA, 60 bp, Artificial
  Synthetic oligonucleotide
ggatgtcaatccgactttacttttcttgaaagttccagcgcaaagtgccataagcaccac

SEQ ID NO: 82681 - DNA, 60 bp, Artificial
  Synthetic oligonucleotide
ctggcaatcatgatagctggtctatctttctggatgtgctccaatggatcattgcagtgc

SEQ ID NO: 82682 - DNA, 60 bp, Artificial
  Synthetic oligonucleotide
ttgtgtgatgtcaagggttttgcacccttttccaaagacaacggaataagaattggatcg

SEQ ID NO: 82683 - DNA, 53 bp, Artificial
  Synthetic oligonucleotide
gcacccttttccaaagacaacggaataagaattggatcgaggggtcatgtttt

SEQ ID NO: 82684 - DNA, 60 bp, Artificial
  Synthetic oligonucleotide
gcacccttttccaaagacaacggaataagaattggatcgaggggtcatgtttttgtcata

SEQ ID NO: 82685 - DNA, 60 bp, Artificial
  Synthetic oligonucleotide
gagatttaatgtcgcagtctcgcactcgcgagatactgacaaaaaccactgtggaccata

SEQ ID NO: 82686 - DNA, 60 bp, Artificial
  Synthetic oligonucleotide
cagtaatggtaacctaatcgctcctcgagggtacttcaagatgcgcactgggaaaagctc

SEQ ID NO: 82687 - DNA, 60 bp, Artificial
  Synthetic oligonucleotide
gtgactaatgccactgaactggtccagagctcctcaacagggaaaatatgcaacaaccct

SEQ ID NO: 82688 - DNA, 60 bp, Artificial
  Synthetic oligonucleotide
agctactttttctgtctggctttcagccaagaccactcagaaagcaacaacagcactgca

SEQ ID NO: 82689 - DNA, 60 bp, Artificial
  Synthetic oligonucleotide
ctgggaaaagctcaataatgagatctgatgcacctatcgacacatgcatctccgaatgta

SEQ ID NO: 82690 - DNA, 60 bp, Artificial
  Synthetic oligonucleotide
gacggctggtatggtttcagacaccaaaactctgagggtacagggcaagctgcagaccta

SEQ ID NO: 82691 - DNA, 60 bp, Artificial
  Synthetic oligonucleotide
ctggggagttcatcacccaagcacaaaccaagagcaaaccgatctatacgttcaggcatc

SEQ ID NO: 82692 - DNA, 53 bp, Artificial
  Synthetic oligonucleotide
aacagggaaaatatgcaacaaccctcacagaatccttgatggaagagattgca

SEQ ID NO: 82693 - DNA, 60 bp, Artificial
  Synthetic oligonucleotide
agatctctagttgcttcttcaggaaccctagagttcatcacagaagggtttacatggaca

SEQ ID NO: 82694 - DNA, 60 bp, Artificial
  Synthetic oligonucleotide
gcactctgaaattggcaacaggaatgcggaatgtgcctgagaaacagaccaggggtctct

SEQ ID NO: 82695 - DNA, 60 bp, Artificial
  Synthetic oligonucleotide
caacaggaatgcggaatgtgcctgagaaacagaccaggggtctctttggtgcaatagcgg

SEQ ID NO: 82696 - DNA, 60 bp, Artificial
  Synthetic oligonucleotide
cctaatggaagcatccccaatgacaagccctttcagaatgtaaacaagatcacttacgga

SEQ ID NO: 82697 - DNA, 60 bp, Artificial
  Synthetic oligonucleotide
gggtaatcgagaagacaaatgagaagtttcaccagattgaaaaggaattctccgaagtag

SEQ ID NO: 82698 - DNA, 60 bp, Artificial
  Synthetic oligonucleotide
tctgaatgtattactcctaatggaagcatccccaatgacaagccctttcagaatgtaaac

SEQ ID NO: 82699 - DNA, 60 bp, Artificial
  Synthetic oligonucleotide
gatcacttacggagcatgccctaagtatgtcaaacagagcactctgaaattggcaacagg

SEQ ID NO: 82700 - DNA, 60 bp, Artificial
  Synthetic oligonucleotide
cggatgaccaaattgaagtgactaatgccactgaactggtccagagctcctcaacaggga

SEQ ID NO: 82701 - DNA, 60 bp, Artificial
  Synthetic oligonucleotide
gacaactttgacaaattgtatgtctggggggttcatcacccaagcacaaaccaagagcaa

SEQ ID NO: 82702 - DNA, 60 bp, Artificial
  Synthetic oligonucleotide
ttggatccaggccttgggtcagaggccaatcagggaggataagcatctactggacaatag

SEQ ID NO: 82703 - DNA, 60 bp, Artificial
  Synthetic oligonucleotide
aataaaacatttcagaatgtaagccctctgtggataggagaatgccccaaatatgtgaaa

SEQ ID NO: 82704 - DNA, 60 bp, Artificial
  Synthetic oligonucleotide
cgatgaaaagcttgagtatgaagtcggttatctatgcgctggaattccaacagacacccc

SEQ ID NO: 82705 - DNA, 60 bp, Artificial
  Synthetic oligonucleotide
aactgtatagttccatgcttttggctggagatgattagggggaaaccagaggagaggact

SEQ ID NO: 82706 - DNA, 60 bp, Artificial
  Synthetic oligonucleotide
gactgtttagttccgtgcttttggctagagatgattagggggaaaccagaggagaggaat

SEQ ID NO: 82707 - DNA, 60 bp, Artificial
  Synthetic oligonucleotide
ggcccttcagaatgtaggacctttttcttaacgcagggtgccttgctgaatgacaagcat

SEQ ID NO: 82708 - DNA, 60 bp, Artificial
  Synthetic oligonucleotide
caattctgatattcgatgaaaagcttgagtatgaagtcggttatctatgcgctggaattc

SEQ ID NO: 82709 - DNA, 60 bp, Artificial
  Synthetic oligonucleotide
ttcgatgaaaagcttgagtatgaagtcggttatctttgcgctggaattccaacagacacc

SEQ ID NO: 82710 - DNA, 60 bp, Artificial
  Synthetic oligonucleotide
caaacactgtgtcaagcttccaggtagattgctttctttggcatgtccgcaaacgatttg

SEQ ID NO: 82711 - DNA, 60 bp, Artificial
  Synthetic oligonucleotide
ccaacactgtgtcaagctttcaggtagattgctttctttggcatgtccgcaaacgattcg

SEQ ID NO: 82712 - DNA, 60 bp, Artificial
  Synthetic oligonucleotide
gtaagaggcaattctccagtgttcaattacaacaaggcaaccaagaggcttacagtcctc

SEQ ID NO: 82713 - DNA, 60 bp, Artificial
  Synthetic oligonucleotide
gaatggaagatggatttctggacgtttggacatacaatgctgaactgttggttcttcttg

SEQ ID NO: 82714 - DNA, 60 bp, Artificial
  Synthetic oligonucleotide
ggaagattctacatacagatgtgcactgaactcaaactgagtgacaatgaggggaggctg

SEQ ID NO: 82715 - DNA, 60 bp, Artificial
  Synthetic oligonucleotide
tatgaagcaattgaggagtgcctgattaatgatccctgggttttgcttaatgcatcttgg

SEQ ID NO: 82716 - DNA, 60 bp, Artificial
  Synthetic oligonucleotide
ggaaaaccagaagagaggacaagcatttggacctctagtagctccacagtattttgtggt

SEQ ID NO: 82717 - DNA, 60 bp, Artificial
  Synthetic oligonucleotide
aatcaggaacgggacctatgatcatgacatatacagagatgaagcattaaacaatcgatt

SEQ ID NO: 82718 - DNA, 60 bp, Artificial
  Synthetic oligonucleotide
cgcatgtatagagtcaatccgaaacgggacctatgatcatgacatatacagagatgaagc

SEQ ID NO: 82719 - DNA, 60 bp, Artificial
  Synthetic oligonucleotide
gccgggggatgtactagtaattaacagtaatggtaacctgatcgctcctcgagggtactt

SEQ ID NO: 82720 - DNA, 60 bp, Artificial
  Synthetic oligonucleotide
aggataagcatctactggacaatagtgaagccgggggatgtactagtaattaacagtaat

SEQ ID NO: 82721 - DNA, 60 bp, Artificial
  Synthetic oligonucleotide
agatctctagttgcttcctcaggaaccctagagttcatcacagaagggtttacatggaca

SEQ ID NO: 82722 - DNA, 60 bp, Artificial
  Synthetic oligonucleotide
cactgtgatgtattccaagatgaaacctgggacctttatgtggaacgcagtagcgccttc

SEQ ID NO: 82723 - DNA, 60 bp, Artificial
  Synthetic oligonucleotide
ccccactgtgatgtattccaagatgaaacctgggacctttacgtggaacgtagcagcgcc

SEQ ID NO: 82724 - DNA, 60 bp, Artificial
  Synthetic oligonucleotide
ccccactgtgatgtattccaagatgaaacctgggacctttatgtggaacgtagcagcgcc

SEQ ID NO: 82725 - DNA, 60 bp, Artificial
  Synthetic oligonucleotide
agaataagcatctattggacaatagtgaagccgggggatgtactagtaattaacagtaat

SEQ ID NO: 82726 - DNA, 60 bp, Artificial
  Synthetic oligonucleotide
tcttcaggaaccctagagttcatcacagaagggtttacatggacaggagtcactcaaaat

SEQ ID NO: 82727 - DNA, 60 bp, Artificial
  Synthetic oligonucleotide
gacggctggtatggtttcagacaccaaaactctgagggtacaggacaagctgcagaccta

SEQ ID NO: 82728 - DNA, 60 bp, Artificial
  Synthetic oligonucleotide
gaagtagaaggaagaatccaagaccttgagaaatatgtcgaggacactaagatagatcta

SEQ ID NO: 82729 - DNA, 60 bp, Artificial
  Synthetic oligonucleotide
ggaagaatccaagaccttgagaaatatgtcgaggacactaagatagatctatggtcttac

SEQ ID NO: 82730 - DNA, 60 bp, Artificial
  Synthetic oligonucleotide
tgacaacgcatgtatagagtcaatccgaaacgggacctatgatcatgacatatacagaga

SEQ ID NO: 82731 - DNA, 60 bp, Artificial
  Synthetic oligonucleotide
tgatagacggctggtatggtttcagacaccaaaactctgagggtacagggcaagctgcag

SEQ ID NO: 82732 - DNA, 60 bp, Artificial
  Synthetic oligonucleotide
tgatagacggctggtatggtttcagacaccaaaactctgagggtacaggacaagctgcag

SEQ ID NO: 82733 - DNA, 60 bp, Artificial
  Synthetic oligonucleotide
ctggtccagagctcctcaacagggaaaatatgcaacaaccctcacagaatccttgatgga

SEQ ID NO: 82734 - DNA, 60 bp, Artificial
  Synthetic oligonucleotide
ggtccagagctcctcaacagggaaaatatgcaacaaccctcacagaatccttgatggaag

SEQ ID NO: 82735 - DNA, 60 bp, Artificial
  Synthetic oligonucleotide
ctggctttcagccaagaccactcagaaagcaacaacagcactgcaacactgtgcttgggg

SEQ ID NO: 82736 - DNA, 60 bp, Artificial
  Synthetic oligonucleotide
ctgggggacccccactgtgatgtattccaagatgaaacctgggacctttatgtggaacgt

SEQ ID NO: 82737 - DNA, 60 bp, Artificial
  Synthetic oligonucleotide
ctgggggacccccactgtgatgtattccaagatgaaacctgggacctttacgtggaacgt

SEQ ID NO: 82738 - DNA, 60 bp, Artificial
  Synthetic oligonucleotide
ggggatggtgtttggataggaaggacaaagagcttggaatccagaagcggctttgagatg

SEQ ID NO: 82739 - DNA, 60 bp, Artificial
  Synthetic oligonucleotide
ggggatggtgtctggataggaaggacaaagagcttggaatccagaagcggctttgaaatg

SEQ ID NO: 82740 - DNA, 60 bp, Artificial
  Synthetic oligonucleotide
gttcactactctagtggaagagacttgtgcccaataaggggatgggcacctctgagtaag

SEQ ID NO: 82741 - DNA, 60 bp, Artificial
  Synthetic oligonucleotide
ggataggaaggacaaagagcttggaatccagaagcggctttgagatggtatgggatgcca

SEQ ID NO: 82742 - DNA, 60 bp, Artificial
  Synthetic oligonucleotide
gggtgacaaagacataatggactccaatactgtatcaagctttcaggtagactgtttcct

SEQ ID NO: 82743 - DNA, 60 bp, Artificial
  Synthetic oligonucleotide
gggtgacaaagacataatggactccaatactgtgtcaagctttcaggtagactgtttcct

SEQ ID NO: 82744 - DNA, 60 bp, Artificial
  Synthetic oligonucleotide
agcaaaagcagggtgacaaagacataatggactccaatactgtgtcaagctttcaggtag

SEQ ID NO: 82745 - DNA, 60 bp, Artificial
  Synthetic oligonucleotide
gcaaaagcagggtgacaaagacataatggactccaatactgtatcaagctttcaggtaga

SEQ ID NO: 82746 - DNA, 60 bp, Artificial
  Synthetic oligonucleotide
gtttggataggaaggacgaagagcttggaatccagaagcggctttgagatggtgtgggat

SEQ ID NO: 82747 - DNA, 53 bp, Artificial
  Synthetic oligonucleotide
cactattctagtggaagagacttgtgcccaataaagggatgggcacctctgag

SEQ ID NO: 82748 - DNA, 60 bp, Artificial
  Synthetic oligonucleotide
agaatgttcctgttacccgagtgggacagatgttgaatgtgtctgtagggacaattggcg

SEQ ID NO: 82749 - DNA, 60 bp, Artificial
  Synthetic oligonucleotide
gtaagagcctaaaactagcaactggtctgagaaatgttccacgggcagaaacaagaggat

SEQ ID NO: 82750 - DNA, 60 bp, Artificial
  Synthetic oligonucleotide
gtaagagcctaaaactagcaactggtctgagaaatgttccacaggcagaaacaagaggat

SEQ ID NO: 82751 - DNA, 60 bp, Artificial
  Synthetic oligonucleotide
caaatatgttaaaagtaagagcctaaaactagcaactggtctgagaaatgttccacgggc

SEQ ID NO: 82752 - DNA, 60 bp, Artificial
  Synthetic oligonucleotide
caaatatgttaaaagtaagagcctaaaactagcaactggtctgagaaatgttccacaggc

SEQ ID NO: 82753 - DNA, 53 bp, Artificial
  Synthetic oligonucleotide
aaaagctggaagggaaatattatgcgaacacaagagtccgaatgcgtgtgtca

SEQ ID NO: 82754 - DNA, 53 bp, Artificial
  Synthetic oligonucleotide
aaaagttggaagggaaatattatgcgaacacaagagtctgagtgcgtatgcca

SEQ ID NO: 82755 - DNA, 60 bp, Artificial
  Synthetic oligonucleotide
tttttacgctcaccgtgcccagtgagcgaggactgcagcgtagacgctttgtccaaaacg

SEQ ID NO: 82756 - DNA, 53 bp, Artificial
  Synthetic oligonucleotide
ggggaatcggaagattctacatacagatgtgcactgaactcaagctcagtgac

SEQ ID NO: 82757 - DNA, 51 bp, Artificial
  Synthetic oligonucleotide
ggaatcggaagattctacatacagatgtgcactgaactcaagctcagtgac

SEQ ID NO: 82758 - DNA, 60 bp, Artificial
  Synthetic oligonucleotide
ttcttaaagggaaattccaaacagcagcacaacgagcaatgatggaccaggtgagagaga

SEQ ID NO: 82759 - DNA, 60 bp, Artificial
  Synthetic oligonucleotide
aaaatcagtgatgctggaaaatctgggagtataccaaatccttgctatttatagtacggt

SEQ ID NO: 82760 - DNA, 60 bp, Artificial
  Synthetic oligonucleotide
atagtacggtatcgagcagtctggttttggtgggactgatcattgccatgggtatttgga

SEQ ID NO: 82761 - DNA, 60 bp, Artificial
  Synthetic oligonucleotide
atagtacggtatcgagcagtctggttttggtgggactgatcattgccatgggtctttgga

SEQ ID NO: 82762 - DNA, 60 bp, Artificial
  Synthetic oligonucleotide
ttccacaggcagaaacaagaggattgtttggagcaatagctgggtttatagaaggaggat

SEQ ID NO: 82763 - DNA, 60 bp, Artificial
  Synthetic oligonucleotide
caatagacgggatcaccaataaagtcaattcaatcattgacaaaatgaacacacagtttg

SEQ ID NO: 82764 - DNA, 60 bp, Artificial
  Synthetic oligonucleotide
cgggatcaccaataaagtcaattcaatcattgacaaaatgaacacacagtttgaggcagt

SEQ ID NO: 82765 - DNA, 60 bp, Artificial
  Synthetic oligonucleotide
atagtacggtatcgagcagtctggttttggtagggctgatcattgccatgggtctttgga

SEQ ID NO: 82766 - DNA, 60 bp, Artificial
  Synthetic oligonucleotide
ttgttacactttaattacagacgggccgtctgatgcacaggccttctacaagatactaaa

SEQ ID NO: 82767 - DNA, 60 bp, Artificial
  Synthetic oligonucleotide
acacaagagtctgaatgtgtgtgtcaggatgaattttgttacactttaattacagacggg

SEQ ID NO: 82768 - DNA, 60 bp, Artificial
  Synthetic oligonucleotide
agatggagtttggatagggagaacaaaaagcttggaatccaggagcgggtttgaaatggt

SEQ ID NO: 82769 - DNA, 60 bp, Artificial
  Synthetic oligonucleotide
gggaagatacggagtaaaaggattcagctttagatatggagatggagtttggatagggag

SEQ ID NO: 82770 - DNA, 60 bp, Artificial
  Synthetic oligonucleotide
ccatatggactagcggtagtagcatcgcattttgtggtgttgattctgataccacaggtt

SEQ ID NO: 82771 - DNA, 60 bp, Artificial
  Synthetic oligonucleotide
tgtgccgtgcttctgggttgagatgataagggggcagcccaaagagaaaaccatatggac

SEQ ID NO: 82772 - DNA, 60 bp, Artificial
  Synthetic oligonucleotide
ggagtttcagtattagaggagaaacaactggtaggaattgcactgtgccgtgcttctggg

SEQ ID NO: 82773 - DNA, 60 bp, Artificial
  Synthetic oligonucleotide
tacagtgggagtttcagtattagaggagaaacaactggtaggaattgcactgtgccgtgc

SEQ ID NO: 82774 - DNA, 60 bp, Artificial
  Synthetic oligonucleotide
tgagttgccacattggagttgctccttcccctagcaacagtcggttcgaatctgtggctt

SEQ ID NO: 82775 - DNA, 60 bp, Artificial
  Synthetic oligonucleotide
cttttcgcacattaatgagttgccacattggagttgctccttcccctagcaacagtcggt

SEQ ID NO: 82776 - DNA, 60 bp, Artificial
  Synthetic oligonucleotide
cggttcgaatctgtggcttggtctgccactgcatgcagcgatggacccggttggttgaca

SEQ ID NO: 82777 - DNA, 60 bp, Artificial
  Synthetic oligonucleotide
gcggtagtagcatcgcattttgtggtgttgattctgataccacaggttggtcgtggcctg

SEQ ID NO: 82778 - DNA, 60 bp, Artificial
  Synthetic oligonucleotide
cccggttggttgacattaggaattactggccctgattctactgctgttgcggtgataaaa

SEQ ID NO: 82779 - DNA, 60 bp, Artificial
  Synthetic oligonucleotide
acccggttggttgacattaggaattactggccctgattctactgctgttgcggtgataaa

SEQ ID NO: 82780 - DNA, 60 bp, Artificial
  Synthetic oligonucleotide
ggcaacatcatgcgaacacaagagtctgaatgtgtgtgtcaggatgaattttgttacact

SEQ ID NO: 82781 - DNA, 60 bp, Artificial
  Synthetic oligonucleotide
cggtgataaaatacaatggtatcatcaccgatacattaaaaagctggaaaggcaacatca

SEQ ID NO: 82782 - DNA, 60 bp, Artificial
  Synthetic oligonucleotide
gctctcctcaatgataagcactcgaatgggacagtaaaagacagaagtccttttcgcaca

SEQ ID NO: 82783 - DNA, 60 bp, Artificial
  Synthetic oligonucleotide
tgctctcctcaatgataagcactcgaatgggacagtaaaagacagaagtccttttcgcac

SEQ ID NO: 82784 - DNA, 60 bp, Artificial
  Synthetic oligonucleotide
aacagtcggttcgaatctgtggcttggtctgccactgcatgcagcgatggacccggttgg

SEQ ID NO: 82785 - DNA, 60 bp, Artificial
  Synthetic oligonucleotide
gacttttgtaaatgtcaccaatgtgcagaacaattataccacagtaactgagccctcaag

SEQ ID NO: 82786 - DNA, 60 bp, Artificial
  Synthetic oligonucleotide
ctatcaaattggttatgtatgtagtggagtgtttggagacaatcccagaccagtggatgg

SEQ ID NO: 82787 - DNA, 60 bp, Artificial
  Synthetic oligonucleotide
agccctcaagccctcaggtaattcactattccagtggaaaagacctatgcccagtaaaag

SEQ ID NO: 82788 - DNA, 60 bp, Artificial
  Synthetic oligonucleotide
caccaatgtgcagaacaattataccacagtaactgagccctcaagccctcaggtaattca

SEQ ID NO: 82789 - DNA, 60 bp, Artificial
  Synthetic oligonucleotide
atggaattagaattggatccaggggcgaggtatctgtcatacgggagcctttcatatcgt

SEQ ID NO: 82790 - DNA, 60 bp, Artificial
  Synthetic oligonucleotide
gccctcaagccctcaggtaattcactattccagtggaaaagacctatgcccagtaaaagg

SEQ ID NO: 82791 - DNA, 60 bp, Artificial
  Synthetic oligonucleotide
ttcatatcgtgttccattcatgaatgccgaacatttttcttgacccaaggtgctctcctc

SEQ ID NO: 82792 - DNA, 60 bp, Artificial
  Synthetic oligonucleotide
ggatccaggggcgaggtatctgtcatacgggagcctttcatatcgtgttccattcatgaa

SEQ ID NO: 82793 - DNA, 60 bp, Artificial
  Synthetic oligonucleotide
accacaggttggtcgtggcctgatggcgctctgttgccttttgacatagacaagtaattt

SEQ ID NO: 82794 - DNA, 60 bp, Artificial
  Synthetic oligonucleotide
cccagaccagtggatggcaccggatcgtgtagtggaccaatcaacaatgggaagggaaga

SEQ ID NO: 82795 - DNA, 60 bp, Artificial
  Synthetic oligonucleotide
aacaatgggaagggaagatacggagtaaaaggattcagctttagatatggagatggagtt

SEQ ID NO: 82796 - DNA, 60 bp, Artificial
  Synthetic oligonucleotide
agtgttcctgttacccaagtggagaaaatgtcgagtgcgtgtgtagagacaattggaggg

SEQ ID NO: 82797 - DNA, 60 bp, Artificial
  Synthetic oligonucleotide
tgcgtgtgtagagacaattggaggggaagtaatagaccgtggatacgattcaacagtgat

SEQ ID NO: 82798 - DNA, 57 bp, Artificial
  Synthetic oligonucleotide
agacgggccgtctgatgcacaggccttctacaagatactaaagataaggaaagggaa

SEQ ID NO: 82799 - DNA, 60 bp, Artificial
  Synthetic oligonucleotide
ggtttcattttgaagagtgttcctgttacccaagtggagaaaatgtcgagtgcgtgtgta

SEQ ID NO: 82800 - DNA, 60 bp, Artificial
  Synthetic oligonucleotide
ccacaggttggtcgtggcctgatggcgctctgttgccttttgacatagacaagtaatttt

SEQ ID NO: 82801 - DNA, 60 bp, Artificial
  Synthetic oligonucleotide
gagacaatcccagaccagtggatggcaccggatcgtgtagtggaccaatcaacaatggga

SEQ ID NO: 82802 - DNA, 60 bp, Artificial
  Synthetic oligonucleotide
gcgtgtgtagagacaattggaggggaagtaatagaccgtggatacgattcaacagtgatc

SEQ ID NO: 82803 - DNA, 60 bp, Artificial
  Synthetic oligonucleotide
caacagtgatcttgactatcaaattggttatgtatgtagtggagtgtttggagacaatcc

SEQ ID NO: 82804 - DNA, 60 bp, Artificial
  Synthetic oligonucleotide
ggactcaaatggtgtgcaggacattatagacaatgataattggtctggatacagtgggag

SEQ ID NO: 82805 - DNA, 60 bp, Artificial
  Synthetic oligonucleotide
aggactcaaatggtgtgcaggacattatagacaatgataattggtctggatacagtggga

SEQ ID NO: 82806 - DNA, 60 bp, Artificial
  Synthetic oligonucleotide
caaggctcagggtatgcagcagacagagaaagcactcaaagggctatagacggaattaca

SEQ ID NO: 82807 - DNA, 60 bp, Artificial
  Synthetic oligonucleotide
tctggtgatcgatatgtcaggatgggaactgaaagcatgaattttgccaaaagtccggaa

SEQ ID NO: 82808 - DNA, 60 bp, Artificial
  Synthetic oligonucleotide
cactgagtgacatccatatcatggcgtctcaaggcaccaaacgatcttatgagcagatgg

SEQ ID NO: 82809 - DNA, 60 bp, Artificial
  Synthetic oligonucleotide
atgagcaaaataccctgtatggctctggtgacagatatgttagaatgggaactgagagca

SEQ ID NO: 82810 - DNA, 60 bp, Artificial
  Synthetic oligonucleotide
tataggacctgcaagctagttggaatcaatatgagcaaaaagaagtcctacataaacagg

SEQ ID NO: 82811 - DNA, 60 bp, Artificial
  Synthetic oligonucleotide
cttcctttgacatgagtaacgatggatcttatttcttcggagacaatgcagaggaatatg

SEQ ID NO: 82812 - DNA, 60 bp, Artificial
  Synthetic oligonucleotide
atctgttcaaccattgaagagctcagacggcagaaatagtgaattttgcttgtccttcat

SEQ ID NO: 82813 - DNA, 60 bp, Artificial
  Synthetic oligonucleotide
gctgaaatcagtttcaatggaggccatatagaagaatgctcatgctaccccaatgaaggt

SEQ ID NO: 82814 - DNA, 60 bp, Artificial
  Synthetic oligonucleotide
aatgtgagccctctgtggataggagaatgccccaaatatgtgaaaagtgaaagcctgagg

SEQ ID NO: 82815 - DNA, 60 bp, Artificial
  Synthetic oligonucleotide
aatgtaagccctctgtggataggagaatgccccaaatatgtgaaaagtgaaagtttaagg

SEQ ID NO: 82816 - DNA, 60 bp, Artificial
  Synthetic oligonucleotide
cccctgggttttgcttaatgcatcttggttcaactccttcctcacacatgcactgaaata

SEQ ID NO: 82817 - DNA, 60 bp, Artificial
  Synthetic oligonucleotide
cctcaccatttattcgactgtcgcctcatctcttgtgcttgcgatggggtttgctgcctt

SEQ ID NO: 82818 - DNA, 60 bp, Artificial
  Synthetic oligonucleotide
cctcaccatttattcgactgtcgcctcatctcttgtacttgcactggggtttgctgcctt

SEQ ID NO: 82819 - DNA, 60 bp, Artificial
  Synthetic oligonucleotide
actatttattcgactgtcgcctcatctcttgtgcttgcaatggggtttgctgcctttctg

SEQ ID NO: 82820 - DNA, 60 bp, Artificial
  Synthetic oligonucleotide
cttactatttattcgactgtcgcctcatctcttgtgcttgcaatggggtttgctgccttt

SEQ ID NO: 82821 - DNA, 60 bp, Artificial
  Synthetic oligonucleotide
gaatctcccttttgaaagagcaaccgttatggcagccttcagcgggaacaatgaaggacg

SEQ ID NO: 82822 - DNA, 60 bp, Artificial
  Synthetic oligonucleotide
aaagcatccgctggccagatcagtgtgcaacctacattctcagtgcaacggaatctccct

SEQ ID NO: 82823 - DNA, 60 bp, Artificial
  Synthetic oligonucleotide
gctgcccaaagggcaatgatggatcaagtgagagaaagtcggaacccaggaaacgctgag

SEQ ID NO: 82824 - DNA, 60 bp, Artificial
  Synthetic oligonucleotide
agcaaaagcagggtagataatcactcaatgagtgacatcgaagccatggcatctcaaggc

SEQ ID NO: 82825 - DNA, 60 bp, Artificial
  Synthetic oligonucleotide
gcgacactataggttggtcttggccagacggtgctgagttgccattcattattgacaagt

SEQ ID NO: 82826 - DNA, 60 bp, Artificial
  Synthetic oligonucleotide
taaatagcgacactataggttggtcttggccagacggtgctgagttgccattcattattg

SEQ ID NO: 82827 - DNA, 60 bp, Artificial
  Synthetic oligonucleotide
gcgacactataggttggtcttggccagacggtgctgagttgccattcaccattgacaagt

SEQ ID NO: 82828 - DNA, 60 bp, Artificial
  Synthetic oligonucleotide
taaatagcgacactataggttggtcttggccagacggtgctgagttgccattcaccattg

SEQ ID NO: 82829 - DNA, 60 bp, Artificial
  Synthetic oligonucleotide
ggtgtagatagcgacactgtgggttggtcttggccagacggtgctgagttgccattcacc

SEQ ID NO: 82830 - DNA, 56 bp, Artificial
  Synthetic oligonucleotide
cagagtgctgtagatgttgacgatggtcattttgtcaacatagagctggagtaaaa

SEQ ID NO: 82831 - DNA, 60 bp, Artificial
  Synthetic oligonucleotide
gcccggccaagagcatggaatatgatgctgttgcaactacacattcctggatccctaaaa

SEQ ID NO: 82832 - DNA, 60 bp, Artificial
  Synthetic oligonucleotide
ctcattgttcaggcacttagggacaacctggaacctgggaccttcgatcttggtgggcta

SEQ ID NO: 82833 - DNA, 60 bp, Artificial
  Synthetic oligonucleotide
caaatacaggacatttgggcatacaatgcagaattactagtactgcttgaaaatcagaaa

SEQ ID NO: 82834 - DNA, 60 bp, Artificial
  Synthetic oligonucleotide
gtaatccctcttgtgatttgctactgggagggaaagaatggtcctacattgtcgaaagat

SEQ ID NO: 82835 - DNA, 50 bp, Artificial
  Synthetic oligonucleotide
catcaaatagagggctatttggtgccatagctggattcatagaaggaggt

SEQ ID NO: 82836 - DNA, 60 bp, Artificial
  Synthetic oligonucleotide
ctcttgtgatttgctactgggagggaaagaatggtcctacattgtcgaaagatcatcagc

SEQ ID NO: 82837 - DNA, 60 bp, Artificial
  Synthetic oligonucleotide
ccggaaagtcagacaagatctgcatcgggtatcatgccaacaattcaacaacacaagtgg

SEQ ID NO: 82838 - DNA, 60 bp, Artificial
  Synthetic oligonucleotide
gcgaccgatatgttaggatgggaactgaaagcatgaattttgccaagagcccggaaattg

SEQ ID NO: 82839 - DNA, 59 bp, Artificial
  Synthetic oligonucleotide
ctagacctacatgacgcgaatgtgaagaacctgtatgaaaaggtcaaatcacaactacg

SEQ ID NO: 82840 - DNA, 60 bp, Artificial
  Synthetic oligonucleotide
ggggtgcaccatcctcctgacaccaatgagcagaacactttgtatggctctggtgatcga

SEQ ID NO: 82841 - DNA, 60 bp, Artificial
  Synthetic oligonucleotide
tggcatgtccgcaaacgatttgcagaccaagagatgggagacgccccattcctagatcgg

SEQ ID NO: 82842 - DNA, 60 bp, Artificial
  Synthetic oligonucleotide
gcctgcataggatcaatcagaaatggaacttatgaccatgatgtatacagagatgaggca

SEQ ID NO: 82843 - DNA, 54 bp, Artificial
  Synthetic oligonucleotide
cttgaagtagagcaagagataagaactttctcgtttcagcttatttaatgataa

SEQ ID NO: 82844 - DNA, 60 bp, Artificial
  Synthetic oligonucleotide
cagtttcaatggaggccatatagaagaatgctcatgctaccccaatgaaggtaaagtgga

SEQ ID NO: 82845 - DNA, 60 bp, Artificial
  Synthetic oligonucleotide
tagcctaaggctggcaactggtctgagaaatgtcccacaggcagagacaagagggttgtt

SEQ ID NO: 82846 - DNA, 60 bp, Artificial
  Synthetic oligonucleotide
catagtgctgtggatgttgacgatggtcattttgtcaacatagagctggagtaaaaaact

SEQ ID NO: 82847 - DNA, 60 bp, Artificial
  Synthetic oligonucleotide
agccaagtggatatgcacaaacagactgtgtcttggaagcaatggctttccttgaagagt

SEQ ID NO: 82848 - DNA, 60 bp, Artificial
  Synthetic oligonucleotide
attaatgaatcggctgacatgagcattggagtaacagtgataaagaacaacatgataaac

SEQ ID NO: 82849 - DNA, 60 bp, Artificial
  Synthetic oligonucleotide
gtcttggtagggctgattatagcagtgggtctttggatgtgttcaaatggttcaatgcaa

SEQ ID NO: 82850 - DNA, 60 bp, Artificial
  Synthetic oligonucleotide
ttggtagggctgataatagcagtgggtctttggatgtgttcaaatggttcaatgcaatgc

SEQ ID NO: 82851 - DNA, 60 bp, Artificial
  Synthetic oligonucleotide
gtagggctgattatagcaatgggtctttggatgtgttcaaatggttcaatgcaatgcagg

SEQ ID NO: 82852 - DNA, 60 bp, Artificial
  Synthetic oligonucleotide
gtagggctgataatagcagtgggtctttggatgtgttcaaatggttcaatgcaatgcagg

SEQ ID NO: 82853 - DNA, 51 bp, Artificial
  Synthetic oligonucleotide
gcattaggtctttggatgtgttcaaatggttcaatgcaatgcaggatatgt

SEQ ID NO: 82854 - DNA, 60 bp, Artificial
  Synthetic oligonucleotide
gtagggctgattatagcagtgggtctttggatgtgttcaaatggttcaatgcaatgcagg

SEQ ID NO: 82855 - DNA, 60 bp, Artificial
  Synthetic oligonucleotide
gtagggctgatcatagcaatgggtctttggatgtgttcaaatggttcaatgcaatgcagg

SEQ ID NO: 82856 - DNA, 60 bp, Artificial
  Synthetic oligonucleotide
tgagcactgtcctggcagtaagctttgcatatgacaaaatttgcattggatatcaaacaa

SEQ ID NO: 82857 - DNA, 60 bp, Artificial
  Synthetic oligonucleotide
tgccaattgaacgagggtgtaatgaatacaagcaaacctttccagaacactagtaagcac

SEQ ID NO: 82858 - DNA, 60 bp, Artificial
  Synthetic oligonucleotide
agtgccaattgaatgagggtgtaatgaatacaagcaaacctttccagaacactagtaagc

SEQ ID NO: 82859 - DNA, 60 bp, Artificial
  Synthetic oligonucleotide
acgagggtgtaatgaacacaagcaaacctttccagaacactagtaagcactatattggga

SEQ ID NO: 82860 - DNA, 60 bp, Artificial
  Synthetic oligonucleotide
tgccaattgaatgagggtgtaatgaatacaagcaaacctttccagaacactagtaagcac

SEQ ID NO: 82861 - DNA, 60 bp, Artificial
  Synthetic oligonucleotide
tgccaattgaatgagggtgtaatgaatacgagcaaacctttccagaacactagtaagcac

SEQ ID NO: 82862 - DNA, 60 bp, Artificial
  Synthetic oligonucleotide
gccaattgaatgagggtgtaatgaatacgagcaaacctttccagaacactagtaagcact

SEQ ID NO: 82863 - DNA, 60 bp, Artificial
  Synthetic oligonucleotide
gccaattgaatgagggtgtaatgaatacaagcaaacctttccagaacactagtaagcact

SEQ ID NO: 82864 - DNA, 60 bp, Artificial
  Synthetic oligonucleotide
gccaattgaacgagggtgtaatgaatacaagcaaacctttccagaacactagtaagcact

SEQ ID NO: 82865 - DNA, 60 bp, Artificial
  Synthetic oligonucleotide
agtccttaccgtgcattgatgagtgtgccattaggatcttcacccaatgcctaccaggcc

SEQ ID NO: 82866 - DNA, 60 bp, Artificial
  Synthetic oligonucleotide
ccttaccgtgcattgatgagtgtgccattaggatcttcacccaatgcctaccaggccaag

SEQ ID NO: 82867 - DNA, 60 bp, Artificial
  Synthetic oligonucleotide
gtccttatcgtgcattgatgagtgtgccattaggatcttcacccaatgcctaccaggcca

SEQ ID NO: 82868 - DNA, 60 bp, Artificial
  Synthetic oligonucleotide
aaaatgcaattggggtcctcatcggaggacttgaatggaatgataacacagttcgagtca

SEQ ID NO: 82869 - DNA, 60 bp, Artificial
  Synthetic oligonucleotide
actgagagcatgaattttgccaaaagtccggaaatagcagcaagaccagctgtgaatggg

SEQ ID NO: 82870 - DNA, 60 bp, Artificial
  Synthetic oligonucleotide
agcaaaagcagggtagataatcactcaccgagtgacatccacatcatggcgtcccaaggc

SEQ ID NO: 82871 - DNA, 60 bp, Artificial
  Synthetic oligonucleotide
gaacagtcaattgctgaagcaataattgtggccatggtattttcacaagaggattgcatg

SEQ ID NO: 82872 - DNA, 60 bp, Artificial
  Synthetic oligonucleotide
agcaaaagcaggggaaaatgattgcaatcataatactcgcggtagtggcctctaccagca

SEQ ID NO: 82873 - DNA, 60 bp, Artificial
  Synthetic oligonucleotide
agcaaaagcaggggaaaatgattgcaatcataatattagcgatagtggcctctaccagca

SEQ ID NO: 82874 - DNA, 60 bp, Artificial
  Synthetic oligonucleotide
gtaatgacagatggaccagcaaacagacaagcacaatacagagcattcaaagccaaacag

SEQ ID NO: 82875 - DNA, 51 bp, Artificial
  Synthetic oligonucleotide
ggccttctcgtttcagcttatttaatgataaaaaacacccttgtttctact

SEQ ID NO: 82876 - DNA, 60 bp, Artificial
  Synthetic oligonucleotide
gggtggtatggctatcaccatgaaaattctcaaggctcagggtatgcagcagacagagaa

SEQ ID NO: 82877 - DNA, 60 bp, Artificial
  Synthetic oligonucleotide
actaaggggattttgggatttgtgttcacactcaccgtgcccagtgagcgaggactgcag

SEQ ID NO: 82878 - DNA, 60 bp, Artificial
  Synthetic oligonucleotide
gattttagggtttgtgttcacgctcaccgtgcccagtgagcgaggactgcagcgtagacg

SEQ ID NO: 82879 - DNA, 60 bp, Artificial
  Synthetic oligonucleotide
ttttagggtttgtgttcacgctcaccgtgcccagtgagcgaggactgcagcgtagacgtt

SEQ ID NO: 82880 - DNA, 60 bp, Artificial
  Synthetic oligonucleotide
ttttaggatttgttttcacgctcaccgtgcccagtgagcgaggactgcagcgtagacgct

SEQ ID NO: 82881 - DNA, 60 bp, Artificial
  Synthetic oligonucleotide
ttttgggatttgtgttcacactcaccgtgcccagtgagcgaggactgcagcgtagacgct

SEQ ID NO: 82882 - DNA, 60 bp, Artificial
  Synthetic oligonucleotide
ttttggggttcgtgtttacgctcaccgtgcccagtgagcgaggactgcagcgtagacggt

SEQ ID NO: 82883 - DNA, 60 bp, Artificial
  Synthetic oligonucleotide
tcttagggtttgtgttcacgctcaccgtgcccagtgagcgaggactgcagcgtagacgtt

SEQ ID NO: 82884 - DNA, 60 bp, Artificial
  Synthetic oligonucleotide
gacattatagacaacgacaattggtctggttacagcgggagtttcagcattagaggtgag

SEQ ID NO: 82885 - DNA, 51 bp, Artificial
  Synthetic oligonucleotide
ttgaagagctcagacggcagaaatagtgaatttagcttgtccttcatgaaa

SEQ ID NO: 82886 - DNA, 60 bp, Artificial
  Synthetic oligonucleotide
ctgttcaaccattgaagagctcagacggcagaaatagtgaattttgcttgtccttcatga

SEQ ID NO: 82887 - DNA, 60 bp, Artificial
  Synthetic oligonucleotide
aataaaacatttcagaatgtgagccctctgtggataggagaatgccccaaatatgtgaaa

SEQ ID NO: 82888 - DNA, 60 bp, Artificial
  Synthetic oligonucleotide
gtttattgcaatggcaatgctcttggcgagcacaaatgcatacgataggatatgcattgg

SEQ ID NO: 82889 - DNA, 60 bp, Artificial
  Synthetic oligonucleotide
atggagaagtttattgcaatggcaatgctcttggcgagcacaaatgcatacgataggata

SEQ ID NO: 82890 - DNA, 60 bp, Artificial
  Synthetic oligonucleotide
tctgaagttgaaaaaaggataaacatgataaacgataaaatagacgaccaaattgaagat

SEQ ID NO: 82891 - DNA, 60 bp, Artificial
  Synthetic oligonucleotide
tctgaagttgaaaaaaggataaacatgataaatgataaaatagacgaccaaattgaagat

SEQ ID NO: 82892 - DNA, 60 bp, Artificial
  Synthetic oligonucleotide
tcctcgccatttatagtacggtatcgagcagtctagtcttggtagggctgattatagcag

SEQ ID NO: 82893 - DNA, 60 bp, Artificial
  Synthetic oligonucleotide
gctctggtgatcgatatgtcaggatgggaactgaaagcatgaattttgccaagagtccag

SEQ ID NO: 82894 - DNA, 60 bp, Artificial
  Synthetic oligonucleotide
tgccccatggtatggtcacattctctcaggagaaagccatggaagaatcttgaagactga

SEQ ID NO: 82895 - DNA, 60 bp, Artificial
  Synthetic oligonucleotide
ccccatggtatggacacattctctcaggagaaagccatggaagaatcctgaagaccgatc

SEQ ID NO: 82896 - DNA, 60 bp, Artificial
  Synthetic oligonucleotide
caatggaaacctaattgccccatggtatggtcacattctctcaggagaaagccatggaag

SEQ ID NO: 82897 - DNA, 60 bp, Artificial
  Synthetic oligonucleotide
ttgccccatggtatggacacattctctcaggagaaagccatggaagaatcctgaagaccg

SEQ ID NO: 82898 - DNA, 60 bp, Artificial
  Synthetic oligonucleotide
tggggtcaaacttgaggagaattctacatataaaattttgagcatctacagcagtgttgc

SEQ ID NO: 82899 - DNA, 60 bp, Artificial
  Synthetic oligonucleotide
tgatgatcaagtaactgacatatgggcatacaatgctgaattgcttgttctgttggaaaa

SEQ ID NO: 82900 - DNA, 60 bp, Artificial
  Synthetic oligonucleotide
acgacagaaaatcaatggggtcaaacttgaggagaattctacatataaaattctgagcat

SEQ ID NO: 82901 - DNA, 60 bp, Artificial
  Synthetic oligonucleotide
gattaattctaaaattgatgatcaagtaactgacatatgggcatacaatgctgaattgct

SEQ ID NO: 82902 - DNA, 60 bp, Artificial
  Synthetic oligonucleotide
ctccacggtattttgtggtgtttcaagtgaggtcccagggtggtcctgggatgatggagc

SEQ ID NO: 82903 - DNA, 60 bp, Artificial
  Synthetic oligonucleotide
ctccacggtattttgtggtgtttcaagtgaggtcccagggtggtcctgggatgatggcgc

SEQ ID NO: 82904 - DNA, 60 bp, Artificial
  Synthetic oligonucleotide
ctccacagtattttgtggtgtttcaagtgaggtcccagggtggtcctgggatgatggagc

SEQ ID NO: 82905 - DNA, 60 bp, Artificial
  Synthetic oligonucleotide
tagctccacggtattttgtggtgtttcaagtgaggtcccagggtggtcctgggatgatgg

SEQ ID NO: 82906 - DNA, 60 bp, Artificial
  Synthetic oligonucleotide
aagggaagtttcaaacagcagcacaacgagcaatgatggaccaggtgagggaaagccgga

SEQ ID NO: 82907 - DNA, 60 bp, Artificial
  Synthetic oligonucleotide
gaatggaccaggcaattatggataagaacatcatactgaaagcgaatttcagtgtgatct

SEQ ID NO: 82908 - DNA, 60 bp, Artificial
  Synthetic oligonucleotide
cctggcagtaagctttgcatatgacaaaatttgcattggatatcaaacaaacaactcgac

SEQ ID NO: 82909 - DNA, 59 bp, Artificial
  Synthetic oligonucleotide
tggcagtaagctttgcatatgacaaaatttgcattggatatcaaacaaacaactcgact

SEQ ID NO: 82910 - DNA, 60 bp, Artificial
  Synthetic oligonucleotide
agcaaaagcaggggataattctattaatcatgaagaccatcattgtcctaagctactttt

SEQ ID NO: 82911 - DNA, 60 bp, Artificial
  Synthetic oligonucleotide
ccaagatgaaacctgggacctttatgtggaacgcagtagcgccttcagcaactgctatcc

SEQ ID NO: 82912 - DNA, 60 bp, Artificial
  Synthetic oligonucleotide
aacattaggtgcaacatttgcatttgagtatattagtagttaaaaacacccttgtttcta

SEQ ID NO: 82913 - DNA, 60 bp, Artificial
  Synthetic oligonucleotide
gaccagattaacgggaagttgaaccgggtaatcgagaagacaaatgagaagtttcaccag

SEQ ID NO: 82914 - DNA, 60 bp, Artificial
  Synthetic oligonucleotide
tgaccagattaacgggaagttgaaccgggtaatcgagaagacaaatgagaagtttcacca

SEQ ID NO: 82915 - DNA, 60 bp, Artificial
  Synthetic oligonucleotide
cgctgtggtgatgccagctcatggtccagccaagagcatggaatatgatgctgttgctac

SEQ ID NO: 82916 - DNA, 60 bp, Artificial
  Synthetic oligonucleotide
agtgctgtggatgttgacgatggtcattttgtcaacatagagctggagtaaaaaactacc

SEQ ID NO: 82917 - DNA, 60 bp, Artificial
  Synthetic oligonucleotide
ataaaatagatgaccaaattgaagacctttgggcttacaatgcagagctccttgtgctct

SEQ ID NO: 82918 - DNA, 60 bp, Artificial
  Synthetic oligonucleotide
gaacccagaggactgttcggagccattgctggtttcatcgaaggaggatggtctgggatg

SEQ ID NO: 82919 - DNA, 60 bp, Artificial
  Synthetic oligonucleotide
attggtcccagaccattagtaagaggacagcaaggaagaatggattactattggggcatt

SEQ ID NO: 82920 - DNA, 60 bp, Artificial
  Synthetic oligonucleotide
agatggagacatcattttcttatgggggatccaccatcctccaaacacaaaagagcaaac

SEQ ID NO: 82921 - DNA, 60 bp, Artificial
  Synthetic oligonucleotide
ggagaggcccagcgcaccagaggggatgtgttaccctggatctgtggaaaatctggaaga

SEQ ID NO: 82922 - DNA, 60 bp, Artificial
  Synthetic oligonucleotide
atacatagtggagaggcccagcgcaccagaggggatgtgttaccctggatctgtggaaaa

SEQ ID NO: 82923 - DNA, 60 bp, Artificial
  Synthetic oligonucleotide
agcaaaagcaggggtcacaatggagaagttcatcgcaatagcaatgctcttggcgagcac

SEQ ID NO: 82924 - DNA, 60 bp, Artificial
  Synthetic oligonucleotide
acaaatacataatggattccaacacgataacctcgtttcaggtagattgctatctatggc

SEQ ID NO: 82925 - DNA, 57 bp, Artificial
  Synthetic oligonucleotide
ttctgggccatgtccaatggatcttgcagatgcaacatttgtatataattagcaaaa

SEQ ID NO: 82926 - DNA, 60 bp, Artificial
  Synthetic oligonucleotide
gttcaaactcattttacaggagtatgagatggctgactcacaagagcaattcttaccctg

SEQ ID NO: 82927 - DNA, 56 bp, Artificial
  Synthetic oligonucleotide
ttctgggccatgtccaatggatcttgcagatgcaacatttgtatataattagcaaa

SEQ ID NO: 82928 - DNA, 60 bp, Artificial
  Synthetic oligonucleotide
acaggagtatgagatggctgactcacaagagcaattcttaccctgtccaagacgcccaat

SEQ ID NO: 82929 - DNA, 60 bp, Artificial
  Synthetic oligonucleotide
aaacactttgtatggctctggtgatcgatatgtcaggatgggaactgaaagcatgaattt

SEQ ID NO: 82930 - DNA, 60 bp, Artificial
  Synthetic oligonucleotide
ggctcgacactccctagaaggtctggagctgctggtgcagcagtaaagggagttgggaca

SEQ ID NO: 82931 - DNA, 60 bp, Artificial
  Synthetic oligonucleotide
gggctcaacactccctagaaggtctggagctgctggtgcagcagtaaagggagttgggac

SEQ ID NO: 82932 - DNA, 60 bp, Artificial
  Synthetic oligonucleotide
ggccaagcagggaaaaataattgggcaaactgaaatcagtttcaatggaggccatataga

SEQ ID NO: 82933 - DNA, 60 bp, Artificial
  Synthetic oligonucleotide
gcaggcaaaccatttgaatggatgtcaatccgactttacttttcttgaaagtgccagcac

SEQ ID NO: 82934 - DNA, 60 bp, Artificial
  Synthetic oligonucleotide
tgcaagccctacaactactgcttgaagtggagcaagagataagaactttctcgtttcagc

SEQ ID NO: 82935 - DNA, 60 bp, Artificial
  Synthetic oligonucleotide
ggggtaacagtgataaagaacaacatgataaacaatgaccttgggccagcaacggctcaa

SEQ ID NO: 82936 - DNA, 60 bp, Artificial
  Synthetic oligonucleotide
cacaatcccgcacccgcgagatactcaccaaaaccactgtggaccatatggccataatca

SEQ ID NO: 82937 - DNA, 60 bp, Artificial
  Synthetic oligonucleotide
gcttccaggtagattgctttctttggcatgtccgcaaacgatttgcagaccaagagatgg

SEQ ID NO: 82938 - DNA, 60 bp, Artificial
  Synthetic oligonucleotide
ggacgtttggacatacaatgctgaactgttggttcttcttgaaaacgaaagaacactaga

SEQ ID NO: 82939 - DNA, 60 bp, Artificial
  Synthetic oligonucleotide
ctggaatgatagatgggtggtatggctatcaccatgagaattctcaaggttcagggtatg

SEQ ID NO: 82940 - DNA, 60 bp, Artificial
  Synthetic oligonucleotide
ccacagcaactcagagggaacaggaatggcagctgaccagaagtcaacacaggaagccat

SEQ ID NO: 82941 - DNA, 60 bp, Artificial
  Synthetic oligonucleotide
tcacagcaattcagagggaacaggaatggcagctgaccagaaatcaacacaggaagccat

SEQ ID NO: 82942 - DNA, 60 bp, Artificial
  Synthetic oligonucleotide
aaaatagatgaccaaattgaagatctttgggcttacaatgcagagctccttgtgctctta

SEQ ID NO: 82943 - DNA, 60 bp, Artificial
  Synthetic oligonucleotide
gcaatcctgattgctggaggtttaatcctgggcatgcaaaatggatcttgtagatgcatg

SEQ ID NO: 82944 - DNA, 60 bp, Artificial
  Synthetic oligonucleotide
cagcaactcagagggaacaggaatggcagctgaccagaagtcaacacaggaagccatcga

SEQ ID NO: 82945 - DNA, 60 bp, Artificial
  Synthetic oligonucleotide
cagcaattcagagggaacaggaatggcagctgaccagaaatcaacacaggaagccatcga

SEQ ID NO: 82946 - DNA, 60 bp, Artificial
  Synthetic oligonucleotide
ctgcttggcaatcctgattgctggaggtttaatcctgggtatgcaaaatggatcttgtag

SEQ ID NO: 82947 - DNA, 60 bp, Artificial
  Synthetic oligonucleotide
tgcttggcaatcctgattgctggaggtttaatcctgggcatgcaaaatggatcttgtaga

SEQ ID NO: 82948 - DNA, 60 bp, Artificial
  Synthetic oligonucleotide
cagtggcggccagtctttgcttggcaatcctgattgctggaggtttaatcctgggcatgc

SEQ ID NO: 82949 - DNA, 60 bp, Artificial
  Synthetic oligonucleotide
atttacagtacagtggcggccagtctttgcttggcaatcctgattgctggaggtttaatc

SEQ ID NO: 82950 - DNA, 60 bp, Artificial
  Synthetic oligonucleotide
caaatgtgacatccatctgaaagatcaaggttggtcatacatagtggagaggcccagcgc

SEQ ID NO: 82951 - DNA, 60 bp, Artificial
  Synthetic oligonucleotide
ttcatctgaaagatcaaggttggtcatacatagtggagaggcctagcgcaccagaaggga

SEQ ID NO: 82952 - DNA, 60 bp, Artificial
  Synthetic oligonucleotide
tctctgcttggcaatcctgattgctggaggtttaatcctgggtatgcaaaatggatcttg

SEQ ID NO: 82953 - DNA, 60 bp, Artificial
  Synthetic oligonucleotide
accccaaatgtgacatccatctaaaggatcaaggttggtcatacatagtggagaggccca

SEQ ID NO: 82954 - DNA, 60 bp, Artificial
  Synthetic oligonucleotide
ccagcaaggcctgcaataatacatcaaaccaaggctcattctacaggagcatgagatggt

SEQ ID NO: 82955 - DNA, 60 bp, Artificial
  Synthetic oligonucleotide
aacgagctgagcaatcttgcaaaaggagagaaggctaatgtgctaattgggcaaggagac

SEQ ID NO: 82956 - DNA, 60 bp, Artificial
  Synthetic oligonucleotide
catcaacgagctgagcaatcttgcaaaaggagagaaggctaatgtgctaattgggcaagg

SEQ ID NO: 82957 - DNA, 60 bp, Artificial
  Synthetic oligonucleotide
gtagataatcactcactgagtgacatccatatcatggcgtctcaaggcaccaaacgatct

SEQ ID NO: 82958 - DNA, 60 bp, Artificial
  Synthetic oligonucleotide
ggttgaccttaaaatcaggacaattcccagtccagacagatgagtacaagaacaccagag

SEQ ID NO: 82959 - DNA, 60 bp, Artificial
  Synthetic oligonucleotide
ggaccaaggccactcgtgagaggacaacaggggagaatggattactactgggctgttctt

SEQ ID NO: 82960 - DNA, 60 bp, Artificial
  Synthetic oligonucleotide
tctataggagcatgagatggttgaccttaaaatcaggacaattcccagtccagacagatg

SEQ ID NO: 82961 - DNA, 60 bp, Artificial
  Synthetic oligonucleotide
cattctataggagcatgagatggttgaccttaaaatcaggacaattcccagtccaaacag

SEQ ID NO: 82962 - DNA, 60 bp, Artificial
  Synthetic oligonucleotide
tctataggagcatgagatggttgaccttaaaatcaggacaatttccagtccaaacagatg

SEQ ID NO: 82963 - DNA, 56 bp, Artificial
  Synthetic oligonucleotide
ttttgtcataagggaaccattcatttcgtgttctcacttggaatgcagaacctttt

SEQ ID NO: 82964 - DNA, 60 bp, Artificial
  Synthetic oligonucleotide
ttggaatgcagaacctttttcctgactcaaggtgctttgctaaatgacaggcattctaat

SEQ ID NO: 82965 - DNA, 60 bp, Artificial
  Synthetic oligonucleotide
gggcgtaacttcaataatactaaccggcaattcctctctttgcccaataagtggctgggc

SEQ ID NO: 82966 - DNA, 60 bp, Artificial
  Synthetic oligonucleotide
aataagtggctgggctatatacagcaaagacaacagcataaggattggttccaaaggaga

SEQ ID NO: 82967 - DNA, 60 bp, Artificial
  Synthetic oligonucleotide
gtggctgggctatatacagcaaagacaacagcataaggattggttccaaaggagacattt

SEQ ID NO: 82968 - DNA, 60 bp, Artificial
  Synthetic oligonucleotide
ccaaaggagacatttttgtcataagggaaccattcatttcgtgttctcacttggaatgca

SEQ ID NO: 82969 - DNA, 60 bp, Artificial
  Synthetic oligonucleotide
aaatcactctgagatatgcaaccaaaatataattacctatgaaaacaaaacatgggtgaa

SEQ ID NO: 82970 - DNA, 60 bp, Artificial
  Synthetic oligonucleotide
ctctgagatatgcaaccaaaatataattacctatgaaaacaaaacatgggtgaaccagac

SEQ ID NO: 82971 - DNA, 60 bp, Artificial
  Synthetic oligonucleotide
catgggtgaaccagacttatgtaaatatcagcaataccaacattgctgaaggacagggcg

SEQ ID NO: 82972 - DNA, 60 bp, Artificial
  Synthetic oligonucleotide
ggacagggcgtaacttcaataatactaaccggcaattcctctctttgcccaataagtggc

SEQ ID NO: 82973 - DNA, 53 bp, Artificial
  Synthetic oligonucleotide
aaaatattcaaaatggagaagggaaagattattaagtcaattgagctggaagc

SEQ ID NO: 82974 - DNA, 51 bp, Artificial
  Synthetic oligonucleotide
gtgtttgcataaacggttcgtgttttactataatgactgatggtccaagca

SEQ ID NO: 82975 - DNA, 60 bp, Artificial
  Synthetic oligonucleotide
gatacagtaaaaagttggagaaacaaaatactgagaacacaggaatcagaatgtgtttgc

SEQ ID NO: 82976 - DNA, 60 bp, Artificial
  Synthetic oligonucleotide
gatggaacgggatggctaacaatcgggatttccggtccagataatggagcagtggctgtt

SEQ ID NO: 82977 - DNA, 53 bp, Artificial
  Synthetic oligonucleotide
atgtgtttgcataaacggttcgtgttttactataatgactgatggtccaagca

SEQ ID NO: 82978 - DNA, 60 bp, Artificial
  Synthetic oligonucleotide
tggagaaacaaaatactgagaacacaggaatcagaatgtgtttgcataaacggttcgtgt

SEQ ID NO: 82979 - DNA, 60 bp, Artificial
  Synthetic oligonucleotide
gcattctaatggaaccgtcaaggacaggagcccttaccgaacattaatgagctgcccaat

SEQ ID NO: 82980 - DNA, 59 bp, Artificial
  Synthetic oligonucleotide
ttttcctgactcaaggtgctttgctaaatgacaggcattctaatggaaccgtcaaggac

SEQ ID NO: 82981 - DNA, 60 bp, Artificial
  Synthetic oligonucleotide
tgcatgtcatgatggaacgggatggctaacaatcgggatttccggtccagataatggagc

SEQ ID NO: 82982 - DNA, 60 bp, Artificial
  Synthetic oligonucleotide
cattctaatggaaccgtcaaggacaggagcccttaccgaacattaatgagctgcccaatc

SEQ ID NO: 82983 - DNA, 60 bp, Artificial
  Synthetic oligonucleotide
ccatcggaacagtctgtatgataattggaatagttagtctattattgcagataggaagta

SEQ ID NO: 82984 - DNA, 60 bp, Artificial
  Synthetic oligonucleotide
taaccatcggaacagtctgtatgataattggaatagttagtctattattgcagataggaa

SEQ ID NO: 82985 - DNA, 60 bp, Artificial
  Synthetic oligonucleotide
ggatacagtgggagttttgtccaacaccctgaactgacaggaatgaactgcataaggcct

SEQ ID NO: 82986 - DNA, 60 bp, Artificial
  Synthetic oligonucleotide
tgcataaggccttgtttttgggtagagttaatcagaggacaacccaaggaaaacacaata

SEQ ID NO: 82987 - DNA, 60 bp, Artificial
  Synthetic oligonucleotide
ctataaagcaggatattatagcattaactgattggtcaggatacagtgggagttttgtcc

SEQ ID NO: 82988 - DNA, 60 bp, Artificial
  Synthetic oligonucleotide
caggatacagtgggagttttgtccaacaccctgaactgacaggaatgaactgcataaggc

SEQ ID NO: 82989 - DNA, 60 bp, Artificial
  Synthetic oligonucleotide
atcagatagggtatatatgcagtggggttttcggtgataacccacgttctaatgatggga

SEQ ID NO: 82990 - DNA, 60 bp, Artificial
  Synthetic oligonucleotide
tgatagtaggttctctataaagcaggatattatagcattaactgattggtcaggatacag

SEQ ID NO: 82991 - DNA, 60 bp, Artificial
  Synthetic oligonucleotide
ttggcatgcttcaaatcgaccgtgggtctctttcgatcagaaccttaattatcagatagg

SEQ ID NO: 82992 - DNA, 60 bp, Artificial
  Synthetic oligonucleotide
ggcatgcttcaaatcgaccgtgggtctctttcgatcagaaccttaattatcagatagggt

SEQ ID NO: 82993 - DNA, 60 bp, Artificial
  Synthetic oligonucleotide
ttgagcatcaacgaactgagcaatcttgcgaagggggagaaagccaatgtgttaataggg

SEQ ID NO: 82994 - DNA, 60 bp, Artificial
  Synthetic oligonucleotide
ggcaaagaagacaaaaggtatggaccagcactgagcatcaacgaactgagcaatcttgcg

SEQ ID NO: 82995 - DNA, 60 bp, Artificial
  Synthetic oligonucleotide
ggcaaagaagacaaaagatatgggccagcattgagcatcaacgaactgagcaatcttgcg

SEQ ID NO: 82996 - DNA, 60 bp, Artificial
  Synthetic oligonucleotide
ggcaaagaggacaaaagatatgggccagcattgagcatcaacgaactgagcaatcttgcg

SEQ ID NO: 82997 - DNA, 60 bp, Artificial
  Synthetic oligonucleotide
agaatgccactgaaatcagagcatctgttgggagaatggttggtggaataggaagattct

SEQ ID NO: 82998 - DNA, 60 bp, Artificial
  Synthetic oligonucleotide
gccagaatgccactgaaatcagagcatctgttgggagaatggttggtggaattggaagat

SEQ ID NO: 82999 - DNA, 60 bp, Artificial
  Synthetic oligonucleotide
agaatgccactgaaatcagagcatctgttgggagaatggttggtggaattgggagatttt

SEQ ID NO: 83000 - DNA, 60 bp, Artificial
  Synthetic oligonucleotide
atcgggagattctacatacagatgtgcactgaactcaagctcagtgactatgaagggagg

SEQ ID NO: 83001 - DNA, 60 bp, Artificial
  Synthetic oligonucleotide
aaaatgatgactaattcacaagacacagagctctctttcacaatcactggagacaacacc

SEQ ID NO: 83002 - DNA, 60 bp, Artificial
  Synthetic oligonucleotide
cggctaatgaatcaggaaggctaatagatttcctcaaggatgtgatggaatcaatggata

SEQ ID NO: 83003 - DNA, 60 bp, Artificial
  Synthetic oligonucleotide
tccttcctcatacatgcactgaaatagttgtggcaatgctactatttgctatccatactg

SEQ ID NO: 83004 - DNA, 60 bp, Artificial
  Synthetic oligonucleotide
gggtgttttgaattttggcacaaatgtgatgatgaatgcatcaactcagttaagaatggc

SEQ ID NO: 83005 - DNA, 60 bp, Artificial
  Synthetic oligonucleotide
gggtgtacaccatcctcctgacaccaatgagcaaaacactttgtatggctctggtgatcg

SEQ ID NO: 83006 - DNA, 60 bp, Artificial
  Synthetic oligonucleotide
tgctccattagtgaatgtaggacctttttcttaactcagggagcccttctcaatgacaaa

SEQ ID NO: 83007 - DNA, 60 bp, Artificial
  Synthetic oligonucleotide
ttcttaactcagggagcccttctcaatgacaaacactcaaatgggacagtaaaagaccgg

SEQ ID NO: 83008 - DNA, 50 bp, Artificial
  Synthetic oligonucleotide
ttttcttaactcagggagcccttctcaatgacaaacactcaaatgggaca

SEQ ID NO: 83009 - DNA, 60 bp, Artificial
  Synthetic oligonucleotide
tcctcatcggaggacttgaatggaatgataacacagttcgagtctctgaaactctacaga

SEQ ID NO: 83010 - DNA, 53 bp, Artificial
  Synthetic oligonucleotide
cactactctagtggaagagacttgtgcccaataaagggatgggcacctctgag

SEQ ID NO: 83011 - DNA, 60 bp, Artificial
  Synthetic oligonucleotide
tggcggggaagcaatcgaccatggataagattcaacagtgatcttaattaccaaattggc

SEQ ID NO: 83012 - DNA, 60 bp, Artificial
  Synthetic oligonucleotide
gtgtatgtcgggacaattggcggggaagcaatcgaccatggataagattcaacagtaatc

SEQ ID NO: 83013 - DNA, 60 bp, Artificial
  Synthetic oligonucleotide
atatggactagtggtagtagtattgcgttctgtggtgttaattctgataccacaggttgg

SEQ ID NO: 83014 - DNA, 51 bp, Artificial
  Synthetic oligonucleotide
caaatggtgtacaggatattatagacaacgacaattggtctggttacagcg

SEQ ID NO: 83015 - DNA, 60 bp, Artificial
  Synthetic oligonucleotide
caaatggtgtacaggatattatagacaacgacaattggtctggttacagcgggagtttca

SEQ ID NO: 83016 - DNA, 60 bp, Artificial
  Synthetic oligonucleotide
ggacgaagagcttggaatccagaagcggctttgagatggtgtgggatgctaatggatggg

SEQ ID NO: 83017 - DNA, 60 bp, Artificial
  Synthetic oligonucleotide
gtattgcgttctgtggtgttaattctgataccacaggttggtcatggcccgatggcgctc

SEQ ID NO: 83018 - DNA, 60 bp, Artificial
  Synthetic oligonucleotide
agtagtattgcgttctgtggtgttaattctgataccacaggttggtcatggcccgatggc

SEQ ID NO: 83019 - DNA, 60 bp, Artificial
  Synthetic oligonucleotide
ggaccagtggtagtagtattgcgttctgtggtgttaattctgataccacaggttggtcat

SEQ ID NO: 83020 - DNA, 60 bp, Artificial
  Synthetic oligonucleotide
ggacaagcggtagtagtattgcgttctgtggtgttaattctgataccacaggttggtcat

SEQ ID NO: 83021 - DNA, 60 bp, Artificial
  Synthetic oligonucleotide
aatgtgtctgtagggacaattggcggggaagcaatcgaccatggataagattcaacagtg

SEQ ID NO: 83022 - DNA, 60 bp, Artificial
  Synthetic oligonucleotide
agtgtgtatgtcgggacaattggcggggaagcaatcgaccatggataagattcaacagta

SEQ ID NO: 83023 - DNA, 60 bp, Artificial
  Synthetic oligonucleotide
ggcggggaagcaatcgaccatggataagattcaacagtgatcttaattaccaaattggct

SEQ ID NO: 83024 - DNA, 53 bp, Artificial
  Synthetic oligonucleotide
aaaagctggaagggaaatattatgcgaacacaagagtccgagtgcgtatgcca

SEQ ID NO: 83025 - DNA, 60 bp, Artificial
  Synthetic oligonucleotide
gtgtctgtagggacaattggcggggaagcaatcgaccatggataagattcaacagtgatc

SEQ ID NO: 83026 - DNA, 56 bp, Artificial
  Synthetic oligonucleotide
ttaaaaagctggaagggaaatattatgcgaacacaagagtccgagtgcgtatgcca

SEQ ID NO: 83027 - DNA, 60 bp, Artificial
  Synthetic oligonucleotide
agtgtgtctgtcgggacaattggcggggaagcaatcgaccatggataagattcaacagtg

SEQ ID NO: 83028 - DNA, 60 bp, Artificial
  Synthetic oligonucleotide
gtgtctgtcgggacaattggcggggaagcaatcgaccatggataagattcaacagtgatc

SEQ ID NO: 83029 - DNA, 60 bp, Artificial
  Synthetic oligonucleotide
gcgattggaatcctcatcggtggacttgaatggaatgataactcaattcgagcgtctgaa

SEQ ID NO: 83030 - DNA, 60 bp, Artificial
  Synthetic oligonucleotide
ctacggaaggagtgcctgagtctatgagggaagagtaccggcaggaacagcagagtgctg

SEQ ID NO: 83031 - DNA, 60 bp, Artificial
  Synthetic oligonucleotide
aatggctcaatgcaatgcaggatatgtatataattaggaaaaaacacccttgtttctact

SEQ ID NO: 83032 - DNA, 56 bp, Artificial
  Synthetic oligonucleotide
ggttcaatgcaatgcaggatatgtatataattaagaaaaacacccttgtttctact

SEQ ID NO: 83033 - DNA, 60 bp, Artificial
  Synthetic oligonucleotide
gaagaacaattagtgtttcttcacggagtggctttgaggttctattgatagaggacgggt

SEQ ID NO: 83034 - DNA, 60 bp, Artificial
  Synthetic oligonucleotide
gaactagcgtatgggcaggaagaacaattagtgtttcttcacggagtggctttgaggtcc

SEQ ID NO: 83035 - DNA, 60 bp, Artificial
  Synthetic oligonucleotide
caaggaactagcgtatgggcaggaagaacaattagtgtttcttcacggagtggctttgag

SEQ ID NO: 83036 - DNA, 60 bp, Artificial
  Synthetic oligonucleotide
agtaacgagggatcttatttcttcggagacaatgcagaggagtatgacaattaaagaaaa

SEQ ID NO: 83037 - DNA, 60 bp, Artificial
  Synthetic oligonucleotide
ggaccaggcgatcatggaaaagaacatcatactgaaagcgaatttcagtgtgatctttaa

SEQ ID NO: 83038 - DNA, 52 bp, Artificial
  Synthetic oligonucleotide
ggaccaggcgatcatggaaaagaacatcatactgaaagcgaatttcagtgtg

SEQ ID NO: 83039 - DNA, 60 bp, Artificial
  Synthetic oligonucleotide
atgggcatgttcaacatgctaagtacagttttgggagtctcgattctaaatctagggcaa

SEQ ID NO: 83040 - DNA, 60 bp, Artificial
  Synthetic oligonucleotide
tttctaattctaggcaaagaagacaaaagatatgggccagcattgagcatcaacgaactg

SEQ ID NO: 83041 - DNA, 56 bp, Artificial
  Synthetic oligonucleotide
catagtgctgtggatgttgacgatggtcattttgtcaacatagagctggagtaaaa

SEQ ID NO: 83042 - DNA, 60 bp, Artificial
  Synthetic oligonucleotide
gatctgcatcggatatcatgccaacaattcaacaacacaagtagatacgatattggagaa

SEQ ID NO: 83043 - DNA, 60 bp, Artificial
  Synthetic oligonucleotide
agcacagcctacagcaactgttacccttattatgtgccggattatgcctcccttaggtca

SEQ ID NO: 83044 - DNA, 60 bp, Artificial
  Synthetic oligonucleotide
gcacagcctacagcaactgttacccttattatgtgccggattatgcctcccttaggtcac

SEQ ID NO: 83045 - DNA, 60 bp, Artificial
  Synthetic oligonucleotide
gggtcctcatcggaggacttgaatggaatgataacacagttcgagtcactgaaactctac

SEQ ID NO: 83046 - DNA, 56 bp, Artificial
  Synthetic oligonucleotide
ggggctatatgaagcaatcgaggagtgcctgattaatgatccctgggttttgctta

SEQ ID NO: 83047 - DNA, 60 bp, Artificial
  Synthetic oligonucleotide
ttcgatcttggagggctgtatgaagcaattgaggagtgcctgattaatgatccctgggtt

SEQ ID NO: 83048 - DNA, 60 bp, Artificial
  Synthetic oligonucleotide
cttggagggctatacgaagcgattgaggagtgcctgattaatgatccctgggttttgctt

SEQ ID NO: 83049 - DNA, 60 bp, Artificial
  Synthetic oligonucleotide
atcttggagggctatacgaagcgattgaggagtgcctgattaatgatccctgggttttgc

SEQ ID NO: 83050 - DNA, 60 bp, Artificial
  Synthetic oligonucleotide
tggtgggctatatgaagcaatcgaggagtgcctgattaatgatccctgggttttgcttaa

SEQ ID NO: 83051 - DNA, 60 bp, Artificial
  Synthetic oligonucleotide
cttggagggctgtatgaagcaattgaggagtgcctgattaatgatccctgggttttgctt

SEQ ID NO: 83052 - DNA, 58 bp, Artificial
  Synthetic oligonucleotide
ggggctatatgaagcaatcgaggagtgcctgattaatgatccctgggttttgcttaat

SEQ ID NO: 83053 - DNA, 60 bp, Artificial
  Synthetic oligonucleotide
cagggtgacaaagacataatggattccaacacgataacctcgtttcaggtagattgttat

SEQ ID NO: 83054 - DNA, 60 bp, Artificial
  Synthetic oligonucleotide
gcagtcaattgctgaagcaataattgtggccatggtattttcacaagaggattgcatgat

SEQ ID NO: 83055 - DNA, 60 bp, Artificial
  Synthetic oligonucleotide
ggcattccaatttgaatgacgccacgtatcaaagaactagagcacatgtgcgcacaggga

SEQ ID NO: 83056 - DNA, 60 bp, Artificial
  Synthetic oligonucleotide
gggatcagtggctcataagtcctgcctgcctgcttgtgtgtatgggcttgctgtagccag

SEQ ID NO: 83057 - DNA, 60 bp, Artificial
  Synthetic oligonucleotide
acaataaggccaccaagaggcttacagtcctcgggaaggatgcaggtgcattgactgaag

SEQ ID NO: 83058 - DNA, 60 bp, Artificial
  Synthetic oligonucleotide
gaccaaattgaagatctttgggcttacaatgcagagctccttgtgctcttagagaaccag

SEQ ID NO: 83059 - DNA, 60 bp, Artificial
  Synthetic oligonucleotide
cggaacttacgaccataaggaatatgaagaggaagctaaactagaaaggagcaaaataaa

SEQ ID NO: 83060 - DNA, 60 bp, Artificial
  Synthetic oligonucleotide
acatgcatgacgctaatgtgaagaatctgtatgaaaaggtcaaatcacaactacgagaca

SEQ ID NO: 83061 - DNA, 60 bp, Artificial
  Synthetic oligonucleotide
aaatgatgccggctcagaccgagtgatggtatcacctctggctgtgacatggtggaatag

SEQ ID NO: 83062 - DNA, 52 bp, Artificial
  Synthetic oligonucleotide
gtggctgaaatatctcccattccctccatgccaggacattctacagaggatg

SEQ ID NO: 83063 - DNA, 60 bp, Artificial
  Synthetic oligonucleotide
ggcattcacagaagatggtgctattgtggctgaaatatctcccattccctccatgccagg

SEQ ID NO: 83064 - DNA, 60 bp, Artificial
  Synthetic oligonucleotide
cagtgaaagacagaagtccttatcgtgcattgatgagtgtgccattaggatcttcaccca

SEQ ID NO: 83065 - DNA, 60 bp, Artificial
  Synthetic oligonucleotide
gtccttaatattctcctacatatagttagcattacaataacagtgttggttctccctgga

SEQ ID NO: 83066 - DNA, 60 bp, Artificial
  Synthetic oligonucleotide
caaggcctgcaataatacatcaaaccaaggctcattctataggagcatgagatggttgac

SEQ ID NO: 83067 - DNA, 60 bp, Artificial
  Synthetic oligonucleotide
ccagcaaggcctgcaataatacatcaaaccaaggctcattctataggagcatgagatggt

SEQ ID NO: 83068 - DNA, 60 bp, Artificial
  Synthetic oligonucleotide
atacactggaaccagcaaggcctgcaataatacatcaaaccaaggctcattctataggag

SEQ ID NO: 83069 - DNA, 60 bp, Artificial
  Synthetic oligonucleotide
gggaccagcaaggcctgcaataatacatcaaaccaaggctcattctataggagcatgaga

SEQ ID NO: 83070 - DNA, 60 bp, Artificial
  Synthetic oligonucleotide
atacactgggaccagcaaggcctgcaataatacatcaaaccaaggctcattctataggag

SEQ ID NO: 83071 - DNA, 56 bp, Artificial
  Synthetic oligonucleotide
tcttgcctgcctgcttgtgtgtatgggcttgctgtggccagtgggtacgattttga

SEQ ID NO: 83072 - DNA, 60 bp, Artificial
  Synthetic oligonucleotide
gtggaccacatggccataatcaagaaatacacatcaggaagacaggagaagaaccctgcc

SEQ ID NO: 83073 - DNA, 60 bp, Artificial
  Synthetic oligonucleotide
cacatggccataatcaagaaatacacatcaggaagacaggagaagaaccctgccctcagg

SEQ ID NO: 83074 - DNA, 60 bp, Artificial
  Synthetic oligonucleotide
ttactcaaggttccctactcaatgacaaacattctaatggcacagtgaaagaccggagcc

SEQ ID NO: 83075 - DNA, 60 bp, Artificial
  Synthetic oligonucleotide
ttgggatcatggtcctggcatgatggtgctgaaatcacctactttaagtaggaatgattt

SEQ ID NO: 83076 - DNA, 60 bp, Artificial
  Synthetic oligonucleotide
ttcctagatggggaaaattcatggcttggaaggacaattagcaaagactccagatcaggt

SEQ ID NO: 83077 - DNA, 60 bp, Artificial
  Synthetic oligonucleotide
tactgtggacttcaaatagcattgtagctctttgcggatccagggagcgattgggatcat

SEQ ID NO: 83078 - DNA, 60 bp, Artificial
  Synthetic oligonucleotide
gatggggaaaattcatggcttggaaggacaattagcaaagactccagatcaggttacgaa

SEQ ID NO: 83079 - DNA, 60 bp, Artificial
  Synthetic oligonucleotide
tgacaggaaacgcccaacacattgaagaatgctcatgctatggagcaaaagaagtgatca

SEQ ID NO: 83080 - DNA, 60 bp, Artificial
  Synthetic oligonucleotide
tgacaggaaccgcccaacacattgaagaatgctcatgctatggagcaaaggaagtgatca

SEQ ID NO: 83081 - DNA, 60 bp, Artificial
  Synthetic oligonucleotide
aactaagataatttacttcaaggaggggaaaatacaaaaaattgaagagctgacaggaac

SEQ ID NO: 83082 - DNA, 60 bp, Artificial
  Synthetic oligonucleotide
tgacaggaaccgcccaacacattgaagaatgctcatgctatggagcaaaagaagtgatca

SEQ ID NO: 83083 - DNA, 60 bp, Artificial
  Synthetic oligonucleotide
aactaagataatctatttcaaagaagggaaaatacaaaaaattgaagagctgacaggaaa

SEQ ID NO: 83084 - DNA, 60 bp, Artificial
  Synthetic oligonucleotide
aactaagataatctatttcaaagaagggaaaatacaaaaaattgaagagctgacaggaac

SEQ ID NO: 83085 - DNA, 60 bp, Artificial
  Synthetic oligonucleotide
ggaaacgcccaacacattgaagaatgctcatgctatggagcaaaagaagtgatcaaatgc

SEQ ID NO: 83086 - DNA, 60 bp, Artificial
  Synthetic oligonucleotide
ggaaccgcccaacacattgaagaatgctcatgctatggagcaaaagaagtgatcaaatgc

SEQ ID NO: 83087 - DNA, 60 bp, Artificial
  Synthetic oligonucleotide
gaagtgatcaaatgcatatgcagagacaattggaagggagcaaataggccagtaatcatt

SEQ ID NO: 83088 - DNA, 60 bp, Artificial
  Synthetic oligonucleotide
atgacggcatatcaagaatgtcaatatgcatgtcaggaccaaacaataatgcatcagctg

SEQ ID NO: 83089 - DNA, 60 bp, Artificial
  Synthetic oligonucleotide
gaagtgatcaaatgcatatgcagagacaattggaagggagcaaatagaccggtaatcact

SEQ ID NO: 83090 - DNA, 60 bp, Artificial
  Synthetic oligonucleotide
cacatcatgccatgacggcatatcaagaatgtcaatatgcatgtcgggaccaaacaataa

SEQ ID NO: 83091 - DNA, 60 bp, Artificial
  Synthetic oligonucleotide
gaagtgatcaaatgcatatgcagagacaattggaagggggcaaatagaccagtaatcact

SEQ ID NO: 83092 - DNA, 60 bp, Artificial
  Synthetic oligonucleotide
gctaagatcgaatgtatagggtggtcaagcacatcatgccatgacggcatatcaagaatg

SEQ ID NO: 83093 - DNA, 55 bp, Artificial
  Synthetic oligonucleotide
ttagatggggaaaattcatggcttggaaggacaattagcaaagactccagatcag

SEQ ID NO: 83094 - DNA, 60 bp, Artificial
  Synthetic oligonucleotide
ggaaccgcccaacacattgaagaatgctcatgctatggagcaaaggaagtgatcaaatgc

SEQ ID NO: 83095 - DNA, 60 bp, Artificial
  Synthetic oligonucleotide
ccgggaagtcagacaagatctgtattgggtatcatgccaacaattcaacaacacaagtgg

SEQ ID NO: 83096 - DNA, 60 bp, Artificial
  Synthetic oligonucleotide
ggcaggagcagcagagtgctgtggatgttgacgatggtcattttgtcaacatagagctgg

SEQ ID NO: 83097 - DNA, 60 bp, Artificial
  Synthetic oligonucleotide
gcaggagcagcagagtgctgtggatgttgacgatggtcattttgtcaacatagagctggg

SEQ ID NO: 83098 - DNA, 60 bp, Artificial
  Synthetic oligonucleotide
gatggatggtatggctatcatcatgagaattctcaaggctcagggtatgcagcagacaga

SEQ ID NO: 83099 - DNA, 60 bp, Artificial
  Synthetic oligonucleotide
cgactgtcgcctcatctcttgtacttgcactggggtttgctgcctttctgttctgggcca

SEQ ID NO: 83100 - DNA, 60 bp, Artificial
  Synthetic oligonucleotide
gtcgcctcatctcttgtgcttgcaatggggtttgctgcctttctgttctgggccatgtcc

SEQ ID NO: 83101 - DNA, 60 bp, Artificial
  Synthetic oligonucleotide
cgactgtcgcctcatctcttgtgcttgcgatggggtttgctgcctttctgttctgggcca

SEQ ID NO: 83102 - DNA, 60 bp, Artificial
  Synthetic oligonucleotide
ccatacagccatggaacgggaacaggatacaccatggacacagtcaacagaacacatcag

SEQ ID NO: 83103 - DNA, 54 bp, Artificial
  Synthetic oligonucleotide
cactcactgagtgacatctaaatcatggcgtctcaaggcaccaaacgatcttat

SEQ ID NO: 83104 - DNA, 54 bp, Artificial
  Synthetic oligonucleotide
cactcactgagtgacatcaatatcatggcgtctcaaggcaccaaacgatcttat

SEQ ID NO: 83105 - DNA, 60 bp, Artificial
  Synthetic oligonucleotide
tactcacatcatgatttggcattccaacctgaatgatgccacgtaccagagaacaagagc

SEQ ID NO: 83106 - DNA, 60 bp, Artificial
  Synthetic oligonucleotide
tccaaagacaacggaataagaattggatcgaggggtcatgttttcgttataagggaacca

SEQ ID NO: 83107 - DNA, 60 bp, Artificial
  Synthetic oligonucleotide
ccaaagacaacggaataagaattggatcgaggggtcatgttttcgttataagggaaccat

SEQ ID NO: 83108 - DNA, 60 bp, Artificial
  Synthetic oligonucleotide
ggatgttttgaattttggcacaaatgcgacaatgaatgcatcaactcagttaagaatggc

SEQ ID NO: 83109 - DNA, 60 bp, Artificial
  Synthetic oligonucleotide
tggcacaaatgcgacaatgaatgcatcaactcagttaagaatggcacatataactaccca

SEQ ID NO: 83110 - DNA, 60 bp, Artificial
  Synthetic oligonucleotide
taattggacaagctgaaatcagtttcaatggaggccatatagaagaatgctcatgctacc

SEQ ID NO: 83111 - DNA, 60 bp, Artificial
  Synthetic oligonucleotide
agtgccagttgaacgaaggggtgatgaatacaagcaaacctttccagaacactagtaagc

SEQ ID NO: 83112 - DNA, 60 bp, Artificial
  Synthetic oligonucleotide
agcgtctgaaaatatacagagattcgcttggggaatccgtgatgagaatgggggacctcc

SEQ ID NO: 83113 - DNA, 53 bp, Artificial
  Synthetic oligonucleotide
agcgtctgaaaatatacagagattcgcttggggaatccgtgatgagaatgggg

SEQ ID NO: 83114 - DNA, 60 bp, Artificial
  Synthetic oligonucleotide
aattcgagcgtctgaaaatatacagagattcgcttggggaatccgtgatgaggatagggg

SEQ ID NO: 83115 - DNA, 60 bp, Artificial
  Synthetic oligonucleotide
atggaatgataactcaattcgagcgtctgaaaatatacagagattcgcttggggaatccg

SEQ ID NO: 83116 - DNA, 60 bp, Artificial
  Synthetic oligonucleotide
cggtggacttgaatggaatgataactcagttcgagcgtctgaaaatatacagagattcgc

SEQ ID NO: 83117 - DNA, 60 bp, Artificial
  Synthetic oligonucleotide
atcctcatcggtggacttgaatggaatgataactcagttcgagcgtctgaaaatatacag

SEQ ID NO: 83118 - DNA, 60 bp, Artificial
  Synthetic oligonucleotide
gctgctcagcatgagagacatgtgtgatgctccctttgatgatagactcagaagagacca

SEQ ID NO: 83119 - DNA, 60 bp, Artificial
  Synthetic oligonucleotide
ggcacataagaaagctactcagcatgagagacatgtgtgatgctccctttgatgacaggc

SEQ ID NO: 83120 - DNA, 60 bp, Artificial
  Synthetic oligonucleotide
gaagcaataattgtggccatggtattttcacaagaggattgcatgatcaaggcagttcgg

SEQ ID NO: 83121 - DNA, 60 bp, Artificial
  Synthetic oligonucleotide
gtccttatcgtgcattgatgagtgtgccattaggatcttcacccaatgcataccaggcaa

SEQ ID NO: 83122 - DNA, 60 bp, Artificial
  Synthetic oligonucleotide
caatccgactttacttttcttgaaagttccagcgcaaaatgccataagcaccacgttccc

SEQ ID NO: 83123 - DNA, 60 bp, Artificial
  Synthetic oligonucleotide
cacatggcaggatactcaagaataatttgcccataggacaatgtgtaactgagtgccaat

SEQ ID NO: 83124 - DNA, 60 bp, Artificial
  Synthetic oligonucleotide
acatggcaggatactcaagaataatttgcccataggacagtgtgtgactgagtgccagtt

SEQ ID NO: 83125 - DNA, 60 bp, Artificial
  Synthetic oligonucleotide
acatggcaggatactcaagaataatttgcccataggacagtgtgtgactgaatgccaatt

SEQ ID NO: 83126 - DNA, 60 bp, Artificial
  Synthetic oligonucleotide
atggcaggatactcaagaataatttgcccatagggcagtgtgtgactgagtgccaattga

SEQ ID NO: 83127 - DNA, 60 bp, Artificial
  Synthetic oligonucleotide
catggcaggatactcaagaataatttgcccataggacagtgtgtgactgaatgccaattg

SEQ ID NO: 83128 - DNA, 60 bp, Artificial
  Synthetic oligonucleotide
atggcaggatactcaagaataatttgcccataggacagtgtgtgactgaatgccaattga

SEQ ID NO: 83129 - DNA, 60 bp, Artificial
  Synthetic oligonucleotide
cagaagagatcaaaaggcattaaagggaagaggcagcacacttgggctcgacctgcgagt

SEQ ID NO: 83130 - DNA, 60 bp, Artificial
  Synthetic oligonucleotide
actcaggagagatcaaaaggcattaaagggaagaggcagcacacttgggctcgacctgcg

SEQ ID NO: 83131 - DNA, 60 bp, Artificial
  Synthetic oligonucleotide
gggtgacaaagacataatggattccaacacgataacctcgtttcaggtagattgttatct

SEQ ID NO: 83132 - DNA, 60 bp, Artificial
  Synthetic oligonucleotide
gctgaactgttggttcttcttgaaaacgaaagaacactagacctgcatgacgcaaatgtg

SEQ ID NO: 83133 - DNA, 60 bp, Artificial
  Synthetic oligonucleotide
tatttttgtcataagagagccattcatttcatgctctaatttggagtgcagaactttttt

SEQ ID NO: 83134 - DNA, 60 bp, Artificial
  Synthetic oligonucleotide
tgggctatctacagcaaagacaatagcataagaattggttccaagggagatatttttgtc

SEQ ID NO: 83135 - DNA, 60 bp, Artificial
  Synthetic oligonucleotide
attcagaccagagaaaaaaaccaccttgaaaagtgcaatcaaagtgtcattaagtatgaa

SEQ ID NO: 83136 - DNA, 60 bp, Artificial
  Synthetic oligonucleotide
gttattgcaaatagggaatatagtatcgttatgggtaacccattcaattcagaccagaga

SEQ ID NO: 83137 - DNA, 56 bp, Artificial
  Synthetic oligonucleotide
tgggctatctacagcaaagacaatagcataagaattggttccaagggagatatttt

SEQ ID NO: 83138 - DNA, 60 bp, Artificial
  Synthetic oligonucleotide
tgacttcaacaacgctagccggcaattcctctctttgcccaataagtgggtgggctatct

SEQ ID NO: 83139 - DNA, 60 bp, Artificial
  Synthetic oligonucleotide
ccaaagaataataaccattgggacagtctgtctgatagttggaatagtcaatctgttatt

SEQ ID NO: 83140 - DNA, 60 bp, Artificial
  Synthetic oligonucleotide
tgtggcgtagacagtgaaactgcaagctggtcatggccagacggggctgatctgccattc

SEQ ID NO: 83141 - DNA, 60 bp, Artificial
  Synthetic oligonucleotide
atctgttattgcaaatagggaatatagtatcgttatgggtaacccattcaattcagacca

SEQ ID NO: 83142 - DNA, 60 bp, Artificial
  Synthetic oligonucleotide
ccattgggacagtctgtctgatagttggaatagtcaatctgttattgcaaatagggaata

SEQ ID NO: 83143 - DNA, 60 bp, Artificial
  Synthetic oligonucleotide
tgactgattggtcaggatacagtggaagttttgttcaacaccctgaattaacagggatga

SEQ ID NO: 83144 - DNA, 60 bp, Artificial
  Synthetic oligonucleotide
ggacactgacagtagtttctctatgaagcaggatattatagcattgactgattggtcagg

SEQ ID NO: 83145 - DNA, 60 bp, Artificial
  Synthetic oligonucleotide
atggacggacactgacagtagtttctctatgaagcaggatattatagcattgactgattg

SEQ ID NO: 83146 - DNA, 60 bp, Artificial
  Synthetic oligonucleotide
gggaccgtcaaggacagaagtccctatagaaccttaatgagctgccccattggagaagct

SEQ ID NO: 83147 - DNA, 60 bp, Artificial
  Synthetic oligonucleotide
tgcatgccatgatggaacaggatggctaacaatcggaatttccggtccagataatggcgc

SEQ ID NO: 83148 - DNA, 60 bp, Artificial
  Synthetic oligonucleotide
gaactttttttctgacccaaggtgctttgctgaatgacaagcattctaatgggaccgtca

SEQ ID NO: 83149 - DNA, 60 bp, Artificial
  Synthetic oligonucleotide
cccaaggtgctttgctgaatgacaagcattctaatgggaccgtcaaggacagaagtccct

SEQ ID NO: 83150 - DNA, 60 bp, Artificial
  Synthetic oligonucleotide
cagattgggtacatatgtagtggggttttcggtgataacccgcgttctaatgatgggaaa

SEQ ID NO: 83151 - DNA, 60 bp, Artificial
  Synthetic oligonucleotide
tgaaggggttctcgtttagatatggcaatggtgtttggataggaagaactaaaagtatca

SEQ ID NO: 83152 - DNA, 60 bp, Artificial
  Synthetic oligonucleotide
ccatgatggaacaggatggctaacaatcggaatttccggtccagataatggcgcagtggc

SEQ ID NO: 83153 - DNA, 60 bp, Artificial
  Synthetic oligonucleotide
agtaacagatacaataaaaagttggaggaacaaaatattaagaacacaagagtcagaatg

SEQ ID NO: 83154 - DNA, 60 bp, Artificial
  Synthetic oligonucleotide
ggcgtagacagtgaaactgcaagctggtcatggccagacggggctgatctgccattcacc

SEQ ID NO: 83155 - DNA, 60 bp, Artificial
  Synthetic oligonucleotide
ggggttctcgtttagatatggcaatggtgtttggataggaagaactaaaagtatcaactc

SEQ ID NO: 83156 - DNA, 60 bp, Artificial
  Synthetic oligonucleotide
aaaagtatcaactctaggagtggatttgagatggtttgggatccaaatggatggacggac

SEQ ID NO: 83157 - DNA, 60 bp, Artificial
  Synthetic oligonucleotide
ataaggccttgtttctgggtagagttaatcagaggacaacccaaggagagcacaatctgg

SEQ ID NO: 83158 - DNA, 60 bp, Artificial
  Synthetic oligonucleotide
ggatacagtggaagttttgttcaacaccctgaattaacagggatgaattgcataaggcct

SEQ ID NO: 83159 - DNA, 60 bp, Artificial
  Synthetic oligonucleotide
ctctaggagtggatttgagatggtttgggatccaaatggatggacggacactgacagtag

SEQ ID NO: 83160 - DNA, 60 bp, Artificial
  Synthetic oligonucleotide
ccaatctcaacagacgagacaaaattattgtatgtcaatagcgatccttatacgctagta

SEQ ID NO: 83161 - DNA, 60 bp, Artificial
  Synthetic oligonucleotide
acaacaacaccactggtagggatgttttagtcatgtgggggatacaccacccaatctcaa

SEQ ID NO: 83162 - DNA, 60 bp, Artificial
  Synthetic oligonucleotide
gaaagataacagatatccagtaatcagcaggacttacaacaacaccactggtagggatgt

SEQ ID NO: 83163 - DNA, 60 bp, Artificial
  Synthetic oligonucleotide
aatatggtttgtgaagaaagataacagatatccagtaatcagcaggacttacaacaacac

SEQ ID NO: 83164 - DNA, 60 bp, Artificial
  Synthetic oligonucleotide
ggacaacaacggagaattgaggcatttgttcagtggaatcagatctttcagcaggactga

SEQ ID NO: 83165 - DNA, 60 bp, Artificial
  Synthetic oligonucleotide
aggagaactggacaacaacggagaattgaggcatttgttcagtggaatcagatctttcag

SEQ ID NO: 83166 - DNA, 60 bp, Artificial
  Synthetic oligonucleotide
tgcctgtactagcaactttgggatcagagagtggtcatatttgattgaagacccatctgc

SEQ ID NO: 83167 - DNA, 60 bp, Artificial
  Synthetic oligonucleotide
ccgagcaatcgtaatctcgttacttattagcacatgcgtacaggcagacagaatctgtgt

SEQ ID NO: 83168 - DNA, 60 bp, Artificial
  Synthetic oligonucleotide
aagcaatggagggttgttggccccaagatatggttatataatcgaggagtatggaaaagg

SEQ ID NO: 83169 - DNA, 60 bp, Artificial
  Synthetic oligonucleotide
agacgagacaaaattattgtatgtcaatagcgatccttatacgctagtaactaccagttc

SEQ ID NO: 83170 - DNA, 60 bp, Artificial
  Synthetic oligonucleotide
gatatacagctgcattgcaagcagtattgtactagtaggactcatacttgcatttatcat

SEQ ID NO: 83171 - DNA, 60 bp, Artificial
  Synthetic oligonucleotide
atagagggtataaagctggagtcagaagacaatgtttacaaagcattgtcgatatacagc

SEQ ID NO: 83172 - DNA, 57 bp, Artificial
  Synthetic oligonucleotide
tacagctgcattgcaagcagtattgtactagtaggactcatacttgcatttatcatg

SEQ ID NO: 83173 - DNA, 60 bp, Artificial
  Synthetic oligonucleotide
gacaaaatgaatggaaattatgactccatacgaggtgaattcagccaagtagagcaaaga

SEQ ID NO: 83174 - DNA, 60 bp, Artificial
  Synthetic oligonucleotide
ggagggttgttggccccaagatatggttatataatcgaggagtatggaaaagggagaatc

SEQ ID NO: 83175 - DNA, 60 bp, Artificial
  Synthetic oligonucleotide
atggaaaagggagaatcttccaaagccctatcagaattgctagatgcaacaccagatgcc

SEQ ID NO: 83176 - DNA, 60 bp, Artificial
  Synthetic oligonucleotide
tcttccaaagccctatcagaattgctagatgcaacaccagatgccagacttctgttggtg

SEQ ID NO: 83177 - DNA, 60 bp, Artificial
  Synthetic oligonucleotide
agagagaaatgcacttggaaattgccctaagtacataaaatcagggcagctcaagttggc

SEQ ID NO: 83178 - DNA, 60 bp, Artificial
  Synthetic oligonucleotide
cttggaaattgccctaagtacataaaatcagggcagctcaagttggctactgggcttagg

SEQ ID NO: 83179 - DNA, 60 bp, Artificial
  Synthetic oligonucleotide
cggatttcaacatcaaaatgaacaaggagttggaatagctgcagacaaagaatcgacaca

SEQ ID NO: 83180 - DNA, 60 bp, Artificial
  Synthetic oligonucleotide
caacatcaaaatgaacaaggagttggaatagctgcagacaaagaatcgacacaaaaggcc

SEQ ID NO: 83181 - DNA, 60 bp, Artificial
  Synthetic oligonucleotide
aagaaaatggatatccgagcaatcgtaatctcgttacttattagcacatgcgtacaggca

SEQ ID NO: 83182 - DNA, 60 bp, Artificial
  Synthetic oligonucleotide
aattatgactccatacgaggtgaattcagccaagtagagcaaagaataaacatgcttgca

SEQ ID NO: 83183 - DNA, 54 bp, Artificial
  Synthetic oligonucleotide
aatgctaagcttcttgtgctactagaaaatgataaaaccctagacatgcatgat

SEQ ID NO: 83184 - DNA, 60 bp, Artificial
  Synthetic oligonucleotide
agccctggaatgatgatgggcatgttcaacatgctaagtacagttttgggagtttcgatt

SEQ ID NO: 83185 - DNA, 60 bp, Artificial
  Synthetic oligonucleotide
acataagtaataccaatttgattgctgaacaggctgtagctccagtgacactagcaggca

SEQ ID NO: 83186 - DNA, 60 bp, Artificial
  Synthetic oligonucleotide
gatgggctatatacagcaaggacaatggtataagggtaggttccaagggagatgtatttg

SEQ ID NO: 83187 - DNA, 60 bp, Artificial
  Synthetic oligonucleotide
aacataagtaataccaatttgattgctgaacaggctgtagctccaatgacactagcaggc

SEQ ID NO: 83188 - DNA, 60 bp, Artificial
  Synthetic oligonucleotide
aacataagtaataccaatttgattgctgaacaggctgtagctccagtgacactagcaggc

SEQ ID NO: 83189 - DNA, 60 bp, Artificial
  Synthetic oligonucleotide
gatgtatttgtcatcagagagccgtttatttcgtgctctcacttggaatgcaggactttc

SEQ ID NO: 83190 - DNA, 60 bp, Artificial
  Synthetic oligonucleotide
gatgggctatatacagcaaggacaatggtataaggataggttccaggggagatgtatttg

SEQ ID NO: 83191 - DNA, 60 bp, Artificial
  Synthetic oligonucleotide
agagagccgtttatttcgtgctctcacttggaatgcaggactttctttctgactcaaggg

SEQ ID NO: 83192 - DNA, 60 bp, Artificial
  Synthetic oligonucleotide
atctcaatatgggttagccattcaatccaaactggaagtcaaaaccaccctgaaacatgc

SEQ ID NO: 83193 - DNA, 60 bp, Artificial
  Synthetic oligonucleotide
aatctcaatatgggttagccattcaatccagactggaagtcaaaaccaccctgaaacatg

SEQ ID NO: 83194 - DNA, 60 bp, Artificial
  Synthetic oligonucleotide
atctcaatatgggttagccattcaatccggactggaagtcaaaaccaccctgaaacatgc

SEQ ID NO: 83195 - DNA, 60 bp, Artificial
  Synthetic oligonucleotide
gggttagccattcaatccggactggaagtcaaaaccaccctgaaacatgcaatcaaagtg

SEQ ID NO: 83196 - DNA, 60 bp, Artificial
  Synthetic oligonucleotide
ctcaatatgggttagccattcaatccaaactggaagtcaaaaccaccctgaaacatgcaa

SEQ ID NO: 83197 - DNA, 60 bp, Artificial
  Synthetic oligonucleotide
aatcaaacatacatcaacataagtaataccaatttgattgctgaacaggctgtagctcca

SEQ ID NO: 83198 - DNA, 60 bp, Artificial
  Synthetic oligonucleotide
gggttagccattcaatccaaactggaagtcaaaaccaccctgaaacatgcaatcaaagtg

SEQ ID NO: 83199 - DNA, 60 bp, Artificial
  Synthetic oligonucleotide
atcaaacatacatcaacataagtaataccaatttgattgctgaacaggctgtagctccag

SEQ ID NO: 83200 - DNA, 60 bp, Artificial
  Synthetic oligonucleotide
aaccaaacatacatcaacataagtaataccaatttgattgctgaacaggctgtagctcca

SEQ ID NO: 83201 - DNA, 60 bp, Artificial
  Synthetic oligonucleotide
cacaagagtctgaatgtgcatgcatgaatggttcttgctttaccataatgactgatggac

SEQ ID NO: 83202 - DNA, 60 bp, Artificial
  Synthetic oligonucleotide
ctatagaaccttaatgagctgccctgttggtgaagctccctctccatacaattcaaggtt

SEQ ID NO: 83203 - DNA, 60 bp, Artificial
  Synthetic oligonucleotide
ctatagaactttaatgagttgccctgttggtgaagctccctctccatacaattcaaggtt

SEQ ID NO: 83204 - DNA, 60 bp, Artificial
  Synthetic oligonucleotide
gattgaagatctcattttcctggcacggtcagcacttattctaaggggatcagtggcaca

SEQ ID NO: 83205 - DNA, 60 bp, Artificial
  Synthetic oligonucleotide
gggcttgcagtggcaaatgggcatgactttgaaagggaagggtattcactggtcggaata

SEQ ID NO: 83206 - DNA, 60 bp, Artificial
  Synthetic oligonucleotide
acagctgcccagagggcaatgatggaccaagtgagagaaagtcggaacccaggaaatgct

SEQ ID NO: 83207 - DNA, 59 bp, Artificial
  Synthetic oligonucleotide
aactggaggacccatatatagaagagtagacggaaaatggatgagagaactcattcttt

SEQ ID NO: 83208 - DNA, 60 bp, Artificial
  Synthetic oligonucleotide
gaaattctacatccaaatgtgcactgaactcaaactcaatgactatgaaggacggctaat

SEQ ID NO: 83209 - DNA, 60 bp, Artificial
  Synthetic oligonucleotide
caaccgttatggcagctttcagcgggaacaatgaaggacggacatccgatatgcgaacag

SEQ ID NO: 83210 - DNA, 60 bp, Artificial
  Synthetic oligonucleotide
catccgcgggccagatcagtgtgcaacctacattctcagtacaacggaatctcccttttg

SEQ ID NO: 83211 - DNA, 60 bp, Artificial
  Synthetic oligonucleotide
tagacggaattacaaataaggtcaattccattatagacaaaatgaacacacaatttgaag

SEQ ID NO: 83212 - DNA, 56 bp, Artificial
  Synthetic oligonucleotide
accattgaagagctcagacggcagaaatagtgaatttggcttgtccttcatgaaaa

SEQ ID NO: 83213 - DNA, 60 bp, Artificial
  Synthetic oligonucleotide
catgataaaagcagtccgaggtgatctgaatttcgtcaacagagcgaaccaaaggctgaa

SEQ ID NO: 83214 - DNA, 60 bp, Artificial
  Synthetic oligonucleotide
cactgagcatcaacgaactgagcaatcttgcgaaaggggagaaggctaacgtactgatag

SEQ ID NO: 83215 - DNA, 60 bp, Artificial
  Synthetic oligonucleotide
gcctcttgtcaatggccaacaggggagaattgattactattggtcagtactaaagccagg

SEQ ID NO: 83216 - DNA, 60 bp, Artificial
  Synthetic oligonucleotide
agtactaaagccaggtcaaacattgcgggtgagatccaatgggaatttaattgccccatg

SEQ ID NO: 83217 - DNA, 60 bp, Artificial
  Synthetic oligonucleotide
gctccacacagagcacaatggaatgctatgtgcaacaaacctggggcaccctctcatcct

SEQ ID NO: 83218 - DNA, 60 bp, Artificial
  Synthetic oligonucleotide
ggggcaccctctcatcctagacacctgcactatcgaagggctggtatacggtaatccctc

SEQ ID NO: 83219 - DNA, 60 bp, Artificial
  Synthetic oligonucleotide
ctgaacaatggcaattgcgtagtacaatgccaaactgagaaaggtggtctgaacacaacc

SEQ ID NO: 83220 - DNA, 60 bp, Artificial
  Synthetic oligonucleotide
tggcagttggcttgaggaatgtgcctgctgcatcagatagagggttgtttggtgccatag

SEQ ID NO: 83221 - DNA, 60 bp, Artificial
  Synthetic oligonucleotide
caacaaggtgaaaagagcattgggttcaaatgcaagagaagatggaaatggatgcttcga

SEQ ID NO: 83222 - DNA, 56 bp, Artificial
  Synthetic oligonucleotide
aatcgactcaagaggcagtcgacaaaataacatccaaagtaaataatataatcgac

SEQ ID NO: 83223 - DNA, 60 bp, Artificial
  Synthetic oligonucleotide
gcaatcaatgggatgtgttatcctggaaatgtagagaatctagaggaactcaggtctttc

SEQ ID NO: 83224 - DNA, 60 bp, Artificial
  Synthetic oligonucleotide
gcagacaaaatctgcattggctaccagtcaacaaactccacagaaactgtcgacacacta

SEQ ID NO: 83225 - DNA, 60 bp, Artificial
  Synthetic oligonucleotide
ttcatgtggggcatacatcacccacctactgacactgagcagacaaatttatacaaaaag

SEQ ID NO: 83226 - DNA, 58 bp, Artificial
  Synthetic oligonucleotide
atggctgacacacaagagcaattcttaccctgttcaagacgcccaatataccaacaat

SEQ ID NO: 83227 - DNA, 57 bp, Artificial
  Synthetic oligonucleotide
gtaacagtgataaagaacaacatgataaacaatgaccttggaccagcaacagctcag

SEQ ID NO: 83228 - DNA, 60 bp, Artificial
  Synthetic oligonucleotide
acagtgataaagaacaacatgataaacaatgaccttggacctgcaacagcccagatggcc

SEQ ID NO: 83229 - DNA, 60 bp, Artificial
  Synthetic oligonucleotide
cagtgataaagaacaacatgataaacaatgaccttggacctgcaacagcccagatggccc

SEQ ID NO: 83230 - DNA, 60 bp, Artificial
  Synthetic oligonucleotide
aattgcatacgaaagaatgtgtaacattctcaaagggaaattccaaacagcagcacaacg

SEQ ID NO: 83231 - DNA, 60 bp, Artificial
  Synthetic oligonucleotide
catttgaatggatgtcaatccgactttacttttcttgaaagttccagcgcaaaatgccat

SEQ ID NO: 83232 - DNA, 60 bp, Artificial
  Synthetic oligonucleotide
aatggatgtcaatccgactttacttttcttgaaagttccagcgcaaaatgccataagcac

SEQ ID NO: 83233 - DNA, 60 bp, Artificial
  Synthetic oligonucleotide
ctttgatgatagactcagaagagatcaaaaggcattaaagggaagaggcagcacacttgg

SEQ ID NO: 83234 - DNA, 60 bp, Artificial
  Synthetic oligonucleotide
atgacaggctccgaagagaccaaaaggcattaaagggaagaggcagcacacttggactcg

SEQ ID NO: 83235 - DNA, 60 bp, Artificial
  Synthetic oligonucleotide
gtgcctgagtctatgagggaagaataccggcaggaacagcagagtgctgtggatgttgac

SEQ ID NO: 83236 - DNA, 60 bp, Artificial
  Synthetic oligonucleotide
gcctgagtctatgagggaagaataccggcaggaacagcagagtgctgtggatgttgacga

SEQ ID NO: 83237 - DNA, 60 bp, Artificial
  Synthetic oligonucleotide
cttgtgctcttagagaaccagaaaacgctagacgaacatgattccaatgtcaaaaacctt

SEQ ID NO: 83238 - DNA, 60 bp, Artificial
  Synthetic oligonucleotide
tgggatgattgatgggtggtatggatttcatcacagcaattcagagggaacaggaatggc

SEQ ID NO: 83239 - DNA, 60 bp, Artificial
  Synthetic oligonucleotide
gaccaaattgaagacctttgggcttacaatgcagagctccttgtgctcttagagaaccag

SEQ ID NO: 83240 - DNA, 60 bp, Artificial
  Synthetic oligonucleotide
gcgagactgcaagatcgaggcagtaatctatgggaaccccaaatgtgacattcatctgaa

SEQ ID NO: 83241 - DNA, 60 bp, Artificial
  Synthetic oligonucleotide
atctatgggaaccccaaatgtgacatccatctgaaagatcaaggttggtcatacatagtg

SEQ ID NO: 83242 - DNA, 60 bp, Artificial
  Synthetic oligonucleotide
cccaaaggactgttcggagccattgctggtttcattgaaggaggatggtctgggatgatt

SEQ ID NO: 83243 - DNA, 60 bp, Artificial
  Synthetic oligonucleotide
cggagccattgctggtttcattgaaggaggatggtctgggatgattgatgggtggtatgg

SEQ ID NO: 83244 - DNA, 60 bp, Artificial
  Synthetic oligonucleotide
aggaggatggtctgggatgattgatgggtggtatggatttcatcacagcaattcagaggg

SEQ ID NO: 83245 - DNA, 54 bp, Artificial
  Synthetic oligonucleotide
cactcactgagtgacatccacatcatggcgtcccaaggcaccaaacgatcttat

SEQ ID NO: 83246 - DNA, 60 bp, Artificial
  Synthetic oligonucleotide
tatacatgataggagtccattcagagccctcataagttgggaaatgggtcaagcacccag

SEQ ID NO: 83247 - DNA, 60 bp, Artificial
  Synthetic oligonucleotide
ctatacatgacagaagccctttcagagccctcataagttgggaaatgggtcaagtaccca

SEQ ID NO: 83248 - DNA, 60 bp, Artificial
  Synthetic oligonucleotide
actgggcaaacaaagaatgctttaatccttgtttttatgtggagctgattagagggaggc

SEQ ID NO: 83249 - DNA, 60 bp, Artificial
  Synthetic oligonucleotide
catgacagaagccctttcagagccctcataagttgggaaatgggtcaagtacccagtcca

SEQ ID NO: 83250 - DNA, 60 bp, Artificial
  Synthetic oligonucleotide
tgatcagataactgacatatgggcatacaatgctgaattgcttgtcctattggaaaatca

SEQ ID NO: 83251 - DNA, 60 bp, Artificial
  Synthetic oligonucleotide
ggagcatgagatggttgaccttaaaatcaggacaatttccagtccaaacagatgagtaca

SEQ ID NO: 83252 - DNA, 60 bp, Artificial
  Synthetic oligonucleotide
gattaattccaaaattgatgatcagataactgacatatgggcatacaatgctgaactgct

SEQ ID NO: 83253 - DNA, 60 bp, Artificial
  Synthetic oligonucleotide
cccgcggcccctcatgggctttgctaccctggagaattaaacaacaatggtgaactcaga

SEQ ID NO: 83254 - DNA, 60 bp, Artificial
  Synthetic oligonucleotide
ggggaagtacttgacggtacaacatctgcttgcagagataacacgggaaccaacagcttc

SEQ ID NO: 83255 - DNA, 60 bp, Artificial
  Synthetic oligonucleotide
cctgcaccagcaactttgggatcagagagtggtcatacctgattgaggaccccgcggccc

SEQ ID NO: 83256 - DNA, 60 bp, Artificial
  Synthetic oligonucleotide
cttgttcagtggaatcaggtcattcagtagaacggaattgatcccacctacctcctgggg

SEQ ID NO: 83257 - DNA, 60 bp, Artificial
  Synthetic oligonucleotide
ccagttatcagtaagacctacaacaatacaacgggaagggatgttttagttttatgggga

SEQ ID NO: 83258 - DNA, 60 bp, Artificial
  Synthetic oligonucleotide
gggaatacatcacccagtgtctgtggatgagacaaagactctgtatgtcaatagtgatcc

SEQ ID NO: 83259 - DNA, 60 bp, Artificial
  Synthetic oligonucleotide
caggggagatgattactttcgagagtaatggtggatttttagccccaagatatgggtaca

SEQ ID NO: 83260 - DNA, 60 bp, Artificial
  Synthetic oligonucleotide
agaatttacatgagcaagtacgaagagaattgaaggacaatgcaattgacgaaggaaatg

SEQ ID NO: 83261 - DNA, 60 bp, Artificial
  Synthetic oligonucleotide
gcgagaaatataaactagaaacgggagtccgacctggctataatggacagaggagctgga

SEQ ID NO: 83262 - DNA, 60 bp, Artificial
  Synthetic oligonucleotide
ttaggggtgaattcaatcaagttgagaagcgtataaacatgcttgcagacagaatagatg

SEQ ID NO: 83263 - DNA, 60 bp, Artificial
  Synthetic oligonucleotide
tcgacacgctccttgaaaatggggtcccagtcaccagctccattgatctgattgagacaa

SEQ ID NO: 83264 - DNA, 60 bp, Artificial
  Synthetic oligonucleotide
cggagcaattgcagggttcatagaaggaggctggccaggtttaatcaatggttggtacgg

SEQ ID NO: 83265 - DNA, 51 bp, Artificial
  Synthetic oligonucleotide
gggcctgtagtagtgggaattgccgattcaatgtttgtatataagtagaaa

SEQ ID NO: 83266 - DNA, 60 bp, Artificial
  Synthetic oligonucleotide
aaccacacaggaacatactgttctctaaatggagtcagtccagtgcatttgggagattgc

SEQ ID NO: 83267 - DNA, 60 bp, Artificial
  Synthetic oligonucleotide
ccaaaacatcgataagaatgctcttggtgactgtcccaaatacataaagtctggccaact

SEQ ID NO: 83268 - DNA, 60 bp, Artificial
  Synthetic oligonucleotide
ggaaccatgcgcagactcgccgaccaaagtctcccaccgaacttctccagccttgaaaac

SEQ ID NO: 83269 - DNA, 60 bp, Artificial
  Synthetic oligonucleotide
ggaaccatgcgcaggcttgctgaccaaagtctcccaccgaacttctccagccttgaaaac

SEQ ID NO: 83270 - DNA, 60 bp, Artificial
  Synthetic oligonucleotide
ggaaccatgcgcagactcgcagaccaaagtctcccaccgaacttctccagccttgaaaac

SEQ ID NO: 83271 - DNA, 60 bp, Artificial
  Synthetic oligonucleotide
caatgcgcaggcttgccgaccaaagtctcccaccgaacttctccagccttgaaaacttta

SEQ ID NO: 83272 - DNA, 60 bp, Artificial
  Synthetic oligonucleotide
ggaaccatgcgtagacttgccgaccaaagtctcccaccgaacttctccagccttgaaaac

SEQ ID NO: 83273 - DNA, 60 bp, Artificial
  Synthetic oligonucleotide
ggaaccatgcgcaggcttgccgatcaaagtctcccaccgaacttctccagccttgaaaac

SEQ ID NO: 83274 - DNA, 60 bp, Artificial
  Synthetic oligonucleotide
ggaaccatacgcaggctcgccgaccaaagtctcccaccgaacttctccagccttgaaaac

SEQ ID NO: 83275 - DNA, 60 bp, Artificial
  Synthetic oligonucleotide
ggaaccatgcgcaggcttgcagaccaaagtctcccaccgaacttctccagccttgaaaac

SEQ ID NO: 83276 - DNA, 56 bp, Artificial
  Synthetic oligonucleotide
gatttactggtatttgatgcacccaggggaatcaatcagtttcgaaagcaatgggg

SEQ ID NO: 83277 - DNA, 59 bp, Artificial
  Synthetic oligonucleotide
gatttactggtatttgatgcacccaggggaatcaatcagtttcgaaagcaatgggggat

SEQ ID NO: 83278 - DNA, 56 bp, Artificial
  Synthetic oligonucleotide
tgactccatacgaggtgaatttagtcaggtagaacaaagaataaatatgcttgcag

SEQ ID NO: 83279 - DNA, 60 bp, Artificial
  Synthetic oligonucleotide
aagaaatggaacgtacaatcatactgaatatgaggaagaatcaaaattaaaaagacagga

SEQ ID NO: 83280 - DNA, 60 bp, Artificial
  Synthetic oligonucleotide
aaagacaggagatagaaggtataaagctgaagtcagacgacagtgtttacaaagcattat

SEQ ID NO: 83281 - DNA, 60 bp, Artificial
  Synthetic oligonucleotide
gaaggtataaagctgaagtcagacgacagtgtttacaaagcattatcgatttacagctgc

SEQ ID NO: 83282 - DNA, 60 bp, Artificial
  Synthetic oligonucleotide
tgatcagagggacctacaacaacactactggaagagatgttttggttatatggggtatac

SEQ ID NO: 83283 - DNA, 60 bp, Artificial
  Synthetic oligonucleotide
cggaacttggtatggtttgtggagaggggaaataaatatcctgtgatcagagggacctac

SEQ ID NO: 83284 - DNA, 60 bp, Artificial
  Synthetic oligonucleotide
gcctgtgccagcaacctggggatcagagagtggtcatatttgattgaggacccttctgct

SEQ ID NO: 83285 - DNA, 60 bp, Artificial
  Synthetic oligonucleotide
gcaggggaaaacttcaacaaaccgacacaagagaaatggacatcccagtaatcgcattct

SEQ ID NO: 83286 - DNA, 60 bp, Artificial
  Synthetic oligonucleotide
cttttaccggaacttggtatggtttgtggagaggggaaataaatatcctgtgatcagagg

SEQ ID NO: 83287 - DNA, 60 bp, Artificial
  Synthetic oligonucleotide
gtgccagcaacctggggatcagagagtggtcatatttgattgaggacccttctgctcctc

SEQ ID NO: 83288 - DNA, 60 bp, Artificial
  Synthetic oligonucleotide
agcaaaagcaggggaaaacttcaacaaaccgacacaagagaaatggacatcccagtaatc

SEQ ID NO: 83289 - DNA, 60 bp, Artificial
  Synthetic oligonucleotide
cggaaggagtgcctgagtctatgagggaagaataccggcaggaacagcagagtgctgtgg

SEQ ID NO: 83290 - DNA, 60 bp, Artificial
  Synthetic oligonucleotide
aagagggccttctacggaaggagtgcctgagtctatgagggaagaataccggcaggagca

SEQ ID NO: 83291 - DNA, 60 bp, Artificial
  Synthetic oligonucleotide
aagagggccttctacggaaggagtgcctgagtctatgagggaagaataccggcaggaaca

SEQ ID NO: 83292 - DNA, 60 bp, Artificial
  Synthetic oligonucleotide
cggaaggagtgcctgagtctatgagggaagaataccggcaggagcaacagagtgcagtgg

SEQ ID NO: 83293 - DNA, 60 bp, Artificial
  Synthetic oligonucleotide
cggaaggagtgcctgagtctatgagggaagaataccggcaggagcagcagagtgctgtgg

SEQ ID NO: 83294 - DNA, 60 bp, Artificial
  Synthetic oligonucleotide
ggtagataatcactcaccgagtgacatccacatcatggcgtctcaaggcaccaaacgacc

SEQ ID NO: 83295 - DNA, 60 bp, Artificial
  Synthetic oligonucleotide
ttctcaaggctcagggtatgcagcagacagagaaagcactcaaagagctatagacggaat

SEQ ID NO: 83296 - DNA, 60 bp, Artificial
  Synthetic oligonucleotide
caagaaatagattcagtgaaactagaaaatcttggtgtgtatcaaattcttgccatttat

SEQ ID NO: 83297 - DNA, 60 bp, Artificial
  Synthetic oligonucleotide
ggaagaccagaagagaggacaagcatttggacctctagtagctccacggtattttgtggt

SEQ ID NO: 83298 - DNA, 60 bp, Artificial
  Synthetic oligonucleotide
atcgggagattctacatacagatgtgcactgaactaaaactcagcgactatgaagggagg

SEQ ID NO: 83299 - DNA, 60 bp, Artificial
  Synthetic oligonucleotide
cagggtagataatcactcactgagagtcatccacatcatggcgtctcaaggcaccaaacg

SEQ ID NO: 83300 - DNA, 60 bp, Artificial
  Synthetic oligonucleotide
gaacaatacagaaccattgtgtgatgctaagggttttgcacccttttccaaagacaacgg

SEQ ID NO: 83301 - DNA, 60 bp, Artificial
  Synthetic oligonucleotide
ggagcatgagatggttgaccttaaaatcaggacaattcccagtccagacagatgagtaca

SEQ ID NO: 83302 - DNA, 53 bp, Artificial
  Synthetic oligonucleotide
gcatacggggtaaaaggattctcgtttaaatacggcaagggtgtctggatagg

SEQ ID NO: 83303 - DNA, 60 bp, Artificial
  Synthetic oligonucleotide
ccaggagtggatttgagatgatttgggatcccaatgggtggacagagacagatagtagtt

SEQ ID NO: 83304 - DNA, 60 bp, Artificial
  Synthetic oligonucleotide
acagatagtagtttctcagtaaagcaagaaattgtagcaataactgattggtcaggatat

SEQ ID NO: 83305 - DNA, 60 bp, Artificial
  Synthetic oligonucleotide
gtagtttctcagtaaagcaagaaattgtagcaataactgattggtcaggatatagtggga

SEQ ID NO: 83306 - DNA, 60 bp, Artificial
  Synthetic oligonucleotide
gaattaacagggctggactgcataaggccttgtttctgggttgaactgatcagaggacgg

SEQ ID NO: 83307 - DNA, 60 bp, Artificial
  Synthetic oligonucleotide
gggctggactgcataaggccttgtttctgggttgaactgatcagaggacggcctcaggag

SEQ ID NO: 83308 - DNA, 60 bp, Artificial
  Synthetic oligonucleotide
cagaggacggcctcaggagaatacaatttggactagtgggagtagcatttctttctgcgg

SEQ ID NO: 83309 - DNA, 60 bp, Artificial
  Synthetic oligonucleotide
gaggacggcctcaggagaatacaatttggactagtgggagtagcatttctttctgcggtg

SEQ ID NO: 83310 - DNA, 60 bp, Artificial
  Synthetic oligonucleotide
cctgaaacatgcaaccaaagcatcatcacttatgagaacaacacttgggtaaatcagaca

SEQ ID NO: 83311 - DNA, 60 bp, Artificial
  Synthetic oligonucleotide
gatgggctatatacagcaaggacaatggcataaggattggttccaaaggagatgtatttg

SEQ ID NO: 83312 - DNA, 60 bp, Artificial
  Synthetic oligonucleotide
gggttagccattcaattcagactgggaaccaaaaccaacctgaaacatgcaaccaaagca

SEQ ID NO: 83313 - DNA, 60 bp, Artificial
  Synthetic oligonucleotide
caacctgaaacatgcaaccaaagcatcatcacttatgagaacaacacttgggtaaatcag

SEQ ID NO: 83314 - DNA, 60 bp, Artificial
  Synthetic oligonucleotide
agagagccattcatctcatgttcccacttggaatgtagaaccttctttctgactcaagga

SEQ ID NO: 83315 - DNA, 60 bp, Artificial
  Synthetic oligonucleotide
cagcaaggacaatggcataaggattggttccaaaggagatgtatttgtcataagagagcc

SEQ ID NO: 83316 - DNA, 60 bp, Artificial
  Synthetic oligonucleotide
gatgtatttgtcataagagagccattcatctcatgttcccacttggaatgtagaaccttc

SEQ ID NO: 83317 - DNA, 60 bp, Artificial
  Synthetic oligonucleotide
gaaccttctttctgactcaaggagccttgttaaatgacaaacactccaatggaaccgtta

SEQ ID NO: 83318 - DNA, 60 bp, Artificial
  Synthetic oligonucleotide
tgcttgccatgatggcatcagctggttgacagtgggaatttctgggccagacaatggggc

SEQ ID NO: 83319 - DNA, 60 bp, Artificial
  Synthetic oligonucleotide
acataatctcaatatgggttagccattcaattcagactgggaaccaaaaccaacctgaaa

SEQ ID NO: 83320 - DNA, 60 bp, Artificial
  Synthetic oligonucleotide
acaatggggcagttgctgtgttgaaatacaatggcataataatagacactgtcaaaagct

SEQ ID NO: 83321 - DNA, 60 bp, Artificial
  Synthetic oligonucleotide
ggcatcagctggttgacagtgggaatttctgggccagacaatggggcagttgctgtgttg

SEQ ID NO: 83322 - DNA, 60 bp, Artificial
  Synthetic oligonucleotide
caggaatctgagtgtgtctgcataaatggttcttgctttactataatgaccgatggacca

SEQ ID NO: 83323 - DNA, 60 bp, Artificial
  Synthetic oligonucleotide
tggggcagttgctgtgttgaaatacaatggcataataatagacactgtcaaaagctggag

SEQ ID NO: 83324 - DNA, 60 bp, Artificial
  Synthetic oligonucleotide
cgatggaccaagtaatgggcaggcctcatacaagattttcaagatagaaaaagggaaagt

SEQ ID NO: 83325 - DNA, 60 bp, Artificial
  Synthetic oligonucleotide
gtctgcataaatggttcttgctttactataatgaccgatggaccaagtaatgggcaggcc

SEQ ID NO: 83326 - DNA, 60 bp, Artificial
  Synthetic oligonucleotide
aatgttcttgttatcctgatgctagcgaagtaatatgcgtgtgtagggataattggcacg

SEQ ID NO: 83327 - DNA, 60 bp, Artificial
  Synthetic oligonucleotide
gtatcaaatagggtacatatgcagtggggttttcggagacaatccacgccccaatgatgg

SEQ ID NO: 83328 - DNA, 60 bp, Artificial
  Synthetic oligonucleotide
cctgatgctagcgaagtaatatgcgtgtgtagggataattggcacggttcaaatcgacca

SEQ ID NO: 83329 - DNA, 60 bp, Artificial
  Synthetic oligonucleotide
agggttccatttcgaagaatgttcctgttacccgagtgggacagatattgagtgtgtctg

SEQ ID NO: 83330 - DNA, 60 bp, Artificial
  Synthetic oligonucleotide
ctgaaaatcagaaaggggaaaatagtaagtatgaaagatgtggatgcaacagggttccat

SEQ ID NO: 83331 - DNA, 60 bp, Artificial
  Synthetic oligonucleotide
ctgaagatcagaaaggggaaaatagtaagtatgaaggatgtggatgcaacagggttccat

SEQ ID NO: 83332 - DNA, 60 bp, Artificial
  Synthetic oligonucleotide
ctgaaaatcagaaaggggaaaatagtaagtatgaaagatgtggacgcaacagggttccat

SEQ ID NO: 83333 - DNA, 60 bp, Artificial
  Synthetic oligonucleotide
cacattgaaaagctggaaggggaatattatgcgaacacaagagtccgagtgcgtatgcca

SEQ ID NO: 83334 - DNA, 60 bp, Artificial
  Synthetic oligonucleotide
atgctactgctgtggcagtgctgaaatataatggtataataacagacacattaaaaagct

SEQ ID NO: 83335 - DNA, 60 bp, Artificial
  Synthetic oligonucleotide
agaatgttcctgttacccgagtgggacagatattgagtgtgtctgtcgggacaattggcg

SEQ ID NO: 83336 - DNA, 60 bp, Artificial
  Synthetic oligonucleotide
agggttccattttgaagaatgttcctgttacccgagtgggacagatgttgaatgtgtctg

SEQ ID NO: 83337 - DNA, 60 bp, Artificial
  Synthetic oligonucleotide
tattagtcacaagggagccctacttatcctgcgacccacaaggatgcagaatgtttgctc

SEQ ID NO: 83338 - DNA, 60 bp, Artificial
  Synthetic oligonucleotide
gaaagcagcgtactgtggacttcaaatagcatagtagccctttgcggatccagggagcga

SEQ ID NO: 83339 - DNA, 60 bp, Artificial
  Synthetic oligonucleotide
ctcattgttcaggcacttagggacaacctggaacctggaaccttcgatcttggagggctg

SEQ ID NO: 83340 - DNA, 60 bp, Artificial
  Synthetic oligonucleotide
gaccaggcaattatggataagaacatcatactgaaagcgaacttcagtgtgatcttcgag

SEQ ID NO: 83341 - DNA, 60 bp, Artificial
  Synthetic oligonucleotide
gaccaggcaattatggataagaacatcatactgaaagcgaacttcagtgtgatcttcgac

SEQ ID NO: 83342 - DNA, 60 bp, Artificial
  Synthetic oligonucleotide
gaccaggcaattatggataagaacatcatactgaaagcgaacttcagtgtgatcttcgat

SEQ ID NO: 83343 - DNA, 60 bp, Artificial
  Synthetic oligonucleotide
gtcatggagaaagcaaattctaagaacacaagaatcgtcatgtgtgtgtatgaaaggaga

SEQ ID NO: 83344 - DNA, 60 bp, Artificial
  Synthetic oligonucleotide
ccttcgacatgagtaacgagggatcttatttcttcggagacaatgcagaggagtatgaca

SEQ ID NO: 83345 - DNA, 60 bp, Artificial
  Synthetic oligonucleotide
cttccttcgacatgagtaacgagggatcttatttcttcggagacaatgcagaggagtatg

SEQ ID NO: 83346 - DNA, 60 bp, Artificial
  Synthetic oligonucleotide
gggtatacatcaccctgtttccacagacgaagcgaaacaactatatgtcaataacaaccc

SEQ ID NO: 83347 - DNA, 60 bp, Artificial
  Synthetic oligonucleotide
acttcttggggggcagtgaatgatggagtatcgtcggcctgtccagataaaggagccagc

SEQ ID NO: 83348 - DNA, 60 bp, Artificial
  Synthetic oligonucleotide
gcctgtgccagcaacctggggatcagagaatggtcatacttgattgaagatccttctgct

SEQ ID NO: 83349 - DNA, 60 bp, Artificial
  Synthetic oligonucleotide
cctgtaatccgcgggacctacaacaacactactggcagagatgttttggttatatggggt

SEQ ID NO: 83350 - DNA, 61 bp, Artificial
  Synthetic oligonucleotide
gaacgtacaatcatacagaatatgaggaagaatccaaattaaagagacaggaaatagaagg

SEQ ID NO: 83351 - DNA, 60 bp, Artificial
  Synthetic oligonucleotide
aggagccagcagcttttaccggaacttggtatggtttgtgaagagaggaaatcagtatcc

SEQ ID NO: 83352 - DNA, 60 bp, Artificial
  Synthetic oligonucleotide
ggaaaagggcgaattttccaaagccgcattcgaattgctaaatgcaatactaagtgccaa

SEQ ID NO: 83353 - DNA, 56 bp, Artificial
  Synthetic oligonucleotide
tgactccatacgaggtgaattcaatcaggtggaacaaagaataaatatgcttgcag

SEQ ID NO: 83354 - DNA, 60 bp, Artificial
  Synthetic oligonucleotide
gagaaatggacatcccagtagtcgcattcttgatattaaccagtacatgcgtacaggctg

SEQ ID NO: 83355 - DNA, 60 bp, Artificial
  Synthetic oligonucleotide
actcatacttacattcatcatgtgggcatgcagcagtggcaattgccggttcaatatttg

SEQ ID NO: 83356 - DNA, 60 bp, Artificial
  Synthetic oligonucleotide
ggttgacacactgttagaaaacgatgttccggttacaagctctgttgatctggttgagac

SEQ ID NO: 83357 - DNA, 60 bp, Artificial
  Synthetic oligonucleotide
gataaaactctagacatgcatgatgctaatgttagaaacctgcatgatcaagtccgtaga

SEQ ID NO: 83358 - DNA, 60 bp, Artificial
  Synthetic oligonucleotide
aatcagtttcgaaagcaatggaggattattggcacccagatatggttatattattgagga

SEQ ID NO: 83359 - DNA, 60 bp, Artificial
  Synthetic oligonucleotide
ccctactcaatgacaaacattctaatggcacagtgaaagaccggagcccctatagaactc

SEQ ID NO: 83360 - DNA, 60 bp, Artificial
  Synthetic oligonucleotide
ctaaggaaggagtgcctgagtctatgagggaagagtatcggcaggaacagcagagtgctg

SEQ ID NO: 83361 - DNA, 60 bp, Artificial
  Synthetic oligonucleotide
acctccaaacattgaaaataagagtacatgaagggtacgaggaattcacaatggttgggc

SEQ ID NO: 83362 - DNA, 60 bp, Artificial
  Synthetic oligonucleotide
ttgagccccggaatgatgatgggcatgttcaacatgctaagtacagttttgggagtctca

SEQ ID NO: 83363 - DNA, 60 bp, Artificial
  Synthetic oligonucleotide
aataactgggcaaactgaaatcagtttcaatggaggccatatagaagaatgctcatgcta

SEQ ID NO: 83364 - DNA, 51 bp, Artificial
  Synthetic oligonucleotide
ataactgggcaaactgaaatcagtttcaatggaggccatatagaagaatgc

SEQ ID NO: 83365 - DNA, 60 bp, Artificial
  Synthetic oligonucleotide
gtgcgacctattgcttggtgatcaaagctggtcatatatagtggaaaggcctactgctca

SEQ ID NO: 83366 - DNA, 60 bp, Artificial
  Synthetic oligonucleotide
gagcattcatagactactgggcaaacaaagaatgctttaatccttgtttctatgtggagc

SEQ ID NO: 83367 - DNA, 60 bp, Artificial
  Synthetic oligonucleotide
atagcattgtagctctttgcggatccaaggagcgattgggatcatggtcctggcatgatg

SEQ ID NO: 83368 - DNA, 60 bp, Artificial
  Synthetic oligonucleotide
atagcattgtagctctttgcggatccagggagcgattgggatcatggtcctggcatgatg

SEQ ID NO: 83369 - DNA, 60 bp, Artificial
  Synthetic oligonucleotide
agccctttgcggatccagggagcgattgggatcatggtcctggcatgatggtgctgaaat

SEQ ID NO: 83370 - DNA, 60 bp, Artificial
  Synthetic oligonucleotide
gccctttgcggatccagggagcgattgggatcatggtcctggcatgatggtgctgaaatc

SEQ ID NO: 83371 - DNA, 60 bp, Artificial
  Synthetic oligonucleotide
gggatactcaggagcattcatagactactgggcaaacaaagaatgctttaatccttgttt

SEQ ID NO: 83372 - DNA, 60 bp, Artificial
  Synthetic oligonucleotide
gtttgcattcctagatggggaaaattcatggcttggaaggacaattagcaaagactccag

SEQ ID NO: 83373 - DNA, 60 bp, Artificial
  Synthetic oligonucleotide
ttgggatcatggtcctggcatgatggtgctgaaatcatctactttaagtaggaatgattt

SEQ ID NO: 83374 - DNA, 51 bp, Artificial
  Synthetic oligonucleotide
ttgggatcatggtcctggcatgatggtgctgaaatcacctactttaagtag

SEQ ID NO: 83375 - DNA, 57 bp, Artificial
  Synthetic oligonucleotide
ttgggatcatggtcctggcatgatggtgctgaaatcatctactttaagtaggaatga

SEQ ID NO: 83376 - DNA, 60 bp, Artificial
  Synthetic oligonucleotide
cagacaccccacgagttcaagacagcagcttcagcggctcatgcacaaatgcagtcgggg

SEQ ID NO: 83377 - DNA, 60 bp, Artificial
  Synthetic oligonucleotide
ttcaaatctcagagaggaatggtagttgatgaaaaggaaatttcatttcaaggtgggcac

SEQ ID NO: 83378 - DNA, 60 bp, Artificial
  Synthetic oligonucleotide
cacgtatttgtcataagagagccttttgtggcttgtggtccttcagaatgtaggaccttt

SEQ ID NO: 83379 - DNA, 60 bp, Artificial
  Synthetic oligonucleotide
ctaaggacaatgggatcagagtaggttcaagaggtcacgtatttgtcataagagagcctt

SEQ ID NO: 83380 - DNA, 60 bp, Artificial
  Synthetic oligonucleotide
gatttgctattgtttctaaggacaatgggatcagagtaggttcaagaggtcacgtatttg

SEQ ID NO: 83381 - DNA, 60 bp, Artificial
  Synthetic oligonucleotide
atggagaaagcagatattaagaacacaagagtcttcatgtgtttgcatcaagggggagtg

SEQ ID NO: 83382 - DNA, 60 bp, Artificial
  Synthetic oligonucleotide
tcatgagccagaattcctcaacaacacagagcctctctgtgatgtatcaggatttgctat

SEQ ID NO: 83383 - DNA, 60 bp, Artificial
  Synthetic oligonucleotide
ggaatggtagttgatgaaaaggaaatttcatttcaaggtgggcacatagaggaatgctcc

SEQ ID NO: 83384 - DNA, 60 bp, Artificial
  Synthetic oligonucleotide
acagtggtgatccctgtcaacaacaccatatacatagaaagagaattgaatcatgagcca

SEQ ID NO: 83385 - DNA, 60 bp, Artificial
  Synthetic oligonucleotide
gtgactaaggtgtataatgagacagtgagagtggagacagtggtgatccctgtcaacaac

SEQ ID NO: 83386 - DNA, 60 bp, Artificial
  Synthetic oligonucleotide
gagtatgaagtcggttatctttgcgctggaattccaacagacaccccacgagttcaagac

SEQ ID NO: 83387 - DNA, 60 bp, Artificial
  Synthetic oligonucleotide
gcagggacaattggaatggaatgaacagaccaatcttagtattcgatgaaaagcttgagt

SEQ ID NO: 83388 - DNA, 60 bp, Artificial
  Synthetic oligonucleotide
aggtgggcacatagaggaatgctcctgttaccccaacatggggaaagtagagtgtgtttg

SEQ ID NO: 83389 - DNA, 60 bp, Artificial
  Synthetic oligonucleotide
agtgtgtttgcagggacaattggaatggaatgaacagaccaatcttagtattcgatgaaa

SEQ ID NO: 83390 - DNA, 60 bp, Artificial
  Synthetic oligonucleotide
ggcacatagaggaatgctcctgttaccccaacatggggaaagtagagtgtgtttgcaggg

SEQ ID NO: 83391 - DNA, 60 bp, Artificial
  Synthetic oligonucleotide
tacatgcttgcaatgtgactaaggtgtataatgagacagtgagagtggagacagtggtga

SEQ ID NO: 83392 - DNA, 60 bp, Artificial
  Synthetic oligonucleotide
ggagaggaatagtatttggacctcaagtagttccactgtgttctgtggtgtttccagtga

SEQ ID NO: 83393 - DNA, 60 bp, Artificial
  Synthetic oligonucleotide
ttggacctcaagtagttccactgtgttctgtggtgtttccagtgaggtcccaggatggtc

SEQ ID NO: 83394 - DNA, 60 bp, Artificial
  Synthetic oligonucleotide
tggctttgaggtccttttcatagaggacgggtgggttagaccgagtaaaaccattagcaa

SEQ ID NO: 83395 - DNA, 60 bp, Artificial
  Synthetic oligonucleotide
ggtcaggatatagcggggcttttacaatccccactgcaatgacaggcaaggactgtttag

SEQ ID NO: 83396 - DNA, 60 bp, Artificial
  Synthetic oligonucleotide
gggcttttacaatccccactgcaatgacaggcaaggactgtttagttccgtgcttttggc

SEQ ID NO: 83397 - DNA, 53 bp, Artificial
  Synthetic oligonucleotide
ggggagtgccaacagatgtggtaagatcatggagaaagcagatattaagaaca

SEQ ID NO: 83398 - DNA, 60 bp, Artificial
  Synthetic oligonucleotide
ataacacagtaaaagaccggagtccctatcgggcattgatgagtgttccattaggatcct

SEQ ID NO: 83399 - DNA, 60 bp, Artificial
  Synthetic oligonucleotide
cacagtaaaagaccggagtccctatcgggcattgatgagtgttccattaggatcctctcc

SEQ ID NO: 83400 - DNA, 60 bp, Artificial
  Synthetic oligonucleotide
taggacctttttcttaacacaaggtgctttgctgaatgacaagcattcgaataacacagt

SEQ ID NO: 83401 - DNA, 60 bp, Artificial
  Synthetic oligonucleotide
aacacaaggtgctttgctgaatgacaagcattcgaataacacagtaaaagaccggagtcc

SEQ ID NO: 83402 - DNA, 50 bp, Artificial
  Synthetic oligonucleotide
gtctgcaacggcctgtcatgacgggaaagaatggatggccataggagtga

SEQ ID NO: 83403 - DNA, 60 bp, Artificial
  Synthetic oligonucleotide
gcttatgctgttattcactatgggggagtgccaacagatgtggtaagatcatggagaaag

SEQ ID NO: 83404 - DNA, 60 bp, Artificial
  Synthetic oligonucleotide
ttaggatcctctcctaatgcttatcaagcccaattcgagtctgtaggatggtctgcaacg

SEQ ID NO: 83405 - DNA, 60 bp, Artificial
  Synthetic oligonucleotide
aatgcttatcaagcccaattcgagtctgtaggatggtctgcaacggcctgtcatgacggg

SEQ ID NO: 83406 - DNA, 60 bp, Artificial
  Synthetic oligonucleotide
aacagacaccccacgagttcaagacagcagcttcagcggctcatgcacaaatgcagtcgg

SEQ ID NO: 83407 - DNA, 60 bp, Artificial
  Synthetic oligonucleotide
tgcaagcattacaactattgcttgaagtggagcaagagataagaactttctcgtttcagc

SEQ ID NO: 83408 - DNA, 60 bp, Artificial
  Synthetic oligonucleotide
tgaaaggagattgttattgggtaatgacggatggtcctgcgaacaatcaggctagttaca

SEQ ID NO: 83409 - DNA, 60 bp, Artificial
  Synthetic oligonucleotide
tagtagctccacggtattttgtggtgtttcaagtgaggtcccagggtggtcctgggatga

SEQ ID NO: 83410 - DNA, 60 bp, Artificial
  Synthetic oligonucleotide
tgaaaggagactgttattgggtaatgacggatggtcctgcgaacaatcaggctagttaca

SEQ ID NO: 83411 - DNA, 60 bp, Artificial
  Synthetic oligonucleotide
gaaaggaaactgttattgggtaatgacggatggtcctgcgaacaatcaggctagttacaa

SEQ ID NO: 83412 - DNA, 60 bp, Artificial
  Synthetic oligonucleotide
gaaatctaatcgctccttggtatgcatacaaatttgtcagcaccaatagtaaaggagccg

SEQ ID NO: 83413 - DNA, 60 bp, Artificial
  Synthetic oligonucleotide
tgggagctgcaatgaaacaatcattagggaatacaatgaaacagtaaggattgagaaggt

SEQ ID NO: 83414 - DNA, 60 bp, Artificial
  Synthetic oligonucleotide
tgggagttgcaatgaaacaatcattagggaatacaatgaaacagtaaggattgagaaggt

SEQ ID NO: 83415 - DNA, 60 bp, Artificial
  Synthetic oligonucleotide
gggagctgcaatgaaacaatcattagggaatacaatgaaacagtaaggattgagaaggta

SEQ ID NO: 83416 - DNA, 60 bp, Artificial
  Synthetic oligonucleotide
gaaacaatcattagggaatacaatgaaacagtaaggattgagaaggtaacacaatggcac

SEQ ID NO: 83417 - DNA, 60 bp, Artificial
  Synthetic oligonucleotide
tacagttgcattgcaagcagtgttgtgctagtagggctcatacttgcattcataatgtgg

SEQ ID NO: 83418 - DNA, 60 bp, Artificial
  Synthetic oligonucleotide
gcctatgaaagaatgtgcaacatccttaaagggaaattccaaacagcagcacaacgggct

SEQ ID NO: 83419 - DNA, 60 bp, Artificial
  Synthetic oligonucleotide
catgcaagcattacaactactgcttgaagtggagcaagagataagaactttctcgtttca

SEQ ID NO: 83420 - DNA, 60 bp, Artificial
  Synthetic oligonucleotide
gcacccagaaagctatagacgggatcaccaataaagtcaattcaatcattgacaaaatga

SEQ ID NO: 83421 - DNA, 60 bp, Artificial
  Synthetic oligonucleotide
gtacccagaaagcaatagacgggatcaccaataaagtcaattcaatcattgacaaaatga

SEQ ID NO: 83422 - DNA, 60 bp, Artificial
  Synthetic oligonucleotide
tagtagctccacagtattttgtggtgtttcaagtgaggtcccaggatggtcctgggatga

SEQ ID NO: 83423 - DNA, 60 bp, Artificial
  Synthetic oligonucleotide
caactactacttgaagtggagcaagagataagaactttctcgtttcagcttatttaatga

SEQ ID NO: 83424 - DNA, 60 bp, Artificial
  Synthetic oligonucleotide
ataatacagtgaaagacagaagtccttatcgtgcattgatgagtgtgccattaggatctt

SEQ ID NO: 83425 - DNA, 60 bp, Artificial
  Synthetic oligonucleotide
aatggagaagacgcaactgctggtctcacccatttgatgatctggcattccaatctgaat

SEQ ID NO: 83426 - DNA, 60 bp, Artificial
  Synthetic oligonucleotide
tacggtaatggtgtttggataggaagaactaaaagcactagttcaaggagtggatttgag

SEQ ID NO: 83427 - DNA, 60 bp, Artificial
  Synthetic oligonucleotide
ttaaatacggtaatggtgtttggataggaagaactaaaagtactagttcaaggagtggat

SEQ ID NO: 83428 - DNA, 60 bp, Artificial
  Synthetic oligonucleotide
agggttgttcggggctattgcaggcttcatagaaggtggttggccaggattaataaatgg

SEQ ID NO: 83429 - DNA, 60 bp, Artificial
  Synthetic oligonucleotide
agggttgtttggagctattgcaggcttcatagaaggtggttggccaggattaataaatgg

SEQ ID NO: 83430 - DNA, 60 bp, Artificial
  Synthetic oligonucleotide
cggggctattgcaggcttcatagaaggtggttggccaggattaataaatggttggtatgg

SEQ ID NO: 83431 - DNA, 60 bp, Artificial
  Synthetic oligonucleotide
ggactgtttggggcgattgcagggttcatagaaggtggttggccaggattaataaatggt

SEQ ID NO: 83432 - DNA, 60 bp, Artificial
  Synthetic oligonucleotide
ggagctattgcaggcttcatagaaggtggttggccaggattaataaatggttggtatgga

SEQ ID NO: 83433 - DNA, 60 bp, Artificial
  Synthetic oligonucleotide
ggggcgattgcagggttcatagaaggtggttggccaggattaataaatggttggtacgga

SEQ ID NO: 83434 - DNA, 60 bp, Artificial
  Synthetic oligonucleotide
ggcagaaacaagaggattgtttggagcaatagctgggtttatagaaggaggatggacagg

SEQ ID NO: 83435 - DNA, 60 bp, Artificial
  Synthetic oligonucleotide
gctcagaccgagtgatggtatcacctctggctgtgacatggtggaataggaacggaccaa

SEQ ID NO: 83436 - DNA, 60 bp, Artificial
  Synthetic oligonucleotide
ctcaaggttctctactcaatgacaaacattctaatggcacagtgaaagaccggagcccct

SEQ ID NO: 83437 - DNA, 60 bp, Artificial
  Synthetic oligonucleotide
ttttgcacccttttccaaagacaacggaataagaattggatcgagaggtcatgtttttgt

SEQ ID NO: 83438 - DNA, 57 bp, Artificial
  Synthetic oligonucleotide
ttttgcacccttttccaaagacaacggaataagaattggatcgagaggtcatgtttt

SEQ ID NO: 83439 - DNA, 60 bp, Artificial
  Synthetic oligonucleotide
aagatataagaactttctcgtttcagcttatttaatgataaaaaacacccttgtttctac

SEQ ID NO: 83440 - DNA, 60 bp, Artificial
  Synthetic oligonucleotide
gtggaattgggagattctacatacagatgtgcactgaactcaaactcagcgaccatgaag

SEQ ID NO: 83441 - DNA, 60 bp, Artificial
  Synthetic oligonucleotide
atctgttccaccattgaagagctcagacggcggaaatagtgaatttagcttgtccttcat

SEQ ID NO: 83442 - DNA, 60 bp, Artificial
  Synthetic oligonucleotide
gacatgagcattggggtaacagtgataaagaacaacatgataaacaatgaccttggacca

SEQ ID NO: 83443 - DNA, 60 bp, Artificial
  Synthetic oligonucleotide
cgacatgagcattggagtaacagtgataaagaacaacatgataaacaatgaccttggacc

SEQ ID NO: 83444 - DNA, 60 bp, Artificial
  Synthetic oligonucleotide
ggctgacatgagcattggagtaacagtgataaagaacaacatgataaacaatgaccttgg

SEQ ID NO: 83445 - DNA, 60 bp, Artificial
  Synthetic oligonucleotide
tcggctgacatgagcattggagtaacagtgataaagaacaacatgataaacaatgacctc

SEQ ID NO: 83446 - DNA, 60 bp, Artificial
  Synthetic oligonucleotide
cagtgataaagaacaacatgataaacaatgatcttggaccagcaacggctcaaatggctc

SEQ ID NO: 83447 - DNA, 60 bp, Artificial
  Synthetic oligonucleotide
aatgatgatgggcatgttcaacatgctaagtacagtcttgggagtctcgattctaaatct

SEQ ID NO: 83448 - DNA, 60 bp, Artificial
  Synthetic oligonucleotide
aatgatgatgggcatgttcaacatgctaagtacagttttgggagtttcgattctaaatct

SEQ ID NO: 83449 - DNA, 60 bp, Artificial
  Synthetic oligonucleotide
gggaggatggttggtggaatcgggagattctacatacagatgtgcactgaactcaagctc

SEQ ID NO: 83450 - DNA, 60 bp, Artificial
  Synthetic oligonucleotide
gccagaatgccactgaaatcagagcatctgttgggaggatggttggtggaattgggagat

SEQ ID NO: 83451 - DNA, 57 bp, Artificial
  Synthetic oligonucleotide
agaatgccactgaaatcagagcatctgttgggaggatggttggtggaattgggagat

SEQ ID NO: 83452 - DNA, 60 bp, Artificial
  Synthetic oligonucleotide
gggctggtctatggcaatccttcttgtgatatgctattgggagggaaagaatggtcctac

SEQ ID NO: 83453 - DNA, 52 bp, Artificial
  Synthetic oligonucleotide
acactcaccgtgcccagtgagcgaggactgcagcgtagacgctttgtccaaa

SEQ ID NO: 83454 - DNA, 55 bp, Artificial
  Synthetic oligonucleotide
ggggaatcggaagattctacatacagatgtgcactgaactcaagctcagtgataa

SEQ ID NO: 83455 - DNA, 60 bp, Artificial
  Synthetic oligonucleotide
ttgagccccggaatgatgatgggcatgttcaacatgctaagcacagttttgggagtctca

SEQ ID NO: 83456 - DNA, 60 bp, Artificial
  Synthetic oligonucleotide
ttgagtcccggaatgatgatgggcatgttcaacatgctgagtacagttttgggagtctca

SEQ ID NO: 83457 - DNA, 60 bp, Artificial
  Synthetic oligonucleotide
ctgtgtcaagctttcaggtagactgctttctttggcatgtccgcaaacgagttgcagacc

SEQ ID NO: 83458 - DNA, 60 bp, Artificial
  Synthetic oligonucleotide
gtaatgacggatggaccagcaaacagacaagcacaatacagagcattcaaagccaaacag

SEQ ID NO: 83459 - DNA, 60 bp, Artificial
  Synthetic oligonucleotide
atgcagggctcgacactccctagaaggtctggagctgctggtgcagcagtaaagggagtt

SEQ ID NO: 83460 - DNA, 60 bp, Artificial
  Synthetic oligonucleotide
tcatgcagggctcaacactccctagaaggtctggagctgctggtgcagcagtaaagggag

SEQ ID NO: 83461 - DNA, 60 bp, Artificial
  Synthetic oligonucleotide
aaaatcagtgatgctggaaaatctgggagtataccaaatccttgctatctatagtacggt

SEQ ID NO: 83462 - DNA, 60 bp, Artificial
  Synthetic oligonucleotide
acatacactggaaccagcaaggcctgcaataatacatcaaaccaaggctcattctacagg

SEQ ID NO: 83463 - DNA, 53 bp, Artificial
  Synthetic oligonucleotide
cactcaatgagtgacatcgaagccatggcatctcaaggcaccaaacgatcata

SEQ ID NO: 83464 - DNA, 60 bp, Artificial
  Synthetic oligonucleotide
tgcacggtctgctctcattctgaggggatcagtggctcataagtcctgcctgcctgcttg

SEQ ID NO: 83465 - DNA, 60 bp, Artificial
  Synthetic oligonucleotide
gcgagtgagatccaatgggaatctaattgccccatggtatggccacattctctcaggaga

SEQ ID NO: 83466 - DNA, 60 bp, Artificial
  Synthetic oligonucleotide
tgcgagtgagatccaatgggaatctaattgccccatggtatggccacattctctcaggag

SEQ ID NO: 83467 - DNA, 60 bp, Artificial
  Synthetic oligonucleotide
ggggtaaaactggaatctgagggaacttacaaaatcctcaccatttattcgactgtcgcc

SEQ ID NO: 83468 - DNA, 60 bp, Artificial
  Synthetic oligonucleotide
gctggattcatagaaggaggttggccaggactagttgctggctggtatggtttccagcat

SEQ ID NO: 83469 - DNA, 60 bp, Artificial
  Synthetic oligonucleotide
taaacccttccagaacactagtaagcactatattgggaaatgccccaagtacataccatc

SEQ ID NO: 83470 - DNA, 52 bp, Artificial
  Synthetic oligonucleotide
aacactagtaagcactatattgggaaatgccccaaatacataccatcaggga

SEQ ID NO: 83471 - DNA, 60 bp, Artificial
  Synthetic oligonucleotide
ccagaacactagtaagcactatattgggaaatgccccaagtacataccatcagggagtct

SEQ ID NO: 83472 - DNA, 60 bp, Artificial
  Synthetic oligonucleotide
cctttccagaacactagtaagcactatattgggaaatgccccaaatacataccatcgggg

SEQ ID NO: 83473 - DNA, 60 bp, Artificial
  Synthetic oligonucleotide
cccttccagaacactagtaagcactatattgggaaatgccccaagtacataccatcaggg

SEQ ID NO: 83474 - DNA, 60 bp, Artificial
  Synthetic oligonucleotide
aacctttccagaacactagtaagcactatattgggaaatgcccaaaatacataccatcgg

SEQ ID NO: 83475 - DNA, 60 bp, Artificial
  Synthetic oligonucleotide
aacctttccagaacactagtaagcactatattgggaaatgcccaaaatacataccatcag

SEQ ID NO: 83476 - DNA, 60 bp, Artificial
  Synthetic oligonucleotide
agaccaatggtaatcttattgcacctgaatatggtcatttaatcacagggaaatcacatg

SEQ ID NO: 83477 - DNA, 60 bp, Artificial
  Synthetic oligonucleotide
tggtaatcttattgcacctgaatatggtcatttaatcacagggaaatcacatggcaggat

SEQ ID NO: 83478 - DNA, 60 bp, Artificial
  Synthetic oligonucleotide
aaacctttccagaacactagtaagcactatattgggaaatgccccaagtacataccatca

SEQ ID NO: 83479 - DNA, 60 bp, Artificial
  Synthetic oligonucleotide
gcaagggagaattgactactattggtcagtattaaaaccaggccaaacgttgcgagtgag

SEQ ID NO: 83480 - DNA, 60 bp, Artificial
  Synthetic oligonucleotide
cagtgtcagactgagaaaggtggtctaaatacgaccttgccgtttcataatgtcagcaaa

SEQ ID NO: 83481 - DNA, 60 bp, Artificial
  Synthetic oligonucleotide
caactgcgtagtgcaatgccagactgagaaaggtggtctaaatacgaccttgccctttca

SEQ ID NO: 83482 - DNA, 60 bp, Artificial
  Synthetic oligonucleotide
gggagaattgactactattggtcagtattaaaaccaggccaaacgttgcgagtgagatcc

SEQ ID NO: 83483 - DNA, 60 bp, Artificial
  Synthetic oligonucleotide
gccatggaagaatcttgaagactgatttgagcagtggcgactgcgtagtgcagtgtcaga

SEQ ID NO: 83484 - DNA, 60 bp, Artificial
  Synthetic oligonucleotide
gtctcaaactggcagtcggtttaaggaatgtacctgctgtatcagatagagggctgcttg

SEQ ID NO: 83485 - DNA, 60 bp, Artificial
  Synthetic oligonucleotide
gttaccctgggaatgtagaaaacctggaagaactcaggtcctttttcagttccgctaatt

SEQ ID NO: 83486 - DNA, 60 bp, Artificial
  Synthetic oligonucleotide
gttggagtaaagagtctcaaactggcagtcggtttaaggaatgtacctgctgtatcagat

SEQ ID NO: 83487 - DNA, 59 bp, Artificial
  Synthetic oligonucleotide
attgtcgagagatcatctgctgtcaatggaatgtgttaccctgggaatgtagaaaacct

SEQ ID NO: 83488 - DNA, 60 bp, Artificial
  Synthetic oligonucleotide
ggtcctacatcgtcgagaggtcatctgccgtcaatggaatgtgttaccctgggaatgtag

SEQ ID NO: 83489 - DNA, 60 bp, Artificial
  Synthetic oligonucleotide
ggggtaaaactggaatctgaaggaacttacaaaatcctcactatttattcgactgtcgcc

SEQ ID NO: 83490 - DNA, 60 bp, Artificial
  Synthetic oligonucleotide
ggctgatacaacaacaagtgtgacaacagaagatataaatcggactttcaagccagtgat

SEQ ID NO: 83491 - DNA, 60 bp, Artificial
  Synthetic oligonucleotide
gaggggaagaacattctcttcatgtggggcatacaccatccacctactgatgccgaacag

SEQ ID NO: 83492 - DNA, 60 bp, Artificial
  Synthetic oligonucleotide
ctttccagacacaatctggaatgtgacttacactggaacaagcaaagcatgttcgaattc

SEQ ID NO: 83493 - DNA, 60 bp, Artificial
  Synthetic oligonucleotide
gggctgcttggtgctatagctggattcatagaaggaggttggccagggctagttgctggc

SEQ ID NO: 83494 - DNA, 60 bp, Artificial
  Synthetic oligonucleotide
gtgcaatgccagactgagaaaggtggtctaaatacgaccttgccctttcacaatgtcagc

SEQ ID NO: 83495 - DNA, 58 bp, Artificial
  Synthetic oligonucleotide
tggctgcagatagagaatcaactcaagaagcagttgacaaaataacatccaaagtaaa

SEQ ID NO: 83496 - DNA, 60 bp, Artificial
  Synthetic oligonucleotide
gactattattggtcagtattaaaaccaggccaaacgttgcgagtgagatccaatggaaac

SEQ ID NO: 83497 - DNA, 60 bp, Artificial
  Synthetic oligonucleotide
gtattaaaaccaggccaaacgttgcgagtgagatccaatggaaacctaattgccccatgg

SEQ ID NO: 83498 - DNA, 60 bp, Artificial
  Synthetic oligonucleotide
ctctcaggagaaagccatggaagaatcttgaagactgatttgagcagtggcaactgcgta

SEQ ID NO: 83499 - DNA, 60 bp, Artificial
  Synthetic oligonucleotide
ggcagtcggtttaaggaatgtacctgctgtatcagatagagggctgcttggtgctatagc

SEQ ID NO: 83500 - DNA, 60 bp, Artificial
  Synthetic oligonucleotide
gatccagatctttccagacacaatttggaatgtgacttacagtggaacaagcaaagcatg

SEQ ID NO: 83501 - DNA, 60 bp, Artificial
  Synthetic oligonucleotide
ggatccagatctttccagacacaatttggaatgtgacttacagtggaacaagcaaagcat

SEQ ID NO: 83502 - DNA, 60 bp, Artificial
  Synthetic oligonucleotide
tacagtggaacaagcaaagcatgttcaaactcattctacaggagtatgagatggctgaca

SEQ ID NO: 83503 - DNA, 60 bp, Artificial
  Synthetic oligonucleotide
caaactcattctacaggagtatgagatggctgacacacaagagcaattcttaccctgttc

SEQ ID NO: 83504 - DNA, 60 bp, Artificial
  Synthetic oligonucleotide
caaaagaatccagatctttccagacacaatctggaatgtgacttacagtggaacaagcaa

SEQ ID NO: 83505 - DNA, 60 bp, Artificial
  Synthetic oligonucleotide
ccaaagaatccagatctttccagacacaatctggaatgtgacttacagtggaacaagcaa

SEQ ID NO: 83506 - DNA, 60 bp, Artificial
  Synthetic oligonucleotide
tgtgacttacagtggaacaagcaaagcatgttcaaattcattctacaggagtatgagatg

SEQ ID NO: 83507 - DNA, 60 bp, Artificial
  Synthetic oligonucleotide
ccagatctttccagacacaatttggaatgtgacttacagtggaacaagcaaagcatgttc

SEQ ID NO: 83508 - DNA, 57 bp, Artificial
  Synthetic oligonucleotide
caagatctgcattggatatcatgccaacaattcaacaacacaagtgaatacgatact

SEQ ID NO: 83509 - DNA, 60 bp, Artificial
  Synthetic oligonucleotide
gctcctagaaagtcagaaggagaatagattctgcagagtcttgaataaagcgccactgga

SEQ ID NO: 83510 - DNA, 60 bp, Artificial
  Synthetic oligonucleotide
tgcaagcattacaactactgcttgaagtggagcaagagataagaactttctcgtttcagc

SEQ ID NO: 83511 - DNA, 60 bp, Artificial
  Synthetic oligonucleotide
cacatgccagactattgcaggagtcctaaggaccaataaaacatttcagaatgtgagccc

SEQ ID NO: 83512 - DNA, 60 bp, Artificial
  Synthetic oligonucleotide
cggaaggagtgcctgagtctatgagggaagaatatcggcaggaacagcatagtgctgtgg

SEQ ID NO: 83513 - DNA, 60 bp, Artificial
  Synthetic oligonucleotide
gaaattccaaacagcagcacaacgagcaatgatggaccaggtgagagaaagccggaatcc

SEQ ID NO: 83514 - DNA, 60 bp, Artificial
  Synthetic oligonucleotide
ggtaaatttcaaacagcagcacaacgagcaatgatggaccaagtgagggaaagccggaat

SEQ ID NO: 83515 - DNA, 50 bp, Artificial
  Synthetic oligonucleotide
attatgtgggcctgccaaaaaggcaacattaggtgcaacatttgcatttg

SEQ ID NO: 83516 - DNA, 60 bp, Artificial
  Synthetic oligonucleotide
gcacaaacagactgtgtcttggaagcaatggctttccttgaagagtcccacccagggatc

SEQ ID NO: 83517 - DNA, 60 bp, Artificial
  Synthetic oligonucleotide
gctgaactgttggttcttcttgaaaacgaaaggacactagacctgcatgacgcgaatgtg

SEQ ID NO: 83518 - DNA, 60 bp, Artificial
  Synthetic oligonucleotide
atgctgaactgttggttcttcttgaaaacgaaaggacactagacctgcatgacgcgaatg

SEQ ID NO: 83519 - DNA, 60 bp, Artificial
  Synthetic oligonucleotide
ggggtgcaccatcctcctgacaccaatgagcaaaatactttgtatggttctggtgatcga

SEQ ID NO: 83520 - DNA, 53 bp, Artificial
  Synthetic oligonucleotide
ggggtgcaccatcctcctgacaccaatgagcaaaatactttgtatggttctgg

SEQ ID NO: 83521 - DNA, 60 bp, Artificial
  Synthetic oligonucleotide
ctggggggtgcaccatcctcctgacaccaatgagcaaaatactttgtatggttctggtga

SEQ ID NO: 83522 - DNA, 60 bp, Artificial
  Synthetic oligonucleotide
gggtgtgcaccatcctcctgacaccaatgagcaaaatactctgtacggctctggtgatcg

SEQ ID NO: 83523 - DNA, 60 bp, Artificial
  Synthetic oligonucleotide
ggggtgtgcaccatcctcctgacaccaatgagcaaaatactttgtatggttctggtgatc

SEQ ID NO: 83524 - DNA, 60 bp, Artificial
  Synthetic oligonucleotide
ggtgtgcaccatcctcctgacaccaatgagcaaaatactctgtatggctctggcgatcgg

SEQ ID NO: 83525 - DNA, 60 bp, Artificial
  Synthetic oligonucleotide
gggtgtgcaccatcctcctgacaccaatgagcaaaatactttgtatggttctggtgatcg

SEQ ID NO: 83526 - DNA, 60 bp, Artificial
  Synthetic oligonucleotide
attggaagattctacatacagatgtgcactgaactcaaactcagcgaccatgaagggagg

SEQ ID NO: 83527 - DNA, 60 bp, Artificial
  Synthetic oligonucleotide
taatcactcaccgagtgacatccacatcatggcgtctcaaggcaccaaacggtcttatga

SEQ ID NO: 83528 - DNA, 60 bp, Artificial
  Synthetic oligonucleotide
gataatcactcaccgagtgacatccacatcatggcgtctcaaggcaccaaacggtcttat

SEQ ID NO: 83529 - DNA, 60 bp, Artificial
  Synthetic oligonucleotide
tggtcccgtccacttccgaaaccaagttaaaatacgccgccgggttgacataaacccagg

SEQ ID NO: 83530 - DNA, 60 bp, Artificial
  Synthetic oligonucleotide
ttgttgccctggaaaaccaacatacaattgatttaactgactcagaaatgaacaaactgt

SEQ ID NO: 83531 - DNA, 60 bp, Artificial
  Synthetic oligonucleotide
tgacaatgcctgcataggatcaatcagaaatggaacttatgaccatgatgtatacagaga

SEQ ID NO: 83532 - DNA, 60 bp, Artificial
  Synthetic oligonucleotide
caacgcggagcttcttgttgccctggagaaccaacatacaattgatttaactgactcaga

SEQ ID NO: 83533 - DNA, 60 bp, Artificial
  Synthetic oligonucleotide
cttgttgccctggagaaccaacatacaattgatttaactgactcagaaatgaacaaactg

SEQ ID NO: 83534 - DNA, 60 bp, Artificial
  Synthetic oligonucleotide
tgcctcatccggcaccctggaatttacccaagaaagcttcaattggactggagttgctca

SEQ ID NO: 83535 - DNA, 60 bp, Artificial
  Synthetic oligonucleotide
aggacaagcagcagatcttaaaagcactcaagcagcaatcaaccaaatcaccgggaaact

SEQ ID NO: 83536 - DNA, 60 bp, Artificial
  Synthetic oligonucleotide
ggacaagcagcagatcttaaaagcactcaagcagcaatcaaccaaatcaccgggaaactg

SEQ ID NO: 83537 - DNA, 60 bp, Artificial
  Synthetic oligonucleotide
aaccggatcacatatggggcctgtcccagatatgttaagcaaaacactctgaaattggca

SEQ ID NO: 83538 - DNA, 60 bp, Artificial
  Synthetic oligonucleotide
ggggcctgtcccagatatgttaagcaaaacactctgaaattggcaacagggatgcggaat

SEQ ID NO: 83539 - DNA, 60 bp, Artificial
  Synthetic oligonucleotide
actgggaaactgaatagagtaatcaagaaaacgaacgagaaattccatcaaatcgaaaaa

SEQ ID NO: 83540 - DNA, 60 bp, Artificial
  Synthetic oligonucleotide
gaccctcattgtgatgacttccaaaacaaggaatgggacctttttgttgaacgaagcaca

SEQ ID NO: 83541 - DNA, 60 bp, Artificial
  Synthetic oligonucleotide
aatcgaaaaagaattctcagaagtagaagggagaattcaggacctagagaaatacgttga

SEQ ID NO: 83542 - DNA, 60 bp, Artificial
  Synthetic oligonucleotide
ctcattgtgatgacttccaaaacaaggaatgggacctttttgttgaacgaagcacagcct

SEQ ID NO: 83543 - DNA, 60 bp, Artificial
  Synthetic oligonucleotide
ggacctagagaaatacgttgaagacactaaaatagatctctggtcttacaacgcggagct

SEQ ID NO: 83544 - DNA, 60 bp, Artificial
  Synthetic oligonucleotide
cactagttgcttcatccggcaccctggaatttacccaagaaagcttcaattggactggag

SEQ ID NO: 83545 - DNA, 60 bp, Artificial
  Synthetic oligonucleotide
cctctcttaggtcactagttgcttcatccggcaccctggaatttacccaagaaagcttca

SEQ ID NO: 83546 - DNA, 60 bp, Artificial
  Synthetic oligonucleotide
cctcatccggcaccctggaatttacccaagaaagcttcaattggactggagtcgctcagg

SEQ ID NO: 83547 - DNA, 60 bp, Artificial
  Synthetic oligonucleotide
aaacgaacgagaaattccatcaaatcgaaaaagaattctcagaagtagaagggagaattc

SEQ ID NO: 83548 - DNA, 60 bp, Artificial
  Synthetic oligonucleotide
catcagggagaattacagtctccaccaaaagaagccaacaaactgtaatcccaaatatcg

SEQ ID NO: 83549 - DNA, 56 bp, Artificial
  Synthetic oligonucleotide
gaattagaatacaaatatccagcgctgaacgtaactatgccaaacaattacaaatt

SEQ ID NO: 83550 - DNA, 58 bp, Artificial
  Synthetic oligonucleotide
ccaaatatcgggtccagaccctgggtacggggtgtctccagcataataagcatctatt

SEQ ID NO: 83551 - DNA, 60 bp, Artificial
  Synthetic oligonucleotide
ccgggaaactgaatagagtaatcaagaaaacgaacgagaaattccatcaaatcgaaaaag

SEQ ID NO: 83552 - DNA, 60 bp, Artificial
  Synthetic oligonucleotide
cgttgaagacactaaaatagatctctggtcttacaacgcagagcttcttgttgccctgga

SEQ ID NO: 83553 - DNA, 60 bp, Artificial
  Synthetic oligonucleotide
atacgttgaagacactaaaatagatctctggtcttacaacgcagagcttcttgttgccct

SEQ ID NO: 83554 - DNA, 60 bp, Artificial
  Synthetic oligonucleotide
cgctagtgaaaacaatcacggatgaccaaattgaagtgactaatgctactgagctggttc

SEQ ID NO: 83555 - DNA, 60 bp, Artificial
  Synthetic oligonucleotide
agctacattttatgtctgattttcgctcaaaaactccccggaagtgacaacagcatggca

SEQ ID NO: 83556 - DNA, 60 bp, Artificial
  Synthetic oligonucleotide
tagtgaaaacaatcacggatgaacagattgaagtgactaatgctactgagctggtccaga

SEQ ID NO: 83557 - DNA, 60 bp, Artificial
  Synthetic oligonucleotide
atgaagactatcattgcttttagctacattttatgtctgattttcgctcaaaaacttccc

SEQ ID NO: 83558 - DNA, 60 bp, Artificial
  Synthetic oligonucleotide
ctggtccagagttcctcaacaggtagaatatgcaacagtcctcaccaaatccttgatggg

SEQ ID NO: 83559 - DNA, 60 bp, Artificial
  Synthetic oligonucleotide
ctaatgctactgagctggttcagagttcctcaacaggtagaatatgcaacagtcctcacc

SEQ ID NO: 83560 - DNA, 60 bp, Artificial
  Synthetic oligonucleotide
tggaatgatgatgggcatgttcaacatgctaagtacagttttaggagtttcaatcctaaa

SEQ ID NO: 83561 - DNA, 60 bp, Artificial
  Synthetic oligonucleotide
ggaatgatgatgggcatgttcaacatgctaagtacggtcttaggagtctcaatcctgaat

SEQ ID NO: 83562 - DNA, 60 bp, Artificial
  Synthetic oligonucleotide
tgatgatcagataactgacatatgggcatacaatgctgaattgcttgttctattggaaaa

SEQ ID NO: 83563 - DNA, 60 bp, Artificial
  Synthetic oligonucleotide
caatgagccaagtggatatgcacaaacagactgtgtccttgaagcaatggctttccttga

SEQ ID NO: 83564 - DNA, 60 bp, Artificial
  Synthetic oligonucleotide
taatgagccaagtggatatgcacaaacagactgtgtccttgaagcaatggctttccttga

SEQ ID NO: 83565 - DNA, 60 bp, Artificial
  Synthetic oligonucleotide
tggcacagtgaaagaccggagcccctatagaactctaatgagtgtagaaataggacaatc

SEQ ID NO: 83566 - DNA, 57 bp, Artificial
  Synthetic oligonucleotide
acgagggatcttatttcttcggagacaatgcagaggaatatgacaattaaagaaaaa

SEQ ID NO: 83567 - DNA, 60 bp, Artificial
  Synthetic oligonucleotide
aaatgttgaaagtcccaaatgcagaaacaaacacccaatcgggcccaatcgcacatcagg

SEQ ID NO: 83568 - DNA, 60 bp, Artificial
  Synthetic oligonucleotide
gcctcctaataggaatagccaacttaggtttgaacatcggactccattataaggtaggtg

SEQ ID NO: 83569 - DNA, 60 bp, Artificial
  Synthetic oligonucleotide
ccacgggcagaaacaagaggattgtttggagcaatagctgggtttatagaaggaggatgg

SEQ ID NO: 83570 - DNA, 60 bp, Artificial
  Synthetic oligonucleotide
ttccacgggcagaaacaagaggattgtttggagcaatagctgggtttatagaaggaggat

SEQ ID NO: 83571 - DNA, 60 bp, Artificial
  Synthetic oligonucleotide
ccatcattgtggcgatggtgttctcacaagaggattgcatgataaaagcagtccgaggtg

SEQ ID NO: 83572 - DNA, 60 bp, Artificial
  Synthetic oligonucleotide
gaccaaatacaggacatctgggcatacaatgcagaattactagtgctgcttgaaaatcag

SEQ ID NO: 83573 - DNA, 60 bp, Artificial
  Synthetic oligonucleotide
ggacatctgggcatacaatgcagaattactagtgctgcttgaaaatcagaaaacactcga

SEQ ID NO: 83574 - DNA, 60 bp, Artificial
  Synthetic oligonucleotide
tgactaaggggattttgggatttgtgttcacgctcaccgtgcccagtgagcgaggactgc

SEQ ID NO: 83575 - DNA, 60 bp, Artificial
  Synthetic oligonucleotide
cacacgggaacatactgttctctaaatggggtcagcccagtgcatttaggagattgtagc

SEQ ID NO: 83576 - DNA, 60 bp, Artificial
  Synthetic oligonucleotide
ggccaggtctaatcaatggttggtacggttttcagcatcaaaacgaacagggaacaggga

SEQ ID NO: 83577 - DNA, 60 bp, Artificial
  Synthetic oligonucleotide
caatatacagctgcattgcaagcagtgttgtgctagtaggactcatactctctttcatca

SEQ ID NO: 83578 - DNA, 60 bp, Artificial
  Synthetic oligonucleotide
atcgaatagaggactgtttggagcaattgcaggatttatagaaggaggctggccaggtct

SEQ ID NO: 83579 - DNA, 60 bp, Artificial
  Synthetic oligonucleotide
gtggagaagcgcataaacatgcttgcagatagaatagatgatgctgtgacggatatttgg

SEQ ID NO: 83580 - DNA, 60 bp, Artificial
  Synthetic oligonucleotide
tcagtggaatcaggtcattcagcagaacggaattgatcccacctacttcctggggggaag

SEQ ID NO: 83581 - DNA, 60 bp, Artificial
  Synthetic oligonucleotide
actagagactggagttcgaccagggtacaatggacagaggagctggatgaagatctactg

SEQ ID NO: 83582 - DNA, 60 bp, Artificial
  Synthetic oligonucleotide
gagagtggtcatacctgattgaggatcctggggcgccccatgggctttgttaccctggag

SEQ ID NO: 83583 - DNA, 60 bp, Artificial
  Synthetic oligonucleotide
ttacatgagcaggtgcgaagagaattaaaggacaatgcagtagacgaagggaatgggtgt

SEQ ID NO: 83584 - DNA, 60 bp, Artificial
  Synthetic oligonucleotide
gataagaatgctctaggtgactgtcccaaatatataaagtctggccaactcaagctagcc

SEQ ID NO: 83585 - DNA, 60 bp, Artificial
  Synthetic oligonucleotide
gtcgacacgctccttgaaaatggggttccagttaccagctccgttgacctgattgaaaca

SEQ ID NO: 83586 - DNA, 58 bp, Artificial
  Synthetic oligonucleotide
ggaagggatgttctagttttgtggggaatacaccacccagtatctgtggaggagacaa

SEQ ID NO: 83587 - DNA, 60 bp, Artificial
  Synthetic oligonucleotide
agtgatccgtacacgctggtttccaccaaatcatggagcgagaagtataaactagagact

SEQ ID NO: 83588 - DNA, 60 bp, Artificial
  Synthetic oligonucleotide
catatgaccacactgagtatgcagaggagtcaaagttaaagaggcaggaaattaatggga

SEQ ID NO: 83589 - DNA, 60 bp, Artificial
  Synthetic oligonucleotide
ggaatccagcgagacacttaagatgaccattgcatctgtacctacttcgcgctacttggc

SEQ ID NO: 83590 - DNA, 60 bp, Artificial
  Synthetic oligonucleotide
cacttaagatgaccattgcatctgtacctacttcgcgctacttggctgacatgaccctcg

SEQ ID NO: 83591 - DNA, 60 bp, Artificial
  Synthetic oligonucleotide
cacttaagatgaccattgcatctgtacctacttcgagctacctagctgacatgaccctcg

SEQ ID NO: 83592 - DNA, 60 bp, Artificial
  Synthetic oligonucleotide
ggcaaagattgaaagcgacagagaatagtttcgaacaaataacatttatgcaagccttac

SEQ ID NO: 83593 - DNA, 60 bp, Artificial
  Synthetic oligonucleotide
gccccattccttgatcggctccgccgagatcaaaagtccctaaaaggaagaggcaacacc

SEQ ID NO: 83594 - DNA, 60 bp, Artificial
  Synthetic oligonucleotide
ccccattccttgatcggctccgccgagatcaaaagtccctaaaaggaagaggcaacaccc

SEQ ID NO: 83595 - DNA, 60 bp, Artificial
  Synthetic oligonucleotide
catccgcaaacggtttgcagacaatggattgggtgatgccccgttccttgatcggctccg

SEQ ID NO: 83596 - DNA, 60 bp, Artificial
  Synthetic oligonucleotide
tggattgggtgatgccccattccttgatcggctccgccgagatcaaaagtccctaaaagg

SEQ ID NO: 83597 - DNA, 60 bp, Artificial
  Synthetic oligonucleotide
ggaatccagcgagacacttaagatgaccattgcatctgtacctacttcgagctacctagc

SEQ ID NO: 83598 - DNA, 60 bp, Artificial
  Synthetic oligonucleotide
cggcaaagattgaaagcgacagagaatagtttcgaacaaataacatttatgcaagcctta

SEQ ID NO: 83599 - DNA, 60 bp, Artificial
  Synthetic oligonucleotide
cactgggaatttgatagcaccatggtatgcttttgcattgaacaaggggtctgactccgg

SEQ ID NO: 83600 - DNA, 60 bp, Artificial
  Synthetic oligonucleotide
ccactgggaatttgatagcaccatggtatgcttttgcattgaacaaggggtctgactccg

SEQ ID NO: 83601 - DNA, 60 bp, Artificial
  Synthetic oligonucleotide
gacactattggaccagggagacaccataacatttgaagccactgggaatttgatagcacc

SEQ ID NO: 83602 - DNA, 60 bp, Artificial
  Synthetic oligonucleotide
gaactattattggacactattggaccagggagacaccataacatttgaagccactgggaa

SEQ ID NO: 83603 - DNA, 60 bp, Artificial
  Synthetic oligonucleotide
ccaaacccctcatggggctttgaacagcagccttcctttccagaatgtacatcctatcac

SEQ ID NO: 83604 - DNA, 60 bp, Artificial
  Synthetic oligonucleotide
agtgccaaacccctcatggggctttgaacagcagccttcctttccagaatgtacatccta

SEQ ID NO: 83605 - DNA, 60 bp, Artificial
  Synthetic oligonucleotide
ggcaacaggactaagaaatgtcccatccattcaatccagaggactatttggagcaattgc

SEQ ID NO: 83606 - DNA, 60 bp, Artificial
  Synthetic oligonucleotide
tctgcagcctgaacgggatagctcccctacaactggggaagtgcaatgtggcgggatggc

SEQ ID NO: 83607 - DNA, 60 bp, Artificial
  Synthetic oligonucleotide
gaccgtgactcactcagtgaatctgctcgaagacaaccataatgggaaactctgcagcct

SEQ ID NO: 83608 - DNA, 60 bp, Artificial
  Synthetic oligonucleotide
tgttttgagttctaccacaaatgtgatgatgagtgcatggaaagtgtgaagaacggcaca

SEQ ID NO: 83609 - DNA, 60 bp, Artificial
  Synthetic oligonucleotide
ccacaaatgtgatgatgagtgcatggaaagtgtgaagaacggcacatatgactatcccaa

SEQ ID NO: 83610 - DNA, 60 bp, Artificial
  Synthetic oligonucleotide
ggactctggacttccatgactccaatgtgagaaatttatatgagaaagtcaaatcacaat

SEQ ID NO: 83611 - DNA, 60 bp, Artificial
  Synthetic oligonucleotide
ctggacttccatgactccaatgtgagaaatttatatgagaaagtcaaatcacaattgagg

SEQ ID NO: 83612 - DNA, 60 bp, Artificial
  Synthetic oligonucleotide
atcacaaataaggtgaattcggtaattgagaagatgaacactcaattcactgcagtgggc

SEQ ID NO: 83613 - DNA, 51 bp, Artificial
  Synthetic oligonucleotide
ggtcgatgatgggttcttggatgtttggacatataatgccgaactgctcgt

SEQ ID NO: 83614 - DNA, 60 bp, Artificial
  Synthetic oligonucleotide
gcagggatcaggatatgctgccgatcagaaaagcacgcagaatgcgattgacgggatcac

SEQ ID NO: 83615 - DNA, 60 bp, Artificial
  Synthetic oligonucleotide
aatgcgattgacgggatcacaaataaggtgaattcggtaattgagaagatgaacactcaa

SEQ ID NO: 83616 - DNA, 58 bp, Artificial
  Synthetic oligonucleotide
gactatttggagcaattgctggattcattgagggaggatggacaggcatgatagatgg

SEQ ID NO: 83617 - DNA, 60 bp, Artificial
  Synthetic oligonucleotide
atcagaatgagcagggatcaggatatgctgccgatcagaaaagcacgcagaatgcgattg

SEQ ID NO: 83618 - DNA, 60 bp, Artificial
  Synthetic oligonucleotide
actccggagatagcagctagacctaaagttagaggacaggcaggcagaatgaactattat

SEQ ID NO: 83619 - DNA, 60 bp, Artificial
  Synthetic oligonucleotide
ccggagatagcagctagacctaaagttagaggacaggcaggcagaatgaactattattgg

SEQ ID NO: 83620 - DNA, 60 bp, Artificial
  Synthetic oligonucleotide
gggggtgcatcaccctccaactgccagcgagcagcaaagtctatatcagaacgctgacgc

SEQ ID NO: 83621 - DNA, 60 bp, Artificial
  Synthetic oligonucleotide
ggggtgcatcaccctccaactgccagcgagcagcaaagtctatatcagaacgctgacgca

SEQ ID NO: 83622 - DNA, 60 bp, Artificial
  Synthetic oligonucleotide
acgctgacgcatatgtgtcagttggatcatcaaaatacaaccgaagattcactccggaga

SEQ ID NO: 83623 - DNA, 60 bp, Artificial
  Synthetic oligonucleotide
gtgtcagttggatcatcaaaatacaaccgaagattcactccggagatagcagctagacct

SEQ ID NO: 83624 - DNA, 60 bp, Artificial
  Synthetic oligonucleotide
ccgaaggcaagctcatggccaaatcatgagacaaccaaaggtgttacagccgcatgctct

SEQ ID NO: 83625 - DNA, 60 bp, Artificial
  Synthetic oligonucleotide
tggccaaatcatgagacaaccaaaggtgttacagccgcatgctcttactctggagccagc

SEQ ID NO: 83626 - DNA, 60 bp, Artificial
  Synthetic oligonucleotide
ctcagcaaatcatacacgaacaacaaggggaaggaagtgcttgtgctctggggggtgcat

SEQ ID NO: 83627 - DNA, 53 bp, Artificial
  Synthetic oligonucleotide
ctcagcaaatcatacacgaacaacaaggggaaggaagtgcttgtgctctgggg

SEQ ID NO: 83628 - DNA, 60 bp, Artificial
  Synthetic oligonucleotide
ggtcctacataatagaaacttccaattcggaaaacggaacatgctaccccggtgaattca

SEQ ID NO: 83629 - DNA, 60 bp, Artificial
  Synthetic oligonucleotide
ggatagctcccctacaactggggaagtgcaatgtggcgggatggctccttggcaatccag

SEQ ID NO: 83630 - DNA, 60 bp, Artificial
  Synthetic oligonucleotide
ctatcccaaatattcagaagaatccaaattgaaccgagaagaaatagacggagtgaaact

SEQ ID NO: 83631 - DNA, 60 bp, Artificial
  Synthetic oligonucleotide
gaacggcacatatgactatcccaaatattcagaagaatccaaattgaaccgagaagaaat

SEQ ID NO: 83632 - DNA, 60 bp, Artificial
  Synthetic oligonucleotide
gagaagaaatagacggagtgaaactagaatcaatgggagtttaccaaattttggcgatct

SEQ ID NO: 83633 - DNA, 60 bp, Artificial
  Synthetic oligonucleotide
acgtgggatcaatgaccgaaacttctggagaggtgaaaatggacgaagaacaaggattgc

SEQ ID NO: 83634 - DNA, 60 bp, Artificial
  Synthetic oligonucleotide
cgtgggatcaatgaccgaaacttctggagaggtgaaaatggacgaaggacaaggattgca

SEQ ID NO: 83635 - DNA, 60 bp, Artificial
  Synthetic oligonucleotide
acgtgggatcaatgaccgaaacttctggagaggtgaaaatggacgaaggacaaggattgc

SEQ ID NO: 83636 - DNA, 60 bp, Artificial
  Synthetic oligonucleotide
cgtgggatcaatgaccgaaacttctggagaggtgaaaatggacgaagaacaaggattgca

SEQ ID NO: 83637 - DNA, 60 bp, Artificial
  Synthetic oligonucleotide
gactggaaaatctgggtgtatatcagatccttgctatttatagtacggtatcgagcagtc

SEQ ID NO: 83638 - DNA, 60 bp, Artificial
  Synthetic oligonucleotide
atcggaagattctacatacagatgtgcactgaactcaaactgagtgacaatgaggggagg

SEQ ID NO: 83639 - DNA, 60 bp, Artificial
  Synthetic oligonucleotide
atcggaagattctacatacagatgtgcactgaactcaaactaagtgacaacgaggggagg

SEQ ID NO: 83640 - DNA, 60 bp, Artificial
  Synthetic oligonucleotide
attggaagattctacatacagatgtgcactgaactcaagctcagtgacaatgagggaaga

SEQ ID NO: 83641 - DNA, 55 bp, Artificial
  Synthetic oligonucleotide
ctcattgttcaggcacttagggacaacctggaacctggaactttcgatcttgggg

SEQ ID NO: 83642 - DNA, 60 bp, Artificial
  Synthetic oligonucleotide
ctcattgttcaggcacttagggacaacctggaacctggtaccttcgatcttggagggcta

SEQ ID NO: 83643 - DNA, 60 bp, Artificial
  Synthetic oligonucleotide
cctcattgttcaggcacttagggacaacctggaacctggtacattcgatcttggagggct

SEQ ID NO: 83644 - DNA, 60 bp, Artificial
  Synthetic oligonucleotide
tgaatgggagttgttattgggtaatgacggatggtcctgcgaacaatcaggctagctaca

SEQ ID NO: 83645 - DNA, 60 bp, Artificial
  Synthetic oligonucleotide
gggaactgttattgggtaatgacggatggtcctgcgaacagtcaggctagttacaagatt

SEQ ID NO: 83646 - DNA, 60 bp, Artificial
  Synthetic oligonucleotide
gggagttgttattgggtaatgacggatggtcctgcgaacaatcaggctagctacaagatt

SEQ ID NO: 83647 - DNA, 60 bp, Artificial
  Synthetic oligonucleotide
ggagactgttattgggtaatgacggatggtcctgcgaataatcaggctagttacaagatt

SEQ ID NO: 83648 - DNA, 60 bp, Artificial
  Synthetic oligonucleotide
gataatcactcactgagtgacatccacatcatggcgtctcaaggcaccaaacggtcttat

SEQ ID NO: 83649 - DNA, 60 bp, Artificial
  Synthetic oligonucleotide
ctgacagtcagacagcgaccaaaagaattcggatggccatcaattagtgtcgaatagttt

SEQ ID NO: 83650 - DNA, 60 bp, Artificial
  Synthetic oligonucleotide
cttactgacagtcagacagcgaccaaaagaattcggatggccatcaattagtgtcgaata

SEQ ID NO: 83651 - DNA, 60 bp, Artificial
  Synthetic oligonucleotide
ggagactgttattgggtaatgacggatggtcctgcgaacaatcaggctagttacaggatt

SEQ ID NO: 83652 - DNA, 60 bp, Artificial
  Synthetic oligonucleotide
ggcacggttcaaatcgaccatgggtgtctttcaatcaaaatctagagtatcaaatagggt

SEQ ID NO: 83653 - DNA, 60 bp, Artificial
  Synthetic oligonucleotide
aattggcacggttcaaatcgaccatgggtgtctttcaatcaaaatctagagtatcaaata

SEQ ID NO: 83654 - DNA, 60 bp, Artificial
  Synthetic oligonucleotide
gaaacgggactctagcatacttactgacagtcagacagcgaccaaaagaattcggatggc

SEQ ID NO: 83655 - DNA, 60 bp, Artificial
  Synthetic oligonucleotide
gaagaactcagggcctttttcagctctgctaattcctaccaaagaatccagatcttccca

SEQ ID NO: 83656 - DNA, 59 bp, Artificial
  Synthetic oligonucleotide
ttttcagctctgctaattcctaccaaagaatccagatcttcccagacagaatttggaat

SEQ ID NO: 83657 - DNA, 60 bp, Artificial
  Synthetic oligonucleotide
ttctgagcatctacagcagtgttgcctcaagcttagttttactgctcatgattattgggg

SEQ ID NO: 83658 - DNA, 60 bp, Artificial
  Synthetic oligonucleotide
ttttgagcatctacagcagtgttgcctcaagcttagttctactgctcatgattattgggg

SEQ ID NO: 83659 - DNA, 60 bp, Artificial
  Synthetic oligonucleotide
aacctttccagaacactagtaagcactatattgggaaatgccccaaatatataccatcag

SEQ ID NO: 83660 - DNA, 60 bp, Artificial
  Synthetic oligonucleotide
cagaacactagtaagcactatattgggaaatgccccaaatatataccatcaggaagcctg

SEQ ID NO: 83661 - DNA, 60 bp, Artificial
  Synthetic oligonucleotide
ttctacatataaaattctgagcatctacagcagtgttgcctcaagcttagttctactgtt

SEQ ID NO: 83662 - DNA, 60 bp, Artificial
  Synthetic oligonucleotide
tctacatataaaattctgagcatctacagcagtgttgcctcaagcttagttctactgctc

SEQ ID NO: 83663 - DNA, 60 bp, Artificial
  Synthetic oligonucleotide
tacatataaaattctgagcatctacagcagtgttgcctcaagcttagttctactgctcat

SEQ ID NO: 83664 - DNA, 60 bp, Artificial
  Synthetic oligonucleotide
catataaaattctgagcatctacagcagtgttgcctcaagcttagttctactgctcatga

SEQ ID NO: 83665 - DNA, 60 bp, Artificial
  Synthetic oligonucleotide
cgtataaaattctgagcatctacagcagtgttgcctcaagcttagttctactgctcatga

SEQ ID NO: 83666 - DNA, 60 bp, Artificial
  Synthetic oligonucleotide
ttctgagcatctacagcagtgttgcctcaagcttagttctactgttcatgattattgggg

SEQ ID NO: 83667 - DNA, 60 bp, Artificial
  Synthetic oligonucleotide
gcttagttctactgctcatgattattgggggtttcattttcgggtgtcaaaatggaaatg

SEQ ID NO: 83668 - DNA, 60 bp, Artificial
  Synthetic oligonucleotide
tgcctcaagcttagttctactgctcatgattattgggggtttcattttcgggtgtcaaaa

SEQ ID NO: 83669 - DNA, 60 bp, Artificial
  Synthetic oligonucleotide
tactgctcatgattattgggggtttcattttcgggtgtcaaaatggaaatgttcgttgta

SEQ ID NO: 83670 - DNA, 60 bp, Artificial
  Synthetic oligonucleotide
ttctactgttcatgattattgggggtttcattttcgggtgtcaaaatggaaatgttcgtt

SEQ ID NO: 83671 - DNA, 60 bp, Artificial
  Synthetic oligonucleotide
attattgggggtttcattttcgggtgtcaaaatggaaatgttcgttgtactttctgtatt

SEQ ID NO: 83672 - DNA, 60 bp, Artificial
  Synthetic oligonucleotide
ctgctcatgattattgggggtttcattttcgggtgtcaaaatggaaatgttcgttgtact

SEQ ID NO: 83673 - DNA, 51 bp, Artificial
  Synthetic oligonucleotide
ggggtttcattttcgggtgtcaaaatggaaatgttcgttgtactttctgta

SEQ ID NO: 83674 - DNA, 60 bp, Artificial
  Synthetic oligonucleotide
cttattgcacctgaatatggtcatttaatcacagggaaatcacatggcagaatactcaag

SEQ ID NO: 83675 - DNA, 60 bp, Artificial
  Synthetic oligonucleotide
caatggtaaccttattgcacctgaatatggtcatttaatcacagggaaatcacatggcag

SEQ ID NO: 83676 - DNA, 60 bp, Artificial
  Synthetic oligonucleotide
aatgggaatcttattgcacctgaatatggtcatttaatcacagggaaatcacatggcagg

SEQ ID NO: 83677 - DNA, 60 bp, Artificial
  Synthetic oligonucleotide
agcaaaagcaggggataattctatcaaccatgaagaccatcattgctttgagctacattc

SEQ ID NO: 83678 - DNA, 60 bp, Artificial
  Synthetic oligonucleotide
gtttcttcagtagactgaactggttataccaatcagaaaacaaatacccagcgctgaacg

SEQ ID NO: 83679 - DNA, 60 bp, Artificial
  Synthetic oligonucleotide
gttgaacgcagtaaggctttcagcaactgttacccttatgatatgcaggattatgtgtcc

SEQ ID NO: 83680 - DNA, 60 bp, Artificial
  Synthetic oligonucleotide
ttatgatatgcaggattatgtgtcccttaggtcactagttgcctcgtcgggcaccctgga

SEQ ID NO: 83681 - DNA, 60 bp, Artificial
  Synthetic oligonucleotide
gcaggattatgtgtcccttaggtcactagttgcctcgtcgggcaccctggagttcaccaa

SEQ ID NO: 83682 - DNA, 59 bp, Artificial
  Synthetic oligonucleotide
gcaccctggagttcaccaatgaaggcttcaattggaccggagtcactcagagtggggga

SEQ ID NO: 83683 - DNA, 60 bp, Artificial
  Synthetic oligonucleotide
taggatttgcaacagtcctcaccgaatccttgatgggggaaactgcacactgatagatgc

SEQ ID NO: 83684 - DNA, 60 bp, Artificial
  Synthetic oligonucleotide
tgatagatgccctattgggagatcctcattgtgatgcctttcaaaatgagaaatgggacc

SEQ ID NO: 83685 - DNA, 60 bp, Artificial
  Synthetic oligonucleotide
aaatgggacctttttgttgaacgcagtaaggctttcagcaactgttacccttatgatatg

SEQ ID NO: 83686 - DNA, 60 bp, Artificial
  Synthetic oligonucleotide
caagctgcaatagaccaaatcaatgggaaattaaatagggtgatcgagaaaactaatgag

SEQ ID NO: 83687 - DNA, 60 bp, Artificial
  Synthetic oligonucleotide
gaaggaagaattcaggacctcgagaaatacgttgaggacactaaaatagatctctggtcc

SEQ ID NO: 83688 - DNA, 60 bp, Artificial
  Synthetic oligonucleotide
gggaatggtagacggatggtacggcttcaggcatcaaaattctgagggcacaggacaagc

SEQ ID NO: 83689 - DNA, 60 bp, Artificial
  Synthetic oligonucleotide
tcagatgcacctattggcacctgcagttctgaatgcatcactccgaatggaagcataccc

SEQ ID NO: 83690 - DNA, 60 bp, Artificial
  Synthetic oligonucleotide
acacttaagttggcaacggggatgcgaaatataccagagaaacaaaacagaggcatattt

SEQ ID NO: 83691 - DNA, 60 bp, Artificial
  Synthetic oligonucleotide
ctcctcggggatatttcaaaatacacgctgggaaaagctcaataatgaggtcagatgcac

SEQ ID NO: 83692 - DNA, 60 bp, Artificial
  Synthetic oligonucleotide
agctcaataatgaggtcagatgcacctattggcacctgcagttctgaatgcatcactccg

SEQ ID NO: 83693 - DNA, 60 bp, Artificial
  Synthetic oligonucleotide
taaaatagatctctggtcctataatgcagaacttcttgttgctctggagaatcaacatac

SEQ ID NO: 83694 - DNA, 60 bp, Artificial
  Synthetic oligonucleotide
ggtcctataatgcagaacttcttgttgctctggagaatcaacatacagttgatctgactg

SEQ ID NO: 83695 - DNA, 59 bp, Artificial
  Synthetic oligonucleotide
aacattaggtgcaacatttgtatttgagtgtattaattaaaaacacccttgtttctact

SEQ ID NO: 83696 - DNA, 60 bp, Artificial
  Synthetic oligonucleotide
gacaaactatacatttggggagtccaccacccgagcacggacagagaacagaccaatcta

SEQ ID NO: 83697 - DNA, 60 bp, Artificial
  Synthetic oligonucleotide
caatgctactgagctagtccagagttcctcagtgggtaggatttgcaacagtcctcaccg

SEQ ID NO: 83698 - DNA, 60 bp, Artificial
  Synthetic oligonucleotide
caggttgaagtgaccaatgctactgagctagtccagagttcctcagtgggtaggatttgc

SEQ ID NO: 83699 - DNA, 60 bp, Artificial
  Synthetic oligonucleotide
tttcaaaatatatcacaaatgcgacaatacttgtatagggtcaatcagaaatggaactta

SEQ ID NO: 83700 - DNA, 60 bp, Artificial
  Synthetic oligonucleotide
ccgaaaatgaaaaaagcacagcaacgctttgcctggggcatcatgcagtgccaaacggaa

SEQ ID NO: 83701 - DNA, 60 bp, Artificial
  Synthetic oligonucleotide
ggggataattctatcaaccatgaagaccatcattgctttgagctacattcttcgtctggt

SEQ ID NO: 83702 - DNA, 60 bp, Artificial
  Synthetic oligonucleotide
agtgaaaccaggagatacactgttaattaccagtaatgggaatctaattgctcctcgggg

SEQ ID NO: 83703 - DNA, 60 bp, Artificial
  Synthetic oligonucleotide
gttcgaggatcagggagagtcacggtctctaccaagagaagccagcaaactgtgatccca

SEQ ID NO: 83704 - DNA, 60 bp, Artificial
  Synthetic oligonucleotide
gaccaatctatatgttcgaggatcagggagagtcacggtctctaccaagagaagccagca

SEQ ID NO: 83705 - DNA, 60 bp, Artificial
  Synthetic oligonucleotide
tatctattggacgatagtgaaaccaggagatacactgttaattaccagtaatgggaatct

SEQ ID NO: 83706 - DNA, 53 bp, Artificial
  Synthetic oligonucleotide
gaagccagcaaactgtgatcccaaacatcggaccgggaccctgggtaaggggc

SEQ ID NO: 83707 - DNA, 60 bp, Artificial
  Synthetic oligonucleotide
cccagcgctgaacgtcactatgccaaacaatggcaattttgacaaactatacatttgggg

SEQ ID NO: 83708 - DNA, 60 bp, Artificial
  Synthetic oligonucleotide
aaaacaaatacccagcgctgaacgtcactatgccaaacaatggcaattttgacaaactat

SEQ ID NO: 83709 - DNA, 60 bp, Artificial
  Synthetic oligonucleotide
tggggagtccaccacccgagcacggacagagaacagaccaatctatatgttcgaggatca

SEQ ID NO: 83710 - DNA, 60 bp, Artificial
  Synthetic oligonucleotide
tgctctgtgttgttttgctggggttcattatgtgggcctgccaaaaaggcaacattaggt

SEQ ID NO: 83711 - DNA, 60 bp, Artificial
  Synthetic oligonucleotide
tttcaaatcaaagatgttgtgctgaaatcaggatacaaaaactgggtcctgtggatttcc

SEQ ID NO: 83712 - DNA, 61 bp, Artificial
  Synthetic oligonucleotide
ccatgatatatacagagatgaagcattaaacaaccgatttcaaatcaaagatgttgtgctg

SEQ ID NO: 83713 - DNA, 60 bp, Artificial
  Synthetic oligonucleotide
atggaacttatgaccatgatatatacagagatgaagcattaaacaaccgatttcaaatca

SEQ ID NO: 83714 - DNA, 60 bp, Artificial
  Synthetic oligonucleotide
cacaaatgcgacaatacttgtatagggtcaatcagaaatggaacttatgaccatgatata

SEQ ID NO: 83715 - DNA, 60 bp, Artificial
  Synthetic oligonucleotide
atgggaatctaattgctcctcggggatatttcaaaatacacgctgggaaaagctcaataa

SEQ ID NO: 83716 - DNA, 60 bp, Artificial
  Synthetic oligonucleotide
ttgagggaaaatgctgaggacatgggaaatggttgtttcaaaatatatcacaaatgcgac

SEQ ID NO: 83717 - DNA, 60 bp, Artificial
  Synthetic oligonucleotide
aaaacaaggagacaattgagggaaaatgctgaggacatgggaaatggttgtttcaaaata

SEQ ID NO: 83718 - DNA, 60 bp, Artificial
  Synthetic oligonucleotide
atcaacatacagttgatctgactgactcggaaatgaacaaactatttgaaaaaacaagga

SEQ ID NO: 83719 - DNA, 56 bp, Artificial
  Synthetic oligonucleotide
agacaatctgaacaaaagaatggaagatggatttttagacgtgtggacatacaatg

SEQ ID NO: 83720 - DNA, 60 bp, Artificial
  Synthetic oligonucleotide
agatgcgactgctggtctcacccacttgatgatctggcattccaatttgaatgacgccac

SEQ ID NO: 83721 - DNA, 60 bp, Artificial
  Synthetic oligonucleotide
gatgcgactgctggtctcacccacttgatgatctggcattccaatttgaatgacgccacg

SEQ ID NO: 83722 - DNA, 60 bp, Artificial
  Synthetic oligonucleotide
ggaaaatctgggagtataccaaatccttgctatttatagtacggtatcgagcagtctggt

SEQ ID NO: 83723 - DNA, 60 bp, Artificial
  Synthetic oligonucleotide
cgtggaatctaatggaaacctaatcgccccttggtatgcatacaaatttgtcagcaccaa

SEQ ID NO: 83724 - DNA, 60 bp, Artificial
  Synthetic oligonucleotide
gtggaatctaatgggaacctaatcgccccttggtatgcatacaaatttgtcagcaccaat

SEQ ID NO: 83725 - DNA, 60 bp, Artificial
  Synthetic oligonucleotide
ctggggtgtgcaccatcctcctgacaccaatgagcaaaacactttgtatggctctggtga

SEQ ID NO: 83726 - DNA, 60 bp, Artificial
  Synthetic oligonucleotide
tggtgtgaaacttgaggagaactctacatataaaattctgagcatctacagcagtgttgc

SEQ ID NO: 83727 - DNA, 60 bp, Artificial
  Synthetic oligonucleotide
acaattacgagacaatgccaatgatctggggaatgggtgctttgaattttggcataagtg

SEQ ID NO: 83728 - DNA, 60 bp, Artificial
  Synthetic oligonucleotide
aactacgagacaatgccaatgatctggggaatgggtgctttgaattttggcataagtgtg

SEQ ID NO: 83729 - DNA, 60 bp, Artificial
  Synthetic oligonucleotide
tgtgatgggaatgatcggaatattgcctgacatgaccccaagtactgagatgtcgctgag

SEQ ID NO: 83730 - DNA, 60 bp, Artificial
  Synthetic oligonucleotide
tgtggaatctaatggaaatctaatcgctccttggtatgcatacaaatttgtcagcaccaa

SEQ ID NO: 83731 - DNA, 60 bp, Artificial
  Synthetic oligonucleotide
atcggctgacatgagcattggagtgacagtgataaagaacaacatgataaacaatgacct

SEQ ID NO: 83732 - DNA, 60 bp, Artificial
  Synthetic oligonucleotide
atgcaattggggtcctcatcggaggacttgaatggaatgataatacagttcgagtctctg

SEQ ID NO: 83733 - DNA, 60 bp, Artificial
  Synthetic oligonucleotide
aaaatgcaattggggtcctcatcggaggacttgaatggaatgataatacagttcgagtct

SEQ ID NO: 83734 - DNA, 60 bp, Artificial
  Synthetic oligonucleotide
acatactgacgaggatgtcaaaaatgcaattggggtcctcatcggagggcttgaatggaa

SEQ ID NO: 83735 - DNA, 60 bp, Artificial
  Synthetic oligonucleotide
acatactaatgaggatgtcaaaaatgcaattggggtcctcgtcggaggacttgaatggaa

SEQ ID NO: 83736 - DNA, 60 bp, Artificial
  Synthetic oligonucleotide
acatactaatgaggatgtcaaaaatgcaattggggtcctcatcggaggacttgaatggaa

SEQ ID NO: 83737 - DNA, 60 bp, Artificial
  Synthetic oligonucleotide
acataatgacgaggatgtcaaaaatgcaattggggtcctcatcggaggacttgaatggaa

SEQ ID NO: 83738 - DNA, 60 bp, Artificial
  Synthetic oligonucleotide
gagaggacaagcatttggacctctagtagctccacggtattttgtggtgtttcaagtgag

SEQ ID NO: 83739 - DNA, 60 bp, Artificial
  Synthetic oligonucleotide
caaacaccgtgtcaagctttcaggtagactgctttctttggcatgtccgcaaacgatttg

SEQ ID NO: 83740 - DNA, 60 bp, Artificial
  Synthetic oligonucleotide
gaaagcatgaattttgccaaaagtccggaaattgcggctaggcctgctgtgaatggtcaa

SEQ ID NO: 83741 - DNA, 60 bp, Artificial
  Synthetic oligonucleotide
acatttatgcaagccttacaactactgcttgaagtggagcaagagataagaactttctcg

SEQ ID NO: 83742 - DNA, 58 bp, Artificial
  Synthetic oligonucleotide
aaaacaccgatcttgaggcgctcatggaatggctaaagacaagaccaatcctgtcacc

SEQ ID NO: 83743 - DNA, 60 bp, Artificial
  Synthetic oligonucleotide
ttctgggccatgtccaatggatcttgcagatgcaacatttgtatataattagcaaaaaca

SEQ ID NO: 83744 - DNA, 60 bp, Artificial
  Synthetic oligonucleotide
ttgctgcctttctgttctgggccatgtccaatgggtcttgcaggtgcaacatttgtatat

SEQ ID NO: 83745 - DNA, 60 bp, Artificial
  Synthetic oligonucleotide
gctgcctttctgttctgggccatgtccaatgggtcttgcaggtgcaacatttgtatataa

SEQ ID NO: 83746 - DNA, 60 bp, Artificial
  Synthetic oligonucleotide
atcgaagggctggtctatggcaatccttcttgtgatctgctattgggagggaaagaatgg

SEQ ID NO: 83747 - DNA, 60 bp, Artificial
  Synthetic oligonucleotide
gggctggtctatggcaatccttcttgtgatctgctattgggagggaaagaatggtcctac

SEQ ID NO: 83748 - DNA, 60 bp, Artificial
  Synthetic oligonucleotide
gggctgtttggtgctatagctggattcatagaaggaggttggccaggactagttgctgga

SEQ ID NO: 83749 - DNA, 60 bp, Artificial
  Synthetic oligonucleotide
catagctggattcatagaaggaggttggccaggactagttgctggctggtatggtttcca

SEQ ID NO: 83750 - DNA, 60 bp, Artificial
  Synthetic oligonucleotide
gaaagcatgaattttgccaaaagtccggaaattgcggctagacctgctgtgaatggtcaa

SEQ ID NO: 83751 - DNA, 60 bp, Artificial
  Synthetic oligonucleotide
aataaagcgccactggatctaatggactgcaccactgagggttggatccttggaaatccc

SEQ ID NO: 83752 - DNA, 60 bp, Artificial
  Synthetic oligonucleotide
ggaatcggaagattctacatacagatgtgcactgaactcaagctcagtgacaatgaggga

SEQ ID NO: 83753 - DNA, 60 bp, Artificial
  Synthetic oligonucleotide
tcacgaatgaccaaattgaagtgactaatgctactgaattggttcagagttcctcaacag

SEQ ID NO: 83754 - DNA, 60 bp, Artificial
  Synthetic oligonucleotide
tgctgtggtgatgccagctcatggcccagccaagagcatggaatatgatgctgttgctac

SEQ ID NO: 83755 - DNA, 60 bp, Artificial
  Synthetic oligonucleotide
attgcatcaatagtcataggaataatatcagtgacaaaagaaagcagtatatcatcaccc

SEQ ID NO: 83756 - DNA, 60 bp, Artificial
  Synthetic oligonucleotide
atcaatagtcataggaataatatcagtgacaaaagaaagcagtatatcatcaccctgcaa

SEQ ID NO: 83757 - DNA, 60 bp, Artificial
  Synthetic oligonucleotide
atcaatagccataggaataatatcagtgacaaaagaaagcagtatatcatcaccctgcaa

SEQ ID NO: 83758 - DNA, 60 bp, Artificial
  Synthetic oligonucleotide
catcggttaccatgcaaacaactcgacaacacaagtggacacaatattagagaagaatgt

SEQ ID NO: 83759 - DNA, 60 bp, Artificial
  Synthetic oligonucleotide
gagaatagattctgcagagtcttgaataaagcaccactggatctaatggactgcaccact

SEQ ID NO: 83760 - DNA, 60 bp, Artificial
  Synthetic oligonucleotide
gatatgcacaaacagactgcgtcctggaagcaatggctttccttgaagagtcccacccag

SEQ ID NO: 83761 - DNA, 60 bp, Artificial
  Synthetic oligonucleotide
agtggatatgcacaaacagactgcgtcctggaagcaatggctttccttgaagagtcccac

SEQ ID NO: 83762 - DNA, 60 bp, Artificial
  Synthetic oligonucleotide
caaattgtggttgacaatttgaattggtcaggatacagtggttctttcacactacctgtg

SEQ ID NO: 83763 - DNA, 51 bp, Artificial
  Synthetic oligonucleotide
gagggttgttcggggccatagctgggtttatagaaggaggatggacaggca

SEQ ID NO: 83764 - DNA, 59 bp, Artificial
  Synthetic oligonucleotide
agtgctcacaggcaacctccaaacattgaaaataagagtacatgaaggatatgaggaat

SEQ ID NO: 83765 - DNA, 60 bp, Artificial
  Synthetic oligonucleotide
gcagggtagataatcactcactgagtgacatccacatcatggcgtctcaaggcaccaaac

SEQ ID NO: 83766 - DNA, 53 bp, Artificial
  Synthetic oligonucleotide
cactactctagtggaagagacttgtgcccaataaaggggtgggcacctctgag

SEQ ID NO: 83767 - DNA, 60 bp, Artificial
  Synthetic oligonucleotide
ctgtgtcaagctttcaggtagactgctttctttggcacgtccgcaaaagatttgcagacc

SEQ ID NO: 83768 - DNA, 60 bp, Artificial
  Synthetic oligonucleotide
cagcttcactgagtcccggaatgatgatgggcatgttcaacatgctaagtacagttttgg

SEQ ID NO: 83769 - DNA, 60 bp, Artificial
  Synthetic oligonucleotide
gtacggcttcattgagtcccggaatgatgatgggcatgttcaacatgctaagtacagttt

SEQ ID NO: 83770 - DNA, 60 bp, Artificial
  Synthetic oligonucleotide
aacattctcaaagggaaattccaaacagcagcacaacgagcaatgatggaccaggtgaga

SEQ ID NO: 83771 - DNA, 60 bp, Artificial
  Synthetic oligonucleotide
gcgatcgatatgtcaggatgggaactgaaagcatgaattttgccaagagcccggaaattg

SEQ ID NO: 83772 - DNA, 60 bp, Artificial
  Synthetic oligonucleotide
atgtcaggatgggaactgaaagcatgaattttgccagaagtccggaaattgcggctagac

SEQ ID NO: 83773 - DNA, 60 bp, Artificial
  Synthetic oligonucleotide
gtcaggatgggaactgaaagcatgaattttgccaaaagtccggaaattgcggctaggcct

SEQ ID NO: 83774 - DNA, 60 bp, Artificial
  Synthetic oligonucleotide
ccgggaagtcagacaagatctgcattggatatcatgccaacaattcaacaacacaagtgg

SEQ ID NO: 83775 - DNA, 60 bp, Artificial
  Synthetic oligonucleotide
ccggaaggtcagacaagatctgcattggatatcatgccaacaattcaacaacacaagtgg

SEQ ID NO: 83776 - DNA, 60 bp, Artificial
  Synthetic oligonucleotide
ctcgaagacaaccataatgggaaactctgcaacctgaacggaatagccccactacaacta

SEQ ID NO: 83777 - DNA, 60 bp, Artificial
  Synthetic oligonucleotide
agtgaatctgctcgaagacaaccataatgggaaactctgcagcctgaacgggatagctcc

SEQ ID NO: 83778 - DNA, 60 bp, Artificial
  Synthetic oligonucleotide
gcttacgaaagaatgtgcaacattctcaaagggaaattccaaacagcagcacaacgagca

SEQ ID NO: 83779 - DNA, 60 bp, Artificial
  Synthetic oligonucleotide
gcaaaagcagggtgctaaagacataatggattccaacacgataacctcgtttcaggtaga

SEQ ID NO: 83780 - DNA, 60 bp, Artificial
  Synthetic oligonucleotide
catggaatggctaaagacaagaccaatcctgtcacctctgactaaggggatcttagggtt

SEQ ID NO: 83781 - DNA, 60 bp, Artificial
  Synthetic oligonucleotide
cattgttcaggcacttagggacaacctggaacctggaaccttcgatattggggggctata

SEQ ID NO: 83782 - DNA, 53 bp, Artificial
  Synthetic oligonucleotide
cattgttcaggcacttagggacaacctggaacctggaaccttcgatattgggg

SEQ ID NO: 83783 - DNA, 60 bp, Artificial
  Synthetic oligonucleotide
ttgttcaggcacttagggacaacctggaacctggtaccttcgatcttggagggctatatg

SEQ ID NO: 83784 - DNA, 60 bp, Artificial
  Synthetic oligonucleotide
caggacgttctttcttactcaaggttccctactcaatgacaaacattctaatggcacagt

SEQ ID NO: 83785 - DNA, 60 bp, Artificial
  Synthetic oligonucleotide
aatgtgagccctctatggataggagaatgccccaaatatgtgaaaagtgaaagtttgagg

SEQ ID NO: 83786 - DNA, 60 bp, Artificial
  Synthetic oligonucleotide
aataaaacatttcagaatgtgagccctctatggataggagaatgccccaaatatgtgaaa

SEQ ID NO: 83787 - DNA, 60 bp, Artificial
  Synthetic oligonucleotide
gcccagccaagagcatggaatatgatgctgttgctactacgcactcctggatccccaaga

SEQ ID NO: 83788 - DNA, 60 bp, Artificial
  Synthetic oligonucleotide
gcccagccaagagcatggaatatgatgctgttgctactacacactcatggatccctaaga

SEQ ID NO: 83789 - DNA, 60 bp, Artificial
  Synthetic oligonucleotide
ccgtgtcaagctttcaggtagactgctttctttggcatgtccgcaaacgatttgcagacc

SEQ ID NO: 83790 - DNA, 60 bp, Artificial
  Synthetic oligonucleotide
gaattgggtctcgaggcgaagtatttgtcatacgggagcctttcatatcatgctccatta

SEQ ID NO: 83791 - DNA, 60 bp, Artificial
  Synthetic oligonucleotide
cgaggcgaagtatttgtcatacgggagcctttcatatcatgctccattagtgaatgcagg

SEQ ID NO: 83792 - DNA, 60 bp, Artificial
  Synthetic oligonucleotide
ggtgtgggatgctaatggatgggtgtcaacagacaaggattcaaatggtgtacaggatat

SEQ ID NO: 83793 - DNA, 60 bp, Artificial
  Synthetic oligonucleotide
tacgggagcctttcatatcatgctccattagtgaatgcaggactttcttcttaactcagg

SEQ ID NO: 83794 - DNA, 60 bp, Artificial
  Synthetic oligonucleotide
ctttgaaatggtgtgggatgctaatggatgggtgtcgacagacaaggattcaaatggtgt

SEQ ID NO: 83795 - DNA, 60 bp, Artificial
  Synthetic oligonucleotide
gatggtgtgggatgctaatggatgggtgtcgacagacaaggattcaaatggtgtacagga

SEQ ID NO: 83796 - DNA, 60 bp, Artificial
  Synthetic oligonucleotide
accattgaagagctcagacggcagaaatagtgaatttggcttgtccttcatgaaaaaatg

SEQ ID NO: 83797 - DNA, 60 bp, Artificial
  Synthetic oligonucleotide
aatcagagtaccattacctatgaaaataatacctgggtcaatcagacgtatttgaacatc

SEQ ID NO: 83798 - DNA, 60 bp, Artificial
  Synthetic oligonucleotide
ggattagccactcaattcaaactggagaccaaaaacgcccagaaacatgtaatcagagta

SEQ ID NO: 83799 - DNA, 60 bp, Artificial
  Synthetic oligonucleotide
tgttttactgtgatgactgatggcccgagcaataggcaggcttcatacaggattttcagg

SEQ ID NO: 83800 - DNA, 60 bp, Artificial
  Synthetic oligonucleotide
gtgacatactaagaacacaggagtctgaatgtgcctgcataaatggttcatgttttactg

SEQ ID NO: 83801 - DNA, 60 bp, Artificial
  Synthetic oligonucleotide
gactgatggcccgagcaataggcaggcttcatacaggattttcaggatagagaaagggag

SEQ ID NO: 83802 - DNA, 60 bp, Artificial
  Synthetic oligonucleotide
gtgagctggttaacaattggggtttctgggccagatgatggggcggtggctgtactaaaa

SEQ ID NO: 83803 - DNA, 60 bp, Artificial
  Synthetic oligonucleotide
cgagatttgaatcggttgcatggtcagcaagcgcatgccatgatggtgtgagctggttaa

SEQ ID NO: 83804 - DNA, 60 bp, Artificial
  Synthetic oligonucleotide
tggtataataaccgacaccattaaaagctggaggggtgacatactaagaacacaggagtc

SEQ ID NO: 83805 - DNA, 60 bp, Artificial
  Synthetic oligonucleotide
tgtactaaaatacaatggtataataaccgacaccattaaaagctggaggggtgacatact

SEQ ID NO: 83806 - DNA, 60 bp, Artificial
  Synthetic oligonucleotide
ctttcaatcaagacctagagtatcagataggatacatctgcagcggggtgtttggtgata

SEQ ID NO: 83807 - DNA, 60 bp, Artificial
  Synthetic oligonucleotide
tggactagtgggagtagcatttccttctgtggtgtaagtggtgacactgtgggttggtct

SEQ ID NO: 83808 - DNA, 60 bp, Artificial
  Synthetic oligonucleotide
agagctgacagggctggactgcatgaggccttgcttctgggtggaactaataaggggacg

SEQ ID NO: 83809 - DNA, 60 bp, Artificial
  Synthetic oligonucleotide
gagctgtcctgttggtgaagccccttccccatacaattcgagatttgaatcggttgcatg

SEQ ID NO: 83810 - DNA, 60 bp, Artificial
  Synthetic oligonucleotide
attcgagatttgaatcggttgcatggtcagcaagcgcatgccatgatggtgtgagctggt

SEQ ID NO: 83811 - DNA, 60 bp, Artificial
  Synthetic oligonucleotide
tacagtaaggacaacggcataagaatcggttctaaaggggacgtttttgtcataagagag

SEQ ID NO: 83812 - DNA, 60 bp, Artificial
  Synthetic oligonucleotide
cataagagagccatttatttcgtgttctcatctggaatgtagaacctttttcttaaccca

SEQ ID NO: 83813 - DNA, 60 bp, Artificial
  Synthetic oligonucleotide
ccattacctatgaaaataatacctgggtcaatcagacgtatttgaacatcagtgtcacga

SEQ ID NO: 83814 - DNA, 60 bp, Artificial
  Synthetic oligonucleotide
tttgaacatcagtgtcacgaatttggctgctgaacaggacagaaccccaaaagtattagc

SEQ ID NO: 83815 - DNA, 60 bp, Artificial
  Synthetic oligonucleotide
cacgaatttggctgctgaacaggacagaaccccaaaagtattagctggtaactcctccct

SEQ ID NO: 83816 - DNA, 60 bp, Artificial
  Synthetic oligonucleotide
ggaccccaatggctggacagagactgatggtagcttctctgtgaaacaggatattgtagc

SEQ ID NO: 83817 - DNA, 60 bp, Artificial
  Synthetic oligonucleotide
gtgaaacaggatattgtagcaattactgattggtcaggctatagtgggagcttcgtgcag

SEQ ID NO: 83818 - DNA, 60 bp, Artificial
  Synthetic oligonucleotide
gcatacggagtgaaaggattttcatttaggtatggtagtggcgtctggataggtagaacc

SEQ ID NO: 83819 - DNA, 60 bp, Artificial
  Synthetic oligonucleotide
aaatgatttgggaccccaatggctggacagagactgatggtagcttctctgtgaaacagg

SEQ ID NO: 83820 - DNA, 60 bp, Artificial
  Synthetic oligonucleotide
gtcctctaatggagcatacggagtgaaaggattttcatttaggtatggtagtggcgtctg

SEQ ID NO: 83821 - DNA, 60 bp, Artificial
  Synthetic oligonucleotide
gacctagagtatcagataggatacatctgcagcggggtgtttggtgataatcctcgtcct

SEQ ID NO: 83822 - DNA, 60 bp, Artificial
  Synthetic oligonucleotide
gtagcaattactgattggtcaggctatagtgggagcttcgtgcagcatccagagctgaca

SEQ ID NO: 83823 - DNA, 60 bp, Artificial
  Synthetic oligonucleotide
cttcgtgcagcatccagagctgacagggctggactgcatgaggccttgcttctgggtgga

SEQ ID NO: 83824 - DNA, 60 bp, Artificial
  Synthetic oligonucleotide
agcaattgggacagaaatttgaggaaataaggtggttgattgaagaagtgcggcaaagat

SEQ ID NO: 83825 - DNA, 60 bp, Artificial
  Synthetic oligonucleotide
gcaaacggtttgcagacaatggattgggtgatgccccgttccttgatcggctccgccgag

SEQ ID NO: 83826 - DNA, 60 bp, Artificial
  Synthetic oligonucleotide
acacggttcgaggctctgaaaatctacagagattcgcttggagaaaccataatgaggatg

SEQ ID NO: 83827 - DNA, 60 bp, Artificial
  Synthetic oligonucleotide
cttggctgacatgaccctcgaggaaatgtcacgagactggttcatgctcatgcctaggca

SEQ ID NO: 83828 - DNA, 60 bp, Artificial
  Synthetic oligonucleotide
ttgaatggaatggtaacacggttcgaggctctgaaaatctacagagattcgcttggagaa

SEQ ID NO: 83829 - DNA, 60 bp, Artificial
  Synthetic oligonucleotide
ttcaggtagactgtttcctttggcacatccgcaaacgatttgcagacaatggattgggtg

SEQ ID NO: 83830 - DNA, 60 bp, Artificial
  Synthetic oligonucleotide
gctacttggctgacatgaccctcgaggaaatgtcacgagactggttcatgctcatgccta

SEQ ID NO: 83831 - DNA, 60 bp, Artificial
  Synthetic oligonucleotide
agactgtttcctttggcacatccgcaaacgatttgcagacaatggattgggtgatgcccc

SEQ ID NO: 83832 - DNA, 60 bp, Artificial
  Synthetic oligonucleotide
gacacttaagatgaccattgcatctgtacctacttcgcgctacctagctgacatgaccct

SEQ ID NO: 83833 - DNA, 60 bp, Artificial
  Synthetic oligonucleotide
accctcgaggaaatgtcacgagactggttcatgctcatgcctaggcaaaagataataggc

SEQ ID NO: 83834 - DNA, 60 bp, Artificial
  Synthetic oligonucleotide
cattgcatctgtacctacttcgcgctacctagctgacatgaccctcgaggaaatgtcacg

SEQ ID NO: 83835 - DNA, 60 bp, Artificial
  Synthetic oligonucleotide
cttgttcagtggaatcagatctttcagtagaacagagttgatcgcacctacctcttgggg

SEQ ID NO: 83836 - DNA, 50 bp, Artificial
  Synthetic oligonucleotide
ggaatcagatctttcagtagaacagagttgattgcacctacttcttgggg

SEQ ID NO: 83837 - DNA, 60 bp, Artificial
  Synthetic oligonucleotide
ggacctacaacaacactactggaagagatgttttggttatatggggtatacatcaccctg

SEQ ID NO: 83838 - DNA, 60 bp, Artificial
  Synthetic oligonucleotide
taacaacccatacacgttggtatctaccagttcatggagtaggaaatacaacttagagac

SEQ ID NO: 83839 - DNA, 55 bp, Artificial
  Synthetic oligonucleotide
ccagtacatgcgtacaggctgataggatatgtgttgggtacttaagcaccaactc

SEQ ID NO: 83840 - DNA, 60 bp, Artificial
  Synthetic oligonucleotide
ccagtacatgcgtacaggctgataggatatgtgttgggtacttaagcaccaactcatcag

SEQ ID NO: 83841 - DNA, 60 bp, Artificial
  Synthetic oligonucleotide
acttgttcagtggaatcagatctttcagtagaacagagttgatcgcacctacctcttggg

SEQ ID NO: 83842 - DNA, 60 bp, Artificial
  Synthetic oligonucleotide
acttgttcagtggaatcagatctttcagtagaacagagttgattgcacctacttcttggg

SEQ ID NO: 83843 - DNA, 60 bp, Artificial
  Synthetic oligonucleotide
acaacccatacacattggtatctaccagttcatggagtaggaaatacaacctagaaattg

SEQ ID NO: 83844 - DNA, 60 bp, Artificial
  Synthetic oligonucleotide
tggtatctaccagttcatggagtaggaaatacaacctagaaattggaatccggcctggat

SEQ ID NO: 83845 - DNA, 60 bp, Artificial
  Synthetic oligonucleotide
aaagcactatcgatttacagctgcattgcaagcagtattgtattggtaggactcatactt

SEQ ID NO: 83846 - DNA, 51 bp, Artificial
  Synthetic oligonucleotide
gcattatcgatttacagctgcattgcaagcagtattgtattggtaggactt

SEQ ID NO: 83847 - DNA, 59 bp, Artificial
  Synthetic oligonucleotide
tgcatgatgctaatgttagaaacctgcatgatcaagtccgtagagcactaaagaccaat

SEQ ID NO: 83848 - DNA, 60 bp, Artificial
  Synthetic oligonucleotide
gcacgacgctaatgttagaaacctgcatgatcaagtccgtagagtgctaaagaccaatgc

SEQ ID NO: 83849 - DNA, 60 bp, Artificial
  Synthetic oligonucleotide
ggttggtatggattccaacatcagaacgaacaaggagtgggcatggctgcagacaaagag

SEQ ID NO: 83850 - DNA, 60 bp, Artificial
  Synthetic oligonucleotide
tagacatgcacgacgctaatgttagaaacctgcatgatcaagtccgtagagtgctaaaga

SEQ ID NO: 83851 - DNA, 60 bp, Artificial
  Synthetic oligonucleotide
gtgctaaagaccaatgcaattgatgagggaaatggatgttttgagctcctccataaatgt

SEQ ID NO: 83852 - DNA, 55 bp, Artificial
  Synthetic oligonucleotide
aaagcattatcgatttacagctgcattgcaagcagtattgtattggtaggactta

SEQ ID NO: 83853 - DNA, 60 bp, Artificial
  Synthetic oligonucleotide
agtccgtagagcactaaagaccaatgcaattgatgagggaaatggatgtttcgaactcct

SEQ ID NO: 83854 - DNA, 60 bp, Artificial
  Synthetic oligonucleotide
ccgtagagcactaaagaccaatgcaattgatgagggaaatggatgtttcgaactcctcca

SEQ ID NO: 83855 - DNA, 60 bp, Artificial
  Synthetic oligonucleotide
cccagtaatcgcattcttaatattaaccagcacatgcgtacaggctgataggatatgtgt

SEQ ID NO: 83856 - DNA, 60 bp, Artificial
  Synthetic oligonucleotide
taataaatggttggtatggattccaacatcagaacgaacaaggagtgggcatggctgcag

SEQ ID NO: 83857 - DNA, 60 bp, Artificial
  Synthetic oligonucleotide
accggacttaggaatgtacctgccatatcaaacagagggttgttcggggctattgcaggc

SEQ ID NO: 83858 - DNA, 60 bp, Artificial
  Synthetic oligonucleotide
ggaaatacaacttagagactggaacccggcctggatacaatggccaaaagagttggatga

SEQ ID NO: 83859 - DNA, 60 bp, Artificial
  Synthetic oligonucleotide
ggagtaggaaatacaacttagagactggaacccggcctggatacaatggccaaaagagtt

SEQ ID NO: 83860 - DNA, 60 bp, Artificial
  Synthetic oligonucleotide
ccggcctggatacaatggccaaaagagttggatgaagatttactggtatttgatgcaccc

SEQ ID NO: 83861 - DNA, 60 bp, Artificial
  Synthetic oligonucleotide
ctagaaattggaatccggcctggatacaatggccaaaagagttggatgaagatttactgg

SEQ ID NO: 83862 - DNA, 60 bp, Artificial
  Synthetic oligonucleotide
gaagatttactggtatttgatgcacccaggggagtcaatcagtttcgaaagcaatggagg

SEQ ID NO: 83863 - DNA, 60 bp, Artificial
  Synthetic oligonucleotide
caaaagagttggatgaagatttactggtatttgatgcacccaggggagtcaatcagtttc

SEQ ID NO: 83864 - DNA, 60 bp, Artificial
  Synthetic oligonucleotide
cagctcaagttagccaccggacttaggaatgtacctgccatatcaaaaagagggttgttt

SEQ ID NO: 83865 - DNA, 60 bp, Artificial
  Synthetic oligonucleotide
cagctcaagttagccaccggacttaggaatgtacctgccatatcaaacagagggttgttc

SEQ ID NO: 83866 - DNA, 60 bp, Artificial
  Synthetic oligonucleotide
ctattgcacatcgtgagcatcatagtaacagtattggtcctggggaatggtgggagcaat

SEQ ID NO: 83867 - DNA, 60 bp, Artificial
  Synthetic oligonucleotide
catcgtgagcatcatagtaacagtattggtcctggggaatggtgggagcaatggagtctg

SEQ ID NO: 83868 - DNA, 60 bp, Artificial
  Synthetic oligonucleotide
aaataataactataggctccgtatcattggggttggttgtattcaatgttctattgcaca

SEQ ID NO: 83869 - DNA, 60 bp, Artificial
  Synthetic oligonucleotide
gctccgtatcattggggttggttgtattcaatgttctattgcacatcgtgagcatcatag

SEQ ID NO: 83870 - DNA, 53 bp, Artificial
  Synthetic oligonucleotide
tgggagcaatggagtctgtaatgagacgatagtgagggaatataatgagacag

SEQ ID NO: 83871 - DNA, 60 bp, Artificial
  Synthetic oligonucleotide
attcaatggcataatactagtgtagttgaatacgtaccatattggagtggaggcacctac

SEQ ID NO: 83872 - DNA, 60 bp, Artificial
  Synthetic oligonucleotide
gggaaatgatgtatggatggggcggacaattagtcgaacctccaggtcaggatttgaggt

SEQ ID NO: 83873 - DNA, 60 bp, Artificial
  Synthetic oligonucleotide
gggaagatgcccaattttccggctcttgcaccagtcctattggtggtcaggggtacggtg

SEQ ID NO: 83874 - DNA, 60 bp, Artificial
  Synthetic oligonucleotide
gagacaactggaaagggaccaatcggcctgtactggtgatctcgcctgatctctcttaca

SEQ ID NO: 83875 - DNA, 60 bp, Artificial
  Synthetic oligonucleotide
ctaccctaatgatggcaaggtggaatgcgtatgtagagacaactggaaagggaccaatcg

SEQ ID NO: 83876 - DNA, 60 bp, Artificial
  Synthetic oligonucleotide
tgaagagtgttcttgctaccctaatgatggcaaggtggaatgcgtatgtagagacaactg

SEQ ID NO: 83877 - DNA, 60 bp, Artificial
  Synthetic oligonucleotide
caaggcaagataattggtcagatggatattaactttgatgggggacatattgaagagtgt

SEQ ID NO: 83878 - DNA, 60 bp, Artificial
  Synthetic oligonucleotide
tagaggggaagatgcccaattttccggctcttgcaccagtcctattggtggtcaggggta

SEQ ID NO: 83879 - DNA, 60 bp, Artificial
  Synthetic oligonucleotide
ggatatttgtgtgcagggcttccaagcgacactcctagaggggaagatgcccaattttcc

SEQ ID NO: 83880 - DNA, 60 bp, Artificial
  Synthetic oligonucleotide
ctctcttacaaagttggatatttgtgtgcagggcttccaagcgacactcctagaggggaa

SEQ ID NO: 83881 - DNA, 60 bp, Artificial
  Synthetic oligonucleotide
ctggaaagggaccaatcggcctgtactggtgatctcgcctgatctctcttacaaagttgg

SEQ ID NO: 83882 - DNA, 60 bp, Artificial
  Synthetic oligonucleotide
tttgtcataagggagcccttcgtctcctgttcgcccatagaatgcagaactttcttcctc

SEQ ID NO: 83883 - DNA, 52 bp, Artificial
  Synthetic oligonucleotide
cacctttctcaaaggacaacgggataagaattggttctaggggacatgtttt

SEQ ID NO: 83884 - DNA, 60 bp, Artificial
  Synthetic oligonucleotide
tttcttcctcacccaggggtccctactcaatgacaaacactcaaatggaacagtgagaga

SEQ ID NO: 83885 - DNA, 60 bp, Artificial
  Synthetic oligonucleotide
gcccttcgtctcctgttcgcccatagaatgcagaactttcttcctcacccaggggtccct

SEQ ID NO: 83886 - DNA, 60 bp, Artificial
  Synthetic oligonucleotide
aggcacctacacaaataatacagaagcagtatgtgacgtcaagggctttgcacctttctc

SEQ ID NO: 83887 - DNA, 60 bp, Artificial
  Synthetic oligonucleotide
caatggcataatactagtgtagttgaatacgtaccatattggagtggaggcacctacaca

SEQ ID NO: 83888 - DNA, 60 bp, Artificial
  Synthetic oligonucleotide
cacctttctcaaaggacaacgggataagaattggttctaggggacatgtttttgtcataa

SEQ ID NO: 83889 - DNA, 60 bp, Artificial
  Synthetic oligonucleotide
taatacagaagcagtatgtgacgtcaagggctttgcacctttctcaaaggacaacgggat

SEQ ID NO: 83890 - DNA, 60 bp, Artificial
  Synthetic oligonucleotide
cagtgagagatagaagcccattcagaactcttatgagtgtcgaagtgggtctgtcaccca

SEQ ID NO: 83891 - DNA, 60 bp, Artificial
  Synthetic oligonucleotide
cacccaggggtccctactcaatgacaaacactcaaatggaacagtgagagatagaagccc

SEQ ID NO: 83892 - DNA, 60 bp, Artificial
  Synthetic oligonucleotide
cacttgcatacggggttattgctactgggtgatgactgacggccctgccgataggcaggc

SEQ ID NO: 83893 - DNA, 60 bp, Artificial
  Synthetic oligonucleotide
tcaggagtcatcctgcacttgcatacggggttattgctactgggtgatgactgacggccc

SEQ ID NO: 83894 - DNA, 60 bp, Artificial
  Synthetic oligonucleotide
cagattagaaaacaagtagttgttgacaatttgaattggtcaggatacagtgggtccttc

SEQ ID NO: 83895 - DNA, 60 bp, Artificial
  Synthetic oligonucleotide
gtagttgttgacaatttgaattggtcaggatacagtgggtccttcactctgccagtagaa

SEQ ID NO: 83896 - DNA, 60 bp, Artificial
  Synthetic oligonucleotide
gatttgaggtaataagggtaaagaatggttggacacagacaagtaaagaacagattagaa

SEQ ID NO: 83897 - DNA, 60 bp, Artificial
  Synthetic oligonucleotide
gggtaaagaatggttggacacagacaagtaaagaacagattagaaaacaagtagttgttg

SEQ ID NO: 83898 - DNA, 60 bp, Artificial
  Synthetic oligonucleotide
cctgtttttgggtcgaaatgatcagaggtaaaccagaggaaagagcaatctggacctcca

SEQ ID NO: 83899 - DNA, 60 bp, Artificial
  Synthetic oligonucleotide
gggtcgaaatgatcagaggtaaaccagaggaaagagcaatctggacctccagcagctcca

SEQ ID NO: 83900 - DNA, 60 bp, Artificial
  Synthetic oligonucleotide
tgggtccttcactctgccagtagaattgtctgggaaaggctgcttggttccctgtttttg

SEQ ID NO: 83901 - DNA, 58 bp, Artificial
  Synthetic oligonucleotide
tgggtccttcactctgccagtagaattgtctgggaaaggctgcttggttccctgtttt

SEQ ID NO: 83902 - DNA, 60 bp, Artificial
  Synthetic oligonucleotide
ttggtgtaacagggccagataccaaggcagtggcagtagttcattatgggggagtgccta

SEQ ID NO: 83903 - DNA, 60 bp, Artificial
  Synthetic oligonucleotide
ggagtgcctactgatatcattaactcttgggcaggggatatattgaggactcaggagtca

SEQ ID NO: 83904 - DNA, 60 bp, Artificial
  Synthetic oligonucleotide
gatatcattaactcttgggcaggggatatattgaggactcaggagtcatcctgcacttgc

SEQ ID NO: 83905 - DNA, 60 bp, Artificial
  Synthetic oligonucleotide
ctgacggccctgccgataggcaggcacagtatagaatatacaaagctaaccaaggcaaga

SEQ ID NO: 83906 - DNA, 58 bp, Artificial
  Synthetic oligonucleotide
ccattcagaactcttatgagtgtcgaagtgggtctgtcacccaatgtatatcaagcca

SEQ ID NO: 83907 - DNA, 60 bp, Artificial
  Synthetic oligonucleotide
ctgtcacccaatgtatatcaagccaggtttgaagctgtagcgtggtcagcaactgcctgc

SEQ ID NO: 83908 - DNA, 60 bp, Artificial
  Synthetic oligonucleotide
gtcacccaatgtatatcaagccaggtttgaagctgtagcgtggtcagcaactgcctgcca

SEQ ID NO: 83909 - DNA, 51 bp, Artificial
  Synthetic oligonucleotide
ttggtgtaacagggccagataccaaggcagtggcagtagttcattatgggg

SEQ ID NO: 83910 - DNA, 52 bp, Artificial
  Synthetic oligonucleotide
tgggggcaatcagtttctggatgtgttctaatgggtcattgcaatgcagaat

SEQ ID NO: 83911 - DNA, 50 bp, Artificial
  Synthetic oligonucleotide
ggggcaatcagtttctggatgtgttctaatgggtcattgcaatgcagaat

SEQ ID NO: 83912 - DNA, 60 bp, Artificial
  Synthetic oligonucleotide
aatctaatgggaatctaatcgctccttggtatgcatacaaatttgacagtaccactagca

SEQ ID NO: 83913 - DNA, 60 bp, Artificial
  Synthetic oligonucleotide
ggaaatctaatcgctccttggtatgcatacaaatttgtcagcacaagtaataaaggagcc

SEQ ID NO: 83914 - DNA, 60 bp, Artificial
  Synthetic oligonucleotide
atgggaatctaatcgctccttggtatgcatacaaatttgacagtactactagcaaaggag

SEQ ID NO: 83915 - DNA, 60 bp, Artificial
  Synthetic oligonucleotide
gcctctatgcgaagtaaactcatggcacatcctgtcaaaagacaatgcgataagaattgg

SEQ ID NO: 83916 - DNA, 60 bp, Artificial
  Synthetic oligonucleotide
gtcaaggcacaacactcagggggcgacatgcaaatgggactatacatgataggagtccgt

SEQ ID NO: 83917 - DNA, 56 bp, Artificial
  Synthetic oligonucleotide
ggggcgacatgcaaatgggactatacatgataggagtccgttcagagccctcgtaa

SEQ ID NO: 83918 - DNA, 60 bp, Artificial
  Synthetic oligonucleotide
ccttgaggcactcatggaatggctaaagacaagaccaatcctgtcacctctgactaaggg

SEQ ID NO: 83919 - DNA, 60 bp, Artificial
  Synthetic oligonucleotide
attcgtcatcaatgatgtgggagatcaatggtcctgagtcagtgctgatcaacacttatc

SEQ ID NO: 83920 - DNA, 53 bp, Artificial
  Synthetic oligonucleotide
ctgagccctgggatgatgatgggcatgttcaacatgctaagcacggttttggg

SEQ ID NO: 83921 - DNA, 60 bp, Artificial
  Synthetic oligonucleotide
aatgtggaatctaatggaaatctaatcgctccttggtatgcatacaaatttgtcagcaca

SEQ ID NO: 83922 - DNA, 60 bp, Artificial
  Synthetic oligonucleotide
gctttcaggtagactgctttctttggcatgtccgcaaacgatttgcagaccaagaacggg

SEQ ID NO: 83923 - DNA, 60 bp, Artificial
  Synthetic oligonucleotide
agctttcaggtagactgctttctttggcatgtccgcaaacgatttgcagaccaagaattg

SEQ ID NO: 83924 - DNA, 60 bp, Artificial
  Synthetic oligonucleotide
gctttcaggtagactgctttctttggcatgtccgcaaacgatttgcagaccaagagctgg

SEQ ID NO: 83925 - DNA, 60 bp, Artificial
  Synthetic oligonucleotide
ttgagtcctggaatgatgatgggcatgttcaacatgctaagtacagttttaggagtctcg

SEQ ID NO: 83926 - DNA, 60 bp, Artificial
  Synthetic oligonucleotide
atgcaagccttacaactactgcttgaagtggagcaagagataagaactttctcgtttcag

SEQ ID NO: 83927 - DNA, 60 bp, Artificial
  Synthetic oligonucleotide
gcatcagcagtgatctggtacaatagaaggcctgttacagaaatcaacacatgggcccga

SEQ ID NO: 83928 - DNA, 60 bp, Artificial
  Synthetic oligonucleotide
acaatgcatcagcagtgatctggtacaatagaaggcctgttacagaaatcaacacatggg

SEQ ID NO: 83929 - DNA, 60 bp, Artificial
  Synthetic oligonucleotide
tcaaagcccactcaaggtcagacaatcgtattaaacactgattggagtggctacagtggg

SEQ ID NO: 83930 - DNA, 60 bp, Artificial
  Synthetic oligonucleotide
cgacccttatccaggaaataacaacaatggagtcaaaggattctcatacctagatggagg

SEQ ID NO: 83931 - DNA, 60 bp, Artificial
  Synthetic oligonucleotide
ccctgttctcacagataaccctcgaccgaatgatccaactgtaggtaagtgtaacgaccc

SEQ ID NO: 83932 - DNA, 60 bp, Artificial
  Synthetic oligonucleotide
tgtaggtaagtgtaacgacccttatccaggaaataacaacaatggagtcaaaggattctc

SEQ ID NO: 83933 - DNA, 60 bp, Artificial
  Synthetic oligonucleotide
atcgcgccctgataagctggccactatcatcaccacctacagtatacaacagcagggtgg

SEQ ID NO: 83934 - DNA, 60 bp, Artificial
  Synthetic oligonucleotide
acgatagatcccagtatcgcgccctgataagctggccactatcatcaccacctacagtat

SEQ ID NO: 83935 - DNA, 60 bp, Artificial
  Synthetic oligonucleotide
agcagggtggaatgcattgggtggtcaagtactagttgccatgatggcagagccaggatg

SEQ ID NO: 83936 - DNA, 60 bp, Artificial
  Synthetic oligonucleotide
cctacagtatacaacagcagggtggaatgcattgggtggtcaagtactagttgccatgat

SEQ ID NO: 83937 - DNA, 60 bp, Artificial
  Synthetic oligonucleotide
cgtgtttttatgtggagttgatacgtggaaggcccaaggaagacaaagtatggtggacca

SEQ ID NO: 83938 - DNA, 60 bp, Artificial
  Synthetic oligonucleotide
ggagttgatacgtggaaggcccaaggaagacaaagtatggtggaccagtaatagtatagt

SEQ ID NO: 83939 - DNA, 60 bp, Artificial
  Synthetic oligonucleotide
atgggaaagacaatgcggtaagaattggggaggactcagatgttctagtaacaagagaac

SEQ ID NO: 83940 - DNA, 60 bp, Artificial
  Synthetic oligonucleotide
ggcagagccaggatgtcaatatgtatatcaggcccgaacaacaatgcatcagcagtgatc

SEQ ID NO: 83941 - DNA, 60 bp, Artificial
  Synthetic oligonucleotide
ttgccatgatggcagagccaggatgtcaatatgtatatcaggcccgaacaacaatgcatc

SEQ ID NO: 83942 - DNA, 60 bp, Artificial
  Synthetic oligonucleotide
ctctgactggaactgctaagcacatcgaagaatgctcatgctacggggaacaggcaggga

SEQ ID NO: 83943 - DNA, 60 bp, Artificial
  Synthetic oligonucleotide
gaatctctgactggaactgctaagcacatcgaagaatgctcatgctacggggaacaggca

SEQ ID NO: 83944 - DNA, 60 bp, Artificial
  Synthetic oligonucleotide
cggtaagaattggggaggactcagatgttctagtaacaagagaaccctatgtctcctgtg

SEQ ID NO: 83945 - DNA, 60 bp, Artificial
  Synthetic oligonucleotide
acaagagaaccctatgtctcctgtgacccagatgagtgcaggttctatgctctcagccaa

SEQ ID NO: 83946 - DNA, 60 bp, Artificial
  Synthetic oligonucleotide
cccgaaacatactaaggacacaagaatctgaatgcgtatgccacaacggtgtctgcccgg

SEQ ID NO: 83947 - DNA, 60 bp, Artificial
  Synthetic oligonucleotide
aacacatgggcccgaaacatactaaggacacaagaatctgaatgcgtatgccacaacggt

SEQ ID NO: 83948 - DNA, 60 bp, Artificial
  Synthetic oligonucleotide
ctgcagaaacaagaatatactattttaaggaaggaaaaatattaaaatgggaatctctga

SEQ ID NO: 83949 - DNA, 60 bp, Artificial
  Synthetic oligonucleotide
ccacaacggtgtctgcccggtagtgttcacagatgggtctgccactggacctgcagaaac

SEQ ID NO: 83950 - DNA, 60 bp, Artificial
  Synthetic oligonucleotide
gcagtactcataggaatagcgaacttaggattgaacataggactacatctgaaaccgagc

SEQ ID NO: 83951 - DNA, 60 bp, Artificial
  Synthetic oligonucleotide
acccagataagtaataccaacatccaagtagaggagagagcaaatagagaattcaataac

SEQ ID NO: 83952 - DNA, 60 bp, Artificial
  Synthetic oligonucleotide
gtaataggcacaattgcagtactcataggaatagcgaacttaggattgaacataggacta

SEQ ID NO: 83953 - DNA, 60 bp, Artificial
  Synthetic oligonucleotide
tatatatgtagccctgttctcacagataaccctcgaccgaatgatccaactgtaggtaag

SEQ ID NO: 83954 - DNA, 60 bp, Artificial
  Synthetic oligonucleotide
aaatagatccagtggcgatgacacatactagtcaatatatatgtagccctgttctcacag

SEQ ID NO: 83955 - DNA, 60 bp, Artificial
  Synthetic oligonucleotide
accaacatccaagtagaggagagagcaaatagagaattcaataacttgaccaaagggctc

SEQ ID NO: 83956 - DNA, 60 bp, Artificial
  Synthetic oligonucleotide
attcaataacttgaccaaagggctctgtactataaattcatggcacatatatgggaaaga

SEQ ID NO: 83957 - DNA, 60 bp, Artificial
  Synthetic oligonucleotide
caaggtcagacaatcgtattaaacactgattggagtggctacagtgggtccttcatggac

SEQ ID NO: 83958 - DNA, 60 bp, Artificial
  Synthetic oligonucleotide
ctacagtgggtccttcatggactattgggccgagggggaatgctaccgagcgtgttttta

SEQ ID NO: 83959 - DNA, 60 bp, Artificial
  Synthetic oligonucleotide
atagaccagtaattcaaatagatccagtggcgatgacacatactagtcaatatatatgta

SEQ ID NO: 83960 - DNA, 60 bp, Artificial
  Synthetic oligonucleotide
ggaacaggcagggattacttgcacatgcagggataattggcagggctcaaatagaccagt

SEQ ID NO: 83961 - DNA, 60 bp, Artificial
  Synthetic oligonucleotide
cactcactgagtgacatccacatcatggcgtctcaaggcaccaaacgatcttatgagcag

SEQ ID NO: 83962 - DNA, 60 bp, Artificial
  Synthetic oligonucleotide
ggaggccatatagaagaatgctcatgctaccccaatgagggtaaagtggagtgtgtttgt

SEQ ID NO: 83963 - DNA, 60 bp, Artificial
  Synthetic oligonucleotide
gccatatagaagaatgctcatgctaccccaatgagggtaaagtggagtgtgtttgtagag

SEQ ID NO: 83964 - DNA, 60 bp, Artificial
  Synthetic oligonucleotide
gtcatatagaagaatgctcatgctaccccaatgagggtaaagtggagtgtgtttgtagag

SEQ ID NO: 83965 - DNA, 60 bp, Artificial
  Synthetic oligonucleotide
atggaccaggcgatcatggataagaacatcatactgaaagcgaacttcagtgtgatattc

SEQ ID NO: 83966 - DNA, 58 bp, Artificial
  Synthetic oligonucleotide
atggaccaggcgatcatggataagaacatcatactgaaagcgaacttcagtgtgatat

SEQ ID NO: 83967 - DNA, 60 bp, Artificial
  Synthetic oligonucleotide
ctaatggcacagtgaaagaccggagcccctatagaactctaatgagtgtagaaatagggc

SEQ ID NO: 83968 - DNA, 60 bp, Artificial
  Synthetic oligonucleotide
ttctaatggcacagtgaaagacagaagcccctatagaactctaatgagtgtagaaatagg

SEQ ID NO: 83969 - DNA, 60 bp, Artificial
  Synthetic oligonucleotide
gaccggagcccctatagaactctaatgagtgtagaaatagggcaatcacccaatgtgtac

SEQ ID NO: 83970 - DNA, 60 bp, Artificial
  Synthetic oligonucleotide
ccggagcccctatagaactctaatgagtgtagaaataggacaatcagccaacgtgtacca

SEQ ID NO: 83971 - DNA, 60 bp, Artificial
  Synthetic oligonucleotide
cacagtgaaagacagaagcccctatagaactctaatgagtgtagaaatagggcaatcacc

SEQ ID NO: 83972 - DNA, 60 bp, Artificial
  Synthetic oligonucleotide
acagtgaaagaccggagcccctatagaactctaatgagtgtagaaatagggcaatcaccc

SEQ ID NO: 83973 - DNA, 60 bp, Artificial
  Synthetic oligonucleotide
cacagtaaaagaccggagcccctatagaactctaatgagtgtagaaatagggcaatcacc

SEQ ID NO: 83974 - DNA, 60 bp, Artificial
  Synthetic oligonucleotide
cctatagaactctaatgagtgtagaaatagggcaatcacccaatgtgtaccaggcaaggt

SEQ ID NO: 83975 - DNA, 60 bp, Artificial
  Synthetic oligonucleotide
ccatctatagtacggtatcgagcagtctagtattggtggggctgatcatagcaatgggtc

SEQ ID NO: 83976 - DNA, 60 bp, Artificial
  Synthetic oligonucleotide
aaattcttgccatctatagtacggtatcgagcagtctagtattggtggggctgatcatag

SEQ ID NO: 83977 - DNA, 60 bp, Artificial
  Synthetic oligonucleotide
atctgtcgggaggatggttgggggaatcggaagattctacatacagatgtgcactgaact

SEQ ID NO: 83978 - DNA, 60 bp, Artificial
  Synthetic oligonucleotide
atctgtcgggagaatggttgggggaatcggaagattctacatacagatgtgcactgaact

SEQ ID NO: 83979 - DNA, 60 bp, Artificial
  Synthetic oligonucleotide
ccctttggagcaaaacaaatgatgccggctcagaccgagtgatggtatcacctctggctg

SEQ ID NO: 83980 - DNA, 60 bp, Artificial
  Synthetic oligonucleotide
gcaagcattacaactattgcttgaagtggagcaagagataagaactttctcgtttcagct

SEQ ID NO: 83981 - DNA, 60 bp, Artificial
  Synthetic oligonucleotide
gcagccggaaggtcagacaagatctgcattggatatcatgccaacaattcaacaacacaa

SEQ ID NO: 83982 - DNA, 60 bp, Artificial
  Synthetic oligonucleotide
gcggccgggaagtcagacaagatctgcattggatatcatgccaacaattcaacaacacaa

SEQ ID NO: 83983 - DNA, 60 bp, Artificial
  Synthetic oligonucleotide
cggccgggaagtcagacaagatctgcattggatatcatgccaacaattcaacaacacaag

SEQ ID NO: 83984 - DNA, 60 bp, Artificial
  Synthetic oligonucleotide
tctataggagtatgagatggttgaccttaaaatcaggacaattcccagtccagacagatg

SEQ ID NO: 83985 - DNA, 60 bp, Artificial
  Synthetic oligonucleotide
ggagcatgagatggttgaccttaaaatcaggacaattcccagtccaaacagatgaataca

SEQ ID NO: 83986 - DNA, 60 bp, Artificial
  Synthetic oligonucleotide
tgatgatcagataactgacatatgggcatacaatgctgaactgcttgttctattggaaaa

SEQ ID NO: 83987 - DNA, 60 bp, Artificial
  Synthetic oligonucleotide
ggagcatgagatggttgaccttaaaatcaggacaattcccagtccaaacagatgagtaca

SEQ ID NO: 83988 - DNA, 60 bp, Artificial
  Synthetic oligonucleotide
ctgcttgaagttgagcaagagataagaactttctcgtttcagcttatttaatgataaaaa

SEQ ID NO: 83989 - DNA, 52 bp, Artificial
  Synthetic oligonucleotide
ggagagacaacaggcaggaattgcactgtcccatgtttctgggttgagatga

SEQ ID NO: 83990 - DNA, 60 bp, Artificial
  Synthetic oligonucleotide
gattaccaaattggctatgtatgtagtgggatatttggggacaatcccagacctgtagat

SEQ ID NO: 83991 - DNA, 60 bp, Artificial
  Synthetic oligonucleotide
ctacaacgctgaactgttggttcttcttgaaaacgaaagaacactagacctgcatgacgc

SEQ ID NO: 83992 - DNA, 60 bp, Artificial
  Synthetic oligonucleotide
agagcatgaattttgccaaaggcccagaaatagcagcaagaccagctgtgaatggacaaa

SEQ ID NO: 83993 - DNA, 60 bp, Artificial
  Synthetic oligonucleotide
gtctagttttggtgggactgatcgttgccatgggtctttggatgtgctcgaatggctcaa

SEQ ID NO: 83994 - DNA, 60 bp, Artificial
  Synthetic oligonucleotide
tcagtgagactggaaaatctgggtgtatatcagatccttgctatttatagtacggtatcg

SEQ ID NO: 83995 - DNA, 60 bp, Artificial
  Synthetic oligonucleotide
gcaaaataccctgtatggctctggtgacagatatgttagaatggggactgagagcatgaa

SEQ ID NO: 83996 - DNA, 60 bp, Artificial
  Synthetic oligonucleotide
tttggatgtgctcgaatggctcaatgcaatgcaggatatgtatataattaggaaaaaaca

SEQ ID NO: 83997 - DNA, 60 bp, Artificial
  Synthetic oligonucleotide
tacggtatcgagcagtctagttttggtgggactgatcgttgccatgggtctttggatgtg

SEQ ID NO: 83998 - DNA, 60 bp, Artificial
  Synthetic oligonucleotide
ccctgtatggctctggtgacagatatgttagaatgggaactgagagcatgaattttgcca

SEQ ID NO: 83999 - DNA, 60 bp, Artificial
  Synthetic oligonucleotide
gacgcaactgctggtctcacccatttgatgatctggcattccaatctgaatgatgccaca

SEQ ID NO: 84000 - DNA, 60 bp, Artificial
  Synthetic oligonucleotide
acgcaactgctggtctcacccatttgatgatctggcattccaatctgaatgatgccacat

SEQ ID NO: 84001 - DNA, 60 bp, Artificial
  Synthetic oligonucleotide
tcaatcagaatctagaatatcaaataggatacatatgcagcggagtttttggagacaatc

SEQ ID NO: 84002 - DNA, 60 bp, Artificial
  Synthetic oligonucleotide
gtgtatgcagagacaactggcatggttcaaatcgaccatgggtgtctttcaatcagaatc

SEQ ID NO: 84003 - DNA, 60 bp, Artificial
  Synthetic oligonucleotide
gtgtgtatgcagagacaactggcatggttcaaatcgaccatgggtgtctttcaatcagaa

SEQ ID NO: 84004 - DNA, 60 bp, Artificial
  Synthetic oligonucleotide
acgctagcgaggtaatgtgtgtgtgcagagacaactggcatggttcaaatcgaccatggg

SEQ ID NO: 84005 - DNA, 60 bp, Artificial
  Synthetic oligonucleotide
gacaagaccaatcctgtcacctctgactaaggggattttgggatttgtgttcacactcac

SEQ ID NO: 84006 - DNA, 60 bp, Artificial
  Synthetic oligonucleotide
catggaatggctaaagacaagaccaatcctgtcacctctgactaagggtattctagggtt

SEQ ID NO: 84007 - DNA, 50 bp, Artificial
  Synthetic oligonucleotide
gctcaccgtgcccagtgagcgaggactgcagcgtagacgctttgttcaaa

SEQ ID NO: 84008 - DNA, 50 bp, Artificial
  Synthetic oligonucleotide
gctcaccgtgcccagtgagcgaggactgcagcgtagacgatttgtccaga

SEQ ID NO: 84009 - DNA, 51 bp, Artificial
  Synthetic oligonucleotide
cgctcaccgtgcccagtgagcgaggactgcagcgtagacgctttgttcaaa

SEQ ID NO: 84010 - DNA, 50 bp, Artificial
  Synthetic oligonucleotide
gctcaccgtgcccagtgagcgaggactgcagcgtagacggtttgtccaga

SEQ ID NO: 84011 - DNA, 60 bp, Artificial
  Synthetic oligonucleotide
cgatttaacggctaatgaatcaggaaggctaatagatttcctcaaggatgtgatggaatc

SEQ ID NO: 84012 - DNA, 60 bp, Artificial
  Synthetic oligonucleotide
cgatctgacggctaatgaatcaggaaggctaatagatttcctcaaggatgtgatggaatc

SEQ ID NO: 84013 - DNA, 60 bp, Artificial
  Synthetic oligonucleotide
tgttacccttatgatgtgccggattatgcctctcttaggtcactagttgcctcatccggc

SEQ ID NO: 84014 - DNA, 60 bp, Artificial
  Synthetic oligonucleotide
gcacagcttacagcaactgttacccttatgatgtgccggattatgcctctcttaggtcac

SEQ ID NO: 84015 - DNA, 60 bp, Artificial
  Synthetic oligonucleotide
acagcttacagcaactgttacccttatgatgtgccggattatgcctctcttaggtcacta

SEQ ID NO: 84016 - DNA, 60 bp, Artificial
  Synthetic oligonucleotide
ctggttcagagttcctcaacaggtagaatatgcaacagtcctcaccaagtccttgatggg

SEQ ID NO: 84017 - DNA, 60 bp, Artificial
  Synthetic oligonucleotide
acgaagcacagcttacagcaactgttacccttatgatgtgccggattatgcctctcttag

SEQ ID NO: 84018 - DNA, 60 bp, Artificial
  Synthetic oligonucleotide
ggcaatcggtctgaggaatgtgcctgctgcatcagataggggaatatttggtgccatagc

SEQ ID NO: 84019 - DNA, 52 bp, Artificial
  Synthetic oligonucleotide
aaaatctgcatcggctaccagtcaacaaactccacggaaactgttgatacac

SEQ ID NO: 84020 - DNA, 60 bp, Artificial
  Synthetic oligonucleotide
ttttaggatttgtgttcacgctcaccgtgcccagtgagcgaggactgcagcgtagacgtt

SEQ ID NO: 84021 - DNA, 60 bp, Artificial
  Synthetic oligonucleotide
ctgttccaccattgaagagctcagacggcggaaatagtgaatttagcttgtccttcatga

SEQ ID NO: 84022 - DNA, 60 bp, Artificial
  Synthetic oligonucleotide
cactagttcaaggagtggatttgagatgatttgggatcccaatgggtggacagagacaga

SEQ ID NO: 84023 - DNA, 60 bp, Artificial
  Synthetic oligonucleotide
gttccaggagtggatttgagatgatttgggatcccaatgggtggacagagacagatagta

SEQ ID NO: 84024 - DNA, 60 bp, Artificial
  Synthetic oligonucleotide
gacggatggaccagcaaacagacaagcacaatacagagcatttaaagccaagcaggggaa

SEQ ID NO: 84025 - DNA, 60 bp, Artificial
  Synthetic oligonucleotide
gacagatggaccagcaaacagacaagcacaatacagagcattcaaagccaaacaggggaa

SEQ ID NO: 84026 - DNA, 60 bp, Artificial
  Synthetic oligonucleotide
gcgacagagaatagtttcgaacaaataacatttatgcaagccttacaactactgcttgag

SEQ ID NO: 84027 - DNA, 60 bp, Artificial
  Synthetic oligonucleotide
tcagaagtggaaggaagaattcaggacctcgagaaatacgttgaggacactaaaatagat

SEQ ID NO: 84028 - DNA, 60 bp, Artificial
  Synthetic oligonucleotide
tccaaagacaacggaataagaattggatcgaggggtcatgtttttgttataagggaacca

SEQ ID NO: 84029 - DNA, 60 bp, Artificial
  Synthetic oligonucleotide
agattgttatctatggcacataagaaagctactcagcatgagagacatgtgtgatgctcc

SEQ ID NO: 84030 - DNA, 60 bp, Artificial
  Synthetic oligonucleotide
tgatgggcatgttcaacatgctaagtacagtcttaggagtttcaatcctaaacctgggac

SEQ ID NO: 84031 - DNA, 60 bp, Artificial
  Synthetic oligonucleotide
gatgtctggacatacaatgctgaactgttggttctccttgagaatgaaaggacactggac

SEQ ID NO: 84032 - DNA, 60 bp, Artificial
  Synthetic oligonucleotide
ggacgtctggacatacaatgctgaactgttggttcttcttgagaacgaaaggacattaga

SEQ ID NO: 84033 - DNA, 60 bp, Artificial
  Synthetic oligonucleotide
gatttctggacgtctggacatacaatgctgaactgttggttcttcttgagaacgaaagga

SEQ ID NO: 84034 - DNA, 60 bp, Artificial
  Synthetic oligonucleotide
gattctacatacaaatgtgcactgaactcaaactcagtgactacgaaggaagactgatcc

SEQ ID NO: 84035 - DNA, 60 bp, Artificial
  Synthetic oligonucleotide
tggacctctagtagctccacggtattttgtggtgtttcaagtgaggtcccaggatggtcc

SEQ ID NO: 84036 - DNA, 58 bp, Artificial
  Synthetic oligonucleotide
ggtagtcaaatcagtcgagttgaatgctcctaattaccactatgaggagtgctcctgt

SEQ ID NO: 84037 - DNA, 60 bp, Artificial
  Synthetic oligonucleotide
cttgaaagttccagcgcagaatgccataagcaccacattcccatatactggagatcctcc

SEQ ID NO: 84038 - DNA, 60 bp, Artificial
  Synthetic oligonucleotide
gaccaggcaattatggataagaacatcatactgaaagcgaacttcagtgtgattttcgag

SEQ ID NO: 84039 - DNA, 60 bp, Artificial
  Synthetic oligonucleotide
gcattgggtctttggatgtgttcaaatggttcaatgcaatgcaggatatgtatataatta

SEQ ID NO: 84040 - DNA, 59 bp, Artificial
  Synthetic oligonucleotide
gctgaacttttagttctactagaaaatgagagaaccttggacttgcatgatgctaatgt

SEQ ID NO: 84041 - DNA, 60 bp, Artificial
  Synthetic oligonucleotide
gattggagaatgccccaagtatgttaaaagtgatagcctaagactggcaactggtctgag

SEQ ID NO: 84042 - DNA, 60 bp, Artificial
  Synthetic oligonucleotide
ggcacatatgactatccaaaataccaaggcgagagcaaacttaataggcaggaaatagat

SEQ ID NO: 84043 - DNA, 60 bp, Artificial
  Synthetic oligonucleotide
cagctgtgaatgggcaaagagggaggattgattattattggtctgtattgaagccaggag

SEQ ID NO: 84044 - DNA, 60 bp, Artificial
  Synthetic oligonucleotide
cgctgcatatccaataattaggggaacatataataatactggctcccaaccaattctata

SEQ ID NO: 84045 - DNA, 60 bp, Artificial
  Synthetic oligonucleotide
tttgatgggactgattgttgccatgggtctttggatgtgctcgaatggttcaatgcagtg

SEQ ID NO: 84046 - DNA, 60 bp, Artificial
  Synthetic oligonucleotide
ggggtgtacaccatcctcctgataccaatgagcaaaataccctgtatggttctggtgata

SEQ ID NO: 84047 - DNA, 60 bp, Artificial
  Synthetic oligonucleotide
caaaccttccaattgaaaattgtgatactgcctgtcagacagccgctggggcactaagga

SEQ ID NO: 84048 - DNA, 60 bp, Artificial
  Synthetic oligonucleotide
atgggctggagtggacactggcagtggagttacaaaagcctgcccctacaacagtggctc

SEQ ID NO: 84049 - DNA, 60 bp, Artificial
  Synthetic oligonucleotide
ccctgtatggttctggtgatagatatgttagaatgggtactgagagcatgaactttgcca

SEQ ID NO: 84050 - DNA, 60 bp, Artificial
  Synthetic oligonucleotide
cgcaagtggatacaatattagaaaggaatgtgacagtgacgcattcagttgagctcctag

SEQ ID NO: 84051 - DNA, 60 bp, Artificial
  Synthetic oligonucleotide
cattggatctggagaaagagtacagagatttgaaatgtttcccaaaagcacatgggctgg

SEQ ID NO: 84052 - DNA, 60 bp, Artificial
  Synthetic oligonucleotide
cccaacatgggatatgctacccagggacattaaatgaattggaagaattgaaagcactca

SEQ ID NO: 84053 - DNA, 60 bp, Artificial
  Synthetic oligonucleotide
ggtgtgtatcaaatccttgctatttatagtacgatatcgagcagtctagttttgatggga

SEQ ID NO: 84054 - DNA, 60 bp, Artificial
  Synthetic oligonucleotide
ggggatcaatgatcggaatttctggagaggcgaaaatggacgaaggacaaggattgcata

SEQ ID NO: 84055 - DNA, 60 bp, Artificial
  Synthetic oligonucleotide
ggatgggaactgaaagcatgaattttgccaagagcccggaaattgcggcaaggcctgcgg

SEQ ID NO: 84056 - DNA, 60 bp, Artificial
  Synthetic oligonucleotide
ggatgggaactgaaagcatgaattttgccaagagcccggaaattgcagcaaggcctgcag

SEQ ID NO: 84057 - DNA, 60 bp, Artificial
  Synthetic oligonucleotide
ggctgacatgagcattggagtaacagtaataaagaacaacatgataaacaatgaccttgg

SEQ ID NO: 84058 - DNA, 60 bp, Artificial
  Synthetic oligonucleotide
gccacatagaagaatgctcatgctaccccaatgaaggtaaagtggaatgtgtttgtagag

SEQ ID NO: 84059 - DNA, 60 bp, Artificial
  Synthetic oligonucleotide
atagttagcatcacaataacagtgttggttctccctggaaatggaaataatgggagctgc

SEQ ID NO: 84060 - DNA, 60 bp, Artificial
  Synthetic oligonucleotide
cccaggatggtcctgggatgatggagcaattcttccctttgacatcgataagatgtaatt

SEQ ID NO: 84061 - DNA, 60 bp, Artificial
  Synthetic oligonucleotide
tggtgtttcaagtgaggtcccagggtggtcctgggatgatggagcaattcttccctttgg

SEQ ID NO: 84062 - DNA, 53 bp, Artificial
  Synthetic oligonucleotide
agcaggggaaaatgattgcaatcataatactggcagtagtggtctctaccagc

SEQ ID NO: 84063 - DNA, 60 bp, Artificial
  Synthetic oligonucleotide
tagtgaatgcaccgaatcatgagggaatacaagcaggagtagatagattctacaggactt

SEQ ID NO: 84064 - DNA, 60 bp, Artificial
  Synthetic oligonucleotide
caactggtgtggatggcatgccactctgctgcatttgaagatctgagggtgtcaagcttc

SEQ ID NO: 84065 - DNA, 60 bp, Artificial
  Synthetic oligonucleotide
aaaacccggctcacaagagtcaattagtgtggatggcatgccactctgctgcatttgagg

SEQ ID NO: 84066 - DNA, 60 bp, Artificial
  Synthetic oligonucleotide
aaaacccagctcacaagagtcaattagtgtggatggcatgccactctgctgcatttgagg

SEQ ID NO: 84067 - DNA, 60 bp, Artificial
  Synthetic oligonucleotide
catgcaccaatgcagttgggaggagtgggacaaacaattatggagtaaagggattcggct

SEQ ID NO: 84068 - DNA, 60 bp, Artificial
  Synthetic oligonucleotide
ctcatgcaccaatgcagttgggaggagtgggacaaacaattatggagtaaagggattcgg

SEQ ID NO: 84069 - DNA, 60 bp, Artificial
  Synthetic oligonucleotide
gacaccccaagagttcaagacagcagcttcactggctcatgcaccaatgcagttgggagg

SEQ ID NO: 84070 - DNA, 60 bp, Artificial
  Synthetic oligonucleotide
ggcagaattgattattactggtctgttttaaaaccgggggaaaccttgaatgtggaatct

SEQ ID NO: 84071 - DNA, 60 bp, Artificial
  Synthetic oligonucleotide
gggagacaagagaagaaccctgcgctcagaatgaaatggatgatggcaatgaaatatcca

SEQ ID NO: 84072 - DNA, 60 bp, Artificial
  Synthetic oligonucleotide
ttgtgagaaaaatgatgactaattcacaagacacagagctttctttcacaataactggag

SEQ ID NO: 84073 - DNA, 60 bp, Artificial
  Synthetic oligonucleotide
ttgctatttatagtacggtatcgagcagtctagtcttggtagggctgataatagcagtgg

SEQ ID NO: 84074 - DNA, 60 bp, Artificial
  Synthetic oligonucleotide
tcctaaggggatcagttgcacataagtcttgcctgcctgcttgtgtgtatgggcttgcag

SEQ ID NO: 84075 - DNA, 60 bp, Artificial
  Synthetic oligonucleotide
cacgctcaccgtgcccagtgagcgaggactgcagcgtagacgctttgtccaaaatgccct

SEQ ID NO: 84076 - DNA, 60 bp, Artificial
  Synthetic oligonucleotide
ggttctgtgtcattggcactagttgtattcaacatactgcttcatattgcatcaatagcc

SEQ ID NO: 84077 - DNA, 60 bp, Artificial
  Synthetic oligonucleotide
ggttctgtgtcattggcactagttgtattcaacatactgcttcatattgcatcaatagtc

SEQ ID NO: 84078 - DNA, 60 bp, Artificial
  Synthetic oligonucleotide
atgggcatgttcaacatgctaagtacagttttaggagtctcaatcctaaatctaggacag

SEQ ID NO: 84079 - DNA, 60 bp, Artificial
  Synthetic oligonucleotide
caaggcctgctgtgaatggtcaaagaggcagaattgattattactggtctgttttaaagc

SEQ ID NO: 84080 - DNA, 60 bp, Artificial
  Synthetic oligonucleotide
tgtcacagtctcgcactcgcgagatactaacaaaaaccactgtggaccatatggccataa

SEQ ID NO: 84081 - DNA, 54 bp, Artificial
  Synthetic oligonucleotide
gttcgagtctctgaaactctacagagattcgcttggagaagcagtaatgaggat

SEQ ID NO: 84082 - DNA, 50 bp, Artificial
  Synthetic oligonucleotide
gagtctctgaaactctacagagattcgcttggagaagcagtaatgaggat

SEQ ID NO: 84083 - DNA, 60 bp, Artificial
  Synthetic oligonucleotide
gttcgagtctctgaaactctacagagattcgcttggagaagcagtaatgaggacgggaga

SEQ ID NO: 84084 - DNA, 60 bp, Artificial
  Synthetic oligonucleotide
gacatgagcattggggtaacagtgataaagaacaacatgataaacaatgaccttgggcca

SEQ ID NO: 84085 - DNA, 51 bp, Artificial
  Synthetic oligonucleotide
atgaagggtcttatttcttcggagacaatgcagaggagtatgaaaagtgag

SEQ ID NO: 84086 - DNA, 60 bp, Artificial
  Synthetic oligonucleotide
gctttctttggcatgtccgcaaacgatttgcagaccaagaattgggtgatgccccattcc

SEQ ID NO: 84087 - DNA, 60 bp, Artificial
  Synthetic oligonucleotide
tgccatttatagtacggtatcgagcagtctagtcttggtagggctgatcatagcaatggg

SEQ ID NO: 84088 - DNA, 60 bp, Artificial
  Synthetic oligonucleotide
caagaccaatcctgtcacctctgactaaggggattttaggatttgtttttacgctcaccg

SEQ ID NO: 84089 - DNA, 60 bp, Artificial
  Synthetic oligonucleotide
gacaagaccaatcctgtcacctctgactaaggggattttaggatttgttttcacgctcac

SEQ ID NO: 84090 - DNA, 60 bp, Artificial
  Synthetic oligonucleotide
caagaccaatcctgtcacctctgactaaggggattttaggatttgtgttcacactcaccg

SEQ ID NO: 84091 - DNA, 56 bp, Artificial
  Synthetic oligonucleotide
gaatggaccaggcaattatggataagaacatcatactgaaagcgaatttcagtgtg

SEQ ID NO: 84092 - DNA, 60 bp, Artificial
  Synthetic oligonucleotide
tcactcaccgagtgacatccacatcatggcgtctcaaggcaccaaacgatcctatgaaca

SEQ ID NO: 84093 - DNA, 60 bp, Artificial
  Synthetic oligonucleotide
gtgaagctagagaaccttggtgtgtatcaaattcttgccatttatagtacggtatcgagc

SEQ ID NO: 84094 - DNA, 60 bp, Artificial
  Synthetic oligonucleotide
caggaaatagaatcggtgaagctagagaaccttggtgtgtatcaaattcttgccatttat

SEQ ID NO: 84095 - DNA, 55 bp, Artificial
  Synthetic oligonucleotide
gcgaccaaaagaattcggatggccatcaattagtgtcgaattgtttaaaaacgac

SEQ ID NO: 84096 - DNA, 60 bp, Artificial
  Synthetic oligonucleotide
tgggcatacaatgcagaattactagtactgcttgaaaatcagaaaacactcgatgagcat

SEQ ID NO: 84097 - DNA, 57 bp, Artificial
  Synthetic oligonucleotide
gggcatacaatgcagaactgctagtgctgcttgaaaatcagaaaacactcgatgaac

SEQ ID NO: 84098 - DNA, 60 bp, Artificial
  Synthetic oligonucleotide
gattgcaatcattgtaatagcgatactggcagcaaccgggaagtcagacaagatctgcat

SEQ ID NO: 84099 - DNA, 60 bp, Artificial
  Synthetic oligonucleotide
aaaatgattgcaatcattgtaatagcgatactggcagcagccggaaagtcagacaagatc

SEQ ID NO: 84100 - DNA, 57 bp, Artificial
  Synthetic oligonucleotide
tgattgcaatcattgtaatagcgatactggcagcagccggaaagtcagacaagatct

SEQ ID NO: 84101 - DNA, 57 bp, Artificial
  Synthetic oligonucleotide
tgattgcaatcattgtaatagcgatactggcagcggccgggaagtcagacaagatat

SEQ ID NO: 84102 - DNA, 60 bp, Artificial
  Synthetic oligonucleotide
atgattgcaatcattgtaatagcgatactggcagcggccgggaagtcagacaagatctgc

SEQ ID NO: 84103 - DNA, 60 bp, Artificial
  Synthetic oligonucleotide
atgattgcaatcattgtaatagcgatactggcagcgaccgggaagtcagacaagatctgt

SEQ ID NO: 84104 - DNA, 57 bp, Artificial
  Synthetic oligonucleotide
tgattgcaatcattgtaatagcgatactggcagcggccgggaagtcagacaagatct

SEQ ID NO: 84105 - DNA, 57 bp, Artificial
  Synthetic oligonucleotide
tgattgcaatcattgtaatagcgatactggcagcgaccgggaagtcagacaagatct

SEQ ID NO: 84106 - DNA, 60 bp, Artificial
  Synthetic oligonucleotide
tccttggtatgcttacaaattcaccagttccaataataagggagctgtcttcaaatcaaa

SEQ ID NO: 84107 - DNA, 60 bp, Artificial
  Synthetic oligonucleotide
ggctggcaactggtctgagaaatgtcccacaggcagagacaaggggattgttcggggcca

SEQ ID NO: 84108 - DNA, 60 bp, Artificial
  Synthetic oligonucleotide
ggctggcaactggtctgagaaatgtcccacaggcagagacaagagggttgttcggggcca

SEQ ID NO: 84109 - DNA, 60 bp, Artificial
  Synthetic oligonucleotide
gggactgattgttgccatgggtctttggatgtgctcgaatggttcaatgcagtgcaggat

SEQ ID NO: 84110 - DNA, 60 bp, Artificial
  Synthetic oligonucleotide
gtatgcttacaaattcaccagttccaataataagggagctgtcttcaaatcaaaccttcc

SEQ ID NO: 84111 - DNA, 60 bp, Artificial
  Synthetic oligonucleotide
ctggtctgagaaatgtcccacaggcagagacaagaggattgttcggggccatagcagggt

SEQ ID NO: 84112 - DNA, 60 bp, Artificial
  Synthetic oligonucleotide
gtgggactgatcgttgccatgggtctttggatgtgctcgaatggctcaatgcaatgcagg

SEQ ID NO: 84113 - DNA, 60 bp, Artificial
  Synthetic oligonucleotide
caaaagaagccaacaaactgtaatcccgaatatcggatctagaccctgggtaaggggtat

SEQ ID NO: 84114 - DNA, 60 bp, Artificial
  Synthetic oligonucleotide
cggaaggagtgcctgagtctatgagggaagaatatcgacaggaacagcagaatgctgtgg

SEQ ID NO: 84115 - DNA, 60 bp, Artificial
  Synthetic oligonucleotide
aatgatgggaaaggcaattgtggcccagtactttctaatggagcaaacggagtgaaggga

SEQ ID NO: 84116 - DNA, 60 bp, Artificial
  Synthetic oligonucleotide
gggaaaggcaattgtggcccagtactttctaatggagcaaatggagtgaaggggttctcg

SEQ ID NO: 84117 - DNA, 60 bp, Artificial
  Synthetic oligonucleotide
gggaaaggcaattgtggcccagtactttctaatggagcaaacggagtgaagggattctca

SEQ ID NO: 84118 - DNA, 60 bp, Artificial
  Synthetic oligonucleotide
cgctagccggcaattcctctctttgcccaataagtgggtgggctatctacagcaaagaca

SEQ ID NO: 84119 - DNA, 55 bp, Artificial
  Synthetic oligonucleotide
ttttgggtagagttaatcagaggacaacccaaggaaaacacaatatggacgagtg

SEQ ID NO: 84120 - DNA, 60 bp, Artificial
  Synthetic oligonucleotide
tgtagtggggttttcggtgataacccgcgttctaatgatgggaaaggcaattgtggccca

SEQ ID NO: 84121 - DNA, 60 bp, Artificial
  Synthetic oligonucleotide
tatgcagtggggttttcggtgataacccacgttctaatgatgggaaaggcaattgtggcc

SEQ ID NO: 84122 - DNA, 60 bp, Artificial
  Synthetic oligonucleotide
acagggatgaattgcataaggccttgtttctgggtagagttaatcagaggacaacccaag

SEQ ID NO: 84123 - DNA, 60 bp, Artificial
  Synthetic oligonucleotide
catatgcagtggggttttcggagacaatccacgccccaatgatggaacaggcagctgtgg

SEQ ID NO: 84124 - DNA, 60 bp, Artificial
  Synthetic oligonucleotide
agaaaactgctcagcatgagagacatgtgtgatgctccctttgatgatagactcaggaga

SEQ ID NO: 84125 - DNA, 60 bp, Artificial
  Synthetic oligonucleotide
gaaagctgctcagcatgagagacatgtgtgatgctccctttgatgatagactcagaagag

SEQ ID NO: 84126 - DNA, 60 bp, Artificial
  Synthetic oligonucleotide
tccctttgatgatagactcaggagagatcaaaaggcattaaagggaagaggcagcacact

SEQ ID NO: 84127 - DNA, 60 bp, Artificial
  Synthetic oligonucleotide
agcaaaagcagggtagataatcactcactgagtgacatcaatatcatggcgtctcaaggc

SEQ ID NO: 84128 - DNA, 60 bp, Artificial
  Synthetic oligonucleotide
aatcatggataagaacatcatactgaaagcgaacttcagtgtgatcttcgaccgactgga

SEQ ID NO: 84129 - DNA, 60 bp, Artificial
  Synthetic oligonucleotide
caagctgaaatcagtttcaatggaggccatatagaagaatgctcatgctaccccaatgaa

SEQ ID NO: 84130 - DNA, 60 bp, Artificial
  Synthetic oligonucleotide
tttgaagaaataaggtggttgattgaagaagtgcgacatagactgaaggttacagagaat

SEQ ID NO: 84131 - DNA, 60 bp, Artificial
  Synthetic oligonucleotide
tggtcatacatagtggagaggcccagcgcaccagaggggatgtgttaccctggatctata

SEQ ID NO: 84132 - DNA, 60 bp, Artificial
  Synthetic oligonucleotide
acaatgaagatggagacatcattttcttatgggggatccatcatccacctgacacaaaag

SEQ ID NO: 84133 - DNA, 60 bp, Artificial
  Synthetic oligonucleotide
tggtcatacatagtggagaggcccagcgcaccagaggggatgtgttaccctggatctgta

SEQ ID NO: 84134 - DNA, 60 bp, Artificial
  Synthetic oligonucleotide
gagaacaccacttacaaaattcttagcatttacagtacagtggcggccagtctctgcttg

SEQ ID NO: 84135 - DNA, 60 bp, Artificial
  Synthetic oligonucleotide
atcccaagtgtgacatccatctaaaggatcaaggttggtcatacatagtggagaggccca

SEQ ID NO: 84136 - DNA, 60 bp, Artificial
  Synthetic oligonucleotide
cttagcatttacagtacagtggcggccagtctctgcttggcaatcctgattgctggaggt

SEQ ID NO: 84137 - DNA, 58 bp, Artificial
  Synthetic oligonucleotide
tggtcatacatagtggagaggcccagtgcaccagaggggatgtgttaccctggatctg

SEQ ID NO: 84138 - DNA, 60 bp, Artificial
  Synthetic oligonucleotide
ggtcatacatagtggagaggcccagcgcaccagaggggatgtgttaccctggatctgtag

SEQ ID NO: 84139 - DNA, 60 bp, Artificial
  Synthetic oligonucleotide
cacaaatgcgacaatgagtgtatggagactataaagaatgggacttacgaccataaggaa

SEQ ID NO: 84140 - DNA, 60 bp, Artificial
  Synthetic oligonucleotide
ggtcatacatagtggagaggcccagcgcaccagaggggatgtgttaccctggatctatag

SEQ ID NO: 84141 - DNA, 60 bp, Artificial
  Synthetic oligonucleotide
gtcaataatgaagatggagacatcattttcttatgggggatccatcatccgccggacaca

SEQ ID NO: 84142 - DNA, 60 bp, Artificial
  Synthetic oligonucleotide
ttaacaatgaagatggagacatcattttcttatgggggatccatcatccgcccgacacaa

SEQ ID NO: 84143 - DNA, 60 bp, Artificial
  Synthetic oligonucleotide
caaaattcttagcatttacagtacagtggcggccagtctctgcttggcaatcctgattgc

SEQ ID NO: 84144 - DNA, 60 bp, Artificial
  Synthetic oligonucleotide
tgaagatggagacatcattttcttatgggggattcatcatccacctgatgcaaaagagca

SEQ ID NO: 84145 - DNA, 57 bp, Artificial
  Synthetic oligonucleotide
gggctattcggagccattgctggtttcatcgaaggaggatggtctgggatgattgat

SEQ ID NO: 84146 - DNA, 60 bp, Artificial
  Synthetic oligonucleotide
atatagttgataaaatgaacagggagtttgaagttgtgaatcatgagttttctgaagttg

SEQ ID NO: 84147 - DNA, 60 bp, Artificial
  Synthetic oligonucleotide
acaaaattcttagcatttacagtacagtggcggccagtctctgcttggcaatcctgattg

SEQ ID NO: 84148 - DNA, 60 bp, Artificial
  Synthetic oligonucleotide
agctctcggacgaaaaggcgacgaacccgatcgtgccttcctttgacatgagtaacgagg

SEQ ID NO: 84149 - DNA, 60 bp, Artificial
  Synthetic oligonucleotide
gctctcggacgaaaaggcgacgaacccgatcgtgccttcctttgacatgagtaacgaggg

SEQ ID NO: 84150 - DNA, 60 bp, Artificial
  Synthetic oligonucleotide
gcattgggtctttggatgtgctcaaatggttcaatgcaatgcaggatatgtatataatta

SEQ ID NO: 84151 - DNA, 60 bp, Artificial
  Synthetic oligonucleotide
gtttcttcacggagtggctttgaggttctattgatagaggacgggtggattagaccgagt

SEQ ID NO: 84152 - DNA, 60 bp, Artificial
  Synthetic oligonucleotide
tgcgtacaggccgacagaatctgtgtaggatacttaagcaccaactcaacagaaaaagtt

SEQ ID NO: 84153 - DNA, 56 bp, Artificial
  Synthetic oligonucleotide
tgcgtacaggccgacagaatctgtgtaggatacttaagcaccaactcaacagaaaa

SEQ ID NO: 84154 - DNA, 60 bp, Artificial
  Synthetic oligonucleotide
ccttcataaatgtaatgactcttgtatggagacaataagaaacgggacttacaaccatgc

SEQ ID NO: 84155 - DNA, 60 bp, Artificial
  Synthetic oligonucleotide
ccttcataaatgtaatgactcttgtatggagacaataagaaacgggacttacaaccattc

SEQ ID NO: 84156 - DNA, 60 bp, Artificial
  Synthetic oligonucleotide
ctttgagctccttcataaatgtaatgactcttgtatggagacaataagaaacgggactta

SEQ ID NO: 84157 - DNA, 60 bp, Artificial
  Synthetic oligonucleotide
gctttgaactccttcataaatgtaatgactcttgtatggagacaataagaaacgggactt

SEQ ID NO: 84158 - DNA, 60 bp, Artificial
  Synthetic oligonucleotide
gggcttaggaatgtacctgccacatcaaacagaggactgtttggagcgattgcagggttc

SEQ ID NO: 84159 - DNA, 60 bp, Artificial
  Synthetic oligonucleotide
tcaagttggctactgggcttaggaatgtacctgccacatcaaacagaggactgtttggag

SEQ ID NO: 84160 - DNA, 60 bp, Artificial
  Synthetic oligonucleotide
agcttaagttggcaactgggcttaggaatgtacctgccacatcaaacagaggactgtttg

SEQ ID NO: 84161 - DNA, 60 bp, Artificial
  Synthetic oligonucleotide
gatagtaggaaatcctgcctgtactagcaactttggaatcagagagtggtcatatttaat

SEQ ID NO: 84162 - DNA, 60 bp, Artificial
  Synthetic oligonucleotide
gatcgtaggaaatcctgcctgtactagcaactttgggatcagagagtggtcatatttgat

SEQ ID NO: 84163 - DNA, 60 bp, Artificial
  Synthetic oligonucleotide
cagcccagtgcacttgggagattgcagctttgagggttggatagtaggaaatcctgcctg

SEQ ID NO: 84164 - DNA, 60 bp, Artificial
  Synthetic oligonucleotide
cagcccagtgcacttgggagattgcagctttgagggttggatcgtaggaaatcctgcctg

SEQ ID NO: 84165 - DNA, 60 bp, Artificial
  Synthetic oligonucleotide
agaaaaagttgatacactgttggagaataatgttccagtcacaagctctattgatctagt

SEQ ID NO: 84166 - DNA, 60 bp, Artificial
  Synthetic oligonucleotide
aaaaagttgacacactgttggagagtgatgttccagtcacaagctctattgatctagttg

SEQ ID NO: 84167 - DNA, 54 bp, Artificial
  Synthetic oligonucleotide
cgtacaggcagacagaatctgtgtaggatacttaagcaccaactcaacagaaaa

SEQ ID NO: 84168 - DNA, 60 bp, Artificial
  Synthetic oligonucleotide
cgtacaggcagacagaatctgtgtaggatacttaagcaccaactcaacagaaaaagttga

SEQ ID NO: 84169 - DNA, 60 bp, Artificial
  Synthetic oligonucleotide
ttggatggagtcagcccagtgcacttgggagattgcagctttgagggttggatagtagga

SEQ ID NO: 84170 - DNA, 60 bp, Artificial
  Synthetic oligonucleotide
ttagatggaatcagcccagtgcacttgggagattgcagctttgagggttggatcgtagga

SEQ ID NO: 84171 - DNA, 60 bp, Artificial
  Synthetic oligonucleotide
gacacactgttggagagtgatgttccagtcacaagctctattgatctagttgaaacaaac

SEQ ID NO: 84172 - DNA, 60 bp, Artificial
  Synthetic oligonucleotide
gatacactgttggagaataatgttccagtcacaagctctattgatctagttgagacaaac

SEQ ID NO: 84173 - DNA, 60 bp, Artificial
  Synthetic oligonucleotide
cagtttcgagcagataacgttcttacaggcattgcaactcttacttgaagttgagagtga

SEQ ID NO: 84174 - DNA, 60 bp, Artificial
  Synthetic oligonucleotide
cagataacgttcttgcaggcattgcaactcttacttgaagttgagagtgagataaggaca

SEQ ID NO: 84175 - DNA, 60 bp, Artificial
  Synthetic oligonucleotide
caatgaactgagcaatcttgcaaaaggagagaaggctaatgtgctaattgggcaaggaga

SEQ ID NO: 84176 - DNA, 60 bp, Artificial
  Synthetic oligonucleotide
cgttcccatatactggagatcctccatacagccatggaacgggaacaggatacaccatgg

SEQ ID NO: 84177 - DNA, 60 bp, Artificial
  Synthetic oligonucleotide
gaaacgggactctagcatacttactgacagccagacagcgaccaaaagaatccgaatggc

SEQ ID NO: 84178 - DNA, 60 bp, Artificial
  Synthetic oligonucleotide
cgggactctagcatacttactgacagccagacagcgaccaaaagaatccgaatggccatc

SEQ ID NO: 84179 - DNA, 60 bp, Artificial
  Synthetic oligonucleotide
taagatcgatcgtaatctcgttacttattagcacgtgcgtacaggccgacagaatctgtg

SEQ ID NO: 84180 - DNA, 60 bp, Artificial
  Synthetic oligonucleotide
tgcctgtactagcaactttggaatcagagagtggtcatatttaattgaagacccatctgc

SEQ ID NO: 84181 - DNA, 60 bp, Artificial
  Synthetic oligonucleotide
gtcgttcagcagaactgaattgatcgcacctacttcttggggagaagtgaatgatggagc

SEQ ID NO: 84182 - DNA, 60 bp, Artificial
  Synthetic oligonucleotide
cggatttcaacatcagaatgaacaaggggttggaatcgctgcagataaagaatcgacaca

SEQ ID NO: 84183 - DNA, 60 bp, Artificial
  Synthetic oligonucleotide
aataaatggttggtacggatttcaacatcagaatgaacaaggggttggaatcgctgcaga

SEQ ID NO: 84184 - DNA, 60 bp, Artificial
  Synthetic oligonucleotide
gaaaggtaacaaatatccagtgatcagcaggacttacaacaacacaactggtagagatgt

SEQ ID NO: 84185 - DNA, 60 bp, Artificial
  Synthetic oligonucleotide
cgagaccagatcattatatgtcaatagtgatccttatacgctggtatctaccagctcgtg

SEQ ID NO: 84186 - DNA, 60 bp, Artificial
  Synthetic oligonucleotide
tctttcaaagcccaatcagagtcgccagatgcaacaccaaatgccagacttcggtcggag

SEQ ID NO: 84187 - DNA, 60 bp, Artificial
  Synthetic oligonucleotide
acgggacttacaaccatgctgaatatgcagaagagtcgaaactgaagagacaagaaatag

SEQ ID NO: 84188 - DNA, 60 bp, Artificial
  Synthetic oligonucleotide
gcacttggaaattgccccaagtacataaaatcagggcagcttaagttggcaactgggctt

SEQ ID NO: 84189 - DNA, 60 bp, Artificial
  Synthetic oligonucleotide
caagtgcgaagaacactaaaggccaatgcaattgatgaaggaaatgggtgctttgagctc

SEQ ID NO: 84190 - DNA, 54 bp, Artificial
  Synthetic oligonucleotide
tacaatggtcaaaggagttggatgaagatttactgggttttaatgcatccagga

SEQ ID NO: 84191 - DNA, 59 bp, Artificial
  Synthetic oligonucleotide
aaaatacaaattggaaactggagtcaggcctgggtacaatggtcaaaggagttggatga

SEQ ID NO: 84192 - DNA, 60 bp, Artificial
  Synthetic oligonucleotide
ggaggattgttggccccaagatatggttacataatcgaggagtatggaaaaggaagaatc

SEQ ID NO: 84193 - DNA, 60 bp, Artificial
  Synthetic oligonucleotide
agcagtgttgtgctagtagggctcatacttgcattcataatgtgggcatgtagtagtggc

SEQ ID NO: 84194 - DNA, 60 bp, Artificial
  Synthetic oligonucleotide
ccagctcgtggagtaaaaaatacaaattggaaactggagtcaggcctgggtacaatggtc

SEQ ID NO: 84195 - DNA, 51 bp, Artificial
  Synthetic oligonucleotide
gaagtgaatgatggagcaacatctgcctgcagggacaatacggggacaagc

SEQ ID NO: 84196 - DNA, 60 bp, Artificial
  Synthetic oligonucleotide
atggaaaaggaagaatctttcaaagcccaatcagagtcgccagatgcaacaccaaatgcc

SEQ ID NO: 84197 - DNA, 59 bp, Artificial
  Synthetic oligonucleotide
cattgacaaaatgaacgggaattatgactctatacgaggtgaattcagccaagtagaac

SEQ ID NO: 84198 - DNA, 60 bp, Artificial
  Synthetic oligonucleotide
acaagaaaatggatataagatcgatcgtaatctcgttacttattagcacgtgcgtacagg

SEQ ID NO: 84199 - DNA, 60 bp, Artificial
  Synthetic oligonucleotide
agtatggtttgtgaagaaaggtaacaaatatccagtgatcagcaggacttacaacaacac

SEQ ID NO: 84200 - DNA, 60 bp, Artificial
  Synthetic oligonucleotide
gttgccctggagaaccaacatacaattgatttaactgactcagaaatgaacaaactgttc

SEQ ID NO: 84201 - DNA, 60 bp, Artificial
  Synthetic oligonucleotide
gccctggagaaccaacacacaattgatctaactgactcagaaatgaacaaactgttcgaa

SEQ ID NO: 84202 - DNA, 60 bp, Artificial
  Synthetic oligonucleotide
cggtctccaccaaaagaagccaacaaactgtaatcccgaatatcgggtctagaccctggg

SEQ ID NO: 84203 - DNA, 60 bp, Artificial
  Synthetic oligonucleotide
gttgccctggaaaaccaacatacaattgatttaactgactcagaaatgaacaaactgttc

SEQ ID NO: 84204 - DNA, 60 bp, Artificial
  Synthetic oligonucleotide
catcagggagagttacggtctccaccaaaagaagccaacaaactgtaatcccgaatatcg

SEQ ID NO: 84205 - DNA, 60 bp, Artificial
  Synthetic oligonucleotide
cagtctccaccaaaagaagccaacaaactgtaatcccaaatatcgggtccagaccctggg

SEQ ID NO: 84206 - DNA, 60 bp, Artificial
  Synthetic oligonucleotide
cagcgactgttacccttatgatgtgccggattatgcctcccttaggtcactagttgcctc

SEQ ID NO: 84207 - DNA, 60 bp, Artificial
  Synthetic oligonucleotide
agcacagcttacagcgactgttacccttatgatgtgccggattatgcctcccttaggtca

SEQ ID NO: 84208 - DNA, 60 bp, Artificial
  Synthetic oligonucleotide
taggtcactagttgcctcatccggcaccctggaatttacccaagaaagcttcaattggac

SEQ ID NO: 84209 - DNA, 60 bp, Artificial
  Synthetic oligonucleotide
ccttaggtcactagttgcctcatccggcaccctggaatttacccaagaaagcttcaattg

SEQ ID NO: 84210 - DNA, 60 bp, Artificial
  Synthetic oligonucleotide
cggaaacgggactctagcatacttactgacagccagacagcgaccaaaaggattcggatg

SEQ ID NO: 84211 - DNA, 60 bp, Artificial
  Synthetic oligonucleotide
aggacaaaccctctggagcaaaacaaatgatgccggctcagaccgagtgatggtatcacc

SEQ ID NO: 84212 - DNA, 60 bp, Artificial
  Synthetic oligonucleotide
aaccatttgaatggatgtcaatccgactttactttttctgaaagttccagcgcaaaatgc

SEQ ID NO: 84213 - DNA, 60 bp, Artificial
  Synthetic oligonucleotide
ccatttgaatggatgtcaatccgactttactttttctgaaagttccagcgcaaaatgcca

SEQ ID NO: 84214 - DNA, 60 bp, Artificial
  Synthetic oligonucleotide
gtttgtgttcacgctcaccgtgcccagtgagcgaggactgcagcgtagacgctttgttca

SEQ ID NO: 84215 - DNA, 58 bp, Artificial
  Synthetic oligonucleotide
tgcttgaagtagagcaagagataagaactttctcgtttcagcttatttaataataaaa

SEQ ID NO: 84216 - DNA, 60 bp, Artificial
  Synthetic oligonucleotide
catgataaaggcagtccgaggtgatctgaatttcgtcaacagagcgaaccaacggctgaa

SEQ ID NO: 84217 - DNA, 60 bp, Artificial
  Synthetic oligonucleotide
caatctgaacaaaagaatggaagatggatttctggacgtttggacatacaatgctgaact

SEQ ID NO: 84218 - DNA, 60 bp, Artificial
  Synthetic oligonucleotide
cgggactctagcatacttactgacagtcagacagcgaccaaaagaattcgtatggccatc

SEQ ID NO: 84219 - DNA, 60 bp, Artificial
  Synthetic oligonucleotide
cgggactctagcatacttactgacagtcagacagcgaccaaaagaattcgaatggccatc

SEQ ID NO: 84220 - DNA, 60 bp, Artificial
  Synthetic oligonucleotide
ctcggacgaaaaggccacgaacccgatcgtgccttcctttgacatgagtaatgagggatc

SEQ ID NO: 84221 - DNA, 60 bp, Artificial
  Synthetic oligonucleotide
ctcagacgaaaaggccacgaacccgatcgtgccttcctttgacatgagtaatgagggatc

SEQ ID NO: 84222 - DNA, 60 bp, Artificial
  Synthetic oligonucleotide
agtggcaatggtgttctcacaagaggattgcatgataaaggcagtgagaggtgatttgaa

SEQ ID NO: 84223 - DNA, 60 bp, Artificial
  Synthetic oligonucleotide
tgcaacattctcaaagggaaattccaaacagcagcacaacgagcaatgatggaccaggtg

SEQ ID NO: 84224 - DNA, 60 bp, Artificial
  Synthetic oligonucleotide
ttgagtcccggaatgatgatgggcatgttcaacatgctaagtacagttttaggagtctca

SEQ ID NO: 84225 - DNA, 60 bp, Artificial
  Synthetic oligonucleotide
atggactccaacacgataacctcgtttcaggtagattgctatttatggcacataagaaag

SEQ ID NO: 84226 - DNA, 60 bp, Artificial
  Synthetic oligonucleotide
cacaggagtctgaatgtgcctgcataaatggttcatgttttactgtgatgactgatggcc

SEQ ID NO: 84227 - DNA, 60 bp, Artificial
  Synthetic oligonucleotide
agttttgaacaaataacatttatgcaagccttacaactactgcttgaagtggagcaagag

SEQ ID NO: 84228 - DNA, 60 bp, Artificial
  Synthetic oligonucleotide
actccaacacgataacctcgtttcaggtagattgctatctatggcacataagaaaactgc

SEQ ID NO: 84229 - DNA, 60 bp, Artificial
  Synthetic oligonucleotide
aaggagaattgacaatctaaacaaaagaatggaagatggatttctggatgtctggaccta

SEQ ID NO: 84230 - DNA, 60 bp, Artificial
  Synthetic oligonucleotide
cgaccgctggtctcacccatttgatgatctggcattccaatttgaatgacgccacgtatc

SEQ ID NO: 84231 - DNA, 60 bp, Artificial
  Synthetic oligonucleotide
atgcgaccgctggtctcacccatttgatgatctggcattccaatttgaatgacgccacgt

SEQ ID NO: 84232 - DNA, 60 bp, Artificial
  Synthetic oligonucleotide
agatgaacagatgtatcaaaagtgctgcaatctattcgagaaattcttccctagcagttc

SEQ ID NO: 84233 - DNA, 60 bp, Artificial
  Synthetic oligonucleotide
gattaccaaatcggctatgtatgtagtgggatatttggggacaatcccaggcccatggat

SEQ ID NO: 84234 - DNA, 60 bp, Artificial
  Synthetic oligonucleotide
ttcaacagtaatcttgattaccaaatcggctatgtatgtagtgggatatttggggacaat

SEQ ID NO: 84235 - DNA, 60 bp, Artificial
  Synthetic oligonucleotide
aatgagttgtcccataggagttgccccctctcctagcaatagccgctttgaatctgtggc

SEQ ID NO: 84236 - DNA, 60 bp, Artificial
  Synthetic oligonucleotide
cattgatgagttgtcccataggagttgccccctctcctagcaatagccgctttgaatcgg

SEQ ID NO: 84237 - DNA, 60 bp, Artificial
  Synthetic oligonucleotide
aatgagttgtcccataggagttgccccctctcctagtaacagccgctttgaatctgtggc

SEQ ID NO: 84238 - DNA, 60 bp, Artificial
  Synthetic oligonucleotide
ttcaacagtgatcttgattaccaaatcggctatgtatgtagtgggatatttggggacaac

SEQ ID NO: 84239 - DNA, 60 bp, Artificial
  Synthetic oligonucleotide
tggtcttggtagggctgatcatagcaatgggtctttggatgtgttcaaatggttcaatgc

SEQ ID NO: 84240 - DNA, 58 bp, Artificial
  Synthetic oligonucleotide
gaaagattcgaaatatttcccaaggaaagttcatggcccaaccacaacaccaaaggag

SEQ ID NO: 84241 - DNA, 60 bp, Artificial
  Synthetic oligonucleotide
gcaagactactggtcctgttatgtgcacttgcagctacagatgcagacacaatatgtata

SEQ ID NO: 84242 - DNA, 60 bp, Artificial
  Synthetic oligonucleotide
aatatgtataggctaccatgcgaacaactcaaccgacactgttgacacactactcgagaa

SEQ ID NO: 84243 - DNA, 60 bp, Artificial
  Synthetic oligonucleotide
caggagtaccaaattgaggatggttacaggactaagaaacatcccatccattcaattcag

SEQ ID NO: 84244 - DNA, 60 bp, Artificial
  Synthetic oligonucleotide
gtagtgtcttcaaattataacgggagattcaccccggaaatagctgcaagacccaaagta

SEQ ID NO: 84245 - DNA, 60 bp, Artificial
  Synthetic oligonucleotide
cccaaagctgagcaattcctatgtgaacaataaagggaaagaagtccttgtactatgggg

SEQ ID NO: 84246 - DNA, 60 bp, Artificial
  Synthetic oligonucleotide
ggacatttggacatataatgcagaattgttagttctactggaaaatgaaaggactttgga

SEQ ID NO: 84247 - DNA, 59 bp, Artificial
  Synthetic oligonucleotide
atgtgacagtgacacattctgttaacctgctcgaagacagccacaacgggaaactatgt

SEQ ID NO: 84248 - DNA, 60 bp, Artificial
  Synthetic oligonucleotide
acacactactcgagaagaatgtgacagtgacacattctgttaacctgctcgaagacagcc

SEQ ID NO: 84249 - DNA, 60 bp, Artificial
  Synthetic oligonucleotide
tactcgagaagaatgtgacagtgacacattctgttaacctgctcgaagacagccacaacg

SEQ ID NO: 84250 - DNA, 60 bp, Artificial
  Synthetic oligonucleotide
gctaccatgcgaacaactcaaccgacactgttgacacactactcgagaagaatgtgacag

SEQ ID NO: 84251 - DNA, 60 bp, Artificial
  Synthetic oligonucleotide
cggagacacaataatatttgaggcaactggtaatctaatagcaccatggtatgctttcgc

SEQ ID NO: 84252 - DNA, 60 bp, Artificial
  Synthetic oligonucleotide
tataacgggagattcaccccggaaatagctgcaagacccaaagtaagaaatcaacatggg

SEQ ID NO: 84253 - DNA, 60 bp, Artificial
  Synthetic oligonucleotide
acccaaagtaagaaatcaacatgggaggatgaactattactggaccttgctagaacccgg

SEQ ID NO: 84254 - DNA, 60 bp, Artificial
  Synthetic oligonucleotide
gtaagaaatcaacatgggaggatgaactattactggaccttgctagaacccggagacaca

SEQ ID NO: 84255 - DNA, 60 bp, Artificial
  Synthetic oligonucleotide
atagactaagaagagatcaaaaggcattaaagggaagaggcagcacacttggactcgacc

SEQ ID NO: 84256 - DNA, 60 bp, Artificial
  Synthetic oligonucleotide
actcaggagagatcaaaaggcattaaagggaagaggcagcacacttggactcgacctgcg

SEQ ID NO: 84257 - DNA, 60 bp, Artificial
  Synthetic oligonucleotide
actcagaagagatcaaaaggcattaaagggaagaggcagcacacttggactcgacttgcg

SEQ ID NO: 84258 - DNA, 55 bp, Artificial
  Synthetic oligonucleotide
aaaatgcaattggggtcctcatcggaggacttgaatggaatggtaacacggttcg

SEQ ID NO: 84259 - DNA, 60 bp, Artificial
  Synthetic oligonucleotide
ggatcctcatcggaggacttgaatggaatgataacacagttcgagtctctcaagctctac

SEQ ID NO: 84260 - DNA, 60 bp, Artificial
  Synthetic oligonucleotide
atcggaaggttctacatacagatgtgcactgaactcaaactcagtgactatgaaggaagg

SEQ ID NO: 84261 - DNA, 60 bp, Artificial
  Synthetic oligonucleotide
aaggatcaactctcccgaggagatctggagctgctggtgcagcagtaaagggagttggga

SEQ ID NO: 84262 - DNA, 60 bp, Artificial
  Synthetic oligonucleotide
cccgaggagatctggagctgctggtgcagcagtaaagggagttgggacgatggtgatgga

SEQ ID NO: 84263 - DNA, 60 bp, Artificial
  Synthetic oligonucleotide
cgaggagatctggagctgctggtgcagcagtaaagggagtcgggacgatggtgatggaac

SEQ ID NO: 84264 - DNA, 60 bp, Artificial
  Synthetic oligonucleotide
ggaaagccagaagagaggacaagcatttggacctctagtagctccacagtattttgtggt

SEQ ID NO: 84265 - DNA, 60 bp, Artificial
  Synthetic oligonucleotide
ctgccccaaatacgttggagtaaagagtctcaaactggcagttggcttgaggaatgtgcc

SEQ ID NO: 84266 - DNA, 60 bp, Artificial
  Synthetic oligonucleotide
attgggtaatgacggatggtcctgcgaacaatcaggctagttacaagattttcaagtccc

SEQ ID NO: 84267 - DNA, 60 bp, Artificial
  Synthetic oligonucleotide
cgactgtcgcctcatctcttgtgcttgcaatagggtttgctgccttccttttctgggcca

SEQ ID NO: 84268 - DNA, 60 bp, Artificial
  Synthetic oligonucleotide
gcacagacagactgtgtcctggaagcaatggctttccttgaagagtcccacccaggaatc

SEQ ID NO: 84269 - DNA, 60 bp, Artificial
  Synthetic oligonucleotide
aagacaagaccaatcctgtcacctctgactaaggggattttagggtttgtgttcacgctc

SEQ ID NO: 84270 - DNA, 53 bp, Artificial
  Synthetic oligonucleotide
tcaccataatgactgatggaccaagtaatggccaggcctcatacaagattttc

SEQ ID NO: 84271 - DNA, 53 bp, Artificial
  Synthetic oligonucleotide
ttgaggcactcatggagtggctaaagacaagaccaatcctgtcacctctgact

SEQ ID NO: 84272 - DNA, 60 bp, Artificial
  Synthetic oligonucleotide
gaccaggcgattatggataagaacatcatactgaaagcgaacttcagtgtgatcttcaat

SEQ ID NO: 84273 - DNA, 60 bp, Artificial
  Synthetic oligonucleotide
gcaagccctacaactactgcttgaagtggagcaagagataagaactttctcgtttcagct

SEQ ID NO: 84274 - DNA, 60 bp, Artificial
  Synthetic oligonucleotide
ttcagacaaggtaatagtgtgtgggcaggaagaacagttagcatttcatcccgaagtggg

SEQ ID NO: 84275 - DNA, 60 bp, Artificial
  Synthetic oligonucleotide
cagacaaggtaatagtgtgtgggcaggaagaacagttagcatttcatcccgaagtgggtt

SEQ ID NO: 84276 - DNA, 60 bp, Artificial
  Synthetic oligonucleotide
gacaaggtaatagtgtgtgggcaggaagaacagttagcatttcatcccgaagtgggtttg

SEQ ID NO: 84277 - DNA, 60 bp, Artificial
  Synthetic oligonucleotide
tgccatttatagtacggtatcgagcagtctagtcttggtagggctgatcatagcattggg

SEQ ID NO: 84278 - DNA, 60 bp, Artificial
  Synthetic oligonucleotide
gaagataatatgcatttcagctacaggaatgacactatcggtagtaagcctcctgatagg

SEQ ID NO: 84279 - DNA, 60 bp, Artificial
  Synthetic oligonucleotide
gaagataatatgcatatcagctacaggaatgacactatcggtagtaagcctcctgatagg

SEQ ID NO: 84280 - DNA, 60 bp, Artificial
  Synthetic oligonucleotide
atgaatccaaatcagaagataatatgcatatcagctacaggaatgacactatcggtagta

SEQ ID NO: 84281 - DNA, 60 bp, Artificial
  Synthetic oligonucleotide
atcggtagtaagcctcctgataggaattgccaacttaggtttgaacatcggactccatta

SEQ ID NO: 84282 - DNA, 60 bp, Artificial
  Synthetic oligonucleotide
gggttggatcttagggaatcctcaatgtgatctattgcttggtgatcaaagctggtcata

SEQ ID NO: 84283 - DNA, 60 bp, Artificial
  Synthetic oligonucleotide
ggcaatttaatagctccttggtatgcttacaaattcactagctccaataataagggagct

SEQ ID NO: 84284 - DNA, 60 bp, Artificial
  Synthetic oligonucleotide
tctcagccaagggacaacgatcagagggaaacactcaaatggaacaatacacgatagatc

SEQ ID NO: 84285 - DNA, 60 bp, Artificial
  Synthetic oligonucleotide
gccaaggaacaacgataaggggaaagcactcaaatggaacaatacacgatagatcccaat

SEQ ID NO: 84286 - DNA, 53 bp, Artificial
  Synthetic oligonucleotide
ctaggggtgttcaaattgcatccaatgagaacatggaaacaatgaattccagc

SEQ ID NO: 84287 - DNA, 54 bp, Artificial
  Synthetic oligonucleotide
accaggggtgttcaaattgcatccaatgagaacatggaaaccatgaattccagc

SEQ ID NO: 84288 - DNA, 53 bp, Artificial
  Synthetic oligonucleotide
ctaggggtgttcaaattgcatccaatgagaacatggaaaccatgaattccagc

SEQ ID NO: 84289 - DNA, 60 bp, Artificial
  Synthetic oligonucleotide
cttgatgcactcatggaatggctaaagacaagaccaatcctgtcacctctgactaagggg

SEQ ID NO: 84290 - DNA, 60 bp, Artificial
  Synthetic oligonucleotide
ttgaaagatgagtcttctaaccgaggtcgaaacgtacgttctctctattgtcccgtcagg

SEQ ID NO: 84291 - DNA, 60 bp, Artificial
  Synthetic oligonucleotide
aagatgagtcttctaaccgaggtcgaaacgtacgttctctctatagtcccgtcaggcccc

SEQ ID NO: 84292 - DNA, 60 bp, Artificial
  Synthetic oligonucleotide
gctatctatggcatataagaaagctactcagcatgagagacatgtgtgatgctccctttg

SEQ ID NO: 84293 - DNA, 60 bp, Artificial
  Synthetic oligonucleotide
caagaattgcttacgaaagaatgtgcaacattctcaaagggaaattccaaacagcagcac

SEQ ID NO: 84294 - DNA, 59 bp, Artificial
  Synthetic oligonucleotide
cttgaaagttccagcgcaaaatgccataagcaccacattcccatatactggagatcctc

SEQ ID NO: 84295 - DNA, 60 bp, Artificial
  Synthetic oligonucleotide
gaaagagcgaccatcatggctgcattcacaggaaatgcagaaggcagaacatctgatatg

SEQ ID NO: 84296 - DNA, 60 bp, Artificial
  Synthetic oligonucleotide
gaaagagcgaccatcatggctgcattcacaggaaacgcagaaggaaggacatccgatatg

SEQ ID NO: 84297 - DNA, 60 bp, Artificial
  Synthetic oligonucleotide
gaaagataggagtccttaccgtgcattgatgagtgtgccattaggatcttcacccaatgc

SEQ ID NO: 84298 - DNA, 60 bp, Artificial
  Synthetic oligonucleotide
attgggtaatgacggatggtcctgcgaacaatcaggctagttacaagattttcaagtctc

SEQ ID NO: 84299 - DNA, 60 bp, Artificial
  Synthetic oligonucleotide
tttggacatacaatgctgaactgttggttcttcttgaaaacgaaagaacactagacctgc

SEQ ID NO: 84300 - DNA, 60 bp, Artificial
  Synthetic oligonucleotide
gtggaccatatggccataatcaagaaatacacatcaggacgacaggaaaagaaccctgcc

SEQ ID NO: 84301 - DNA, 60 bp, Artificial
  Synthetic oligonucleotide
cacttttaaaagaacaagcggatcgtcagtcaaaagagaagaagaagtgcttacaggcaa

SEQ ID NO: 84302 - DNA, 60 bp, Artificial
  Synthetic oligonucleotide
gtggaatctaatggaaacctaatcgccccttggtatgcatacaaatttgtcagcaccaat

SEQ ID NO: 84303 - DNA, 60 bp, Artificial
  Synthetic oligonucleotide
tgtgcaacatcctcaaagggaaatttcaaacagcagcacaacgggctatgatggatcaag

SEQ ID NO: 84304 - DNA, 60 bp, Artificial
  Synthetic oligonucleotide
ggtaatgtgtgtatgcagagacaactggcatggttcgaatcgaccatgggtgtctttcaa

SEQ ID NO: 84305 - DNA, 60 bp, Artificial
  Synthetic oligonucleotide
atgatgctggctcagaccgagtgatggtatcacctctggctgtaacatggtggaatagga

SEQ ID NO: 84306 - DNA, 60 bp, Artificial
  Synthetic oligonucleotide
aaccaagtggatatgcacaaacagactgtgtcctggaagcaatggctttccttgaagagt

SEQ ID NO: 84307 - DNA, 60 bp, Artificial
  Synthetic oligonucleotide
cattggagtgacagtgataaagaacaacatgataaacaatgaccttgggccagcaacggc

SEQ ID NO: 84308 - DNA, 60 bp, Artificial
  Synthetic oligonucleotide
aaatgtcagacatatgcaggagcaattaatagcagcaaaccctttcagaatgcaagtaga

SEQ ID NO: 84309 - DNA, 60 bp, Artificial
  Synthetic oligonucleotide
tcaacaggtgcccaatccttctatagaagcatcaactggttgaccaaaaagaaaccagac

SEQ ID NO: 84310 - DNA, 60 bp, Artificial
  Synthetic oligonucleotide
aaatgtcaaacatatgcaggagcaattaatagcagcaaaccctttcagaatgcaagtaga

SEQ ID NO: 84311 - DNA, 60 bp, Artificial
  Synthetic oligonucleotide
agcaaaagcaggggtcacaatggagaaattcatcgcaatagcaatgctcttggcgagcac

SEQ ID NO: 84312 - DNA, 55 bp, Artificial
  Synthetic oligonucleotide
atcggtagtaagcctcctgataggaattgccaatttaggtttaaacatcggactc

SEQ ID NO: 84313 - DNA, 60 bp, Artificial
  Synthetic oligonucleotide
tagcattaggtctttggatgtgttcaaatggttcaatgcaatgcaggatatgtatataat

SEQ ID NO: 84314 - DNA, 60 bp, Artificial
  Synthetic oligonucleotide
tagcattgggtctttggatgtgttcaaatggttcaatgcaatgcaggatatgtatataat

SEQ ID NO: 84315 - DNA, 54 bp, Artificial
  Synthetic oligonucleotide
tagcaatgggtctttggatgtgttcaaatggttcaatgcaatgcaggatatgta

SEQ ID NO: 84316 - DNA, 60 bp, Artificial
  Synthetic oligonucleotide
cctgattgctggaggtttaatcctgggtatgcaaaatggatcttgtagatgcatgttctg

SEQ ID NO: 84317 - DNA, 60 bp, Artificial
  Synthetic oligonucleotide
attggtcccagaccattagtaagaggacaacaaggaagaatggattactattggggcatt

SEQ ID NO: 84318 - DNA, 60 bp, Artificial
  Synthetic oligonucleotide
atgcatcaacaggtggccaatccttctataggagcatcaactggttgaccaagaagaaac

SEQ ID NO: 84319 - DNA, 60 bp, Artificial
  Synthetic oligonucleotide
cacaccttctattgaacccaaagggctattcggagccattgctggtttcatcgagggagg

SEQ ID NO: 84320 - DNA, 60 bp, Artificial
  Synthetic oligonucleotide
gcttcttattgttcaggcacttagggacaacctggaacctggaaccttcgatcttggagg

SEQ ID NO: 84321 - DNA, 60 bp, Artificial
  Synthetic oligonucleotide
cttgaaagttccagcgcaaaatgccataagcaccacattcccatacactggagatcctcc

SEQ ID NO: 84322 - DNA, 60 bp, Artificial
  Synthetic oligonucleotide
cttgaaagttccagcgcaaaatgccataagcaccacattcccttatactggagaccctcc

SEQ ID NO: 84323 - DNA, 60 bp, Artificial
  Synthetic oligonucleotide
cttgaaagttccagcgcaaaatgccataagcaccacattcccctatactggagatcctcc

SEQ ID NO: 84324 - DNA, 60 bp, Artificial
  Synthetic oligonucleotide
tgatgggcatgttcaacatgctaagtacagttttaggagtttcaatcctaaacctgggac

SEQ ID NO: 84325 - DNA, 60 bp, Artificial
  Synthetic oligonucleotide
ggttctgtgtcattggcactagttgtactcaacatactgcttcatattgcatcaatagtc

SEQ ID NO: 84326 - DNA, 60 bp, Artificial
  Synthetic oligonucleotide
gtgagaagagcaacagtatcagcagacccactagcatctctattggagatgtgccacagc

SEQ ID NO: 84327 - DNA, 60 bp, Artificial
  Synthetic oligonucleotide
tgtcgaggacactaagatagatctatggtcttacaatgcagagcttctggtggccttgga

SEQ ID NO: 84328 - DNA, 60 bp, Artificial
  Synthetic oligonucleotide
aggtctctaattgcttcctcaggaaccctagagttcatcacagaaggattcacatggaca

SEQ ID NO: 84329 - DNA, 60 bp, Artificial
  Synthetic oligonucleotide
cacatggacaggagtcactcaaaatggaggaagcagtgcatgcaaaagaggacctgctag

SEQ ID NO: 84330 - DNA, 60 bp, Artificial
  Synthetic oligonucleotide
gtcgaggacactaagatagatctatggtcttacaatgcagagcttctggtggccttggaa

SEQ ID NO: 84331 - DNA, 60 bp, Artificial
  Synthetic oligonucleotide
caggaacgggacctatgatcatgacatatacagagatgaagcattaaacaatcgatttca

SEQ ID NO: 84332 - DNA, 60 bp, Artificial
  Synthetic oligonucleotide
tcaaatcaaaggcgtggagctaaaatctggatacaaagattggatcttatggatttcctt

SEQ ID NO: 84333 - DNA, 60 bp, Artificial
  Synthetic oligonucleotide
ctctctgagggcattcacagaagatggtgctattgtggctgaaatatctcccattccctc

SEQ ID NO: 84334 - DNA, 60 bp, Artificial
  Synthetic oligonucleotide
cattaaaggggagaggcagcacacttggactcgatctaagagtggctacaatggagggga

SEQ ID NO: 84335 - DNA, 60 bp, Artificial
  Synthetic oligonucleotide
gaggagataagccgagaatggtacatgctgatgcctaggcagaaaataaccggaggcctt

SEQ ID NO: 84336 - DNA, 53 bp, Artificial
  Synthetic oligonucleotide
gacagcgaccaaaaggattcggatggccatcaattagtgtcgaattgttaaaa

SEQ ID NO: 84337 - DNA, 52 bp, Artificial
  Synthetic oligonucleotide
atctgttccaccattgaagagctcagacggcaaaaatagtgaatttagcttg

SEQ ID NO: 84338 - DNA, 60 bp, Artificial
  Synthetic oligonucleotide
agcaaaagcaggcaaaccatttgaatggatgtcaatccgactttacttttcttgaaagtt

SEQ ID NO: 84339 - DNA, 53 bp, Artificial
  Synthetic oligonucleotide
agcgaaagcaggcaaaccatttgaatggatgtcaatccgactttacttttctt

SEQ ID NO: 84340 - DNA, 60 bp, Artificial
  Synthetic oligonucleotide
gcgaacagaagttataaggatgatggaaagtgcaaaaccagaagatttgtccttccaggg

SEQ ID NO: 84341 - DNA, 60 bp, Artificial
  Synthetic oligonucleotide
gaatctcccttttgaaagagcaaccattatggcagctttcagcgggaacaatgaaggacg

SEQ ID NO: 84342 - DNA, 60 bp, Artificial
  Synthetic oligonucleotide
aaagcatccgcgggccagatcagtgtgcaacctacattctcagtacaacggaatctccct

SEQ ID NO: 84343 - DNA, 60 bp, Artificial
  Synthetic oligonucleotide
acggaaacgggactctagcatacttactgacagtcagacagcgaccaaaagaattcgtat

SEQ ID NO: 84344 - DNA, 60 bp, Artificial
  Synthetic oligonucleotide
acggaaacgggactctagcatacttactgacagtcagacagcgaccaaaagaattcgaat

SEQ ID NO: 84345 - DNA, 60 bp, Artificial
  Synthetic oligonucleotide
acgaaaacgggactctagcatacttactgacagtcagacagcgaccaaaagaattcggat

SEQ ID NO: 84346 - DNA, 60 bp, Artificial
  Synthetic oligonucleotide
tcatggcccagccaagagcatggaatatgatgctgttgctactacacactcctggatccc

SEQ ID NO: 84347 - DNA, 60 bp, Artificial
  Synthetic oligonucleotide
gactgctttctttggcatgtccgcaaacgatttgcagaccaagaattgggtgatgcccca

SEQ ID NO: 84348 - DNA, 60 bp, Artificial
  Synthetic oligonucleotide
gcaagccttacaactactgcttgaggtagaacaagagataaggactttctcgtttcagct

SEQ ID NO: 84349 - DNA, 60 bp, Artificial
  Synthetic oligonucleotide
gcaagccttaaaactactgcttgaggtagaacaagagataaggactttctcgtttcagct

SEQ ID NO: 84350 - DNA, 60 bp, Artificial
  Synthetic oligonucleotide
gcaagccttacaactactgcttgaagtcgaacaagagataaggactttctcgtttcagct

SEQ ID NO: 84351 - DNA, 60 bp, Artificial
  Synthetic oligonucleotide
ttcaagtgaggtcccaggatggtcctgggatgatggagcaattcttccctttgacatcga

SEQ ID NO: 84352 - DNA, 60 bp, Artificial
  Synthetic oligonucleotide
cccaggatggtcctgggatgatggagcaattcttccctttgacatcgataagatgtagct

SEQ ID NO: 84353 - DNA, 60 bp, Artificial
  Synthetic oligonucleotide
tttccagtgaggtcccaggatggtcctgggatgatggagcaattcttccctttgacatcg

SEQ ID NO: 84354 - DNA, 60 bp, Artificial
  Synthetic oligonucleotide
gaattggttcagagttcctcaacaggtagaatatgtgaccgacctcatcgaatccttgat

SEQ ID NO: 84355 - DNA, 60 bp, Artificial
  Synthetic oligonucleotide
cgaagtggagaaagctcaataatgaggtcagatgcacccattgatagctgcaattctgaa

SEQ ID NO: 84356 - DNA, 60 bp, Artificial
  Synthetic oligonucleotide
ccaaaccagtctatatgttcaagcatcagggagagtcacaatctctaccaaaagaagcca

SEQ ID NO: 84357 - DNA, 60 bp, Artificial
  Synthetic oligonucleotide
aatttgacaaattgtacatttggggggtgcaccacccgagcacggacagtgaccaaacca

SEQ ID NO: 84358 - DNA, 60 bp, Artificial
  Synthetic oligonucleotide
attagaatacaaatatccagcactgaacgtgactatgccaaacaatgaaaaatttgacaa

SEQ ID NO: 84359 - DNA, 60 bp, Artificial
  Synthetic oligonucleotide
gtttcgattggactggagtctctcaggatggaacaagcaatgcttgcaaaaggagatctg

SEQ ID NO: 84360 - DNA, 60 bp, Artificial
  Synthetic oligonucleotide
tgcctcatccggcaccctggagtttaacgatgaaagtttcgattggactggagtctctca

SEQ ID NO: 84361 - DNA, 60 bp, Artificial
  Synthetic oligonucleotide
gattaacagcacagggaatctaatcgcccctcggggttacttcaagatacgaagtggaga

SEQ ID NO: 84362 - DNA, 60 bp, Artificial
  Synthetic oligonucleotide
ctcattgtgatagtttccaaaacaaggaatgggacctttttgtagaacgcagcacagctt

SEQ ID NO: 84363 - DNA, 60 bp, Artificial
  Synthetic oligonucleotide
gcctgcatagggtcgatcagaaatggaacttatgaccataatgtatacagagacgaagca

SEQ ID NO: 84364 - DNA, 60 bp, Artificial
  Synthetic oligonucleotide
ccaataacaaaccatttcaaaatgtaaacaggatcacatatggggcctgtcctagatatg

SEQ ID NO: 84365 - DNA, 60 bp, Artificial
  Synthetic oligonucleotide
gagacgaagcattaaacaaccgactccatatcaaaggggttgagctgaagtcaggataca

SEQ ID NO: 84366 - DNA, 60 bp, Artificial
  Synthetic oligonucleotide
ggggtatctccagcagaataagcatctattggacaatagtaaaacctggagacatactta

SEQ ID NO: 84367 - DNA, 60 bp, Artificial
  Synthetic oligonucleotide
caggacaagcagcagacctcaaaagcactcaggcagcaattaaccaaatcaacgggaaac

SEQ ID NO: 84368 - DNA, 60 bp, Artificial
  Synthetic oligonucleotide
ccaacaaactgtaatcccgaatatcggatctagaccctgggtaaggggtatctccagcag

SEQ ID NO: 84369 - DNA, 60 bp, Artificial
  Synthetic oligonucleotide
tcagacgtggaagggagaattcaggatctcgagaaatatgttgaagacaccaaaatagat

SEQ ID NO: 84370 - DNA, 60 bp, Artificial
  Synthetic oligonucleotide
cactagtgaaaacaatcacgaatgaccaaattgaagtgactaatgctactgaattggttc

SEQ ID NO: 84371 - DNA, 60 bp, Artificial
  Synthetic oligonucleotide
aatccttgatggggaaaactgcacactgatagatgctctcttgggagaccctcattgtga

SEQ ID NO: 84372 - DNA, 60 bp, Artificial
  Synthetic oligonucleotide
gggaatggtagacggttggtacggttttaggcatctaaattctgagggctcaggacaagc

SEQ ID NO: 84373 - DNA, 60 bp, Artificial
  Synthetic oligonucleotide
gctgaactgttggttcttcttgaaaacgaaaggacactagacctacatgacgcgaatgtg

SEQ ID NO: 84374 - DNA, 60 bp, Artificial
  Synthetic oligonucleotide
ccttaggtcactagttgcctcatccggcaccctggagtttaacgatgaaagtttcgattg

SEQ ID NO: 84375 - DNA, 60 bp, Artificial
  Synthetic oligonucleotide
cctagatatgttaaacaaaaaactctaaaattggcaacagggatgcggaatgtaccagag

SEQ ID NO: 84376 - DNA, 57 bp, Artificial
  Synthetic oligonucleotide
aaaactctaaaattggcaacagggatgcggaatgtaccagagaaacaagctaggggc

SEQ ID NO: 84377 - DNA, 60 bp, Artificial
  Synthetic oligonucleotide
gaaattggcaacagggatgcggaatgtaccagaaaaacaaactagaggcatattcggcgc

SEQ ID NO: 84378 - DNA, 60 bp, Artificial
  Synthetic oligonucleotide
cacttaaaatgaccattgcatccgtacctacttcgcgctacctagctgacatgaccctcg

SEQ ID NO: 84379 - DNA, 60 bp, Artificial
  Synthetic oligonucleotide
ttccttactcaaggttccctactcaatgacaaacattctaatggcacagtgaaagacaga

SEQ ID NO: 84380 - DNA, 60 bp, Artificial
  Synthetic oligonucleotide
ccctaaaaggaagaggcaacaccattggcctcgacatcgaaacagccactcttattggga

SEQ ID NO: 84381 - DNA, 60 bp, Artificial
  Synthetic oligonucleotide
gggaaacaaattgtggaatggattttgaaagaggaatccagcgagacacttaagatgacc

SEQ ID NO: 84382 - DNA, 60 bp, Artificial
  Synthetic oligonucleotide
ggacagaaatttgaggaaataaggtggttgattgaagaagtgcggcaaagattgaaagcg

SEQ ID NO: 84383 - DNA, 60 bp, Artificial
  Synthetic oligonucleotide
cttattgggaaacaaattgtggaatggattttgaaagaggaatccagcgagacacttaag

SEQ ID NO: 84384 - DNA, 60 bp, Artificial
  Synthetic oligonucleotide
gcccttatcgtgcattgatgagtgtgccattaggatcttcacccaatgcttaccaggcca

SEQ ID NO: 84385 - DNA, 60 bp, Artificial
  Synthetic oligonucleotide
gtccttaccgtgcattgatgagtgtgccattaggatcttcacccaatgcttaccaagcca

SEQ ID NO: 84386 - DNA, 60 bp, Artificial
  Synthetic oligonucleotide
cccttatcgtgcattgatgagtgtgccattaggatcttcacccaatgcttaccaggccaa

SEQ ID NO: 84387 - DNA, 60 bp, Artificial
  Synthetic oligonucleotide
gtccttatcgtgcattgatgagtgtgccattaggatcttcacccaatgcttaccaggcca

SEQ ID NO: 84388 - DNA, 60 bp, Artificial
  Synthetic oligonucleotide
ccttatcgtgcattgatgagtgtgccattaggatcttcacccaatgcttaccaggccaag

SEQ ID NO: 84389 - DNA, 60 bp, Artificial
  Synthetic oligonucleotide
tatcgtgcattgatgagtgtgccattaggatcttcacccaatgcttatcaggctaagttt

SEQ ID NO: 84390 - DNA, 60 bp, Artificial
  Synthetic oligonucleotide
gaagcaatcgaggagtgcctgattaatgatccctgggttttgcttaatgcatcttggttc

SEQ ID NO: 84391 - DNA, 60 bp, Artificial
  Synthetic oligonucleotide
gggggatggactggaatgatagatgggtggtatggctatcaccatgaaaattctcaaggc

SEQ ID NO: 84392 - DNA, 58 bp, Artificial
  Synthetic oligonucleotide
tacttgaagtggagcaagagataagaactttctcgtttcagcttatttaataataaaa

SEQ ID NO: 84393 - DNA, 56 bp, Artificial
  Synthetic oligonucleotide
gctcaccgtgcccagtgagcgaggactgcagcgtagacgctttgtccaaagtgcac

SEQ ID NO: 84394 - DNA, 60 bp, Artificial
  Synthetic oligonucleotide
ggtagctaaatcagttgagttgaatgcccctaattaccactatgaggagtgctcctgtta

SEQ ID NO: 84395 - DNA, 60 bp, Artificial
  Synthetic oligonucleotide
gaggggaatcaatgaccgaaacttctggagaggtgaaaatggaaggagaacaagaattgc

SEQ ID NO: 84396 - DNA, 60 bp, Artificial
  Synthetic oligonucleotide
ctgagcaatcttgcaaaaggggagaaggctaatgtgctaattgggcaaggagacgtagtg

SEQ ID NO: 84397 - DNA, 60 bp, Artificial
  Synthetic oligonucleotide
ggatttctggacgtttggacatacaatgctgaactgttggttcttcttgaaaacgaaaga

SEQ ID NO: 84398 - DNA, 60 bp, Artificial
  Synthetic oligonucleotide
gggttttgcgcccttttccaaagacaacggaataagaattggatcgagaggtcatgtttt

SEQ ID NO: 84399 - DNA, 60 bp, Artificial
  Synthetic oligonucleotide
taagggttttgcgcccttttccaaagacaacggaataagaattggatcgagaggtcatgt

SEQ ID NO: 84400 - DNA, 51 bp, Artificial
  Synthetic oligonucleotide
gggatgatggagcaattcttccctttgacatcgataagatgtaatttgtaa

SEQ ID NO: 84401 - DNA, 54 bp, Artificial
  Synthetic oligonucleotide
cctgggatgatggcgcaattcttccctttgacatcgataagatgtaatttgtga

SEQ ID NO: 84402 - DNA, 60 bp, Artificial
  Synthetic oligonucleotide
gagtccgttcagagccctcgtaagttgggaaatgggtcaagcacccagcccatataacgc

SEQ ID NO: 84403 - DNA, 60 bp, Artificial
  Synthetic oligonucleotide
gtccgttcagagccctcgtaagttgggaaatgggtcaagcacccagcccatataatgcta

SEQ ID NO: 84404 - DNA, 60 bp, Artificial
  Synthetic oligonucleotide
ctggtcgggatactcaggagcattcatagactactgggcaaacaaagagtgcttcaatcc

SEQ ID NO: 84405 - DNA, 58 bp, Artificial
  Synthetic oligonucleotide
ggatactcaggagcattcatagactactgggcaaacaaagagtgcttcaatccttgtt

SEQ ID NO: 84406 - DNA, 60 bp, Artificial
  Synthetic oligonucleotide
aggagtccgttcagagccctcgtaagttgggaaatgggtcaagcacccagcccatataac

SEQ ID NO: 84407 - DNA, 60 bp, Artificial
  Synthetic oligonucleotide
gcctctatgtgaagtaaactcatggcacatcctgtcaaaagataatgcaataagaattgg

SEQ ID NO: 84408 - DNA, 60 bp, Artificial
  Synthetic oligonucleotide
atgaatccaaatcagaagataatatgcatttcagctacaggcatgacactatcggtagta

SEQ ID NO: 84409 - DNA, 60 bp, Artificial
  Synthetic oligonucleotide
caatcgggcccaatcgcacatcaggtgattgtcaacaaccaaaactggtcgggatactca

SEQ ID NO: 84410 - DNA, 60 bp, Artificial
  Synthetic oligonucleotide
gcatcagctgtggtgtggtatgggggtagaccagtaacagaaattccatcatgggcagga

SEQ ID NO: 84411 - DNA, 60 bp, Artificial
  Synthetic oligonucleotide
ggatactcaggagcattcatagactactgggcaaacaaagagtgcttcaatccttgtttc

SEQ ID NO: 84412 - DNA, 60 bp, Artificial
  Synthetic oligonucleotide
ccgttcagagccctcgtaagttgggaaatgggtcaagcacccagcccatataatgctaag

SEQ ID NO: 84413 - DNA, 60 bp, Artificial
  Synthetic oligonucleotide
aaacaataacgcatcagctgtggtgtggtatgggggtagaccaataacagaaattccatc

SEQ ID NO: 84414 - DNA, 60 bp, Artificial
  Synthetic oligonucleotide
gggcccaatcgcacatcaggtgattgtcaacaaccaaaactggtcgggatactcaggagc

SEQ ID NO: 84415 - DNA, 60 bp, Artificial
  Synthetic oligonucleotide
gggcccaatcacacaccaggtaattgtcaacaaccaaaactggtcgggatactcaggagc

SEQ ID NO: 84416 - DNA, 60 bp, Artificial
  Synthetic oligonucleotide
aatcgggcccaatcacacaccagataattgtcaacaaccaaaactggtcgggatactcag

SEQ ID NO: 84417 - DNA, 60 bp, Artificial
  Synthetic oligonucleotide
gggcccaatcacacaccagataattgtcaacaaccaaaactggtcgggatactcaggagc

SEQ ID NO: 84418 - DNA, 60 bp, Artificial
  Synthetic oligonucleotide
gatctgcatcggatatcatgccaacaattcaacaacacaagtggatacgatactggagaa

SEQ ID NO: 84419 - DNA, 60 bp, Artificial
  Synthetic oligonucleotide
ctacgagacaatgctaacgatctgggaaatgggtgctttgaattttggcataagtgtgat

SEQ ID NO: 84420 - DNA, 60 bp, Artificial
  Synthetic oligonucleotide
gtgaaactagagaaccttggtgtgtatcaaattcttgccatctatagtacggtatcgagc

SEQ ID NO: 84421 - DNA, 60 bp, Artificial
  Synthetic oligonucleotide
ggaacaagcaaagcatgttcaaattcattctacaggagtatgagatggctgactcacaag

SEQ ID NO: 84422 - DNA, 60 bp, Artificial
  Synthetic oligonucleotide
gtggccatggtattttcacaagaggattgcatgatcaaggcagtcaggggcgatctgaac

SEQ ID NO: 84423 - DNA, 60 bp, Artificial
  Synthetic oligonucleotide
agtactgaagccaggtcagacattgcgagtgagatccaatgggaatttaattgctccatg

SEQ ID NO: 84424 - DNA, 60 bp, Artificial
  Synthetic oligonucleotide
ccaggtcagacattgcgagtgagatccaatgggaatttaattgctccatggtatggacac

SEQ ID NO: 84425 - DNA, 60 bp, Artificial
  Synthetic oligonucleotide
ttgctccatggtatggacacatcctctcaggagaaagccatgggagaatcctgaagaccg

SEQ ID NO: 84426 - DNA, 60 bp, Artificial
  Synthetic oligonucleotide
ggacacatcctctcaggagaaagccatgggagaatcctgaagaccgatttgaacagtggc

SEQ ID NO: 84427 - DNA, 60 bp, Artificial
  Synthetic oligonucleotide
catgttcaaacacattctacaggaatatgagatggctgacacacaagagtgattcttatc

SEQ ID NO: 84428 - DNA, 60 bp, Artificial
  Synthetic oligonucleotide
tctacaggaatatgagatggctgacacacaagagtgattcttatcctgttcaagacgccc

SEQ ID NO: 84429 - DNA, 60 bp, Artificial
  Synthetic oligonucleotide
ccaaggccccttgtcaaaggtcaacaggggagaattgattattattggtcagtactgaag

SEQ ID NO: 84430 - DNA, 60 bp, Artificial
  Synthetic oligonucleotide
gccccttgtcaaaggtcaacaggggagaattgattattattggtcagtactgaagccagg

SEQ ID NO: 84431 - DNA, 60 bp, Artificial
  Synthetic oligonucleotide
ggcagaaaatagaaggggtaaaactggaatctgggggtacttacaagattctcaccattt

SEQ ID NO: 84432 - DNA, 60 bp, Artificial
  Synthetic oligonucleotide
ctgaagaccgatttgaacagtggcaactgcatagtacagtgtcaaactgagaaaggtggt

SEQ ID NO: 84433 - DNA, 60 bp, Artificial
  Synthetic oligonucleotide
gagtctcaaactggcaatcggtctgaggaatgtgcctgctgcatcagataggggaatatt

SEQ ID NO: 84434 - DNA, 60 bp, Artificial
  Synthetic oligonucleotide
ggggaatatttggtgccatagctggattcatagagggaggttggccaggactagttgcag

SEQ ID NO: 84435 - DNA, 60 bp, Artificial
  Synthetic oligonucleotide
ggtgccatagctggattcatagagggaggttggccaggactagttgcaggatggtacggt

SEQ ID NO: 84436 - DNA, 60 bp, Artificial
  Synthetic oligonucleotide
gatcttcccagacagaatttggaatgtgacttacactggaacaagcgcagcatgttcaaa

SEQ ID NO: 84437 - DNA, 60 bp, Artificial
  Synthetic oligonucleotide
cttcccagacagaatttggaatgtgacttacactggaacaagcgcagcatgttcaaacac

SEQ ID NO: 84438 - DNA, 60 bp, Artificial
  Synthetic oligonucleotide
ctagttgcaggatggtacggttttcagcattcaaatgatcagggagtcggaatggctgca

SEQ ID NO: 84439 - DNA, 60 bp, Artificial
  Synthetic oligonucleotide
caggatggtacggttttcagcattcaaatgatcagggagtcggaatggctgcagacagag

SEQ ID NO: 84440 - DNA, 60 bp, Artificial
  Synthetic oligonucleotide
ggtgaagaaagcattgggttctaatgcaatggaggacggaaatgggtgctttgaattgta

SEQ ID NO: 84441 - DNA, 60 bp, Artificial
  Synthetic oligonucleotide
ggacaccctcttattctagacacctgcactatagaaggattggtatacggcaatcctgcc

SEQ ID NO: 84442 - DNA, 60 bp, Artificial
  Synthetic oligonucleotide
tgggacaccctcttattctagacacctgcactatagaaggattggtatacggcaatcctg

SEQ ID NO: 84443 - DNA, 60 bp, Artificial
  Synthetic oligonucleotide
aaggtgaagaaagcattgggttctaatgcaatggaggacggaaatgggtgctttgaattg

SEQ ID NO: 84444 - DNA, 60 bp, Artificial
  Synthetic oligonucleotide
gcaaattctaagaacacaagaatcgtcatgtgtgtgtatgaaaggagattgttattgggt

SEQ ID NO: 84445 - DNA, 60 bp, Artificial
  Synthetic oligonucleotide
gacacgttaaaaagttggaagggaaatattatgcgaacacaagagtctgagtgcgtatgc

SEQ ID NO: 84446 - DNA, 60 bp, Artificial
  Synthetic oligonucleotide
cataaccatcggtagtgctagtattatattaacaacaataggcctgcttctccaaataac

SEQ ID NO: 84447 - DNA, 60 bp, Artificial
  Synthetic oligonucleotide
ggctatatatgtagcgggatatttggggacaatcccaggtctgtggatggcacgggctca

SEQ ID NO: 84448 - DNA, 60 bp, Artificial
  Synthetic oligonucleotide
ccggccaagagcatggaatatgatgctgttgcaactacacattcctggatccctaaaagg

SEQ ID NO: 84449 - DNA, 60 bp, Artificial
  Synthetic oligonucleotide
tgatgggcatgttcaacatgctaagtacagttttgggagtttcgattctaaatctagggc

SEQ ID NO: 84450 - DNA, 60 bp, Artificial
  Synthetic oligonucleotide
ggacaatgctataagaataggggagaactctgatgttttagtcacaagagagccatatgt

SEQ ID NO: 84451 - DNA, 60 bp, Artificial
  Synthetic oligonucleotide
caatctgaccaaagggctctgcacaataaattcgtggcatatattcgggaaggacaatgc

SEQ ID NO: 84452 - DNA, 60 bp, Artificial
  Synthetic oligonucleotide
ccaatcccactcctgaagccacaaatgtgagccaaacaataataaacaattaccacaatg

SEQ ID NO: 84453 - DNA, 60 bp, Artificial
  Synthetic oligonucleotide
attaccacaatgaaacaaatattactcaaataagcaatacaaacattcaacatatggggg

SEQ ID NO: 84454 - DNA, 60 bp, Artificial
  Synthetic oligonucleotide
gaacataggactacacctgaaaccgggctgcaactgctccaatcccactcctgaagccac

SEQ ID NO: 84455 - DNA, 60 bp, Artificial
  Synthetic oligonucleotide
ctccaatcccactcctgaagccacaaatgtgagccaaacaataataaacaattaccacaa

SEQ ID NO: 84456 - DNA, 60 bp, Artificial
  Synthetic oligonucleotide
agagccatatgtttcttgtgatccagatggatgcagattttatgctcttagccaaggaac

SEQ ID NO: 84457 - DNA, 60 bp, Artificial
  Synthetic oligonucleotide
cttgtgatccagatggatgcagattttatgctcttagccaaggaacaacgataaggggaa

SEQ ID NO: 84458 - DNA, 55 bp, Artificial
  Synthetic oligonucleotide
ggggctaaaatagagtacttcctctaagatgtagaaaaagacccttgtttctact

SEQ ID NO: 84459 - DNA, 60 bp, Artificial
  Synthetic oligonucleotide
cacagactggagtggttacagtgggtctttcattgattactgggcaaaaggggagtgcta

SEQ ID NO: 84460 - DNA, 60 bp, Artificial
  Synthetic oligonucleotide
ggtggaccagtaatagcatagtatcgatgtgttccagcacagagttccttggacaatgga

SEQ ID NO: 84461 - DNA, 52 bp, Artificial
  Synthetic oligonucleotide
atggagtatgtccagtagtgttcactgacggttctgctactggcccagcaga

SEQ ID NO: 84462 - DNA, 60 bp, Artificial
  Synthetic oligonucleotide
tagatggtgacaatacgtggctaggaagaacaataagcacagcttctaggtctggatatg

SEQ ID NO: 84463 - DNA, 60 bp, Artificial
  Synthetic oligonucleotide
ctaggaagaacaataagcacagcttctaggtctggatatgaaatgctgaaagtgcctaat

SEQ ID NO: 84464 - DNA, 60 bp, Artificial
  Synthetic oligonucleotide
agcacagcttctaggtctggatatgaaatgctgaaagtgcctaatgcactgacagatgat

SEQ ID NO: 84465 - DNA, 60 bp, Artificial
  Synthetic oligonucleotide
agtgcctaatgcactgacagatgatagatcaaaacctactcaaggtcagacaattgtgtt

SEQ ID NO: 84466 - DNA, 60 bp, Artificial
  Synthetic oligonucleotide
attggcaaggctcgaatagaccagtgatacaaataaatcccacaatgatgacgcacacta

SEQ ID NO: 84467 - DNA, 60 bp, Artificial
  Synthetic oligonucleotide
aaaacctactcaaggtcagacaattgtgttaaacacagactggagtggttacagtgggtc

SEQ ID NO: 84468 - DNA, 60 bp, Artificial
  Synthetic oligonucleotide
caattgtgttaaacacagactggagtggttacagtgggtctttcattgattactgggcaa

SEQ ID NO: 84469 - DNA, 60 bp, Artificial
  Synthetic oligonucleotide
ccgtgctttagtgagctggcctttatcatcaccacccactgtatacaataccagggtaga

SEQ ID NO: 84470 - DNA, 60 bp, Artificial
  Synthetic oligonucleotide
tgtatacaataccagggtagaatgcattggatggtccagcacaagctgccatgatgggaa

SEQ ID NO: 84471 - DNA, 60 bp, Artificial
  Synthetic oligonucleotide
cgataaggggaaagcactcaaatggaacaatacacgatagatcccaataccgtgctttag

SEQ ID NO: 84472 - DNA, 60 bp, Artificial
  Synthetic oligonucleotide
agatcccaataccgtgctttagtgagctggcctttatcatcaccacccactgtatacaat

SEQ ID NO: 84473 - DNA, 60 bp, Artificial
  Synthetic oligonucleotide
gatgggaaagcacgaatgtctatatgtgtttcaggtcccaacaacaatgcatcagcagtg

SEQ ID NO: 84474 - DNA, 60 bp, Artificial
  Synthetic oligonucleotide
gcatcagcagtgatttggtacaaagggaggcctatcacagaaatcaatacgtgggcccga

SEQ ID NO: 84475 - DNA, 60 bp, Artificial
  Synthetic oligonucleotide
cagggtagaatgcattggatggtccagcacaagctgccatgatgggaaagcacgaatgtc

SEQ ID NO: 84476 - DNA, 60 bp, Artificial
  Synthetic oligonucleotide
gagtgctatagagcatgcttctatgttgagctgatccgtgggaggccaaaggaggacaaa

SEQ ID NO: 84477 - DNA, 60 bp, Artificial
  Synthetic oligonucleotide
gtgggcccgaaacatattgagaacccaagagtctgagtgtgtgtgccacaatggagtatg

SEQ ID NO: 84478 - DNA, 60 bp, Artificial
  Synthetic oligonucleotide
ggcccgaaacatattgagaacccaagagtctgagtgtgtgtgccacaatggagtatgtcc

SEQ ID NO: 84479 - DNA, 60 bp, Artificial
  Synthetic oligonucleotide
ggcaaggctcgaatagaccagtgatacaaataaatcccacaatgatgacgcacactagtc

SEQ ID NO: 84480 - DNA, 60 bp, Artificial
  Synthetic oligonucleotide
acaataatggggtcaaaggattctcatatttagatggtgacaatacgtggctaggaagaa

SEQ ID NO: 84481 - DNA, 60 bp, Artificial
  Synthetic oligonucleotide
cagactggagtggttacagtgggtctttcattgattactgggcaaaaggggagtgctata

SEQ ID NO: 84482 - DNA, 60 bp, Artificial
  Synthetic oligonucleotide
ctggagtggttacagtgggtctttcattgattactgggcaaaaggggagtgctatagagc

SEQ ID NO: 84483 - DNA, 60 bp, Artificial
  Synthetic oligonucleotide
gcaaacctaggtttgaacataggactacacctgaaaccgggctgcaactgctccaatccc

SEQ ID NO: 84484 - DNA, 60 bp, Artificial
  Synthetic oligonucleotide
gacagatgatagatcaaaacctactcaaggtcagacaattgtgttaaacacagactggag

SEQ ID NO: 84485 - DNA, 60 bp, Artificial
  Synthetic oligonucleotide
atgctcttgctatgggaaagactcagaaataacatgcacatgtagagacaattggcaagg

SEQ ID NO: 84486 - DNA, 60 bp, Artificial
  Synthetic oligonucleotide
ggaggacaaagtgtggtggaccagtaatagcatagtatcgatgtgttccagcacagagtt

SEQ ID NO: 84487 - DNA, 60 bp, Artificial
  Synthetic oligonucleotide
ccgtgggaggccaaaggaggacaaagtgtggtggaccagtaatagcatagtatcgatgtg

SEQ ID NO: 84488 - DNA, 60 bp, Artificial
  Synthetic oligonucleotide
gcatgcttctatgttgagctgatccgtgggaggccaaaggaggacaaagtgtggtggacc

SEQ ID NO: 84489 - DNA, 60 bp, Artificial
  Synthetic oligonucleotide
ggaaagactcagaaataacatgcacatgtagagacaattggcaaggctcgaatagaccag

SEQ ID NO: 84490 - DNA, 60 bp, Artificial
  Synthetic oligonucleotide
ggggagtgctatagagcatgcttctatgttgagctgatccgtgggaggccaaaggaggac

SEQ ID NO: 84491 - DNA, 60 bp, Artificial
  Synthetic oligonucleotide
tactgggcaaaaggggagtgctatagagcatgcttctatgttgagctgatccgtgggagg

SEQ ID NO: 84492 - DNA, 60 bp, Artificial
  Synthetic oligonucleotide
ccccgcggtaggcaagtgtaatgatccttatccagggaacaacaataatggggtcaaagg

SEQ ID NO: 84493 - DNA, 60 bp, Artificial
  Synthetic oligonucleotide
aaggattctcatatttagatggtgacaatacgtggctaggaagaacaataagcacagctt

SEQ ID NO: 84494 - DNA, 60 bp, Artificial
  Synthetic oligonucleotide
ggggtcaaaggattctcatatttagatggtgacaatacgtggctaggaagaacaataagc

SEQ ID NO: 84495 - DNA, 60 bp, Artificial
  Synthetic oligonucleotide
ccagcacagagttccttggacaatggaactggccagatggggctaaaatagagtacttcc

SEQ ID NO: 84496 - DNA, 60 bp, Artificial
  Synthetic oligonucleotide
tatcgatgtgttccagcacagagttccttggacaatggaactggccagatggggctaaaa

SEQ ID NO: 84497 - DNA, 59 bp, Artificial
  Synthetic oligonucleotide
cttgaagtagagcaagagataagaactttctcgtttcagcttatttaatgataaaaaac

SEQ ID NO: 84498 - DNA, 60 bp, Artificial
  Synthetic oligonucleotide
cttgaagtagagcaagagataagaactttctcgtttcagcttatttaatgataaaaaaca

SEQ ID NO: 84499 - DNA, 60 bp, Artificial
  Synthetic oligonucleotide
ctgcttgaagtggagcaagagataagaactttctcgtttcagcttatttaatgataaaaa

SEQ ID NO: 84500 - DNA, 60 bp, Artificial
  Synthetic oligonucleotide
ccataggaataatatcagtgacaaaagaaagcagtatatcatcaccctgcaacaccactg

SEQ ID NO: 84501 - DNA, 60 bp, Artificial
  Synthetic oligonucleotide
ataggaataatatcagtgacaaaagaaagcagtatatcatcaccctgcaacaccactgag

SEQ ID NO: 84502 - DNA, 60 bp, Artificial
  Synthetic oligonucleotide
cataggaataatatcagtgacaaaagaaagcagtatatcatcaacctgcaacaccactga

SEQ ID NO: 84503 - DNA, 60 bp, Artificial
  Synthetic oligonucleotide
gcatatgcagagacaattggaagggagcaaatagaccggtaatcactatagaccctgata

SEQ ID NO: 84504 - DNA, 60 bp, Artificial
  Synthetic oligonucleotide
gcatatgcagagacaattggaagggagcaaataggccagtaatcattatagaccctgaga

SEQ ID NO: 84505 - DNA, 60 bp, Artificial
  Synthetic oligonucleotide
agccaagcagggaaaaataactgggcaaactgaaatcagtttcaatggaggccatataga

SEQ ID NO: 84506 - DNA, 60 bp, Artificial
  Synthetic oligonucleotide
gagatttaatgtcgcagtcccgcactcgcgagatactgacaaaaaccactgtggaccata

SEQ ID NO: 84507 - DNA, 60 bp, Artificial
  Synthetic oligonucleotide
aaaataggataatgatcaatccggtaaagcttagtagtgggtacaaagatgtgatactat

SEQ ID NO: 84508 - DNA, 60 bp, Artificial
  Synthetic oligonucleotide
actggatgttttgagattttccaccgatgtgacgatcaatgtatggagagcatacggaat

SEQ ID NO: 84509 - DNA, 60 bp, Artificial
  Synthetic oligonucleotide
tcaatccggtaaagcttagtggtgggtacaaagatgtgatactatggtttagcttcgggg

SEQ ID NO: 84510 - DNA, 60 bp, Artificial
  Synthetic oligonucleotide
atagacaatgagttcactgaagtggagcagcagataggcaatgtaataaactggacaagg

SEQ ID NO: 84511 - DNA, 60 bp, Artificial
  Synthetic oligonucleotide
catacggaataatacttacaatcacactgaatatcgacaggaagccttacaaaataggat

SEQ ID NO: 84512 - DNA, 60 bp, Artificial
  Synthetic oligonucleotide
cttacaatcacactgaatatcgacaggaagccttacagaataggataatgatcaatccgg

SEQ ID NO: 84513 - DNA, 60 bp, Artificial
  Synthetic oligonucleotide
gggaacagctgctgactacaagagtactcaggctgcaattgaccagataacagggaaact

SEQ ID NO: 84514 - DNA, 60 bp, Artificial
  Synthetic oligonucleotide
aagcaatcaagcttgccgctggccttaggaatgaaaaatgtaccagagaaaatacgtact

SEQ ID NO: 84515 - DNA, 60 bp, Artificial
  Synthetic oligonucleotide
cttctacagtggagggacaataaacagccctttaccatttcaaaacatcgatagtagggc

SEQ ID NO: 84516 - DNA, 60 bp, Artificial
  Synthetic oligonucleotide
agattaattgaaaaaaccaacacacagtttgaactcatagacaatgagttcactgaagtg

SEQ ID NO: 84517 - DNA, 60 bp, Artificial
  Synthetic oligonucleotide
ctacaagagtactcaggctgcaattgaccagataacagggaaacttaatagattaattga

SEQ ID NO: 84518 - DNA, 60 bp, Artificial
  Synthetic oligonucleotide
actacaagagtactcaggctgcaattgaccagataacagggaaacttaatagattaattg

SEQ ID NO: 84519 - DNA, 60 bp, Artificial
  Synthetic oligonucleotide
ggaacagctgctgactacaagagtactcaggctgcaattgaccagataacagggaaactt

SEQ ID NO: 84520 - DNA, 60 bp, Artificial
  Synthetic oligonucleotide
gctcaaagtaccaacaatcgttttcaccaagtccaggggccaggcccaaagtgaatggtc

SEQ ID NO: 84521 - DNA, 60 bp, Artificial
  Synthetic oligonucleotide
ggagctgggaacaagctgataacagtaggaagctcaaaataccaacaatcgttttcacca

SEQ ID NO: 84522 - DNA, 60 bp, Artificial
  Synthetic oligonucleotide
cgttttcaccaagtccaggggacaggcccaaagtgaatggtcaggccgggaggatcgact

SEQ ID NO: 84523 - DNA, 60 bp, Artificial
  Synthetic oligonucleotide
ataccaacaatcgttttcaccaagtccaggggacaggcccaaagtgaatggtcaggccgg

SEQ ID NO: 84524 - DNA, 60 bp, Artificial
  Synthetic oligonucleotide
caagttccttggatgagcaaaataagctatatggaactgggaacaagctgataacagtag

SEQ ID NO: 84525 - DNA, 60 bp, Artificial
  Synthetic oligonucleotide
ggggagtacatcattcaagttccttggatgagcaaaataagctatatggagctgggaaca

SEQ ID NO: 84526 - DNA, 60 bp, Artificial
  Synthetic oligonucleotide
aataagctatatggagctgggaacaagctgataacagtaggaagctcaaaataccaacaa

SEQ ID NO: 84527 - DNA, 60 bp, Artificial
  Synthetic oligonucleotide
cttggatgagcaaaataagctatatggaactgggaacaagctgataacagtaggaagctc

SEQ ID NO: 84528 - DNA, 60 bp, Artificial
  Synthetic oligonucleotide
ccaaagtgaatggtcaggccgggaggatcgactttcattggatgctattggacccagggg

SEQ ID NO: 84529 - DNA, 60 bp, Artificial
  Synthetic oligonucleotide
ggccaggcccaaagtgaatggtcaggccgggaggatcgactttcattggatgctattgga

SEQ ID NO: 84530 - DNA, 60 bp, Artificial
  Synthetic oligonucleotide
tagacaatgagttcactgaagtggagcagcagataggcaatgtaataaactggacaaggg

SEQ ID NO: 84531 - DNA, 60 bp, Artificial
  Synthetic oligonucleotide
ctggatgttttgagattttccaccgatgtgacgatcaatgtatggagagcatacggaata

SEQ ID NO: 84532 - DNA, 60 bp, Artificial
  Synthetic oligonucleotide
ggacaagggactccttgactgagatctggtcatacaatgccgaactgctagtagcaatgg

SEQ ID NO: 84533 - DNA, 60 bp, Artificial
  Synthetic oligonucleotide
tcaatccggtaaagcttagtagtgggtacaaagatgtgatactatggtttagcttcgggg

SEQ ID NO: 84534 - DNA, 60 bp, Artificial
  Synthetic oligonucleotide
ctgaagtggagcagcagataggcaatgtaataaactggacaagggactccttgactgaga

SEQ ID NO: 84535 - DNA, 60 bp, Artificial
  Synthetic oligonucleotide
ggagcagcagataggcaatgtaataaactggacaagggactccttgactgagatctggtc

SEQ ID NO: 84536 - DNA, 60 bp, Artificial
  Synthetic oligonucleotide
cactgaagtggagcagcagataggcaatgtaataaactggacaagggactccttgactga

SEQ ID NO: 84537 - DNA, 60 bp, Artificial
  Synthetic oligonucleotide
actgaagtggagcagcagataggcaatgtaataaactggacaagggactccttgactgag

SEQ ID NO: 84538 - DNA, 60 bp, Artificial
  Synthetic oligonucleotide
atgtgaaggggaatgcttctacagtggagggacaataaacagccctttgccatttcaaaa

SEQ ID NO: 84539 - DNA, 60 bp, Artificial
  Synthetic oligonucleotide
cttctacagtggagggacaataaacagccctttgccatttcaaaacatcgatagttgggc

SEQ ID NO: 84540 - DNA, 60 bp, Artificial
  Synthetic oligonucleotide
ctggacaagggactccttgactgagatctggtcatacaatgctgaacttctagtagcaat

SEQ ID NO: 84541 - DNA, 60 bp, Artificial
  Synthetic oligonucleotide
tggacaagggactccttgactgagatctggtcatacaatgccgaactgctagtagcaatg

SEQ ID NO: 84542 - DNA, 60 bp, Artificial
  Synthetic oligonucleotide
gggaagtcactgggaatacagagtgatgcacaaatcgatgaatcatgtgaaggggaatgc

SEQ ID NO: 84543 - DNA, 60 bp, Artificial
  Synthetic oligonucleotide
tctatgagagagtgagaagacagctaagggagaatgccgaggaggatggaactggatgtt

SEQ ID NO: 84544 - DNA, 60 bp, Artificial
  Synthetic oligonucleotide
gagagagtgagaagacagctaagggagaatgccgaggaggatggaactggatgttttgag

SEQ ID NO: 84545 - DNA, 58 bp, Artificial
  Synthetic oligonucleotide
gtcaggccgggaggatcgactttcattggatgctattggacccaggggatacagtcac

SEQ ID NO: 84546 - DNA, 60 bp, Artificial
  Synthetic oligonucleotide
ccccagatagagccacctttctccgctctaatgccccttcaggaattgagtacaatggga

SEQ ID NO: 84547 - DNA, 60 bp, Artificial
  Synthetic oligonucleotide
ccccagatagagccacctttctccgctctaatgccccatcgggagttgagtacaatggga

SEQ ID NO: 84548 - DNA, 60 bp, Artificial
  Synthetic oligonucleotide
tacaatgggaagtcactgggaatacagagtgatgcacaaatcgatgaatcatgtgaaggg

SEQ ID NO: 84549 - DNA, 60 bp, Artificial
  Synthetic oligonucleotide
tggaagtggtcaatgccacggagacagtggagattacaggaataaataaagtgtgcacaa

SEQ ID NO: 84550 - DNA, 60 bp, Artificial
  Synthetic oligonucleotide
ggaagaaagcggtggacttgggatcttgtggaatactgggaactatcattgggcctccac

SEQ ID NO: 84551 - DNA, 60 bp, Artificial
  Synthetic oligonucleotide
acaagatttgtctcgggcaccatgccgtagcaaatgggacaaaagtcaacacactaactg

SEQ ID NO: 84552 - DNA, 60 bp, Artificial
  Synthetic oligonucleotide
cattctagtcctcggactgtcgatggtgagatctgacaagatttgtctcgggcaccatgc

SEQ ID NO: 84553 - DNA, 60 bp, Artificial
  Synthetic oligonucleotide
agaataggataatgatcaatccggtaaagcttagtggtgggtacaaagatgtgatactat

SEQ ID NO: 84554 - DNA, 60 bp, Artificial
  Synthetic oligonucleotide
gggaagtcactgggaatacagagtgatgcacaaattgatgaatcatgtgaaggggaatgc

SEQ ID NO: 84555 - DNA, 60 bp, Artificial
  Synthetic oligonucleotide
agacggggcaaccagtgcgtgtaagagaacagtgtcctctttctactcagaaatgaaatg

SEQ ID NO: 84556 - DNA, 60 bp, Artificial
  Synthetic oligonucleotide
cagccctaattgtttggggagtacatcattcaagttccttggatgagcaaaataagctat

SEQ ID NO: 84557 - DNA, 60 bp, Artificial
  Synthetic oligonucleotide
tggtttcagacaaggtaatagtgtgtgggcaggaagaacagttagcatttcgtcccgaag

SEQ ID NO: 84558 - DNA, 60 bp, Artificial
  Synthetic oligonucleotide
cagacaaggtaatagtgtgtgggcaggaagaacagttagcatttcgtcccgaagtggttt

SEQ ID NO: 84559 - DNA, 57 bp, Artificial
  Synthetic oligonucleotide
gaattcgtatggccatcaattagtgtcgaattgtttaaaaacgaccttgtttctact

SEQ ID NO: 84560 - DNA, 57 bp, Artificial
  Synthetic oligonucleotide
gaattcggattgccatcaattagtgtcgaattgtttaaaaacgaccttgtttctact

SEQ ID NO: 84561 - DNA, 60 bp, Artificial
  Synthetic oligonucleotide
cacaggaaccatgcgtaggcttgccgatcaaagtctcccaccgaacttctccagccttga

SEQ ID NO: 84562 - DNA, 60 bp, Artificial
  Synthetic oligonucleotide
aatcacaggaaccatgcgcaggcttgccgaccaaagtctcccaccgaacttctccagcct

SEQ ID NO: 84563 - DNA, 60 bp, Artificial
  Synthetic oligonucleotide
tcctcatcgggggacttgaatggaatgataacacagttcgaatctctgaagctctacaga

SEQ ID NO: 84564 - DNA, 60 bp, Artificial
  Synthetic oligonucleotide
tccgctaattcctaccaaagaatccagatctttccagacacaatctggaatgtgacttac

SEQ ID NO: 84565 - DNA, 60 bp, Artificial
  Synthetic oligonucleotide
ttctcaaggctcagggtatgcagcagacagagaaagcactcaaagggctatagacggaat

SEQ ID NO: 84566 - DNA, 60 bp, Artificial
  Synthetic oligonucleotide
ccgaagtagaaggaagaattcaggacctcgagaaatatgtcgaggacactaagatagatc

SEQ ID NO: 84567 - DNA, 60 bp, Artificial
  Synthetic oligonucleotide
atatgcatttgggaactgccccaaatacgttggagtaaagagtctcaaactggcagttgg

SEQ ID NO: 84568 - DNA, 60 bp, Artificial
  Synthetic oligonucleotide
gcatttgggaactgccccaaatacgttggagtgaagagtctcaaactggcaatcggtctg

SEQ ID NO: 84569 - DNA, 60 bp, Artificial
  Synthetic oligonucleotide
catttgggaactgccccaaatacgttggagttaagagtctcaaactggcagtcggtctga

SEQ ID NO: 84570 - DNA, 60 bp, Artificial
  Synthetic oligonucleotide
tgaccaaatacaggacatctgggcatacaatgcagaattactagtactgcttgaaaatca

SEQ ID NO: 84571 - DNA, 60 bp, Artificial
  Synthetic oligonucleotide
ggacatctgggcatacaatgcagaattactagtactgcttgaaaatcagaaaacactcga

SEQ ID NO: 84572 - DNA, 60 bp, Artificial
  Synthetic oligonucleotide
ggcaaccaagaggcttacagtcctcgggaaggatgcaggttcattgacagaagacccaga

SEQ ID NO: 84573 - DNA, 60 bp, Artificial
  Synthetic oligonucleotide
ttgggatttccagcatggtggaggccatggtgtctagggccagaattgatgcacgaattg

SEQ ID NO: 84574 - DNA, 60 bp, Artificial
  Synthetic oligonucleotide
gatgtcaaaaatgcaattggggtcctcatcggaggacttgaatggaatgataatacagtt

SEQ ID NO: 84575 - DNA, 60 bp, Artificial
  Synthetic oligonucleotide
cccgagcgggacagatgttgaatgtgtctgtagggacaattggcggggaagcaatcgacc

SEQ ID NO: 84576 - DNA, 60 bp, Artificial
  Synthetic oligonucleotide
cgcaactgctggtctcacccatttgatgatctggcattccaatctgaatgatgccacata

SEQ ID NO: 84577 - DNA, 60 bp, Artificial
  Synthetic oligonucleotide
tggtcctgtccacttccgaaaccaagttaaaatacgtcgcagggttgacataaacccagg

SEQ ID NO: 84578 - DNA, 60 bp, Artificial
  Synthetic oligonucleotide
ccatcggtagtgctagtattatattaacaacaataggcctgcttctccaaataacaagtt

SEQ ID NO: 84579 - DNA, 60 bp, Artificial
  Synthetic oligonucleotide
gcaacccttcttgtgatctgctattgggagggaaagaatggtcctacattgtcgaaagat

SEQ ID NO: 84580 - DNA, 60 bp, Artificial
  Synthetic oligonucleotide
gtgatctgctattgggagggaaagaatggtcctacattgtcgaaagatcgtcggctgtca

SEQ ID NO: 84581 - DNA, 50 bp, Artificial
  Synthetic oligonucleotide
ggtgccatagctggattcatagaaggaggttggcctggactagtcgcagg

SEQ ID NO: 84582 - DNA, 60 bp, Artificial
  Synthetic oligonucleotide
ggtgccatagctggattcatagaaggaggttggcctggactagtcgcaggctggtacggt

SEQ ID NO: 84583 - DNA, 60 bp, Artificial
  Synthetic oligonucleotide
ggtgctatagctggattcatagaaggaggttggccagggctagttgctggctggtatggg

SEQ ID NO: 84584 - DNA, 60 bp, Artificial
  Synthetic oligonucleotide
ccatatggccataatcaagaaatacacatcaggaagacaggagaagaatcctgctctcag

SEQ ID NO: 84585 - DNA, 60 bp, Artificial
  Synthetic oligonucleotide
gtggaccatatggccataatcaagaaatacacatcaggaagacaggagaagaatcctgct

SEQ ID NO: 84586 - DNA, 60 bp, Artificial
  Synthetic oligonucleotide
agcatttccttctgtggtgtaagtggtgacactgtgggttggtcttggccagacggtgct

SEQ ID NO: 84587 - DNA, 60 bp, Artificial
  Synthetic oligonucleotide
ctttctgcggtgtagatagcgacactgtgggttggtcttggccagacggtgctgagttgc

SEQ ID NO: 84588 - DNA, 60 bp, Artificial
  Synthetic oligonucleotide
agccgacaccatctgtataggctaccatgcaaacaattctacagacactgtcgacacagt

SEQ ID NO: 84589 - DNA, 60 bp, Artificial
  Synthetic oligonucleotide
attctacagacactgtcgacacagtgctagagaagaatgtaactgtgactcactcagtta

SEQ ID NO: 84590 - DNA, 60 bp, Artificial
  Synthetic oligonucleotide
aagatggaagcaaaactactcgtattattctgcatgttcactgcactaaaagccgacacc

SEQ ID NO: 84591 - DNA, 60 bp, Artificial
  Synthetic oligonucleotide
gttcactgcactaaaagccgacaccatctgtataggctaccatgcaaacaattctacaga

SEQ ID NO: 84592 - DNA, 60 bp, Artificial
  Synthetic oligonucleotide
aaaatcaaatcaatcaagatggaagcaaaactactcgtattattctgcatgttcactgca

SEQ ID NO: 84593 - DNA, 60 bp, Artificial
  Synthetic oligonucleotide
gtcgacacagtgctagagaagaatgtaactgtgactcactcagttaatttactcgaagac

SEQ ID NO: 84594 - DNA, 60 bp, Artificial
  Synthetic oligonucleotide
cactcagttaatttactcgaagacaaccataatgggaaactctgcaacctgaacggaata

SEQ ID NO: 84595 - DNA, 60 bp, Artificial
  Synthetic oligonucleotide
cggccagacctaaagtcagagggcaagcgggtaggatgaattattattggacactattgg

SEQ ID NO: 84596 - DNA, 60 bp, Artificial
  Synthetic oligonucleotide
ttgagaatctgaataagaaggttgacgatgggtttctggatgtttggacatataatgcag

SEQ ID NO: 84597 - DNA, 60 bp, Artificial
  Synthetic oligonucleotide
aaggtgaactcagtaattgagaaaatgaacactcaattcactgcagtgggtaaggagttc

SEQ ID NO: 84598 - DNA, 60 bp, Artificial
  Synthetic oligonucleotide
ggactcttcggagcaattgctgggttcattgaagggggatggacaggaatgatagatggg

SEQ ID NO: 84599 - DNA, 60 bp, Artificial
  Synthetic oligonucleotide
caggcctaagaaacatcccttccattcaatctagaggactcttcggagcaattgctgggt

SEQ ID NO: 84600 - DNA, 60 bp, Artificial
  Synthetic oligonucleotide
aactaaggatggcaacaggcctaagaaacatcccttccattcaatctagaggactcttcg

SEQ ID NO: 84601 - DNA, 60 bp, Artificial
  Synthetic oligonucleotide
ctgggaacttaatagcaccatggtatgctttcgcactaaacaagggctctgattctggta

SEQ ID NO: 84602 - DNA, 60 bp, Artificial
  Synthetic oligonucleotide
cagctgatcagaagagcacacaaaatgcgatcgacgggataaccaacaaggtgaactcag

SEQ ID NO: 84603 - DNA, 60 bp, Artificial
  Synthetic oligonucleotide
atgcagctgatcagaagagcacacaaaatgcgatcgacgggataaccaacaaggtgaact

SEQ ID NO: 84604 - DNA, 60 bp, Artificial
  Synthetic oligonucleotide
gggtggtatgggtaccatcatcagaatgagcaggggtctggttatgcagctgatcagaag

SEQ ID NO: 84605 - DNA, 60 bp, Artificial
  Synthetic oligonucleotide
gatagatgggtggtatgggtaccatcatcagaatgagcaggggtctggttatgcagctga

SEQ ID NO: 84606 - DNA, 60 bp, Artificial
  Synthetic oligonucleotide
tcaaattcagaaaatggaacatgctaccccggggaattcatcggttatgaagaattgcga

SEQ ID NO: 84607 - DNA, 60 bp, Artificial
  Synthetic oligonucleotide
tatataatagagacttcaaattcagaaaatggaacatgctaccccggggaattcatcggt

SEQ ID NO: 84608 - DNA, 60 bp, Artificial
  Synthetic oligonucleotide
cccgaaggcaagctcgtggccaaatcatgagacaaccaaaggtgtcacagctgcatgctc

SEQ ID NO: 84609 - DNA, 60 bp, Artificial
  Synthetic oligonucleotide
tttgagattttcccgaaggcaagctcgtggccaaatcatgagacaaccaaaggtgtcaca

SEQ ID NO: 84610 - DNA, 60 bp, Artificial
  Synthetic oligonucleotide
cactacaactagggaaatgcaacgtggcggggtggctcctcggcaacccagaatgtgacc

SEQ ID NO: 84611 - DNA, 60 bp, Artificial
  Synthetic oligonucleotide
gaacggaatagccccactacaactagggaaatgcaacgtggcggggtggctcctcggcaa

SEQ ID NO: 84612 - DNA, 60 bp, Artificial
  Synthetic oligonucleotide
cggcaacccagaatgtgacctgctgctcactgcgaattcatggtcctatataatagagac

SEQ ID NO: 84613 - DNA, 60 bp, Artificial
  Synthetic oligonucleotide
tcctcggcaacccagaatgtgacctgctgctcactgcgaattcatggtcctatataatag

SEQ ID NO: 84614 - DNA, 60 bp, Artificial
  Synthetic oligonucleotide
atttgctatggataataaagaagggaacttcctatcctaaactcagtaaatcatatacaa

SEQ ID NO: 84615 - DNA, 60 bp, Artificial
  Synthetic oligonucleotide
aggtgtcacagctgcatgctcttactctggagctagcagtttttaccggaatttgctatg

SEQ ID NO: 84616 - DNA, 60 bp, Artificial
  Synthetic oligonucleotide
tttggcgatctactccacaatcgctagttccctggtcttgttagtctccctgggggcaat

SEQ ID NO: 84617 - DNA, 60 bp, Artificial
  Synthetic oligonucleotide
ctcgttctgctcgagaatgaaaggacgttggatttccatgactccaatgtaaggaatctg

SEQ ID NO: 84618 - DNA, 60 bp, Artificial
  Synthetic oligonucleotide
gtgcttcgaattctaccacaaatgtgatgatgaatgcatggagagcgtgaagaacggcac

SEQ ID NO: 84619 - DNA, 60 bp, Artificial
  Synthetic oligonucleotide
agaaggttgacgatgggtttctggatgtttggacatataatgcagaattgctcgttctgc

SEQ ID NO: 84620 - DNA, 60 bp, Artificial
  Synthetic oligonucleotide
tataatgcagaattgctcgttctgctcgagaatgaaaggacgttggatttccatgactcc

SEQ ID NO: 84621 - DNA, 60 bp, Artificial
  Synthetic oligonucleotide
agagaagaaatagacggggtgaaattagaatcaatgggggtttaccagattttggcgatc

SEQ ID NO: 84622 - DNA, 60 bp, Artificial
  Synthetic oligonucleotide
agcaactgggaacttaatagcaccatggtatgctttcgcactaaacaagggctctgattc

SEQ ID NO: 84623 - DNA, 60 bp, Artificial
  Synthetic oligonucleotide
agaacggcacatatgactatcctaagtactcagaggagtccaaactaaacagagaagaaa

SEQ ID NO: 84624 - DNA, 60 bp, Artificial
  Synthetic oligonucleotide
gactatcctaagtactcagaggagtccaaactaaacagagaagaaatagacggggtgaaa

SEQ ID NO: 84625 - DNA, 60 bp, Artificial
  Synthetic oligonucleotide
ccaactacaaatgaacagcaaaccctctatcagaatactgacgcatatgtctcagttggg

SEQ ID NO: 84626 - DNA, 60 bp, Artificial
  Synthetic oligonucleotide
catatgtctcagttgggtcatcaaaatataaccggagattcacacctgaaatagcggcca

SEQ ID NO: 84627 - DNA, 60 bp, Artificial
  Synthetic oligonucleotide
gtctcagttgggtcatcaaaatataaccggagattcacacctgaaatagcggccagacct

SEQ ID NO: 84628 - DNA, 60 bp, Artificial
  Synthetic oligonucleotide
atagcggccagacctaaagtcagagggcaagcgggtaggatgaattattattggacacta

SEQ ID NO: 84629 - DNA, 66 bp, Artificial
  Synthetic oligonucleotide
ggataataaagaagggaacttcctatcctaaactcagtaaatcatatacaaacaataaggggaaag

SEQ ID NO: 84630 - DNA, 60 bp, Artificial
  Synthetic oligonucleotide
tcatatacaaacaataaggggaaagaagtgctcgtactttggggagtgcatcatcctcca

SEQ ID NO: 84631 - DNA, 60 bp, Artificial
  Synthetic oligonucleotide
aaggggaaagaagtgctcgtactttggggagtgcatcatcctccaactacaaatgaacag

SEQ ID NO: 84632 - DNA, 60 bp, Artificial
  Synthetic oligonucleotide
tcatcctccaactacaaatgaacagcaaaccctctatcagaatactgacgcatatgtctc

SEQ ID NO: 84633 - DNA, 60 bp, Artificial
  Synthetic oligonucleotide
tgagtactgtcttggcagcaagctttgcatatgacaaaatttgcattggataccaaacaa

SEQ ID NO: 84634 - DNA, 60 bp, Artificial
  Synthetic oligonucleotide
cctgtggataggagagtgcccaaaatacgtgaaaagtgaaagtttgaggcttgcaactgg

SEQ ID NO: 84635 - DNA, 60 bp, Artificial
  Synthetic oligonucleotide
atgagggatcttatttcttcggagacaatgctgaggagtatgacaattgaagaaaaatac

SEQ ID NO: 84636 - DNA, 56 bp, Artificial
  Synthetic oligonucleotide
atgagggatcttatttcttcggagacaatgctgaggagtatgacaattgaagaaaa

SEQ ID NO: 84637 - DNA, 60 bp, Artificial
  Synthetic oligonucleotide
ggctcagcatcgttgggattagtcattttcaacattcttcttcatgtggcatcaataacc

SEQ ID NO: 84638 - DNA, 60 bp, Artificial
  Synthetic oligonucleotide
atttcattccaaggtgggcacattgaagaatgttcctgttatcccaacatggggaaagtg

SEQ ID NO: 84639 - DNA, 60 bp, Artificial
  Synthetic oligonucleotide
gggcacattgaagaatgttcctgttatcccaacatggggaaagtggagtgtgtttgcagg

SEQ ID NO: 84640 - DNA, 60 bp, Artificial
  Synthetic oligonucleotide
atgggggagtgccgacagatgtgataaggtcatggaggaagcaaatactaagaacacaag

SEQ ID NO: 84641 - DNA, 60 bp, Artificial
  Synthetic oligonucleotide
gggagtgccgacagatgtgataaggtcatggaggaagcaaatactaagaacacaagagtc

SEQ ID NO: 84642 - DNA, 60 bp, Artificial
  Synthetic oligonucleotide
agaacacaagagtcttcgtgtgtttgcataaagggagagtgttattgggtaatgacggac

SEQ ID NO: 84643 - DNA, 60 bp, Artificial
  Synthetic oligonucleotide
gagtcttcgtgtgtttgcataaagggagagtgttattgggtaatgacggacggtccagcg

SEQ ID NO: 84644 - DNA, 60 bp, Artificial
  Synthetic oligonucleotide
tgggatcctctcctaatgcctaccaagccaaattcgagtccgtaggatggtctgcaacag

SEQ ID NO: 84645 - DNA, 60 bp, Artificial
  Synthetic oligonucleotide
gagtccgtaggatggtctgcaacagcctgccatgatgggaaaaaatggatggccataggg

SEQ ID NO: 84646 - DNA, 56 bp, Artificial
  Synthetic oligonucleotide
ggccataggggtgagtggtgcagacgatgacgcttatgctgttattcattatgggg

SEQ ID NO: 84647 - DNA, 60 bp, Artificial
  Synthetic oligonucleotide
ggccataggggtgagtggtgcagacgatgacgcttatgctgttattcattatgggggagt

SEQ ID NO: 84648 - DNA, 60 bp, Artificial
  Synthetic oligonucleotide
aataacacagtaaaagacaggagtccctatcgggcattgatgagtgtaccattgggatcc

SEQ ID NO: 84649 - DNA, 60 bp, Artificial
  Synthetic oligonucleotide
tgatgagtgtaccattgggatcctctcctaatgcctaccaagccaaattcgagtccgtag

SEQ ID NO: 84650 - DNA, 53 bp, Artificial
  Synthetic oligonucleotide
ttttcttaacgcagggtgccttgctgaatgacaagcattcaaataacacagta

SEQ ID NO: 84651 - DNA, 60 bp, Artificial
  Synthetic oligonucleotide
tgacaagcattcaaataacacagtaaaagacaggagtccctatcgggcattgatgagtgt

SEQ ID NO: 84652 - DNA, 60 bp, Artificial
  Synthetic oligonucleotide
gggcacatatttgttataagagagccctttgtatcttgtggcccttcagaatgtaggacc

SEQ ID NO: 84653 - DNA, 60 bp, Artificial
  Synthetic oligonucleotide
gggcacatatttgttataagagagccctttgtagcttgtggcccttcagaatgtaggacc

SEQ ID NO: 84654 - DNA, 60 bp, Artificial
  Synthetic oligonucleotide
taggttcaagagggcacatatttgttataagagagccctttgtagcttgtggcccttcag

SEQ ID NO: 84655 - DNA, 60 bp, Artificial
  Synthetic oligonucleotide
taggttcaagagggcacatatttgttataagagagccctttgtatcttgtggcccttcag

SEQ ID NO: 84656 - DNA, 60 bp, Artificial
  Synthetic oligonucleotide
ctgtgatgtatcgggatttgccattgtttccaaggataatgggatcagaataggttcaag

SEQ ID NO: 84657 - DNA, 60 bp, Artificial
  Synthetic oligonucleotide
gtatcgggatttgccattgtttccaaggataatgggatcagaataggttcaagagggcac

SEQ ID NO: 84658 - DNA, 60 bp, Artificial
  Synthetic oligonucleotide
ttatggagtaaagggattcggctttagacaaggaaatagtgtatgggcgggaagaacaat

SEQ ID NO: 84659 - DNA, 57 bp, Artificial
  Synthetic oligonucleotide
gctggaattccaacagacaccccaagagttcaagacagcagcttcactggctcatgc

SEQ ID NO: 84660 - DNA, 60 bp, Artificial
  Synthetic oligonucleotide
gctggaattccaacagacaccccaagagttcaagacagcagcttcactggctcatgcacc

SEQ ID NO: 84661 - DNA, 60 bp, Artificial
  Synthetic oligonucleotide
ggggaaagtggagtgtgtttgcagggacaattggaacggaatgaatagaccaattctgat

SEQ ID NO: 84662 - DNA, 60 bp, Artificial
  Synthetic oligonucleotide
ggtcgggatacagcggggcttttaccatccccactgcaatgacaagcaagaactgtatag

SEQ ID NO: 84663 - DNA, 60 bp, Artificial
  Synthetic oligonucleotide
gggattcggctttagacaaggaaatagtgtatgggcgggaagaacaattagtgtttcttc

SEQ ID NO: 84664 - DNA, 60 bp, Artificial
  Synthetic oligonucleotide
agggattcggctttagacaaggaaatagtgtatgggcgggaagaacaattagtgtttctt

SEQ ID NO: 84665 - DNA, 60 bp, Artificial
  Synthetic oligonucleotide
aagtgcttacaggcaacctccaaacattgaaaataagagtacatgaagggtacgaggaat

SEQ ID NO: 84666 - DNA, 60 bp, Artificial
  Synthetic oligonucleotide
gggaccagcaaagcctgcaataatacatcaaaccaaggctcattctataggagcatgaga

SEQ ID NO: 84667 - DNA, 60 bp, Artificial
  Synthetic oligonucleotide
atatactggaatcagcaaggcctgcaataatacatcaaaccaaggctcattctataggag

SEQ ID NO: 84668 - DNA, 60 bp, Artificial
  Synthetic oligonucleotide
cagtgaaagatagaagtccttatcgtgcattgatgagtgtgccattaggatcttcaccca

SEQ ID NO: 84669 - DNA, 60 bp, Artificial
  Synthetic oligonucleotide
cagtaaaagatagaagtccttatcgtgcattgatgagtgtgccattaggatcttcaccca

SEQ ID NO: 84670 - DNA, 60 bp, Artificial
  Synthetic oligonucleotide
gcaagcattacaactactgcttgaagtggagcaagagataagaactttctcgtttcagct

SEQ ID NO: 84671 - DNA, 60 bp, Artificial
  Synthetic oligonucleotide
tgtaatcaattcctgggcaggagatattttaagaactcaggaatcatcatgcacttgcat

SEQ ID NO: 84672 - DNA, 60 bp, Artificial
  Synthetic oligonucleotide
ggagggtggactggaatgatagatggatggtatggctatcaccatgaaaattctcaaggc

SEQ ID NO: 84673 - DNA, 60 bp, Artificial
  Synthetic oligonucleotide
gaaccttaatgagctgtcctgttggtgaggctccctctccatacaattcaaggtttgagt

SEQ ID NO: 84674 - DNA, 60 bp, Artificial
  Synthetic oligonucleotide
gaaccttaatgagctgccctgttggtgaagctccctctccatacaattcaaggtttgagt

SEQ ID NO: 84675 - DNA, 60 bp, Artificial
  Synthetic oligonucleotide
actttaatgagttgccctgttggtgaagctccctctccatacaattcaaggtttgagtcg

SEQ ID NO: 84676 - DNA, 60 bp, Artificial
  Synthetic oligonucleotide
ggactggaatgatagatgggtggtatggctatcatcatgaaaattctcaaggctcagggt

SEQ ID NO: 84677 - DNA, 60 bp, Artificial
  Synthetic oligonucleotide
gtatgcttacaaattcaccagttccaataataagggagctgtcttcaagtcaaaccttcc

SEQ ID NO: 84678 - DNA, 60 bp, Artificial
  Synthetic oligonucleotide
tggtatgcttacaaattcaccagttccaataataagggagctgtcttcaagtcaaacctt

SEQ ID NO: 84679 - DNA, 60 bp, Artificial
  Synthetic oligonucleotide
agccaggagaaaccttaaatgtagaatccaatggcaatttaatagctccttggtatgctt

SEQ ID NO: 84680 - DNA, 60 bp, Artificial
  Synthetic oligonucleotide
gaagccaggagaaaccttaaatgtagaatccaatggcaatttgatagctccttggtatgc

SEQ ID NO: 84681 - DNA, 58 bp, Artificial
  Synthetic oligonucleotide
agccaggagaaaccttaaatgtagaatccaatggcaatttaatagctccttggtatgc

SEQ ID NO: 84682 - DNA, 60 bp, Artificial
  Synthetic oligonucleotide
ttgaagccaggagaaaccttaaatgtagaatccaatggcaatttgatagctccttggtat

SEQ ID NO: 84683 - DNA, 60 bp, Artificial
  Synthetic oligonucleotide
gaatggaagatggacttctagatgtgtggacatacaatgctgaacttttagttctactag

SEQ ID NO: 84684 - DNA, 60 bp, Artificial
  Synthetic oligonucleotide
gggtgttttgaattttggcacaaatgtgatgatgaatgcatcaattcagttaagaatggc

SEQ ID NO: 84685 - DNA, 60 bp, Artificial
  Synthetic oligonucleotide
acctaaacaagagaatggaagatggacttctagatgtgtggacatacaatgctgaacttt

SEQ ID NO: 84686 - DNA, 60 bp, Artificial
  Synthetic oligonucleotide
ctaaacaagagaatggaagatgggtttttagatgtgtggacatacaatgctgaactttta

SEQ ID NO: 84687 - DNA, 51 bp, Artificial
  Synthetic oligonucleotide
cagacaaagaaagtactcagaaagcaattgacgggatcaccaataaagtca

SEQ ID NO: 84688 - DNA, 60 bp, Artificial
  Synthetic oligonucleotide
ggctaccatcatgagaactcacagggatcgggctatgcagcagacaaagaaagtactcag

SEQ ID NO: 84689 - DNA, 60 bp, Artificial
  Synthetic oligonucleotide
tcttcacccaatgcttaccaggccaagtttgagtctgttgcatggtcggccacagcatgc

SEQ ID NO: 84690 - DNA, 60 bp, Artificial
  Synthetic oligonucleotide
tgaatgggaactgttattgggtaatgacagatggtcctgcgaacaatcaggctagttaca

SEQ ID NO: 84691 - DNA, 56 bp, Artificial
  Synthetic oligonucleotide
tcttcacccaatgcttaccaggccaagtttgagtctgttgcatggtcggccacagc

SEQ ID NO: 84692 - DNA, 60 bp, Artificial
  Synthetic oligonucleotide
tgaaaggaaactgttattgggtaatgacagatggtcctgcgaacaatcaggctagttaca

SEQ ID NO: 84693 - DNA, 60 bp, Artificial
  Synthetic oligonucleotide
gaatgggaactgttattgggtaatgacagatggtcctgcgaacaatcaggctagttacaa

SEQ ID NO: 84694 - DNA, 60 bp, Artificial
  Synthetic oligonucleotide
taggccttctcctccaaataacaagtttatgctcaatatggtttagccattacaaccagg

SEQ ID NO: 84695 - DNA, 60 bp, Artificial
  Synthetic oligonucleotide
aacgacgataggccttctcctccaaataacaagtttatgctcaatatggtttagccatta

SEQ ID NO: 84696 - DNA, 50 bp, Artificial
  Synthetic oligonucleotide
tccaaataacaagtttatgctcaatatggtttagccattacaaccaagtg

SEQ ID NO: 84697 - DNA, 60 bp, Artificial
  Synthetic oligonucleotide
acgctagacgaacatgattccaatgtcaaaaaccttttcgacgaggtgaaaaggagattg

SEQ ID NO: 84698 - DNA, 60 bp, Artificial
  Synthetic oligonucleotide
attggtcccagaccattagtaagaggacagcaagggagaatggattactattggggcatt

SEQ ID NO: 84699 - DNA, 60 bp, Artificial
  Synthetic oligonucleotide
ggtcccagaccattagtaagaggacagcaagggagaatggattactattggggcattctg

SEQ ID NO: 84700 - DNA, 60 bp, Artificial
  Synthetic oligonucleotide
tggtcccagaccattagtaagaggacagcaagggagaatggattactattggggcattct

SEQ ID NO: 84701 - DNA, 60 bp, Artificial
  Synthetic oligonucleotide
agcaaaagcagggtagataatcactcactgagagtcatccacatcatggcgtctcaaggc

SEQ ID NO: 84702 - DNA, 60 bp, Artificial
  Synthetic oligonucleotide
cttctcattgttcaggcacttagggacaacctggaacctggcaccttcgatcttgggggg

SEQ ID NO: 84703 - DNA, 60 bp, Artificial
  Synthetic oligonucleotide
tgcagaacaattataccacagtaactgagccctcagcccctgatgtgattcactactcta

SEQ ID NO: 84704 - DNA, 60 bp, Artificial
  Synthetic oligonucleotide
taatacagttcgagtctctgaaactctacagagattcgcttggagaagcagtaatgagga

SEQ ID NO: 84705 - DNA, 60 bp, Artificial
  Synthetic oligonucleotide
gctaaactggcaaatgttgtgagaaaaatgatgactaattcacaagacacagagctttct

SEQ ID NO: 84706 - DNA, 60 bp, Artificial
  Synthetic oligonucleotide
cctttgacatgagtaatgagggatcttatttcttcggagacaatgctgaggagtatgaca

SEQ ID NO: 84707 - DNA, 60 bp, Artificial
  Synthetic oligonucleotide
ttacaactactacttgaagtggagcaagagataagaactttctcgtttcagcttatttaa

SEQ ID NO: 84708 - DNA, 60 bp, Artificial
  Synthetic oligonucleotide
cactgagtgacatccacatcatggcgtctcaaggcaccaaacggtcttatgagcagatgg

SEQ ID NO: 84709 - DNA, 60 bp, Artificial
  Synthetic oligonucleotide
cactgagtgacatccacatcatggcgtctcaaggcaccaaacggtcttatgaacagatgg

SEQ ID NO: 84710 - DNA, 60 bp, Artificial
  Synthetic oligonucleotide
aggattggtagtccttaatattctcctacatatagttagcattacaataacagtgttggt

SEQ ID NO: 84711 - DNA, 60 bp, Artificial
  Synthetic oligonucleotide
gcacccgcgagatactcacaaaaaccactgtggaccatatggccataatcaaaaagtaca

SEQ ID NO: 84712 - DNA, 60 bp, Artificial
  Synthetic oligonucleotide
cagggtagataatcactcaccgagtgacatccacatcatggcgtcccaaggcaccaaacg

SEQ ID NO: 84713 - DNA, 60 bp, Artificial
  Synthetic oligonucleotide
ggtatcgagcagtctggttttggtggggctgatcattgccatgggtctttggatgtgttc

SEQ ID NO: 84714 - DNA, 60 bp, Artificial
  Synthetic oligonucleotide
gccaaaggggaatccttgaagatgaacagatgtatcagaagtgctgcaatctattcgaga

SEQ ID NO: 84715 - DNA, 60 bp, Artificial
  Synthetic oligonucleotide
ttctgagaggatcagtggctcataagtcctgcctgcctgcttgtgtgtatgggcttgctg

SEQ ID NO: 84716 - DNA, 60 bp, Artificial
  Synthetic oligonucleotide
gtcagaccgagtgatggtatcacctctggctgtgacatggtggaataggaatggaccaac

SEQ ID NO: 84717 - DNA, 58 bp, Artificial
  Synthetic oligonucleotide
actttggatatgcatgatgctaatgtaaagaatctacatgaaaaggtgaaatcacaat

SEQ ID NO: 84718 - DNA, 60 bp, Artificial
  Synthetic oligonucleotide
gaaagctaaactggcaaatgttgtgaggaaaatgatgactaattcacaagacacagaact

SEQ ID NO: 84719 - DNA, 60 bp, Artificial
  Synthetic oligonucleotide
cttcctttgacatgagtaatgaagggccttatttcttcggagacaatgcagaggagtatg

SEQ ID NO: 84720 - DNA, 60 bp, Artificial
  Synthetic oligonucleotide
cctttgacatgagtaatgaagggccttatttcttcggagacaatgcagaggagtatgaca

SEQ ID NO: 84721 - DNA, 54 bp, Artificial
  Synthetic oligonucleotide
ggaacttacgatcacaaggaatatgaagaggaagctaaactagaaaggagcaag

SEQ ID NO: 84722 - DNA, 60 bp, Artificial
  Synthetic oligonucleotide
ccataattgtagcgatggtgttctcacaagaggattgcatgataaaggcagtccgaggtg

SEQ ID NO: 84723 - DNA, 60 bp, Artificial
  Synthetic oligonucleotide
ccatcattgtagcgatggtgttctcacaagaggattgcatgataaaggcagtccgaggtg

SEQ ID NO: 84724 - DNA, 60 bp, Artificial
  Synthetic oligonucleotide
gatggatggtatggctatcatcatgaaaattctcaaggctcagggtatgcagcagacaga

SEQ ID NO: 84725 - DNA, 57 bp, Artificial
  Synthetic oligonucleotide
gacagcgaccaaaaggattcggatggccatcaattagtgtcgaattgttaaaaacga

SEQ ID NO: 84726 - DNA, 60 bp, Artificial
  Synthetic oligonucleotide
ggacagaaatttgaggaaataaggtggttaattgaagaagtgcgacacagattgaaagcg

SEQ ID NO: 84727 - DNA, 60 bp, Artificial
  Synthetic oligonucleotide
cttctgatagatggtacagcctcattgagtcctggaatgatgatgggcatgttcaacatg

SEQ ID NO: 84728 - DNA, 50 bp, Artificial
  Synthetic oligonucleotide
ttttcttaactcagggagccctcctcaatgacaagcattcaaatgggaca

SEQ ID NO: 84729 - DNA, 60 bp, Artificial
  Synthetic oligonucleotide
tgctccattagtgaatgcaggacttttttcttaactcagggagccctcctcaatgacaag

SEQ ID NO: 84730 - DNA, 60 bp, Artificial
  Synthetic oligonucleotide
ccccttctcctagtaacagccgctttgaatctgtggcatggtctgccactgcatgtagcg

SEQ ID NO: 84731 - DNA, 60 bp, Artificial
  Synthetic oligonucleotide
aggagttgccccttctcctagtaacagccgctttgaatctgtggcatggtctgccactgc

SEQ ID NO: 84732 - DNA, 60 bp, Artificial
  Synthetic oligonucleotide
aatctgtggcatggtctgccactgcatgtagcgacggatccggttggctaacactaggaa

SEQ ID NO: 84733 - DNA, 51 bp, Artificial
  Synthetic oligonucleotide
cccctctcctagtaacagccgctttgaatctgtggcatggtctgccactgc

SEQ ID NO: 84734 - DNA, 60 bp, Artificial
  Synthetic oligonucleotide
ggagtgaagggattcagctttagatatggggatggtgtttggataggaagaacaaagagt

SEQ ID NO: 84735 - DNA, 60 bp, Artificial
  Synthetic oligonucleotide
gtttggataggaagaacaaagagtttggagtccagaagcggctttgagatggtgtgggat

SEQ ID NO: 84736 - DNA, 60 bp, Artificial
  Synthetic oligonucleotide
ggagacaatccacgccccaatgatggaacaggcagttgtggtccagtgtcttctaatggg

SEQ ID NO: 84737 - DNA, 60 bp, Artificial
  Synthetic oligonucleotide
cacgccccaatgatggaacaggcagttgtggtccagtgtcttctaatggggcatatggag

SEQ ID NO: 84738 - DNA, 60 bp, Artificial
  Synthetic oligonucleotide
atgtgcctgcataaatggttcttgctttaccataatgactgatggaccaagtaatggcca

SEQ ID NO: 84739 - DNA, 60 bp, Artificial
  Synthetic oligonucleotide
gcctgcataaatggttcttgctttaccataatgactgatggaccaagtaatggccaggcc

SEQ ID NO: 84740 - DNA, 60 bp, Artificial
  Synthetic oligonucleotide
aatgtgcatgcatgaatggttcttgctttaccataatgactgatggaccaagtaatggcc

SEQ ID NO: 84741 - DNA, 60 bp, Artificial
  Synthetic oligonucleotide
ctgaattgcttgttctattggaaaatcagaagacattagatgagcatgacgctaatgtaa

SEQ ID NO: 84742 - DNA, 60 bp, Artificial
  Synthetic oligonucleotide
ggtatcgagcagtctggttttggtgggactgatcattgccatgggtctttggatgtgctc

SEQ ID NO: 84743 - DNA, 60 bp, Artificial
  Synthetic oligonucleotide
cgagaggagaataggcaatctgaacaaaagaatggaagatggatttttagacgtgtggac

SEQ ID NO: 84744 - DNA, 60 bp, Artificial
  Synthetic oligonucleotide
cgaccatgggtgtccttcaatcagaatctagagtatcaaataggatacatatgcagcgga

SEQ ID NO: 84745 - DNA, 60 bp, Artificial
  Synthetic oligonucleotide
tgggctatatacagcaaggataatggtataaggataggttccaaaggagatgtatttgtc

SEQ ID NO: 84746 - DNA, 60 bp, Artificial
  Synthetic oligonucleotide
agagccttttatttcatgctctcacttggaatgcaggactttctttctaactcaaggggc

SEQ ID NO: 84747 - DNA, 60 bp, Artificial
  Synthetic oligonucleotide
cagcaaggataatggtataaggataggttccaaaggagatgtatttgtcatcagagagcc

SEQ ID NO: 84748 - DNA, 60 bp, Artificial
  Synthetic oligonucleotide
ggagtctgaatgtgcctgcattaacggttcctgcttcaccataatgactgatggaccaag

SEQ ID NO: 84749 - DNA, 60 bp, Artificial
  Synthetic oligonucleotide
ccggtccagacaatggggcggtggctgtattgaaatataatggcataataacagatacta

SEQ ID NO: 84750 - DNA, 60 bp, Artificial
  Synthetic oligonucleotide
tagctccagtaacactagcaggcaattcctctctatgtctcatcagtggatgggctatat

SEQ ID NO: 84751 - DNA, 60 bp, Artificial
  Synthetic oligonucleotide
tatattgagaacacaggagtctgaatgtgcctgcattaacggttcctgcttcaccataat

SEQ ID NO: 84752 - DNA, 56 bp, Artificial
  Synthetic oligonucleotide
cctaatgagctgtcctgttggtgaagctccttccccatacaattcaaggtttgagt

SEQ ID NO: 84753 - DNA, 60 bp, Artificial
  Synthetic oligonucleotide
gctcctgttatccagacgctagcgaggtaatgtgtgtgtgcagagacaactggcatggtt

SEQ ID NO: 84754 - DNA, 60 bp, Artificial
  Synthetic oligonucleotide
tattgtagcaataactgattggtcaggatatagcggaagctttgttcagcatccagaact

SEQ ID NO: 84755 - DNA, 60 bp, Artificial
  Synthetic oligonucleotide
gaagctttgttcagcatccagaactgacggggttggactgcatgaggccttgtttctggg

SEQ ID NO: 84756 - DNA, 60 bp, Artificial
  Synthetic oligonucleotide
tggcatggttcaaatcgaccatgggtgtccttcaatcagaatctagagtatcaaatagga

SEQ ID NO: 84757 - DNA, 60 bp, Artificial
  Synthetic oligonucleotide
tgagttgaatgcccctaattaccactatgaggagtgctcctgttatccagacgctagcga

SEQ ID NO: 84758 - DNA, 56 bp, Artificial
  Synthetic oligonucleotide
ggactttctttctaactcaaggggccttgttgaatgacaaacattccaatggaacc

SEQ ID NO: 84759 - DNA, 54 bp, Artificial
  Synthetic oligonucleotide
cctgggatgatggagcaattcttccctttgacatcgataagatgtaatttgtga

SEQ ID NO: 84760 - DNA, 53 bp, Artificial
  Synthetic oligonucleotide
cctgggatgatggagcaattcttccctttgacatcgataagatgtaatttgta

SEQ ID NO: 84761 - DNA, 60 bp, Artificial
  Synthetic oligonucleotide
tatggcaatccttcttgtgatctgctattgggagggaaagaatggtcctacatcgtcgag

SEQ ID NO: 84762 - DNA, 60 bp, Artificial
  Synthetic oligonucleotide
atcgaagggctagtttatggcaatccttcttgtgatctgctattgggagggaaagaatgg

SEQ ID NO: 84763 - DNA, 60 bp, Artificial
  Synthetic oligonucleotide
aaccttgaatgtggaatctaatggaaatctaatcgccccttggtatgcatacaaatttgt

SEQ ID NO: 84764 - DNA, 60 bp, Artificial
  Synthetic oligonucleotide
aagtctggccaactcaagctagccactggactcagaaatgtgccagctatatcgaataga

SEQ ID NO: 84765 - DNA, 60 bp, Artificial
  Synthetic oligonucleotide
cagaagacaacgtttacaaagcattatcaatatacagttgcattgcaagtagtgttgtac

SEQ ID NO: 84766 - DNA, 60 bp, Artificial
  Synthetic oligonucleotide
ccagagtcgcatcagaatgtctaggtgcaacaccaagtgccagacttcggttggagggat

SEQ ID NO: 84767 - DNA, 60 bp, Artificial
  Synthetic oligonucleotide
gaatgctcttggtgactgtcccaaatacataaagtctggccaactcaagctagccactgg

SEQ ID NO: 84768 - DNA, 60 bp, Artificial
  Synthetic oligonucleotide
caagctagccactggactcagaaatgtgccagctatatcgaatagaggactgcttggagc

SEQ ID NO: 84769 - DNA, 60 bp, Artificial
  Synthetic oligonucleotide
cagggaacaggaatagctgcagacaaagaatcaacacagaaagctatagaccagataaca

SEQ ID NO: 84770 - DNA, 60 bp, Artificial
  Synthetic oligonucleotide
ggccaactcaagctagccactggactcagaaatgtgccagctatatcgaatagaggactg

SEQ ID NO: 84771 - DNA, 60 bp, Artificial
  Synthetic oligonucleotide
caagctagccactggactcagaaatgtgccagctatatcgaatagaggattgttcggagc

SEQ ID NO: 84772 - DNA, 60 bp, Artificial
  Synthetic oligonucleotide
tgcagacagaatatgcgtggggtatctgagcaccaattcatcagaaagggtcgacacgct

SEQ ID NO: 84773 - DNA, 60 bp, Artificial
  Synthetic oligonucleotide
aggcagacagaatatgcgtaggttatctgagcaccaattcatcagaaagggtcgacacgc

SEQ ID NO: 84774 - DNA, 60 bp, Artificial
  Synthetic oligonucleotide
ggaacaggaatagctgcagacaaagaatcaacacagaaagctatagaccagataacaacc

SEQ ID NO: 84775 - DNA, 60 bp, Artificial
  Synthetic oligonucleotide
aatatgcgtggggtatctgagcaccaattcatcagaaagggtcgacacgctccttgaaaa

SEQ ID NO: 84776 - DNA, 60 bp, Artificial
  Synthetic oligonucleotide
gcgtaggttatctgagcaccaattcatcagaaagggtcgacacgctccttgaaaatgggg

SEQ ID NO: 84777 - DNA, 60 bp, Artificial
  Synthetic oligonucleotide
gcgtggggtatctgagcaccaattcatcagaaagggtcgacacgctccttgaaaatgggg

SEQ ID NO: 84778 - DNA, 60 bp, Artificial
  Synthetic oligonucleotide
ggggtatctgagcaccaattcatcagaaagggtcgacacgctccttgaaaatggggtccc

SEQ ID NO: 84779 - DNA, 60 bp, Artificial
  Synthetic oligonucleotide
aatatgcgtggggtatctgagcaccaattcatcagaaagggtcgacacgctcctggaaaa

SEQ ID NO: 84780 - DNA, 60 bp, Artificial
  Synthetic oligonucleotide
ctggccaactcaagctagccactggactcagaaatgtgccagctatatcgaatagaggat

SEQ ID NO: 84781 - DNA, 60 bp, Artificial
  Synthetic oligonucleotide
gggatcagagagtggtcatacctgattgaggatcctggggcgccccatgggctttgttac

SEQ ID NO: 84782 - DNA, 60 bp, Artificial
  Synthetic oligonucleotide
tgggatcagagagtggtcatacctgattgaggaccccgcggcccctcatgggctttgcta

SEQ ID NO: 84783 - DNA, 60 bp, Artificial
  Synthetic oligonucleotide
gctttgttaccctggagaattaaacaacaatggtgagctcagacatttgttcagtggaat

SEQ ID NO: 84784 - DNA, 60 bp, Artificial
  Synthetic oligonucleotide
gggctttgctaccctggagaattaaacaacaatggtgaactcagacacttgttcagtgga

SEQ ID NO: 84785 - DNA, 60 bp, Artificial
  Synthetic oligonucleotide
agatctactggtcattgctacatccaggggagatgattactttcgagagtaatggtggac

SEQ ID NO: 84786 - DNA, 60 bp, Artificial
  Synthetic oligonucleotide
gagctggatgaaaatttattggtctttgatacatccaggggagatgattactttcgagag

SEQ ID NO: 84787 - DNA, 60 bp, Artificial
  Synthetic oligonucleotide
ttttccagagtcgcatcagaatgtctaggtgcaacaccaagtgccagacttcggttggag

SEQ ID NO: 84788 - DNA, 52 bp, Artificial
  Synthetic oligonucleotide
agatctactggtcattgctacatccaggggagatgattactttcgagagtaa

SEQ ID NO: 84789 - DNA, 60 bp, Artificial
  Synthetic oligonucleotide
tttccaaagtcgcataagaatgtctaagtgcaacaccaagtgccagacttcggttggagg

SEQ ID NO: 84790 - DNA, 60 bp, Artificial
  Synthetic oligonucleotide
ttttccaaagtcgcataagaatgtctaagtgcaacaccaagtgccagacttcggttggag

SEQ ID NO: 84791 - DNA, 60 bp, Artificial
  Synthetic oligonucleotide
ggaacagggatagctgcagacaaagaatcaacacagaaagctatagaccagataacaact

SEQ ID NO: 84792 - DNA, 60 bp, Artificial
  Synthetic oligonucleotide
ggggtatctgagcaccaattcatcagaaagggtcgacacgctcctggaaaatggggtccc

SEQ ID NO: 84793 - DNA, 60 bp, Artificial
  Synthetic oligonucleotide
ttgggatcagagagtggtcatacctgattgaggaccccgcggcccctcatgggctttgct

SEQ ID NO: 84794 - DNA, 60 bp, Artificial
  Synthetic oligonucleotide
cattgcaagtagtgttgtactagtaggactcatactctctttcatcatgtgggcctgtag

SEQ ID NO: 84795 - DNA, 60 bp, Artificial
  Synthetic oligonucleotide
tgtactagtaggactcatactctctttcatcatgtgggcctgtagtagtgggaattgccg

SEQ ID NO: 84796 - DNA, 60 bp, Artificial
  Synthetic oligonucleotide
taggactcatactctctttcatcatgtgggcctgtagtaatggaagctgtcgattcaatg

SEQ ID NO: 84797 - DNA, 60 bp, Artificial
  Synthetic oligonucleotide
aaactcaaatcagaagacaacgtttacaaagcattatcaatatacagttgcattgcaagt

SEQ ID NO: 84798 - DNA, 60 bp, Artificial
  Synthetic oligonucleotide
ggactcatactctctttcatcatgtgggcctgtagtaatggaagctgtcgattcaatgtt

SEQ ID NO: 84799 - DNA, 60 bp, Artificial
  Synthetic oligonucleotide
cactcaccgagtgacatccacatcatggcgtctcaaggcaccaaacgatcttatgaacag

SEQ ID NO: 84800 - DNA, 60 bp, Artificial
  Synthetic oligonucleotide
attctacaggagcatgagatggttgaccttaaaatcgggacagtttccagtccagacaga

SEQ ID NO: 84801 - DNA, 60 bp, Artificial
  Synthetic oligonucleotide
tctacaggagcatgagatggttgaccttaaaatcgggacaatttccagtccaaacagatg

SEQ ID NO: 84802 - DNA, 60 bp, Artificial
  Synthetic oligonucleotide
cgtacgttctctctatcgtaccgtcaggccccctcaaagccgagatcgcgcagagacttg

SEQ ID NO: 84803 - DNA, 60 bp, Artificial
  Synthetic oligonucleotide
tacgttctctctatcgtcccgtcaggccccctcaaagccgagatcgcgcagagacttgaa

SEQ ID NO: 84804 - DNA, 60 bp, Artificial
  Synthetic oligonucleotide
tctctctatcgtcccgtcaggccccctcaaagccgagatcgcgcagagacttgaggatgt

SEQ ID NO: 84805 - DNA, 52 bp, Artificial
  Synthetic oligonucleotide
tctctctatcgtcccgtcaggccccctcaaagccgagatcgcgcagagactt

SEQ ID NO: 84806 - DNA, 60 bp, Artificial
  Synthetic oligonucleotide
cctgtggataggagaatgtccaaaatacgtgaaaagtgaaagtttgaggcttgcaactgg

SEQ ID NO: 84807 - DNA, 60 bp, Artificial
  Synthetic oligonucleotide
aagccccctgtggataggagaatgtccaaaatacgtgaaaagtgaaagtttgaggcttgc

SEQ ID NO: 84808 - DNA, 60 bp, Artificial
  Synthetic oligonucleotide
gcgacctattacttggtgaccaaagttggtcatacatagtggaaaggcccactgctcgaa

SEQ ID NO: 84809 - DNA, 60 bp, Artificial
  Synthetic oligonucleotide
aaattgcggcaagacctgcggtgaacggtcaaagaggcagaattgattattattggtctg

SEQ ID NO: 84810 - DNA, 60 bp, Artificial
  Synthetic oligonucleotide
ggatgggaactgaaagcatgaattttgccaaaactccagaaattgcggcaagacctgcgg

SEQ ID NO: 84811 - DNA, 60 bp, Artificial
  Synthetic oligonucleotide
aacaaggcccctctcgacttaagaggatgtaccatggagggttggatattggggaatccc

SEQ ID NO: 84812 - DNA, 60 bp, Artificial
  Synthetic oligonucleotide
ctgcggtgaacggtcaaagaggcagaattgattattattggtctgttttacggccagggg

SEQ ID NO: 84813 - DNA, 60 bp, Artificial
  Synthetic oligonucleotide
ctgttgaattgctggaaaatcagaaggaagaaagattctgtagaattttaaacaaggccc

SEQ ID NO: 84814 - DNA, 60 bp, Artificial
  Synthetic oligonucleotide
gacaacacaagtggatacaatattggagaaaaatgtaaccgtcacacactctgttgaatt

SEQ ID NO: 84815 - DNA, 60 bp, Artificial
  Synthetic oligonucleotide
ccggaaagtcagacaagatctgcatcgggtatcatgccaacaattcgacaacacaagtgg

SEQ ID NO: 84816 - DNA, 60 bp, Artificial
  Synthetic oligonucleotide
acaaccggaaagtcagacaagatctgcatcgggtatcatgccaacaattcgacaacacaa

SEQ ID NO: 84817 - DNA, 60 bp, Artificial
  Synthetic oligonucleotide
gtgtgtatcaaatccttgccatatatagtacggtatcgagcagtctagtactggtggggc

SEQ ID NO: 84818 - DNA, 60 bp, Artificial
  Synthetic oligonucleotide
aactagagaatcttggtgtgtatcaaatccttgccatatatagtacggtatcgagcagtc

SEQ ID NO: 84819 - DNA, 60 bp, Artificial
  Synthetic oligonucleotide
caaatcacaactacgagacaatgctaacgatctgggaaatggatgctttgaattttggca

SEQ ID NO: 84820 - DNA, 60 bp, Artificial
  Synthetic oligonucleotide
tatatgaaaaggtcaaatcacaactacgagacaatgctaacgatctgggaaatggatgct

SEQ ID NO: 84821 - DNA, 52 bp, Artificial
  Synthetic oligonucleotide
tcgagcagtctagtactggtggggctgatcatagcaatgggtctttggatgt

SEQ ID NO: 84822 - DNA, 60 bp, Artificial
  Synthetic oligonucleotide
agatgggtggtatggttatcaccatgaaaattctcaaggttcaggatatgcagcagacag

SEQ ID NO: 84823 - DNA, 60 bp, Artificial
  Synthetic oligonucleotide
ctggaaacaagccaatcctttatttctggggtgtacatcatcctcctgacaccagtgaac

SEQ ID NO: 84824 - DNA, 60 bp, Artificial
  Synthetic oligonucleotide
aaagaccagatcaggacaatatccagtaattagtggaacttacaacaacactggaaacaa

SEQ ID NO: 84825 - DNA, 60 bp, Artificial
  Synthetic oligonucleotide
gaacttacaacaacactggaaacaagccaatcctttatttctggggtgtacatcatcctc

SEQ ID NO: 84826 - DNA, 60 bp, Artificial
  Synthetic oligonucleotide
acgtggagaggagtagacaccagcagtggagtaacagcagcttgcccttataatagtggt

SEQ ID NO: 84827 - DNA, 60 bp, Artificial
  Synthetic oligonucleotide
gcactcattggctcaggagaaagagttgagagatttgaaatgttccccaaaaatacgtgg

SEQ ID NO: 84828 - DNA, 60 bp, Artificial
  Synthetic oligonucleotide
aaatacgtggagaggagtagacaccagcagtggagtaacagcagcttgcccttataatag

SEQ ID NO: 84829 - DNA, 60 bp, Artificial
  Synthetic oligonucleotide
cgctccttggtatgcatacaaatttgacagtacaactaacaaaggagcagtattcaagtc

SEQ ID NO: 84830 - DNA, 60 bp, Artificial
  Synthetic oligonucleotide
cctgacaccagtgaacaaaacaacttatatggttctggtgatcgatatgtcaggatggga

SEQ ID NO: 84831 - DNA, 60 bp, Artificial
  Synthetic oligonucleotide
tcgatatgtcaggatgggaactgaaagcatgaattttgccaaaactccagaaattgcggc

SEQ ID NO: 84832 - DNA, 60 bp, Artificial
  Synthetic oligonucleotide
gctggaaaatcagaaggaagaaagattctgtagaattttaaacaaggcccctctcgactt

SEQ ID NO: 84833 - DNA, 60 bp, Artificial
  Synthetic oligonucleotide
agcaaaagcaggggaaaatgattgcaatcattgtaatagtgacactggcaacaaccggaa

SEQ ID NO: 84834 - DNA, 57 bp, Artificial
  Synthetic oligonucleotide
tgattgcaatcattgtaatagtgacactggcaacaaccggaaagtcagacaagatct

SEQ ID NO: 84835 - DNA, 60 bp, Artificial
  Synthetic oligonucleotide
agtcaaacttgccaatagagaactgtgacgccacatgccaaactgtagcaggggtcctga

SEQ ID NO: 84836 - DNA, 60 bp, Artificial
  Synthetic oligonucleotide
aaggagcagtattcaagtcaaacttgccaatagagaactgtgacgccacatgccaaactg

SEQ ID NO: 84837 - DNA, 60 bp, Artificial
  Synthetic oligonucleotide
gagaacgaaaggacactggacttgcatgacgccaatgtgaggaatctatatgaaaaggtc

SEQ ID NO: 84838 - DNA, 60 bp, Artificial
  Synthetic oligonucleotide
ggcttgcaactggactaagaaatgtccctaaggtagagactagaggacttttcggagcca

SEQ ID NO: 84839 - DNA, 60 bp, Artificial
  Synthetic oligonucleotide
cttttcggagccattgcaggtttcattgaagggggatggactggaatgatagatgggtgg

SEQ ID NO: 84840 - DNA, 60 bp, Artificial
  Synthetic oligonucleotide
tgccaaactgtagcaggggtcctgaggacaaataaaacattccaaaatgtaagccccctg

SEQ ID NO: 84841 - DNA, 60 bp, Artificial
  Synthetic oligonucleotide
ggttatcaccatgaaaattctcaaggttcaggatatgcagcagacagagaaagcacccaa

SEQ ID NO: 84842 - DNA, 55 bp, Artificial
  Synthetic oligonucleotide
cagcagacagagaaagcacccaaaaggctatagacgggattacaaataaggtcaa

SEQ ID NO: 84843 - DNA, 59 bp, Artificial
  Synthetic oligonucleotide
tgaacacacaattcgaagctgttgaccatgaattttcaaatttggaaaggagaattgac

SEQ ID NO: 84844 - DNA, 60 bp, Artificial
  Synthetic oligonucleotide
gaagatggatttctggatgtctggacatacaatgctgaactgttggttctccttgagaac

SEQ ID NO: 84845 - DNA, 60 bp, Artificial
  Synthetic oligonucleotide
cccttccaagacgcccaatacaccaacaataaggggaagaatattctattcatgtggggc

SEQ ID NO: 84846 - DNA, 60 bp, Artificial
  Synthetic oligonucleotide
tcagcaaatacgcatttgggaattgccccaagtacgttggagtaaagagtctcaaactgg

SEQ ID NO: 84847 - DNA, 60 bp, Artificial
  Synthetic oligonucleotide
agacagaaaattgaaggggtaaaactggaatctgaaggaacttacaaaatcctcaccatt

SEQ ID NO: 84848 - DNA, 60 bp, Artificial
  Synthetic oligonucleotide
acttatacaaaaaggctgatacaacaacaagtgtgacaacagaagatataaaccggactt

SEQ ID NO: 84849 - DNA, 60 bp, Artificial
  Synthetic oligonucleotide
gcaagggagaattgactactattggtcagtattaaaaccaggtcaaacgttgcgagtgag

SEQ ID NO: 84850 - DNA, 59 bp, Artificial
  Synthetic oligonucleotide
caaggtgaaaagagcattgggttctaatgcagcagaggatggaaatggatgcttcgagt

SEQ ID NO: 84851 - DNA, 60 bp, Artificial
  Synthetic oligonucleotide
gggctgatacaacaacaagtgtgacaacagaagatataaaccgaactttcaagccaatga

SEQ ID NO: 84852 - DNA, 60 bp, Artificial
  Synthetic oligonucleotide
gggctgtttggtgctatagctggattcatagaaggaggttggccaggactggttgctgga

SEQ ID NO: 84853 - DNA, 60 bp, Artificial
  Synthetic oligonucleotide
gttggagtaaagagtctcaaactggcagtcggtttaaggaatatacctgctgtatcagat

SEQ ID NO: 84854 - DNA, 60 bp, Artificial
  Synthetic oligonucleotide
ctcaaattggcagtcggtttaaggaatatacctgctgtatcagatagagggctgtttggt

SEQ ID NO: 84855 - DNA, 53 bp, Artificial
  Synthetic oligonucleotide
ctaccaatcaacaaattccacagaaacggttgacacgctaatagaaagcaatg

SEQ ID NO: 84856 - DNA, 60 bp, Artificial
  Synthetic oligonucleotide
gaaagaatggtcctacatcgtcgagaggtcatctgctgtcaatggaatgtgttaccctgg

SEQ ID NO: 84857 - DNA, 60 bp, Artificial
  Synthetic oligonucleotide
ggtcctacatcgtcgagaggtcatctgctgtcaatggaatgtgttaccctgggaatgtag

SEQ ID NO: 84858 - DNA, 60 bp, Artificial
  Synthetic oligonucleotide
accagatacaagacatttgggcatacaatgcagaactgctagtactgcttgaaaatcaga

SEQ ID NO: 84859 - DNA, 60 bp, Artificial
  Synthetic oligonucleotide
gggagaattgactactattggtcagtattaaaaccaggtcaaacgttgcgagtgagatcc

SEQ ID NO: 84860 - DNA, 60 bp, Artificial
  Synthetic oligonucleotide
ggggtaaaattggaatctgaaggaacttacaaaatcctcaccatttattcgactgccgcc

SEQ ID NO: 84861 - DNA, 60 bp, Artificial
  Synthetic oligonucleotide
tcttaccccttccaagacgcccaatacaccaacaataaggggaagaatattctattcatg

SEQ ID NO: 84862 - DNA, 60 bp, Artificial
  Synthetic oligonucleotide
gttcgaattcattctacagaagtatgagatggttgactcacaagagcaattcttacccct

SEQ ID NO: 84863 - DNA, 57 bp, Artificial
  Synthetic oligonucleotide
gttaccctgggaatgtagaaaacctggaagaactcaggtcctttttcagttccgcga

SEQ ID NO: 84864 - DNA, 60 bp, Artificial
  Synthetic oligonucleotide
ctacagaagtatgagatggttgactcacaagagcaattcttaccccttccaagacgccca

SEQ ID NO: 84865 - DNA, 60 bp, Artificial
  Synthetic oligonucleotide
cacaatgtcagcaaatacgcatttgggaattgccccaagtacgttggagtaaagagtctc

SEQ ID NO: 84866 - DNA, 60 bp, Artificial
  Synthetic oligonucleotide
tgccctttcacaatgtcagcaaatacgcatttgggaattgccccaggtacgttggagtaa

SEQ ID NO: 84867 - DNA, 60 bp, Artificial
  Synthetic oligonucleotide
cctatgacaggcaaaagtatcaagaggagtcaaaactagagagacagaaaattgaagggg

SEQ ID NO: 84868 - DNA, 60 bp, Artificial
  Synthetic oligonucleotide
gaaacgggacctatgacaggcaaaagtatcaagaggagtcaaaactagagagacagaaaa

SEQ ID NO: 84869 - DNA, 60 bp, Artificial
  Synthetic oligonucleotide
tctattcatgtggggcatacaccatccacctactgatgccgaacagacaaacttatacaa

SEQ ID NO: 84870 - DNA, 60 bp, Artificial
  Synthetic oligonucleotide
cgactgcgtagtgcaatgccagactgagaaaggtggcctaaatacgaccttgccctttca

SEQ ID NO: 84871 - DNA, 60 bp, Artificial
  Synthetic oligonucleotide
ccatggaagaatcttgaagactgatttgagcagtggcgactgcgtagtgcaatgccagac

SEQ ID NO: 84872 - DNA, 60 bp, Artificial
  Synthetic oligonucleotide
ctctcaggagaaagccatggaagaatcttgaagactgatttgagcagtggcgactgcgta

SEQ ID NO: 84873 - DNA, 60 bp, Artificial
  Synthetic oligonucleotide
ggtactaaaaccaggtcagacattgcgagtgaggtccaatgggaatctaattgccccatg

SEQ ID NO: 84874 - DNA, 60 bp, Artificial
  Synthetic oligonucleotide
ctgcagacaggaagtcaacccaagaagcagttgacaagataacatccaaagtgaacaata

SEQ ID NO: 84875 - DNA, 60 bp, Artificial
  Synthetic oligonucleotide
catagctggcttcatagaagggggttggccagggctagttgctggctggtatggtttcca

SEQ ID NO: 84876 - DNA, 60 bp, Artificial
  Synthetic oligonucleotide
aagagagctttgggttctaatgcaatagaagatggaaatggatgctttgaattgtaccac

SEQ ID NO: 84877 - DNA, 60 bp, Artificial
  Synthetic oligonucleotide
ggtcctacattgtcgaaaggtcatcggctgtcaatggaatgtgttaccctggaaatgtag

SEQ ID NO: 84878 - DNA, 60 bp, Artificial
  Synthetic oligonucleotide
ctgaagaccgatttgaacagtggcaactgcgtagtacaatgtcagactgagaaaggtggc

SEQ ID NO: 84879 - DNA, 60 bp, Artificial
  Synthetic oligonucleotide
ccccaaatacgttggagttaagagtctcaaactggcagtcggcctgaggaatgtacctgc

SEQ ID NO: 84880 - DNA, 60 bp, Artificial
  Synthetic oligonucleotide
gaaaggtggcttaaacacaaccttgccgttccacaatgtcagcaaatatgcatttgggaa

SEQ ID NO: 84881 - DNA, 57 bp, Artificial
  Synthetic oligonucleotide
gtatgagatggctgactcacaagagcaattcttaccctgttcaagacgcccaataca

SEQ ID NO: 84882 - DNA, 60 bp, Artificial
  Synthetic oligonucleotide
aacattctcttcatgtggggcatacatcacccacctactgacactgaacaaacaagtcta

SEQ ID NO: 84883 - DNA, 60 bp, Artificial
  Synthetic oligonucleotide
gcctcttgtcaatggtcagcaagggaggattgactattattggtcggtactaaaaccagg

SEQ ID NO: 84884 - DNA, 60 bp, Artificial
  Synthetic oligonucleotide
agattgatgaccaaatacaggacatctgggcatacaatgcagagttactagtactgcttg

SEQ ID NO: 84885 - DNA, 57 bp, Artificial
  Synthetic oligonucleotide
tcggctaccagtcaacaaactccacggaaactgttgatacactaacagaaaacaatg

SEQ ID NO: 84886 - DNA, 52 bp, Artificial
  Synthetic oligonucleotide
tgggatcatggtcctggcatgatggtgctgaaatcatctactttaagtagga

SEQ ID NO: 84887 - DNA, 55 bp, Artificial
  Synthetic oligonucleotide
aaaagcgattaggatcatggtcctggcatgatggtgctgaaatcatctacttcga

SEQ ID NO: 84888 - DNA, 60 bp, Artificial
  Synthetic oligonucleotide
gtagctctctgtggatccaaggaacgattaggatcatggtcctggcatgatggtgctgaa

SEQ ID NO: 84889 - DNA, 60 bp, Artificial
  Synthetic oligonucleotide
agtagctctctgtggatccaaaaagcgattaggatcatggtcctggcatgatggtgctga

SEQ ID NO: 84890 - DNA, 57 bp, Artificial
  Synthetic oligonucleotide
gaattcggatggccaccaattagtgtcgaattgtttaaaaacgaccttgtttctact

SEQ ID NO: 84891 - DNA, 50 bp, Artificial
  Synthetic oligonucleotide
gatggccatcaattaatgtcgaattgtttaaaaacgaccttgtttctact

SEQ ID NO: 84892 - DNA, 56 bp, Artificial
  Synthetic oligonucleotide
aattcggatggccatcaattaatgtcgaattgtttaaaaacgaccttgtttctact

SEQ ID NO: 84893 - DNA, 60 bp, Artificial
  Synthetic oligonucleotide
accaaaagaattcggatggccatcaattaatgtcgaattgtttaaaaacgaccttgtttc

SEQ ID NO: 84894 - DNA, 60 bp, Artificial
  Synthetic oligonucleotide
cactccctccaaagcagaaacgctacatggcgaggagagttgagtcagaagtttgaggaa

SEQ ID NO: 84895 - DNA, 60 bp, Artificial
  Synthetic oligonucleotide
gttgcatttaacccagggaacatgctgggagcagatgtacactccaggaggggaagtgag

SEQ ID NO: 84896 - DNA, 60 bp, Artificial
  Synthetic oligonucleotide
gcaaaccatttgaatggatgtcaatccgactttacttttcttgaaagttccagcgcaaaa

SEQ ID NO: 84897 - DNA, 60 bp, Artificial
  Synthetic oligonucleotide
atggagtgaagcctctcattttgagggattgtagtgtagctggatggctcctcggaaatc

SEQ ID NO: 84898 - DNA, 60 bp, Artificial
  Synthetic oligonucleotide
gctctgcagcctaaatggagtgaagcctctcattttgagggattgtagtgtagctggatg

SEQ ID NO: 84899 - DNA, 60 bp, Artificial
  Synthetic oligonucleotide
ctagaccttcatgactcaaatgtcaagaacctttacgacaaggttcgactacagcttagg

SEQ ID NO: 84900 - DNA, 60 bp, Artificial
  Synthetic oligonucleotide
ggagtgaagcctctcattttgagggattgtagtgtagctggatggctcctcggaaatcct

SEQ ID NO: 84901 - DNA, 60 bp, Artificial
  Synthetic oligonucleotide
tggagtgaagcctctcattttgagggattgtagtgtagctggatggctcctcggaaaccc

SEQ ID NO: 84902 - DNA, 60 bp, Artificial
  Synthetic oligonucleotide
gatcgggctttgaaatcatcaaagttacagaggggtggatcaactctcccaaccatgcca

SEQ ID NO: 84903 - DNA, 60 bp, Artificial
  Synthetic oligonucleotide
gtgggagatcaggctttgaaatcatcaaagttacagagggatggattaattctcccaatc

SEQ ID NO: 84904 - DNA, 60 bp, Artificial
  Synthetic oligonucleotide
gtggtagatcgggctttgaaatcatcaaagttacagaggggtggatcaactctcccaacc

SEQ ID NO: 84905 - DNA, 60 bp, Artificial
  Synthetic oligonucleotide
gtggtagatcgggctttgaaatcatcaaagttacagagggatggatcaactctcccaacc

SEQ ID NO: 84906 - DNA, 60 bp, Artificial
  Synthetic oligonucleotide
gcagaaaattatggaaagtggagggattgacaagataagcaccgggtttacatatggatc

SEQ ID NO: 84907 - DNA, 60 bp, Artificial
  Synthetic oligonucleotide
agcattaaggcagaaaattatggaaagtggagggattgacaagataagcaccgggtttac

SEQ ID NO: 84908 - DNA, 60 bp, Artificial
  Synthetic oligonucleotide
caaggacctaggtaattgccacccgatagggatggtagtagggactcctgcttgtgacct

SEQ ID NO: 84909 - DNA, 60 bp, Artificial
  Synthetic oligonucleotide
aaaaaccggaattacaaggacctaggtaattgccacccgatagggatggtagtagggact

SEQ ID NO: 84910 - DNA, 60 bp, Artificial
  Synthetic oligonucleotide
gggactcctgcttgtgacctacacctcactggaacatgggacactttaatagagagagac

SEQ ID NO: 84911 - DNA, 60 bp, Artificial
  Synthetic oligonucleotide
agtagggactcctgcttgtgacctacacctcactggaacatgggacactttaatagagag

SEQ ID NO: 84912 - DNA, 54 bp, Artificial
  Synthetic oligonucleotide
cgctccttggagcggtgcatggtcttgacaaaatatgccttggacaccatgcag

SEQ ID NO: 84913 - DNA, 54 bp, Artificial
  Synthetic oligonucleotide
ccaatgctactgaaacggtggaaagcaaaagcctggacaaactttgcatgaaaa

SEQ ID NO: 84914 - DNA, 60 bp, Artificial
  Synthetic oligonucleotide
ccaatgctactgaaacggtggaaagcaaaagcctggacaaactttgcatgaaaaaccgga

SEQ ID NO: 84915 - DNA, 60 bp, Artificial
  Synthetic oligonucleotide
gctgctatagatcaaataaccgggaaattgaacaggctgatagagaagacaaacacagag

SEQ ID NO: 84916 - DNA, 54 bp, Artificial
  Synthetic oligonucleotide
agaagacaaacacagagttcgaatccatagagtctgagttcagtgaaatagaac

SEQ ID NO: 84917 - DNA, 60 bp, Artificial
  Synthetic oligonucleotide
gctcgctaccggaatgaggaatgtgccagaggttgcccaaggaagaggcctgtttggagc

SEQ ID NO: 84918 - DNA, 60 bp, Artificial
  Synthetic oligonucleotide
ggaagggatggtagatggttggtatggtttccgacatcaaaatgcccaaggcactggtca

SEQ ID NO: 84919 - DNA, 60 bp, Artificial
  Synthetic oligonucleotide
gaagggatggtagatggttggtatggtttccgacatcaaaatgcccaaggcactggtcag

SEQ ID NO: 84920 - DNA, 60 bp, Artificial
  Synthetic oligonucleotide
tactcaggctgctatagatcaaataaccgggaaattgaacaggctgatagagaagacaaa

SEQ ID NO: 84921 - DNA, 60 bp, Artificial
  Synthetic oligonucleotide
atgtttttggaaaggtggatccatcaacaccaaactcccttttcagaatctttccccaag

SEQ ID NO: 84922 - DNA, 60 bp, Artificial
  Synthetic oligonucleotide
ggtggatccatcaacaccaaactcccttttcagaatctttccccaagaactgtgggtcaa

SEQ ID NO: 84923 - DNA, 60 bp, Artificial
  Synthetic oligonucleotide
tttccccaagaactgtgggtcaatgccccaagtatgtgaacaaaaagagcctgctgctcg

SEQ ID NO: 84924 - DNA, 60 bp, Artificial
  Synthetic oligonucleotide
ctgctgctcgctaccggaatgaggaatgtgccagaggttgcccaaggaagaggcctgttt

SEQ ID NO: 84925 - DNA, 60 bp, Artificial
  Synthetic oligonucleotide
cggcggattaatagcacctaatagagtgagcaaactaaagggaagaggccttggcattca

SEQ ID NO: 84926 - DNA, 60 bp, Artificial
  Synthetic oligonucleotide
cacctaatagagtgagcaaactaaagggaagaggccttggcattcaatcaggagcttcag

SEQ ID NO: 84927 - DNA, 60 bp, Artificial
  Synthetic oligonucleotide
ggaacacaatcactttccatttcagtagggagttctacttatcaaaacaactttgtgcct

SEQ ID NO: 84928 - DNA, 59 bp, Artificial
  Synthetic oligonucleotide
tacttatcaaaacaactttgtgcctgtggtgggagcaagaccacaagtgaatggccaaa

SEQ ID NO: 84929 - DNA, 60 bp, Artificial
  Synthetic oligonucleotide
tctggggaattcatcacccttcaagcacacaagaaaagaatgatctgtatggaacacaat

SEQ ID NO: 84930 - DNA, 60 bp, Artificial
  Synthetic oligonucleotide
aagaatgatctgtatggaacacaatcactttccatttcagtagggagttctacttatcaa

SEQ ID NO: 84931 - DNA, 60 bp, Artificial
  Synthetic oligonucleotide
gcatgagaaatggaggaaacagtttctattcagaactaaagtggctagtgtcgaagaaca

SEQ ID NO: 84932 - DNA, 60 bp, Artificial
  Synthetic oligonucleotide
tagaacatcttataatctggggaattcatcacccttcaagcacacaagaaaagaatgatc

SEQ ID NO: 84933 - DNA, 60 bp, Artificial
  Synthetic oligonucleotide
ccgggtttacatatggatcatccatcaattcagctggaaccactaaagcatgcatgagaa

SEQ ID NO: 84934 - DNA, 60 bp, Artificial
  Synthetic oligonucleotide
tgcatgagaaatggaggaaacagtttctattcagaactaaagtggctagtgtcgaagaac

SEQ ID NO: 84935 - DNA, 60 bp, Artificial
  Synthetic oligonucleotide
cgacgacaactgcatggaaagcatcagaaacaacacctatgaccatacacaatacagaga

SEQ ID NO: 84936 - DNA, 60 bp, Artificial
  Synthetic oligonucleotide
gatggaaaagggtgctttgaaatatatcacaaatgcgacgacaactgcatggaaagcatc

SEQ ID NO: 84937 - DNA, 60 bp, Artificial
  Synthetic oligonucleotide
caaaatgcagaagaagatggaaaagggtgctttgaaatatatcacaaatgcgacgacaac

SEQ ID NO: 84938 - DNA, 60 bp, Artificial
  Synthetic oligonucleotide
caatggaaaatcagcatacaattgacatggctgattcagaaatgctgaatctatatgaga

SEQ ID NO: 84939 - DNA, 60 bp, Artificial
  Synthetic oligonucleotide
tgttatactgtggtttagcttcggggcatcatgctttgtacttttggctgtcatcatggg

SEQ ID NO: 84940 - DNA, 60 bp, Artificial
  Synthetic oligonucleotide
aaagatgttatactgtggtttagcttcggggcatcatgctttgtacttttggctgtcatc

SEQ ID NO: 84941 - DNA, 60 bp, Artificial
  Synthetic oligonucleotide
gcatggaaagcatcagaaacaacacctatgaccatacacaatacagagaagaagcgctct

SEQ ID NO: 84942 - DNA, 60 bp, Artificial
  Synthetic oligonucleotide
ctgggagacccccactgtgatgtattccaagatgaaacctgggacctctatgtggaacgt

SEQ ID NO: 84943 - DNA, 60 bp, Artificial
  Synthetic oligonucleotide
gtcccaaggcaccaaacgatcttatgagcagatggaaactggtggagagcgccagaatgc

SEQ ID NO: 84944 - DNA, 60 bp, Artificial
  Synthetic oligonucleotide
caacatcctcaaggggaaattccaaacagcagcacaacgagcaatgatggaccaagtgag

SEQ ID NO: 84945 - DNA, 60 bp, Artificial
  Synthetic oligonucleotide
cgccaataaccggagggagcccagatcctggcgtaaaaggatttgcattcttagacgggg

SEQ ID NO: 84946 - DNA, 60 bp, Artificial
  Synthetic oligonucleotide
caccgataaccggagggagcccagatcctggcgtaaaaggatttgcattcttagacgggg

SEQ ID NO: 84947 - DNA, 60 bp, Artificial
  Synthetic oligonucleotide
tggccaaatcatgagacaactaaaggtgttacagctgcatgcccttactctggagccagc

SEQ ID NO: 84948 - DNA, 60 bp, Artificial
  Synthetic oligonucleotide
taagaaatgtcccatccattcaatccagaggactatttggagcaatcgccggattcatag

SEQ ID NO: 84949 - DNA, 60 bp, Artificial
  Synthetic oligonucleotide
cccaagtatatcaagagcaccaagctaaggatggcaacaggactaagaaatgtcccatcc

SEQ ID NO: 84950 - DNA, 60 bp, Artificial
  Synthetic oligonucleotide
gtgcatcctatcactattggagaatgtcccaaatacgtcaagagcaccaaactaagaatg

SEQ ID NO: 84951 - DNA, 60 bp, Artificial
  Synthetic oligonucleotide
gcgttgaacagtagcctcccttttcagaatgtgcatcctatcactattggagaatgtccc

SEQ ID NO: 84952 - DNA, 60 bp, Artificial
  Synthetic oligonucleotide
tgcatggaaagtgtgaagaacggcacatatgactaccccaaatattcagaagagtctaaa

SEQ ID NO: 84953 - DNA, 60 bp, Artificial
  Synthetic oligonucleotide
tggccaaaccatgagacaactaaaggtgttacagctgcctgctcttactctggggccagc

SEQ ID NO: 84954 - DNA, 60 bp, Artificial
  Synthetic oligonucleotide
ctgtgacccactcagtgaatttgctcgaagacagccataatgggaaactctgcagtctga

SEQ ID NO: 84955 - DNA, 60 bp, Artificial
  Synthetic oligonucleotide
aatgtcccatccattcaatccagaggactatttggagcaatcgccggattcatagagggg

SEQ ID NO: 84956 - DNA, 60 bp, Artificial
  Synthetic oligonucleotide
aagcacacagaatgcgatcgacgggatcacaaataaggtgaattcggtaattgagaagat

SEQ ID NO: 84957 - DNA, 60 bp, Artificial
  Synthetic oligonucleotide
gcacacagaatgcgatcgacgggatcacaaataaggtgaattcggtaattgagaagatga

SEQ ID NO: 84958 - DNA, 60 bp, Artificial
  Synthetic oligonucleotide
atttggcttcaaaacgggtaatgatgtatggttgggaaggacggtatcaactagtggaag

SEQ ID NO: 84959 - DNA, 60 bp, Artificial
  Synthetic oligonucleotide
catttcaagtcctcattgccactgtgccccttccgaggtttcttcccctttcacaaggac

SEQ ID NO: 84960 - DNA, 60 bp, Artificial
  Synthetic oligonucleotide
aagggagccttatgtcagttgcgacaatgatgattgctggtcttttgccctcgcccaagg

SEQ ID NO: 84961 - DNA, 55 bp, Artificial
  Synthetic oligonucleotide
gctggtcttttgccctcgcccaaggggctctactggggactaaacacagcaatgg

SEQ ID NO: 84962 - DNA, 55 bp, Artificial
  Synthetic oligonucleotide
actgggtaattacaaggagatatgcgttgcttggtcaagtagcagttgcttcgat

SEQ ID NO: 84963 - DNA, 60 bp, Artificial
  Synthetic oligonucleotide
gaagacattcccaagacaaagatacaacatttggaggagtgttcttgttatgtggacatc

SEQ ID NO: 84964 - DNA, 60 bp, Artificial
  Synthetic oligonucleotide
ggaaaggttccaacagaccttggatgaggatcaacaatgagaccatactagaaacaggat

SEQ ID NO: 84965 - DNA, 60 bp, Artificial
  Synthetic oligonucleotide
ctcccctaatcatgccaaatcagttacacaaacattagtgtcaaacaacgattggtcagg

SEQ ID NO: 84966 - DNA, 60 bp, Artificial
  Synthetic oligonucleotide
ctagtggaagatcaggctttgaagtcatcaaagtcacagaggggtggatcaactccccta

SEQ ID NO: 84967 - DNA, 60 bp, Artificial
  Synthetic oligonucleotide
agcaaaagcaggtgcgaaatgaatccaaatcagaagataataacaattggtgtagtgaat

SEQ ID NO: 84968 - DNA, 60 bp, Artificial
  Synthetic oligonucleotide
ctaaagcggaaaagcatttcaagtcctcattgccactgtgccccttccgaggtttcttcc

SEQ ID NO: 84969 - DNA, 60 bp, Artificial
  Synthetic oligonucleotide
gcattgacggaacctgtattgtcgctgttacagatggtcctgcggctaatagtgcagacc

SEQ ID NO: 84970 - DNA, 60 bp, Artificial
  Synthetic oligonucleotide
ctagaaacaggatatgtatgtagcaaattccattcagatacccccagaccagccgatcct

SEQ ID NO: 84971 - DNA, 60 bp, Artificial
  Synthetic oligonucleotide
gagttcattgctgaggaattccaatggagcacagtcaaacaaaatgggaaatccggggca

SEQ ID NO: 84972 - DNA, 60 bp, Artificial
  Synthetic oligonucleotide
gggacatttgaattcacaagctttttctatcgctatgggtttgtggccaattttagcatg

SEQ ID NO: 84973 - DNA, 60 bp, Artificial
  Synthetic oligonucleotide
ggtgggataaggatggtggacatccttaggcagaatccaacagaggaacaagccgtggat

SEQ ID NO: 84974 - DNA, 60 bp, Artificial
  Synthetic oligonucleotide
ggcaccaaaattccgaaggtacaggacaagcagcagaccttaaaagcactcaggcagcca

SEQ ID NO: 84975 - DNA, 60 bp, Artificial
  Synthetic oligonucleotide
ggacctcaagtagctccattgtgatgtgtggggtggaccatgaggttgccgattggtcat

SEQ ID NO: 84976 - DNA, 60 bp, Artificial
  Synthetic oligonucleotide
gccatatagaagaatgctcatgctaccccaatgagggtaaagtggaatgtgtttgtaggg

SEQ ID NO: 84977 - DNA, 60 bp, Artificial
  Synthetic oligonucleotide
ttcaatggaggccatatagaagaatgctcatgctaccccaatgagggtaaagtggaatgt

SEQ ID NO: 84978 - DNA, 60 bp, Artificial
  Synthetic oligonucleotide
gatgcaccgataaccggagggagcccagatcctggcgtaaaaggatttgcattcttagac

SEQ ID NO: 84979 - DNA, 60 bp, Artificial
  Synthetic oligonucleotide
tgatcgctcctcgagggtacttcaaaatgcgcactgggaaaagctcaataatgagatcag

SEQ ID NO: 84980 - DNA, 60 bp, Artificial
  Synthetic oligonucleotide
cgctcctcgagggtacttcaaaatgcgcactgggaaaagctcaataatgagatcagatgc

SEQ ID NO: 84981 - DNA, 60 bp, Artificial
  Synthetic oligonucleotide
gttggtggaatcggaagattctacatacagatgtgcactgaactcaaactcagtgactac

SEQ ID NO: 84982 - DNA, 60 bp, Artificial
  Synthetic oligonucleotide
tcagacggcagaaatagtgaatttagcttgtccttcatgaaaaaatgccttgtttctact

SEQ ID NO: 84983 - DNA, 60 bp, Artificial
  Synthetic oligonucleotide
aagagctcagacggcaaaaatagtgaatttagcttgtccttcatgaaaaaatgccttgtt

SEQ ID NO: 84984 - DNA, 60 bp, Artificial
  Synthetic oligonucleotide
cagcctctttgagtcccggaatgatgatgggcatgttcaacatgctaagtacagttttgg

SEQ ID NO: 84985 - DNA, 60 bp, Artificial
  Synthetic oligonucleotide
ggattcatagaggggggatggacaggcatgatagatgggtggtatgggtaccaccaccag

SEQ ID NO: 84986 - DNA, 57 bp, Artificial
  Synthetic oligonucleotide
gaaatagatggagtgaagctagaatcaatgggagtttaccaaattttggcgatctat

SEQ ID NO: 84987 - DNA, 60 bp, Artificial
  Synthetic oligonucleotide
cgtacgttctctctatcgtcccgtcgggccccctcaaagccgagatcgcgcagagacttg

SEQ ID NO: 84988 - DNA, 60 bp, Artificial
  Synthetic oligonucleotide
tgagcagataacatttatgcaagccttacaactactgcttgaagtggagcaagagataag

SEQ ID NO: 84989 - DNA, 60 bp, Artificial
  Synthetic oligonucleotide
agcaaaagcaggggttataccatggacaaccgaacaaagacaatgaccatcacctttctc

SEQ ID NO: 84990 - DNA, 60 bp, Artificial
  Synthetic oligonucleotide
ctttccacaacattcacccattgacaataggtgagtgtcccaagtatgtaaagtcagata

SEQ ID NO: 84991 - DNA, 60 bp, Artificial
  Synthetic oligonucleotide
tgaccagattaatgggaagttgaaccgagtaatcgagaaaacaaatgaaaagtttcatca

SEQ ID NO: 84992 - DNA, 60 bp, Artificial
  Synthetic oligonucleotide
gaccagattaatgggaagttgaaccgagtaatcgagaaaacaaatgaaaagtttcatcag

SEQ ID NO: 84993 - DNA, 60 bp, Artificial
  Synthetic oligonucleotide
cctggggaaaccttgaatgtagagtctaatggaaatctaatagctccttggtatgcatac

SEQ ID NO: 84994 - DNA, 60 bp, Artificial
  Synthetic oligonucleotide
gctccttggtatgcatacagattcgtcagcaccagtagaaaaggagccgtcttcaagtca

SEQ ID NO: 84995 - DNA, 60 bp, Artificial
  Synthetic oligonucleotide
ctgctgtgaacggactaagaggtagaattgattactactggtctgttttaaagcctgggg

SEQ ID NO: 84996 - DNA, 60 bp, Artificial
  Synthetic oligonucleotide
ttttaaagcctggggaaaccttgaatgtagagtctaatggaaatctaatagctccttggt

SEQ ID NO: 84997 - DNA, 57 bp, Artificial
  Synthetic oligonucleotide
aaaacactggaaaccagccaatactctatttctggggtgtgcaccatcctccggaca

SEQ ID NO: 84998 - DNA, 60 bp, Artificial
  Synthetic oligonucleotide
aagacctgctgtgaacggactaagaggtagaattgattactactggtctgttttaaagcc

SEQ ID NO: 84999 - DNA, 60 bp, Artificial
  Synthetic oligonucleotide
tggataataaaaactagatcagcagcgtaccctgtaatcaggggaacttacaaaaacact

SEQ ID NO: 85000 - DNA, 59 bp, Artificial
  Synthetic oligonucleotide
caaaaacactggaaaccagccaatactctatttctggggtgtgcaccatcctccggaca

SEQ ID NO: 85001 - DNA, 60 bp, Artificial
  Synthetic oligonucleotide
tacatgggcaggggtagacaccaatagtggggtgtcaagtgcttgcccgtatactagtgg

SEQ ID NO: 85002 - DNA, 60 bp, Artificial
  Synthetic oligonucleotide
caagtgcttgcccgtatactagtggttcgtctttctacagaaacctgctgtggataataa

SEQ ID NO: 85003 - DNA, 60 bp, Artificial
  Synthetic oligonucleotide
ggtcatatatagtggaaaggcctacagcccaaaatgggatatgctacccaggagtgctga

SEQ ID NO: 85004 - DNA, 59 bp, Artificial
  Synthetic oligonucleotide
ccccgatgcgacctgttacttggtgatcaaagctggtcatatatagtggaaaggcctac

SEQ ID NO: 85005 - DNA, 60 bp, Artificial
  Synthetic oligonucleotide
catagacaaaatgaacacacagttcgaagctgtcgatcacgaattttcaaatttggagag

SEQ ID NO: 85006 - DNA, 60 bp, Artificial
  Synthetic oligonucleotide
ggatgctttgaattttggcataagtgtgacaatgaatgcatagagtctgtcaagaatggt

SEQ ID NO: 85007 - DNA, 60 bp, Artificial
  Synthetic oligonucleotide
gtctgtcaagaatggtacttataactatcccaaataccaggatgaaagcagattaaacag

SEQ ID NO: 85008 - DNA, 60 bp, Artificial
  Synthetic oligonucleotide
caagaatggtacttataactatcccaaataccaggatgaaagcagattaaacaggcagac

SEQ ID NO: 85009 - DNA, 60 bp, Artificial
  Synthetic oligonucleotide
gattaaacaggcagacaatagaatcggtgaaactggaaaaccttggtgtgtatcaaattc

SEQ ID NO: 85010 - DNA, 60 bp, Artificial
  Synthetic oligonucleotide
caggcagacaatagaatcggtgaaactggaaaaccttggtgtgtatcaaattcttgccat

SEQ ID NO: 85011 - DNA, 60 bp, Artificial
  Synthetic oligonucleotide
gatgtttcccaaaagtacatgggcaggggtagacaccaatagtggggtgtcaagtgcttg

SEQ ID NO: 85012 - DNA, 60 bp, Artificial
  Synthetic oligonucleotide
aaagtcttgaacaaagcccctctcgacttgaaaggctgcaccatagagggttggatattg

SEQ ID NO: 85013 - DNA, 60 bp, Artificial
  Synthetic oligonucleotide
agttgctggagaatcaaaaggaagaaaggttctgcaaagtcttgaacaaagcccctctcg

SEQ ID NO: 85014 - DNA, 60 bp, Artificial
  Synthetic oligonucleotide
tcacgcactcagttgagttgctggagaatcaaaaggaagaaaggttctgcaaagtcttga

SEQ ID NO: 85015 - DNA, 60 bp, Artificial
  Synthetic oligonucleotide
ggaaaggcctacagcccaaaatgggatatgctacccaggagtgctgaatgaggttgaaga

SEQ ID NO: 85016 - DNA, 60 bp, Artificial
  Synthetic oligonucleotide
aaggtcaattctatcatagacaaaatgaacacacagttcgaagctgtcgatcacgaattt

SEQ ID NO: 85017 - DNA, 60 bp, Artificial
  Synthetic oligonucleotide
gcagcagacagagagagcactcaaaaggctatagacgggatcacaaataaggtcaattct

SEQ ID NO: 85018 - DNA, 60 bp, Artificial
  Synthetic oligonucleotide
ttggatattggggaacccccgatgcgacctgttacttggtgatcaaagctggtcatatat

SEQ ID NO: 85019 - DNA, 60 bp, Artificial
  Synthetic oligonucleotide
aacaaagcccctctcgacttgaaaggctgcaccatagagggttggatattggggaacccc

SEQ ID NO: 85020 - DNA, 60 bp, Artificial
  Synthetic oligonucleotide
ggagctatcgcaggcttcatcgaaggaggatggactggaatgatagatggatggtatggc

SEQ ID NO: 85021 - DNA, 60 bp, Artificial
  Synthetic oligonucleotide
atgcagcagacagagagagcactcaaaaggctatagacgggatcacaaataaggtcaatt

SEQ ID NO: 85022 - DNA, 60 bp, Artificial
  Synthetic oligonucleotide
tggctaccaccatgaaaattctcaaggctcagggtatgcagcagacagagagagcactca

SEQ ID NO: 85023 - DNA, 60 bp, Artificial
  Synthetic oligonucleotide
ctggactaaggaatgttccacagattgaaactagaggactcttcggagctatcgcaggct

SEQ ID NO: 85024 - DNA, 60 bp, Artificial
  Synthetic oligonucleotide
gtttgagacttgcaactggactaaggaatgttccacagattgaaactagaggactcttcg

SEQ ID NO: 85025 - DNA, 50 bp, Artificial
  Synthetic oligonucleotide
tacttgaagtggagcaagagataagaactttctcgtttcagcttatttaa

SEQ ID NO: 85026 - DNA, 60 bp, Artificial
  Synthetic oligonucleotide
gtcggaatcaatatgagcaaaaagaagtcctatataaataggacaggaacatttgaattc

SEQ ID NO: 85027 - DNA, 60 bp, Artificial
  Synthetic oligonucleotide
atttgaatggatgtcaatccgactttacttttcttgaaagttccagcgcaaaatgctata

SEQ ID NO: 85028 - DNA, 60 bp, Artificial
  Synthetic oligonucleotide
taattcacaagacacagaactctctttcacaatcactggagacaacaccaaatggaatga

SEQ ID NO: 85029 - DNA, 59 bp, Artificial
  Synthetic oligonucleotide
aaaacaccgatcttgaggcgctcatggaatggctaaagacaagaccaatcctgtcacct

SEQ ID NO: 85030 - DNA, 60 bp, Artificial
  Synthetic oligonucleotide
ggattcttcccttttcacaaggacaatgcaatacggctgggtgagaacaaggacgtcata

SEQ ID NO: 85031 - DNA, 60 bp, Artificial
  Synthetic oligonucleotide
cataaacaggacaggaacatttgaattcacaagctttttctatcgctatggattcgtggc

SEQ ID NO: 85032 - DNA, 60 bp, Artificial
  Synthetic oligonucleotide
ggaatccgtaatgagaatgggagaccttcactccctccaaagcagaaacgctacatggcg

SEQ ID NO: 85033 - DNA, 60 bp, Artificial
  Synthetic oligonucleotide
ggcacacaacgggaagctctgcagcctaaatggagtgaaacctctcattttgagggattg

SEQ ID NO: 85034 - DNA, 56 bp, Artificial
  Synthetic oligonucleotide
aaaacacacaacgggaagctctgcagcctaaatggagtgaagcctctcattttgag

SEQ ID NO: 85035 - DNA, 60 bp, Artificial
  Synthetic oligonucleotide
ctggatgtgctccaatggatcattgcagtgcagaatttgcatttaaaattattagtccag

SEQ ID NO: 85036 - DNA, 60 bp, Artificial
  Synthetic oligonucleotide
cggagggagcgggacgaacaattacggagtgaaaggatttggcttcagacaaggtaatag

SEQ ID NO: 85037 - DNA, 60 bp, Artificial
  Synthetic oligonucleotide
tgtcggagggagcgggacgaacaattacggagtgaaaggatttggcttcagacaaggtaa

SEQ ID NO: 85038 - DNA, 60 bp, Artificial
  Synthetic oligonucleotide
ggttctgtgtcactggcactagttatattcaacatattgcttcatattgcatcaatagtc

SEQ ID NO: 85039 - DNA, 60 bp, Artificial
  Synthetic oligonucleotide
acaatgaaactgtaaggctggaaactataacaattcctatcaataacaccgtgtatatag

SEQ ID NO: 85040 - DNA, 61 bp, Artificial
  Synthetic oligonucleotide
caatgaaactgtaaggctggaaactataacaattcctatcaataacaccgtgtatatagag

SEQ ID NO: 85041 - DNA, 60 bp, Artificial
  Synthetic oligonucleotide
gtgtatatagagagagagttacatcaaggacctgaattcttaaacaatacagaacctctc

SEQ ID NO: 85042 - DNA, 60 bp, Artificial
  Synthetic oligonucleotide
agaacctctctgcaatgtatccggatttgcaatagtttccaaagacaatggaattagaat

SEQ ID NO: 85043 - DNA, 60 bp, Artificial
  Synthetic oligonucleotide
tgtatccggatttgcaatagtttccaaagacaatggaattagaatagggtcaaggggaca

SEQ ID NO: 85044 - DNA, 55 bp, Artificial
  Synthetic oligonucleotide
gctgagcaatcttgcaaaaggagagaaggctaatgtgctaattgggcaaggagac

SEQ ID NO: 85045 - DNA, 60 bp, Artificial
  Synthetic oligonucleotide
attgaaagatgagtcttctaaccgaggtcgaaacgtacgttctctctatcgtcccatcag

SEQ ID NO: 85046 - DNA, 60 bp, Artificial
  Synthetic oligonucleotide
gctcatggccaggtcatgagacaactaaaggtgttaccgctgcatgctcttatcacgggg

SEQ ID NO: 85047 - DNA, 60 bp, Artificial
  Synthetic oligonucleotide
ttgaggccactggaaatttgatagcaccatggtacgctttcgcactgaataaaggttctg

SEQ ID NO: 85048 - DNA, 60 bp, Artificial
  Synthetic oligonucleotide
ggccactggaaatttgatagcaccatggtacgctttcgcactgaataaaggttctggctc

SEQ ID NO: 85049 - DNA, 60 bp, Artificial
  Synthetic oligonucleotide
aggttcactccagaactagcagccagacctaaagtaagaggacaggcaggcagaattaac

SEQ ID NO: 85050 - DNA, 60 bp, Artificial
  Synthetic oligonucleotide
ctagcagccagacctaaagtaagaggacaggcaggcagaattaactactattggaccctg

SEQ ID NO: 85051 - DNA, 60 bp, Artificial
  Synthetic oligonucleotide
ttggaccctgttagatcaaggagacaacataacatttgaggccactggaaatttgatagc

SEQ ID NO: 85052 - DNA, 60 bp, Artificial
  Synthetic oligonucleotide
ccaaacccctcatggggctctgaacagcagcctcccttttcagaatgtacatcctatcac

SEQ ID NO: 85053 - DNA, 60 bp, Artificial
  Synthetic oligonucleotide
ctcatggtcatacataatagaaactacaaattcagagaacggaacatgctaccccggtga

SEQ ID NO: 85054 - DNA, 60 bp, Artificial
  Synthetic oligonucleotide
gcaggatggcttcttggcaatccggagtgtgatcttctactgactgcaagctcatggtca

SEQ ID NO: 85055 - DNA, 60 bp, Artificial
  Synthetic oligonucleotide
gcacatacgactatcccaagtattcagaagagtccaaactgaatcgagaagaaatagatg

SEQ ID NO: 85056 - DNA, 60 bp, Artificial
  Synthetic oligonucleotide
cccaagtattcagaagagtccaaactgaatcgagaagaaatagatggagtgaagctagaa

SEQ ID NO: 85057 - DNA, 58 bp, Artificial
  Synthetic oligonucleotide
tcatggccaggtcatgagacaactaaaggtgttaccgctgcatgctcttatcacgggg

SEQ ID NO: 85058 - DNA, 55 bp, Artificial
  Synthetic oligonucleotide
ttctacttgaaaatgaaaggactctagacctccatgactccaatgtgaggaattt

SEQ ID NO: 85059 - DNA, 60 bp, Artificial
  Synthetic oligonucleotide
tgagttctaccacaagtgtgacgatgaatgcatggaaagtgtgaagaatggcacatacga

SEQ ID NO: 85060 - DNA, 60 bp, Artificial
  Synthetic oligonucleotide
cagaaggccggttggaatttccagcatggtggaggccatggtgtctagggcccgaattga

SEQ ID NO: 85061 - DNA, 60 bp, Artificial
  Synthetic oligonucleotide
aatattggcagtagaccatgggtgagaggccaaagcggcaggatcagcttctattggaca

SEQ ID NO: 85062 - DNA, 60 bp, Artificial
  Synthetic oligonucleotide
cgcttggggaatctgtgatgagaatgggagacctccactccctccaaagcagaaacgcta

SEQ ID NO: 85063 - DNA, 60 bp, Artificial
  Synthetic oligonucleotide
aatgatgatgggcatgttcaacatgctaagtacagttttgggagtctcgattctaaacct

SEQ ID NO: 85064 - DNA, 60 bp, Artificial
  Synthetic oligonucleotide
ggaatgatgatgggcatgttcaacatgctaagtacggttttaggagtctcaatcctaaat

SEQ ID NO: 85065 - DNA, 60 bp, Artificial
  Synthetic oligonucleotide
aatgatgatgggcatgttcaacatgctaagtacagtgttgggagtctcgattctaaatct

SEQ ID NO: 85066 - DNA, 60 bp, Artificial
  Synthetic oligonucleotide
gtttgaagagataagatggttgattgaagaagtgagacataagttgaaaacaacagaaaa

SEQ ID NO: 85067 - DNA, 60 bp, Artificial
  Synthetic oligonucleotide
atttatcgtcgccttaaatacggtttgaaaagagggccttctacggaaggagtgcctgag

SEQ ID NO: 85068 - DNA, 60 bp, Artificial
  Synthetic oligonucleotide
agggttgctccttcaaataacaagcttatgctcaatatggtttagccattacaaccaggt

SEQ ID NO: 85069 - DNA, 60 bp, Artificial
  Synthetic oligonucleotide
ggtctggttacagcggaagcttcagcattagaggggagacaacaggcaggaattgcactg

SEQ ID NO: 85070 - DNA, 60 bp, Artificial
  Synthetic oligonucleotide
ataattggtctggttacagcggaagcttcagcattagaggggagacaacaggcaggaatt

SEQ ID NO: 85071 - DNA, 60 bp, Artificial
  Synthetic oligonucleotide
gagggcaacctaaagaaaggaccatatggactagtggtagtagcattgctttctgtggtg

SEQ ID NO: 85072 - DNA, 60 bp, Artificial
  Synthetic oligonucleotide
aagagggcaacctaaagaaaggaccatatggactagtggtagtagcattgctttctgtgg

SEQ ID NO: 85073 - DNA, 60 bp, Artificial
  Synthetic oligonucleotide
agcttggaatccagaagcggttttgagatggtctgggatgctaatggatgggtgtcgaca

SEQ ID NO: 85074 - DNA, 60 bp, Artificial
  Synthetic oligonucleotide
gatatggagatggtgtttggatagggaggacaaagagcttggaatccagaagcggttttg

SEQ ID NO: 85075 - DNA, 60 bp, Artificial
  Synthetic oligonucleotide
ggtgtcgacagacaaggattcgaatggtgtacaggatattatagacaacgataattggtc

SEQ ID NO: 85076 - DNA, 60 bp, Artificial
  Synthetic oligonucleotide
gcttggaatccagaagcggttttgagatggtctgggatgctaatggatgggtgtcgacag

SEQ ID NO: 85077 - DNA, 60 bp, Artificial
  Synthetic oligonucleotide
ctcagcccctgatgtggtccattactctagtggaagagacttgtgcccaataaaagggtg

SEQ ID NO: 85078 - DNA, 60 bp, Artificial
  Synthetic oligonucleotide
caccaatgtgcagaacaactataccacagtaattgaaccctcagcccctgatgtggtcca

SEQ ID NO: 85079 - DNA, 60 bp, Artificial
  Synthetic oligonucleotide
tttgtcaatgtcaccaatgtgcagaacaactataccacagtaattgaaccctcagcccct

SEQ ID NO: 85080 - DNA, 60 bp, Artificial
  Synthetic oligonucleotide
gctccttcaaataacaagcttatgctcaatatggtttagccattacaaccaggtgaccca

SEQ ID NO: 85081 - DNA, 60 bp, Artificial
  Synthetic oligonucleotide
taatgaatgcaggacctttttcttgactcagggagccctcctcaatgacaagcattcgaa

SEQ ID NO: 85082 - DNA, 60 bp, Artificial
  Synthetic oligonucleotide
ggtgggcacctctaagtaaagacaatggaattagaattggatcccgaggcgaggtatttg

SEQ ID NO: 85083 - DNA, 60 bp, Artificial
  Synthetic oligonucleotide
taaaagggtgggcacctctaagtaaagacaatggaattagaattggatcccgaggcgagg

SEQ ID NO: 85084 - DNA, 60 bp, Artificial
  Synthetic oligonucleotide
ccctgatgtggtccattactctagtggaagagacttgtgcccaataaaagggtgggcacc

SEQ ID NO: 85085 - DNA, 60 bp, Artificial
  Synthetic oligonucleotide
aacagtaaaagacagaagtccctttcgtacgttaatgagttgtccagtaggagttgcccc

SEQ ID NO: 85086 - DNA, 60 bp, Artificial
  Synthetic oligonucleotide
agcattcgaacggaacagtaaaagacagaagtccctttcgtacgttaatgagttgtccag

SEQ ID NO: 85087 - DNA, 60 bp, Artificial
  Synthetic oligonucleotide
ggctcatgtaacagtccagtcaacaacgggaagggaagatatggggtgaagggattcagc

SEQ ID NO: 85088 - DNA, 60 bp, Artificial
  Synthetic oligonucleotide
agggattcagctttagatatggagatggtgtttggatagggaggacaaagagcttggaat

SEQ ID NO: 85089 - DNA, 60 bp, Artificial
  Synthetic oligonucleotide
gcgggatatttggggacaatcccaggcctgtggatggcataggctcatgtaacagtccag

SEQ ID NO: 85090 - DNA, 60 bp, Artificial
  Synthetic oligonucleotide
aggctcatgtaacagtccagtcaacaacgggaagggaagatatggggtgaagggattcag

SEQ ID NO: 85091 - DNA, 60 bp, Artificial
  Synthetic oligonucleotide
aagctggaagggtaatatcatgcgaacacaagagtctgaatgcgtatgccaggatgagtt

SEQ ID NO: 85092 - DNA, 60 bp, Artificial
  Synthetic oligonucleotide
gttgaatgtgtctgtagagacaactggcgggggagcaataggccatggataagattcaac

SEQ ID NO: 85093 - DNA, 50 bp, Artificial
  Synthetic oligonucleotide
tgtggcatggtctgccacagcatgcagtgatggacccggttggctaacat

SEQ ID NO: 85094 - DNA, 60 bp, Artificial
  Synthetic oligonucleotide
gacacgttaaaaagctggaagggtaatatcatgcgaacacaagagtctgaatgcgtatgc

SEQ ID NO: 85095 - DNA, 60 bp, Artificial
  Synthetic oligonucleotide
agttgtccagtaggagttgccccctctcctagcaacagccgttttgaatctgtggcatgg

SEQ ID NO: 85096 - DNA, 55 bp, Artificial
  Synthetic oligonucleotide
cccctctcctagcaacagccgttttgaatctgtggcatggtctgccacagcatgc

SEQ ID NO: 85097 - DNA, 60 bp, Artificial
  Synthetic oligonucleotide
tttgaagagataagatggttgattgaagaagtgcgacatagattgaagattacagagaat

SEQ ID NO: 85098 - DNA, 60 bp, Artificial
  Synthetic oligonucleotide
tgtcaacaaccaaaactggtcgggatactcaggagcattcatagactactgggcaaacaa

SEQ ID NO: 85099 - DNA, 60 bp, Artificial
  Synthetic oligonucleotide
cattgaaaataagagtacatgaggggtatgaagagttcacaatggttgggagaagagcaa

SEQ ID NO: 85100 - DNA, 60 bp, Artificial
  Synthetic oligonucleotide
tatccgtagtaagtctgctaataggattggccaacttggggctgaacattgggcttcatt

SEQ ID NO: 85101 - DNA, 60 bp, Artificial
  Synthetic oligonucleotide
tggagcaatagctgggttcatagagaatggctggcaaggtctaatcgatggttggtatgg

SEQ ID NO: 85102 - DNA, 60 bp, Artificial
  Synthetic oligonucleotide
aaatgtccctaaaacgaagatacaacacttagaagagtgttcctgctatgtggacatcga

SEQ ID NO: 85103 - DNA, 60 bp, Artificial
  Synthetic oligonucleotide
cgactccagctgagagacaatgcaaaagaattgggcaacggatgctttgaattctaccac

SEQ ID NO: 85104 - DNA, 60 bp, Artificial
  Synthetic oligonucleotide
agctttgaaagtaatgggaattttatagctcctgaatatgcgtacaagattgtcaagaaa

SEQ ID NO: 85105 - DNA, 54 bp, Artificial
  Synthetic oligonucleotide
atgcctcatcaggagtgagttcggcatgcccatacaatggtagatcttcctttt

SEQ ID NO: 85106 - DNA, 60 bp, Artificial
  Synthetic oligonucleotide
cgacggagcaggttgatacaatcatggagaagaatgtgacggtcacacatgctcaggata

SEQ ID NO: 85107 - DNA, 60 bp, Artificial
  Synthetic oligonucleotide
caaacaattcgacagagcaggttgatacaatcatggagaagaatgtgacggtcacacatg

SEQ ID NO: 85108 - DNA, 60 bp, Artificial
  Synthetic oligonucleotide
cgacagagcaggttgatacaatcatggagaagaatgtgacggtcacacatgctcaggata

SEQ ID NO: 85109 - DNA, 60 bp, Artificial
  Synthetic oligonucleotide
tttgaaagtaatgggaattttatagctcctgaatatgcgtacaagattgtcaagaaagga

SEQ ID NO: 85110 - DNA, 57 bp, Artificial
  Synthetic oligonucleotide
agctttgagagtaatgggaattttatagctcctgaatatgcgtacaagattgtcaaa

SEQ ID NO: 85111 - DNA, 60 bp, Artificial
  Synthetic oligonucleotide
gaccaaatctgcattggttatcatgcaaacaattcaacagaacaggtcgacacaatcatg

SEQ ID NO: 85112 - DNA, 60 bp, Artificial
  Synthetic oligonucleotide
caaacaattcgacggagcaggttgatacaatcatggagaagaatgtgacggtcacacatg

SEQ ID NO: 85113 - DNA, 60 bp, Artificial
  Synthetic oligonucleotide
gatttacatgattcaaatgtcaagaacctatacgataaggtccgactccagctgagagac

SEQ ID NO: 85114 - DNA, 55 bp, Artificial
  Synthetic oligonucleotide
ttgcaacaggactaagaaacgtaccccaaagagaaacaagaggcctatttggagc

SEQ ID NO: 85115 - DNA, 60 bp, Artificial
  Synthetic oligonucleotide
tatgctgcagacaaagaatctacccagaaagcaatcgatgggatcaccaataaagtaaac

SEQ ID NO: 85116 - DNA, 60 bp, Artificial
  Synthetic oligonucleotide
gacgtatggacttacaatgcagaacttctcgtgctcatggaaaacgaaagaactctggat

SEQ ID NO: 85117 - DNA, 60 bp, Artificial
  Synthetic oligonucleotide
ggatgtatggacttataatgcagaacttctagtgctcatggaaaacgaaagaactctgga

SEQ ID NO: 85118 - DNA, 60 bp, Artificial
  Synthetic oligonucleotide
cattgctgaggaattccaatggaacacagtcaagcagaatgggaaatccggagcatgcaa

SEQ ID NO: 85119 - DNA, 60 bp, Artificial
  Synthetic oligonucleotide
cattgctgaggaattccaatggaacacagtcaaacaaaatgggaaatccggggcttgcaa

SEQ ID NO: 85120 - DNA, 60 bp, Artificial
  Synthetic oligonucleotide
gagagggaacccaggagtgaaagggtgggcctttgacaatgggaatgatgtttggatggg

SEQ ID NO: 85121 - DNA, 60 bp, Artificial
  Synthetic oligonucleotide
gagagagggaacccaggagtgaaagggtgggcctttgacaatgggaatgatgtttggatg

SEQ ID NO: 85122 - DNA, 60 bp, Artificial
  Synthetic oligonucleotide
cagttatgtgtgttcaggacttgtcggagacacaccaaggaacgatgatagctctagcag

SEQ ID NO: 85123 - DNA, 60 bp, Artificial
  Synthetic oligonucleotide
ccagttatgtgtgctcaggacttgttggcgacacaccaaggaacgatgatagctctagca

SEQ ID NO: 85124 - DNA, 60 bp, Artificial
  Synthetic oligonucleotide
ggctccgtctctctaactattgcaacagtgtgtttcctcatgcagattgccatcctaaca

SEQ ID NO: 85125 - DNA, 54 bp, Artificial
  Synthetic oligonucleotide
atggcctgatggagcgaatatcaacttcatgcctatataagctttcgcaatttt

SEQ ID NO: 85126 - DNA, 60 bp, Artificial
  Synthetic oligonucleotide
tattctggtattttctctgttgaaagcaaaagctgcatcaataggtgtttttatgtggag

SEQ ID NO: 85127 - DNA, 60 bp, Artificial
  Synthetic oligonucleotide
tattctgggattttctctgttgaaagcaaaagctgcatcaataggtgtttttatgtggag

SEQ ID NO: 85128 - DNA, 60 bp, Artificial
  Synthetic oligonucleotide
tggcattttctctgttgaaggcaaaagctgcatcaataggtgtttttatgtggagttgat

SEQ ID NO: 85129 - DNA, 60 bp, Artificial
  Synthetic oligonucleotide
cataatggattccaacacgataacctcgtttcaggtagattgctatctatggcacataag

SEQ ID NO: 85130 - DNA, 60 bp, Artificial
  Synthetic oligonucleotide
aatacataatggactccaacacgataacctcgtttcaggtagattgctatctatggcaca

SEQ ID NO: 85131 - DNA, 60 bp, Artificial
  Synthetic oligonucleotide
ggttatcatgcaaacaattcaacagaacaggtcgacacaatcatggagaagaatgtgacg

SEQ ID NO: 85132 - DNA, 60 bp, Artificial
  Synthetic oligonucleotide
cctgtgctatccaggagacttcaacgattatgaagaattaaagcatttaatgagcagcac

SEQ ID NO: 85133 - DNA, 60 bp, Artificial
  Synthetic oligonucleotide
cccaggagctcttggtccaatcatgatgcctcatcgggagtgagttcggcatgcccatac

SEQ ID NO: 85134 - DNA, 60 bp, Artificial
  Synthetic oligonucleotide
gtgagttcggcatgcccatacaatggtaggtcttcctttttcaggaatgtagtgtggttg

SEQ ID NO: 85135 - DNA, 60 bp, Artificial
  Synthetic oligonucleotide
gtacccaacaataaagaggacctacaacaacaccaatgtagaagaccttttaatattatg

SEQ ID NO: 85136 - DNA, 60 bp, Artificial
  Synthetic oligonucleotide
gggaattcaccaccctaatgatgcagcagaacaaacaaaactctaccagaactcgaacac

SEQ ID NO: 85137 - DNA, 54 bp, Artificial
  Synthetic oligonucleotide
gtgagttcagattataattaaaaacacccttgtttctctttaggagtcgtatta

SEQ ID NO: 85138 - DNA, 60 bp, Artificial
  Synthetic oligonucleotide
ccagaactcgaacacttatgtgtctgtaggaacatcaacactgaatcagaggtcaatccc

SEQ ID NO: 85139 - DNA, 60 bp, Artificial
  Synthetic oligonucleotide
ttcagataattcccaggagctcttggtccaatcatgatgcctcatcgggagtgagttcgg

SEQ ID NO: 85140 - DNA, 60 bp, Artificial
  Synthetic oligonucleotide
aatgtaccggaatggtcatacattgtggaaaaagataatccagttaatggcctgtgctat

SEQ ID NO: 85141 - DNA, 60 bp, Artificial
  Synthetic oligonucleotide
gcagtgtagctgggtggcttcttggaaacccaatgtgtgatgaattcttgaatgtaccgg

SEQ ID NO: 85142 - DNA, 60 bp, Artificial
  Synthetic oligonucleotide
gaggtcaatcccagaaatagccaccagacccaaagtgaacggacaaagtggaagaatgga

SEQ ID NO: 85143 - DNA, 60 bp, Artificial
  Synthetic oligonucleotide
gtttttggatgtatggacttataatgcagaacttctagtgctcatggaaaacgaaagaac

SEQ ID NO: 85144 - DNA, 56 bp, Artificial
  Synthetic oligonucleotide
actatccacaatactcagaagaatcaagattgaacagggaggaaatagacggagtc

SEQ ID NO: 85145 - DNA, 60 bp, Artificial
  Synthetic oligonucleotide
ccttaccattggggaatgccccaagtatgtcaaatcggacaaactggtccttgcaacagg

SEQ ID NO: 85146 - DNA, 60 bp, Artificial
  Synthetic oligonucleotide
catgaaaagtgaactggagtacggtaattgtgacaccaaatgtcagactccaatgggtgc

SEQ ID NO: 85147 - DNA, 60 bp, Artificial
  Synthetic oligonucleotide
aaggaggatggcaaggaatggtggatggatggtacgggtaccaccatagcaatgagcagg

SEQ ID NO: 85148 - DNA, 60 bp, Artificial
  Synthetic oligonucleotide
cagggaagtggatatgctgcagacaaagaatctacccagaaagcaatcgatggaatcacc

SEQ ID NO: 85149 - DNA, 60 bp, Artificial
  Synthetic oligonucleotide
gtggaagaatggaatttttttggacaatactaaggcctaacgatgcaatcagctttgaga

SEQ ID NO: 85150 - DNA, 60 bp, Artificial
  Synthetic oligonucleotide
caggaatgaggaacatccctgagaaggcaaccagaggtctatttggtgcaattgctggct

SEQ ID NO: 85151 - DNA, 60 bp, Artificial
  Synthetic oligonucleotide
gtggaggccatggtgtctagggcccgaattgacgcacggattgacttcgagtctggaagg

SEQ ID NO: 85152 - DNA, 60 bp, Artificial
  Synthetic oligonucleotide
gcttcgagcagataacgttcttacaagcattgcaactcttacttgaagttgagagtgaga

SEQ ID NO: 85153 - DNA, 60 bp, Artificial
  Synthetic oligonucleotide
acattcttgcaagcattgcaactcttacttgaagttgagagtgagataaggacgttttct

SEQ ID NO: 85154 - DNA, 60 bp, Artificial
  Synthetic oligonucleotide
agtttcgagcaaataacattcttgcaagcattgcaactcttacttgaagttgagagtgag

SEQ ID NO: 85155 - DNA, 60 bp, Artificial
  Synthetic oligonucleotide
ctttgcacctttttccaatgacaatgggataagaattggttccaggggacatgtctttgt

SEQ ID NO: 85156 - DNA, 60 bp, Artificial
  Synthetic oligonucleotide
ccaatgacaatgggataagaattggttccaggggacatgtctttgttataagagagccct

SEQ ID NO: 85157 - DNA, 60 bp, Artificial
  Synthetic oligonucleotide
gataatttgaattggtcaggatacagtggatctttcactctgccagtagaattgtctggg

SEQ ID NO: 85158 - DNA, 60 bp, Artificial
  Synthetic oligonucleotide
atgggaaagtggaatgcgtatgtagagacaattggacaggaaccaacaggcctgtactgg

SEQ ID NO: 85159 - DNA, 60 bp, Artificial
  Synthetic oligonucleotide
tgatggcaaagtggaatgtgtgtgtagagacaattggacaggaaccaacaggcctgtact

SEQ ID NO: 85160 - DNA, 60 bp, Artificial
  Synthetic oligonucleotide
gcgtatgtagagacaattggacaggaaccaacaggcctgtactggttatctcaccggatc

SEQ ID NO: 85161 - DNA, 60 bp, Artificial
  Synthetic oligonucleotide
ggaatgtgtgtgtagagacaattggacaggaaccaacaggcctgtactagtcatctcgcc

SEQ ID NO: 85162 - DNA, 60 bp, Artificial
  Synthetic oligonucleotide
tcttcacccaatgcctaccaggccaagtttgagtctgttgcatggtcggccacagcatgc

SEQ ID NO: 85163 - DNA, 60 bp, Artificial
  Synthetic oligonucleotide
cgagatgatgacccatacaagcaagtatttatgctcaaaggtcctaactgatacgagtcg

SEQ ID NO: 85164 - DNA, 60 bp, Artificial
  Synthetic oligonucleotide
ggcttgggaggacaattagcaaagattccagatcaggttatgaaatgttaaaggtcccaa

SEQ ID NO: 85165 - DNA, 60 bp, Artificial
  Synthetic oligonucleotide
gtcgtcccaatgaccccactaatggaaactgtgacgcgccaataacaggagggagcccag

SEQ ID NO: 85166 - DNA, 60 bp, Artificial
  Synthetic oligonucleotide
aaggtcccaaatgctgaaactgatatccaatcgggcccaatctcaaaccaggtgattgtc

SEQ ID NO: 85167 - DNA, 60 bp, Artificial
  Synthetic oligonucleotide
aagtaaactcatggcacatcctatcaaaggacaatgcaataagaataggagaggatgctc

SEQ ID NO: 85168 - DNA, 60 bp, Artificial
  Synthetic oligonucleotide
ggtggagaaagaacatttctaaacctaactaagcccctatgtgaagtaaactcatggcac

SEQ ID NO: 85169 - DNA, 60 bp, Artificial
  Synthetic oligonucleotide
tgcagagacaattggaagggagcaaatagaccagtaatcactatagaccccgagatgatg

SEQ ID NO: 85170 - DNA, 52 bp, Artificial
  Synthetic oligonucleotide
agcaaacaatagagcagcaaccaagataatctatttcaaggaagggaaaata

SEQ ID NO: 85171 - DNA, 53 bp, Artificial
  Synthetic oligonucleotide
tgccatgatggcatgtcaagaatgtcaatatgcatgtcaggaccgaacaacaa

SEQ ID NO: 85172 - DNA, 60 bp, Artificial
  Synthetic oligonucleotide
atcggtagtaagcctcctagtaggaatcgccaatttaggtctaaacatcggactccatta

SEQ ID NO: 85173 - DNA, 60 bp, Artificial
  Synthetic oligonucleotide
gggtcaagcacccagtccatataatactagggttgagtgcatagggtggtcaagcacatc

SEQ ID NO: 85174 - DNA, 60 bp, Artificial
  Synthetic oligonucleotide
gactccattataaagtaggtgatacaccaaatgtgaatattccaaacgtaaatgggacca

SEQ ID NO: 85175 - DNA, 60 bp, Artificial
  Synthetic oligonucleotide
cctggtcacaagagagccctatctatcttgcgatccacaagggtgcaggatgtttgctct

SEQ ID NO: 85176 - DNA, 60 bp, Artificial
  Synthetic oligonucleotide
gacatgcaaatgggactatacatgataggagtccgttcagagcccttataagctgggaaa

SEQ ID NO: 85177 - DNA, 60 bp, Artificial
  Synthetic oligonucleotide
gatctgttccaccattgaagagctcagacggcagaaatagtgaatttagcttgtccttca

SEQ ID NO: 85178 - DNA, 60 bp, Artificial
  Synthetic oligonucleotide
tgcaaggatcaactctcccgaggagatctggagctgctggtgcagcagtaaagggagttg

SEQ ID NO: 85179 - DNA, 60 bp, Artificial
  Synthetic oligonucleotide
agttcatacaggagaccggttgggatttccagcatggtggaggccatggtgtctagggcc

SEQ ID NO: 85180 - DNA, 60 bp, Artificial
  Synthetic oligonucleotide
tatctttctggatgtgctccaatggatcattgcagtgcagaatttgcatttaaaattatt

SEQ ID NO: 85181 - DNA, 51 bp, Artificial
  Synthetic oligonucleotide
tatctttctggatgtgctccaatggatcattgcagtgcagaatttgcattt

SEQ ID NO: 85182 - DNA, 59 bp, Artificial
  Synthetic oligonucleotide
cgtacgttctctctatcgtcccgtcaggccccctcaaagccgagatcgcgcagagactt

SEQ ID NO: 85183 - DNA, 60 bp, Artificial
  Synthetic oligonucleotide
aacgtacgttctctctatcgtcccgtcaggccccctcaaagccgagatcgcgcagagact

SEQ ID NO: 85184 - DNA, 60 bp, Artificial
  Synthetic oligonucleotide
ctcatggcccagccaagagcatggaatatgatgctgttgctactacacactcttggatac

SEQ ID NO: 85185 - DNA, 60 bp, Artificial
  Synthetic oligonucleotide
aagatcacctacggggcatgtcccaaatatgtcaaacagagcactttgaaactggcaaca

SEQ ID NO: 85186 - DNA, 60 bp, Artificial
  Synthetic oligonucleotide
atggtttcaggcatcaaaactcggaaggcacaggacaagcagcagaccttaaaagcaccc

SEQ ID NO: 85187 - DNA, 60 bp, Artificial
  Synthetic oligonucleotide
agcaaaagcagggtgacaaagacataatggattcaaacacgataacctcgtttcaggtag

SEQ ID NO: 85188 - DNA, 60 bp, Artificial
  Synthetic oligonucleotide
gcaaaagcagggtgacaaagacataatggattcaaacacgataacctcgtttcaggtaga

SEQ ID NO: 85189 - DNA, 60 bp, Artificial
  Synthetic oligonucleotide
gacacccaatcggggccaatctcacatcaggtgattgtcaacaaccaaaactggtcggga

SEQ ID NO: 85190 - DNA, 60 bp, Artificial
  Synthetic oligonucleotide
gggcaaacaaagagtgcttcaatccttgtttttatgtggaactaatcagagggaggccca

SEQ ID NO: 85191 - DNA, 60 bp, Artificial
  Synthetic oligonucleotide
gggcaaacaaagaatgcttcaatccctgcttttatgtggaactaatcagagggaggccca

SEQ ID NO: 85192 - DNA, 60 bp, Artificial
  Synthetic oligonucleotide
caggattgtaagattgctcctttaatggtggcatacatgttggaaagagaactggttcgc

SEQ ID NO: 85193 - DNA, 60 bp, Artificial
  Synthetic oligonucleotide
gagtgtgtgtgccataaaggagtttgtccagtagtcatgacagatggcccagcaaacaat

SEQ ID NO: 85194 - DNA, 60 bp, Artificial
  Synthetic oligonucleotide
gtgccataaaggagtttgtccagtagtcatgacagatggcccagcaaacaatagagcagc

SEQ ID NO: 85195 - DNA, 60 bp, Artificial
  Synthetic oligonucleotide
tgccataaagggatctgcccagtagtcatgacagatggcccagcaaacaatagagcagcg

SEQ ID NO: 85196 - DNA, 60 bp, Artificial
  Synthetic oligonucleotide
caagcgggtcgtcagtcaaaagagaagaagaagtgcttacgggcaacctccaaacattga

SEQ ID NO: 85197 - DNA, 60 bp, Artificial
  Synthetic oligonucleotide
cgggagcggaaactgtgatgaaccgataaccggagggagcccagatcctggcgtaaaagg

SEQ ID NO: 85198 - DNA, 60 bp, Artificial
  Synthetic oligonucleotide
ctaactcacaagacacagagctctctttcacaatcactggagacaacaccaaatggaatg

SEQ ID NO: 85199 - DNA, 60 bp, Artificial
  Synthetic oligonucleotide
tgtcagcacaagtaataaaggagccgtcttcaagtcaaacttaccaatcgagaattgtga

SEQ ID NO: 85200 - DNA, 60 bp, Artificial
  Synthetic oligonucleotide
gtgtgtatcaaattcttgccatttatagtacggtatcgagcagcctagtattggtaggac

SEQ ID NO: 85201 - DNA, 60 bp, Artificial
  Synthetic oligonucleotide
gaatagacaatctgaacaaaagaatggaagatggatttttagacgtgtggacatacaatg

SEQ ID NO: 85202 - DNA, 60 bp, Artificial
  Synthetic oligonucleotide
ctgcagagtcttgaataaagcgccactggatctaatggactgcaccactgaaggttggat

SEQ ID NO: 85203 - DNA, 60 bp, Artificial
  Synthetic oligonucleotide
gtggagctcctagaaagccagaaggagaatagattctgcagagtcttgaataaagcgcca

SEQ ID NO: 85204 - DNA, 60 bp, Artificial
  Synthetic oligonucleotide
acgctgtggtgatgccagctcatggtccagccaagagcatggaatatgatgctgttgcta

SEQ ID NO: 85205 - DNA, 59 bp, Artificial
  Synthetic oligonucleotide
aatttcgagtctttgcaacacgaattcagtgaaatagaggagaggataaaccaattgtc

SEQ ID NO: 85206 - DNA, 60 bp, Artificial
  Synthetic oligonucleotide
atgaatacaaatttcgagtctgtacaacacgaattcagtgaaatagaggagaggataaac

SEQ ID NO: 85207 - DNA, 60 bp, Artificial
  Synthetic oligonucleotide
tgtagcagtgggttcagaaacttacaacagaagattcaccccagaaatcagcactaggcc

SEQ ID NO: 85208 - DNA, 60 bp, Artificial
  Synthetic oligonucleotide
ggtcatataacgcacaactcctcgttttgcttgaaaatgagaaaactctggatctccacg

SEQ ID NO: 85209 - DNA, 60 bp, Artificial
  Synthetic oligonucleotide
ggtcatataatgcacaactcctcgttttgcttgaaaatgaaaagaccctggacctccacg

SEQ ID NO: 85210 - DNA, 60 bp, Artificial
  Synthetic oligonucleotide
ctgtggttgacatctggtcatataacgcacaactcctcgttttgcttgaaaatgagaaaa

SEQ ID NO: 85211 - DNA, 60 bp, Artificial
  Synthetic oligonucleotide
cgagtctgtacaacacgaattcagtgaaatagaggagaggataaaccgattgtcgaaaca

SEQ ID NO: 85212 - DNA, 60 bp, Artificial
  Synthetic oligonucleotide
ggggcaggagtgaccgctgcatgcaaattcggaagctccaattctttcttccgaaacatg

SEQ ID NO: 85213 - DNA, 60 bp, Artificial
  Synthetic oligonucleotide
ctttcttccgaaacatgatctggctgatacatcaatcaggaacatatcctgtaataaaga

SEQ ID NO: 85214 - DNA, 60 bp, Artificial
  Synthetic oligonucleotide
cgaaacatgatctggctgatacatcaatcaggaacatatcctgtaataaagaggaccttc

SEQ ID NO: 85215 - DNA, 60 bp, Artificial
  Synthetic oligonucleotide
tatggcttatacatcaatcaggaacatatcctgtaataaagaggacttttaacaatacca

SEQ ID NO: 85216 - DNA, 51 bp, Artificial
  Synthetic oligonucleotide
ccaggaatattggagaatgaagaagaactgagactgaaattcagtggagtc

SEQ ID NO: 85217 - DNA, 60 bp, Artificial
  Synthetic oligonucleotide
gaattcaggggcaggagtgaccgctgcatgcaaattcggaagctccaattctttcttccg

SEQ ID NO: 85218 - DNA, 60 bp, Artificial
  Synthetic oligonucleotide
cgggagcaggagtgactgctgcatgcaaattcggaagctccaattctttcttccgaaaca

SEQ ID NO: 85219 - DNA, 60 bp, Artificial
  Synthetic oligonucleotide
caatcaggaacatatcctgtaataaagaggacttttaacaataccaaaggaagagatgtg

SEQ ID NO: 85220 - DNA, 60 bp, Artificial
  Synthetic oligonucleotide
aaaaagacagttcctatgtagcagtgggttcagagacctacaacagaagattcaccccag

SEQ ID NO: 85221 - DNA, 60 bp, Artificial
  Synthetic oligonucleotide
tcgctcctcggtatgcttttgagttagtgtccttggggaatggaaaattgttcaggagtg

SEQ ID NO: 85222 - DNA, 60 bp, Artificial
  Synthetic oligonucleotide
accgggctcagaaatgtccctgcgattgctgcaagaggcctgtttggtgcaatagctggt

SEQ ID NO: 85223 - DNA, 60 bp, Artificial
  Synthetic oligonucleotide
cccaaatatgtgaatgttaaatccctaaagcttgctaccgggctcagaaatgtccctgcg

SEQ ID NO: 85224 - DNA, 60 bp, Artificial
  Synthetic oligonucleotide
gggatcaacactaataggagcttccacaatgtccataggaacacaataggagactgcccc

SEQ ID NO: 85225 - DNA, 60 bp, Artificial
  Synthetic oligonucleotide
gctggtttcatagaaggtggttggccaggtttaatcaatggttggtatgggttccaacac

SEQ ID NO: 85226 - DNA, 60 bp, Artificial
  Synthetic oligonucleotide
caacccagaaagcaatagaccagataacatctaaagtcaataacattgttgatcggatga

SEQ ID NO: 85227 - DNA, 60 bp, Artificial
  Synthetic oligonucleotide
agcaaaagcaggggatcaatcaagaaatcaagatgaagaaagtactgctctttgcagcaa

SEQ ID NO: 85228 - DNA, 60 bp, Artificial
  Synthetic oligonucleotide
ggaatttgaagaggagtccaaactgaacagacaagaaattgagggagtgaaactggattc

SEQ ID NO: 85229 - DNA, 60 bp, Artificial
  Synthetic oligonucleotide
gcagtcttgtgttggcagcaatcattatggggttcatcttctgggcgtgtagcaatgggt

SEQ ID NO: 85230 - DNA, 51 bp, Artificial
  Synthetic oligonucleotide
ttaatggtatggggagttcaccaccccgcaactctaaaggaacaccaagac

SEQ ID NO: 85231 - DNA, 60 bp, Artificial
  Synthetic oligonucleotide
accgcagcctgcaaatttggaagcagtaactcttttttcaggaacatggtatggttgatc

SEQ ID NO: 85232 - DNA, 60 bp, Artificial
  Synthetic oligonucleotide
cagttgaactggttgaaaatgagcacactggatctttctgctcaatcgacgggaaagcac

SEQ ID NO: 85233 - DNA, 60 bp, Artificial
  Synthetic oligonucleotide
cctgagcaacaactcaacagaaaaagtggacacaataattgagagtaatgtcacggttac

SEQ ID NO: 85234 - DNA, 60 bp, Artificial
  Synthetic oligonucleotide
agtggggtcctcgaattcagcaaatttgaagccttcacctcaaatggatggggagcagta

SEQ ID NO: 85235 - DNA, 60 bp, Artificial
  Synthetic oligonucleotide
catcatggtcctacatagtggagaaaccaaatcccgtcaatggaatatgttacccgggta

SEQ ID NO: 85236 - DNA, 60 bp, Artificial
  Synthetic oligonucleotide
ttctgctcaatcgacgggaaagcaccgataagtcttggtgattgctcctttgctggatgg

SEQ ID NO: 85237 - DNA, 60 bp, Artificial
  Synthetic oligonucleotide
agcggaagttttgttcagcatccagaactgacggggttgaactgcatgaggccttgtttc

SEQ ID NO: 85238 - DNA, 60 bp, Artificial
  Synthetic oligonucleotide
tatattgagaacacaagagtctgaatgtgcctgcattaatggttcttgctttaccataat

SEQ ID NO: 85239 - DNA, 60 bp, Artificial
  Synthetic oligonucleotide
cgaccatgggtgtccttcaatcagaatctagaatatcaaataggatacatatgcagcgga

SEQ ID NO: 85240 - DNA, 60 bp, Artificial
  Synthetic oligonucleotide
tggcatggttcaaatcgaccatgggtgtccttcaatcagaatctagaatatcaaatagga

SEQ ID NO: 85241 - DNA, 60 bp, Artificial
  Synthetic oligonucleotide
tcaaataggatacatatgcagcggagtttttggagacaacccacgccccaatgatggaac

SEQ ID NO: 85242 - DNA, 60 bp, Artificial
  Synthetic oligonucleotide
aatcaaacgtacatcaacataagtaataccaatttaattgcagaacaagctgtagctcca

SEQ ID NO: 85243 - DNA, 60 bp, Artificial
  Synthetic oligonucleotide
aacataagtaataccaatttaattgcagaacaagctgtagctccagtaacactagcaggc

SEQ ID NO: 85244 - DNA, 60 bp, Artificial
  Synthetic oligonucleotide
cagcatccagaactgacggggttgaactgcatgaggccttgtttctgggttgagctgatc

SEQ ID NO: 85245 - DNA, 60 bp, Artificial
  Synthetic oligonucleotide
gccttgtttctgggttgagctgatcagaggaagacccaaggagaatacaatctggaccag

SEQ ID NO: 85246 - DNA, 60 bp, Artificial
  Synthetic oligonucleotide
gatgtatttgtcatcagagagccttttatttcatgctctcacctggaatgcaggactttc

SEQ ID NO: 85247 - DNA, 60 bp, Artificial
  Synthetic oligonucleotide
agagagccttttatttcatgctctcacctggaatgcaggactttctttctaactcaaggg

SEQ ID NO: 85248 - DNA, 60 bp, Artificial
  Synthetic oligonucleotide
tgtagctccagtaacactagcaggcaattcctctctctgtcccaccagtggatgggctat

SEQ ID NO: 85249 - DNA, 60 bp, Artificial
  Synthetic oligonucleotide
ccagtaacactagcaggcaattcctctctctgtcccaccagtggatgggctatatacagc

SEQ ID NO: 85250 - DNA, 60 bp, Artificial
  Synthetic oligonucleotide
tgatgactaattcacaagacacagaactctctttcacaatcactggagacaacaccaaat

SEQ ID NO: 85251 - DNA, 60 bp, Artificial
  Synthetic oligonucleotide
tgactaattcacaagacacagaactctctttcacaatcactggagacaacaccaaatgga

SEQ ID NO: 85252 - DNA, 60 bp, Artificial
  Synthetic oligonucleotide
ctggtttcatagagaatggctggcaaggtctaatcgatggctggtatgggtttaggcacc

SEQ ID NO: 85253 - DNA, 60 bp, Artificial
  Synthetic oligonucleotide
ggaagattctacatacagatgtgcactgaactcaaactcagtgactacgaagggaggttg

SEQ ID NO: 85254 - DNA, 60 bp, Artificial
  Synthetic oligonucleotide
gggagattctacatacagatgtgcactgaactcaaactcagtgactacgaagggagacta

SEQ ID NO: 85255 - DNA, 60 bp, Artificial
  Synthetic oligonucleotide
ggattcttcccttttcacaaggacaatgcaatacgattgggtgagaataaggacgtcata

SEQ ID NO: 85256 - DNA, 60 bp, Artificial
  Synthetic oligonucleotide
cacaaggacaatgcaatacgattgggtgagaacaaggacgtcatagtcacaagggagcct

SEQ ID NO: 85257 - DNA, 60 bp, Artificial
  Synthetic oligonucleotide
ccccttccgaggattcttcccttttcacaaggacaatgcaatacgattgggtgagaacaa

SEQ ID NO: 85258 - DNA, 60 bp, Artificial
  Synthetic oligonucleotide
aaggagggtggcaaggcatggtagacggttggtatggataccaccatagcaacgagcagg

SEQ ID NO: 85259 - DNA, 60 bp, Artificial
  Synthetic oligonucleotide
tagcaggctttatagaaggagggtggcaaggcatggtagacggttggtatggataccacc

SEQ ID NO: 85260 - DNA, 54 bp, Artificial
  Synthetic oligonucleotide
aaaagaaacaagaggactatttggggctatagcaggctttatagaaggagggtg

SEQ ID NO: 85261 - DNA, 60 bp, Artificial
  Synthetic oligonucleotide
tggactcaggaatgtccctcaaaaagaaacaagaggactatttggggctatagcaggctt

SEQ ID NO: 85262 - DNA, 60 bp, Artificial
  Synthetic oligonucleotide
gccccaaatacgtgaaatcaaatagattagtccttgcgactggactcaggaatgtccctc

SEQ ID NO: 85263 - DNA, 60 bp, Artificial
  Synthetic oligonucleotide
tgggtgcgataaactctagcatgccattccacaacatacatcctctcaccattggggaat

SEQ ID NO: 85264 - DNA, 60 bp, Artificial
  Synthetic oligonucleotide
ggataccaccatagcaacgagcaggggagtggatacgctgcagacaaagagtccactcaa

SEQ ID NO: 85265 - DNA, 51 bp, Artificial
  Synthetic oligonucleotide
ttcttctggacaattttaaagccgaatgatgccatcaatttcgagagcaat

SEQ ID NO: 85266 - DNA, 60 bp, Artificial
  Synthetic oligonucleotide
gaatatgcatacaaaattgtcaagaagggagactcagcaatcatgaaaagtggcttggaa

SEQ ID NO: 85267 - DNA, 60 bp, Artificial
  Synthetic oligonucleotide
attgtcaagaagggagactcagcaatcatgaaaagtggcttggaatatggtaactgcaac

SEQ ID NO: 85268 - DNA, 60 bp, Artificial
  Synthetic oligonucleotide
ctctgcatgcccatataatgggaggtcctcctttttcagaaatgtggtgtggcttatcaa

SEQ ID NO: 85269 - DNA, 60 bp, Artificial
  Synthetic oligonucleotide
taatgatgcggcagagcagatgaagctctatcaaaacccaaccacttacgtttcagttgg

SEQ ID NO: 85270 - DNA, 60 bp, Artificial
  Synthetic oligonucleotide
gactacccgcagtattcagaagaggcaagactaaatagagaggaaataagtggagtaaaa

SEQ ID NO: 85271 - DNA, 60 bp, Artificial
  Synthetic oligonucleotide
cccgcagtattcagaagaggcaagactaaatagagaggaaataagtggagtaaaattgga

SEQ ID NO: 85272 - DNA, 60 bp, Artificial
  Synthetic oligonucleotide
atcacaaatgtgataatgaatgtatggaaagtgtaagaaacggaacatatgactacccgc

SEQ ID NO: 85273 - DNA, 60 bp, Artificial
  Synthetic oligonucleotide
atgaatgtatggaaagtgtaagaaacggaacatatgactacccgcagtattcagaagagg

SEQ ID NO: 85274 - DNA, 60 bp, Artificial
  Synthetic oligonucleotide
acagcttagggataatgcaaaggagctgggtaatggttgtttcgagttctatcacaaatg

SEQ ID NO: 85275 - DNA, 60 bp, Artificial
  Synthetic oligonucleotide
gctgaacttctggttctcatggaaaatgagagaactctagaccttcatgactcaaatgtc

SEQ ID NO: 85276 - DNA, 60 bp, Artificial
  Synthetic oligonucleotide
gaccttcatgactcaaatgtcaagaacctttacgacaaggttcgactacagcttagggat

SEQ ID NO: 85277 - DNA, 60 bp, Artificial
  Synthetic oligonucleotide
gacaaaatgaacactcagtttgaggccgttggaaaggaattcaataacttggaaaggagg

SEQ ID NO: 85278 - DNA, 60 bp, Artificial
  Synthetic oligonucleotide
tctggacttataatgctgaacttctggttctcatggaaaatgagagaactctagaccttc

SEQ ID NO: 85279 - DNA, 60 bp, Artificial
  Synthetic oligonucleotide
gaagaaccctgcactcagaatgaaatggatgatggcaatgaaatatccaattacagcgga

SEQ ID NO: 85280 - DNA, 60 bp, Artificial
  Synthetic oligonucleotide
atctacagaaggagagatgggaaatgggtgagagaattgatcctgtatgataaagaagag

SEQ ID NO: 85281 - DNA, 60 bp, Artificial
  Synthetic oligonucleotide
gaaaaataattgggcaaactgaaatcagtttcaatggaggccatatagaagaatgctcat

SEQ ID NO: 85282 - DNA, 60 bp, Artificial
  Synthetic oligonucleotide
ttgggcaaactgaaatcagtttcaatggaggccatatagaagaatgctcatgctacccca

SEQ ID NO: 85283 - DNA, 52 bp, Artificial
  Synthetic oligonucleotide
taattcacaggacacagagctctctttcacaatcactggagacaacaccaaa

SEQ ID NO: 85284 - DNA, 60 bp, Artificial
  Synthetic oligonucleotide
gcaggcaaaccatttgaatggatgtcaacccgactttacttttcttgaaagttccagcgc

SEQ ID NO: 85285 - DNA, 60 bp, Artificial
  Synthetic oligonucleotide
ggtgattgtcaacaaccaaaactggtcgggatactcaggggcattcatcgactactgggc

SEQ ID NO: 85286 - DNA, 60 bp, Artificial
  Synthetic oligonucleotide
ttgagtcctggaatgatgatgggcatgttcaacatgctaagtacagttttaggagtttca

SEQ ID NO: 85287 - DNA, 60 bp, Artificial
  Synthetic oligonucleotide
tcattgacaaaatgaacacacagtttgaggcggtagagcatgagttctcaaatctagaga

SEQ ID NO: 85288 - DNA, 60 bp, Artificial
  Synthetic oligonucleotide
aataaagcgccactggatctaatggactgcactactgagggttggatccttggaaacccc

SEQ ID NO: 85289 - DNA, 60 bp, Artificial
  Synthetic oligonucleotide
aataaagcgccactggatctaatggactgcaccactgaaggttggatacttggaaacccc

SEQ ID NO: 85290 - DNA, 60 bp, Artificial
  Synthetic oligonucleotide
gtgcaattgctggtttcatagagaatggctggcaaggtctaatcgatggctggtatgggt

SEQ ID NO: 85291 - DNA, 59 bp, Artificial
  Synthetic oligonucleotide
gataatcactcaccgagtgacatccacatcatggcgtctcaaggcaccaaacggtccta

SEQ ID NO: 85292 - DNA, 60 bp, Artificial
  Synthetic oligonucleotide
acgatccctgggttttgcttaatgcatcttggttcaactccttcctcgcacatgcactga

SEQ ID NO: 85293 - DNA, 60 bp, Artificial
  Synthetic oligonucleotide
gtacactccaggaggggaagtgagaaatgatgatgttgaccaaagcttgattatcgctgc

SEQ ID NO: 85294 - DNA, 60 bp, Artificial
  Synthetic oligonucleotide
agaaaagttgacaataacatattcatcatcaatgatgtgggagattaatggtccggaatc

SEQ ID NO: 85295 - DNA, 60 bp, Artificial
  Synthetic oligonucleotide
tagaccatgggtgagaggccaaagcggcaggatcagcttctattggacaattgtagaacc

SEQ ID NO: 85296 - DNA, 60 bp, Artificial
  Synthetic oligonucleotide
gggtgagaggccaaagcggcaggatcagcttctattggacaattgtagaaccaggagatc

SEQ ID NO: 85297 - DNA, 60 bp, Artificial
  Synthetic oligonucleotide
ccatgggtgagaggccaaagcggcaggatcagcttctattggacaattgtagaaccagga

SEQ ID NO: 85298 - DNA, 60 bp, Artificial
  Synthetic oligonucleotide
ctccctttgatgatagactcagaagggatcaaaaggcattaaagggaagaggcagcacac

SEQ ID NO: 85299 - DNA, 60 bp, Artificial
  Synthetic oligonucleotide
ctccctttgatgatagactccgaagagaccaaaaggcattaaagggaagaggcagcacac

SEQ ID NO: 85300 - DNA, 60 bp, Artificial
  Synthetic oligonucleotide
cccctttgatgacagactcagaagagatcaaaaggcattaaagggaagaggcagcacact

SEQ ID NO: 85301 - DNA, 60 bp, Artificial
  Synthetic oligonucleotide
caagtgggtcgtcagttaaaagagaagaagaagtgcttacgggcaacctccaaacattga

SEQ ID NO: 85302 - DNA, 60 bp, Artificial
  Synthetic oligonucleotide
ggtgcaattgctggctttatagagaacggctggcaaggtctaatcgatggttggtatggg

SEQ ID NO: 85303 - DNA, 60 bp, Artificial
  Synthetic oligonucleotide
ctggcttcatagagaacggctggcaaggtctaatcgatggttggtatgggtttaggcacc

SEQ ID NO: 85304 - DNA, 60 bp, Artificial
  Synthetic oligonucleotide
ggctttatagagaacggctggcaaggtctaatcgatggttggtatgggtttaggcaccag

SEQ ID NO: 85305 - DNA, 60 bp, Artificial
  Synthetic oligonucleotide
gtgcaattgctggctttatagagaacggctggcaaggtctaatcgatggttggtatgggt

SEQ ID NO: 85306 - DNA, 60 bp, Artificial
  Synthetic oligonucleotide
tgcaattgctggcttcatagagaacggctggcaaggtctaatcgatggttggtatgggtt

SEQ ID NO: 85307 - DNA, 60 bp, Artificial
  Synthetic oligonucleotide
catcaatgagctgagcaatcttgcaaaaggagagaaggctaatgtgctaattgggcaagg

SEQ ID NO: 85308 - DNA, 60 bp, Artificial
  Synthetic oligonucleotide
atacttactgacagccagacagcgaccagaagaattcggatggccatcaattagtgtcga

SEQ ID NO: 85309 - DNA, 60 bp, Artificial
  Synthetic oligonucleotide
attcgagtctctgaaactctacagagattcgcttggagaagcagtaatgagaatgggaga

SEQ ID NO: 85310 - DNA, 60 bp, Artificial
  Synthetic oligonucleotide
caggcacattggagttcattactgaaggtttcacctggacaggggtcactcagaatgggg

SEQ ID NO: 85311 - DNA, 60 bp, Artificial
  Synthetic oligonucleotide
actgttacccttatgatgtaccagattacgcatcccttagatctctagttgcctcatcag

SEQ ID NO: 85312 - DNA, 60 bp, Artificial
  Synthetic oligonucleotide
gtttcttcagtagactgaattggttgactaaatcaggaagcacatacccagtgttgaacg

SEQ ID NO: 85313 - DNA, 60 bp, Artificial
  Synthetic oligonucleotide
ggtcactcagaatgggggaagcggtgcatgcaaaaggggacctaccaatggtttcttcag

SEQ ID NO: 85314 - DNA, 60 bp, Artificial
  Synthetic oligonucleotide
ggggaagcggtgcatgcaaaaggggacctaccaatggtttcttcagtagactgaattggt

SEQ ID NO: 85315 - DNA, 60 bp, Artificial
  Synthetic oligonucleotide
gtgttgaacgtgactatgccaaataacgacaactttgacaaactatacatttggggggtt

SEQ ID NO: 85316 - DNA, 60 bp, Artificial
  Synthetic oligonucleotide
tcacagtatctaccaggagaagccagcaaaccatcatcccgaatattggatctagaccct

SEQ ID NO: 85317 - DNA, 60 bp, Artificial
  Synthetic oligonucleotide
tgaagatacaaaaatagatctctggtcttataatgcggaacttcttgttgccctagaaaa

SEQ ID NO: 85318 - DNA, 59 bp, Artificial
  Synthetic oligonucleotide
caaatgagaaattccatcagatcgaaaaagagttctcagaagttgaagggaggatccaa

SEQ ID NO: 85319 - DNA, 60 bp, Artificial
  Synthetic oligonucleotide
acagggcaagcagcagaccttaaaagcactcaggcagccattgaccaaattaatgggaaa

SEQ ID NO: 85320 - DNA, 60 bp, Artificial
  Synthetic oligonucleotide
gaaatgggacttacgatcatgacatatacagggacgaagcactgaacaatcggttccaga

SEQ ID NO: 85321 - DNA, 60 bp, Artificial
  Synthetic oligonucleotide
ccacaaatgtgacaattcctgcatagagtcaattagaaatgggacttacgatcatgacat

SEQ ID NO: 85322 - DNA, 60 bp, Artificial
  Synthetic oligonucleotide
ttgcttcaagatataccacaaatgtgacaattcctgcatagagtcaattagaaatgggac

SEQ ID NO: 85323 - DNA, 60 bp, Artificial
  Synthetic oligonucleotide
agatctctggtcttataatgcggaacttcttgttgccctagaaaaccagcatacaattga

SEQ ID NO: 85324 - DNA, 60 bp, Artificial
  Synthetic oligonucleotide
tgctttgtgttgttttgctagggttcattatgtgggcctgccagagaggcaatatcaggt

SEQ ID NO: 85325 - DNA, 60 bp, Artificial
  Synthetic oligonucleotide
atcatgacatatacagggacgaagcactgaacaatcggttccagatcaaaggtgttgagc

SEQ ID NO: 85326 - DNA, 60 bp, Artificial
  Synthetic oligonucleotide
cccaagtatgtcaagcagggcactctgaagttggcaacaggaatgaggaacgtaccagag

SEQ ID NO: 85327 - DNA, 60 bp, Artificial
  Synthetic oligonucleotide
agggaatgatagatggctggtatggttttaggcatcaaaattctgagggtacagggcaag

SEQ ID NO: 85328 - DNA, 60 bp, Artificial
  Synthetic oligonucleotide
ccaggagaagccagcaaaccatcatcccgaatattggatctagaccctgggtgaggggtc

SEQ ID NO: 85329 - DNA, 60 bp, Artificial
  Synthetic oligonucleotide
gagatcagatgcccctattgagacttgcatttctgagtgcatcactccaaacgggagcat

SEQ ID NO: 85330 - DNA, 60 bp, Artificial
  Synthetic oligonucleotide
gggtgaggggtcagtctggcagaataagcatatattggacaatagtcaaacctggggacg

SEQ ID NO: 85331 - DNA, 60 bp, Artificial
  Synthetic oligonucleotide
atggagcatgtcccaagtatgtcaagcagggcactctgaagttggcaacaggaatgagga

SEQ ID NO: 85332 - DNA, 60 bp, Artificial
  Synthetic oligonucleotide
gcccctattgagacttgcatttctgagtgcatcactccaaacgggagcatttccaatgac

SEQ ID NO: 85333 - DNA, 56 bp, Artificial
  Synthetic oligonucleotide
ggaatgaggaacgtaccagagaaacaaactagaggattattcggcgcaatagcagg

SEQ ID NO: 85334 - DNA, 60 bp, Artificial
  Synthetic oligonucleotide
tcaagacgagacatgggatctctttgtggaacgaagcaatgctttcagcaactgttaccc

SEQ ID NO: 85335 - DNA, 60 bp, Artificial
  Synthetic oligonucleotide
gatggctggtatggttttaggcatcaaaattctgagggtacagggcaagcagcagacctt

SEQ ID NO: 85336 - DNA, 60 bp, Artificial
  Synthetic oligonucleotide
gactgcacactgatagatgctctacttggggatcctcattgcgatgtctttcaagacgag

SEQ ID NO: 85337 - DNA, 60 bp, Artificial
  Synthetic oligonucleotide
gtgcctaggacaccatgcagtgccaaatgggacaatagtgaagacaatcacagacgacca

SEQ ID NO: 85338 - DNA, 60 bp, Artificial
  Synthetic oligonucleotide
tggccaggactatccagataatggaaacaatacggcaacactgtgcctaggacaccatgc

SEQ ID NO: 85339 - DNA, 60 bp, Artificial
  Synthetic oligonucleotide
acagagacgaggcaatcaataacagattccagatacaaggagttaaattgactcaaggat

SEQ ID NO: 85340 - DNA, 51 bp, Artificial
  Synthetic oligonucleotide
cagagacgaagcaatcaataacagattccagatacaaggagtcaaattgac

SEQ ID NO: 85341 - DNA, 60 bp, Artificial
  Synthetic oligonucleotide
gagacgaggcaatcaataacagattccagatacaaggagttaaattgactcaaggataca

SEQ ID NO: 85342 - DNA, 60 bp, Artificial
  Synthetic oligonucleotide
cagcttcactgagccctggaatgatgatgggcatgttcaacatgctaagtacagtcttag

SEQ ID NO: 85343 - DNA, 60 bp, Artificial
  Synthetic oligonucleotide
aatctcgttacttattagcacgtgcgtacaggccgacagaatctgtgtaggatacttaag

SEQ ID NO: 85344 - DNA, 60 bp, Artificial
  Synthetic oligonucleotide
ctcgttacttattagcacgtgcgtacaggccgacagaatctgtgtaggatacttaagcac

SEQ ID NO: 85345 - DNA, 58 bp, Artificial
  Synthetic oligonucleotide
ggggatacaccatccagtctcaacagacgagaccaaatcattatatgtcaatagtgat

SEQ ID NO: 85346 - DNA, 60 bp, Artificial
  Synthetic oligonucleotide
gatgttttagttatatgggggatacaccatccagtctcaacagacgagaccaaatcatta

SEQ ID NO: 85347 - DNA, 60 bp, Artificial
  Synthetic oligonucleotide
cagcccagttcacttgggagattgcagctttgagggttggatagtaggaaatcctgcctg

SEQ ID NO: 85348 - DNA, 60 bp, Artificial
  Synthetic oligonucleotide
atctgttcagtggaatcaaatcgtttagcagaactgaattgatcgcacctacttcttggg

SEQ ID NO: 85349 - DNA, 60 bp, Artificial
  Synthetic oligonucleotide
tcttggggagaagtgaatgatggagcaacatctgcctgcagggacaatacggggacaagc

SEQ ID NO: 85350 - DNA, 60 bp, Artificial
  Synthetic oligonucleotide
ttggatggagtcagcccagttcacttgggagattgcagctttgagggttggatagtagga

SEQ ID NO: 85351 - DNA, 60 bp, Artificial
  Synthetic oligonucleotide
ggggagaagtgaatgatggagcaacatctgcctgcagggacaatacggggaccagcagtt

SEQ ID NO: 85352 - DNA, 60 bp, Artificial
  Synthetic oligonucleotide
gaaaggtaacaaatatccagtaatcagcaggacttacaacaacaccactggtagagatgt

SEQ ID NO: 85353 - DNA, 60 bp, Artificial
  Synthetic oligonucleotide
agtatggtttgtgaagagaggtaacaaatatccagtaatcagcaggacttacaacaacac

SEQ ID NO: 85354 - DNA, 60 bp, Artificial
  Synthetic oligonucleotide
tccagtaatcagcaggacttacaacaacaccactggtagagatgttttagttatatgggg

SEQ ID NO: 85355 - DNA, 60 bp, Artificial
  Synthetic oligonucleotide
gtaacaaatatccagtaatcagcaggacttacaacaacaccactggtagagatgttttag

SEQ ID NO: 85356 - DNA, 52 bp, Artificial
  Synthetic oligonucleotide
gttggagaatgatgttccagtcacaagctctattgatctagttgagacaaac

SEQ ID NO: 85357 - DNA, 60 bp, Artificial
  Synthetic oligonucleotide
acttcttggggagaagtgaatgatggagcaacatctgcctgcagggacaatacggggacc

SEQ ID NO: 85358 - DNA, 60 bp, Artificial
  Synthetic oligonucleotide
gatacactgttggagaatgatgttccagtcacaagctctattgatctagttgagacaaac

SEQ ID NO: 85359 - DNA, 50 bp, Artificial
  Synthetic oligonucleotide
aaaagttgacacactgttggagaatgatgttccagtcacaagctctattg

SEQ ID NO: 85360 - DNA, 60 bp, Artificial
  Synthetic oligonucleotide
agttggaaaccggagtcaggcctgggtacaatggtcaaaggagttggatgaagatttact

SEQ ID NO: 85361 - DNA, 60 bp, Artificial
  Synthetic oligonucleotide
ggaaaccggagtcaggcctgggtacaatggtcaaaggagttggatgaagatttactgggt

SEQ ID NO: 85362 - DNA, 60 bp, Artificial
  Synthetic oligonucleotide
gagtcaggcctgggtacaatggtcaaaggagttggatgaagatttactgggttttaatgc

SEQ ID NO: 85363 - DNA, 60 bp, Artificial
  Synthetic oligonucleotide
gagtcaggcctgggtacaatggtcaaaggagttggatgaagatttactgggtcctaatgc

SEQ ID NO: 85364 - DNA, 60 bp, Artificial
  Synthetic oligonucleotide
gggttacaccatccagtctcaacagacgagaccaaatcattgtacgtcaatagtgatcct

SEQ ID NO: 85365 - DNA, 60 bp, Artificial
  Synthetic oligonucleotide
gagaccaaatcattatatgtcaatagtgatccttatacgctagtatctaccagctcgtgg

SEQ ID NO: 85366 - DNA, 60 bp, Artificial
  Synthetic oligonucleotide
caaatcattatatgtcaatagtgatccttatacgctagtatctaccagctcgtggagtaa

SEQ ID NO: 85367 - DNA, 60 bp, Artificial
  Synthetic oligonucleotide
acaaattggaaactggagtcaggcctaggtacaatggtcaaaggagttggatgaagattt

SEQ ID NO: 85368 - DNA, 60 bp, Artificial
  Synthetic oligonucleotide
gcctgggtacaatggtcaaaggagttggatgaagatttactgggtcctaatgcatccagg

SEQ ID NO: 85369 - DNA, 60 bp, Artificial
  Synthetic oligonucleotide
gcctgggtacaatggtcaaaggagttggatgaagatttactgggttttaatgcatccagg

SEQ ID NO: 85370 - DNA, 59 bp, Artificial
  Synthetic oligonucleotide
acttcttggggagaagtgaatgatggagcaacatctgcctgcagggacaatacggggac

SEQ ID NO: 85371 - DNA, 60 bp, Artificial
  Synthetic oligonucleotide
acttcttggggagaagtgaatgatggagcaacatctgcctgcagggacaatacggggaca

SEQ ID NO: 85372 - DNA, 60 bp, Artificial
  Synthetic oligonucleotide
cagttgcattgcaagcagtgttgtgctagtagggctcatacttgcatttataatgtgggc

SEQ ID NO: 85373 - DNA, 60 bp, Artificial
  Synthetic oligonucleotide
tacagttgcattgcaagcagtgttgtgctagtagggctcatacttgcatttataatgtgg

SEQ ID NO: 85374 - DNA, 54 bp, Artificial
  Synthetic oligonucleotide
tacttgcatttataatgtgggcatgtagtagtggcaattgccggttcaatgttt

SEQ ID NO: 85375 - DNA, 60 bp, Artificial
  Synthetic oligonucleotide
agcagtgttgtgctagtagggctcatacttgcatttataatgtgggcatgtagtagtggc

SEQ ID NO: 85376 - DNA, 60 bp, Artificial
  Synthetic oligonucleotide
cgttacttattagcacgtgcgtacaggccgacagaatctgtgtaggatacttaagcacca

SEQ ID NO: 85377 - DNA, 60 bp, Artificial
  Synthetic oligonucleotide
gatagtaggaaatcctgcctgtactagcaactttggaatcagagagtggtcatatttgat

SEQ ID NO: 85378 - DNA, 60 bp, Artificial
  Synthetic oligonucleotide
tgcctgtactagcaactttggaatcagagagtggtcatatttgattgaagacccatctgc

SEQ ID NO: 85379 - DNA, 60 bp, Artificial
  Synthetic oligonucleotide
gatctttcagcagaactgaattgatcgcacctacttcttggggagaggtgaatgatggag

SEQ ID NO: 85380 - DNA, 60 bp, Artificial
  Synthetic oligonucleotide
ctgaattgatcgcacctacttcttggggagaggtgaatgatggagcaacatctgcctgca

SEQ ID NO: 85381 - DNA, 60 bp, Artificial
  Synthetic oligonucleotide
tcaaatcgtttagcagaactgaattgatcgcacctacttcttggggagaagtgaatgatg

SEQ ID NO: 85382 - DNA, 59 bp, Artificial
  Synthetic oligonucleotide
caaatcgttcagcagaactgaattgatcgcacctacttcttggggagaagtgaatgatg

SEQ ID NO: 85383 - DNA, 60 bp, Artificial
  Synthetic oligonucleotide
agaaaaagttgatacactgttggagaatgatgttccagtcacaagctctattgatctagt

SEQ ID NO: 85384 - DNA, 60 bp, Artificial
  Synthetic oligonucleotide
catagagagaaatgcacttggaaattgccccaagtacataaaatcagggcagctcaagtt

SEQ ID NO: 85385 - DNA, 60 bp, Artificial
  Synthetic oligonucleotide
ggaggattgttggccccaagatatggttatataatcgaggagtatggaaaaggaagaatc

SEQ ID NO: 85386 - DNA, 50 bp, Artificial
  Synthetic oligonucleotide
aatcgctgcagataaagaatcgacacaaaaggccattgaccagataacaa

SEQ ID NO: 85387 - DNA, 60 bp, Artificial
  Synthetic oligonucleotide
ttaataaatggttggtacggatttcaacatcagaatgaacaaggggttggaatcgctgca

SEQ ID NO: 85388 - DNA, 60 bp, Artificial
  Synthetic oligonucleotide
gcacttggaaattgccccaagtacataaaatcagggcagctcaagttggctactgggctt

SEQ ID NO: 85389 - DNA, 60 bp, Artificial
  Synthetic oligonucleotide
gatatacagctgcattgcaagcagtgttgtgctagtaggactcatacttgcatttataat

SEQ ID NO: 85390 - DNA, 53 bp, Artificial
  Synthetic oligonucleotide
ccgattggtcatggcacgatggagctattcttccctttgacatcgataagatg

SEQ ID NO: 85391 - DNA, 51 bp, Artificial
  Synthetic oligonucleotide
ccgattggtcatggcacgatggagctattcttccctttgacatcgataaga

SEQ ID NO: 85392 - DNA, 60 bp, Artificial
  Synthetic oligonucleotide
ggggataattctattaatcatgaagaccatcattgttctaagttatcttttctgtctggc

SEQ ID NO: 85393 - DNA, 60 bp, Artificial
  Synthetic oligonucleotide
gttcgagtctctgaaactctacagagattcgcttggggaagcagtaatgaggatgggaga

SEQ ID NO: 85394 - DNA, 60 bp, Artificial
  Synthetic oligonucleotide
gttcgagtctctgaaactctacagagattcgcttggagaagcggtaatgaggatgggaga

SEQ ID NO: 85395 - DNA, 60 bp, Artificial
  Synthetic oligonucleotide
ggagaatgacagactccattaaatcatggagaaaggacatattaagaactcaggagtccg

SEQ ID NO: 85396 - DNA, 60 bp, Artificial
  Synthetic oligonucleotide
gcagggagaatgacagactccattaaatcatggagaaaggacatattaagaacccaggag

SEQ ID NO: 85397 - DNA, 60 bp, Artificial
  Synthetic oligonucleotide
tgcaagtgcccagataatatatgcagggagaatgacagactccattaaatcatggagaaa

SEQ ID NO: 85398 - DNA, 60 bp, Artificial
  Synthetic oligonucleotide
ctagtgggagatcaggctttgaaatcatcaaagttacagagggatggattaattctccca

SEQ ID NO: 85399 - DNA, 60 bp, Artificial
  Synthetic oligonucleotide
tgttggagggagtggaactaacaactatggagtgaagggatttggattcagacaaggcaa

SEQ ID NO: 85400 - DNA, 60 bp, Artificial
  Synthetic oligonucleotide
ccgtgtttctggctggaaatgataagaggaaaaccagaagagaggacaagcatttggacc

SEQ ID NO: 85401 - DNA, 60 bp, Artificial
  Synthetic oligonucleotide
ggctggcagtaggggtaagtggtgcagatgacgatgcttatgcagtaatccattatgggg

SEQ ID NO: 85402 - DNA, 60 bp, Artificial
  Synthetic oligonucleotide
gggtcctcatcggaggacttgaatggaatgataacacagttcgagtctctgaaactttac

SEQ ID NO: 85403 - DNA, 60 bp, Artificial
  Synthetic oligonucleotide
agcaaaagcagggtagataatcactcactgagtgacatccacaccatggcgtctcaaggc

SEQ ID NO: 85404 - DNA, 57 bp, Artificial
  Synthetic oligonucleotide
gatactcaggggcattcatagactactgggcaaacaaagaatgcttcaatccttgtt

SEQ ID NO: 85405 - DNA, 60 bp, Artificial
  Synthetic oligonucleotide
gatactcaggggcattcatagactactgggcaaacaaagaatgcttcaatccttgttttt

SEQ ID NO: 85406 - DNA, 60 bp, Artificial
  Synthetic oligonucleotide
ccgccccaatgatcccaccaatgggaactgtgatgcgccaataacaggagggagcccaga

SEQ ID NO: 85407 - DNA, 60 bp, Artificial
  Synthetic oligonucleotide
gatcccactaatgggaactgtgatgcgccaataacaggagggagcccagatcctggggta

SEQ ID NO: 85408 - DNA, 60 bp, Artificial
  Synthetic oligonucleotide
gatacaagccgccccaatgatcccaccaatgggaactgtgatgcgccaataacaggaggg

SEQ ID NO: 85409 - DNA, 60 bp, Artificial
  Synthetic oligonucleotide
gggtcctcatcggaggacttgaatggaatggtaacacagttcgagtctctgaaactctac

SEQ ID NO: 85410 - DNA, 60 bp, Artificial
  Synthetic oligonucleotide
aaggggaaaaccagaagaaaagactatatggacctcaagtagctccattgtgatgtgtgg

SEQ ID NO: 85411 - DNA, 60 bp, Artificial
  Synthetic oligonucleotide
ggggaaaaccagaagaaaagactatatggacctcaagtagctccattgtgatgtgtggag

SEQ ID NO: 85412 - DNA, 60 bp, Artificial
  Synthetic oligonucleotide
tgacgctaagggttttgcacccttttccaaagacaatggaataagaattggatcgagagg

SEQ ID NO: 85413 - DNA, 60 bp, Artificial
  Synthetic oligonucleotide
agcaaaagcagggtagataatcactcactgagtgacatcaacatcatggcgtcccaaggc

SEQ ID NO: 85414 - DNA, 60 bp, Artificial
  Synthetic oligonucleotide
cctcacacatgcactgaaatagttgtggcaatgctactatttgctatccatactgtccga

SEQ ID NO: 85415 - DNA, 60 bp, Artificial
  Synthetic oligonucleotide
tcccagaattacacagggaatcctgtgatatgcctgggacatcatgctgtatccaatggg

SEQ ID NO: 85416 - DNA, 60 bp, Artificial
  Synthetic oligonucleotide
cctgctgctaatagtgcagatcacagggtttattggatacgggaggggagaatagtgaag

SEQ ID NO: 85417 - DNA, 60 bp, Artificial
  Synthetic oligonucleotide
gacagtgtcaactagtggtagatcgggctttgaaatcatcaaagttacagaggggtggat

SEQ ID NO: 85418 - DNA, 59 bp, Artificial
  Synthetic oligonucleotide
gataatcactcaccgagtgacatccacatcatggcgtctcaaggcaccaaacgatccta

SEQ ID NO: 85419 - DNA, 60 bp, Artificial
  Synthetic oligonucleotide
gataatcactcaccgagtgacatccacatcatggcgtctcaaggcaccaaacgatcctat

SEQ ID NO: 85420 - DNA, 60 bp, Artificial
  Synthetic oligonucleotide
cgggactctagcatacttactgacagccagacagcgaccaaaagaattcggatggccacc

SEQ ID NO: 85421 - DNA, 60 bp, Artificial
  Synthetic oligonucleotide
cagacagcgaccaaaagaattcggatggccatcaattagtgtcgaattgtttaaaaacga

SEQ ID NO: 85422 - DNA, 60 bp, Artificial
  Synthetic oligonucleotide
ccctctggagcaaaacaaatgatgccgggtcagaccgagtgatggtatcacctctggccg

SEQ ID NO: 85423 - DNA, 60 bp, Artificial
  Synthetic oligonucleotide
tcaattggtgtggatggcatgccattctgcagcatttgaggatttgagagtgtcaagttt

SEQ ID NO: 85424 - DNA, 60 bp, Artificial
  Synthetic oligonucleotide
aattgcatacgaaagaatgtgcaacattctcaaagggaaatttcaaacagcagcacaacg

SEQ ID NO: 85425 - DNA, 60 bp, Artificial
  Synthetic oligonucleotide
cataaacaggacaggaacatttgaattcacaagctttttctaccgctatgggtttgtagc

SEQ ID NO: 85426 - DNA, 60 bp, Artificial
  Synthetic oligonucleotide
atatgcatctcagcaacaggaatgatactatccgtagtaagtctgctaataggattggcc

SEQ ID NO: 85427 - DNA, 60 bp, Artificial
  Synthetic oligonucleotide
ttccatcgcaaaatgccataagcaccacattcccatatactggagatcctccatacagcc

SEQ ID NO: 85428 - DNA, 60 bp, Artificial
  Synthetic oligonucleotide
agttccatcgcaaaatgccataagcaccacattcccatatactggagatcctccatacag

SEQ ID NO: 85429 - DNA, 57 bp, Artificial
  Synthetic oligonucleotide
cagcgcaaaatgccataagcaccacattcccatatactggagatcctccatacagcc

SEQ ID NO: 85430 - DNA, 60 bp, Artificial
  Synthetic oligonucleotide
ggaagctgcaacgagacggtggtgagggagtataatgagacagttaaagtagaaaaggta

SEQ ID NO: 85431 - DNA, 60 bp, Artificial
  Synthetic oligonucleotide
aaaaatggaagctgcaacgagacggtggtgagggagtataatgagacagttaaagtagaa

SEQ ID NO: 85432 - DNA, 60 bp, Artificial
  Synthetic oligonucleotide
tgcatatcgtgagcatcatagtaacggtattggtcctggggaaaggtgagaaaaatggaa

SEQ ID NO: 85433 - DNA, 60 bp, Artificial
  Synthetic oligonucleotide
ccattggctccatatcactgggattggttgtattcaacgtcctattgcatatcgtgagca

SEQ ID NO: 85434 - DNA, 60 bp, Artificial
  Synthetic oligonucleotide
gagatactgaggataaagaatggttggacacagacaagtaaagaacaggttggaagacag

SEQ ID NO: 85435 - DNA, 60 bp, Artificial
  Synthetic oligonucleotide
tccaggtcaggatttgagatactgaggataaagaatggttggacacagacaagtaaagaa

SEQ ID NO: 85436 - DNA, 60 bp, Artificial
  Synthetic oligonucleotide
gattgctattgggtgatgactgacggccccgccaataggcaggcacagtatagaatatac

SEQ ID NO: 85437 - DNA, 60 bp, Artificial
  Synthetic oligonucleotide
actgaggactcaagagtcatcctgcacttgcatccaaggtgattgctattgggtgatgac

SEQ ID NO: 85438 - DNA, 60 bp, Artificial
  Synthetic oligonucleotide
gaatatacaaggcaaaccaaggcaggataattgggcagattgatgtaagctttaatgggg

SEQ ID NO: 85439 - DNA, 60 bp, Artificial
  Synthetic oligonucleotide
ggggcacattgaagagtgttcttgctacccgaatgatggtaaggtggaatgcgtatgtag

SEQ ID NO: 85440 - DNA, 60 bp, Artificial
  Synthetic oligonucleotide
gctttaatggggggcacattgaagagtgttcttgctacccgaatgatggtaaggtggaat

SEQ ID NO: 85441 - DNA, 60 bp, Artificial
  Synthetic oligonucleotide
gcgtatgtagagacaactggactggaacaaacaggcctatactagtcatatcgcctgatc

SEQ ID NO: 85442 - DNA, 60 bp, Artificial
  Synthetic oligonucleotide
aaggtggaatgcgtatgtagagacaactggactggaacaaacaggcctatactagtcata

SEQ ID NO: 85443 - DNA, 58 bp, Artificial
  Synthetic oligonucleotide
ggggagtgcctaccgatgtcattaattcctgggcaggagacatactgaggactcaaga

SEQ ID NO: 85444 - DNA, 60 bp, Artificial
  Synthetic oligonucleotide
caggagacatactgaggactcaagagtcatcctgcacttgcatccaaggtgattgctatt

SEQ ID NO: 85445 - DNA, 60 bp, Artificial
  Synthetic oligonucleotide
taatcgaacacataccgtattggaatgggggcacttacatgaacaatacagaagcaatat

SEQ ID NO: 85446 - DNA, 60 bp, Artificial
  Synthetic oligonucleotide
gataagaattggttccagaggacatgtttttgtcataagggagcccttcgtttcttgttc

SEQ ID NO: 85447 - DNA, 60 bp, Artificial
  Synthetic oligonucleotide
catgagtgtcgaagtgggccaatcacccaatgtataccaagccagatttgaggctgtggc

SEQ ID NO: 85448 - DNA, 60 bp, Artificial
  Synthetic oligonucleotide
gccagatttgaggctgtggcgtggtcagcaacagcatgccacgatgggaagaaatggatg

SEQ ID NO: 85449 - DNA, 60 bp, Artificial
  Synthetic oligonucleotide
gggaagaaatggatgacaattggtgtaacagggccagactctaaggcagtagcagtaatt

SEQ ID NO: 85450 - DNA, 60 bp, Artificial
  Synthetic oligonucleotide
ggatgacaattggtgtaacagggccagactctaaggcagtagcagtaattcattacgggg

SEQ ID NO: 85451 - DNA, 60 bp, Artificial
  Synthetic oligonucleotide
agcagtaattcattacgggggagtgcctaccgatgtcattaattcctgggcaggagacat

SEQ ID NO: 85452 - DNA, 60 bp, Artificial
  Synthetic oligonucleotide
cggggtacagtgggtctttcactctaccagtagaaatgtcggggagagattgtctggttc

SEQ ID NO: 85453 - DNA, 60 bp, Artificial
  Synthetic oligonucleotide
aagtaaagaacaggttggaagacaggtagttgttgataacttgaattggtcggggtacag

SEQ ID NO: 85454 - DNA, 60 bp, Artificial
  Synthetic oligonucleotide
ggttggaagacaggtagttgttgataacttgaattggtcggggtacagtgggtctttcac

SEQ ID NO: 85455 - DNA, 60 bp, Artificial
  Synthetic oligonucleotide
ggatgtgcaacatccttaaagggaaattccaaacagcagcacaacgagcaatgatggacc

SEQ ID NO: 85456 - DNA, 60 bp, Artificial
  Synthetic oligonucleotide
aataaccggttccagatcaaaggtgttgagctaaaatctggatacaaagactggatcctg

SEQ ID NO: 85457 - DNA, 60 bp, Artificial
  Synthetic oligonucleotide
agagatgaggcattgaataaccggttccagatcaaaggtgttgagctaaaatctggatac

SEQ ID NO: 85458 - DNA, 60 bp, Artificial
  Synthetic oligonucleotide
ttgggggatcctcattgcgatgtctttcaagacgaaacatgggacctttttgtagagcgg

SEQ ID NO: 85459 - DNA, 60 bp, Artificial
  Synthetic oligonucleotide
taaagtaaactcaatcattgacaaaatgaacactcaattcgaagccgttgggaaagaatt

SEQ ID NO: 85460 - DNA, 60 bp, Artificial
  Synthetic oligonucleotide
gcccagccaagagcatggaatatgatgctgttgccactacacactcctgggtccctaaga

SEQ ID NO: 85461 - DNA, 60 bp, Artificial
  Synthetic oligonucleotide
ggcccagccaagagcatggaatatgatgctgttgctactacacactcttggatacctaag

SEQ ID NO: 85462 - DNA, 60 bp, Artificial
  Synthetic oligonucleotide
gtggaccatatggccataatcaaaaagtacacatcaggaagacaagagaagaaccccgca

SEQ ID NO: 85463 - DNA, 60 bp, Artificial
  Synthetic oligonucleotide
tctgattgccctatgtggaagcccattcccagttgggtccggttccttccccgatggggc

SEQ ID NO: 85464 - DNA, 60 bp, Artificial
  Synthetic oligonucleotide
gggtgatgactgacggccccgccaataggcaggcacagtatagaatatacaaggcaaacc

SEQ ID NO: 85465 - DNA, 60 bp, Artificial
  Synthetic oligonucleotide
aatgggggaacttacatgaacaataccgaggcaatatgtgatgtcaagggctttgcacct

SEQ ID NO: 85466 - DNA, 59 bp, Artificial
  Synthetic oligonucleotide
ggggaacttacatgaacaataccgaggcaatatgtgatgtcaagggctttgcacctttt

SEQ ID NO: 85467 - DNA, 60 bp, Artificial
  Synthetic oligonucleotide
cccattcagaactctcatgagtgtcgaagtgggccaatcacccaatgtataccaagccag

SEQ ID NO: 85468 - DNA, 60 bp, Artificial
  Synthetic oligonucleotide
tatctattggggactgtcccaagtatgtcaaacagggatccttgaaacttgctacaggaa

SEQ ID NO: 85469 - DNA, 60 bp, Artificial
  Synthetic oligonucleotide
tatcaatcggggactgtcccaagtatgtcaaacagggatccttgaaacttgctacaggaa

SEQ ID NO: 85470 - DNA, 60 bp, Artificial
  Synthetic oligonucleotide
ggggactgtcccaagtatgtcaaacagggatccttgaaacttgctacaggaatgaggaac

SEQ ID NO: 85471 - DNA, 60 bp, Artificial
  Synthetic oligonucleotide
ggagcgttcatcgattattgggctgatagagagtgctttaacccttgcttttatgtggag

SEQ ID NO: 85472 - DNA, 60 bp, Artificial
  Synthetic oligonucleotide
caggagcgttcatcgattattgggctgatagagagtgctttaacccttgcttttatgtgg

SEQ ID NO: 85473 - DNA, 60 bp, Artificial
  Synthetic oligonucleotide
gtgttgttctactggggttcattatgtgggcctgccaaagaggcaacattaggtgcaaca

SEQ ID NO: 85474 - DNA, 60 bp, Artificial
  Synthetic oligonucleotide
cacatggacaggagtcactcaaaatggaggaagcaatgcctgcaaaagagggcctgccag

SEQ ID NO: 85475 - DNA, 60 bp, Artificial
  Synthetic oligonucleotide
aggtctctagttgcttcctcaggaaccctagagttcatcacagaaggattcacatggaca

SEQ ID NO: 85476 - DNA, 60 bp, Artificial
  Synthetic oligonucleotide
atcacagaaggattcacatggacaggagtcactcaaaatggaggaagcaatgcctgcaaa

SEQ ID NO: 85477 - DNA, 60 bp, Artificial
  Synthetic oligonucleotide
ggacaggagtcactcaaaatggaggaagcaatgcctgcaaaagagggcctgccagtggtt

SEQ ID NO: 85478 - DNA, 60 bp, Artificial
  Synthetic oligonucleotide
gaagataatgtgcatctcagcaacaggaatgacactatccgtagtaagtctgctaatagg

SEQ ID NO: 85479 - DNA, 60 bp, Artificial
  Synthetic oligonucleotide
aatgaatccaaatcagaagataatatgcatctcagcaacaggaatgacactatccgtagt

SEQ ID NO: 85480 - DNA, 60 bp, Artificial
  Synthetic oligonucleotide
atgaatccaaatcagaagataatatgcatctcagcaacaggaatgacactatccgtagtg

SEQ ID NO: 85481 - DNA, 54 bp, Artificial
  Synthetic oligonucleotide
atctgttccaccattgaagagctcagacggcagaaatagtgaatttagcttgtc

SEQ ID NO: 85482 - DNA, 60 bp, Artificial
  Synthetic oligonucleotide
ttttagggtttgtgtttacgctcaccgtgcccagtgagcgaggactgcagcgcagacgct

SEQ ID NO: 85483 - DNA, 60 bp, Artificial
  Synthetic oligonucleotide
gaggcagaccaaaagagagtagtgtattgtggacatccaatagtatagtagcgctttgtg

SEQ ID NO: 85484 - DNA, 60 bp, Artificial
  Synthetic oligonucleotide
cacagatggccctgctgctaatagtgcagatcacagggtttactggatacgggagggaag

SEQ ID NO: 85485 - DNA, 60 bp, Artificial
  Synthetic oligonucleotide
ctggtcctttgctctcgcacaaggagcattgctagggactaaacatagcaatgggaccat

SEQ ID NO: 85486 - DNA, 60 bp, Artificial
  Synthetic oligonucleotide
acttgtgttgttgctgtcacggatggccctgctgctaatagtgcagatcacagggtttac

SEQ ID NO: 85487 - DNA, 60 bp, Artificial
  Synthetic oligonucleotide
gtcacggatggccctgctgctaatagtgcagatcacagggtttactggatacgagaggga

SEQ ID NO: 85488 - DNA, 60 bp, Artificial
  Synthetic oligonucleotide
tgtgcagtaaatttcactcagacacccccaggccagctgacccctcaacaatatcatgtg

SEQ ID NO: 85489 - DNA, 60 bp, Artificial
  Synthetic oligonucleotide
gcagtaaatttcactcagacacccccaggccagctgacccctcaacaatatcatgtgact

SEQ ID NO: 85490 - DNA, 60 bp, Artificial
  Synthetic oligonucleotide
gcccatttagggcattaataagttgggaaatggggcaagcaccgagtccatacaatatca

SEQ ID NO: 85491 - DNA, 60 bp, Artificial
  Synthetic oligonucleotide
cccatttagggcattaataagttgggaaatggggcaagcaccgagtccatacaatatcag

SEQ ID NO: 85492 - DNA, 60 bp, Artificial
  Synthetic oligonucleotide
attgtggacatccaatagtatagtagcgctttgtggatccaaggagcgattgggatcatg

SEQ ID NO: 85493 - DNA, 60 bp, Artificial
  Synthetic oligonucleotide
cgaacaaataacattcatgcaagccttacaactactgcttgaagtggagcaagagataag

SEQ ID NO: 85494 - DNA, 60 bp, Artificial
  Synthetic oligonucleotide
agcgaaagcaggcaaaccatttgaatggatgtcaacccgactttacttttcttgaaggtt

SEQ ID NO: 85495 - DNA, 60 bp, Artificial
  Synthetic oligonucleotide
ctgaacgggatagctcccctacaactgggaaagtgcaatgtggcgggatggctccttggc

SEQ ID NO: 85496 - DNA, 60 bp, Artificial
  Synthetic oligonucleotide
tgcatgcccttactctggagccagcagtttttatcggaatttgctgtggataacaaagaa

SEQ ID NO: 85497 - DNA, 60 bp, Artificial
  Synthetic oligonucleotide
ccgaaggcaagctcatggccaaatcatgagacaactaaaggtgttacagctgcatgccct

SEQ ID NO: 85498 - DNA, 60 bp, Artificial
  Synthetic oligonucleotide
gtcaatgagcaacaaagtatatatcagaatgctgatgcatatgtttcggttggatcgtca

SEQ ID NO: 85499 - DNA, 60 bp, Artificial
  Synthetic oligonucleotide
tgtcaatgagcaacaaagtatatatcagaatgctgatgcatatgtttcggttggatcgtc

SEQ ID NO: 85500 - DNA, 60 bp, Artificial
  Synthetic oligonucleotide
ggacatacaatgccgaactgctcgtcttacttgaaaatgaaaggactctagactttcatg

SEQ ID NO: 85501 - DNA, 60 bp, Artificial
  Synthetic oligonucleotide
gccgaactgctcgtcttacttgaaaatgaaaggactctagactttcatgactccaatgtg

SEQ ID NO: 85502 - DNA, 60 bp, Artificial
  Synthetic oligonucleotide
ggtgccaaacccctcatggggctttgaacagcagccttcctttccagaatgtgcatccta

SEQ ID NO: 85503 - DNA, 60 bp, Artificial
  Synthetic oligonucleotide
cactattggagaatgtcccaaatacgtcaagagcaccaaactaagaatggcaacaggact

SEQ ID NO: 85504 - DNA, 60 bp, Artificial
  Synthetic oligonucleotide
gaccaaggagacaccataacatttgaagccactgggaatttgatagcaccatggtatgct

SEQ ID NO: 85505 - DNA, 60 bp, Artificial
  Synthetic oligonucleotide
ggagacaccataacatttgaagccactgggaatttgatagcaccatggtatgctttcgca

SEQ ID NO: 85506 - DNA, 60 bp, Artificial
  Synthetic oligonucleotide
atggtatgctttcgcattgaataaggggtctgactctggaattataacatcagatgctcc

SEQ ID NO: 85507 - DNA, 60 bp, Artificial
  Synthetic oligonucleotide
ggtatgctttcgcattgaataaggggtctgactctggaattataacatcagatgctccag

SEQ ID NO: 85508 - DNA, 60 bp, Artificial
  Synthetic oligonucleotide
gagaagaaatagacggggtgaaactagaatcaatgggagtttatcaaattttggcgatct

SEQ ID NO: 85509 - DNA, 60 bp, Artificial
  Synthetic oligonucleotide
ctatcccaagtattcggaagagtccaaattgaatcgagaagaaatagacggggtgaaact

SEQ ID NO: 85510 - DNA, 53 bp, Artificial
  Synthetic oligonucleotide
gactttcatgactccaatgtgaggaatttatatgagaaggtcaaatcacaatt

SEQ ID NO: 85511 - DNA, 60 bp, Artificial
  Synthetic oligonucleotide
gaacggcacatatgactatcccaagtattcggaagagtccaaattgaatcgagaagaaat

SEQ ID NO: 85512 - DNA, 60 bp, Artificial
  Synthetic oligonucleotide
atttagggcattaataagttgggaaatggggcaagcaccgagtccgtacaatgtcaaagt

SEQ ID NO: 85513 - DNA, 58 bp, Artificial
  Synthetic oligonucleotide
gtttagggcattaataagttgggaaatggggcaagcaccgagtccatacaatatcaga

SEQ ID NO: 85514 - DNA, 60 bp, Artificial
  Synthetic oligonucleotide
gtttagggcattaataagttgggaaatggggcaagcaccgagcccatacaatatcagggt

SEQ ID NO: 85515 - DNA, 60 bp, Artificial
  Synthetic oligonucleotide
ttttagggcgttaataagttgggaaatggggcaagcaccgagtccatacaatatcagagt

SEQ ID NO: 85516 - DNA, 60 bp, Artificial
  Synthetic oligonucleotide
cttgtcttacagagtcggatacttgtgtgcaggtctccccagtgacaccccaagaggaga

SEQ ID NO: 85517 - DNA, 60 bp, Artificial
  Synthetic oligonucleotide
ctctaatgagtgtagaaatagggcaatcacccaatgtgtaccaggcaaggtttgaggcgg

SEQ ID NO: 85518 - DNA, 60 bp, Artificial
  Synthetic oligonucleotide
gaatcatcatgcacttgcattcaaggtgaatgttattgggtaatgacggatggaccagca

SEQ ID NO: 85519 - DNA, 60 bp, Artificial
  Synthetic oligonucleotide
agacaacggaataagaattggatcgagaggtcatgtttttgtcataagggaaccgtttgt

SEQ ID NO: 85520 - DNA, 52 bp, Artificial
  Synthetic oligonucleotide
tgaaggtaaagtggaatgtgtttgtagggacaactggactggaaccaacagg

SEQ ID NO: 85521 - DNA, 60 bp, Artificial
  Synthetic oligonucleotide
ccaatggcacagtgaaagaccggagtccctatagaactctaatgagtgtagaaatagggc

SEQ ID NO: 85522 - DNA, 60 bp, Artificial
  Synthetic oligonucleotide
ggatcgagaggtcatgtttttgtcataagggaaccatttgtttcttgctctccaacagag

SEQ ID NO: 85523 - DNA, 60 bp, Artificial
  Synthetic oligonucleotide
ggcgccaactaagagagaatgctgaagacaagggaaatggatgttttgaaattttccacc

SEQ ID NO: 85524 - DNA, 60 bp, Artificial
  Synthetic oligonucleotide
aggcgccaactaagagagaatgctgaagacaagggaaatggatgttttgaaattttccac

SEQ ID NO: 85525 - DNA, 60 bp, Artificial
  Synthetic oligonucleotide
caatccgactttacttttcttgaaagttccagcgcaaaatgccataagcactacattccc

SEQ ID NO: 85526 - DNA, 60 bp, Artificial
  Synthetic oligonucleotide
gggttcatagagaatggctggcaaggtctaatcgatggttggtatgggtttaggcaccag

SEQ ID NO: 85527 - DNA, 60 bp, Artificial
  Synthetic oligonucleotide
ggggactgtcccaagtatgtcaaacagggatccttgaaactagctacaggaatgaggaac

SEQ ID NO: 85528 - DNA, 60 bp, Artificial
  Synthetic oligonucleotide
agcaaaagcaggggaaacaatgctatcaatcacaattctgtttctgctcatagcagaggg

SEQ ID NO: 85529 - DNA, 60 bp, Artificial
  Synthetic oligonucleotide
acatctcgaggatatcaatcggggactgtcccaagtatgtcaaacagggatccttgaaac

SEQ ID NO: 85530 - DNA, 60 bp, Artificial
  Synthetic oligonucleotide
ctcgaggatatcaatcggggactgtcccaagtatgtcaaacagggatccttgaaactagc

SEQ ID NO: 85531 - DNA, 60 bp, Artificial
  Synthetic oligonucleotide
tcttcatagagcgacccactgctgtggacacttgttacccatttgatgtgccagattatc

SEQ ID NO: 85532 - DNA, 60 bp, Artificial
  Synthetic oligonucleotide
gaagtatgttgaagacacaaagattgacctgtggtcttacaatgctgaactattggtggc

SEQ ID NO: 85533 - DNA, 60 bp, Artificial
  Synthetic oligonucleotide
ggtgttctcacaagaggattgcatgataaaggcagtccgaggtgatctaaatttcgtaaa

SEQ ID NO: 85534 - DNA, 60 bp, Artificial
  Synthetic oligonucleotide
ggtgttctcacaagaggattgcatgataaaggcagtccgaggtgatctgaattttgtgaa

SEQ ID NO: 85535 - DNA, 60 bp, Artificial
  Synthetic oligonucleotide
aattggtcaggatactcaggaagtttcatcgactactgggatgaaagcaatgagtgctac

SEQ ID NO: 85536 - DNA, 60 bp, Artificial
  Synthetic oligonucleotide
gcttatgcaaagttgaaggatgggtagtggtagccaaggacaacgctataagatttggtg

SEQ ID NO: 85537 - DNA, 60 bp, Artificial
  Synthetic oligonucleotide
tctaatgctgaataaaagcttatgcaaagttgaaggatgggtagtggtagccaaggacaa

SEQ ID NO: 85538 - DNA, 60 bp, Artificial
  Synthetic oligonucleotide
tgcgaagcaaaattatctaatgctgaataaaagcttatgcaaagttgaaggatgggtagt

SEQ ID NO: 85539 - DNA, 60 bp, Artificial
  Synthetic oligonucleotide
gaccgcgaagcaaaattatctaatgctgaataaaagcttatgcaaagttgaaggatgggt

SEQ ID NO: 85540 - DNA, 60 bp, Artificial
  Synthetic oligonucleotide
agcaaaagcagggtcgagatgaatccaaatcagaagattctattcgcttctgccactgct

SEQ ID NO: 85541 - DNA, 58 bp, Artificial
  Synthetic oligonucleotide
ggatcgggaaattggccggatggttctaacattgggtttatgcccaagtaacagaaaa

SEQ ID NO: 85542 - DNA, 60 bp, Artificial
  Synthetic oligonucleotide
ggatcgggaaattggccggatggttctaacattgggtttatgcccaagtaacagaaaaaa

SEQ ID NO: 85543 - DNA, 60 bp, Artificial
  Synthetic oligonucleotide
gtcgtcactgcccaggaattagtggaatcgcaacatctaccggaattgtgtcctagtcct

SEQ ID NO: 85544 - DNA, 60 bp, Artificial
  Synthetic oligonucleotide
ctgttccaccattgaagagctcagacggcagaagtagtgaatttggcttgtccttcatga

SEQ ID NO: 85545 - DNA, 60 bp, Artificial
  Synthetic oligonucleotide
aggatgtaatcatggaagttgttttcccaaatgaagtgggagctagaatactaacatcgg

SEQ ID NO: 85546 - DNA, 60 bp, Artificial
  Synthetic oligonucleotide
taatcatggaagttgttttcccaaatgaagtgggggccagaatactaacatcggaatcac

SEQ ID NO: 85547 - DNA, 60 bp, Artificial
  Synthetic oligonucleotide
tgtcataatggaagttgttttcccaaatgaagtgggtgccagaatactaacgtcggaatc

SEQ ID NO: 85548 - DNA, 60 bp, Artificial
  Synthetic oligonucleotide
gatgtaatcatggaagttgttttcccaaatgaagtgggggctagaatactaacatcggaa

SEQ ID NO: 85549 - DNA, 60 bp, Artificial
  Synthetic oligonucleotide
aagacacagagctctctttcacaatcactggagacaacaccaaatggaacgagaaccaga

SEQ ID NO: 85550 - DNA, 60 bp, Artificial
  Synthetic oligonucleotide
tgggacaccctcttattctagacacctgcaatatagaaggattggtatacggcaatcctg

SEQ ID NO: 85551 - DNA, 60 bp, Artificial
  Synthetic oligonucleotide
gccccttgtcaaaggtcaacaggggagaattgattattattggtcagtactaaagccagg

SEQ ID NO: 85552 - DNA, 60 bp, Artificial
  Synthetic oligonucleotide
ccaaggccccttgtcaaaggtcaacaggggagaattgattattattggtcagtactaaag

SEQ ID NO: 85553 - DNA, 55 bp, Artificial
  Synthetic oligonucleotide
acggttttcagcattcaaatgatcagggagtcggaatggctgcagacagagattc

SEQ ID NO: 85554 - DNA, 60 bp, Artificial
  Synthetic oligonucleotide
gttcaaacacattctacaggaatatgagatggctgacacacaagagtaattcttatcctg

SEQ ID NO: 85555 - DNA, 60 bp, Artificial
  Synthetic oligonucleotide
ggacaccctcttattctagacacctgcaatatagaaggattggtatacggcaatcctgcc

SEQ ID NO: 85556 - DNA, 60 bp, Artificial
  Synthetic oligonucleotide
ctcaccatttactcgactgtcgcctcatctcttgtgcttgcaatagggtttgctgccttc

SEQ ID NO: 85557 - DNA, 60 bp, Artificial
  Synthetic oligonucleotide
ggggtaaaactggaatctgagggtacttacaagattctcaccatttactcgactgtcgcc

SEQ ID NO: 85558 - DNA, 60 bp, Artificial
  Synthetic oligonucleotide
gtgcctgctgcatcagataggggactatttggtgccatagctggattcatagagggaggt

SEQ ID NO: 85559 - DNA, 60 bp, Artificial
  Synthetic oligonucleotide
catagctggattcatagagggaggttggccaggactagttgcaggctggtacggttttca

SEQ ID NO: 85560 - DNA, 60 bp, Artificial
  Synthetic oligonucleotide
agtactaaagccaggtcagacattgcgagtgagatccaatgggaatttaattgctccatg

SEQ ID NO: 85561 - DNA, 60 bp, Artificial
  Synthetic oligonucleotide
ccccaaatacgttggagtgaagagtctcaaactggcaatcggtctgaggaatgtgcctgc

SEQ ID NO: 85562 - DNA, 60 bp, Artificial
  Synthetic oligonucleotide
atcggtctgaggaatgtgcctgctgcatcagataggggactatttggtgccatagctgga

SEQ ID NO: 85563 - DNA, 60 bp, Artificial
  Synthetic oligonucleotide
aacagtggcaactgcatagtacagtgtcaaactgagaaaggtggtttgaacacgaccttg

SEQ ID NO: 85564 - DNA, 60 bp, Artificial
  Synthetic oligonucleotide
gaaaggtggtttgaacacgaccttgccgttccaaaatgtcagcaaatatgcatttgggaa

SEQ ID NO: 85565 - DNA, 60 bp, Artificial
  Synthetic oligonucleotide
ctacaggaatatgagatggctgacacacaagagtaattcttatcctgttcaagacgccca

SEQ ID NO: 85566 - DNA, 60 bp, Artificial
  Synthetic oligonucleotide
gctggattcatagagggaggttggccaggactagttgcaggctggtacggttttcagcat

SEQ ID NO: 85567 - DNA, 53 bp, Artificial
  Synthetic oligonucleotide
aaaaggtgaagagagcattgggttctaatgcaatggaggacggaaatgggtgc

SEQ ID NO: 85568 - DNA, 60 bp, Artificial
  Synthetic oligonucleotide
tccaacgggacaatggtgaaaaccttgactgatgaccaagtagaagtcgtcactgcccaa

SEQ ID NO: 85569 - DNA, 60 bp, Artificial
  Synthetic oligonucleotide
cacttttctcatcctcctgttcacagtagtgaaaggggaccaaatatgtatcggatacca

SEQ ID NO: 85570 - DNA, 60 bp, Artificial
  Synthetic oligonucleotide
atttctttctggatgtgttctaatgggtctctgcaatgcagaatttgcatatgactgtaa

SEQ ID NO: 85571 - DNA, 60 bp, Artificial
  Synthetic oligonucleotide
ggagcgttcatcgattattgggctgatagagaatgcttcaatccttgcttctatgtggaa

SEQ ID NO: 85572 - DNA, 60 bp, Artificial
  Synthetic oligonucleotide
tgcagacaaaatctgcatcggctaccagtcaacaaactccacggaaactgttgatacact

SEQ ID NO: 85573 - DNA, 60 bp, Artificial
  Synthetic oligonucleotide
agaaaggcagaagatagaaggggtaaaactggaatctgagggaacttacaaaattctcac

SEQ ID NO: 85574 - DNA, 60 bp, Artificial
  Synthetic oligonucleotide
gaaaggcagaagatagaaggggtaaaactggaatctgagggaacttacaaaattctcacc

SEQ ID NO: 85575 - DNA, 60 bp, Artificial
  Synthetic oligonucleotide
ggcttaaacacaaccttgccgttccacaatgtcagcaaatatgcatttgggaactgcccc

SEQ ID NO: 85576 - DNA, 60 bp, Artificial
  Synthetic oligonucleotide
catttgggaactgccccaaatacgttggagttaagagtctcaaactggcagtcggcctga

SEQ ID NO: 85577 - DNA, 60 bp, Artificial
  Synthetic oligonucleotide
aggtggtttgaacacgaccttgccgttccaaaatgtcagcaaatatgcatttgggaactg

SEQ ID NO: 85578 - DNA, 60 bp, Artificial
  Synthetic oligonucleotide
gaccaaatacaggacatctgggcatacaatgcagagttactagtactgcttgaaaatcag

SEQ ID NO: 85579 - DNA, 60 bp, Artificial
  Synthetic oligonucleotide
gcagacaaaatctgcatcggctaccagtcaacaaactccacggaaactgttgatacacta

SEQ ID NO: 85580 - DNA, 60 bp, Artificial
  Synthetic oligonucleotide
catttgggaactgccccaaatacgttggagtgaagagtctcaaactggcaatcggtctga

SEQ ID NO: 85581 - DNA, 60 bp, Artificial
  Synthetic oligonucleotide
tgaccaaatacaggacatctgggcatacaatgcagagttactagtactgcttgaaaatca

SEQ ID NO: 85582 - DNA, 60 bp, Artificial
  Synthetic oligonucleotide
ggcagaaaatagaaggggtaaaactggaatctgagggtacttacaagattctcaccattt

SEQ ID NO: 85583 - DNA, 60 bp, Artificial
  Synthetic oligonucleotide
tatgagagaatgtgcaacattctcaaagggaaattccaaacagcagcacaacgagcaatg

SEQ ID NO: 85584 - DNA, 60 bp, Artificial
  Synthetic oligonucleotide
ccccggaagcggaaactgtgatgcaccaataaccggagggagcccagatcctggcgtaaa

SEQ ID NO: 85585 - DNA, 60 bp, Artificial
  Synthetic oligonucleotide
gaccccggaaacggaaactgtgatgcaccaataaccggagggagcccagatcctggcgta

SEQ ID NO: 85586 - DNA, 60 bp, Artificial
  Synthetic oligonucleotide
attatgtgggcctgccaaagaggcaacattaggtgcaacatttgcatttgagtacattgg

SEQ ID NO: 85587 - DNA, 60 bp, Artificial
  Synthetic oligonucleotide
ggcaccaaacgatcttatgagcagatggaaactggtggagaacgccagaatgccactgaa

SEQ ID NO: 85588 - DNA, 60 bp, Artificial
  Synthetic oligonucleotide
ataacacagttcgagtctctgaaactctacagagattcgcttggagaggcagtaatgagg

SEQ ID NO: 85589 - DNA, 60 bp, Artificial
  Synthetic oligonucleotide
caagacacagaactctctttcacaatcactggagacaacaccaaatggaatgaaaatcag

SEQ ID NO: 85590 - DNA, 60 bp, Artificial
  Synthetic oligonucleotide
gggtactcatcggaggacttgaatggaatgataacacagttcgagtctctgaaactctac

SEQ ID NO: 85591 - DNA, 60 bp, Artificial
  Synthetic oligonucleotide
ggagacgtggtgttggtgatgaaacggaaacgggactctagcatacttactgacagccag

SEQ ID NO: 85592 - DNA, 60 bp, Artificial
  Synthetic oligonucleotide
tagtgttggtaatgaaacggaaacgggactctagcatacttactgacagccagacagcga

SEQ ID NO: 85593 - DNA, 60 bp, Artificial
  Synthetic oligonucleotide
ctctactcaatgacaaacattctaatggcacagtgaaagaccggagcccctacagaactc

SEQ ID NO: 85594 - DNA, 60 bp, Artificial
  Synthetic oligonucleotide
cccagggtacatgctgggagcagatgtacactccaggaggggaagtgagaaatgatgatg

SEQ ID NO: 85595 - DNA, 60 bp, Artificial
  Synthetic oligonucleotide
ggaaatggatgctttgaattttggcataagtgtgacaatgaatgcatagagtctgtcaag

SEQ ID NO: 85596 - DNA, 60 bp, Artificial
  Synthetic oligonucleotide
tttgggcatacaatgcagaactgctagtactgcttgaaaatcagaaaacactcgatgaac

SEQ ID NO: 85597 - DNA, 60 bp, Artificial
  Synthetic oligonucleotide
ttgagccctggaatgatgatgggcatgttcaacatgctaagtacagttttaggagtctca

SEQ ID NO: 85598 - DNA, 60 bp, Artificial
  Synthetic oligonucleotide
cataaacaggacaggaacatttgaattcacaagctttttctatcgctatgggttcgtagc

SEQ ID NO: 85599 - DNA, 60 bp, Artificial
  Synthetic oligonucleotide
ggacctaataacaatgcttcggcagtggtctggtacaatggaaggccagtaaccgaaatt

SEQ ID NO: 85600 - DNA, 60 bp, Artificial
  Synthetic oligonucleotide
ttgaatggatgtcaatccgactttacttttcttaaaagtaccagcgcaaaatgctataag

SEQ ID NO: 85601 - DNA, 60 bp, Artificial
  Synthetic oligonucleotide
atagctccccgaggttatttcaaaatgcgcactgggaaaagctcaataatgagatcagat

SEQ ID NO: 85602 - DNA, 60 bp, Artificial
  Synthetic oligonucleotide
ccccgaggttatttcaaaatgcgcactgggaaaagctcaataatgagatcagatgcccct

SEQ ID NO: 85603 - DNA, 60 bp, Artificial
  Synthetic oligonucleotide
atggcccagcattgagcatcaacgaactaagcaatcttgcaaaaggagagaaggctaatg

SEQ ID NO: 85604 - DNA, 60 bp, Artificial
  Synthetic oligonucleotide
caataatcgtggccatggtattttcacaagaggattgcatgatcaaggcagttagaggcg

SEQ ID NO: 85605 - DNA, 60 bp, Artificial
  Synthetic oligonucleotide
gcagggctcaacactccctagaaggtctggagctgctggtgcagcagtaaagggagttgg

SEQ ID NO: 85606 - DNA, 60 bp, Artificial
  Synthetic oligonucleotide
aggaacagagaaactgacaataacttattcatcatcaatgatgtgggagatcaatggccc

SEQ ID NO: 85607 - DNA, 58 bp, Artificial
  Synthetic oligonucleotide
ttttgtcataagggaaccatttgtttcttgctctccaacagagtgcaggacgttcttc

SEQ ID NO: 85608 - DNA, 60 bp, Artificial
  Synthetic oligonucleotide
ggcagtagcatggtcggctactgcatgtcatgatgggaagaaatggatgacaattggagt

SEQ ID NO: 85609 - DNA, 60 bp, Artificial
  Synthetic oligonucleotide
gaatggatgcatgtatgcatgacagggaacgataatgatgcaagtgctcaaataatatat

SEQ ID NO: 85610 - DNA, 60 bp, Artificial
  Synthetic oligonucleotide
atctacaggaggagagatgggaaatgggtgagagaattgatcctgtatgataaagaagag

SEQ ID NO: 85611 - DNA, 60 bp, Artificial
  Synthetic oligonucleotide
ccaactcacaagacacagagctctctttcacaatcactggagacaacaccaaatggaatg

SEQ ID NO: 85612 - DNA, 60 bp, Artificial
  Synthetic oligonucleotide
tgacactatccgtagtaagtctgctaataggattggccaacttggggctgaacattgggc

SEQ ID NO: 85613 - DNA, 60 bp, Artificial
  Synthetic oligonucleotide
agactgaactggttgactaagtcagggagcgcatacccagtgttgaacgtgactatgcca

SEQ ID NO: 85614 - DNA, 60 bp, Artificial
  Synthetic oligonucleotide
gactgaattggttgactaaatcaggaagcacatacccagtgttgaacgtgactatgccaa

SEQ ID NO: 85615 - DNA, 60 bp, Artificial
  Synthetic oligonucleotide
gaatctgggtgtatatcagatccttgctatttatagtacggtatcgagcagtctagtttt

SEQ ID NO: 85616 - DNA, 60 bp, Artificial
  Synthetic oligonucleotide
aatgccagctcatggcccagccaagagcatggaatatgatgctgttgctactacacactc

SEQ ID NO: 85617 - DNA, 60 bp, Artificial
  Synthetic oligonucleotide
ggtgttctcacaagaggattgcatgataaaggcagtccgaggcgatctgaatttcgtaaa

SEQ ID NO: 85618 - DNA, 60 bp, Artificial
  Synthetic oligonucleotide
ctcactgactgtgaatgtgagaggatcaggaatgaggatactggtaagaggcaattctcc

SEQ ID NO: 85619 - DNA, 60 bp, Artificial
  Synthetic oligonucleotide
cttgaaagttccagcgcaaaatgccataagcactacattcccttacactggagatcctcc

SEQ ID NO: 85620 - DNA, 60 bp, Artificial
  Synthetic oligonucleotide
gtttcgaacaaataacattcatgcaagccttacaactactgcttgaagtggagcaagaga

SEQ ID NO: 85621 - DNA, 60 bp, Artificial
  Synthetic oligonucleotide
attaatgacccctgggttttgcttaatgcatcttggttcaactccttcctcacacatgca

SEQ ID NO: 85622 - DNA, 58 bp, Artificial
  Synthetic oligonucleotide
atccctgggttttgcttaatgcatcttggttcaactccttcctcacacatgcactgaa

SEQ ID NO: 85623 - DNA, 60 bp, Artificial
  Synthetic oligonucleotide
tcaagggtgtagagctaaaatctgggtacaaagattggatcttatggatttcctttgcca

SEQ ID NO: 85624 - DNA, 51 bp, Artificial
  Synthetic oligonucleotide
gggtgtagagctgaaatctgggtacaaagattggatcttatggatttcctt

SEQ ID NO: 85625 - DNA, 60 bp, Artificial
  Synthetic oligonucleotide
gttttgctagggttcattatgtgggcctgccagagaggcaatatcaggtgcaacatttgc

SEQ ID NO: 85626 - DNA, 51 bp, Artificial
  Synthetic oligonucleotide
agcaatcttgcgaagggagagaaggctaatgtgctaattgggcaaggagac

SEQ ID NO: 85627 - DNA, 60 bp, Artificial
  Synthetic oligonucleotide
ctgaagcaataattgtggccatggtattctcacaagaggattgcatgatcaaggcagttc

SEQ ID NO: 85628 - DNA, 60 bp, Artificial
  Synthetic oligonucleotide
atcttggggggctatatgaagcaattgaggagtgcctgattaatgatccctgggttttgc

SEQ ID NO: 85629 - DNA, 60 bp, Artificial
  Synthetic oligonucleotide
cggaaacgggactctagcatacttactgacagtcagacagcgaccaaaagaattcggatg

SEQ ID NO: 85630 - DNA, 60 bp, Artificial
  Synthetic oligonucleotide
ggacctcaagcagctccattgtgatgtgtggagtagaccatgagattgccgactggtcgt

SEQ ID NO: 85631 - DNA, 60 bp, Artificial
  Synthetic oligonucleotide
gattggtcatggcacgatggagctattcttccttttgacatcgataagatgtaatttacg

SEQ ID NO: 85632 - DNA, 60 bp, Artificial
  Synthetic oligonucleotide
gacgaacagtcaattgccgaagcaataattgtggccatggtattttcacaagaggattgc

SEQ ID NO: 85633 - DNA, 60 bp, Artificial
  Synthetic oligonucleotide
ctcaaaattgcaattgcatccagccctgctcctcggtacattaccgatatgaacatagag

SEQ ID NO: 85634 - DNA, 60 bp, Artificial
  Synthetic oligonucleotide
tgccagattatcagagcctacggagtatcttggcaaacaacgggaaatttgagttcattg

SEQ ID NO: 85635 - DNA, 55 bp, Artificial
  Synthetic oligonucleotide
aaatgggaaatccggggcttgcaaaagagcaaatgtgaatgacttcttcaacaga

SEQ ID NO: 85636 - DNA, 60 bp, Artificial
  Synthetic oligonucleotide
aatactgcagttcctataggatcttgcgttagtaaatgtcacactgacaggggttcaatt

SEQ ID NO: 85637 - DNA, 60 bp, Artificial
  Synthetic oligonucleotide
ttggggactgtcccaaatatgtcaaacagggatccttgaaacttgctacaggaatgagaa

SEQ ID NO: 85638 - DNA, 60 bp, Artificial
  Synthetic oligonucleotide
tagcagagggctcctctcagaattacacagggaatcctgtgatatgcctcggacaccatg

SEQ ID NO: 85639 - DNA, 60 bp, Artificial
  Synthetic oligonucleotide
cagagggctcttttcagaattacacagggaatcctgtgatatgcctcggacaccatgctg

SEQ ID NO: 85640 - DNA, 60 bp, Artificial
  Synthetic oligonucleotide
aggagcattcatagattactgggcgaacaaagaatgcttcaatccttgtttttatgtgga

SEQ ID NO: 85641 - DNA, 60 bp, Artificial
  Synthetic oligonucleotide
atagttaacatcataataacagtgttggttctccctggaaatggaaataatgggagatgc

SEQ ID NO: 85642 - DNA, 60 bp, Artificial
  Synthetic oligonucleotide
atagttagcattacagtaacagtgttggttctccctggaaatggaaataatgggagttgc

SEQ ID NO: 85643 - DNA, 60 bp, Artificial
  Synthetic oligonucleotide
ggtcaagcacgtcatgccacgatggcatatcaaggatgtcaatatgcatgtcgggaccga

SEQ ID NO: 85644 - DNA, 60 bp, Artificial
  Synthetic oligonucleotide
agggtggtcaagcacttcatgccatgacggcatatcaaggatgtcaatatgcatgtcagg

SEQ ID NO: 85645 - DNA, 60 bp, Artificial
  Synthetic oligonucleotide
ggctctgtctctctaaccattgcaacagtatgtttcctcatgcagattgccatcctaaca

SEQ ID NO: 85646 - DNA, 60 bp, Artificial
  Synthetic oligonucleotide
ggtactcaggagcgttcatcgattattgggctgatagagagtgctttaacccttgctttt

SEQ ID NO: 85647 - DNA, 60 bp, Artificial
  Synthetic oligonucleotide
ggtactcaggagcgttcatcgattattgggctgatagagagtgcttcaacccttgctttt

SEQ ID NO: 85648 - DNA, 60 bp, Artificial
  Synthetic oligonucleotide
gatactcaggagcgttcatcgattattgggctgacagagaatgcttcaatccttgctttt

SEQ ID NO: 85649 - DNA, 60 bp, Artificial
  Synthetic oligonucleotide
tgggttttgcttaatgcatcttggttcaactccttcctcacacatgcactgaagtagttg

SEQ ID NO: 85650 - DNA, 60 bp, Artificial
  Synthetic oligonucleotide
agacatgtgtgatgctccctttgatgatagactccgaagagaccaaaaggcattaaaggg

SEQ ID NO: 85651 - DNA, 60 bp, Artificial
  Synthetic oligonucleotide
agacatgtgtgatgctccctttgatgatagactcagaagggatcaaaaggcattaaaggg

SEQ ID NO: 85652 - DNA, 50 bp, Artificial
  Synthetic oligonucleotide
tgccatgatgggaaaaagtggatgacagttggagtcacagggcccgatgc

SEQ ID NO: 85653 - DNA, 60 bp, Artificial
  Synthetic oligonucleotide
gtcatgcacctgcattaaaggagactgttattgggtgatgactgatggaccggcgaacag

SEQ ID NO: 85654 - DNA, 60 bp, Artificial
  Synthetic oligonucleotide
ctaatgtgtatcaagctaggtttgaagcggtggcatggtcagcaacagcatgccatgatg

SEQ ID NO: 85655 - DNA, 60 bp, Artificial
  Synthetic oligonucleotide
gtgtatcaagctaggtttgaagcggtggcatggtcagcaacagcatgccatgatgggaaa

SEQ ID NO: 85656 - DNA, 60 bp, Artificial
  Synthetic oligonucleotide
cacacagggctcattacttaatgacaaacattctaacggcacagtgaaggaccgaagtcc

SEQ ID NO: 85657 - DNA, 60 bp, Artificial
  Synthetic oligonucleotide
ggaccgaagtccatataggactttcatgagtgtcaaagtagggcaatcacctaatgtgta

SEQ ID NO: 85658 - DNA, 60 bp, Artificial
  Synthetic oligonucleotide
gcccagggctttgcaccattttccaaagataatggaatacgaattggatcgagaggtcat

SEQ ID NO: 85659 - DNA, 60 bp, Artificial
  Synthetic oligonucleotide
ctcacacagggctcattacttaatgacaaacattctaacggcacagtgaaggaccgaagt

SEQ ID NO: 85660 - DNA, 60 bp, Artificial
  Synthetic oligonucleotide
gagagaccttcaaatgaatactacatgaacaacaccgaaccactgtgtgaagcccagggc

SEQ ID NO: 85661 - DNA, 60 bp, Artificial
  Synthetic oligonucleotide
gaaccactgtgtgaagcccagggctttgcaccattttccaaagataatggaatacgaatt

SEQ ID NO: 85662 - DNA, 60 bp, Artificial
  Synthetic oligonucleotide
tcagaggtaaacctgaagagacaacaatatggacctctagcagctccattgtgatgtgtg

SEQ ID NO: 85663 - DNA, 60 bp, Artificial
  Synthetic oligonucleotide
gttgataacctaaattggtcaggatatagcggttctttcacattgccggttgaactaaca

SEQ ID NO: 85664 - DNA, 60 bp, Artificial
  Synthetic oligonucleotide
aggatgtttagtcccctgtttctgggttgaaatgatcagaggtaaacctgaagagacaac

SEQ ID NO: 85665 - DNA, 55 bp, Artificial
  Synthetic oligonucleotide
tcagaggtaaacctgaagagacaacaatatggacctctagcagctccattgtgat

SEQ ID NO: 85666 - DNA, 60 bp, Artificial
  Synthetic oligonucleotide
caatcgagtatatagagagaccttcaaatgaatactacatgaacaacaccgaaccactgt

SEQ ID NO: 85667 - DNA, 60 bp, Artificial
  Synthetic oligonucleotide
gcaattggatctgcatcattaggaatactaatcctcaacgtcattctccatgtggtcagc

SEQ ID NO: 85668 - DNA, 60 bp, Artificial
  Synthetic oligonucleotide
atagcaattggatctgcatcattaggaatactaatcctcaacgtcattctccatgtggtc

SEQ ID NO: 85669 - DNA, 60 bp, Artificial
  Synthetic oligonucleotide
gtttcgggtttcgacaaggaaatgacgtatgggccggaaggacaattagtaggacttcga

SEQ ID NO: 85670 - DNA, 60 bp, Artificial
  Synthetic oligonucleotide
gctcatgcacaagccctttgggaaatcaaggatacggtgtaaagggtttcgggtttcgac

SEQ ID NO: 85671 - DNA, 60 bp, Artificial
  Synthetic oligonucleotide
cacaggctcatgcacaagccctttgggaaatcaaggatacggtgtaaagggtttcgggtt

SEQ ID NO: 85672 - DNA, 52 bp, Artificial
  Synthetic oligonucleotide
gagtgttcttgttaccccaatgaagggaaggtggagtgcgtatgcagggaca

SEQ ID NO: 85673 - DNA, 60 bp, Artificial
  Synthetic oligonucleotide
ggagaataattgggcagactgatataaatttcaatgggggacacatagaggagtgttctt

SEQ ID NO: 85674 - DNA, 60 bp, Artificial
  Synthetic oligonucleotide
cacctgcattaaaggagactgttattgggtgatgactgatggaccggcgaacaggcaagc

SEQ ID NO: 85675 - DNA, 60 bp, Artificial
  Synthetic oligonucleotide
ggaatggttggacacagaacagtaaagaccaaatcagaaagcaagtgattgttgataacc

SEQ ID NO: 85676 - DNA, 60 bp, Artificial
  Synthetic oligonucleotide
cgggtttcgacaaggaaatgacgtatgggccggaaggacaattagtaggacttcgagatt

SEQ ID NO: 85677 - DNA, 60 bp, Artificial
  Synthetic oligonucleotide
tacttgaagtggagcaagagataagaactttctcgtttcggcttatttaatgataaaaaa

SEQ ID NO: 85678 - DNA, 60 bp, Artificial
  Synthetic oligonucleotide
actaagaatggcaacaggactaagaaatgtcccatccattcaatccagaggactatttgg

SEQ ID NO: 85679 - DNA, 60 bp, Artificial
  Synthetic oligonucleotide
cgacggaataacaaataaggtgaattcggtaattgagaaaatgaacactcaattcaccgc

SEQ ID NO: 85680 - DNA, 60 bp, Artificial
  Synthetic oligonucleotide
cggagtgcgtatgccacaaagggatctgtccagtagtcatgacagatggcccagcaaaca

SEQ ID NO: 85681 - DNA, 60 bp, Artificial
  Synthetic oligonucleotide
gctcaaaggttttaaccgatacaagtcgccccaatgatcccactaatgggaactgtgatg

SEQ ID NO: 85682 - DNA, 60 bp, Artificial
  Synthetic oligonucleotide
taaatttaacaaagcctctatgcgaagtaaactcatggcacatcctgtcaaaagacaatg

SEQ ID NO: 85683 - DNA, 60 bp, Artificial
  Synthetic oligonucleotide
tgggaaatgggtcaagcacccagcccatataatgctagggtcgaatgcatagggtggtca

SEQ ID NO: 85684 - DNA, 60 bp, Artificial
  Synthetic oligonucleotide
gattgcccctcgaggttattttaagatgcgcactgggaaaagctcgataatgagatcaga

SEQ ID NO: 85685 - DNA, 60 bp, Artificial
  Synthetic oligonucleotide
aaggcttcacgtggacaggagtcacacaaaatggagggagtggtgcttgcaaaagagggc

SEQ ID NO: 85686 - DNA, 60 bp, Artificial
  Synthetic oligonucleotide
tagagttcatcactgaaggcttcacgtggacaggagtcacacaaaatggagggagtggtg

SEQ ID NO: 85687 - DNA, 60 bp, Artificial
  Synthetic oligonucleotide
aatgccttcagcagctgctacccatatgacgtgccagactatgcatctctcagatctcta

SEQ ID NO: 85688 - DNA, 60 bp, Artificial
  Synthetic oligonucleotide
cagcagctgctacccatatgacgtgccagactatgcatctctcagatctctagtggcctc

SEQ ID NO: 85689 - DNA, 60 bp, Artificial
  Synthetic oligonucleotide
tgagatcagacgcacctattgacacatgtatctctgagtgcatcactcctaatggtagca

SEQ ID NO: 85690 - DNA, 60 bp, Artificial
  Synthetic oligonucleotide
ttacgtggacaggagtcacacaaaatggagggagtggtgcttgcaaaagagggcccgcta

SEQ ID NO: 85691 - DNA, 60 bp, Artificial
  Synthetic oligonucleotide
gcgcagcaatgccttcagcaactgctatccatatgacgtgccagactatgcatctctcag

SEQ ID NO: 85692 - DNA, 60 bp, Artificial
  Synthetic oligonucleotide
ctcgatggaagagactgcacactaatggatgctctactaggggaccctcattgtgatgta

SEQ ID NO: 85693 - DNA, 56 bp, Artificial
  Synthetic oligonucleotide
atcaagggtgtggaactgaaatctggatacaaagattggattctatggatttcctt

SEQ ID NO: 85694 - DNA, 60 bp, Artificial
  Synthetic oligonucleotide
gacacatgtatctctgagtgcatcactcctaacggtagcatccccaatgacaagcccttt

SEQ ID NO: 85695 - DNA, 60 bp, Artificial
  Synthetic oligonucleotide
ggacaggagtcacacaaaatggagggagtggtgcttgcaaaagagggcccgctaatggct

SEQ ID NO: 85696 - DNA, 60 bp, Artificial
  Synthetic oligonucleotide
gggagttcatcatccaagcacaaaccaagagcaaaccagtctgtatgttcaggcatcagg

SEQ ID NO: 85697 - DNA, 60 bp, Artificial
  Synthetic oligonucleotide
ggggtccatcatccaagcacaaaccaagagcaaaccaatttgtatgttcaggcatcagga

SEQ ID NO: 85698 - DNA, 60 bp, Artificial
  Synthetic oligonucleotide
catcatccaagcacaaaccaagagcaaaccaatttgtatgttcaggcatcgggaagggtc

SEQ ID NO: 85699 - DNA, 60 bp, Artificial
  Synthetic oligonucleotide
ctaaaagtcagaaatggctgggtacaaaatagtaaagagcagatcagaaagcaagttgtg

SEQ ID NO: 85700 - DNA, 60 bp, Artificial
  Synthetic oligonucleotide
tcagggtttgaaatcctaaaagtcagaaatggctgggtacaaaatagtaaagagcagatc

SEQ ID NO: 85701 - DNA, 60 bp, Artificial
  Synthetic oligonucleotide
gagcagatcaaaaggcaagttgtggttgataacttaaattggtcaggatacagcggctcc

SEQ ID NO: 85702 - DNA, 60 bp, Artificial
  Synthetic oligonucleotide
agagcagatcaaaaggcaagttgtggttgataacttaaattggtcaggatacagcggctc

SEQ ID NO: 85703 - DNA, 60 bp, Artificial
  Synthetic oligonucleotide
agtaacgggccctgattccaaagcagtggcagtggtgcattatgggggaattcccactga

SEQ ID NO: 85704 - DNA, 60 bp, Artificial
  Synthetic oligonucleotide
tgtgtttgtagagacaactggactggaaccaacaggccagtattggttatctctccagat

SEQ ID NO: 85705 - DNA, 60 bp, Artificial
  Synthetic oligonucleotide
cctgaatggtcctatatagtggaaaaggaaaacccggcgaatggtctgtgttacccaggc

SEQ ID NO: 85706 - DNA, 60 bp, Artificial
  Synthetic oligonucleotide
cctgaatggtcctatatagtggaaaaggaaaatccggcgcacggtctgtgctatccaggc

SEQ ID NO: 85707 - DNA, 60 bp, Artificial
  Synthetic oligonucleotide
agtgtacctgaatggtcctatatagtggaaaaggaaaacccggcgaatggtctgtgttac

SEQ ID NO: 85708 - DNA, 60 bp, Artificial
  Synthetic oligonucleotide
agtgtacctgaatggtcctatatagtggaaaaggaaaacccggcgaatggtctgtgctac

SEQ ID NO: 85709 - DNA, 60 bp, Artificial
  Synthetic oligonucleotide
gaagtacctgaatggtcctatatagtggaaaaggaaaatccggcgcacggtctgtgctat

SEQ ID NO: 85710 - DNA, 60 bp, Artificial
  Synthetic oligonucleotide
aaagtacctgaatggtcctatatagtggaaaaggaaaatccggcgcacggtctgtgctat

SEQ ID NO: 85711 - DNA, 60 bp, Artificial
  Synthetic oligonucleotide
ctcatccttctgttcacagtagtgaaaggggaccaaatatgcatcgggtaccatgctaac

SEQ ID NO: 85712 - DNA, 60 bp, Artificial
  Synthetic oligonucleotide
ctcatcctcctgttcacagtagtgaaaggggaccaaatatgtatcggataccatgccaac

SEQ ID NO: 85713 - DNA, 60 bp, Artificial
  Synthetic oligonucleotide
ctcatcctcctgttcacagtagtgaaaggggaccaaatatgcatcgggtaccatgctaac

SEQ ID NO: 85714 - DNA, 60 bp, Artificial
  Synthetic oligonucleotide
ctcatcctcctgttcacagtagtgaaaggggaccaaatatgtatcgggtaccatgccaac

SEQ ID NO: 85715 - DNA, 60 bp, Artificial
  Synthetic oligonucleotide
ataaatgtgatgatgaatgcatggatagtgtcaggaatgggacatatgattatcccaaat

SEQ ID NO: 85716 - DNA, 60 bp, Artificial
  Synthetic oligonucleotide
ggctccttgtcactggcaatcatgatagctgggatttctttctggatgtgctctaatggg

SEQ ID NO: 85717 - DNA, 60 bp, Artificial
  Synthetic oligonucleotide
gctttgagttttatcataaatgtgatgatgaatgcatgaatagtgtcaggaatgggacat

SEQ ID NO: 85718 - DNA, 60 bp, Artificial
  Synthetic oligonucleotide
ccaaggaaatagggaacggatgctttgagttttatcataaatgtgatgatgaatgcatgg

SEQ ID NO: 85719 - DNA, 60 bp, Artificial
  Synthetic oligonucleotide
gccaaggaaatagggaacggatgctttgagttttatcataaatgtgatgatgaatgcatg

SEQ ID NO: 85720 - DNA, 60 bp, Artificial
  Synthetic oligonucleotide
acccattgacaataggtgagtgtcccaaatatgtaaagtcagatagattggttttggcaa

SEQ ID NO: 85721 - DNA, 60 bp, Artificial
  Synthetic oligonucleotide
cccattgacaataggtgaatgtcccaaatatgtaaagtcagatagattggttttggcaac

SEQ ID NO: 85722 - DNA, 60 bp, Artificial
  Synthetic oligonucleotide
acccattgacaataggtgagtgtcccaagtatgtaaagtcagatagattggttttggcaa

SEQ ID NO: 85723 - DNA, 60 bp, Artificial
  Synthetic oligonucleotide
cacctttctcatcctcctgttcacagtagtgaaaggggaccaaatatgcatcgggtacca

SEQ ID NO: 85724 - DNA, 50 bp, Artificial
  Synthetic oligonucleotide
gtcataaattttgagagcactggtaatttaattgcaccagaatacggttt

SEQ ID NO: 85725 - DNA, 60 bp, Artificial
  Synthetic oligonucleotide
agtgaaattgagcaatatgggggtttatcaaatacttgctatatacgctacagtagcagg

SEQ ID NO: 85726 - DNA, 60 bp, Artificial
  Synthetic oligonucleotide
agtgaaattgagcaatatgggggtttatcaaatacttgctatatacgctacagtggcagg

SEQ ID NO: 85727 - DNA, 56 bp, Artificial
  Synthetic oligonucleotide
ggggtttatcaaatacttgctatatacgctacagtagcaggctccttgtcactggc

SEQ ID NO: 85728 - DNA, 56 bp, Artificial
  Synthetic oligonucleotide
ggggtttatcaaatacttgctatatacgctacagtggcaggctccttgtcactggc

SEQ ID NO: 85729 - DNA, 60 bp, Artificial
  Synthetic oligonucleotide
gaatgcatggatagtgtcaggaatgggacatatgattatcccaaatatgaagaagaatcc

SEQ ID NO: 85730 - DNA, 60 bp, Artificial
  Synthetic oligonucleotide
cagtagcaggctccttgtcactggcaatcatgatagctgggatttctttctggatgtgct

SEQ ID NO: 85731 - DNA, 56 bp, Artificial
  Synthetic oligonucleotide
tgggatgtcataaattttgagagcactggtaatttaattgcaccagaatacggttt

SEQ ID NO: 85732 - DNA, 60 bp, Artificial
  Synthetic oligonucleotide
attgagagacaatgccaaggaaatagggaacggatgctttgagttttatcataaatgtga

SEQ ID NO: 85733 - DNA, 60 bp, Artificial
  Synthetic oligonucleotide
gagacaatgccaaggaaatagggaatggatgctttgagttttatcataaatgtgatgatg

SEQ ID NO: 85734 - DNA, 60 bp, Artificial
  Synthetic oligonucleotide
cttttcacaacattcacccattgacaataggtgagtgccccaaatatgtaaagtcagata

SEQ ID NO: 85735 - DNA, 60 bp, Artificial
  Synthetic oligonucleotide
ggagagactgcacactaatagatgctctactaggggaccctcattgtgatgtattccaag

SEQ ID NO: 85736 - DNA, 60 bp, Artificial
  Synthetic oligonucleotide
cctcatcaggaaccctagagttcatcactgaaggctttacgtggacaggagtcacacaaa

SEQ ID NO: 85737 - DNA, 60 bp, Artificial
  Synthetic oligonucleotide
ccataattcctaacattgggtccagtccttgggtcagaggccaatcaggaagaataagca

SEQ ID NO: 85738 - DNA, 60 bp, Artificial
  Synthetic oligonucleotide
ttaggatttgtgtttacgctcaccgtgcccagtgagcgaggactgcagcgtagacgcttt

SEQ ID NO: 85739 - DNA, 60 bp, Artificial
  Synthetic oligonucleotide
ggccataatcaagaaatacacatcaggaagacaagagaagaatcccgcactcaggatgaa

SEQ ID NO: 85740 - DNA, 60 bp, Artificial
  Synthetic oligonucleotide
ccgaatattggatccaggccttgggtcaggggccaatcagggaggataagcatctactgg

SEQ ID NO: 85741 - DNA, 60 bp, Artificial
  Synthetic oligonucleotide
gaggtcatgtttttgttataagggaaccatttgtttcttgctctccaacagaatgcagga

SEQ ID NO: 85742 - DNA, 60 bp, Artificial
  Synthetic oligonucleotide
atcggaagattctacatacagatgtgcactgagctcaagctcagtgacaatgagggaaga

SEQ ID NO: 85743 - DNA, 60 bp, Artificial
  Synthetic oligonucleotide
ggaattggaagattctacatacagatgtgcactgagctcaagctcagtgacaatgaggga

SEQ ID NO: 85744 - DNA, 60 bp, Artificial
  Synthetic oligonucleotide
ggtggaattggaagattctacatacagatgtgcactgaattcaaactcagcgactatgaa

SEQ ID NO: 85745 - DNA, 60 bp, Artificial
  Synthetic oligonucleotide
ggaatcggaagattctacatacagatgtgcactgagctcaagctcagtgacaatgaggga

SEQ ID NO: 85746 - DNA, 60 bp, Artificial
  Synthetic oligonucleotide
agagatctaatgtcacagtcccgcactcgcgagatactaacaaaaaccactgtggaccat

SEQ ID NO: 85747 - DNA, 60 bp, Artificial
  Synthetic oligonucleotide
actgagcaatcttgcaaaaggagagaaggctaatgtgctaattgggcaaggagacgtggt

SEQ ID NO: 85748 - DNA, 60 bp, Artificial
  Synthetic oligonucleotide
gctaataggattggccaacttgggtctgaacattgggcttcatttcaaggtaggagacac

SEQ ID NO: 85749 - DNA, 60 bp, Artificial
  Synthetic oligonucleotide
aacatattcatcatcaatgatgtgggagatcaacggtcctgagtcagtgcttgtcaacac

SEQ ID NO: 85750 - DNA, 60 bp, Artificial
  Synthetic oligonucleotide
cttggttcaactccttcctcacacatgcactgaaatagttgtggcagtgctactatttgc

SEQ ID NO: 85751 - DNA, 60 bp, Artificial
  Synthetic oligonucleotide
cttggttcaactccttcctcacacatgcactgaaatagttgtggcaatgctgctatttgc

SEQ ID NO: 85752 - DNA, 60 bp, Artificial
  Synthetic oligonucleotide
cggaagcgggaactgtgatgcaccaataaccggagggagcccagatcctggcgtaaaagg

SEQ ID NO: 85753 - DNA, 60 bp, Artificial
  Synthetic oligonucleotide
tcggggtacagtgggtctttcactctgccagtagaattgtctggaaaagattgcttggtc

SEQ ID NO: 85754 - DNA, 60 bp, Artificial
  Synthetic oligonucleotide
cagtataggatatacaaagcaaatcagggtaagatagttggccaaacggatatcagcttt

SEQ ID NO: 85755 - DNA, 60 bp, Artificial
  Synthetic oligonucleotide
ctccagatcaggatttgagatactaagagtaaagaacggttggacacaaacgagtaaaga

SEQ ID NO: 85756 - DNA, 60 bp, Artificial
  Synthetic oligonucleotide
cagggaaccgatgtatggatggggcggacaattagtcgaacctccagatcaggatttgag

SEQ ID NO: 85757 - DNA, 60 bp, Artificial
  Synthetic oligonucleotide
tgcagggctgcccagcgatactccaagaggggaagatgcccaatttactgggtcatgcac

SEQ ID NO: 85758 - DNA, 60 bp, Artificial
  Synthetic oligonucleotide
taagaattggttccaggggacatgtttttgttataagggagcctttcgtctcttgttcgc

SEQ ID NO: 85759 - DNA, 60 bp, Artificial
  Synthetic oligonucleotide
gtggaaacagcgggatctgtaacgagacagtagtgagggaatacaatgagacagtcagga

SEQ ID NO: 85760 - DNA, 60 bp, Artificial
  Synthetic oligonucleotide
ggaggacatattgaagagtgttcttgctaccctaatgatgggaaagtggaatgcgtatgt

SEQ ID NO: 85761 - DNA, 60 bp, Artificial
  Synthetic oligonucleotide
tatcagctttaatggaggacatattgaagagtgttcttgctaccctaatgatgggaaagt

SEQ ID NO: 85762 - DNA, 60 bp, Artificial
  Synthetic oligonucleotide
ccattggctccatatcattaggattggttgtattcaatgttctgctgcatgtcgtgagca

SEQ ID NO: 85763 - DNA, 60 bp, Artificial
  Synthetic oligonucleotide
ctcaccggatctctcttacagagttgggtatttatgtgcagggctgcccagcgatactcc

SEQ ID NO: 85764 - DNA, 60 bp, Artificial
  Synthetic oligonucleotide
ggtcatgcactagccccatggggaatcaggggtatggtgtaaaaggcttcggatttcgac

SEQ ID NO: 85765 - DNA, 60 bp, Artificial
  Synthetic oligonucleotide
ctgcccagcgatactccaagaggggaagatgcccaatttactgggtcatgcactagcccc

SEQ ID NO: 85766 - DNA, 60 bp, Artificial
  Synthetic oligonucleotide
ggatttcgacagggaaccgatgtatggatggggcggacaattagtcgaacctccagatca

SEQ ID NO: 85767 - DNA, 60 bp, Artificial
  Synthetic oligonucleotide
gccccatggggaatcaggggtatggtgtaaaaggcttcggatttcgacagggaaccgatg

SEQ ID NO: 85768 - DNA, 50 bp, Artificial
  Synthetic oligonucleotide
ttttgttataagggagcctttcgtctcttgttcgcccacggaatgcagaa

SEQ ID NO: 85769 - DNA, 51 bp, Artificial
  Synthetic oligonucleotide
tagaagcccattcaggactctcatgagtgtcgaagtaggccaatcacccaa

SEQ ID NO: 85770 - DNA, 60 bp, Artificial
  Synthetic oligonucleotide
cagtagcagtagttcattatggaggggtgcctactgatgtcgtcaattcctgggcagggg

SEQ ID NO: 85771 - DNA, 60 bp, Artificial
  Synthetic oligonucleotide
gggcaggggatatattaaggacccaagaatcatcctgcacttgcattcaaggtaattgct

SEQ ID NO: 85772 - DNA, 60 bp, Artificial
  Synthetic oligonucleotide
aaggtaattgctattgggtaatgactgacggtcccgccaataggcaggcacagtatagga

SEQ ID NO: 85773 - DNA, 60 bp, Artificial
  Synthetic oligonucleotide
gggtaatgactgacggtcccgccaataggcaggcacagtataggatatacaaagcaaatc

SEQ ID NO: 85774 - DNA, 60 bp, Artificial
  Synthetic oligonucleotide
gagcaggttaggaagcaagtagttgttgataatttgaactggtcggggtacagtgggtct

SEQ ID NO: 85775 - DNA, 60 bp, Artificial
  Synthetic oligonucleotide
caaagcaaatcagggtaagatagttggccaaacggatatcagctttaatggaggacatat

SEQ ID NO: 85776 - DNA, 60 bp, Artificial
  Synthetic oligonucleotide
tgagatactaagagtaaagaacggttggacacaaacgagtaaagagcaggttaggaagca

SEQ ID NO: 85777 - DNA, 60 bp, Artificial
  Synthetic oligonucleotide
cgagtaaagagcaggttaggaagcaagtagttgttgataatttgaactggtcggggtaca

SEQ ID NO: 85778 - DNA, 59 bp, Artificial
  Synthetic oligonucleotide
ttttgggttgaaatgatcagaggcaagccagaagagaaaacaatctggacttccagcag

SEQ ID NO: 85779 - DNA, 60 bp, Artificial
  Synthetic oligonucleotide
ttgcttggtcccttgtttttgggttgaaatgatcagaggcaagccagaagagaaaacaat

SEQ ID NO: 85780 - DNA, 60 bp, Artificial
  Synthetic oligonucleotide
ctgcatgtcgtgagcatcatagtgacagtattaatccttgggagaggtggaaacagcggg

SEQ ID NO: 85781 - DNA, 60 bp, Artificial
  Synthetic oligonucleotide
cgagttgaatgctcctaattatcattacgaggagtgttcctgttatcctgatgctggcga

SEQ ID NO: 85782 - DNA, 60 bp, Artificial
  Synthetic oligonucleotide
ggtagtcaaatcagtcgagttgaatgctcctaattatcattacgaggagtgttcctgtta

SEQ ID NO: 85783 - DNA, 58 bp, Artificial
  Synthetic oligonucleotide
caggactttctttctgactcaaggggccttgttgaatgacaaacattccaatggaacc

SEQ ID NO: 85784 - DNA, 58 bp, Artificial
  Synthetic oligonucleotide
attcaaggtttgaatcagttgcttggtcagcgagtgcttgccatgatggcattagttg

SEQ ID NO: 85785 - DNA, 60 bp, Artificial
  Synthetic oligonucleotide
ctatagaaccttaatgagctgtcctgttggtgaagccccctctccatacaattcaaggtt

SEQ ID NO: 85786 - DNA, 60 bp, Artificial
  Synthetic oligonucleotide
gacactatcaaaagttggagaaacaacatattgaggacacaagagtctgagtgtgcctgc

SEQ ID NO: 85787 - DNA, 60 bp, Artificial
  Synthetic oligonucleotide
aacagacactatcaaaagttggagaaacaacatattgaggacacaagagtctgagtgtgc

SEQ ID NO: 85788 - DNA, 60 bp, Artificial
  Synthetic oligonucleotide
gcctgcataaatggttcttgctttactataatgactgatggaccaagtaatggtcaggcc

SEQ ID NO: 85789 - DNA, 60 bp, Artificial
  Synthetic oligonucleotide
ctgagtgtgcctgcataaatggttcttgctttactataatgactgatggaccaagtaatg

SEQ ID NO: 85790 - DNA, 60 bp, Artificial
  Synthetic oligonucleotide
atctcgatatgggttagccattcaatccagactggaggtcaaaaccaccctgaaacatgc

SEQ ID NO: 85791 - DNA, 60 bp, Artificial
  Synthetic oligonucleotide
gggttagccattcaatccagactggaggtcaaaaccaccctgaaacatgcaatcaaagtg

SEQ ID NO: 85792 - DNA, 60 bp, Artificial
  Synthetic oligonucleotide
caataactgattggtcagggtatagcgggagttttgtgcagcatccagaattaacaggac

SEQ ID NO: 85793 - DNA, 60 bp, Artificial
  Synthetic oligonucleotide
tggcatggttcgaatcgaccatgggtgtctttcaatcagaatttagaatatcagatagga

SEQ ID NO: 85794 - DNA, 60 bp, Artificial
  Synthetic oligonucleotide
cgaccatgggtgtctttcaatcagaatttagaatatcagataggatacatatgcagcggg

SEQ ID NO: 85795 - DNA, 60 bp, Artificial
  Synthetic oligonucleotide
gttcctgttatcctgatgctggcgaggtaatgtgtgtgtgcagagataactggcatggtt

SEQ ID NO: 85796 - DNA, 60 bp, Artificial
  Synthetic oligonucleotide
cctgatgctggcgaggtaatgtgtgtgtgcagagataactggcatggttcgaatcgacca

SEQ ID NO: 85797 - DNA, 60 bp, Artificial
  Synthetic oligonucleotide
tttaaatacggcaatggtgtttggataggaagaactaaaagcactagttcaaggagtggg

SEQ ID NO: 85798 - DNA, 60 bp, Artificial
  Synthetic oligonucleotide
tcagataggatacatatgcagcggggtttttggagacaatccacgccccaatgatggaac

SEQ ID NO: 85799 - DNA, 60 bp, Artificial
  Synthetic oligonucleotide
gtaaaagggttttcatttaaatacggcaatggtgtttggataggaagaactaaaagcact

SEQ ID NO: 85800 - DNA, 60 bp, Artificial
  Synthetic oligonucleotide
gtgcagcatccagaattaacaggactggactgcataagaccttgcttctgggttgaactg

SEQ ID NO: 85801 - DNA, 60 bp, Artificial
  Synthetic oligonucleotide
ttaacaggactggactgcataagaccttgcttctgggttgaactgattaggggaaggccc

SEQ ID NO: 85802 - DNA, 56 bp, Artificial
  Synthetic oligonucleotide
ggttgaactgattaggggaaggcccaaggagaatacaatctggactagtgggagca

SEQ ID NO: 85803 - DNA, 60 bp, Artificial
  Synthetic oligonucleotide
gagcagatcaaaaggcaagttgtggtcgataacttaaattggtcaggatacagtggttct

SEQ ID NO: 85804 - DNA, 60 bp, Artificial
  Synthetic oligonucleotide
agagcagatcaaaaggcaagttgtggtcgataacttaaattggtcaggatacagtggttc

SEQ ID NO: 85805 - DNA, 60 bp, Artificial
  Synthetic oligonucleotide
gtgtagtaccaaatattggcagtagaccatgggtgagaggccaaagcggcaggatcagct

SEQ ID NO: 85806 - DNA, 60 bp, Artificial
  Synthetic oligonucleotide
agtgtagtaccaaatattggcagtagaccatgggtgagaggccaaagcggcaggatcagc

SEQ ID NO: 85807 - DNA, 60 bp, Artificial
  Synthetic oligonucleotide
tcagagggaggcccaaagagagtagtgtactttggacttcaaatagcattgtagctctct

SEQ ID NO: 85808 - DNA, 60 bp, Artificial
  Synthetic oligonucleotide
tgcgattagaataggggaggatgcccacatccttgtcacaagagaaccatatctctcatg

SEQ ID NO: 85809 - DNA, 60 bp, Artificial
  Synthetic oligonucleotide
gaataggggaggatgcccacatccttgtcacaagagaaccatatctctcatgtggaccac

SEQ ID NO: 85810 - DNA, 60 bp, Artificial
  Synthetic oligonucleotide
agaataggggaggatgcccacatccttgtcacaagagaaccatatctctcatgtggacca

SEQ ID NO: 85811 - DNA, 60 bp, Artificial
  Synthetic oligonucleotide
ccttcaaacattgaaaataagagtacatgaggggtatgaagagttcacaatggtcgggag

SEQ ID NO: 85812 - DNA, 60 bp, Artificial
  Synthetic oligonucleotide
atggtgaagacgcaactgctggtctcacccatttgatgatctggcattccaatctgaatg

SEQ ID NO: 85813 - DNA, 60 bp, Artificial
  Synthetic oligonucleotide
aaaacccttgtgtgaagtaaactcatggcacatcctatctaaggacaatgcaattagaat

SEQ ID NO: 85814 - DNA, 60 bp, Artificial
  Synthetic oligonucleotide
atcgaaggattggtttatggcaatccttcttgtgatctgctattgggagggaaagaatgg

SEQ ID NO: 85815 - DNA, 60 bp, Artificial
  Synthetic oligonucleotide
ccagacacaatctggaatgtgacttacactggaacaagccaagcatgttcgaattcattc

SEQ ID NO: 85816 - DNA, 60 bp, Artificial
  Synthetic oligonucleotide
ggattggtttatggcaatccttcttgtgatctgctattgggagggaaagaatggtcctac

SEQ ID NO: 85817 - DNA, 60 bp, Artificial
  Synthetic oligonucleotide
cgactgccgcctcatctcttgtgcttgcaatggggtttgctgcctttctgttctgggcca

SEQ ID NO: 85818 - DNA, 57 bp, Artificial
  Synthetic oligonucleotide
gttaccctgggaaggtagaaaacctggaagaactcaggtcctttttcagttctgcga

SEQ ID NO: 85819 - DNA, 60 bp, Artificial
  Synthetic oligonucleotide
ctttccagacacaatctggaatgtgacttacactggaacaagccaagcatgttcgaattc

SEQ ID NO: 85820 - DNA, 60 bp, Artificial
  Synthetic oligonucleotide
ccaggtcagacattgcgagtgaggtccaatgggaatctaattgccccatggtatggacac

SEQ ID NO: 85821 - DNA, 60 bp, Artificial
  Synthetic oligonucleotide
ggacatctgggcatacaatgcagagttactagtactgcttgaaaatcagaaaacactcga

SEQ ID NO: 85822 - DNA, 60 bp, Artificial
  Synthetic oligonucleotide
ccagacacaatctggaatgtgacttacactggaacaagccaagcatgttcgaattcgttc

SEQ ID NO: 85823 - DNA, 60 bp, Artificial
  Synthetic oligonucleotide
ccagacacaatctggaatgtgacttacactggaacaagcaaagcatgttcgaattcattc

SEQ ID NO: 85824 - DNA, 60 bp, Artificial
  Synthetic oligonucleotide
ccggaatacggatacagcagaacatctcataatatggggaattcatcacccttccagcac

SEQ ID NO: 85825 - DNA, 60 bp, Artificial
  Synthetic oligonucleotide
ggctgcaggatgtttgctctgagccaaggcacaacactcagagggcgacatgcaaatggg

SEQ ID NO: 85826 - DNA, 60 bp, Artificial
  Synthetic oligonucleotide
gggtgcaggatgtttgctctaagtcaaggcacaacactcagagggcgacatgcaaatggg

SEQ ID NO: 85827 - DNA, 60 bp, Artificial
  Synthetic oligonucleotide
acaagggtgcaggatgtttgctctaagtcaaggcacaacactcagagggcgacatgcaaa

SEQ ID NO: 85828 - DNA, 60 bp, Artificial
  Synthetic oligonucleotide
actactgggcaaacaaagaatgcttcaatccctgcttttatgtggaactaatcagaggga

SEQ ID NO: 85829 - DNA, 60 bp, Artificial
  Synthetic oligonucleotide
gagggaggcccaaagagagtagtgtactgtggacttcaaatagcatagtagctctctgtg

SEQ ID NO: 85830 - DNA, 60 bp, Artificial
  Synthetic oligonucleotide
ctattgcttgaagtggagcaagagataagaactttctcgtttcagcttatttgataataa

SEQ ID NO: 85831 - DNA, 60 bp, Artificial
  Synthetic oligonucleotide
tgagcagataacatttatgcaagccctacaactactgcttgaagtggagcaagagataag

SEQ ID NO: 85832 - DNA, 60 bp, Artificial
  Synthetic oligonucleotide
cagaagagatcaaaaggcattaaagggaagaggcagcacacttggactcgacctgcgagt

SEQ ID NO: 85833 - DNA, 60 bp, Artificial
  Synthetic oligonucleotide
agagaaattgacaataacatattcatcatcaatgatgtgggagatcaacggtcctgagtc

SEQ ID NO: 85834 - DNA, 60 bp, Artificial
  Synthetic oligonucleotide
attgacaataacatattcatcatcaatgatgtgggagatcaacggtcctgagtcagtgct

SEQ ID NO: 85835 - DNA, 60 bp, Artificial
  Synthetic oligonucleotide
ccttgtgtgaagtaaactcatggcacatcctatctaaggacaatgcaattagaatagggg

SEQ ID NO: 85836 - DNA, 60 bp, Artificial
  Synthetic oligonucleotide
attatgggggaattcccactgatgtaatcaattcctgggcaggagatattctaaggactc

SEQ ID NO: 85837 - DNA, 60 bp, Artificial
  Synthetic oligonucleotide
gggaatgatgtttggatgggaagaacaatcagtaaagattcgcgctcaggctatgagact

SEQ ID NO: 85838 - DNA, 60 bp, Artificial
  Synthetic oligonucleotide
tgggaatgatgtttggatgggaagaacaatcagcaaggattcacgctcaggttatgagac

SEQ ID NO: 85839 - DNA, 60 bp, Artificial
  Synthetic oligonucleotide
gcgcagaatgccataagcaccacattcccatatactggagatcctccatacagccatggg

SEQ ID NO: 85840 - DNA, 60 bp, Artificial
  Synthetic oligonucleotide
cgcaaaatgctataagcaccacattcccatatactggagatcctccatacagccatggaa

SEQ ID NO: 85841 - DNA, 54 bp, Artificial
  Synthetic oligonucleotide
ctgagaatggcaacaggactaagaaatgtcccttccattcaatccaggggactt

SEQ ID NO: 85842 - DNA, 60 bp, Artificial
  Synthetic oligonucleotide
ctgagaatggcaacaggactaagaaatgtcccttccattcaatccaggggacttttcgga

SEQ ID NO: 85843 - DNA, 51 bp, Artificial
  Synthetic oligonucleotide
ttgagaagatgaacactcaattcactgcagtgggcaaggaattcaataatt

SEQ ID NO: 85844 - DNA, 60 bp, Artificial
  Synthetic oligonucleotide
gtatccagtaattaagggaacttacaacaacactggaaaccagccaatcctctatttctg

SEQ ID NO: 85845 - DNA, 60 bp, Artificial
  Synthetic oligonucleotide
ctgtatggctctggcgatcggtatgttaggatgggaactgagagcatgaattttgccaag

SEQ ID NO: 85846 - DNA, 60 bp, Artificial
  Synthetic oligonucleotide
aaaacatttcagaatgtgagccctctgtggataggagaatgccccaagtatgtgaaaagt

SEQ ID NO: 85847 - DNA, 60 bp, Artificial
  Synthetic oligonucleotide
tttcccaaaagcacatggacaggggtagacaccagcagtggggtaacaaaagcttgtcct

SEQ ID NO: 85848 - DNA, 60 bp, Artificial
  Synthetic oligonucleotide
cagagggcttttcggagctatcgcaggttttattgaaggaggatggactggaatgataga

SEQ ID NO: 85849 - DNA, 60 bp, Artificial
  Synthetic oligonucleotide
gtgagccctctgtggataggagaatgccccaagtatgtgaaaagtgaaagtctaaggctt

SEQ ID NO: 85850 - DNA, 60 bp, Artificial
  Synthetic oligonucleotide
gggtggtatggctatcatcatgagaattctcaaggctcgggatatgcagcagacagagaa

SEQ ID NO: 85851 - DNA, 60 bp, Artificial
  Synthetic oligonucleotide
gaatgatagatgggtggtatggctatcatcatgagaattctcaaggctcgggatatgcag

SEQ ID NO: 85852 - DNA, 60 bp, Artificial
  Synthetic oligonucleotide
aaataaagttaattccatcatcgacaagatgaacacacaattcgaagctgtcgaccacga

SEQ ID NO: 85853 - DNA, 60 bp, Artificial
  Synthetic oligonucleotide
tgcaagatcttgaataaggcccctctcgacctaaaaggatgcaccatagagggttggatc

SEQ ID NO: 85854 - DNA, 60 bp, Artificial
  Synthetic oligonucleotide
ggacatacaatgctgaactgttggttcttcttgagaacgaaagaacactggacctgcatg

SEQ ID NO: 85855 - DNA, 60 bp, Artificial
  Synthetic oligonucleotide
aaggattgacaatctgaacaaacgaatggaagacggatttttggatgtttggacatacaa

SEQ ID NO: 85856 - DNA, 60 bp, Artificial
  Synthetic oligonucleotide
gggaacttacaacaacactggaaaccagccaatcctctatttctggggtgtgcaccatcc

SEQ ID NO: 85857 - DNA, 60 bp, Artificial
  Synthetic oligonucleotide
gcattgggtatcatgccaacaattcaacaacacaggtggatacgatacttgagaagaatg

SEQ ID NO: 85858 - DNA, 60 bp, Artificial
  Synthetic oligonucleotide
gctggtcatatatagtggaaagacctactgcccaaaatgggatatgctacccaggagctt

SEQ ID NO: 85859 - DNA, 60 bp, Artificial
  Synthetic oligonucleotide
catgccagactattgcaggagtcctaaggaccaataaaacatttcagaatgtgagccctc

SEQ ID NO: 85860 - DNA, 60 bp, Artificial
  Synthetic oligonucleotide
tatgctacccaggagctttgagtgaggtagaagaactgaaagcatttatcgaatcaggag

SEQ ID NO: 85861 - DNA, 60 bp, Artificial
  Synthetic oligonucleotide
taaaggagccgtcttcaagtcaaacttaccaatcgagaattgtgatgccacatgccagac

SEQ ID NO: 85862 - DNA, 60 bp, Artificial
  Synthetic oligonucleotide
agaattgtgatgccacatgccagactattgcaggagtcctaaggaccaataaaacatttc

SEQ ID NO: 85863 - DNA, 60 bp, Artificial
  Synthetic oligonucleotide
aatgggatatgctacccaggagctttgagtgaggtagaagaactgaaagcatttatcgaa

SEQ ID NO: 85864 - DNA, 60 bp, Artificial
  Synthetic oligonucleotide
agacaagatctgcattgggtatcatgccaacaattcaacaacacaggtggatacgatact

SEQ ID NO: 85865 - DNA, 60 bp, Artificial
  Synthetic oligonucleotide
gcaatcattgtaatagcgatactggcagcagccggaaagtcagacaagatctgcattggg

SEQ ID NO: 85866 - DNA, 60 bp, Artificial
  Synthetic oligonucleotide
aaggaagaaagattctgcaagatcttgaataaggcccctctcgacctaaaaggatgcacc

SEQ ID NO: 85867 - DNA, 60 bp, Artificial
  Synthetic oligonucleotide
gctctggcgatcggtatgttaggatgggaactgagagcatgaattttgccaagggcccgg

SEQ ID NO: 85868 - DNA, 60 bp, Artificial
  Synthetic oligonucleotide
ttttgccaagggcccggaaattgcagcaagacccgctgtgaatggccaaagaggtcgaat

SEQ ID NO: 85869 - DNA, 60 bp, Artificial
  Synthetic oligonucleotide
gccaagggcccggaaattgcagcaagacccgctgtgaatggccaaagaggtcgaattgat

SEQ ID NO: 85870 - DNA, 60 bp, Artificial
  Synthetic oligonucleotide
gaggtcgaattgattattactggtctgttttaaaaccaggagaaactttgaatgtggaat

SEQ ID NO: 85871 - DNA, 60 bp, Artificial
  Synthetic oligonucleotide
tgcttggtgaccaaagctggtcatatatagtggaaagacctactgcccaaaatgggatat

SEQ ID NO: 85872 - DNA, 60 bp, Artificial
  Synthetic oligonucleotide
gggacaatgctaatgatttaggaaatggatgctttgaattttggcataaatgtgacaatg

SEQ ID NO: 85873 - DNA, 60 bp, Artificial
  Synthetic oligonucleotide
gctgaactgttggttcttcttgagaacgaaagaacactggacctgcatgacgcgaatgtg

SEQ ID NO: 85874 - DNA, 60 bp, Artificial
  Synthetic oligonucleotide
gacctgcatgacgcgaatgtgaagaacctatatgaaagggtcaaatcgcaactaagggac

SEQ ID NO: 85875 - DNA, 60 bp, Artificial
  Synthetic oligonucleotide
gtaggactgatcttagcaatgggtctttggatgtgttcgaacggctcaatgcagtgcagg

SEQ ID NO: 85876 - DNA, 60 bp, Artificial
  Synthetic oligonucleotide
aggatgcaccatagagggttggatcttggggaatccccaatgcgacctgttgcttggtga

SEQ ID NO: 85877 - DNA, 60 bp, Artificial
  Synthetic oligonucleotide
ttgccatttatagtacggtatcgagcagcctagtattggtaggactgatcttagcaatgg

SEQ ID NO: 85878 - DNA, 60 bp, Artificial
  Synthetic oligonucleotide
ttggtaggactgatcttagcaatgggtctttggatgtgttcgaacggctcaatgcagtgc

SEQ ID NO: 85879 - DNA, 60 bp, Artificial
  Synthetic oligonucleotide
gcagcagacagagaaagtactcaaaaggctatagacgggattacaaataaagttaattcc

SEQ ID NO: 85880 - DNA, 60 bp, Artificial
  Synthetic oligonucleotide
gccagaatgccactgaaatcagagcatctgttgggagaatggttggtggaatcggaagat

SEQ ID NO: 85881 - DNA, 60 bp, Artificial
  Synthetic oligonucleotide
cgccagaatgccactgaaatcagagcatctgttgggagaatggttggtggaatcgggaga

SEQ ID NO: 85882 - DNA, 60 bp, Artificial
  Synthetic oligonucleotide
caacattctcaaagggaaattccaaacagcagcacaacgagcaatgatggaccaggtacg

SEQ ID NO: 85883 - DNA, 60 bp, Artificial
  Synthetic oligonucleotide
ggaagggctccaacagaccttggatgagaatcaacaacgagaccatactagaaacaggat

SEQ ID NO: 85884 - DNA, 60 bp, Artificial
  Synthetic oligonucleotide
gcgcaaaatgccataagcaccacattcccatatactggagaccctccatacagccatggg

SEQ ID NO: 85885 - DNA, 60 bp, Artificial
  Synthetic oligonucleotide
gaacatgctgggagcagatgtacactccaggaggggaagtgagaaatgatgatgttgacc

SEQ ID NO: 85886 - DNA, 60 bp, Artificial
  Synthetic oligonucleotide
cagggaacatgctgggagcagatgtacactccaggaggggaagtgagaaatgatgatgtt

SEQ ID NO: 85887 - DNA, 60 bp, Artificial
  Synthetic oligonucleotide
atggaagttgttttcccaaatgaagtgggagctagaatactaacatcggagtcacaactg

SEQ ID NO: 85888 - DNA, 50 bp, Artificial
  Synthetic oligonucleotide
tccttgatggaagggactgtacactgatagatgccctactgggagacccc

SEQ ID NO: 85889 - DNA, 60 bp, Artificial
  Synthetic oligonucleotide
agaatccttgatggaagggactgtacactgatagatgccctactgggagacccccactgt

SEQ ID NO: 85890 - DNA, 54 bp, Artificial
  Synthetic oligonucleotide
agaatccttgatggaagggactgtacactgatagatgccctactgggagacccc

SEQ ID NO: 85891 - DNA, 60 bp, Artificial
  Synthetic oligonucleotide
gggtcctcatcggaggacttgaatggaatgataacacggttcgagtctctgaaactctac

SEQ ID NO: 85892 - DNA, 60 bp, Artificial
  Synthetic oligonucleotide
cggttccagatcaaaggtgttgagctaaaatctgggtacaaagactggatcctgtggatt

SEQ ID NO: 85893 - DNA, 60 bp, Artificial
  Synthetic oligonucleotide
ccccggaagtggaaactgtgatgcaccgataaccggagggagcccagatcctggcgtaaa

SEQ ID NO: 85894 - DNA, 60 bp, Artificial
  Synthetic oligonucleotide
accagcaaacaataaagcagcaactaagataatctatttcaaagaagggaagatacaaaa

SEQ ID NO: 85895 - DNA, 60 bp, Artificial
  Synthetic oligonucleotide
gccctacttatcctgtgatccacaaggctgcagaatgtttgctctaagccaaggcacaac

SEQ ID NO: 85896 - DNA, 60 bp, Artificial
  Synthetic oligonucleotide
cagagtgtgtatgccataaaggaatttgtccagtagtcatgacagatggaccagcaaaca

SEQ ID NO: 85897 - DNA, 60 bp, Artificial
  Synthetic oligonucleotide
cacatcatgccacgatggcatatcaagaatgtcaatatgcatgtcaggaccaaacaataa

SEQ ID NO: 85898 - DNA, 60 bp, Artificial
  Synthetic oligonucleotide
caaacaataacgcatcagctgtagtgtggtatgggggtagaccaatgacagaaattccat

SEQ ID NO: 85899 - DNA, 60 bp, Artificial
  Synthetic oligonucleotide
actattgggcaaacaaagaatgctttaatccttgtttctatgtggagctaattagaggga

SEQ ID NO: 85900 - DNA, 60 bp, Artificial
  Synthetic oligonucleotide
ggcttgggaggacaattagcaaagacactagatcaggttacgaaatgttgaaagtcccaa

SEQ ID NO: 85901 - DNA, 60 bp, Artificial
  Synthetic oligonucleotide
ggtgaagatgaatccaaatcagaagataatatgcatctcagcaacaggaatgacactatc

SEQ ID NO: 85902 - DNA, 60 bp, Artificial
  Synthetic oligonucleotide
atggtcctggcatgatggtgctgaaatcatctactttaagtaggaatgatttaggaaaaa

SEQ ID NO: 85903 - DNA, 60 bp, Artificial
  Synthetic oligonucleotide
ggtgattgtcaataaccaaaactggtcgggatactcaggagcattcatagactattgggc

SEQ ID NO: 85904 - DNA, 60 bp, Artificial
  Synthetic oligonucleotide
gcttccaggtagattgctttctttggcatgtccgcaaaagatttgcagaccaagagatgg

SEQ ID NO: 85905 - DNA, 60 bp, Artificial
  Synthetic oligonucleotide
caaacactgtgtcaagcttccaggtagattgctttctttggcatgtccgcaaaagatttg

SEQ ID NO: 85906 - DNA, 60 bp, Artificial
  Synthetic oligonucleotide
ctgacagccagacagcgaccagaagaattcggatggccatcaattagtgtcgaattgttt

SEQ ID NO: 85907 - DNA, 60 bp, Artificial
  Synthetic oligonucleotide
gttggtatgggtttaggcaccagaatgcagaaggaacaggaacagcggcagatctcaaat

SEQ ID NO: 85908 - DNA, 60 bp, Artificial
  Synthetic oligonucleotide
taggcaccagaatgcagaaggaacaggaacagcggcagatctcaaatccactcaggcagc

SEQ ID NO: 85909 - DNA, 60 bp, Artificial
  Synthetic oligonucleotide
gcaaggctttacatctggggagttcatcacccttcgacagacacagagcaaaccaacctg

SEQ ID NO: 85910 - DNA, 60 bp, Artificial
  Synthetic oligonucleotide
cagacacagagcaaaccaacctgtacaagaataaccctggaagagtcactgtgtctacca

SEQ ID NO: 85911 - DNA, 60 bp, Artificial
  Synthetic oligonucleotide
agtcaaacaagtgtagtgcctaacattagcagcagacccttggtgagaggacaaagcggc

SEQ ID NO: 85912 - DNA, 60 bp, Artificial
  Synthetic oligonucleotide
gagccaggagacttgatagtcttcaacacaatagggaatctaattgcttcgagaggccat

SEQ ID NO: 85913 - DNA, 60 bp, Artificial
  Synthetic oligonucleotide
attgccgaagaattccaatggaacacggtgaagcaaaatggaaaatccggagcctgcaag

SEQ ID NO: 85914 - DNA, 60 bp, Artificial
  Synthetic oligonucleotide
caatggggattatgcaaggctttacatctggggagttcatcacccttcgacagacacaga

SEQ ID NO: 85915 - DNA, 60 bp, Artificial
  Synthetic oligonucleotide
gtgtctaccaaaactagtcaaacaagtgtagtgcctaacattagcagcagacccttggtg

SEQ ID NO: 85916 - DNA, 60 bp, Artificial
  Synthetic oligonucleotide
gaagaagtatgttgaggacacaaagattgatttatggtcatataatgcagagctattagt

SEQ ID NO: 85917 - DNA, 60 bp, Artificial
  Synthetic oligonucleotide
acccttggtgagaggacaaagcggcagagattgtttctactggactattgtagagccagg

SEQ ID NO: 85918 - DNA, 60 bp, Artificial
  Synthetic oligonucleotide
tactgcaattcccataggctcatgtgtcagcaaatgtcacacagacaaaggttctctctc

SEQ ID NO: 85919 - DNA, 60 bp, Artificial
  Synthetic oligonucleotide
gccaatgggactatggtaaagaccctagccgatgatcaagtggaagtggtcactgcacag

SEQ ID NO: 85920 - DNA, 60 bp, Artificial
  Synthetic oligonucleotide
tcgagaggccattacaaagttaacaatcagaagaagagcacaattctaaatactgcaatt

SEQ ID NO: 85921 - DNA, 60 bp, Artificial
  Synthetic oligonucleotide
cgctaagggttttgcacccttttccaaagacaatggaataagaattggatcgagaggcca

SEQ ID NO: 85922 - DNA, 60 bp, Artificial
  Synthetic oligonucleotide
caagggatttgcacccttttccaaagacaatggaataagaattggatcgagaggtcatgt

SEQ ID NO: 85923 - DNA, 60 bp, Artificial
  Synthetic oligonucleotide
tcattgtgtgacgctaagggttttgcacccttttccaaagacaatggaataagaattgga

SEQ ID NO: 85924 - DNA, 60 bp, Artificial
  Synthetic oligonucleotide
cgctaagggttttgcacccttttccaaagacaatggaataagaattggatcaaggggtca

SEQ ID NO: 85925 - DNA, 56 bp, Artificial
  Synthetic oligonucleotide
cagacagcgaccaaaagaattcggatggccatcaattagtgtcgaattgtttaaaa

SEQ ID NO: 85926 - DNA, 60 bp, Artificial
  Synthetic oligonucleotide
aataaggggaaagaagtgcttgtgctctggggggtgcaccaccctccaactgtcaatgag

SEQ ID NO: 85927 - DNA, 60 bp, Artificial
  Synthetic oligonucleotide
gcgacccaccgctgtggacacttgttatccatttgatgtgccggattatcagagcctacg

SEQ ID NO: 85928 - DNA, 60 bp, Artificial
  Synthetic oligonucleotide
tgacgccggctcagaccgagtgatggtatcacctctggctgtgacatggtggaataggaa

SEQ ID NO: 85929 - DNA, 60 bp, Artificial
  Synthetic oligonucleotide
cctcaccatttattcgactgccgcctcatctcttgtgcttgcaatggggtttgctgcctt

SEQ ID NO: 85930 - DNA, 60 bp, Artificial
  Synthetic oligonucleotide
gttaccctggaaatgtagagaacctggaagaactcaggtcctttttcagttctgctaatt

SEQ ID NO: 85931 - DNA, 60 bp, Artificial
  Synthetic oligonucleotide
tgaagagctcagacggcagaaatagtgaatttagcttgtccttcatgaaaaaatgccttg

SEQ ID NO: 85932 - DNA, 60 bp, Artificial
  Synthetic oligonucleotide
agcaaaagcaggggataattcattaatcatgaagaccattattgctttaagctacgtttt

SEQ ID NO: 85933 - DNA, 60 bp, Artificial
  Synthetic oligonucleotide
agcaaaagcaggggataattcattaatcatgaagaccgttattgctttaagctgcatttt

SEQ ID NO: 85934 - DNA, 60 bp, Artificial
  Synthetic oligonucleotide
ctaagtcaggaaacgcatatcctgtattgaacgtgactatgccaaacaatgacaattttg

SEQ ID NO: 85935 - DNA, 60 bp, Artificial
  Synthetic oligonucleotide
caggaaacgcatatcctgtattgaacgtgactatgccaaacaatgacaattttgacaaac

SEQ ID NO: 85936 - DNA, 60 bp, Artificial
  Synthetic oligonucleotide
cccagtgttgaacgtgactatgccaaacaatgacaattttgacaaactatacatctgggg

SEQ ID NO: 85937 - DNA, 60 bp, Artificial
  Synthetic oligonucleotide
gactatgccaaacaatgacaattttgacaaactatacatctggggagttcaccacccgag

SEQ ID NO: 85938 - DNA, 60 bp, Artificial
  Synthetic oligonucleotide
gatcacatacggagcatgtcccaaatatgtgaagcagaacaccctgaagttggcaacagg

SEQ ID NO: 85939 - DNA, 60 bp, Artificial
  Synthetic oligonucleotide
gtcccaaatatgtgaagcagaacaccctgaagttggcaacaggaatgcggaatgtacctg

SEQ ID NO: 85940 - DNA, 60 bp, Artificial
  Synthetic oligonucleotide
ccccaatgacaagcccttccaaaatgtaaacaagatcacatacggagcatgtcccaaata

SEQ ID NO: 85941 - DNA, 60 bp, Artificial
  Synthetic oligonucleotide
caaaatgtgaacaagatcacatacggagcatgtcccaaatatgtgaagcagaacaccctg

SEQ ID NO: 85942 - DNA, 60 bp, Artificial
  Synthetic oligonucleotide
ccagaaggcaactgagggaaaatgctgaagacatgggtaacggttgtttcaaaatatacc

SEQ ID NO: 85943 - DNA, 60 bp, Artificial
  Synthetic oligonucleotide
cccaaatatgtgaagcagaacaccctgaagttggcaacaggaatgcggaatgtacctgag

SEQ ID NO: 85944 - DNA, 60 bp, Artificial
  Synthetic oligonucleotide
tgctgaagacatgggcaatggttgtttcaagatataccacaagtgtgacaatgcctgcat

SEQ ID NO: 85945 - DNA, 60 bp, Artificial
  Synthetic oligonucleotide
gacatgggcaatggttgtttcaagatataccacaagtgtgacaatgcctgcatagagtca

SEQ ID NO: 85946 - DNA, 60 bp, Artificial
  Synthetic oligonucleotide
gcctgcatagagtcaattaggaacgggacttatgaccatgacatatacagagatgaggca

SEQ ID NO: 85947 - DNA, 60 bp, Artificial
  Synthetic oligonucleotide
atgcctgcatagagtcaattaggaacgggacttatgaccatgacatatacagagatgagg

SEQ ID NO: 85948 - DNA, 60 bp, Artificial
  Synthetic oligonucleotide
ataccacaagtgtgacaatgcctgcatagagtcaattaggaacgggacttatgaccatga

SEQ ID NO: 85949 - DNA, 60 bp, Artificial
  Synthetic oligonucleotide
cggttgtttcaaaatataccacaagtgtgacaatgcctgcatagagtcaattaggaacgg

SEQ ID NO: 85950 - DNA, 60 bp, Artificial
  Synthetic oligonucleotide
ccggttccagatcaagggtgttgagctgaaatctggatacaaagactggatcctgtggat

SEQ ID NO: 85951 - DNA, 60 bp, Artificial
  Synthetic oligonucleotide
aaccggttccagatcaagggtgttgagctgaaatctggatacaaagactggatcctgtgg

SEQ ID NO: 85952 - DNA, 60 bp, Artificial
  Synthetic oligonucleotide
ggaacgggacttatgaccatgacatatacagggatgaggcattgaacaaccggttccaga

SEQ ID NO: 85953 - DNA, 60 bp, Artificial
  Synthetic oligonucleotide
ttaggaacgggacttatgaccatgacatatacagggatgaggcattgaacaaccggttcc

SEQ ID NO: 85954 - DNA, 60 bp, Artificial
  Synthetic oligonucleotide
gacaaactatacatctggggagttcaccacccgagtacaaatcaagaacaaaccgacctg

SEQ ID NO: 85955 - DNA, 60 bp, Artificial
  Synthetic oligonucleotide
gacaattttgacaaactatacatctggggagttcaccacccgagtacaaatcaagaacaa

SEQ ID NO: 85956 - DNA, 60 bp, Artificial
  Synthetic oligonucleotide
ccaggagaagccaacagactataatcccgaacattggatctagaccctgggtaaggggcc

SEQ ID NO: 85957 - DNA, 60 bp, Artificial
  Synthetic oligonucleotide
cgacctgtatgttcaagcctcaggaagagtcacagtctctaccaggagaagccaacagac

SEQ ID NO: 85958 - DNA, 60 bp, Artificial
  Synthetic oligonucleotide
atcaatagtaatggaaatctaatcgctcctcggggctacttcaagatgcgcactgggaaa

SEQ ID NO: 85959 - DNA, 60 bp, Artificial
  Synthetic oligonucleotide
cctaacattggatctagaccctgggtaaggggtcaatctggcagaataagcatctactgg

SEQ ID NO: 85960 - DNA, 60 bp, Artificial
  Synthetic oligonucleotide
gctcgataatgaggtcagatgcacctattgacacctgtatttctgaatgcatcaccccaa

SEQ ID NO: 85961 - DNA, 60 bp, Artificial
  Synthetic oligonucleotide
aatctaatcgctcctcggggctacttcaagatgcgcactgggaaaagctcgataatgagg

SEQ ID NO: 85962 - DNA, 60 bp, Artificial
  Synthetic oligonucleotide
ccccaaatggaagcatccccaatgacaagccctttcaaaatgtgaacaagatcacatacg

SEQ ID NO: 85963 - DNA, 60 bp, Artificial
  Synthetic oligonucleotide
cacctgcatttctgaatgcatcactccaaatggaagcatccccaatgacaagcccttcca

SEQ ID NO: 85964 - DNA, 60 bp, Artificial
  Synthetic oligonucleotide
tggattggagagtgccccaagtatgtcaaaagtaagaacctaaaactagcaactggtctg

SEQ ID NO: 85965 - DNA, 60 bp, Artificial
  Synthetic oligonucleotide
ccctaagaacacatggcaaggagtagatactagtagcggagtttcgagtgcttgccccta

SEQ ID NO: 85966 - DNA, 60 bp, Artificial
  Synthetic oligonucleotide
ctggggtgtgcaccatcctccagatgacgtcgagcaagctaatctgtatggacttggtac

SEQ ID NO: 85967 - DNA, 60 bp, Artificial
  Synthetic oligonucleotide
atggtagacggttggtacggatatcatcatgaaaattcacagggatctggttatgcagca

SEQ ID NO: 85968 - DNA, 60 bp, Artificial
  Synthetic oligonucleotide
aatggaagatggatttttagacgtgtggacatacaatgctgaacttctggttctgctgga

SEQ ID NO: 85969 - DNA, 60 bp, Artificial
  Synthetic oligonucleotide
ctgatccgtactcagtggtaaaggggacttacaccaatacagactctcaaccaatcttat

SEQ ID NO: 85970 - DNA, 60 bp, Artificial
  Synthetic oligonucleotide
gcagcagataaagagagcacccagaaagctatagatgggatcaccaataaagtcaattca

SEQ ID NO: 85971 - DNA, 60 bp, Artificial
  Synthetic oligonucleotide
acagtgacacactcagtggagctcctagagagcaagaaggagagtagattctgcagagtc

SEQ ID NO: 85972 - DNA, 60 bp, Artificial
  Synthetic oligonucleotide
aaccaggagaaactttgaaagtggaatccaatgggaatttaatagctccttggtatgctt

SEQ ID NO: 85973 - DNA, 60 bp, Artificial
  Synthetic oligonucleotide
ccaatcttatatttctggggtgtgcaccatcctccagatgacgtcgagcaagctaatctg

SEQ ID NO: 85974 - DNA, 60 bp, Artificial
  Synthetic oligonucleotide
gaacctaaaactagcaactggtctgaggaatgtcccacaggtgaaaacacgaggattgtt

SEQ ID NO: 85975 - DNA, 58 bp, Artificial
  Synthetic oligonucleotide
aggagtattgaaagaaacggaggagctgaaagcactcattgggtctatagatagcata

SEQ ID NO: 85976 - DNA, 60 bp, Artificial
  Synthetic oligonucleotide
aaaatcagtgatgctggaaaatctgggaatatatcaaatccttgctatttatagtacggt

SEQ ID NO: 85977 - DNA, 60 bp, Artificial
  Synthetic oligonucleotide
aatgttagtccagtctggattggagagtgccccaagtatgtcaaaagtaagaacctaaaa

SEQ ID NO: 85978 - DNA, 60 bp, Artificial
  Synthetic oligonucleotide
gagcatgagttctcaaatctagagaggagaataggcaatctgaacaaaagaatggaagat

SEQ ID NO: 85979 - DNA, 60 bp, Artificial
  Synthetic oligonucleotide
aactggtctgaggaatgtcccacaggtgaaaacacgaggattgtttggagcaatagctgg

SEQ ID NO: 85980 - DNA, 58 bp, Artificial
  Synthetic oligonucleotide
catcaaatcggttaaaaatggtacatatgactatccaaaataccaagaagagagcaga

SEQ ID NO: 85981 - DNA, 52 bp, Artificial
  Synthetic oligonucleotide
ctgaaatagcagatagaccgcctgcgaatggacaacgaggaagaattgatta

SEQ ID NO: 85982 - DNA, 60 bp, Artificial
  Synthetic oligonucleotide
tattaatcatgaagaccatcattgttctaagttatcttttctgtctggctctcggccaag

SEQ ID NO: 85983 - DNA, 60 bp, Artificial
  Synthetic oligonucleotide
gcccattatcaggaagtgcccagcatatagaggaatgttcctgttatccccgttatccag

SEQ ID NO: 85984 - DNA, 60 bp, Artificial
  Synthetic oligonucleotide
ttcgttaaagaggggaaaattgtacatatcagcccattatcaggaagtgcccagcatata

SEQ ID NO: 85985 - DNA, 60 bp, Artificial
  Synthetic oligonucleotide
gggaaaattgtacatatcagcccattatcaggaagtgcccagcatatagaggaatgttcc

SEQ ID NO: 85986 - DNA, 60 bp, Artificial
  Synthetic oligonucleotide
gaatgtatttgcatcaatggaacctgtacagtagtaatgactgatggaagtgcatcagga

SEQ ID NO: 85987 - DNA, 60 bp, Artificial
  Synthetic oligonucleotide
cgtctgcatcaatggaacttgtacagtagtaatgactgatggaagtgcatcaggaagggc

SEQ ID NO: 85988 - DNA, 60 bp, Artificial
  Synthetic oligonucleotide
gctcaagctgccatgatgggaaagcatggttacatgtttgtgtcactggggatgatagaa

SEQ ID NO: 85989 - DNA, 60 bp, Artificial
  Synthetic oligonucleotide
agaatgcgtctgcatcaatggaacttgtacagtagtaatgactgatggaagtgcatcagg

SEQ ID NO: 85990 - DNA, 60 bp, Artificial
  Synthetic oligonucleotide
ggattggtcgaaaccgcagtgtcagattacagggtttgctcctttctccaaggacaactc

SEQ ID NO: 85991 - DNA, 60 bp, Artificial
  Synthetic oligonucleotide
ggtctagctcaagctgccatgacggaaaggcatggttacatgtttgtgtcactggggatg

SEQ ID NO: 85992 - DNA, 60 bp, Artificial
  Synthetic oligonucleotide
gttatgagactttcagggtcattggtggttggactatggctaattccaaatcccaggtga

SEQ ID NO: 85993 - DNA, 60 bp, Artificial
  Synthetic oligonucleotide
gggaagaacaatcagcaaggattcacgttcaggttatgagactttcagggtcattggtgg

SEQ ID NO: 85994 - DNA, 60 bp, Artificial
  Synthetic oligonucleotide
gatgggaagaacaatcagcaaggattcacgctcaggttatgagactttcagggtcattgg

SEQ ID NO: 85995 - DNA, 60 bp, Artificial
  Synthetic oligonucleotide
aaatgatgtttggatgggaagaacaatcagcaaggattcacgttcaggttatgagacttt

SEQ ID NO: 85996 - DNA, 60 bp, Artificial
  Synthetic oligonucleotide
attgtccatattagcccattatcaggaagtgcccagcatatagaggaatgttcctgttat

SEQ ID NO: 85997 - DNA, 60 bp, Artificial
  Synthetic oligonucleotide
atgagactttcagggtcattggtggttggaccacagctaattccaaatcacaggtaaata

SEQ ID NO: 85998 - DNA, 60 bp, Artificial
  Synthetic oligonucleotide
gcatccccaatgacaagccctttcagaatgtaaacaagatcacttacggagcatgcccta

SEQ ID NO: 85999 - DNA, 60 bp, Artificial
  Synthetic oligonucleotide
cactgtgatgtattccaagatgaaacctgggacctttatgtggaacgtagcagcgcattc

SEQ ID NO: 86000 - DNA, 60 bp, Artificial
  Synthetic oligonucleotide
cccccactgtgatgtattccaagatgaaacctgggacctttatgtagaacgtagcagtgc

SEQ ID NO: 86001 - DNA, 60 bp, Artificial
  Synthetic oligonucleotide
ccccactgtgatgtattccaagatgaaacctgggacctctatgtggaacgtagcagcgcc

SEQ ID NO: 86002 - DNA, 60 bp, Artificial
  Synthetic oligonucleotide
ccccactgtgatgtattccaagatgaaacctgggacctttatgtagaacgtagcagtgca

SEQ ID NO: 86003 - DNA, 60 bp, Artificial
  Synthetic oligonucleotide
gcatccccaatgacaaaccctttcagaatgtaaacaagatcacttacggagcatgtccta

SEQ ID NO: 86004 - DNA, 60 bp, Artificial
  Synthetic oligonucleotide
cattgtgatgtattccaagatgaaacctgggacctttatgtggaacgtagcagtgccttc

SEQ ID NO: 86005 - DNA, 60 bp, Artificial
  Synthetic oligonucleotide
gcatccccaatgacaggccttttcaaaatgtaaacaagatcacttacggagcatgtccta

SEQ ID NO: 86006 - DNA, 60 bp, Artificial
  Synthetic oligonucleotide
gcatccccaatgacaagccttttcaaaatgtaaacaagatcacttacggagcatgcccta

SEQ ID NO: 86007 - DNA, 60 bp, Artificial
  Synthetic oligonucleotide
aaaatgccactgaaatcagagcatctgttgggagaatggttggtggaatcgggagattct

SEQ ID NO: 86008 - DNA, 60 bp, Artificial
  Synthetic oligonucleotide
caagggacggaaaagttgacaataacttactcatcatcaatgatgtgggagatcaatggt

SEQ ID NO: 86009 - DNA, 60 bp, Artificial
  Synthetic oligonucleotide
caagggacagagaagctgacaataacttactcatcatcaatgatgtgggagatcaatggt

SEQ ID NO: 86010 - DNA, 60 bp, Artificial
  Synthetic oligonucleotide
ctgaaagtcagaaatggctgggtacaaaatagtaaagagcagatcaaaaggcaagttgtg

SEQ ID NO: 86011 - DNA, 60 bp, Artificial
  Synthetic oligonucleotide
agagcagatcagaaagcaagttgtggttgataacttaaattggtcaggatacagtggttc

SEQ ID NO: 86012 - DNA, 60 bp, Artificial
  Synthetic oligonucleotide
tgtcaagaaaggagattcagcaatcatgagaagtgaattggagtatggtaactgtgacac

SEQ ID NO: 86013 - DNA, 60 bp, Artificial
  Synthetic oligonucleotide
gcattgtcaaaggtgaccaaatctgcattggttatcatgcaaacaattcgacggagcagg

SEQ ID NO: 86014 - DNA, 55 bp, Artificial
  Synthetic oligonucleotide
atggtcatacatcgtggaaaaagataatccagtcaatggcctgtgctatccagga

SEQ ID NO: 86015 - DNA, 60 bp, Artificial
  Synthetic oligonucleotide
atgcctcatcaggagtgagttcggcatgcccataccatggtagatcttcctttttcagga

SEQ ID NO: 86016 - DNA, 60 bp, Artificial
  Synthetic oligonucleotide
gagatcaatcccagaaatagccactagacccaaagtgaacggacaaagtgggagaatgga

SEQ ID NO: 86017 - DNA, 60 bp, Artificial
  Synthetic oligonucleotide
tcttaccattggggagtgcccaaagtatgtcaaatctgacaaactggttcttgcaacagg

SEQ ID NO: 86018 - DNA, 60 bp, Artificial
  Synthetic oligonucleotide
gctgcagacaaagaatctacccagaaagcaatcgatgggatcaccaataaagtaaactca

SEQ ID NO: 86019 - DNA, 60 bp, Artificial
  Synthetic oligonucleotide
tgaacagggaggaaatagacggggtcaaattggaatcaatgggcacctatcaaatactat

SEQ ID NO: 86020 - DNA, 60 bp, Artificial
  Synthetic oligonucleotide
agcaaaagcaggggtacaaactataaaatggaaagaatagtgattgccctcgcaataatc

SEQ ID NO: 86021 - DNA, 60 bp, Artificial
  Synthetic oligonucleotide
gtttttagacgtatggacttacaatgcagaacttctcgtgctcatggaaaacgaaagaac

SEQ ID NO: 86022 - DNA, 60 bp, Artificial
  Synthetic oligonucleotide
agctggatggctcctcggaaaccctatgtgtgacgaattccttaatgtgccagagtggtc

SEQ ID NO: 86023 - DNA, 60 bp, Artificial
  Synthetic oligonucleotide
tagctggatggctcctcggaaaccctatgtgtgacgaattccttaatgtgccagagtggt

SEQ ID NO: 86024 - DNA, 60 bp, Artificial
  Synthetic oligonucleotide
tcctggcccaaccatgaagcctcatcaggagtaagctctgcatgtccatacaatgggagg

SEQ ID NO: 86025 - DNA, 52 bp, Artificial
  Synthetic oligonucleotide
ctacgaagaactgaaacatctattaagttgtacgaaacattttgagaaaatt

SEQ ID NO: 86026 - DNA, 60 bp, Artificial
  Synthetic oligonucleotide
ggttgtttcgagttctaccataaatgtgacaatgaatgtatggaaagcatcagaaacgga

SEQ ID NO: 86027 - DNA, 60 bp, Artificial
  Synthetic oligonucleotide
gtttcgagttctaccataaatgtgacaatgaatgtatggaaagcatcagaaacggaacat

SEQ ID NO: 86028 - DNA, 60 bp, Artificial
  Synthetic oligonucleotide
cgactacagcttaaggataatgcaagggaactgggtaatggttgtttcgagttctaccat

SEQ ID NO: 86029 - DNA, 60 bp, Artificial
  Synthetic oligonucleotide
ggtaatggttgtttcgagttctaccataaatgtgacaatgaatgtatggaaagcatcaga

SEQ ID NO: 86030 - DNA, 60 bp, Artificial
  Synthetic oligonucleotide
aacggaacatataactatccacagtattcagaagaggcaagactgaacagggaagaaata

SEQ ID NO: 86031 - DNA, 60 bp, Artificial
  Synthetic oligonucleotide
aagcatcagaaacggaacatataactatccacagtattcagaagaggcaagactaaacag

SEQ ID NO: 86032 - DNA, 60 bp, Artificial
  Synthetic oligonucleotide
gcatcagaaacggaacatataactatccacagtattcagaagaggcaagactaaacaggg

SEQ ID NO: 86033 - DNA, 60 bp, Artificial
  Synthetic oligonucleotide
aagaactctagattttcatgacgcaaacgtcaagagcctttacgacaaggttcgactaca

SEQ ID NO: 86034 - DNA, 60 bp, Artificial
  Synthetic oligonucleotide
gaactctagattttcatgaggcaaacgtcaagagcctttacgacaaggttcgactacagc

SEQ ID NO: 86035 - DNA, 60 bp, Artificial
  Synthetic oligonucleotide
gcctttacgacaaggttcgactacagcttaaggataatgcaagggaactgggtaatggtt

SEQ ID NO: 86036 - DNA, 60 bp, Artificial
  Synthetic oligonucleotide
ggtttctagatgtttggacttataatgctgaacttctagttctcatggaaaatgaaagaa

SEQ ID NO: 86037 - DNA, 60 bp, Artificial
  Synthetic oligonucleotide
tctcatggaaaatgaaagaactctagattttcatgacgcaaacgtcaagagcctttacga

SEQ ID NO: 86038 - DNA, 60 bp, Artificial
  Synthetic oligonucleotide
gacaaggttcgactacagcttaaggataatgcaagggaactgggtaatggttgtttcgag

SEQ ID NO: 86039 - DNA, 60 bp, Artificial
  Synthetic oligonucleotide
caaggttcgactacagcttaaggataatgcaagggaactgggtaatggttgtttcgagtt

SEQ ID NO: 86040 - DNA, 60 bp, Artificial
  Synthetic oligonucleotide
gaatatggtaactgcaatactaagtgtcaaactccaataggtgcgataaattccagcatg

SEQ ID NO: 86041 - DNA, 60 bp, Artificial
  Synthetic oligonucleotide
gggaattcaccatcctaatgatgcagcagagcaaaccaagctctatcaaaacccaaccac

SEQ ID NO: 86042 - DNA, 60 bp, Artificial
  Synthetic oligonucleotide
gagtaatggaaacttcattgctccagagtatgcctataaaattgtcaagaagggggactc

SEQ ID NO: 86043 - DNA, 60 bp, Artificial
  Synthetic oligonucleotide
ttctaatactgtggggaattcaccatcctaatgatgcagcagagcaaaccaagctctatc

SEQ ID NO: 86044 - DNA, 60 bp, Artificial
  Synthetic oligonucleotide
ctggcccaaccatgaagcctcatcaggagtaagctctgcatgtccatacaatgggaggtc

SEQ ID NO: 86045 - DNA, 60 bp, Artificial
  Synthetic oligonucleotide
caatgggaggtcttcttttttcaggaatgtggtatggcttatcaaaaaggacaatgcata

SEQ ID NO: 86046 - DNA, 60 bp, Artificial
  Synthetic oligonucleotide
ctgcaatactaagtgtcaaactccaataggtgcgataaattccagcatgccactccacaa

SEQ ID NO: 86047 - DNA, 54 bp, Artificial
  Synthetic oligonucleotide
ggtctatttggagctatggcaggcttcatagaggggggatggcagggaatggta

SEQ ID NO: 86048 - DNA, 54 bp, Artificial
  Synthetic oligonucleotide
ccaaatacgtgaaatcagatagattggtccttgcaactggactcaggaacaccc

SEQ ID NO: 86049 - DNA, 60 bp, Artificial
  Synthetic oligonucleotide
ttccagcatgccactccacaatatacatcctcttaccattggagaatgccccaaatacgt

SEQ ID NO: 86050 - DNA, 60 bp, Artificial
  Synthetic oligonucleotide
ccaataggtgcgataaattccagcatgccattccacaatatacatcctcttaccattgga

SEQ ID NO: 86051 - DNA, 60 bp, Artificial
  Synthetic oligonucleotide
actaagtgtcaaactccaataggtgcgataaattccagcatgccattccacaatatacat

SEQ ID NO: 86052 - DNA, 60 bp, Artificial
  Synthetic oligonucleotide
taccattggagaatgccccaaatacgtgaaatcagatagattggtccttgcaactggact

SEQ ID NO: 86053 - DNA, 60 bp, Artificial
  Synthetic oligonucleotide
caatatacatcctcttaccattggagaatgccccaaatacgtgaaatcagatagattggt

SEQ ID NO: 86054 - DNA, 60 bp, Artificial
  Synthetic oligonucleotide
ccagcatgccactccacaatatacatcctcttaccattggagaatgccccaaatacgtga

SEQ ID NO: 86055 - DNA, 60 bp, Artificial
  Synthetic oligonucleotide
gccaaggcacaacactcagagggcggcatgcgaatgggactatacatgataggagcccgt

SEQ ID NO: 86056 - DNA, 60 bp, Artificial
  Synthetic oligonucleotide
gggagagaccctaagaaaaccggaggaccaatctacagaaggagagatggaaaatgggtg

SEQ ID NO: 86057 - DNA, 60 bp, Artificial
  Synthetic oligonucleotide
cagtgtgtcatcatcctgcaacaccactgagatttacaatgaaactgtaaggctggaaac

SEQ ID NO: 86058 - DNA, 60 bp, Artificial
  Synthetic oligonucleotide
agtgacaaaagaaagcagtgtgtcatcatcctgcaacaccactgagatttacaatgaaac

SEQ ID NO: 86059 - DNA, 60 bp, Artificial
  Synthetic oligonucleotide
cctgcaacaccactgagatttacaatgaaactgtaaggctggaaactataacaattccta

SEQ ID NO: 86060 - DNA, 60 bp, Artificial
  Synthetic oligonucleotide
catcctgcaacaccactgagatttacaatgaaactgtaaggctggaaactataacaattc

SEQ ID NO: 86061 - DNA, 60 bp, Artificial
  Synthetic oligonucleotide
caacacagaacctctctgcaatgtatccgggtttgcaatagtttccaaggacaatggaat

SEQ ID NO: 86062 - DNA, 60 bp, Artificial
  Synthetic oligonucleotide
cctctctgcaatgtatccgggtttgcaatagtttccaaggacaatggaatcagaataggg

SEQ ID NO: 86063 - DNA, 60 bp, Artificial
  Synthetic oligonucleotide
aaacaatacagaacctctctgcaatgtatcagggtttgcaatagtttccaaggacaatgg

SEQ ID NO: 86064 - DNA, 60 bp, Artificial
  Synthetic oligonucleotide
atgaggacctgagctataatgtgggttatttatgtgctggaataccgacagacaccccac

SEQ ID NO: 86065 - DNA, 60 bp, Artificial
  Synthetic oligonucleotide
gaggacctgagctataatgtgggttatttatgtgctggaataccgacagacaccccacgg

SEQ ID NO: 86066 - DNA, 60 bp, Artificial
  Synthetic oligonucleotide
tttgatgaggacctggactatgaggtgggttatttatgtgctggaataccgacagacact

SEQ ID NO: 86067 - DNA, 60 bp, Artificial
  Synthetic oligonucleotide
gagaagacaaggaggcaactaagggagaatgctgaagacatgggcaatggttgcttcaag

SEQ ID NO: 86068 - DNA, 55 bp, Artificial
  Synthetic oligonucleotide
gggaaattcatatcctgaactaagcaaatcatacacgaacaacaagggaaaagaa

SEQ ID NO: 86069 - DNA, 60 bp, Artificial
  Synthetic oligonucleotide
agtgcatcaccctccaagcaccaacgaacaacaaaatctctaccagaatgctaatgcgta

SEQ ID NO: 86070 - DNA, 60 bp, Artificial
  Synthetic oligonucleotide
gaataccccccttgcaactgggaaaatgcaacgtagcgggatggcttcttggcaacccag

SEQ ID NO: 86071 - DNA, 60 bp, Artificial
  Synthetic oligonucleotide
ccttgcaactgggaaaatgcaacgtagcgggatggcttcttggcaacccagaatgtgacc

SEQ ID NO: 86072 - DNA, 60 bp, Artificial
  Synthetic oligonucleotide
agtcaatttactcgaaagcagccataatggaaaactctgcagcctgaatggaataccccc

SEQ ID NO: 86073 - DNA, 60 bp, Artificial
  Synthetic oligonucleotide
gctcctggccaaatcatgagacaaccaaaggtgttacagccgcatgcccttaccttggga

SEQ ID NO: 86074 - DNA, 60 bp, Artificial
  Synthetic oligonucleotide
taccttgggaacagcaatttttatcggaatttactatggataacaaagaagggaaattca

SEQ ID NO: 86075 - DNA, 60 bp, Artificial
  Synthetic oligonucleotide
gctaagttcagtgtcttcattcgagaaatttgaaattttcccgaaggcaagctcctggcc

SEQ ID NO: 86076 - DNA, 54 bp, Artificial
  Synthetic oligonucleotide
cgagaaatttgaaattttcccgaaggcaagctcctggccaaatcatgagacaac

SEQ ID NO: 86077 - DNA, 60 bp, Artificial
  Synthetic oligonucleotide
acttttcggagcaattgccggatttattgaaggaggatggacaggcatgatagatggatg

SEQ ID NO: 86078 - DNA, 60 bp, Artificial
  Synthetic oligonucleotide
tgccggatttattgaaggaggatggacaggcatgatagatggatggtatgggtaccacca

SEQ ID NO: 86079 - DNA, 60 bp, Artificial
  Synthetic oligonucleotide
tagatggatggtatgggtaccaccatcagaatgagcagggatctggttatgcagctgatc

SEQ ID NO: 86080 - DNA, 60 bp, Artificial
  Synthetic oligonucleotide
gatggatggtatgggtaccaccatcagaatgagcagggatctggttatgcagctgatcag

SEQ ID NO: 86081 - DNA, 60 bp, Artificial
  Synthetic oligonucleotide
atgtcaaacccctcatggagccttaaacagcagcctcccctttcagaacgtacatcctat

SEQ ID NO: 86082 - DNA, 60 bp, Artificial
  Synthetic oligonucleotide
tggagccttaaacagcagcctcccctttcagaacgtacatcctatcaccattggggagtg

SEQ ID NO: 86083 - DNA, 60 bp, Artificial
  Synthetic oligonucleotide
tacatcctatcaccattggggagtgcccaaaatacattaaaagcaccaaactgagaatgg

SEQ ID NO: 86084 - DNA, 60 bp, Artificial
  Synthetic oligonucleotide
caccattggggagtgcccaaaatacattaaaagcaccaaactgagaatggcaacaggact

SEQ ID NO: 86085 - DNA, 60 bp, Artificial
  Synthetic oligonucleotide
gcagctgatcagaaaagcacacaaaatgcaatcgacggaatcactaacaaggtgaactca

SEQ ID NO: 86086 - DNA, 60 bp, Artificial
  Synthetic oligonucleotide
cagctgatcagaaaagcacacaaaatgcaatcgacggaatcactaacaaggtgaactcag

SEQ ID NO: 86087 - DNA, 60 bp, Artificial
  Synthetic oligonucleotide
acagacactgttgacacagtgctggagaagaatgtgactgtgactcattcagtcaattta

SEQ ID NO: 86088 - DNA, 60 bp, Artificial
  Synthetic oligonucleotide
cagttgggtcatcaaaatacaaccggagattcacaccggaaatagcggctagacctaagg

SEQ ID NO: 86089 - DNA, 60 bp, Artificial
  Synthetic oligonucleotide
ctgtactgaaagccgacatcatctgtgtaggctaccatgcaaacaattctacagacactg

SEQ ID NO: 86090 - DNA, 60 bp, Artificial
  Synthetic oligonucleotide
ccgacatcatctgtgtaggctaccatgcaaacaattctacagacactgttgacacagtgc

SEQ ID NO: 86091 - DNA, 51 bp, Artificial
  Synthetic oligonucleotide
agcaaaagcaggggaaaatcaaatcaatcaagatggaagccagactatttg

SEQ ID NO: 86092 - DNA, 60 bp, Artificial
  Synthetic oligonucleotide
gatgtcggatgctccagtccataattgtgacacgaaatgtcaaacccctcatggagcctt

SEQ ID NO: 86093 - DNA, 60 bp, Artificial
  Synthetic oligonucleotide
gattctggaattatgatgtcggatgctccagtccataattgtgacacgaaatgtcaaacc

SEQ ID NO: 86094 - DNA, 60 bp, Artificial
  Synthetic oligonucleotide
ctgttagatcaaggagataccataacatttgaagccaccgggaacttgatagcaccatgg

SEQ ID NO: 86095 - DNA, 60 bp, Artificial
  Synthetic oligonucleotide
ctattattggacactgttagatcaaggagataccataacatttgaagccaccgggaactt

SEQ ID NO: 86096 - DNA, 60 bp, Artificial
  Synthetic oligonucleotide
ccgggaacttgatagcaccatggtatgcattcgcattgaataagaattctgattctggaa

SEQ ID NO: 86097 - DNA, 60 bp, Artificial
  Synthetic oligonucleotide
ctaatgcgtatgtctcagttgggtcatcaaaatacaaccggagattcacaccggaaatag

SEQ ID NO: 86098 - DNA, 60 bp, Artificial
  Synthetic oligonucleotide
ccaagcaccaacgaacaacaaaatctctaccagaatgctaatgcgtatgtctcagttggg

SEQ ID NO: 86099 - DNA, 60 bp, Artificial
  Synthetic oligonucleotide
ccggaaatagcggctagacctaaggtaagagggcaagcaggtagaatgaactattattgg

SEQ ID NO: 86100 - DNA, 60 bp, Artificial
  Synthetic oligonucleotide
cacagtgctggagaagaatgtgactgtgactcattcagtcaatttactcgaaagcagcca

SEQ ID NO: 86101 - DNA, 56 bp, Artificial
  Synthetic oligonucleotide
agatagatggagtgaaattggaatcaatgggagtttaccagattttggcgatctat

SEQ ID NO: 86102 - DNA, 60 bp, Artificial
  Synthetic oligonucleotide
tgttttgaattctaccacaaatgtgatgatgagtgtatggagagtgtgaaaaatggcaca

SEQ ID NO: 86103 - DNA, 60 bp, Artificial
  Synthetic oligonucleotide
gaggaccctagattttcatgactctaatgtgagaaatctgtacgagaaagtcaaatcgca

SEQ ID NO: 86104 - DNA, 60 bp, Artificial
  Synthetic oligonucleotide
atgagaggaccctagattttcatgactctaatgtgagaaatctgtacgagaaagtcaaat

SEQ ID NO: 86105 - DNA, 60 bp, Artificial
  Synthetic oligonucleotide
ggatgtttggacatacaacgccgagttgctcgttctactcgagaatgagaggaccctaga

SEQ ID NO: 86106 - DNA, 60 bp, Artificial
  Synthetic oligonucleotide
ttttctggatgtttggacatacaacgccgagttgctcgttctactcgagaatgagaggac

SEQ ID NO: 86107 - DNA, 60 bp, Artificial
  Synthetic oligonucleotide
ctgcatttaacccaggggacatgctgggagcagatgtacactccaggaggggaagtgaga

SEQ ID NO: 86108 - DNA, 60 bp, Artificial
  Synthetic oligonucleotide
agaggggaaaattgtccacattagtccattgtcaggaagtgctcagcatatagaggaatg

SEQ ID NO: 86109 - DNA, 60 bp, Artificial
  Synthetic oligonucleotide
ggtccagttcaagttgtcatgatgggaaagcatggttgcacgtttgtgtcactggggatg

SEQ ID NO: 86110 - DNA, 60 bp, Artificial
  Synthetic oligonucleotide
catgtttgtgtcactggggatgatagaaatgcaactgctagtttcatttatgatgggatg

SEQ ID NO: 86111 - DNA, 60 bp, Artificial
  Synthetic oligonucleotide
tgtgtcatgcgaccccagtaaatgttatcaatttgcacttgggcaggggaccacactgga

SEQ ID NO: 86112 - DNA, 60 bp, Artificial
  Synthetic oligonucleotide
tgatgggatgcttgttgacagtatcggttcctggtctcaaaatatcctaagaactcagga

SEQ ID NO: 86113 - DNA, 60 bp, Artificial
  Synthetic oligonucleotide
ggatgcttgttgacagtatcggttcctggtctcaaaatatcctaagaactcaggagtcag

SEQ ID NO: 86114 - DNA, 57 bp, Artificial
  Synthetic oligonucleotide
tgatgggatgcttgttgacagtatcggttcctggtctcaaaatatcctcagaactca

SEQ ID NO: 86115 - DNA, 60 bp, Artificial
  Synthetic oligonucleotide
agtcacagaccaatagacaagtcatagttgacaataacaattggtctggttattctggta

SEQ ID NO: 86116 - DNA, 60 bp, Artificial
  Synthetic oligonucleotide
agtcacagaccaatagacaagtcatagttgacaataacaattggtctggttattctggga

SEQ ID NO: 86117 - DNA, 60 bp, Artificial
  Synthetic oligonucleotide
ccaatagacaagtcatagttgacaataacaattggtctggttattctggtattttctctg

SEQ ID NO: 86118 - DNA, 60 bp, Artificial
  Synthetic oligonucleotide
ccaatagacaagtcatagttgacaataacaattggtctggttattctgggattttctctg

SEQ ID NO: 86119 - DNA, 60 bp, Artificial
  Synthetic oligonucleotide
ggaagaacaatcagtaaggattcgcgttcaggctatgagactttcagggtcattggtggc

SEQ ID NO: 86120 - DNA, 60 bp, Artificial
  Synthetic oligonucleotide
gggaagaacaatcagtaaggattcgcgttcaggctatgagactttcagggtcattggtgg

SEQ ID NO: 86121 - DNA, 60 bp, Artificial
  Synthetic oligonucleotide
gctctagcagcagcaactgcagggaccctaataatgagagagggaacccaggagtgaaag

SEQ ID NO: 86122 - DNA, 60 bp, Artificial
  Synthetic oligonucleotide
caaggaacgatgatagctctagcagcagcaactgcagggaccctaataatgagagaggga

SEQ ID NO: 86123 - DNA, 60 bp, Artificial
  Synthetic oligonucleotide
gagagggaatccaggagtaaaagggtgggcctttgacaatgggaatgatgtttggatggg

SEQ ID NO: 86124 - DNA, 60 bp, Artificial
  Synthetic oligonucleotide
gagagagggaatccaggagtaaaagggtgggcctttgacaatgggaatgatgtttggatg

SEQ ID NO: 86125 - DNA, 60 bp, Artificial
  Synthetic oligonucleotide
gcagattatagcattgactccagttatgtgtgttcaggacttgtcggagacacaccaagg

SEQ ID NO: 86126 - DNA, 60 bp, Artificial
  Synthetic oligonucleotide
ttatagcattgactccagttatgtgtgttcaggacttgtcggagacacaccaaggaacga

SEQ ID NO: 86127 - DNA, 60 bp, Artificial
  Synthetic oligonucleotide
cttgtcggagacacaccaaggaacgatgatagctctagcagcagcaactgcagagaccct

SEQ ID NO: 86128 - DNA, 60 bp, Artificial
  Synthetic oligonucleotide
gacttgtcggagacacaccaaggaacgatgatagctctagcagcagcaactgcagagacc

SEQ ID NO: 86129 - DNA, 60 bp, Artificial
  Synthetic oligonucleotide
gagaaccttatgtgtcatgcgacccaagtaaatgttatcaatttgcacttgggcagggga

SEQ ID NO: 86130 - DNA, 60 bp, Artificial
  Synthetic oligonucleotide
aacaagagaaccttatgtgtcatgcgaccccagtaaatgttatcaatttgcacttgggca

SEQ ID NO: 86131 - DNA, 60 bp, Artificial
  Synthetic oligonucleotide
ggctccgtctctctaactattgcaacagtgtgtttcctcatgcagattgccattctaaca

SEQ ID NO: 86132 - DNA, 60 bp, Artificial
  Synthetic oligonucleotide
ggaaaggaagatatggggtgaagggattcagctttagatatggggatggtgtttggatag

SEQ ID NO: 86133 - DNA, 60 bp, Artificial
  Synthetic oligonucleotide
tatgtatgtagcgggatatttggggacaatcccaggcctgtggatggcataggctcatgt

SEQ ID NO: 86134 - DNA, 60 bp, Artificial
  Synthetic oligonucleotide
ggattcgaatggtgtacaggatattatagacaacgataattggtctggttacagcggaag

SEQ ID NO: 86135 - DNA, 60 bp, Artificial
  Synthetic oligonucleotide
ggtgtgggatgctaatggatgggtgtcgacagacaaggattcaaatggtgtacaggatat

SEQ ID NO: 86136 - DNA, 60 bp, Artificial
  Synthetic oligonucleotide
ggtgttaattctgataccacaggttggtcatggcccgatggcgctctattgccctttgac

SEQ ID NO: 86137 - DNA, 60 bp, Artificial
  Synthetic oligonucleotide
ctttctgtggtgttaattctgataccacaggttggtcatggcccgatggcgctctattgc

SEQ ID NO: 86138 - DNA, 60 bp, Artificial
  Synthetic oligonucleotide
caacagggttccattttgaagaatgttcctgttacccgagcgggacagatgttgaatgtg

SEQ ID NO: 86139 - DNA, 53 bp, Artificial
  Synthetic oligonucleotide
cactattctagtggaagagacttgtgcccaataaaggggtgggcacctctgag

SEQ ID NO: 86140 - DNA, 58 bp, Artificial
  Synthetic oligonucleotide
ttttcttgactcagggagccctcctcaatgacaagcattcgaacggaacagtaaaaga

SEQ ID NO: 86141 - DNA, 60 bp, Artificial
  Synthetic oligonucleotide
gggttccattttgaagaatgttcctgttacccgagcgggacagatgttgaatgtgtctgt

SEQ ID NO: 86142 - DNA, 60 bp, Artificial
  Synthetic oligonucleotide
gcatatgtagggacaattggaaaggttccaacaggccttggatgaggattagcaatgaga

SEQ ID NO: 86143 - DNA, 60 bp, Artificial
  Synthetic oligonucleotide
gtaatgacagatggaccagcaaacagacaagcacaatacagagcattcaaagccaaagag

SEQ ID NO: 86144 - DNA, 60 bp, Artificial
  Synthetic oligonucleotide
agttggaggtaatgaaaagaaggctaaactggcaaatgttgtgagaaaaatgatgactaa

SEQ ID NO: 86145 - DNA, 60 bp, Artificial
  Synthetic oligonucleotide
agttggaggcaatgaaaagaaggctaaactggcaaatgttgtgagaaaaatgatgactaa

SEQ ID NO: 86146 - DNA, 60 bp, Artificial
  Synthetic oligonucleotide
agtgcttacaggcaacctccaaacattgaaaataagagtacatgaggggtatgaggaatt

SEQ ID NO: 86147 - DNA, 58 bp, Artificial
  Synthetic oligonucleotide
gcagtaatgaggatgggagacctccactccctccaaagcagaaacggaaaatggcgag

SEQ ID NO: 86148 - DNA, 60 bp, Artificial
  Synthetic oligonucleotide
gggaattcctactgatgtaatcaattcctgggcaggagatattctaagaactcaggaatc

SEQ ID NO: 86149 - DNA, 60 bp, Artificial
  Synthetic oligonucleotide
gacacagtcaaaaggtgacctgtgtgtgcagagacaactggcagggggcaaacaggccta

SEQ ID NO: 86150 - DNA, 60 bp, Artificial
  Synthetic oligonucleotide
gggatcagccagacatattgaggaatgctcctgttacggacacagtcaaaaggtgacctg

SEQ ID NO: 86151 - DNA, 60 bp, Artificial
  Synthetic oligonucleotide
ggaggcattaaagggatcagccagacatattgaggaatgctcctgttacggacacagtca

SEQ ID NO: 86152 - DNA, 60 bp, Artificial
  Synthetic oligonucleotide
gtaatgtatttccacaagggattaataattaaggaggaggcattaaagggatcagccaga

SEQ ID NO: 86153 - DNA, 60 bp, Artificial
  Synthetic oligonucleotide
caagcctatacaaaagtaatgtatttccacaagggattaataattaaggaggaggcatta

SEQ ID NO: 86154 - DNA, 60 bp, Artificial
  Synthetic oligonucleotide
ggcacatgtgcagttgtaatgactgacggatcggctagtagtcaagcctatacaaaagta

SEQ ID NO: 86155 - DNA, 60 bp, Artificial
  Synthetic oligonucleotide
gccacaatggcacatgtgcagttgtaatgactgacggatcggctagtagtcaagcctata

SEQ ID NO: 86156 - DNA, 60 bp, Artificial
  Synthetic oligonucleotide
gaaacattctgaggactcaagaatcagaatgtgtgtgccacaatggcacatgtgcagttg

SEQ ID NO: 86157 - DNA, 60 bp, Artificial
  Synthetic oligonucleotide
acgaccattaatcaaagcaacactactgtagtagaaaccacatacgtaaataatacaaca

SEQ ID NO: 86158 - DNA, 60 bp, Artificial
  Synthetic oligonucleotide
ggagaaaggacccagacaggaagagaatttaacatgcacgaccattaatcaaagcaacac

SEQ ID NO: 86159 - DNA, 60 bp, Artificial
  Synthetic oligonucleotide
aatacaacaataattaccaaggaaactgatttgaaaacaccaagctacctgctgttgaac

SEQ ID NO: 86160 - DNA, 60 bp, Artificial
  Synthetic oligonucleotide
taatacaacaataattaccaaggaaactgatttgaaaacaccaagctacctgctgttgaa

SEQ ID NO: 86161 - DNA, 60 bp, Artificial
  Synthetic oligonucleotide
tagtgtactgaacttattgataggaatctcaaatgtcggattgaatgtatctctacatct

SEQ ID NO: 86162 - DNA, 60 bp, Artificial
  Synthetic oligonucleotide
gaaactatttgcattatctggagtggcaatagcacttagtgtactgaacttattgatagg

SEQ ID NO: 86163 - DNA, 60 bp, Artificial
  Synthetic oligonucleotide
ctctacatctaaaggagaaaggacccagacaggaagagaatttaacatgcacgaccatta

SEQ ID NO: 86164 - DNA, 60 bp, Artificial
  Synthetic oligonucleotide
attgataggaatctcaaatgtcggattgaatgtatctctacatctaaaggagaaaggacc

SEQ ID NO: 86165 - DNA, 60 bp, Artificial
  Synthetic oligonucleotide
tgaacaaatcattgttaccagggaaccatatgtatcatgcgacccaacagaatgcaaaat

SEQ ID NO: 86166 - DNA, 60 bp, Artificial
  Synthetic oligonucleotide
ggagggtgggtcgtgatagcgaaagacaatgcagtaagatttggggaaagtgaacaaatc

SEQ ID NO: 86167 - DNA, 54 bp, Artificial
  Synthetic oligonucleotide
ccgtgcttttacgtagagttaattagaggaagacctgaagaggctaaatatgta

SEQ ID NO: 86168 - DNA, 60 bp, Artificial
  Synthetic oligonucleotide
cgtgtgcactggaattctcacagacaccagcagacctggggacaaatctagtggtgattg

SEQ ID NO: 86169 - DNA, 60 bp, Artificial
  Synthetic oligonucleotide
ctagtggtgattgttccaatccaataactggaagtcctggcgctccgggagtgaagggat

SEQ ID NO: 86170 - DNA, 60 bp, Artificial
  Synthetic oligonucleotide
ggtgattgttccaatccaataactggaagtcctggcgctccgggagtgaagggattcggg

SEQ ID NO: 86171 - DNA, 60 bp, Artificial
  Synthetic oligonucleotide
gtgaagggattcgggtttctaaatggggataacacatggcttggtaggaccatcagcccc

SEQ ID NO: 86172 - DNA, 60 bp, Artificial
  Synthetic oligonucleotide
gggattcgggtttctaaatggggataacacatggcttggtaggaccatcagccccagatc

SEQ ID NO: 86173 - DNA, 60 bp, Artificial
  Synthetic oligonucleotide
catcagccccagatcaagaagtggattcgaaatgttgaaaatacctaatgcaggtactga

SEQ ID NO: 86174 - DNA, 56 bp, Artificial
  Synthetic oligonucleotide
caggtactgatcccaattctagaatagcagaacgacaggaaattgtcgacaataac

SEQ ID NO: 86175 - DNA, 60 bp, Artificial
  Synthetic oligonucleotide
atgaatccaaatcagaaactatttgcattatctggagtggcaatagcacttagtgtactg

SEQ ID NO: 86176 - DNA, 60 bp, Artificial
  Synthetic oligonucleotide
gggattggcagaatgactatctgcatacaaggaaacaatgacaacgctacagcaacggtt

SEQ ID NO: 86177 - DNA, 60 bp, Artificial
  Synthetic oligonucleotide
gacaacgctacagcaacggtttattataacagaaggctgaccactaccattaagacctgg

SEQ ID NO: 86178 - DNA, 60 bp, Artificial
  Synthetic oligonucleotide
cagtgactttgtatgtgttgggtggtcaagcacaacttgccatgatgggattggcagaat

SEQ ID NO: 86179 - DNA, 60 bp, Artificial
  Synthetic oligonucleotide
cttgccatgatgggattggcagaatgactatctgcatacaaggaaacaatgacaacgcta

SEQ ID NO: 86180 - DNA, 60 bp, Artificial
  Synthetic oligonucleotide
gctttcagaggtctcatctccactccattgggcactccaccaaccgtaagtaacagtgac

SEQ ID NO: 86181 - DNA, 60 bp, Artificial
  Synthetic oligonucleotide
accaaccgtaagtaacagtgactttgtatgtgttgggtggtcaagcacaacttgccatga

SEQ ID NO: 86182 - DNA, 60 bp, Artificial
  Synthetic oligonucleotide
taccagggaaccatatgtatcatgcgacccaacagaatgcaaaatgtatgccttgcacca

SEQ ID NO: 86183 - DNA, 60 bp, Artificial
  Synthetic oligonucleotide
cgctacagcaacggtttattataacagaaggctgaccactaccattaagacctgggccag

SEQ ID NO: 86184 - DNA, 60 bp, Artificial
  Synthetic oligonucleotide
taagacctgggccagaaacattctgaggactcaagaatcagaatgtgtgtgccacaatgg

SEQ ID NO: 86185 - DNA, 60 bp, Artificial
  Synthetic oligonucleotide
ctctgaaactctacagagattcgcttggagaagcagtaatgaggatgggagacctccact

SEQ ID NO: 86186 - DNA, 60 bp, Artificial
  Synthetic oligonucleotide
ggagagaactcatggctcggaagaacaattagcaaagactccagatcaggctatgaaatg

SEQ ID NO: 86187 - DNA, 60 bp, Artificial
  Synthetic oligonucleotide
ggggcaaataggccagtaatcactatagatcccgaaatgatgacccacacaagcaagtat

SEQ ID NO: 86188 - DNA, 60 bp, Artificial
  Synthetic oligonucleotide
gggggcaaataggccagtaatcactatagatcccgaaatgatgacccacacaagcaagta

SEQ ID NO: 86189 - DNA, 60 bp, Artificial
  Synthetic oligonucleotide
tgctatggagcagtaagggtaatcaaatgtatatgcagggacaattggaagggggcaaat

SEQ ID NO: 86190 - DNA, 60 bp, Artificial
  Synthetic oligonucleotide
caggaccgaacaacaatgcatcagcagtagtgtggtacggaggtaggccagtaacagaga

SEQ ID NO: 86191 - DNA, 60 bp, Artificial
  Synthetic oligonucleotide
catgtcgggaccgaacaacaatgcatcagcagtagtgtggtacggggggaggccagtaac

SEQ ID NO: 86192 - DNA, 60 bp, Artificial
  Synthetic oligonucleotide
gcatgtcaggaccgaacaacaatgcatcagcagtagtgtggtacggaggtaggccagtaa

SEQ ID NO: 86193 - DNA, 60 bp, Artificial
  Synthetic oligonucleotide
atgcatgtcaggaccgaacaacaatgcatcagcagtagtgtggtacggaggtaggccagt

SEQ ID NO: 86194 - DNA, 60 bp, Artificial
  Synthetic oligonucleotide
atcaagaatgtcaatatgcatgtcaggaccgaacaacaatgcatcagcagtagtgtggta

SEQ ID NO: 86195 - DNA, 60 bp, Artificial
  Synthetic oligonucleotide
atcggtagtaagcctgctgataggaattgccaatttaggcctaaacatcggactccatta

SEQ ID NO: 86196 - DNA, 57 bp, Artificial
  Synthetic oligonucleotide
ataatatgcatttctgccacaggaatgacactatcggtagtaagcctgctgatagga

SEQ ID NO: 86197 - DNA, 60 bp, Artificial
  Synthetic oligonucleotide
tggagagaactcatggctcggaagaacaattagcaaagactccagatcaggctatgaaat

SEQ ID NO: 86198 - DNA, 60 bp, Artificial
  Synthetic oligonucleotide
gggagaactcatggctcggaaggacgattagcaaagactccagatcaggctatgaaatgt

SEQ ID NO: 86199 - DNA, 60 bp, Artificial
  Synthetic oligonucleotide
gaagaacaattagcaaagactccagatcaggctatgaaatgttaaaagtcccaaatgcag

SEQ ID NO: 86200 - DNA, 60 bp, Artificial
  Synthetic oligonucleotide
gcaaagactccagatcaggctatgaaatgttaaaagtcccaaatgcagaaactgacaccc

SEQ ID NO: 86201 - DNA, 60 bp, Artificial
  Synthetic oligonucleotide
gctatgaaatgttaaaagtcccaaatgcagaaactgacatccaatcggggccaatttcac

SEQ ID NO: 86202 - DNA, 60 bp, Artificial
  Synthetic oligonucleotide
tatgaaatgttaaaagtcccaaatgcagaaaccgacacccaatcgggaccaatctcacac

SEQ ID NO: 86203 - DNA, 60 bp, Artificial
  Synthetic oligonucleotide
gggaggcccaaagagagtagcgtactgtggacttcaaatagcattgtagctctctgtgga

SEQ ID NO: 86204 - DNA, 60 bp, Artificial
  Synthetic oligonucleotide
acttcaaatagcattgtagctctctgtggatccaaggaacgattaggatcatggtcctgg

SEQ ID NO: 86205 - DNA, 60 bp, Artificial
  Synthetic oligonucleotide
atcggtagtaagcctgctgataggaattgccaatttgggcctaaatatcggactccatta

SEQ ID NO: 86206 - DNA, 57 bp, Artificial
  Synthetic oligonucleotide
atcggtagtaagcctgctgataggaattgccaatttaggcctaaacatcggactcca

SEQ ID NO: 86207 - DNA, 60 bp, Artificial
  Synthetic oligonucleotide
atcaggacctaataacaatgcttcggcagtggtctggtacaatggaagaccagtcaccga

SEQ ID NO: 86208 - DNA, 60 bp, Artificial
  Synthetic oligonucleotide
ggacggagaagctgacaataacttattcatcatcaatgatgtgggagatcaatggtcctg

SEQ ID NO: 86209 - DNA, 60 bp, Artificial
  Synthetic oligonucleotide
ggacggaaaagttgacaataacttattcatcatcaatgatgtgggagatcaatggtcctg

SEQ ID NO: 86210 - DNA, 60 bp, Artificial
  Synthetic oligonucleotide
gggacggaaaagttgacaataacttattcatcatcaatgatgtgggagatcaatggtcct

SEQ ID NO: 86211 - DNA, 60 bp, Artificial
  Synthetic oligonucleotide
agggacggagaagctgacaataacttattcatcatcaatgatgtgggagatcaatggtcc

SEQ ID NO: 86212 - DNA, 60 bp, Artificial
  Synthetic oligonucleotide
aggaacagaaaagttgacaataacttattcatcatcaatgatgtgggagatcaatggtcc

SEQ ID NO: 86213 - DNA, 60 bp, Artificial
  Synthetic oligonucleotide
catgggatgtcataaattttgagagcactggtaatttaattgcaccagaatacggattca

SEQ ID NO: 86214 - DNA, 60 bp, Artificial
  Synthetic oligonucleotide
gggagaatggaattctcttggactctattggaaacatgggatgtcataaattttgagagc

SEQ ID NO: 86215 - DNA, 60 bp, Artificial
  Synthetic oligonucleotide
taaggattgaaaaagtaacacaatggcacaataccaatgtcattgagtatgtagagaggc

SEQ ID NO: 86216 - DNA, 60 bp, Artificial
  Synthetic oligonucleotide
gtacgggttgagaaggtaacacaatggcacaataccaatgtcattgagtatatagagaga

SEQ ID NO: 86217 - DNA, 56 bp, Artificial
  Synthetic oligonucleotide
ttgagaaggtaacacaatggcacaataccaatgtcattgagtatatagagagacca

SEQ ID NO: 86218 - DNA, 50 bp, Artificial
  Synthetic oligonucleotide
gtacgggttgagaaggtaacacaatggcacaataccaatgtcattgagta

SEQ ID NO: 86219 - DNA, 60 bp, Artificial
  Synthetic oligonucleotide
acaaacattctaatggcacagtgaaagaccggagcccctatagaactctaatgagtgtag

SEQ ID NO: 86220 - DNA, 60 bp, Artificial
  Synthetic oligonucleotide
tcagggtttgaaatcctgaaagtcagaaatggctgggtacaaaatagtaaagagcagatc

SEQ ID NO: 86221 - DNA, 60 bp, Artificial
  Synthetic oligonucleotide
tgaccagattaatgggaagttgaaccgagtaatcgagaaaactaatgaaaagtttcatca

SEQ ID NO: 86222 - DNA, 60 bp, Artificial
  Synthetic oligonucleotide
gaccagattaatgggaagttgaaccgagtaatcgagaaaacaaatgagaagtttcatcag

SEQ ID NO: 86223 - DNA, 60 bp, Artificial
  Synthetic oligonucleotide
tgaccagattaatgggaagttgaaccgagtaatcgagaaaacaaatgagaagtttcatca

SEQ ID NO: 86224 - DNA, 60 bp, Artificial
  Synthetic oligonucleotide
gaccagattaatgggaagttgaaccgagtaatcgagaaaactaatgaaaagtttcatcaa

SEQ ID NO: 86225 - DNA, 60 bp, Artificial
  Synthetic oligonucleotide
gacggctggtatggtttcagacaccagaactctgagggtacagggcaagctgcagatcta

SEQ ID NO: 86226 - DNA, 60 bp, Artificial
  Synthetic oligonucleotide
tgatagacggctggtatggtttcagacaccagaactctgaaggtacaggacaagctgcag

SEQ ID NO: 86227 - DNA, 60 bp, Artificial
  Synthetic oligonucleotide
gacggctggtatggtttcagacaccagaactctgaaggtacaggacaagctgcagacctg

SEQ ID NO: 86228 - DNA, 60 bp, Artificial
  Synthetic oligonucleotide
gacggctggtatggtttcagacaccagaactctgaaggtacaggacaagctgcagaccta

SEQ ID NO: 86229 - DNA, 60 bp, Artificial
  Synthetic oligonucleotide
actgatcttgaggcactcatggaatggctaaagacaagaccaatcctgtcacctctgact

SEQ ID NO: 86230 - DNA, 60 bp, Artificial
  Synthetic oligonucleotide
cctagatatgcttttgagattgtctctgttggaaatgggaaactgttcaggagcgaactg

SEQ ID NO: 86231 - DNA, 60 bp, Artificial
  Synthetic oligonucleotide
aatgtgtataaaatactgtcaatttacagctgcattgcaagcagtctcgtactggcagca

SEQ ID NO: 86232 - DNA, 60 bp, Artificial
  Synthetic oligonucleotide
gtgcattcctggctcctagatatgcttttgagattgtctctgttggaaatggaaaactat

SEQ ID NO: 86233 - DNA, 60 bp, Artificial
  Synthetic oligonucleotide
cctggctcctagatatgcttttgagattgtctctgttggaaatggaaaactattcaggag

SEQ ID NO: 86234 - DNA, 60 bp, Artificial
  Synthetic oligonucleotide
cctagctcctagatatgcttttgagattgtctctgttggaaatgggaaactgttcaggag

SEQ ID NO: 86235 - DNA, 60 bp, Artificial
  Synthetic oligonucleotide
atgtagcagtgggttcagagacctacaacagaagattcaccccagaaatcagcactaggc

SEQ ID NO: 86236 - DNA, 60 bp, Artificial
  Synthetic oligonucleotide
ctgatacaccaatcaggaacatatcctgtaataaagagaacctttaacaacaccaaaggg

SEQ ID NO: 86237 - DNA, 60 bp, Artificial
  Synthetic oligonucleotide
cggcatctcaagaatgtcaatctgcatgtcaggacctaataacaatgcttcggcagtggt

SEQ ID NO: 86238 - DNA, 60 bp, Artificial
  Synthetic oligonucleotide
gtctggctctcggccaagattactcagagaacaacaacagcactgcaacactgtgcttgg

SEQ ID NO: 86239 - DNA, 60 bp, Artificial
  Synthetic oligonucleotide
taatgaaacggaaacgggactctagcatacttactgacagtcagacagcgaccaaaagaa

SEQ ID NO: 86240 - DNA, 60 bp, Artificial
  Synthetic oligonucleotide
tgcaaaattgcccccttgatggtagcatacatgctagaaagagagttagtccgcaaaacg

SEQ ID NO: 86241 - DNA, 60 bp, Artificial
  Synthetic oligonucleotide
ggacatcatgctgtatccaatgggacaatggtgaaaaccttgaccgatgaccaagtagaa

SEQ ID NO: 86242 - DNA, 60 bp, Artificial
  Synthetic oligonucleotide
agaatgggatgtcttcatagagcgacccactgctgtggacacttgttatccatttgatgt

SEQ ID NO: 86243 - DNA, 60 bp, Artificial
  Synthetic oligonucleotide
tgaatgggatgtcttcatagagcgacccactgctgtggacacttgttatccatttgatgt

SEQ ID NO: 86244 - DNA, 60 bp, Artificial
  Synthetic oligonucleotide
gtggtgccaaatattggcagcagaccatgggtgagaggccaaagcggcaggatcagcttt

SEQ ID NO: 86245 - DNA, 60 bp, Artificial
  Synthetic oligonucleotide
accagtcaaacaagtgtggtgccaaatattggcagtagaccatgggtgagaggccaaagc

SEQ ID NO: 86246 - DNA, 57 bp, Artificial
  Synthetic oligonucleotide
gggtgagaggccaaagcggcaggatcagcttctactggacaattgtggaaccaggag

SEQ ID NO: 86247 - DNA, 60 bp, Artificial
  Synthetic oligonucleotide
tactttctgtggactagacaatgaacctggatcgggaaattggcctgatggttccaacat

SEQ ID NO: 86248 - DNA, 57 bp, Artificial
  Synthetic oligonucleotide
actgagactgaaattcagtggagtcctggaattcagcaagttcgaagcattcacatc

SEQ ID NO: 86249 - DNA, 60 bp, Artificial
  Synthetic oligonucleotide
aacccaacaaatggaatttgttaccctggaactttggaggatgaagaagaactgagactg

SEQ ID NO: 86250 - DNA, 60 bp, Artificial
  Synthetic oligonucleotide
catccaaagtaaacaacatcgtcgacagaatgaatacaaatttcgagtctttgcaacacg

SEQ ID NO: 86251 - DNA, 60 bp, Artificial
  Synthetic oligonucleotide
caggagcgttcatcgattattgggctgatagagaatgcttcaatccttgcttttatgtgg

SEQ ID NO: 86252 - DNA, 60 bp, Artificial
  Synthetic oligonucleotide
gatactcaggagcgttcatcgattattgggctgatagagaatgcttcaatccttgctttt

SEQ ID NO: 86253 - DNA, 60 bp, Artificial
  Synthetic oligonucleotide
ggacaccatgctgtatccaatgggacaatggtgaaaaccttgactgatgaccaagtagaa

SEQ ID NO: 86254 - DNA, 60 bp, Artificial
  Synthetic oligonucleotide
ggacatcatgctgtatccaatgggacaatggtgaaaaccttgactgatgaccaagtagaa

SEQ ID NO: 86255 - DNA, 60 bp, Artificial
  Synthetic oligonucleotide
gacactatccgtagtaagtctgctaataggattggccaacttggggctgaacattgggct

SEQ ID NO: 86256 - DNA, 60 bp, Artificial
  Synthetic oligonucleotide
cactatccgtagtaagtctgctaataggattggccaacttggggctgaacattgggcttc

SEQ ID NO: 86257 - DNA, 60 bp, Artificial
  Synthetic oligonucleotide
ttgaatggatgtcaatccgactttacttttcttgaaagtaccagcgcaaaatgctataag

SEQ ID NO: 86258 - DNA, 60 bp, Artificial
  Synthetic oligonucleotide
ggcctttcaagcctccactgccgctgtgccccttcagaggattcttcccttttcacaagg

SEQ ID NO: 86259 - DNA, 60 bp, Artificial
  Synthetic oligonucleotide
tctctgtggatccaaggagcgattgggatcatggtcctggcatgatggtgctgaaatcat

SEQ ID NO: 86260 - DNA, 60 bp, Artificial
  Synthetic oligonucleotide
ctctgtggatccaaggagcgattgggatcatggtcctggcatgatggtgctgaaatcatc

SEQ ID NO: 86261 - DNA, 60 bp, Artificial
  Synthetic oligonucleotide
ggtgaactcagtaattgagaaaatgaacactcaattcactgcagtgggcaaagagttcaa

SEQ ID NO: 86262 - DNA, 53 bp, Artificial
  Synthetic oligonucleotide
ggggcaatcagtttctggatgtgttctaatgggtcattgcaatgcagagtgtg

SEQ ID NO: 86263 - DNA, 58 bp, Artificial
  Synthetic oligonucleotide
taaagcgccactggatctaatggactgcaccactgagggttggatccttggacacccc

SEQ ID NO: 86264 - DNA, 60 bp, Artificial
  Synthetic oligonucleotide
taaagcgccactggatctaatggactgcaccactgagggttggatccttggacacccccg

SEQ ID NO: 86265 - DNA, 60 bp, Artificial
  Synthetic oligonucleotide
ttctgtgcctgcttcacgctacctaactgacatgactcttgaagaaatgtcaagagactg

SEQ ID NO: 86266 - DNA, 60 bp, Artificial
  Synthetic oligonucleotide
gcctctgttcctgcttcacgctacctaactgacatgactcttgaagaaatgtcaagagac

SEQ ID NO: 86267 - DNA, 60 bp, Artificial
  Synthetic oligonucleotide
ttgaatggaatgataacacagttcgagtctctaaaactctacagagattcgcttggagaa

SEQ ID NO: 86268 - DNA, 60 bp, Artificial
  Synthetic oligonucleotide
aggaaagaacaccgatcttgaggcactcatggaatggctaaagacaagaccaatcctgtc

SEQ ID NO: 86269 - DNA, 60 bp, Artificial
  Synthetic oligonucleotide
agggaagaacaccgatcttgaggcactcatggaatggctaaagacaagaccaatcctgtc

SEQ ID NO: 86270 - DNA, 60 bp, Artificial
  Synthetic oligonucleotide
atcagagggaggcccaaagagagtagtgtactgtggacttcaaatagcatagtagctctc

SEQ ID NO: 86271 - DNA, 60 bp, Artificial
  Synthetic oligonucleotide
atggcgtcccaaggcaccaaacgatcttatgagcagatggaaactggtggagaacgccag

SEQ ID NO: 86272 - DNA, 54 bp, Artificial
  Synthetic oligonucleotide
gactggtcgtggcacgatggagctattcttccttttgacatcgataagatgtaa

SEQ ID NO: 86273 - DNA, 60 bp, Artificial
  Synthetic oligonucleotide
gtggagttgactataaagttgccgattggacatggcacgatggagctattcttccctttg

SEQ ID NO: 86274 - DNA, 60 bp, Artificial
  Synthetic oligonucleotide
ggagttgactataaagttgccgattggacatggcacgatggagctattcttccctttgac

SEQ ID NO: 86275 - DNA, 60 bp, Artificial
  Synthetic oligonucleotide
gaagtatgttgaagacacaaagattgacctgtggtcttacaatgctgaattattggtggc

SEQ ID NO: 86276 - DNA, 60 bp, Artificial
  Synthetic oligonucleotide
cataaacaagacaggaacatttgaattcacaagctttttctaccgctatggatttgtagc

SEQ ID NO: 86277 - DNA, 60 bp, Artificial
  Synthetic oligonucleotide
cgttgacaggatgaatacaaactttgagtctgtgcaacacgaattcagtgaaatagagga

SEQ ID NO: 86278 - DNA, 60 bp, Artificial
  Synthetic oligonucleotide
atcgttgacaggatgaatacaaactttgagtctgtgcaacacgaattcagtgaaatagag

SEQ ID NO: 86279 - DNA, 60 bp, Artificial
  Synthetic oligonucleotide
gagtcaactcaaaaggcaatagaccagataacatccaaggtaaataacatcgttgacagg

SEQ ID NO: 86280 - DNA, 60 bp, Artificial
  Synthetic oligonucleotide
aggagtcaactcaaaaggcaatagaccagataacatccaaggtaaataacatcgttgaca

SEQ ID NO: 86281 - DNA, 60 bp, Artificial
  Synthetic oligonucleotide
ccaacacagggacgaagaaggaacaggcattgcagcagacaaggagtcaactcaaaaggc

SEQ ID NO: 86282 - DNA, 60 bp, Artificial
  Synthetic oligonucleotide
ccaacacaggaacgaagaaggaacaggcattgcagcagacaaggagtcaactcaaaaggc

SEQ ID NO: 86283 - DNA, 60 bp, Artificial
  Synthetic oligonucleotide
gtatgggttccaacacagggacgaagaaggaacaggcattgcagcagacaaggagtcaac

SEQ ID NO: 86284 - DNA, 60 bp, Artificial
  Synthetic oligonucleotide
agacactggacctccatgactcaaatgtcaggaacctccatgagaaagtcagaagaatgc

SEQ ID NO: 86285 - DNA, 60 bp, Artificial
  Synthetic oligonucleotide
tacttgaaaatgagaagacactggacctccatgactcaaatgtcaggaacctccatgaga

SEQ ID NO: 86286 - DNA, 60 bp, Artificial
  Synthetic oligonucleotide
cgaaacatggtatggctgatacaccaatcaggaacatatcctgtaataaagagaaccttt

SEQ ID NO: 86287 - DNA, 60 bp, Artificial
  Synthetic oligonucleotide
aactttagagagtgaagaagaactaagactgaaattcagtggagttttagaatttaacaa

SEQ ID NO: 86288 - DNA, 60 bp, Artificial
  Synthetic oligonucleotide
agcaacaactcgacagacaaagttgacacaataattgagaacaatgtcacggtcactagc

SEQ ID NO: 86289 - DNA, 60 bp, Artificial
  Synthetic oligonucleotide
tgtatcgggtatttaagcaacaactcgacagacaaagttgacacaataattgagaacaat

SEQ ID NO: 86290 - DNA, 60 bp, Artificial
  Synthetic oligonucleotide
aggaaaccctatgtgtgatgaactaattggaaagacttcatggtcttacattgtggaaaa

SEQ ID NO: 86291 - DNA, 60 bp, Artificial
  Synthetic oligonucleotide
ggatattaggaaaccctatgtgtgatgaactaattggaaagacttcatggtcttacattg

SEQ ID NO: 86292 - DNA, 60 bp, Artificial
  Synthetic oligonucleotide
aaacccaatccaacaaatggaatctgttacccaggaactttagagagtgaagaagaacta

SEQ ID NO: 86293 - DNA, 60 bp, Artificial
  Synthetic oligonucleotide
tcttacattgtggaaaaacccaatccaacaaatggaatctgttacccaggaactttagag

SEQ ID NO: 86294 - DNA, 60 bp, Artificial
  Synthetic oligonucleotide
aagatagtcaaaccaggagaatcaataacattcgaatctaatggggcgttcctagctcct

SEQ ID NO: 86295 - DNA, 60 bp, Artificial
  Synthetic oligonucleotide
caaaccaggagaatcaataacattcgaatctaatggggcgttcctagctcctagatatgc

SEQ ID NO: 86296 - DNA, 60 bp, Artificial
  Synthetic oligonucleotide
tgttcaggagcgaactgaacattgaatcatgctctaccaaatgtcaaacagaaataggag

SEQ ID NO: 86297 - DNA, 60 bp, Artificial
  Synthetic oligonucleotide
gttcaggagcgaactgaacattgaatcatgctctaccaaatgtcaaacagaaataggagg

SEQ ID NO: 86298 - DNA, 60 bp, Artificial
  Synthetic oligonucleotide
gaaataggaggaattaatacgaacaaaagcttccacaatgttcacagaaacactatcggg

SEQ ID NO: 86299 - DNA, 60 bp, Artificial
  Synthetic oligonucleotide
ggaattaatacgaacaaaagcttccacaatgttcacagaaacactatcggggattgcccc

SEQ ID NO: 86300 - DNA, 60 bp, Artificial
  Synthetic oligonucleotide
cactatcggggattgccccaagtatgtgaatgtcaaatccttaaagcttgcaacaggacc

SEQ ID NO: 86301 - DNA, 60 bp, Artificial
  Synthetic oligonucleotide
gcaatagctggattcatagaagggggatggcctggactgatcaatggatggtatgggttc

SEQ ID NO: 86302 - DNA, 53 bp, Artificial
  Synthetic oligonucleotide
ggggatggcctggactgatcaatggatggtatgggttccaacacagggacgaa

SEQ ID NO: 86303 - DNA, 60 bp, Artificial
  Synthetic oligonucleotide
gagttagaaacggaacatatgatcataaagaattcgaggaggaatcaaaaatcaatcgcc

SEQ ID NO: 86304 - DNA, 60 bp, Artificial
  Synthetic oligonucleotide
ctccatgagaaagtcagaagaatgctaaaggacaatgccaaagatgaggggaacggatgc

SEQ ID NO: 86305 - DNA, 60 bp, Artificial
  Synthetic oligonucleotide
gagaaagtcagaagaatgctaaaggacaatgccaaagatgaggggaacggatgcttcacc

SEQ ID NO: 86306 - DNA, 60 bp, Artificial
  Synthetic oligonucleotide
gaacggatgcttcaccttttaccataagtgtgacaataaatgcattgaacgagttagaaa

SEQ ID NO: 86307 - DNA, 60 bp, Artificial
  Synthetic oligonucleotide
cggatgcttcaccttttaccataagtgtgacaataaatgcattgaacgagttagaaacgg

SEQ ID NO: 86308 - DNA, 60 bp, Artificial
  Synthetic oligonucleotide
cctggtgttgttggtctccctgggggcaatcagtttctggatgtgttctaatgggtcatt

SEQ ID NO: 86309 - DNA, 60 bp, Artificial
  Synthetic oligonucleotide
cgccaggagattgaaggggtgaaactagattctagtgggaatgtgtataaaatactgtca

SEQ ID NO: 86310 - DNA, 60 bp, Artificial
  Synthetic oligonucleotide
atcaatcgccaggagattgaaggggtgaaactagattctagtgggaatgtgtataaaata

SEQ ID NO: 86311 - DNA, 60 bp, Artificial
  Synthetic oligonucleotide
cacaaggacaatgcaatacgattgggtgagaataaggacgtcatagtcacaagagaacct

SEQ ID NO: 86312 - DNA, 60 bp, Artificial
  Synthetic oligonucleotide
cccactgatgtaatcaattcctgggcaggagatattctaaggactcaggaatcatcatgc

SEQ ID NO: 86313 - DNA, 60 bp, Artificial
  Synthetic oligonucleotide
ggattgcctatgaaagaatgtgcaacatccttaaagggaaattccaaacagcagcacaac

SEQ ID NO: 86314 - DNA, 60 bp, Artificial
  Synthetic oligonucleotide
ggatgtcaatccgactttacttttcttgaaagttccagcgcaaaatgctataagcaccac

SEQ ID NO: 86315 - DNA, 60 bp, Artificial
  Synthetic oligonucleotide
cgggcaaccttcaaacattgaaaataagagtacatgaggggcatgaagagttcacaatgg

SEQ ID NO: 86316 - DNA, 60 bp, Artificial
  Synthetic oligonucleotide
agcaaaagcaggggataattctattaatcatgaagaccattattgctctaagttgttttt

SEQ ID NO: 86317 - DNA, 60 bp, Artificial
  Synthetic oligonucleotide
atgaatccaaatcagaagataatatgcatttctgccacgggaatgacactatcggtagta

SEQ ID NO: 86318 - DNA, 60 bp, Artificial
  Synthetic oligonucleotide
atgaatccaaatcagaagataatatgcatttctgccacaggaatgacactatcggtagta

SEQ ID NO: 86319 - DNA, 60 bp, Artificial
  Synthetic oligonucleotide
tgatgtgtggagtagaccatgagattgccgactggtcatggcacgatggagctatccttc

SEQ ID NO: 86320 - DNA, 60 bp, Artificial
  Synthetic oligonucleotide
ctccattgtgatgtgtggagtagaccatgagattgccgactggtcgtggcacgatggagc

SEQ ID NO: 86321 - DNA, 60 bp, Artificial
  Synthetic oligonucleotide
cagtgacaccccaagaggagaagatagtcagttcacaggatcatgcactagccctatggg

SEQ ID NO: 86322 - DNA, 60 bp, Artificial
  Synthetic oligonucleotide
cggagcccctacagaactctaatgagtgtagaaatagggcaatcacccaatgtgtaccaa

SEQ ID NO: 86323 - DNA, 60 bp, Artificial
  Synthetic oligonucleotide
gcacagtgaaagaccggagcccctatagaactctaatgagtgtagaaatagggcaatcac

SEQ ID NO: 86324 - DNA, 60 bp, Artificial
  Synthetic oligonucleotide
ggaagattctacatacagatgtgcactgaactcaaactcagcgactatgaagggaggctg

SEQ ID NO: 86325 - DNA, 60 bp, Artificial
  Synthetic oligonucleotide
gggagattctacatacagatgtgcactgaactcaaactcggcgactatgaaggaaggttg

SEQ ID NO: 86326 - DNA, 60 bp, Artificial
  Synthetic oligonucleotide
gtggagttgactataaagttgccgattggtcatggcacgatggagctattcttccctttg

SEQ ID NO: 86327 - DNA, 60 bp, Artificial
  Synthetic oligonucleotide
caatcggggactgtcccaagtatgtcaaacagggatctttgaaactagctacagggatga

SEQ ID NO: 86328 - DNA, 60 bp, Artificial
  Synthetic oligonucleotide
gtgggcctgccaaagaggcaacattaggtgcaacatttgcatttgagtacattggtaatt

SEQ ID NO: 86329 - DNA, 60 bp, Artificial
  Synthetic oligonucleotide
caagcacctcatgccatgacggcatctcaagaatgtcaatctgcatgtcaggacctaata

SEQ ID NO: 86330 - DNA, 60 bp, Artificial
  Synthetic oligonucleotide
caggggtcacaatgtacaaagtagtagtaataattgcgctccttggagcagtgagagggc

SEQ ID NO: 86331 - DNA, 60 bp, Artificial
  Synthetic oligonucleotide
tatagaaaacggatgggaaggaatggtagacggctggtatggtttcagacaccaaaatgc

SEQ ID NO: 86332 - DNA, 60 bp, Artificial
  Synthetic oligonucleotide
gggaaggaatggtagacggctggtatggtttcagacaccaaaatgctcaggggacaggcc

SEQ ID NO: 86333 - DNA, 60 bp, Artificial
  Synthetic oligonucleotide
gggaaggaatggtagacggctggtatggtttcagacaccaaaatgctcagggcataggcc

SEQ ID NO: 86334 - DNA, 60 bp, Artificial
  Synthetic oligonucleotide
gacggctggtatggtttcagacaccaaaatgctcagggcataggccaagctgctgactac

SEQ ID NO: 86335 - DNA, 60 bp, Artificial
  Synthetic oligonucleotide
gcagctatcgaccaaatcactgggaagctgaacaggttgattgagaagaccaacactgag

SEQ ID NO: 86336 - DNA, 60 bp, Artificial
  Synthetic oligonucleotide
gatcacggggaagctgaacaggttgattgagaagaccaacactgagtttgagtcaataga

SEQ ID NO: 86337 - DNA, 60 bp, Artificial
  Synthetic oligonucleotide
cggggaagctgaacaggttgattgagaagaccaacactgagtttgagtcaatagaatctg

SEQ ID NO: 86338 - DNA, 60 bp, Artificial
  Synthetic oligonucleotide
caggggtcacaatgtacaaagtagtagtaataattgcgctccttggagcagtgagaggcc

SEQ ID NO: 86339 - DNA, 60 bp, Artificial
  Synthetic oligonucleotide
aaaatgcaattagggtcctcatcggaggacttgaatggaatgataacacagttcgagtct

SEQ ID NO: 86340 - DNA, 60 bp, Artificial
  Synthetic oligonucleotide
tgcaagccttacaactattgcttgaagtagagcaagagataagaactttctcgtttcagc

SEQ ID NO: 86341 - DNA, 60 bp, Artificial
  Synthetic oligonucleotide
tgatgggatgcttgttgacagtattggctcatggtctcaaaacatcctcagaactcaaga

SEQ ID NO: 86342 - DNA, 60 bp, Artificial
  Synthetic oligonucleotide
ctaaagtattaaaatacagggattggtcgaaaccacagtgtcagattgcagggtttgctc

SEQ ID NO: 86343 - DNA, 60 bp, Artificial
  Synthetic oligonucleotide
catgtttgtgtcactggggatgataggaatgcaactgccagcttcatttatgatgggatg

SEQ ID NO: 86344 - DNA, 60 bp, Artificial
  Synthetic oligonucleotide
aatagaaaggaacataacagaaatagtgtatttgaataatactataatagaaaaagagct

SEQ ID NO: 86345 - DNA, 60 bp, Artificial
  Synthetic oligonucleotide
aaaaagagctttgtcctaaagtattaaaatacagggattggtcgaaaccacagtgtcaga

SEQ ID NO: 86346 - DNA, 60 bp, Artificial
  Synthetic oligonucleotide
gaactcaagagtcagaatgtatttgcatcaatggaacctgtacagtagtaatgactgatg

SEQ ID NO: 86347 - DNA, 60 bp, Artificial
  Synthetic oligonucleotide
tgtgcatagcatggtctagctcaagctgccatgacggaaaggcatggttacatgtttgtg

SEQ ID NO: 86348 - DNA, 60 bp, Artificial
  Synthetic oligonucleotide
acatttgggtaacaagagaaccatatgtatcatgcagccccgataaatgttatcaattcg

SEQ ID NO: 86349 - DNA, 60 bp, Artificial
  Synthetic oligonucleotide
gagaaccatatgtatcatgcagccccgataaatgttatcaattcgcacttgggcagggaa

SEQ ID NO: 86350 - DNA, 60 bp, Artificial
  Synthetic oligonucleotide
gcgacacaccgaggaacgatgatagctctagcaatagcaattgcaaggaccctaataatg

SEQ ID NO: 86351 - DNA, 60 bp, Artificial
  Synthetic oligonucleotide
cctaataatgaaagaggaaacccaggagtgaaagggtgggcttttgactatgggaatgat

SEQ ID NO: 86352 - DNA, 60 bp, Artificial
  Synthetic oligonucleotide
gcagtattccctcgaacaatcaggtaatgccatgtgaaccaatcataatagaaaggaaca

SEQ ID NO: 86353 - DNA, 60 bp, Artificial
  Synthetic oligonucleotide
gaatgcagtattccctcgaacaatcaggtaatgccatgtgaaccaatcataatagaaagg

SEQ ID NO: 86354 - DNA, 60 bp, Artificial
  Synthetic oligonucleotide
ggatgcttgttgacagtattggctcatggtctcaaaacatcctcagaactcaagagtcag

SEQ ID NO: 86355 - DNA, 60 bp, Artificial
  Synthetic oligonucleotide
ttctggcattttttctgttgaaggcaaaagctgcattaataggtgtttttatgtggaatt

SEQ ID NO: 86356 - DNA, 60 bp, Artificial
  Synthetic oligonucleotide
tatggcagattatagcattgattctagttatgtgtgctcagggcttgttggcgacacacc

SEQ ID NO: 86357 - DNA, 60 bp, Artificial
  Synthetic oligonucleotide
cattgattctagttatgtgtgctcagggcttgttggcgacacaccgaggaacgatgatag

SEQ ID NO: 86358 - DNA, 60 bp, Artificial
  Synthetic oligonucleotide
gggtcattggtggttggactatggctaattccaaatcccaggtgaataggcaggtcatag

SEQ ID NO: 86359 - DNA, 60 bp, Artificial
  Synthetic oligonucleotide
ggaaacccaggagtgaaagggtgggcttttgactatgggaatgatgtttggatgggaaga

SEQ ID NO: 86360 - DNA, 60 bp, Artificial
  Synthetic oligonucleotide
cccaggtgaataggcaggtcatagttgacaataataattggtctggttattctggcattt

SEQ ID NO: 86361 - DNA, 60 bp, Artificial
  Synthetic oligonucleotide
tcccaggtgaataggcaggtcatagttgacaataataattggtctggttattctggcatt

SEQ ID NO: 86362 - DNA, 60 bp, Artificial
  Synthetic oligonucleotide
gtgcccagataatatatgcagggagaatgacagactccattaaatcatggagaaaggaca

SEQ ID NO: 86363 - DNA, 60 bp, Artificial
  Synthetic oligonucleotide
aataatatatgcagggagaatgacagactccattaaatcatggagaaaggacatattaag

SEQ ID NO: 86364 - DNA, 60 bp, Artificial
  Synthetic oligonucleotide
gataatatatgcagggagaatgacagactccattaaatcatggagaaaggacatattaag

SEQ ID NO: 86365 - DNA, 50 bp, Artificial
  Synthetic oligonucleotide
caactgccggtctcacccatttgatgatctggcattccaatctgaatgac

SEQ ID NO: 86366 - DNA, 60 bp, Artificial
  Synthetic oligonucleotide
gttccaccattgaagagctcagacggcagaaatagtgaatttagcttgtccttcatgaaa

SEQ ID NO: 86367 - DNA, 60 bp, Artificial
  Synthetic oligonucleotide
ccaaatattggcagtagaccatgggtgagaggccaaagcggcagaatcagcttctattgg

SEQ ID NO: 86368 - DNA, 60 bp, Artificial
  Synthetic oligonucleotide
aggtctctagttgcctcctcaggaaccctagagttcatcacagaaggattcacatggaca

SEQ ID NO: 86369 - DNA, 60 bp, Artificial
  Synthetic oligonucleotide
caggagcgttcatcgattattgggctgatagagagtgcttcaacccttgcttttatgtgg

SEQ ID NO: 86370 - DNA, 60 bp, Artificial
  Synthetic oligonucleotide
caggagcgttcatcgattattgggctgatagagagtgcttcaacccttgcttttacgtag

SEQ ID NO: 86371 - DNA, 60 bp, Artificial
  Synthetic oligonucleotide
cctgggcaactgccatccgataggaatgttgataggaacaccagcttgtgatttacatct

SEQ ID NO: 86372 - DNA, 60 bp, Artificial
  Synthetic oligonucleotide
aaagacctgggcaactgccatccgataggaatgttgataggaacaccagcttgtgattta

SEQ ID NO: 86373 - DNA, 60 bp, Artificial
  Synthetic oligonucleotide
ggcacaggccaagccgccgattacaagagtactcaagcagctattgaccagatcactgga

SEQ ID NO: 86374 - DNA, 60 bp, Artificial
  Synthetic oligonucleotide
cggacacagctgaacatctcataatatggggaattcaccatccttccagcactcaggaga

SEQ ID NO: 86375 - DNA, 60 bp, Artificial
  Synthetic oligonucleotide
taaatttgtatgagagagtgaggaaacaactcaggcagaatgcagaagaagatgggaagg

SEQ ID NO: 86376 - DNA, 60 bp, Artificial
  Synthetic oligonucleotide
gggacaggccaagccgccgattacaagagtactcaggcagctatcgaccaaatcactggg

SEQ ID NO: 86377 - DNA, 60 bp, Artificial
  Synthetic oligonucleotide
gagagagtgaggaaacaactcaggcagaatgcagaagaagatgggaaggggtgttttgag

SEQ ID NO: 86378 - DNA, 60 bp, Artificial
  Synthetic oligonucleotide
atgaaagagtgaggaaacaactcaggcagaatgcagaagaggacgggaaaggatgttttg

SEQ ID NO: 86379 - DNA, 60 bp, Artificial
  Synthetic oligonucleotide
aggatctgggcaactgccatccaataggaatgttgataggaacaccagcttgtgatctgc

SEQ ID NO: 86380 - DNA, 60 bp, Artificial
  Synthetic oligonucleotide
ttatttcttcggagacaatgcagaggaatatgacaattaaagaaaaatacccttgtttct

SEQ ID NO: 86381 - DNA, 60 bp, Artificial
  Synthetic oligonucleotide
gattctgtggttgacatctggtcatataatgcacagcttctcgttttacttgaaaatgag

SEQ ID NO: 86382 - DNA, 60 bp, Artificial
  Synthetic oligonucleotide
ctcctatgtagcagtgggttcagagacctacaacagaagattcactccagaaatcaacac

SEQ ID NO: 86383 - DNA, 60 bp, Artificial
  Synthetic oligonucleotide
gtgggttcagagacctacaacagaagattcactccagaaatcaacactaggcccagagtc

SEQ ID NO: 86384 - DNA, 60 bp, Artificial
  Synthetic oligonucleotide
agatgattctgtggttgacatctggtcatataatgcacagcttctcgttttacttgaaaa

SEQ ID NO: 86385 - DNA, 60 bp, Artificial
  Synthetic oligonucleotide
aaccaggagaaaccttgaatgtggaatccaatggaaatttaatagctccttggtatgctt

SEQ ID NO: 86386 - DNA, 60 bp, Artificial
  Synthetic oligonucleotide
ggaaaatctgggagtataccaaatccttgctatctatagtacggtatcgagcagtctggt

SEQ ID NO: 86387 - DNA, 60 bp, Artificial
  Synthetic oligonucleotide
gtatgcttacaagttcaccagttccagagacaagggagctattttcaaatcagaccttcc

SEQ ID NO: 86388 - DNA, 60 bp, Artificial
  Synthetic oligonucleotide
ggaaaatgagagaaccttggacatgcatgatgccaatgtaaagaatctatatgaaaaggt

SEQ ID NO: 86389 - DNA, 60 bp, Artificial
  Synthetic oligonucleotide
cagtttgaggcagtagagcatgagttctcaaatctcgaaaggagaatagacaatctgaac

SEQ ID NO: 86390 - DNA, 60 bp, Artificial
  Synthetic oligonucleotide
caatattagagaagaatgtgacagtgacgcactcagtggagctcctagaaagccagaagg

SEQ ID NO: 86391 - DNA, 60 bp, Artificial
  Synthetic oligonucleotide
tagtagagaggcttgacgcccaaaatgggatatgttacccaggggtgttgaaagagacgg

SEQ ID NO: 86392 - DNA, 60 bp, Artificial
  Synthetic oligonucleotide
gacacccccgatgtgataacttactcggtgatcgaagttggtcatacatagtagagaggc

SEQ ID NO: 86393 - DNA, 60 bp, Artificial
  Synthetic oligonucleotide
gatgtgataacttactcggtgatcgaagttggtcatacatagtagagaggcttgacgccc

SEQ ID NO: 86394 - DNA, 60 bp, Artificial
  Synthetic oligonucleotide
gaacacacagtttgaggcaatagagcatgagttctcaaatctcgaaaggagaatagacaa

SEQ ID NO: 86395 - DNA, 60 bp, Artificial
  Synthetic oligonucleotide
ggtggatcgtccttttacaggaatctgttgtggataattaaaataagatctgatccgtac

SEQ ID NO: 86396 - DNA, 60 bp, Artificial
  Synthetic oligonucleotide
tgcccctacaatggtggatcgtccttttacaggaatctgttgtggataattaaaataaga

SEQ ID NO: 86397 - DNA, 60 bp, Artificial
  Synthetic oligonucleotide
ccggagtagacactaatagcggagttacgagcgcttgcccctacaatggtggatcgtcct

SEQ ID NO: 86398 - DNA, 60 bp, Artificial
  Synthetic oligonucleotide
ccaaaagcacatggaccggagtagacactaatagcggagttacgagcgcttgcccctaca

SEQ ID NO: 86399 - DNA, 60 bp, Artificial
  Synthetic oligonucleotide
acgcccaaaatgggatatgttacccaggggtgttgaaagagacggaagagctgaaagcgc

SEQ ID NO: 86400 - DNA, 60 bp, Artificial
  Synthetic oligonucleotide
aactggtttgaggaatgtcccacaggcagaaacaagaggattgtttggagcaatagctgg

SEQ ID NO: 86401 - DNA, 60 bp, Artificial
  Synthetic oligonucleotide
gtctggattggagaatgtcccaaatatgttaaaagtaagagcctgaaactagcaactggt

SEQ ID NO: 86402 - DNA, 60 bp, Artificial
  Synthetic oligonucleotide
aatgttagtccagtctggattggagaatgtcccaaatatgttaaaagtaagagcctgaaa

SEQ ID NO: 86403 - DNA, 60 bp, Artificial
  Synthetic oligonucleotide
gagcctgaaactagcaactggtttgaggaatgtcccacaggcagaaacaagaggattgtt

SEQ ID NO: 86404 - DNA, 60 bp, Artificial
  Synthetic oligonucleotide
taaaataagatctgatccgtactcattgattaagggaacatataccaatactggctctca

SEQ ID NO: 86405 - DNA, 56 bp, Artificial
  Synthetic oligonucleotide
ttgcaatcataatacttgcaatagtggtctctaccagcaagtcagacaggatctgc

SEQ ID NO: 86406 - DNA, 60 bp, Artificial
  Synthetic oligonucleotide
taccagcaagtcagacaggatctgcattggttaccatgcaaacaactcgacaacacaagt

SEQ ID NO: 86407 - DNA, 60 bp, Artificial
  Synthetic oligonucleotide
tccaatggaacaatggtgaaaaccttgactgatgaccaagtagaagttgtcactgcccag

SEQ ID NO: 86408 - DNA, 60 bp, Artificial
  Synthetic oligonucleotide
atccaatgggacaatggtgaaaaccttgactgatgaccaggtagaagttgtcactgccca

SEQ ID NO: 86409 - DNA, 60 bp, Artificial
  Synthetic oligonucleotide
ctgtgccggcttcacgctacctaactgacatgactcttgaagaaatgtcaagagactggt

SEQ ID NO: 86410 - DNA, 60 bp, Artificial
  Synthetic oligonucleotide
ctttgatgacagactcagaagagatcaaaaggcattaaagggaagaggcagcacacttgg

SEQ ID NO: 86411 - DNA, 60 bp, Artificial
  Synthetic oligonucleotide
gatcaaaaggcattaaagggaagaggcagcacacttggactcgacctgcgggtggctaca

SEQ ID NO: 86412 - DNA, 60 bp, Artificial
  Synthetic oligonucleotide
ggaatgataactcaattcgagcgtctgaaaatatacagagattcgcttggggaatccgta

SEQ ID NO: 86413 - DNA, 54 bp, Artificial
  Synthetic oligonucleotide
tcagattcagggagtcaaattgacccagggatataaagacattattctctggat

SEQ ID NO: 86414 - DNA, 51 bp, Artificial
  Synthetic oligonucleotide
tcagattcagggagtcaaattgacccagggatataaagacattattctctg

SEQ ID NO: 86415 - DNA, 60 bp, Artificial
  Synthetic oligonucleotide
gacatttatagagatgaagcaatcaacaatcgatttcagattcagggagtcaaattgacc

SEQ ID NO: 86416 - DNA, 60 bp, Artificial
  Synthetic oligonucleotide
gcttctggagagtcaaaaggaggaaagattctgccgagtgttaagtaaagcccctttgga

SEQ ID NO: 86417 - DNA, 60 bp, Artificial
  Synthetic oligonucleotide
cagttgagcttctggagagtcaaaaggaggaaagattctgccgagtgttaagtaaagccc

SEQ ID NO: 86418 - DNA, 57 bp, Artificial
  Synthetic oligonucleotide
tgattgcaatcataataatcgcgatagtggcctctaccagcaagtcagacaagatct

SEQ ID NO: 86419 - DNA, 60 bp, Artificial
  Synthetic oligonucleotide
cgcaagtggacacaatattagaaaagaatgtgacggtaacgcactcagttgagcttctgg

SEQ ID NO: 86420 - DNA, 60 bp, Artificial
  Synthetic oligonucleotide
gacaacgcaagtggacacaatattagaaaagaatgtgacggtaacgcactcagttgagct

SEQ ID NO: 86421 - DNA, 60 bp, Artificial
  Synthetic oligonucleotide
gatagatggttggtacggctaccatcatgagaattcacagggatcgggctacgcagcaga

SEQ ID NO: 86422 - DNA, 59 bp, Artificial
  Synthetic oligonucleotide
ctacgcagcagataaagaaagtactcagaaagcaatcgacgggatcaccaataaggtca

SEQ ID NO: 86423 - DNA, 60 bp, Artificial
  Synthetic oligonucleotide
acacagtttgaggcagtagagcatgagttttcaaacctcgaaagaagaatagacaatcta

SEQ ID NO: 86424 - DNA, 60 bp, Artificial
  Synthetic oligonucleotide
ggatgtgtggacatacaatgctgaacttttagttctactggaaaatgagggaaccttgga

SEQ ID NO: 86425 - DNA, 60 bp, Artificial
  Synthetic oligonucleotide
caatgctgaacttttagttctactggaaaatgagggaaccttggatctgcatgatgccaa

SEQ ID NO: 86426 - DNA, 60 bp, Artificial
  Synthetic oligonucleotide
gaaccttggatctgcatgatgccaatgtgaagaacctgtatgaaaaagtgaaatcacaat

SEQ ID NO: 86427 - DNA, 60 bp, Artificial
  Synthetic oligonucleotide
gggtgtttcgaattttggcataaatgtgatgatgaatgcatcaactcagtgaagaatggc

SEQ ID NO: 86428 - DNA, 60 bp, Artificial
  Synthetic oligonucleotide
ggatgagagcaaacttaataggcaggaaatagattcagtgaaattggagaatctgggtgt

SEQ ID NO: 86429 - DNA, 60 bp, Artificial
  Synthetic oligonucleotide
gctctcaaccgatcctgtatttctggggtgtacaccatcccccagataccaatgagcaaa

SEQ ID NO: 86430 - DNA, 60 bp, Artificial
  Synthetic oligonucleotide
aatgagcaaaatactctgtatggctctggtgacagatatgttagaatggggactgagagc

SEQ ID NO: 86431 - DNA, 60 bp, Artificial
  Synthetic oligonucleotide
agtaaagcccctttggatctaaagggttgcactattgaaggttggattcttggaaacccc

SEQ ID NO: 86432 - DNA, 51 bp, Artificial
  Synthetic oligonucleotide
cctttggatctaaagggttgcactattgaaggttggattcttggaaacccc

SEQ ID NO: 86433 - DNA, 60 bp, Artificial
  Synthetic oligonucleotide
aacaaagtctgctgcatatccagtaattaggggaacatacaataatactggctctcaacc

SEQ ID NO: 86434 - DNA, 60 bp, Artificial
  Synthetic oligonucleotide
ctgctgcatatccagtaattaggggaacatacaataatactggctctcaaccgatcctgt

SEQ ID NO: 86435 - DNA, 60 bp, Artificial
  Synthetic oligonucleotide
ccaagagcacatgggccggagtggacactagcagcggagttacgatggcttgcccttaca

SEQ ID NO: 86436 - DNA, 60 bp, Artificial
  Synthetic oligonucleotide
ggccggagtggacactagcagcggagttacgatggcttgcccttacattagtgggtcgtc

SEQ ID NO: 86437 - DNA, 60 bp, Artificial
  Synthetic oligonucleotide
tagcctaaggctggcaactggtttgagaaatgtcccacaggcagagacaagaggattgtt

SEQ ID NO: 86438 - DNA, 60 bp, Artificial
  Synthetic oligonucleotide
ccctctatggattggagaatgccccaagtatgtcaaaagtgatagcctaaggctggcaac

SEQ ID NO: 86439 - DNA, 60 bp, Artificial
  Synthetic oligonucleotide
aatgttagccctctatggattggagaatgccccaagtatgtcaaaagtgatagcctaagg

SEQ ID NO: 86440 - DNA, 60 bp, Artificial
  Synthetic oligonucleotide
gtgaatggacaaagagggagaattgactattattggtctgtgctgaaaccaggagaaacc

SEQ ID NO: 86441 - DNA, 60 bp, Artificial
  Synthetic oligonucleotide
ctgtgaatggacaaagagggagaattgactattattggtctgtgctgaaaccaggagaaa

SEQ ID NO: 86442 - DNA, 60 bp, Artificial
  Synthetic oligonucleotide
gaattttgccaaaggcccagaaatagcagcaagaccagctgtgaatggacaaagagggag

SEQ ID NO: 86443 - DNA, 60 bp, Artificial
  Synthetic oligonucleotide
gactgagagcatgaattttgccaaaggcccagaaatagcagcaagaccagctgtgaatgg

SEQ ID NO: 86444 - DNA, 60 bp, Artificial
  Synthetic oligonucleotide
ctctgtatggctctggtgacagatatgttagaatggggactgagagcatgaattttgcca

SEQ ID NO: 86445 - DNA, 60 bp, Artificial
  Synthetic oligonucleotide
atgatagatggttggtacggctaccatcatgagaattcacagggatcgggctacgcagca

SEQ ID NO: 86446 - DNA, 60 bp, Artificial
  Synthetic oligonucleotide
aacagaaaacagtttcgaacaaataacattcatgcaagccttacaactactgcttgaagt

SEQ ID NO: 86447 - DNA, 60 bp, Artificial
  Synthetic oligonucleotide
ctattgcttgaagtggagcaagagataagaactttctcgtttcagcttatttaatgataa

SEQ ID NO: 86448 - DNA, 60 bp, Artificial
  Synthetic oligonucleotide
ccacgatggcatatcaagaatgtcaatatgcatgtcaggaccaaacaataacgcatcagc

SEQ ID NO: 86449 - DNA, 60 bp, Artificial
  Synthetic oligonucleotide
aagatgagtcttctaaccgaggtcgaaacgtacgttctctctatcgtaccgtcaggcccc

SEQ ID NO: 86450 - DNA, 60 bp, Artificial
  Synthetic oligonucleotide
ggagggaattcctggttgggaaggaccataagcaaagattcaagatcagggtatgagatg

SEQ ID NO: 86451 - DNA, 60 bp, Artificial
  Synthetic oligonucleotide
gggaattcctggttgggaaggaccataagcaaagactcaaggtcggggtacgaaatgctg

SEQ ID NO: 86452 - DNA, 60 bp, Artificial
  Synthetic oligonucleotide
gggaattcctggttgggaaggaccataagcaaagattcaaggtcagggtatgagatgcta

SEQ ID NO: 86453 - DNA, 60 bp, Artificial
  Synthetic oligonucleotide
ggtgactgctcctttgctggatggatccttggaaacccaatgtgtgatgatttgattggg

SEQ ID NO: 86454 - DNA, 60 bp, Artificial
  Synthetic oligonucleotide
ttgagactgaagtttagtggggtcctcgaatacagcaaatttgaagcattcacttcaaat

SEQ ID NO: 86455 - DNA, 60 bp, Artificial
  Synthetic oligonucleotide
ttgagactgaagtttagtggggtcctcgaattcagcaaatttgaagccttcacctcaaat

SEQ ID NO: 86456 - DNA, 56 bp, Artificial
  Synthetic oligonucleotide
atggttgatccaccaatcagggacatatcctgttatacggaggacattcaataaca

SEQ ID NO: 86457 - DNA, 58 bp, Artificial
  Synthetic oligonucleotide
ttttcagacacatggtatggttgatccatcaatcagggacatatcctgttatacggag

SEQ ID NO: 86458 - DNA, 60 bp, Artificial
  Synthetic oligonucleotide
gtaaatggtcaggctgggagaatgacattctactggaccatagtgaaaccgggagaagca

SEQ ID NO: 86459 - DNA, 60 bp, Artificial
  Synthetic oligonucleotide
tggtgtccttggggaatgggaaactgttcaggagtgacttgaatattgaatcttgctcaa

SEQ ID NO: 86460 - DNA, 60 bp, Artificial
  Synthetic oligonucleotide
gctgggagaatgacattctactggaccatagtgagaccaagagaaacaataacatttgag

SEQ ID NO: 86461 - DNA, 60 bp, Artificial
  Synthetic oligonucleotide
aacatatgaccacaaggaatttgaagaggagtccaaactgaacagacaagaaattgaggg

SEQ ID NO: 86462 - DNA, 60 bp, Artificial
  Synthetic oligonucleotide
tacaacgcacagcttcttgtcctattggagaatgaaaaaacattagatctccatgattct

SEQ ID NO: 86463 - DNA, 60 bp, Artificial
  Synthetic oligonucleotide
caaagcatgtggatgattctgttattgacatatggtcatacaacgcacagcttcttgttc

SEQ ID NO: 86464 - DNA, 60 bp, Artificial
  Synthetic oligonucleotide
cagcacatgtgggtgattctgttattgacatatggtcatacaacgcacagcttcttgtcc

SEQ ID NO: 86465 - DNA, 60 bp, Artificial
  Synthetic oligonucleotide
taaaccaattgtcaaagcatgtggatgattctgttattgacatatggtcatacaacgcac

SEQ ID NO: 86466 - DNA, 60 bp, Artificial
  Synthetic oligonucleotide
taaaccaattgtcagcacatgtgggtgattctgttattgacatatggtcatacaacgcac

SEQ ID NO: 86467 - DNA, 57 bp, Artificial
  Synthetic oligonucleotide
ttaataacattgttgatcggatgaatacaaactttgagtctgttcaacatgaattca

SEQ ID NO: 86468 - DNA, 60 bp, Artificial
  Synthetic oligonucleotide
gaaacacaataggagactgccccaaatatgtgaatgttaaatctctaaagcttgccaccg

SEQ ID NO: 86469 - DNA, 60 bp, Artificial
  Synthetic oligonucleotide
ttcaggagtgacttgaatattgaatcttgctcaactaaatgccagtccgaaattggaggg

SEQ ID NO: 86470 - DNA, 60 bp, Artificial
  Synthetic oligonucleotide
ggtgtccttggggaatgggaaactgttcaggagtgacttgaatattgaatcttgctcaac

SEQ ID NO: 86471 - DNA, 60 bp, Artificial
  Synthetic oligonucleotide
agtcttggtgactgctcctttgctggatggatccttggaaacccaatgtgtgatgatttg

SEQ ID NO: 86472 - DNA, 60 bp, Artificial
  Synthetic oligonucleotide
ggagtgacttgaatattgaatcttgctcaactaaatgccagtccgaaattggagggatca

SEQ ID NO: 86473 - DNA, 60 bp, Artificial
  Synthetic oligonucleotide
aatggctggtatgggttccaacatagaaatgaagaaggtacagggattgctgcagacaaa

SEQ ID NO: 86474 - DNA, 60 bp, Artificial
  Synthetic oligonucleotide
ggtgcaatagctggtttcatagaaggtggttggccagggttgatcaatggctggtatggg

SEQ ID NO: 86475 - DNA, 60 bp, Artificial
  Synthetic oligonucleotide
aatagctggtttcatagaaggtggttggccaggtttaatcaatggttggtatgggttcca

SEQ ID NO: 86476 - DNA, 60 bp, Artificial
  Synthetic oligonucleotide
tgatgatttgattgggaaaacatcatggtcctacatagtagagaaaccaaatcctgctaa

SEQ ID NO: 86477 - DNA, 60 bp, Artificial
  Synthetic oligonucleotide
agcctcattgagtcctggaatgatgatgggcatgttcaacatgctgagtacagtcttagg

SEQ ID NO: 86478 - DNA, 60 bp, Artificial
  Synthetic oligonucleotide
ggaagggagcaaatagaccagtaatcactatagaccccgagatgatgacccatacaagca

SEQ ID NO: 86479 - DNA, 60 bp, Artificial
  Synthetic oligonucleotide
gaagataatatgcatttcagccacaggaatgacactatcggtagtaagcctcctagtagg

SEQ ID NO: 86480 - DNA, 60 bp, Artificial
  Synthetic oligonucleotide
aataaggatggtagacatccttcggcaaaatccaacagaggaacaagccgtggacatatg

SEQ ID NO: 86481 - DNA, 60 bp, Artificial
  Synthetic oligonucleotide
gcccaacagtaacgacccctgcaataccaaactgcagtgacactataataacatacaata

SEQ ID NO: 86482 - DNA, 50 bp, Artificial
  Synthetic oligonucleotide
aatgggaccattaaagacagaacaccatataggtctctaatccgattccc

SEQ ID NO: 86483 - DNA, 60 bp, Artificial
  Synthetic oligonucleotide
gtcggcaacgatgtatggttgggcaggacagtgtcaactagtggtagatcgggctttgaa

SEQ ID NO: 86484 - DNA, 60 bp, Artificial
  Synthetic oligonucleotide
aataatatatgcagggagaatgacagactccatcaaatcatggagaagagacatattaag

SEQ ID NO: 86485 - DNA, 60 bp, Artificial
  Synthetic oligonucleotide
aggaaacgataatgatgcaagtgctcaaataatatatgcagggagaatgacagactccat

SEQ ID NO: 86486 - DNA, 60 bp, Artificial
  Synthetic oligonucleotide
attcaagtgatcctctcgttattgccgcaagtatcattgggatcttgcacttgatattgt

SEQ ID NO: 86487 - DNA, 60 bp, Artificial
  Synthetic oligonucleotide
gattcaagtgatcctctcgttattgccgcaagtatcattgggatcttgcacttgatattg

SEQ ID NO: 86488 - DNA, 60 bp, Artificial
  Synthetic oligonucleotide
gatcttatttcttcggagacaatgcagaggaatatgacaattaaagaaaaatacccttgt

SEQ ID NO: 86489 - DNA, 60 bp, Artificial
  Synthetic oligonucleotide
ggattgcatgataaaggcagtccgaggtgatctgaatttcgtaaacagagcaaaccaacg

SEQ ID NO: 86490 - DNA, 60 bp, Artificial
  Synthetic oligonucleotide
ggatcatccatcaattcagctggaaccactaaagcatgcatgagaaatggaggaaacagt

SEQ ID NO: 86491 - DNA, 60 bp, Artificial
  Synthetic oligonucleotide
cgcttatgggtcttccatcaactcggctggaaccactaaagcatgcatgagaaatggagg

SEQ ID NO: 86492 - DNA, 60 bp, Artificial
  Synthetic oligonucleotide
cctaacattgggtccaggccttgggtcagaggccaatcaggaagaataagcatctactgg

SEQ ID NO: 86493 - DNA, 60 bp, Artificial
  Synthetic oligonucleotide
gtgatgtcaagggttttgcacccttttccaaagacaacggaataaggattggatcgagag

SEQ ID NO: 86494 - DNA, 60 bp, Artificial
  Synthetic oligonucleotide
agatattctaagaactcaggaatcatcatgcacttgcattcaaggtgaatgtttttgggt

SEQ ID NO: 86495 - DNA, 60 bp, Artificial
  Synthetic oligonucleotide
gatgtgatcaattcttgggcgggagatattctaagaactcaggaatcatcatgcacttgc

SEQ ID NO: 86496 - DNA, 60 bp, Artificial
  Synthetic oligonucleotide
tagaaatagggcaatcacccaatgtgtaccaagcaaggtttgaggcagtagcatggtcag

SEQ ID NO: 86497 - DNA, 60 bp, Artificial
  Synthetic oligonucleotide
gggaattcctactgatgtaatcaattcctgggcgggagatattctaagaactcaggaatc

SEQ ID NO: 86498 - DNA, 60 bp, Artificial
  Synthetic oligonucleotide
ttcctactgatgtgatcaattcttgggcgggagatattctaagaactcaggaatcatcat

SEQ ID NO: 86499 - DNA, 60 bp, Artificial
  Synthetic oligonucleotide
gagatctaatgtcacagtcccgcacccgcgagatactcaccaaaaccactgtggaccaca

SEQ ID NO: 86500 - DNA, 60 bp, Artificial
  Synthetic oligonucleotide
agaatgccactgaaatcagagcatctgttgggaggatggttggcggaattgggagattct

SEQ ID NO: 86501 - DNA, 55 bp, Artificial
  Synthetic oligonucleotide
tatgtagtggggtgttcggagacaaccccaggcctgtggatggtacagggtcgtg

SEQ ID NO: 86502 - DNA, 60 bp, Artificial
  Synthetic oligonucleotide
atggagtttggatagggaggacaaaaagcttggagtccagaagtgggtttgagatggttt

SEQ ID NO: 86503 - DNA, 60 bp, Artificial
  Synthetic oligonucleotide
acactaaagagctggaaaggcaacattatgcgaacacaagagtctgaatgcgtgtgtcag

SEQ ID NO: 86504 - DNA, 60 bp, Artificial
  Synthetic oligonucleotide
acaagagtctgaatgcgtgtgtcaggatgagttttgttacactctagttacagacggacc

SEQ ID NO: 86505 - DNA, 60 bp, Artificial
  Synthetic oligonucleotide
cgtgtgtcaggatgagttttgttacactctagttacagacggaccgtccgatgcacaggc

SEQ ID NO: 86506 - DNA, 51 bp, Artificial
  Synthetic oligonucleotide
cagacggaccgtccgatgcacaggctttctacaagatattaaagatcaaaa

SEQ ID NO: 86507 - DNA, 60 bp, Artificial
  Synthetic oligonucleotide
gattccatttcgaggagtgttcctgttacccaagtggggaaaatgtcgagtgtgtgtgca

SEQ ID NO: 86508 - DNA, 60 bp, Artificial
  Synthetic oligonucleotide
ggagtgttcctgttacccaagtggggaaaatgtcgagtgtgtgtgcagagacaactggag

SEQ ID NO: 86509 - DNA, 60 bp, Artificial
  Synthetic oligonucleotide
tgtgtgtgcagagacaactggagagggagtaatagaccatggataagattcaacagtgac

SEQ ID NO: 86510 - DNA, 60 bp, Artificial
  Synthetic oligonucleotide
gtgtgtgcagagacaactggagagggagtaatagaccatggataagattcaacagtgacc

SEQ ID NO: 86511 - DNA, 60 bp, Artificial
  Synthetic oligonucleotide
cattggtagtgtgagcattgtactgacaacagtaggattgctactccaaataacaagctt

SEQ ID NO: 86512 - DNA, 60 bp, Artificial
  Synthetic oligonucleotide
ggtagtgtgagcattgtactgacaacagtaggattgctactccaaataacaagcttgtgt

SEQ ID NO: 86513 - DNA, 60 bp, Artificial
  Synthetic oligonucleotide
tactacaatgagacttttgtcaatgtcacaaacgtgcagaacaattataccaccatcact

SEQ ID NO: 86514 - DNA, 60 bp, Artificial
  Synthetic oligonucleotide
tttgtcaatgtcacaaacgtgcagaacaattataccaccatcactgaaccttcaatcccc

SEQ ID NO: 86515 - DNA, 60 bp, Artificial
  Synthetic oligonucleotide
accaggtaacccaaacaaacggacaaccatgttcgaacgacacgataaattactacaatg

SEQ ID NO: 86516 - DNA, 60 bp, Artificial
  Synthetic oligonucleotide
ggtaacccaaacaaacggacaaccatgttcgaacgacacgataaattactacaatgagac

SEQ ID NO: 86517 - DNA, 55 bp, Artificial
  Synthetic oligonucleotide
ggacaatgggatcagaattggatccaggggcgaggtatttgtcatacgagagccc

SEQ ID NO: 86518 - DNA, 60 bp, Artificial
  Synthetic oligonucleotide
taatgaatgcagaacttttttcctgacccaaggtgctctcctcaatgacaaacactcgaa

SEQ ID NO: 86519 - DNA, 60 bp, Artificial
  Synthetic oligonucleotide
ctgataccacaagttggtcatggcctgatggcgctctgttgccatttgacatagacaagt

SEQ ID NO: 86520 - DNA, 60 bp, Artificial
  Synthetic oligonucleotide
aacactcgaatgggacagtaaaagataggagtccttttcgcacactaatgagttgcccta

SEQ ID NO: 86521 - DNA, 58 bp, Artificial
  Synthetic oligonucleotide
ttttcctgacccaaggtgctctcctcaatgacaaacactcgaatgggacagtaaaaga

SEQ ID NO: 86522 - DNA, 60 bp, Artificial
  Synthetic oligonucleotide
agttgccctataggggttgccccttcccctagtaacagtcgttttgagtctgtagcttgg

SEQ ID NO: 86523 - DNA, 60 bp, Artificial
  Synthetic oligonucleotide
gacagtaaaagataggagtccttttcgcacactaatgagttgccctataggggttgcccc

SEQ ID NO: 86524 - DNA, 60 bp, Artificial
  Synthetic oligonucleotide
tgtagcttggtctgccactgcatgcagcgatggacccggctggttgacattaggaattac

SEQ ID NO: 86525 - DNA, 60 bp, Artificial
  Synthetic oligonucleotide
taggaattacaggtcctgatactactgctgttgcagtattgaagtacaatggtgttatca

SEQ ID NO: 86526 - DNA, 60 bp, Artificial
  Synthetic oligonucleotide
ggggttgccccttcccctagtaacagtcgttttgagtctgtagcttggtctgccactgca

SEQ ID NO: 86527 - DNA, 60 bp, Artificial
  Synthetic oligonucleotide
ttttgggttgaaatgataaggggacagcctaaggagaaaaccatatggactagcggtagt

SEQ ID NO: 86528 - DNA, 53 bp, Artificial
  Synthetic oligonucleotide
gtttcagcattaggggagaaacaactggcaggaactgcactgtaccgtgtttt

SEQ ID NO: 86529 - DNA, 60 bp, Artificial
  Synthetic oligonucleotide
gtttcagcattaggggagaaacaactggcaggaactgcactgtaccgtgtttttgggttg

SEQ ID NO: 86530 - DNA, 60 bp, Artificial
  Synthetic oligonucleotide
tatagacaatgacaattggtctggctatagtggaagtttcagcattaggggagaaacaac

SEQ ID NO: 86531 - DNA, 60 bp, Artificial
  Synthetic oligonucleotide
tggtgtacaggatattatagacaatgacaattggtctggctatagtggaagtttcagcat

SEQ ID NO: 86532 - DNA, 60 bp, Artificial
  Synthetic oligonucleotide
gatggtttgggacgcaaacgggtgggtttcaacagacaaggactcaaatggtgtacagga

SEQ ID NO: 86533 - DNA, 60 bp, Artificial
  Synthetic oligonucleotide
gagatggtttgggacgcaaacgggtgggtttcaacagacaaggactcaaatggtgtacag

SEQ ID NO: 86534 - DNA, 60 bp, Artificial
  Synthetic oligonucleotide
ggtctgccactgcatgcagcgatggacccggctggttgacattaggaattacaggtcctg

SEQ ID NO: 86535 - DNA, 60 bp, Artificial
  Synthetic oligonucleotide
ggtgttatcacagacacactaaagagctggaaaggcaacattatgcgaacacaagagtct

SEQ ID NO: 86536 - DNA, 60 bp, Artificial
  Synthetic oligonucleotide
caggtcctgatactactgctgttgcagtattgaagtacaatggtgttatcacagacacac

SEQ ID NO: 86537 - DNA, 52 bp, Artificial
  Synthetic oligonucleotide
aaaagcttggagtccagaagtgggtttgagatggtttgggacgcaaacgggt

SEQ ID NO: 86538 - DNA, 60 bp, Artificial
  Synthetic oligonucleotide
tctgataccacaagttggtcatggcctgatggcgctctgttgccatttgacatagacaag

SEQ ID NO: 86539 - DNA, 60 bp, Artificial
  Synthetic oligonucleotide
gggttgaaatgataaggggacagcctaaggagaaaaccatatggactagcggtagtagta

SEQ ID NO: 86540 - DNA, 60 bp, Artificial
  Synthetic oligonucleotide
gcagtctgaatgggatagctcctttacaattggggaagtgtaatgtagcgggatggctcc

SEQ ID NO: 86541 - DNA, 60 bp, Artificial
  Synthetic oligonucleotide
gcgggatggctcctgggcaacccagaatgtgaccttttactcactgcaaactcatggtcc

SEQ ID NO: 86542 - DNA, 60 bp, Artificial
  Synthetic oligonucleotide
caagatggaagcaaaactgttcgtactattctgtacattcactgtcctgaaagctgacac

SEQ ID NO: 86543 - DNA, 60 bp, Artificial
  Synthetic oligonucleotide
ccaccaccagaatgagcaaggatcagggtatgccgctgatcagaaaagcacacagactgc

SEQ ID NO: 86544 - DNA, 60 bp, Artificial
  Synthetic oligonucleotide
aaaagaacgtaactgtgacccactcagtgaatttgctcgaagacagccataatgggaaac

SEQ ID NO: 86545 - DNA, 60 bp, Artificial
  Synthetic oligonucleotide
agaatgtcccaagtatatcaagagcaccaagctaaggatggcaacaggactaagaaatgt

SEQ ID NO: 86546 - DNA, 60 bp, Artificial
  Synthetic oligonucleotide
gttcacaattgcaacacgagatgccaaacccctcacggggcgttgaacagtagcctccct

SEQ ID NO: 86547 - DNA, 60 bp, Artificial
  Synthetic oligonucleotide
gccttcgcactaaataaagggtcagactcagggattataacatcagatgctccagttcac

SEQ ID NO: 86548 - DNA, 60 bp, Artificial
  Synthetic oligonucleotide
gagacaccataacatttgaggccactgggaatctgatagcaccatggtatgccttcgcac

SEQ ID NO: 86549 - DNA, 60 bp, Artificial
  Synthetic oligonucleotide
ccgaccaccagtgagcaacagagtctataccagaacactgatgcatacgtctcagttggg

SEQ ID NO: 86550 - DNA, 60 bp, Artificial
  Synthetic oligonucleotide
cactgtcctgaaagctgacactatctgtgtgggctaccatgcaaacaactctacagacac

SEQ ID NO: 86551 - DNA, 60 bp, Artificial
  Synthetic oligonucleotide
cacagactgcaatcgacggaataacaaataaggtgaattcggtaattgagaaaatgaaca

SEQ ID NO: 86552 - DNA, 60 bp, Artificial
  Synthetic oligonucleotide
catgattccaatgtgaggaatttatatgaaaaggtcagatcacaactgaggaataacgcc

SEQ ID NO: 86553 - DNA, 60 bp, Artificial
  Synthetic oligonucleotide
tgcctgctcttactctggggccagcagtttttaccgaaatttgctgtggataacaaagaa

SEQ ID NO: 86554 - DNA, 60 bp, Artificial
  Synthetic oligonucleotide
ggacatgctatcccggtgagttcatagattatgaagaattaagggagcaattgagttcgg

SEQ ID NO: 86555 - DNA, 60 bp, Artificial
  Synthetic oligonucleotide
gtgtgaagaacggcacatatgactaccccaaatattcagaagagtctaaattgaatcgag

SEQ ID NO: 86556 - DNA, 60 bp, Artificial
  Synthetic oligonucleotide
agggaaaagaagtgcttgtgctctggggagtgcaccatcctccgaccaccagtgagcaac

SEQ ID NO: 86557 - DNA, 60 bp, Artificial
  Synthetic oligonucleotide
catacacgaacaataagggaaaagaagtgcttgtgctctggggagtgcaccatcctccga

SEQ ID NO: 86558 - DNA, 60 bp, Artificial
  Synthetic oligonucleotide
tttggacatacaatgctgaactgctcgttctgctggaaaatgaaagaactctggactttc

SEQ ID NO: 86559 - DNA, 60 bp, Artificial
  Synthetic oligonucleotide
gtctcagttgggtcatcaaagtacaaccgaagattcactccagagatagcagctagaccc

SEQ ID NO: 86560 - DNA, 60 bp, Artificial
  Synthetic oligonucleotide
aaaatgaacactcaattcaccgcagtgggtaaggagttcaataatctagagaggagaatt

SEQ ID NO: 86561 - DNA, 60 bp, Artificial
  Synthetic oligonucleotide
tctgaataagaaagtcgatgatgggttcctggatgtttggacatacaatgctgaactgct

SEQ ID NO: 86562 - DNA, 60 bp, Artificial
  Synthetic oligonucleotide
ctacataaacaggacaggaacatttgaattcacaagctttttctatcgctatggatttgt

SEQ ID NO: 86563 - DNA, 54 bp, Artificial
  Synthetic oligonucleotide
gctcagaccgagtgatggtatcacctctggctgtgacatggtggaataggaatg

SEQ ID NO: 86564 - DNA, 59 bp, Artificial
  Synthetic oligonucleotide
ctgctcgaagtggagcaagagataagaactttctcgtttcagcttatttaatgataaaa

SEQ ID NO: 86565 - DNA, 60 bp, Artificial
  Synthetic oligonucleotide
ctgctcgaagtggagcaagagataagaactttctcgtttcagcttatttaatgataaaaa

SEQ ID NO: 86566 - DNA, 60 bp, Artificial
  Synthetic oligonucleotide
gcgcaaaatgccataagcactacattcccatatactggagatcctccatacagccatgga

SEQ ID NO: 86567 - DNA, 60 bp, Artificial
  Synthetic oligonucleotide
gcgcaaaatgctataagcaccacattcccatatactggagatcctccatacagccatgga

SEQ ID NO: 86568 - DNA, 60 bp, Artificial
  Synthetic oligonucleotide
gggaggttctacatacagatgtgcactgaactcaaactcagtgactatgaagggagactg

SEQ ID NO: 86569 - DNA, 57 bp, Artificial
  Synthetic oligonucleotide
tgggtcaggggccaatcaggaaggataagcatctactggacaatagtgaagccgggg

SEQ ID NO: 86570 - DNA, 60 bp, Artificial
  Synthetic oligonucleotide
tgcgatcagaataggagaggatgcccacatccttgtcacaagagaaccatatctctcatg

SEQ ID NO: 86571 - DNA, 60 bp, Artificial
  Synthetic oligonucleotide
cgcgattagaataggagaggatgcccacatccttgtcacaagagaaccatatctctcatg

SEQ ID NO: 86572 - DNA, 60 bp, Artificial
  Synthetic oligonucleotide
ggaagttgttttcccaaatgaagtgggagctagaatactaacatcggagtcacaactgac

SEQ ID NO: 86573 - DNA, 60 bp, Artificial
  Synthetic oligonucleotide
catggaatggctaaagacaagaccaatcctgtcacctctgactaagggaattttggggtt

SEQ ID NO: 86574 - DNA, 60 bp, Artificial
  Synthetic oligonucleotide
caataattgtggccatggtattttcacaagaggattgcatgatcaaggcagttcggggtg

SEQ ID NO: 86575 - DNA, 60 bp, Artificial
  Synthetic oligonucleotide
ggcaggcccaaagagagtagtgtattgtggacatccaatagtatagtagcgctttgtgga

SEQ ID NO: 86576 - DNA, 60 bp, Artificial
  Synthetic oligonucleotide
ccagattatcagagcctacggagtatcttagcaaacaatggaaaatttgagttcattgct

SEQ ID NO: 86577 - DNA, 60 bp, Artificial
  Synthetic oligonucleotide
ggcaccaaacgatcttatgagcagatggaaactggtggagagcgccagaatgccactgag

SEQ ID NO: 86578 - DNA, 60 bp, Artificial
  Synthetic oligonucleotide
ttgggatcatggtcctggcatgatggtgctgaaatcatctactttaagtagaaatgattt

SEQ ID NO: 86579 - DNA, 60 bp, Artificial
  Synthetic oligonucleotide
gaggattgttcggggccatagctgggtttatagaaggaggatggacaggcatgatagatg

SEQ ID NO: 86580 - DNA, 58 bp, Artificial
  Synthetic oligonucleotide
aaagggcaatagatggaatcaccaataaggtcaactcaatcattgacaaaatgaacac

SEQ ID NO: 86581 - DNA, 60 bp, Artificial
  Synthetic oligonucleotide
gtccactcaaaaagcaatagatggaatcactaataaggtcaactcaatcattgacaaaat

SEQ ID NO: 86582 - DNA, 60 bp, Artificial
  Synthetic oligonucleotide
attcacaagacacagagctctctttcacaatcactggagacaacaccaaatggaatgaaa

SEQ ID NO: 86583 - DNA, 60 bp, Artificial
  Synthetic oligonucleotide
caagacacagagctctctttcacaatcactggagacaacaccaaatggaatgaaaatcag

SEQ ID NO: 86584 - DNA, 54 bp, Artificial
  Synthetic oligonucleotide
cactcactgagtgacatcaacatcatggcgtcccaaggcaccaaacgatcttat

SEQ ID NO: 86585 - DNA, 60 bp, Artificial
  Synthetic oligonucleotide
agaagttgtcactgcccaggaattagtagaatcgcaacatctaccggaattgtgtcctag

SEQ ID NO: 86586 - DNA, 60 bp, Artificial
  Synthetic oligonucleotide
caagggctttgcacctttctccaaagacaatgggataagaattggttccaggggacatgt

SEQ ID NO: 86587 - DNA, 60 bp, Artificial
  Synthetic oligonucleotide
agcaatatgtgatgtcaagggctttgcacctttctccaaagacaatgggataagaattgg

SEQ ID NO: 86588 - DNA, 60 bp, Artificial
  Synthetic oligonucleotide
gaagcaatatgtgatgtcaagggctttgcacctttctccaaagacaatgggataagaatt

SEQ ID NO: 86589 - DNA, 60 bp, Artificial
  Synthetic oligonucleotide
ctcttacttgaagttgagagtgagataaggacattttcttttcagcttatttagtactaa

SEQ ID NO: 86590 - DNA, 60 bp, Artificial
  Synthetic oligonucleotide
cataaataggacaggaacatttgaattcacaagctttttctatcgctatggatttgtagc

SEQ ID NO: 86591 - DNA, 60 bp, Artificial
  Synthetic oligonucleotide
ttgcctatgaaagaatgtgcaacatccttaaagggaaatttcaaacagcagcacaacggg

SEQ ID NO: 86592 - DNA, 60 bp, Artificial
  Synthetic oligonucleotide
gataatcactcactgagtgacatccacatcatggcgtcccaaggcaccaaacgatcttat

SEQ ID NO: 86593 - DNA, 60 bp, Artificial
  Synthetic oligonucleotide
ggtagataatcactcaccgagtgacatccacatcatggcgtctcaaggcaccaaacggtc

SEQ ID NO: 86594 - DNA, 60 bp, Artificial
  Synthetic oligonucleotide
cactgagtgacatccacatcatggcgtcccaaggcaccaaacgatcttatgaacagatgg

SEQ ID NO: 86595 - DNA, 60 bp, Artificial
  Synthetic oligonucleotide
gaatgtgcaacattctcaaagggaaatttcaaacagcagcacaacgagcaatgatggacc

SEQ ID NO: 86596 - DNA, 60 bp, Artificial
  Synthetic oligonucleotide
gctgggagcagatgtacactccaggaggggaagtgagaaatgatgatgttgaccagagct

SEQ ID NO: 86597 - DNA, 60 bp, Artificial
  Synthetic oligonucleotide
tgaagagacaggaaatagaaggtataaagctgaagtcagacgataatgtttacaaagcat

SEQ ID NO: 86598 - DNA, 60 bp, Artificial
  Synthetic oligonucleotide
aagaccaatgcaattgatgaggggaatggatgctttgaactcctccataaatgcaatgac

SEQ ID NO: 86599 - DNA, 60 bp, Artificial
  Synthetic oligonucleotide
ctaaagaccaatgcaattgatgaggggaatggatgctttgaactcctccataaatgcaat

SEQ ID NO: 86600 - DNA, 60 bp, Artificial
  Synthetic oligonucleotide
atgcaaagcttcttgtgttgctagagaacgataaaactctagacatgcatgatgccaatg

SEQ ID NO: 86601 - DNA, 60 bp, Artificial
  Synthetic oligonucleotide
atgtatggtcatacaatgcaaagcttcttgtgttgctagagaacgataaaactctagaca

SEQ ID NO: 86602 - DNA, 60 bp, Artificial
  Synthetic oligonucleotide
tatgcttgcagacagaatagatgacgctgtaactgatgtatggtcatacaatgcaaagct

SEQ ID NO: 86603 - DNA, 60 bp, Artificial
  Synthetic oligonucleotide
ggaacaaaggataaatatgcttgcagacagaatagatgacgctgtaactgatgtatggtc

SEQ ID NO: 86604 - DNA, 60 bp, Artificial
  Synthetic oligonucleotide
aattatgactccatacgaggtgaattcaatcaagtggaacaaaggataaatatgcttgca

SEQ ID NO: 86605 - DNA, 58 bp, Artificial
  Synthetic oligonucleotide
tacaaagcattatcgatttacagctgcattgcaagcagtattgtaatggtaggactca

SEQ ID NO: 86606 - DNA, 60 bp, Artificial
  Synthetic oligonucleotide
gaagagacaggaaatagaaggtataaagctgaagtcagacgataatgtttacaaagcatt

SEQ ID NO: 86607 - DNA, 60 bp, Artificial
  Synthetic oligonucleotide
caatgacccatatacattggtatctaccagttcatggagtagaaaatacaacttagaaat

SEQ ID NO: 86608 - DNA, 60 bp, Artificial
  Synthetic oligonucleotide
attggtatctaccagttcatggagtagaaaatacaacttagaaattggaatccggcctgg

SEQ ID NO: 86609 - DNA, 60 bp, Artificial
  Synthetic oligonucleotide
ggcagtgaatgatggagtatcatcggcctgccaggatcgaggggccagcagcttttatcg

SEQ ID NO: 86610 - DNA, 52 bp, Artificial
  Synthetic oligonucleotide
tccgcgggacctacaacaatacaactggcagagatgttttggtcatgtgggg

SEQ ID NO: 86611 - DNA, 60 bp, Artificial
  Synthetic oligonucleotide
tccgcgggacctacaacaatacaactggcagagatgttttggtcatgtgggggatacatc

SEQ ID NO: 86612 - DNA, 60 bp, Artificial
  Synthetic oligonucleotide
gggatacatcatcctgtttccacagacgaggcgagaaaactatatgtcaacaatgaccca

SEQ ID NO: 86613 - DNA, 60 bp, Artificial
  Synthetic oligonucleotide
ctgtgccagcaacatggggatcagagaatggtcatacttgattgaagatccctctgcacc

SEQ ID NO: 86614 - DNA, 60 bp, Artificial
  Synthetic oligonucleotide
acctgttcagtggaatcagatctttcagtagaacagagttgatcgcacctacttcttggg

SEQ ID NO: 86615 - DNA, 60 bp, Artificial
  Synthetic oligonucleotide
cctgttcagtggaatcagatctttcagtagaacagagttgatcgcacctacttcttgggg

SEQ ID NO: 86616 - DNA, 60 bp, Artificial
  Synthetic oligonucleotide
acttcttggggggcagtgaatgatggagtatcatcggcctgccaggatcgaggggccagc

SEQ ID NO: 86617 - DNA, 60 bp, Artificial
  Synthetic oligonucleotide
acttagaaattggaatccggcctggatacaatggccaaaagagttggatgaagatttact

SEQ ID NO: 86618 - DNA, 60 bp, Artificial
  Synthetic oligonucleotide
tccggcctggatacaatggccaaaagagttggatgaagatttactggtatttgatgcacc

SEQ ID NO: 86619 - DNA, 60 bp, Artificial
  Synthetic oligonucleotide
aagatttactggtatttgatgcacccaggggaatcaatcagtttcgaaagcaatggagga

SEQ ID NO: 86620 - DNA, 60 bp, Artificial
  Synthetic oligonucleotide
gtatttgatgcacccaggggaatcaatcagtttcgaaagcaatggaggattgttggcccc

SEQ ID NO: 86621 - DNA, 60 bp, Artificial
  Synthetic oligonucleotide
caatggaggattgttggcccccagatatggttatattattgaggaatatggaaaagggcg

SEQ ID NO: 86622 - DNA, 60 bp, Artificial
  Synthetic oligonucleotide
gcagctcaagttggccaccggacttagaaatgtacctgccatatcaaacagaggattatt

SEQ ID NO: 86623 - DNA, 60 bp, Artificial
  Synthetic oligonucleotide
ggccaccggacttagaaatgtacctgccatatcaaacagaggattatttggagctattgc

SEQ ID NO: 86624 - DNA, 60 bp, Artificial
  Synthetic oligonucleotide
ttaataaatggttggtatggattccaacatcagaacgaacaaggagtgggaatggctgca

SEQ ID NO: 86625 - DNA, 60 bp, Artificial
  Synthetic oligonucleotide
ggttggtatggattccaacatcagaacgaacaaggagtgggaatggctgcagacaaagag

SEQ ID NO: 86626 - DNA, 60 bp, Artificial
  Synthetic oligonucleotide
gaaaaaatgaatggaaattatgactccatacgaggtgaattcaatcaagtggaacaaagg

SEQ ID NO: 86627 - DNA, 60 bp, Artificial
  Synthetic oligonucleotide
tggacatgcaacagtggaaactgccggttcaatatctgtatataagtagaaaaaataccc

SEQ ID NO: 86628 - DNA, 51 bp, Artificial
  Synthetic oligonucleotide
ggacatgcaacagtggaaactgccggttcaatatctgtatataagtagaaa

SEQ ID NO: 86629 - DNA, 60 bp, Artificial
  Synthetic oligonucleotide
gcagtcgcactcttgatattaaccagcacatgcgtacaggctgatagaatctgtgtggga

SEQ ID NO: 86630 - DNA, 60 bp, Artificial
  Synthetic oligonucleotide
atggacatccaagcagtcgcactcttgatattaaccagcacatgcgtacaggctgataga

SEQ ID NO: 86631 - DNA, 60 bp, Artificial
  Synthetic oligonucleotide
gcctgtgccagcaacatggggatcagagaatggtcatacttgattgaagatccctctgca

SEQ ID NO: 86632 - DNA, 52 bp, Artificial
  Synthetic oligonucleotide
ggctgatagaatctgtgtgggatacttaagcaccaactcatcagaaaaagtt

SEQ ID NO: 86633 - DNA, 60 bp, Artificial
  Synthetic oligonucleotide
caagacacagagctctctttcacaatcactggagacaacaccaaatggaacgaaaatcag

SEQ ID NO: 86634 - DNA, 60 bp, Artificial
  Synthetic oligonucleotide
gcgcaaaatgccataagcaccacattcccatacactggagatcctccatacagccatggg

SEQ ID NO: 86635 - DNA, 60 bp, Artificial
  Synthetic oligonucleotide
gcgcaaaatgccataagcaccacattcccatacactggagatcctccatacagccatgga

SEQ ID NO: 86636 - DNA, 60 bp, Artificial
  Synthetic oligonucleotide
gtggtgcattatgggggaattcctactgatgtaatcaattcctgggcaggagatattcta

SEQ ID NO: 86637 - DNA, 57 bp, Artificial
  Synthetic oligonucleotide
tgagacggtaaggattgaaaggataacacaatggcacaataccaatgtcattgagta

SEQ ID NO: 86638 - DNA, 60 bp, Artificial
  Synthetic oligonucleotide
cagtgaaagatcggagcccctatagaactctaatgagtgtagagatagggcaatcaccca

SEQ ID NO: 86639 - DNA, 60 bp, Artificial
  Synthetic oligonucleotide
tgagacggtaaggattgaaaggataacacaatggcacaataccaatgtcattgagtatct

SEQ ID NO: 86640 - DNA, 57 bp, Artificial
  Synthetic oligonucleotide
tgccatgatggcatatcaagaatgtcaatatgcatgtcgggaccgaacaacaatgca

SEQ ID NO: 86641 - DNA, 60 bp, Artificial
  Synthetic oligonucleotide
caacaattggtcaggatactcaggaagtttcatcgactactgggatgaaagcaatgagtg

SEQ ID NO: 86642 - DNA, 58 bp, Artificial
  Synthetic oligonucleotide
atcactgggagtccgggagctcctggggtcaaaggattcggttttctagatagtggca

SEQ ID NO: 86643 - DNA, 60 bp, Artificial
  Synthetic oligonucleotide
ccaattggtcaggatactcaggaagtttcatcgactactgggatgaaagcaatgagtgct

SEQ ID NO: 86644 - DNA, 60 bp, Artificial
  Synthetic oligonucleotide
caccaattggtcaggatactcaggaagtttcatcgactactgggatgaaagcaatgagtg

SEQ ID NO: 86645 - DNA, 60 bp, Artificial
  Synthetic oligonucleotide
cggaagaagccaagtatgtttggtggacgagcaacagtttagttgcactatgtggaagcc

SEQ ID NO: 86646 - DNA, 60 bp, Artificial
  Synthetic oligonucleotide
taataagaggaaggccggaagaagccaagtatgtttggtggacgagcaacagtttagttg

SEQ ID NO: 86647 - DNA, 60 bp, Artificial
  Synthetic oligonucleotide
cactatgtggaagcccagtctcagttgggtccggttctttccccgatggggcacaaatcc

SEQ ID NO: 86648 - DNA, 60 bp, Artificial
  Synthetic oligonucleotide
agtttagttgcactatgtggaagcccagtctcagttgggtccggttctttccccgatggg

SEQ ID NO: 86649 - DNA, 60 bp, Artificial
  Synthetic oligonucleotide
tccattaggatgtaagatgtacgcactacatcaagggacgaccattagaaacaagcactc

SEQ ID NO: 86650 - DNA, 60 bp, Artificial
  Synthetic oligonucleotide
ggacgaccattagaaacaagcactcaaacggaacaatacacgacaggactgctttcagag

SEQ ID NO: 86651 - DNA, 60 bp, Artificial
  Synthetic oligonucleotide
aatgccataagattcggtgaaagtgaacaaataatagtaacaagggagccgtatgtgtca

SEQ ID NO: 86652 - DNA, 60 bp, Artificial
  Synthetic oligonucleotide
cggtgaaagtgaacaaataatagtaacaagggagccgtatgtgtcatgtgatccattagg

SEQ ID NO: 86653 - DNA, 60 bp, Artificial
  Synthetic oligonucleotide
gtatgtgtcatgtgatccattaggatgtaagatgtacgcactacatcaagggacgaccat

SEQ ID NO: 86654 - DNA, 60 bp, Artificial
  Synthetic oligonucleotide
tactgtcatcaataaggaaacagggactgcaaagccaaattacctaatgctgaacaaaag

SEQ ID NO: 86655 - DNA, 60 bp, Artificial
  Synthetic oligonucleotide
ggaaacagggactgcaaagccaaattacctaatgctgaacaaaagcttatgcaaagttga

SEQ ID NO: 86656 - DNA, 60 bp, Artificial
  Synthetic oligonucleotide
ggtattggacggatgaccatttgtgtgcaggggaataatgacaatgcaacagctacagta

SEQ ID NO: 86657 - DNA, 51 bp, Artificial
  Synthetic oligonucleotide
agctacagtatactatgaccgaaggctcactaccacaataaaaacatgggc

SEQ ID NO: 86658 - DNA, 60 bp, Artificial
  Synthetic oligonucleotide
gctttcagagggctgatatcaactccattagggagcccccctatagtcagcaatagtgac

SEQ ID NO: 86659 - DNA, 60 bp, Artificial
  Synthetic oligonucleotide
ccctcaaaggatcagccagacacatagaggaatgctcatgctatgggcacaattcaaagg

SEQ ID NO: 86660 - DNA, 60 bp, Artificial
  Synthetic oligonucleotide
ttgaaatagatatgaatgctatggagcatacaagtcagtatctatgtacaggggttctca

SEQ ID NO: 86661 - DNA, 60 bp, Artificial
  Synthetic oligonucleotide
acatacaaaagttctgtattttcacaaaggactagtaataaaagaggaagccctcaaagg

SEQ ID NO: 86662 - DNA, 58 bp, Artificial
  Synthetic oligonucleotide
gatatgaatgctatggagcatacaagtcagtatctatgtacaggggttctcactgaca

SEQ ID NO: 86663 - DNA, 60 bp, Artificial
  Synthetic oligonucleotide
gagactgcaataatccaatcactgggagtccgggagctcctggggtcaaaggattcggtt

SEQ ID NO: 86664 - DNA, 60 bp, Artificial
  Synthetic oligonucleotide
tacacctaaagggcagcaatgaccaagataaaaattggacatgcacgagtgtaacacaga

SEQ ID NO: 86665 - DNA, 60 bp, Artificial
  Synthetic oligonucleotide
tataggacctgcaagctggtcggaatcaatatgagcaaaaagaagtcctacataaacagg

SEQ ID NO: 86666 - DNA, 60 bp, Artificial
  Synthetic oligonucleotide
cattaaagggaagaggcagcacacttggactcgatctaagggtggccacaatggaaggga

SEQ ID NO: 86667 - DNA, 60 bp, Artificial
  Synthetic oligonucleotide
atctgcatatcaggacctaataacaatgcttcggcagtggtctggtacaatggaagacca

SEQ ID NO: 86668 - DNA, 60 bp, Artificial
  Synthetic oligonucleotide
aaaatgagcacaccggatctttttgctcaattgacgggaaagcaccgataagtcttggtg

SEQ ID NO: 86669 - DNA, 60 bp, Artificial
  Synthetic oligonucleotide
tctgttacccgggtagtctagacaacgaagaggaattgagactgaagtttagtggggtcc

SEQ ID NO: 86670 - DNA, 60 bp, Artificial
  Synthetic oligonucleotide
agctggattccagtggcaacgtttacaaaatactgtcgatttacagctgcattgcaagca

SEQ ID NO: 86671 - DNA, 53 bp, Artificial
  Synthetic oligonucleotide
tcttgctcaactagatgccagtcagagattggagggatcaacactaacaagag

SEQ ID NO: 86672 - DNA, 60 bp, Artificial
  Synthetic oligonucleotide
ggtacctgagcaacaattcaacagaaaaagtggacacaataattgagagcaacgtcaccg

SEQ ID NO: 86673 - DNA, 60 bp, Artificial
  Synthetic oligonucleotide
ggaatttgaagaggagtccaagttgaacagacaagaaattgaaggagtaaagctggattc

SEQ ID NO: 86674 - DNA, 60 bp, Artificial
  Synthetic oligonucleotide
cttgtgttagcagcaatcattatggggttcattttatgggcatgtagcaatgggtcatgc

SEQ ID NO: 86675 - DNA, 60 bp, Artificial
  Synthetic oligonucleotide
cttgtacaaaaaagacatctcttatgtagcagtgggttcagagagatacaacaggaggtt

SEQ ID NO: 86676 - DNA, 60 bp, Artificial
  Synthetic oligonucleotide
gaaaacatcatggtcctacatagtagagaaaccaaatcctgctaacggaatctgttaccc

SEQ ID NO: 86677 - DNA, 60 bp, Artificial
  Synthetic oligonucleotide
tggtgcatttatcgctcctcggtatgcttttgagttggtgtccttggggaatgggaaact

SEQ ID NO: 86678 - DNA, 60 bp, Artificial
  Synthetic oligonucleotide
gaggttcactcctgaaatcagtgcaagacctgcagtaaatggtcaggctgggagaatgac

SEQ ID NO: 86679 - DNA, 60 bp, Artificial
  Synthetic oligonucleotide
agtggggtcctcgaatacagcaaatttgaagcattcacttcaaatggatggggagcggta

SEQ ID NO: 86680 - DNA, 60 bp, Artificial
  Synthetic oligonucleotide
tggaagcagtagctcttttttcagacacatggtatggttgatccatcaatcagggacata

SEQ ID NO: 86681 - DNA, 60 bp, Artificial
  Synthetic oligonucleotide
gtcaggaaccttcatgaaaaggtcaggcggatgctgaaagataatgctaaagatgaagga

SEQ ID NO: 86682 - DNA, 60 bp, Artificial
  Synthetic oligonucleotide
tgcagacaaagaatcaacccagaaggcaatagaccagataacatccaaagttaataacat

SEQ ID NO: 86683 - DNA, 60 bp, Artificial
  Synthetic oligonucleotide
taatggtatggggagttcaccatccttcaagtctacaggaacaccgagacttgtacaaaa

SEQ ID NO: 86684 - DNA, 60 bp, Artificial
  Synthetic oligonucleotide
ggagcagtgagagggcttgacaaaatctgtctaggacatcatgcagtagctaatggaacc

SEQ ID NO: 86685 - DNA, 60 bp, Artificial
  Synthetic oligonucleotide
ataggaacaccagcttgtgatctgcatcttactgggacatgggacactctcattgagcga

SEQ ID NO: 86686 - DNA, 60 bp, Artificial
  Synthetic oligonucleotide
agtggagagtacaagtttaaacaggttatgtatgaagggaagaagctataaggatctggg

SEQ ID NO: 86687 - DNA, 60 bp, Artificial
  Synthetic oligonucleotide
cgtgaaaacccttacaaatgtacaggaagaggtgaccaatgctactgaaacagtggagag

SEQ ID NO: 86688 - DNA, 60 bp, Artificial
  Synthetic oligonucleotide
gctaatggaaccatcgtgaaaacccttacaaatgtacaggaagaggtgaccaatgctact

SEQ ID NO: 86689 - DNA, 60 bp, Artificial
  Synthetic oligonucleotide
ctttgttcttctggccgctgtcatgggacttgttttcttctgtctgaaaaatggaaacat

SEQ ID NO: 86690 - DNA, 60 bp, Artificial
  Synthetic oligonucleotide
tacagccgggtgacaacataaccttctcacacaatgggggtcggatagcaccgagtcgag

SEQ ID NO: 86691 - DNA, 60 bp, Artificial
  Synthetic oligonucleotide
gacatcattctttggtttagcttcggggcatcatgctttgttcttctggccgctgtcatg

SEQ ID NO: 86692 - DNA, 60 bp, Artificial
  Synthetic oligonucleotide
agggaagaagctataaggatctgggcaactgccatccaataggaatgttgataggaacac

SEQ ID NO: 86693 - DNA, 60 bp, Artificial
  Synthetic oligonucleotide
tatagaaacacggacacagctgaacatctcataatatggggaattcaccatccttccagc

SEQ ID NO: 86694 - DNA, 60 bp, Artificial
  Synthetic oligonucleotide
gttgggagttccacatatcagaacaattttgttccagttgttagggcaagacctcaggtc

SEQ ID NO: 86695 - DNA, 60 bp, Artificial
  Synthetic oligonucleotide
acctcaggtcaatggacaaagcgggcgaattgatttccactggacattagtacagccggg

SEQ ID NO: 86696 - DNA, 60 bp, Artificial
  Synthetic oligonucleotide
agcatcaatagacaatggttgtgaatctaaatgtttttggagaggaggctccataaatac

SEQ ID NO: 86697 - DNA, 60 bp, Artificial
  Synthetic oligonucleotide
gatgggaaggggtgttttgagatatatcatacttgtgacgattcatgcatggagagcata

SEQ ID NO: 86698 - DNA, 60 bp, Artificial
  Synthetic oligonucleotide
ccgagtcgagttagcaaactagttggaagaggtttgggaattcaatcagaagcatcaata

SEQ ID NO: 86699 - DNA, 60 bp, Artificial
  Synthetic oligonucleotide
ctgagtttgagtcaatagagtctgagttcagtgagattgaacaccagattggtaacgtca

SEQ ID NO: 86700 - DNA, 60 bp, Artificial
  Synthetic oligonucleotide
accaaaatgctcaggggacaggccaagccgccgattacaagagtactcaggcagctatcg

SEQ ID NO: 86701 - DNA, 60 bp, Artificial
  Synthetic oligonucleotide
caagggagaggtctatttggtgcaatagcaggatttatagaaaacggatgggaaggaatg

SEQ ID NO: 86702 - DNA, 60 bp, Artificial
  Synthetic oligonucleotide
ggataagggacaaaacttccctcagaccacaaacacttatagaaacacggacacagctga

SEQ ID NO: 86703 - DNA, 60 bp, Artificial
  Synthetic oligonucleotide
ggtaacgtcattaattggaccaaggattcaataaccgacatttggacttatcaggctgaa

SEQ ID NO: 86704 - DNA, 60 bp, Artificial
  Synthetic oligonucleotide
gcactgaggcagaaaataatggagagtggaggaatcagcaaaacaagtactggcttcgct

SEQ ID NO: 86705 - DNA, 60 bp, Artificial
  Synthetic oligonucleotide
acaagtactggcttcgcttatgggtcttccatcaactcggctggaaccactaaagcatgc

SEQ ID NO: 86706 - DNA, 60 bp, Artificial
  Synthetic oligonucleotide
tcttcgggctataaagacatcattctttggtttagcttcggggcatcatgctttgttctt

SEQ ID NO: 86707 - DNA, 60 bp, Artificial
  Synthetic oligonucleotide
gaaatggaggagatagtttctatgcagaggtcaaatggctagtatcaaaggataagggac

SEQ ID NO: 86708 - DNA, 60 bp, Artificial
  Synthetic oligonucleotide
ccagcttgtgatctgcatcttactgggacatgggacactctcattgagcgaaagaatgcc

SEQ ID NO: 86709 - DNA, 60 bp, Artificial
  Synthetic oligonucleotide
cattgagcgaaagaatgccattgcctactgttaccctggaacaaccataaatgaaggagc

SEQ ID NO: 86710 - DNA, 60 bp, Artificial
  Synthetic oligonucleotide
gaatgccattgcctactgttaccctggaacaaccataaatgaaggagcactgaggcagaa

SEQ ID NO: 86711 - DNA, 60 bp, Artificial
  Synthetic oligonucleotide
atgaaggagcactgaggcagaaaataatggagagtggaggaatcagcaaaacaagtactg

SEQ ID NO: 86712 - DNA, 58 bp, Artificial
  Synthetic oligonucleotide
ggagagcataaggaacaacacctatgaccattcacaatacagagaggaagctcttttg

SEQ ID NO: 86713 - DNA, 60 bp, Artificial
  Synthetic oligonucleotide
aattgcttacgaaagaatgtgcaacattctcaaagggaaatttcaaacagcagcacaacg

SEQ ID NO: 86714 - DNA, 60 bp, Artificial
  Synthetic oligonucleotide
gaggaattccaatggagcacagtcaaacaaaatgggaaatccggggcatgcaaaagagca

SEQ ID NO: 86715 - DNA, 60 bp, Artificial
  Synthetic oligonucleotide
aaaatgcaattggggtactcatcggaggacttgaatggaatgataacacagttcgagtct

SEQ ID NO: 86716 - DNA, 60 bp, Artificial
  Synthetic oligonucleotide
ggacaggaacatttgaattcacaagctttttctatcgctatgggtttgtagccaatttta

SEQ ID NO: 86717 - DNA, 60 bp, Artificial
  Synthetic oligonucleotide
atctgttccaccattgaagagctcagacggcagaagtagtgaatttggcttgtccttcat

SEQ ID NO: 86718 - DNA, 60 bp, Artificial
  Synthetic oligonucleotide
caaaagcaggggaaaatgattgcaatcataatacttgcaatagtggtctctaccagcaag

SEQ ID NO: 86719 - DNA, 60 bp, Artificial
  Synthetic oligonucleotide
agcaaaagcaggggaaaatgattgcaatcataataatcgcgatagtggcctctaccagca

SEQ ID NO: 86720 - DNA, 60 bp, Artificial
  Synthetic oligonucleotide
tccaaacagcagcacaacgagcaatgatggaccaagtgcgggaaagccggaatcctggga

SEQ ID NO: 86721 - DNA, 60 bp, Artificial
  Synthetic oligonucleotide
aataatccctgggttttgcttaatgcgtcttggttcaactccttcctcacacatgcactg

SEQ ID NO: 86722 - DNA, 60 bp, Artificial
  Synthetic oligonucleotide
gtggaccatatggccataatcaagaaatacacatcaggaagacaagagaagaatcccgca

SEQ ID NO: 86723 - DNA, 60 bp, Artificial
  Synthetic oligonucleotide
tggaatctgtaatgggacggtagtgagggaatataacgagacagttaggatcgagagggt

SEQ ID NO: 86724 - DNA, 60 bp, Artificial
  Synthetic oligonucleotide
gggacggtagtgagggaatataacgagacagttaggatcgagagggtaactcaatggcac

SEQ ID NO: 86725 - DNA, 60 bp, Artificial
  Synthetic oligonucleotide
ccattggctccatatcattgggattggttgtgttcaatgttctattgcatgtcgttagca

SEQ ID NO: 86726 - DNA, 60 bp, Artificial
  Synthetic oligonucleotide
gtcgttagcattatagtaacagtattaatcttagggaagggtgaaaacaatggaatctgt

SEQ ID NO: 86727 - DNA, 60 bp, Artificial
  Synthetic oligonucleotide
gtaacagtattaatcttagggaagggtgaaaacaatggaatctgtaatgggacggtagtg

SEQ ID NO: 86728 - DNA, 60 bp, Artificial
  Synthetic oligonucleotide
gggttcttgcactagtccaatagggaatcaagggtacggtgtaaaaggctttggatttcg

SEQ ID NO: 86729 - DNA, 60 bp, Artificial
  Synthetic oligonucleotide
gtccaatagggaatcaagggtacggtgtaaaaggctttggatttcggcagggaactgatg

SEQ ID NO: 86730 - DNA, 60 bp, Artificial
  Synthetic oligonucleotide
tgtgctggaattcctagtgataccccaagaggggaagatgcccaatttacgggttcttgc

SEQ ID NO: 86731 - DNA, 60 bp, Artificial
  Synthetic oligonucleotide
agtgataccccaagaggggaagatgcccaatttacgggttcttgcactagtccaataggg

SEQ ID NO: 86732 - DNA, 60 bp, Artificial
  Synthetic oligonucleotide
ggagggcacattgaagaatgttcttgctatcctaatgatggcaaagtggaatgtgtgtgt

SEQ ID NO: 86733 - DNA, 60 bp, Artificial
  Synthetic oligonucleotide
ggcctgtactagtcatctcgcctgatctctcttacagggttgggtacttatgtgctggaa

SEQ ID NO: 86734 - DNA, 60 bp, Artificial
  Synthetic oligonucleotide
acaaggcaaatcaaggcagaataattggtcagacggatgtaagttttaatggagggcaca

SEQ ID NO: 86735 - DNA, 60 bp, Artificial
  Synthetic oligonucleotide
gatgtaagttttaatggagggcacattgaagaatgttcttgctatcctaatgatggcaaa

SEQ ID NO: 86736 - DNA, 60 bp, Artificial
  Synthetic oligonucleotide
ccaaggtgattgctattgggtaatgactgacggtcctgccaacagacaggcacagtatag

SEQ ID NO: 86737 - DNA, 60 bp, Artificial
  Synthetic oligonucleotide
cacagtatagaatatacaaggcaaatcaaggcagaataattggtcagacggatgtaagtt

SEQ ID NO: 86738 - DNA, 60 bp, Artificial
  Synthetic oligonucleotide
ggcagttgcagtaatccactatggaggagtgcctactgatgtcgttaattcctgggtagg

SEQ ID NO: 86739 - DNA, 60 bp, Artificial
  Synthetic oligonucleotide
ggccagattcaaaggcagttgcagtaatccactatggaggagtgcctactgatgtcgtta

SEQ ID NO: 86740 - DNA, 60 bp, Artificial
  Synthetic oligonucleotide
gcgactgcctgccacgacgggaagaaatggatgacagttggtgtaacagggccagattca

SEQ ID NO: 86741 - DNA, 60 bp, Artificial
  Synthetic oligonucleotide
agcgactgcctgccacgacgggaagaaatggatgacagttggtgtaacagggccagattc

SEQ ID NO: 86742 - DNA, 53 bp, Artificial
  Synthetic oligonucleotide
cggaacagtgaaggataggagcccattcagaactctcatgagtgtcgaagtgg

SEQ ID NO: 86743 - DNA, 60 bp, Artificial
  Synthetic oligonucleotide
cggaacagtgaaggataggagcccattcagaactctcatgagtgtcgaagtgggccaatc

SEQ ID NO: 86744 - DNA, 60 bp, Artificial
  Synthetic oligonucleotide
cactcaagggtccctgcttaacgacaaacactcgaacggaacagtgaaggataggagccc

SEQ ID NO: 86745 - DNA, 60 bp, Artificial
  Synthetic oligonucleotide
agagctttctttctcactcaagggtccctgcttaacgacaaacactcgaacggaacagtg

SEQ ID NO: 86746 - DNA, 60 bp, Artificial
  Synthetic oligonucleotide
gagagcccttcgtctcctgttcgcccatagagtgcagagctttctttctcactcaagggt

SEQ ID NO: 86747 - DNA, 60 bp, Artificial
  Synthetic oligonucleotide
atgtctttgttataagagagcccttcgtctcctgttcgcccatagagtgcagagctttct

SEQ ID NO: 86748 - DNA, 60 bp, Artificial
  Synthetic oligonucleotide
ggcagggaactgatgtatggatggggcgaacaattagtcgaacctccaggtcagggtttg

SEQ ID NO: 86749 - DNA, 60 bp, Artificial
  Synthetic oligonucleotide
ttggatttcggcagggaactgatgtatggatggggcgaacaattagtcgaacctccaggt

SEQ ID NO: 86750 - DNA, 60 bp, Artificial
  Synthetic oligonucleotide
agacaggtagttgttgataatttgaattggtcaggatacagtggatctttcactctgcca

SEQ ID NO: 86751 - DNA, 60 bp, Artificial
  Synthetic oligonucleotide
aagtcagatagattggttttggcaacagggctaagaaacgttcctcagattgaatcaaga

SEQ ID NO: 86752 - DNA, 60 bp, Artificial
  Synthetic oligonucleotide
gtttggagcaatagctggtttcatagagggcggatggcaaggaatgattgatggctggta

SEQ ID NO: 86753 - DNA, 60 bp, Artificial
  Synthetic oligonucleotide
cggccgggtgacaacataaccttttcacacaatggaggcctaatagcaccagatcgagtt

SEQ ID NO: 86754 - DNA, 60 bp, Artificial
  Synthetic oligonucleotide
ccgttgggagttctacatatcagaacaacttcgttccagttattggggcaagacctcagg

SEQ ID NO: 86755 - DNA, 60 bp, Artificial
  Synthetic oligonucleotide
ctggacactagtacggccgggtgacaacataaccttttcacacaatggaggcctaatagc

SEQ ID NO: 86756 - DNA, 50 bp, Artificial
  Synthetic oligonucleotide
ctatgcagagctcaaatggctagtgtcagggacaaagggacaaaatttcc

SEQ ID NO: 86757 - DNA, 60 bp, Artificial
  Synthetic oligonucleotide
cagctgggaccactaggtcatgcatgagaaatggaggaaatagtttctatgcagagctca

SEQ ID NO: 86758 - DNA, 60 bp, Artificial
  Synthetic oligonucleotide
gtggtggtatcagcaagatgagaactggtttcacttatggaccttccatcaactcagctg

SEQ ID NO: 86759 - DNA, 60 bp, Artificial
  Synthetic oligonucleotide
gggacaccctcattgagcgagagaatgctactgcctactgttatccaggggtaaccataa

SEQ ID NO: 86760 - DNA, 60 bp, Artificial
  Synthetic oligonucleotide
aactcagctgggaccactaggtcatgcatgagaaatggaggaaatagtttctatgcagag

SEQ ID NO: 86761 - DNA, 60 bp, Artificial
  Synthetic oligonucleotide
caagatgagaactggtttcacttatggaccttccatcaactcagctgggaccactaggtc

SEQ ID NO: 86762 - DNA, 60 bp, Artificial
  Synthetic oligonucleotide
gaagaagatacaaggacctggggaactgccacccaataggaatgttgataggaacacctg

SEQ ID NO: 86763 - DNA, 60 bp, Artificial
  Synthetic oligonucleotide
ctgtgtatgaaaggaagaagatacaaggacctggggaactgccacccaataggaatgttg

SEQ ID NO: 86764 - DNA, 60 bp, Artificial
  Synthetic oligonucleotide
ggaacacctgtttgcgatctgcatctgacaggaacctgggacaccctcattgagcgagag

SEQ ID NO: 86765 - DNA, 60 bp, Artificial
  Synthetic oligonucleotide
aggaatgttgataggaacacctgtttgcgatctgcatctgacaggaacctgggacaccct

SEQ ID NO: 86766 - DNA, 60 bp, Artificial
  Synthetic oligonucleotide
gcctaatagcaccagatcgagttagcaaactaattggaaagggaataggaatccaatccg

SEQ ID NO: 86767 - DNA, 57 bp, Artificial
  Synthetic oligonucleotide
tcaaattggcaatgtcatcaattggaccaaagattcaataaccgacatttggactta

SEQ ID NO: 86768 - DNA, 60 bp, Artificial
  Synthetic oligonucleotide
ggccaagctgctgactacaagagtactcaaacagctattgaccagatcacggggaagctg

SEQ ID NO: 86769 - DNA, 60 bp, Artificial
  Synthetic oligonucleotide
aagaggagtctactacttgcaacaggaatgaggaatgttcctgaagtggtgcagggaagg

SEQ ID NO: 86770 - DNA, 60 bp, Artificial
  Synthetic oligonucleotide
gtcacccagaacagtcggtcaatgccccaaatatgtaaagaagaggagtctactacttgc

SEQ ID NO: 86771 - DNA, 60 bp, Artificial
  Synthetic oligonucleotide
ttcaaaacctgtcacccagaacagtcggtcaatgccccaaatatgtaaagaagaggagtc

SEQ ID NO: 86772 - DNA, 52 bp, Artificial
  Synthetic oligonucleotide
ggggttctataattacggagctcccttttcaaaacctgtcacccagaacagt

SEQ ID NO: 86773 - DNA, 60 bp, Artificial
  Synthetic oligonucleotide
ggcataggccaagctgctgactacaagagtactcaaacagctattgaccagatcacgggg

SEQ ID NO: 86774 - DNA, 60 bp, Artificial
  Synthetic oligonucleotide
ggcctgtttggtgcaatagcagggttcatagagaacggatgggaaggaatggtagacggc

SEQ ID NO: 86775 - DNA, 60 bp, Artificial
  Synthetic oligonucleotide
gcagggaaggggcctgtttggtgcaatagcagggttcatagagaacggatgggaaggaat

SEQ ID NO: 86776 - DNA, 60 bp, Artificial
  Synthetic oligonucleotide
cttgcaacaggaatgaggaatgttcctgaagtggtgcagggaaggggcctgtttggtgca

SEQ ID NO: 86777 - DNA, 60 bp, Artificial
  Synthetic oligonucleotide
gtaccactgtgaagactcttacaaatgaacaagaggaagtaaccaatgctactgaaacgg

SEQ ID NO: 86778 - DNA, 60 bp, Artificial
  Synthetic oligonucleotide
ccactgtgaagactcttacaaatgaacaagaggaagtaaccaatgctactgaaacggtgg

SEQ ID NO: 86779 - DNA, 60 bp, Artificial
  Synthetic oligonucleotide
aatagcaccagatcgagttagcaaactaattggaaagggaataggaatccaatccggagc

SEQ ID NO: 86780 - DNA, 60 bp, Artificial
  Synthetic oligonucleotide
tgaatctaaatgcttttggagagggggttctataattacggagctcccttttcaaaacct

SEQ ID NO: 86781 - DNA, 60 bp, Artificial
  Synthetic oligonucleotide
taccggaatacggatacagcagaacatctcataatatggggaattcatcacccttccagc

SEQ ID NO: 86782 - DNA, 60 bp, Artificial
  Synthetic oligonucleotide
cccttccagcacacaggaaaagaatgacctatacggaacgcagtcactatctatatccgt

SEQ ID NO: 86783 - DNA, 60 bp, Artificial
  Synthetic oligonucleotide
cagcacacaggaaaagaatgacctatacggaacgcagtcactatctatatccgttgggag

SEQ ID NO: 86784 - DNA, 60 bp, Artificial
  Synthetic oligonucleotide
ctatatccgttgggagttctacatatcagaacaacttcgttccagttattggggcaagac

SEQ ID NO: 86785 - DNA, 60 bp, Artificial
  Synthetic oligonucleotide
gatggaaagggatgctttgagatatatcacacttgtgataattcatgcatggagagtata

SEQ ID NO: 86786 - DNA, 58 bp, Artificial
  Synthetic oligonucleotide
ggagagtataaggaacaatacttatgatcattcacaatacagagaggaggctctcttg

SEQ ID NO: 86787 - DNA, 60 bp, Artificial
  Synthetic oligonucleotide
taaatttgtatgaaagagtaagaaagcaactcagacagaatgcagaagaagatggaaagg

SEQ ID NO: 86788 - DNA, 60 bp, Artificial
  Synthetic oligonucleotide
gaaagagtaagaaagcaactcagacagaatgcagaagaagatggaaagggatgctttgag

SEQ ID NO: 86789 - DNA, 60 bp, Artificial
  Synthetic oligonucleotide
gcttcggggcatcatgctttgttcttttagccgttatcatgggtcttggtttcttttgcc

SEQ ID NO: 86790 - DNA, 60 bp, Artificial
  Synthetic oligonucleotide
gggcaggaaacattcttagaacacaagagtctgaatgtgtatgccacaatggaacctgtg

SEQ ID NO: 86791 - DNA, 60 bp, Artificial
  Synthetic oligonucleotide
atatctgtgcacaggggtcctcacagacacgagcagaccatcagacaaatcaataggaga

SEQ ID NO: 86792 - DNA, 60 bp, Artificial
  Synthetic oligonucleotide
tatgtttggtggactagcaacagcttagttgcactatgtggaagcccagtcccagttggg

SEQ ID NO: 86793 - DNA, 60 bp, Artificial
  Synthetic oligonucleotide
ccacaatggaacctgtgtagcagtaatgaccgatgggtcagcaagtagccaggcatatac

SEQ ID NO: 86794 - DNA, 60 bp, Artificial
  Synthetic oligonucleotide
gttgaattaataagaggaaggccagaagaagccaaatatgtttggtggactagcaacagc

SEQ ID NO: 86795 - DNA, 60 bp, Artificial
  Synthetic oligonucleotide
gacacatagaggaatgctcgtgttatggacacgattcaaaggtaacttgtgtatgcaggg

SEQ ID NO: 86796 - DNA, 60 bp, Artificial
  Synthetic oligonucleotide
cagggagtttcattgactactgggatgaaagcaatgagtgctacaacccctgtttctatg

SEQ ID NO: 86797 - DNA, 60 bp, Artificial
  Synthetic oligonucleotide
ggaatcactgaaaggcaagaaatagttgacaataataactggtcaggatactcagggagt

SEQ ID NO: 86798 - DNA, 60 bp, Artificial
  Synthetic oligonucleotide
atgccatggagcatacaagtcaatatctgtgcacaggggtcctcacagacacgagcagac

SEQ ID NO: 86799 - DNA, 52 bp, Artificial
  Synthetic oligonucleotide
aggcatatacaaaggttttgtattttcacaaaggattaataataaaagaaga

SEQ ID NO: 86800 - DNA, 60 bp, Artificial
  Synthetic oligonucleotide
atactcagggagtttcattgactactgggatgaaagcaatgagtgctacaacccctgttt

SEQ ID NO: 86801 - DNA, 60 bp, Artificial
  Synthetic oligonucleotide
tcgaaatagatatgaatgccatggagcatacaagtcaatatctgtgcacaggggtcctca

SEQ ID NO: 86802 - DNA, 60 bp, Artificial
  Synthetic oligonucleotide
aggcaagaaatagttgacaataataactggtcaggatactcagggagtttcattgactac

SEQ ID NO: 86803 - DNA, 60 bp, Artificial
  Synthetic oligonucleotide
tgacttcctttgcgtgggatggtccagcactagttgccatgacggcattggacgaatgac

SEQ ID NO: 86804 - DNA, 59 bp, Artificial
  Synthetic oligonucleotide
caaataatagtgacaagggagccgtatgtgtcatgtgacccatcagggtgtaggatgta

SEQ ID NO: 86805 - DNA, 60 bp, Artificial
  Synthetic oligonucleotide
tatagttagcaatagtgacttcctttgcgtgggatggtccagcactagttgccatgacgg

SEQ ID NO: 86806 - DNA, 60 bp, Artificial
  Synthetic oligonucleotide
gaacaaataatagtgacaagggagccgtatgtgtcatgtgacccatcagggtgtaggatg

SEQ ID NO: 86807 - DNA, 60 bp, Artificial
  Synthetic oligonucleotide
gatgggtagtggtagccaaggacaacgctataagatttggtgaaagtgaacaaataatag

SEQ ID NO: 86808 - DNA, 60 bp, Artificial
  Synthetic oligonucleotide
gccaaggacaacgctataagatttggtgaaagtgaacaaataatagtgacaagggagccg

SEQ ID NO: 86809 - DNA, 60 bp, Artificial
  Synthetic oligonucleotide
ccatgacggcattggacgaatgaccatttgtgtgcagggaaataatgataacgcaacagc

SEQ ID NO: 86810 - DNA, 60 bp, Artificial
  Synthetic oligonucleotide
aaaacatgggcaggaaacattcttagaacacaagagtctgaatgtgtatgccacaatgga

SEQ ID NO: 86811 - DNA, 60 bp, Artificial
  Synthetic oligonucleotide
tctggaatcactgaaaggcaagaaatagttgacaataataactggtcaggatactcaggg

SEQ ID NO: 86812 - DNA, 56 bp, Artificial
  Synthetic oligonucleotide
agtccgggagctcctggagtcaaaggattcggtttcctagatagtagcaatacatg

SEQ ID NO: 86813 - DNA, 60 bp, Artificial
  Synthetic oligonucleotide
taacaacccgattactgggagtccgggagctcctggagtcaaaggattcggtttcctaga

SEQ ID NO: 86814 - DNA, 60 bp, Artificial
  Synthetic oligonucleotide
caataggagactgtaacaacccgattactgggagtccgggagctcctggagtcaaaggat

SEQ ID NO: 86815 - DNA, 60 bp, Artificial
  Synthetic oligonucleotide
gatgttgaaggtacctaatgctgagaaagatccaaagtctggaatcactgaaaggcaaga

SEQ ID NO: 86816 - DNA, 60 bp, Artificial
  Synthetic oligonucleotide
cagaaattatttgcactctctggagtggccatagcactgagtatcctcaacctactgata

SEQ ID NO: 86817 - DNA, 60 bp, Artificial
  Synthetic oligonucleotide
ggagtggttttgagatgttgaaggtacctaatgctgagaaagatccaaagtctggaatca

SEQ ID NO: 86818 - DNA, 50 bp, Artificial
  Synthetic oligonucleotide
gtcaaaggattcggtttcctagatagtagcaatacatggttaggtcgcac

SEQ ID NO: 86819 - DNA, 60 bp, Artificial
  Synthetic oligonucleotide
gcaaagttgaaggatgggtagtggtagccaaggacaacgctataagatttggtgaaagtg

SEQ ID NO: 86820 - DNA, 60 bp, Artificial
  Synthetic oligonucleotide
caataaagaaacagagaccgcgaagcaaaattatctaatgctgaataaaagcttatgcaa

SEQ ID NO: 86821 - DNA, 50 bp, Artificial
  Synthetic oligonucleotide
cctactgataggaatatccaatgtggggctgaatgtctcattacacttaa

SEQ ID NO: 86822 - DNA, 60 bp, Artificial
  Synthetic oligonucleotide
ctctctggagtggccatagcactgagtatcctcaacctactgataggaatatccaatgtg

SEQ ID NO: 86823 - DNA, 60 bp, Artificial
  Synthetic oligonucleotide
ataaaaattggacgtgcacaagcataacacagaacaacacgacgttaattgaaaacacat

SEQ ID NO: 86824 - DNA, 60 bp, Artificial
  Synthetic oligonucleotide
aacaacacgacattaattgaaaacacatatgtcaacaataccactgtcatcaataaagaa

SEQ ID NO: 86825 - DNA, 60 bp, Artificial
  Synthetic oligonucleotide
ggacgtgcacaagcataacacagaacaacacgacgttaattgaaaacacatatgtcaaca

SEQ ID NO: 86826 - DNA, 60 bp, Artificial
  Synthetic oligonucleotide
gaaaacacatatgtcaacaataccactgtcatcaataaagaaacagagactgcgaagcaa

SEQ ID NO: 86827 - DNA, 60 bp, Artificial
  Synthetic oligonucleotide
attgaaaacacatatgtcaacaataccactgtcatcaataaagaaacagagaccgcgaag

SEQ ID NO: 86828 - DNA, 60 bp, Artificial
  Synthetic oligonucleotide
ggtatggcttcaggcaccaaaattccgaaggtacaggacaagcagcagaccttaaaagca

SEQ ID NO: 86829 - DNA, 60 bp, Artificial
  Synthetic oligonucleotide
attgctatctatggcacataagaaagctgctcagcatgagagacatgtgtgatgctccct

SEQ ID NO: 86830 - DNA, 60 bp, Artificial
  Synthetic oligonucleotide
caaatactatcaatctactcaacagtggcgagttccctagcactggcaatcatgatagct

SEQ ID NO: 86831 - DNA, 60 bp, Artificial
  Synthetic oligonucleotide
gtctcacccatttgatgatctggcattccaatttgaatgacgccacgtatcagagaacta

SEQ ID NO: 86832 - DNA, 60 bp, Artificial
  Synthetic oligonucleotide
cgctggtctcacccatttgatgatctggcattccaatttgaatgacgccacgtatcagag

SEQ ID NO: 86833 - DNA, 60 bp, Artificial
  Synthetic oligonucleotide
gaccgctggtctcacccatttgatgatctggcattccaatttgaatgacgccacgtatca

SEQ ID NO: 86834 - DNA, 60 bp, Artificial
  Synthetic oligonucleotide
tcccgaggagatctggagctgctggtgcagcagtaaagggagttgggacgatggtgatgg

SEQ ID NO: 86835 - DNA, 60 bp, Artificial
  Synthetic oligonucleotide
cccgaggagatctggagctgctggtgcagcagtaaagggagtcggaacgatggtgatgga

SEQ ID NO: 86836 - DNA, 60 bp, Artificial
  Synthetic oligonucleotide
aatgggtcattgcaatgcagaatatgcatttaaagctggaatttcaaaatgtatggaaaa

SEQ ID NO: 86837 - DNA, 60 bp, Artificial
  Synthetic oligonucleotide
cgatctgctctcattctgaggggatcagtggctcataagtcctgcctgcctgcttgtgtg

SEQ ID NO: 86838 - DNA, 60 bp, Artificial
  Synthetic oligonucleotide
ggtcaggttattcagggagcttcatcattgaaagcaacggctgtttccagccttgtttct

SEQ ID NO: 86839 - DNA, 60 bp, Artificial
  Synthetic oligonucleotide
tccagccttgtttctatattgagcttatacgagggagacccaataagaatgatgatgtct

SEQ ID NO: 86840 - DNA, 60 bp, Artificial
  Synthetic oligonucleotide
gtcaaatcagttacacaaacattggtgtcgaacaatgattggtcaggttattcagggagc

SEQ ID NO: 86841 - DNA, 60 bp, Artificial
  Synthetic oligonucleotide
gtctgagtgtcaatgtattgacgggacctgtgttgtcgctgttacggatggtcctgcggc

SEQ ID NO: 86842 - DNA, 60 bp, Artificial
  Synthetic oligonucleotide
gcccaaggggcattactggggactaaacacagcaatggaaccataaaagacagaacaccc

SEQ ID NO: 86843 - DNA, 56 bp, Artificial
  Synthetic oligonucleotide
cagaacaccctatagatcactgattaggttcccaataggaacagccccggtactag

SEQ ID NO: 86844 - DNA, 60 bp, Artificial
  Synthetic oligonucleotide
gcctggtcgagtagcagttgcttcgatgggaaggagtggatgcatatttgcatgacagga

SEQ ID NO: 86845 - DNA, 60 bp, Artificial
  Synthetic oligonucleotide
cgctgttacggatggtcctgcggctaatagtgccgaccatagggtttactggatacggga

SEQ ID NO: 86846 - DNA, 60 bp, Artificial
  Synthetic oligonucleotide
tttgcatgacaggaaatgacaatgatgcaagtgcccaaataatatatgcaggaaagatga

SEQ ID NO: 86847 - DNA, 60 bp, Artificial
  Synthetic oligonucleotide
aattctcccaatcatgtcaaatcagttacacaaacattggtgtcgaacaatgattggtca

SEQ ID NO: 86848 - DNA, 60 bp, Artificial
  Synthetic oligonucleotide
ggcgggcgatgatgtgtggttggggaggactgtatcaactagtgggagatcaggctttga

SEQ ID NO: 86849 - DNA, 60 bp, Artificial
  Synthetic oligonucleotide
gttgcgacaataataattgctggtcctttgctctcgcccaaggggcattactggggacta

SEQ ID NO: 86850 - DNA, 60 bp, Artificial
  Synthetic oligonucleotide
gagagccttatgttagttgcgacaataataattgctggtcctttgctctcgcccaagggg

SEQ ID NO: 86851 - DNA, 60 bp, Artificial
  Synthetic oligonucleotide
caacacttggaggagtgttcctgttacgtggacactgatgtatactgcatatgtagggac

SEQ ID NO: 86852 - DNA, 60 bp, Artificial
  Synthetic oligonucleotide
ttcaagcccccactaccgctgtgtcctttcagaggtttcttcccttttcataaggacaat

SEQ ID NO: 86853 - DNA, 60 bp, Artificial
  Synthetic oligonucleotide
aaggttaggtgagaacaaagacgtcatagtcacaagagagccttatgttagttgcgacaa

SEQ ID NO: 86854 - DNA, 60 bp, Artificial
  Synthetic oligonucleotide
taaggacaatgcaataaggttaggtgagaacaaagacgtcatagtcacaagagagcctta

SEQ ID NO: 86855 - DNA, 60 bp, Artificial
  Synthetic oligonucleotide
atttggcttcaaggcgggcgatgatgtgtggttggggaggactgtatcaactagtgggag

SEQ ID NO: 86856 - DNA, 60 bp, Artificial
  Synthetic oligonucleotide
tactctatcaacaatagcccttctcattggaattggaaacctgattttcaacaccgttat

SEQ ID NO: 86857 - DNA, 52 bp, Artificial
  Synthetic oligonucleotide
ggggatcatcagacagtggtgtacccaacagtaatgaccccggtggtaccaa

SEQ ID NO: 86858 - DNA, 60 bp, Artificial
  Synthetic oligonucleotide
gggacaattggaaaggttccaacaggccttggatgaggattagcaatgagactatactag

SEQ ID NO: 86859 - DNA, 60 bp, Artificial
  Synthetic oligonucleotide
caggaaatgacaatgatgcaagtgcccaaataatatatgcaggaaagatgacagactcca

SEQ ID NO: 86860 - DNA, 60 bp, Artificial
  Synthetic oligonucleotide
actaagaactcaagagtctgagtgtcaatgtattgacgggacctgtgttgtcgctgttac

SEQ ID NO: 86861 - DNA, 60 bp, Artificial
  Synthetic oligonucleotide
tggatacgggaaggaaaagtaataaagtatgaaaacgtccccaaaacaagaatacaacac

SEQ ID NO: 86862 - DNA, 60 bp, Artificial
  Synthetic oligonucleotide
agcccttctcattggaattggaaacctgattttcaacaccgttatacatgagaaaatggg

SEQ ID NO: 86863 - DNA, 60 bp, Artificial
  Synthetic oligonucleotide
agcaatgagactatactagaaacagggtatgtgtgtagcaaattccactcagacaccccc

SEQ ID NO: 86864 - DNA, 60 bp, Artificial
  Synthetic oligonucleotide
acaccgttatacatgagaaaatgggggatcatcagacagtggtgtacccaacagtaatga

SEQ ID NO: 86865 - DNA, 60 bp, Artificial
  Synthetic oligonucleotide
acatcatggcgtctcaaggcaccaaacgatcttatgagcagatggaaactggtggggagc

SEQ ID NO: 86866 - DNA, 60 bp, Artificial
  Synthetic oligonucleotide
gccccaagaggacactacaagctggacagccagaaaaagagcacaattctgaacactgca

SEQ ID NO: 86867 - DNA, 60 bp, Artificial
  Synthetic oligonucleotide
gcagttcccataggatcatgtgtcagcaaatgccacacagacaaaggatccctctccaca

SEQ ID NO: 86868 - DNA, 60 bp, Artificial
  Synthetic oligonucleotide
aaacaatggtgattatgcaagactttacatctggggggttcatcatccttcaacagacac

SEQ ID NO: 86869 - DNA, 60 bp, Artificial
  Synthetic oligonucleotide
ccctctccacaactaagcccttccaaaacatatcgagaatagcaattggagattgcccga

SEQ ID NO: 86870 - DNA, 60 bp, Artificial
  Synthetic oligonucleotide
actgtgtctactaaaaccagtcaaacaagtgtggttcctaacatcggtagcaggcccttg

SEQ ID NO: 86871 - DNA, 60 bp, Artificial
  Synthetic oligonucleotide
aaggatccctctccacaactaagcccttccaaaacatatcgagaatagcaattggagatt

SEQ ID NO: 86872 - DNA, 60 bp, Artificial
  Synthetic oligonucleotide
cagacacagagcaaaccaatctgtacaagaacaaccctggaagagtcactgtgtctacta

SEQ ID NO: 86873 - DNA, 60 bp, Artificial
  Synthetic oligonucleotide
gcccttggtgagagggcaaagtggcagaataagtttctactggactattgtagagcctgg

SEQ ID NO: 86874 - DNA, 60 bp, Artificial
  Synthetic oligonucleotide
cattgctgaggaattccaatggaacaccgtgaagcagaacggaaaatccggggcctgcaa

SEQ ID NO: 86875 - DNA, 60 bp, Artificial
  Synthetic oligonucleotide
caggatgcgaccacttaaatggcgcagaatgggacgttttcatagagaggcccagtgcgg

SEQ ID NO: 86876 - DNA, 60 bp, Artificial
  Synthetic oligonucleotide
gaagtggtcaccgcacaagaactggtggaatcacagattctcccggaattatgcccgagc

SEQ ID NO: 86877 - DNA, 60 bp, Artificial
  Synthetic oligonucleotide
actgatgatcaagtggaagtggtcaccgcacaagaactggtggaatcacagattctcccg

SEQ ID NO: 86878 - DNA, 60 bp, Artificial
  Synthetic oligonucleotide
actaggaagtccaggatgcgaccacttaaatggcgcagaatgggacgttttcatagagag

SEQ ID NO: 86879 - DNA, 54 bp, Artificial
  Synthetic oligonucleotide
gattctcccggaattatgcccgagccctctaaggttagtagacggccagacttg

SEQ ID NO: 86880 - DNA, 60 bp, Artificial
  Synthetic oligonucleotide
ggaacctatgatcatgacatttatagagatgaagcaatcaacaatcgatttcagattcag

SEQ ID NO: 86881 - DNA, 60 bp, Artificial
  Synthetic oligonucleotide
ccacaaatgcgacaacaactgcattgaaagtatccggaatggaacctatgatcatgacat

SEQ ID NO: 86882 - DNA, 60 bp, Artificial
  Synthetic oligonucleotide
gggcctgcaagagagcaaatgtaaatgatttctttaataggctaaattggctggtaaaat

SEQ ID NO: 86883 - DNA, 60 bp, Artificial
  Synthetic oligonucleotide
gaggaattccaatggaacaccgtgaagcagaacggaaaatccggggcctgcaagagagca

SEQ ID NO: 86884 - DNA, 60 bp, Artificial
  Synthetic oligonucleotide
accagtcaaacaagtgtggttcctaacatcggtagcaggcccttggtgagagggcaaagt

SEQ ID NO: 86885 - DNA, 60 bp, Artificial
  Synthetic oligonucleotide
gaacactgcagttcccataggatcatgtgtcagcaaatgccacacagacaaaggatccct

SEQ ID NO: 86886 - DNA, 60 bp, Artificial
  Synthetic oligonucleotide
caacagacacagagcaaaccaatctgtacaagaacaaccctggaagagtcactgtgtcta

SEQ ID NO: 86887 - DNA, 60 bp, Artificial
  Synthetic oligonucleotide
tgctttgtgttgttttactggggttcattatgtgggcctgccagagaggcaacattaggt

SEQ ID NO: 86888 - DNA, 60 bp, Artificial
  Synthetic oligonucleotide
tgctttgtgttattttattggggttcattatgtgggcctgccagagaggcaacattaggt

SEQ ID NO: 86889 - DNA, 60 bp, Artificial
  Synthetic oligonucleotide
cactaagatagatctatggtcttacaatgcagagctcctggtggccctggaaaaccagca

SEQ ID NO: 86890 - DNA, 60 bp, Artificial
  Synthetic oligonucleotide
cactaagatagatctatggtcttacaatgcagagcttctggtggcattggaaaaccagca

SEQ ID NO: 86891 - DNA, 60 bp, Artificial
  Synthetic oligonucleotide
gcacaactcctcgttttgcttgaaaatgaaaagaccctggacctccacgactccaatgtc

SEQ ID NO: 86892 - DNA, 59 bp, Artificial
  Synthetic oligonucleotide
ttagaaatgtcccagcaatagcatcaagaggcttgtttggagcaatagccggatttata

SEQ ID NO: 86893 - DNA, 60 bp, Artificial
  Synthetic oligonucleotide
actgatcaatggatggtacgggtttcaacacaggaatgaagaaggaacaggcatagcagc

SEQ ID NO: 86894 - DNA, 60 bp, Artificial
  Synthetic oligonucleotide
gacctccacgactccaatgtcagaaatctccatgagagagttagaaggatgctaaaggac

SEQ ID NO: 86895 - DNA, 60 bp, Artificial
  Synthetic oligonucleotide
ctgtcaatttacagctgcattgcaagcagtctcgtactggcagcactcatcatgggtttc

SEQ ID NO: 86896 - DNA, 60 bp, Artificial
  Synthetic oligonucleotide
caaaaatcaatcgccaggagattgagggggtgaaattagactccagtgggaatgtgtata

SEQ ID NO: 86897 - DNA, 60 bp, Artificial
  Synthetic oligonucleotide
aaaagcttccacagtgttcatagaaacactatcggagactgtcccaaatacgtgaatgtc

SEQ ID NO: 86898 - DNA, 56 bp, Artificial
  Synthetic oligonucleotide
actggcagcactcatcatgggtttcatcctctgggcgtgcagtaatggatcatgta

SEQ ID NO: 86899 - DNA, 60 bp, Artificial
  Synthetic oligonucleotide
gtcgaaacatgtagatgattctgtggttgacatctggtcatataatgcacaactcctcgt

SEQ ID NO: 86900 - DNA, 61 bp, Artificial
  Synthetic oligonucleotide
gaccagataacgtctaaggtaaataatatcgtcgatagaatgaatacaaatttcgagtctg

SEQ ID NO: 86901 - DNA, 60 bp, Artificial
  Synthetic oligonucleotide
atgtttcaccttttaccataagtgtgacaacgaatgcatcgaaaaagttagaaacggaac

SEQ ID NO: 86902 - DNA, 60 bp, Artificial
  Synthetic oligonucleotide
tgttcaatcaatgggaaacaaccgataagccttggagattgctcttttgcagggtggata

SEQ ID NO: 86903 - DNA, 60 bp, Artificial
  Synthetic oligonucleotide
ttcaccccagaaatcagcactaggcctaaagttaatggacaggctggacgaatgacattt

SEQ ID NO: 86904 - DNA, 60 bp, Artificial
  Synthetic oligonucleotide
catggtcctatatcgtggagaaacctaacccaacaaacggaatttgttacccaggaatat

SEQ ID NO: 86905 - DNA, 60 bp, Artificial
  Synthetic oligonucleotide
gaccttcaacaacaccaaaggaagagatgtgttggttgtttggggaattcaccatcctgc

SEQ ID NO: 86906 - DNA, 50 bp, Artificial
  Synthetic oligonucleotide
tccaaataacaagtttatgctcaatatggtttagtcattacaaccaagtg

SEQ ID NO: 86907 - DNA, 60 bp, Artificial
  Synthetic oligonucleotide
ccatcggcagtgctagtattatattaacaacaataggcctgcttctccaaataacaagtt

SEQ ID NO: 86908 - DNA, 60 bp, Artificial
  Synthetic oligonucleotide
cataaccatcggcagtgctagtattatattaacaacaataggcctgcttctccaaataac

SEQ ID NO: 86909 - DNA, 60 bp, Artificial
  Synthetic oligonucleotide
taatggtataataacagacacattaaaaagctggaagggaaatattatgcgaacacaaga

SEQ ID NO: 86910 - DNA, 60 bp, Artificial
  Synthetic oligonucleotide
cgagtgcgtatgccaggacgaattttgttatactctgataacagacggaccgtccgacgc

SEQ ID NO: 86911 - DNA, 60 bp, Artificial
  Synthetic oligonucleotide
gaacacaagagtccgagtgcgtatgccaggacgaattttgttatactctgataacagacg

SEQ ID NO: 86912 - DNA, 50 bp, Artificial
  Synthetic oligonucleotide
aaaagctggaagggaaatattatgcgaacacaagagtccgagtgcgtatg

SEQ ID NO: 86913 - DNA, 60 bp, Artificial
  Synthetic oligonucleotide
ggggtgaagggattcagctttagatatggggatggtgtttggataggaaggacgaagagc

SEQ ID NO: 86914 - DNA, 60 bp, Artificial
  Synthetic oligonucleotide
ggtctgccactgcatgtagcgacggatccggttggctaacactaggaatcactggcccag

SEQ ID NO: 86915 - DNA, 60 bp, Artificial
  Synthetic oligonucleotide
tgcaaaacaactataccacagtaattgagccctcagcccccaatgtggttcactattcta

SEQ ID NO: 86916 - DNA, 60 bp, Artificial
  Synthetic oligonucleotide
acactaggaatcactggcccagatgctactgctgtggcagtgctgaaatataatggtata

SEQ ID NO: 86917 - DNA, 60 bp, Artificial
  Synthetic oligonucleotide
cactggcccagatgctactgctgtggcagtgctgaaatataatggtataataacagacac

SEQ ID NO: 86918 - DNA, 60 bp, Artificial
  Synthetic oligonucleotide
tattggggttcattatgtgggcctgccagagaggcaacattaggtgcaacatttgcattt

SEQ ID NO: 86919 - DNA, 60 bp, Artificial
  Synthetic oligonucleotide
cttcctttaacatgagtaacgaaggatcttatttcttcggagacaatgcagaggaatatg

SEQ ID NO: 86920 - DNA, 58 bp, Artificial
  Synthetic oligonucleotide
cttcctttgacatgagtaacgaaggatcttatttcttcggagacaatgcagaggaata

SEQ ID NO: 86921 - DNA, 60 bp, Artificial
  Synthetic oligonucleotide
ttggatccaggccttgggtcaggggccaatcaggaagaataagcatctactggacaatag

SEQ ID NO: 86922 - DNA, 60 bp, Artificial
  Synthetic oligonucleotide
ggcaggacagtgtcaaccagtggtagatcaggctttgaaatcatcaaagttacagagggg

SEQ ID NO: 86923 - DNA, 60 bp, Artificial
  Synthetic oligonucleotide
caccaaacagtgattcacccaacaataacgacccctgcaataccaaactgcagtgacact

SEQ ID NO: 86924 - DNA, 60 bp, Artificial
  Synthetic oligonucleotide
aatagtgaagtatgaaaatgtccctaaaacgaagatacaacacttagaagagtgttcctg

SEQ ID NO: 86925 - DNA, 60 bp, Artificial
  Synthetic oligonucleotide
ccccagtgacaccccaagaggagaagatagtcagttcacaggatcatgcactagccctat

SEQ ID NO: 86926 - DNA, 60 bp, Artificial
  Synthetic oligonucleotide
caaggttccctactcaatgacaaacattctaatggcacagttaaagaccggagcccctat

SEQ ID NO: 86927 - DNA, 60 bp, Artificial
  Synthetic oligonucleotide
tcggggtttgaaatcctgaaagtcagaaatggctgggtacaaaacagtaaagagcagatc

SEQ ID NO: 86928 - DNA, 60 bp, Artificial
  Synthetic oligonucleotide
acaccccaagaggagaagatagtcagttcacgggatcatgcactagtcccatgggaaacc

SEQ ID NO: 86929 - DNA, 60 bp, Artificial
  Synthetic oligonucleotide
acaccccaagaggagaagatagtcagttcacgggatcatgcactagccccatgggaaacc

SEQ ID NO: 86930 - DNA, 60 bp, Artificial
  Synthetic oligonucleotide
gcgacaccccaagaggagaagatagtcagttcacggggtcatgcactagtcccatgggaa

SEQ ID NO: 86931 - DNA, 60 bp, Artificial
  Synthetic oligonucleotide
cggggtttgaaatcctgaaagtcagaaatggctgggtacaaaacagtaaagagcagatca

SEQ ID NO: 86932 - DNA, 60 bp, Artificial
  Synthetic oligonucleotide
tcagggtttgaaatcctgaaagtcagaaatggctgggtacaaaacagtaaagagcagatc

SEQ ID NO: 86933 - DNA, 60 bp, Artificial
  Synthetic oligonucleotide
gagagggaacccaggagtgaaagggtgggcctttgactatggaaatgatgtttggatggg

SEQ ID NO: 86934 - DNA, 60 bp, Artificial
  Synthetic oligonucleotide
aataatgagagagggaacccaggagtgaaagggtgggcctttgactatggaaatgatgtt

SEQ ID NO: 86935 - DNA, 60 bp, Artificial
  Synthetic oligonucleotide
caggcaaccttcaaacattgaaaataagagtacatgaggggtatgaagagttcacaatgg

SEQ ID NO: 86936 - DNA, 60 bp, Artificial
  Synthetic oligonucleotide
ttcgaaaagacgaggcggcaactgagggagaatgctgaagacatgggcaatggttgcttc

SEQ ID NO: 86937 - DNA, 60 bp, Artificial
  Synthetic oligonucleotide
tgatgactaattcacaagacacagagctctctttcacaatcactggagacaacaccaaat

SEQ ID NO: 86938 - DNA, 60 bp, Artificial
  Synthetic oligonucleotide
gttttactggggttcattatgtgggcctgccagagaggcaacattaggtgcaacgtttgc

SEQ ID NO: 86939 - DNA, 60 bp, Artificial
  Synthetic oligonucleotide
gttttactggggttcattatgtgggcctgccagagaggcaacattaggtgcaacatttgc

SEQ ID NO: 86940 - DNA, 60 bp, Artificial
  Synthetic oligonucleotide
tctacagaaggagagatgggaaatgggtgagagaattagttctgtatgacaaagaagaac

SEQ ID NO: 86941 - DNA, 60 bp, Artificial
  Synthetic oligonucleotide
ctacagaaggagagatgggaaatgggtgagagaattagttctgtatgacaaagaagaact

SEQ ID NO: 86942 - DNA, 60 bp, Artificial
  Synthetic oligonucleotide
agttagtcggaatcaatatgagcaaaaagaagtcctatataaatagaacagggacatttg

SEQ ID NO: 86943 - DNA, 60 bp, Artificial
  Synthetic oligonucleotide
aatgtcaatctgcatatcaggacctaataacaatgcttcggcagtggtctggtacaatgg

SEQ ID NO: 86944 - DNA, 60 bp, Artificial
  Synthetic oligonucleotide
cacaaggaacagagaagctgacaataacttattcatcatcaatgatgtgggagattaatg

SEQ ID NO: 86945 - DNA, 60 bp, Artificial
  Synthetic oligonucleotide
ggagttgactataaagttgccgattggtcatggcacgatggagctattcttccctttgac

SEQ ID NO: 86946 - DNA, 60 bp, Artificial
  Synthetic oligonucleotide
taaagatgaaatcagaaggatttggcgtcaagcgaataatggagaagacgcacctgctgg

SEQ ID NO: 86947 - DNA, 60 bp, Artificial
  Synthetic oligonucleotide
atgataaaggcagtccgaggtgatctgaatttcgttaacagagcgaaccaacggctgaac

SEQ ID NO: 86948 - DNA, 60 bp, Artificial
  Synthetic oligonucleotide
atgataaaggcagtccgaggtgatctgaatttcgtcaacagagcgaaccaacggctgaac

SEQ ID NO: 86949 - DNA, 60 bp, Artificial
  Synthetic oligonucleotide
atcatggagaaagcaaattctaagaacacaagaatcgtcatgtgtatgtatgaaaggaaa

SEQ ID NO: 86950 - DNA, 60 bp, Artificial
  Synthetic oligonucleotide
atcatggagaaagcaaattctaagaacacaagaatcgtcatgtgtatgtatgaatgggaa

SEQ ID NO: 86951 - DNA, 60 bp, Artificial
  Synthetic oligonucleotide
tcttcacccaatgcctaccaggccaagtttgagtctgttgcatggtcagccacagcatgc

SEQ ID NO: 86952 - DNA, 60 bp, Artificial
  Synthetic oligonucleotide
ccagaagagaggacaagcatttggacctctagtagctccacggtattttgtggtgtttca

SEQ ID NO: 86953 - DNA, 50 bp, Artificial
  Synthetic oligonucleotide
ctccacggtattttgtggtgtttcaagtgaggtcccaggatggtcctggg

SEQ ID NO: 86954 - DNA, 60 bp, Artificial
  Synthetic oligonucleotide
gctggaataccgacagacactccacgggttcaggacagtagtttcactggttcctgcaca

SEQ ID NO: 86955 - DNA, 60 bp, Artificial
  Synthetic oligonucleotide
cagtgaaagacaggagtccttatcgtgcattgatgagtgtgccattaggatcttcaccca

SEQ ID NO: 86956 - DNA, 60 bp, Artificial
  Synthetic oligonucleotide
gcttcatattgcatcaatagtcataggaataatatcagtgacaaaagaaagcagtgtgtc

SEQ ID NO: 86957 - DNA, 60 bp, Artificial
  Synthetic oligonucleotide
acattcaacatactgcttcatattgcatcaatagtcataggaataatatcagtgacaaaa

SEQ ID NO: 86958 - DNA, 60 bp, Artificial
  Synthetic oligonucleotide
gggttcaggacagtagtttcactggttcctgcactagtgctgtcggagggagcgggacga

SEQ ID NO: 86959 - DNA, 60 bp, Artificial
  Synthetic oligonucleotide
gacaaggtaatagtgtgtgggcaggaagaacagttagcatttcgtcccgaagtggttttg

SEQ ID NO: 86960 - DNA, 60 bp, Artificial
  Synthetic oligonucleotide
gacactccacgggttcaggacagtagtttcactggttcctgcactagtgctgtcggaggg

SEQ ID NO: 86961 - DNA, 60 bp, Artificial
  Synthetic oligonucleotide
atgataagaggaaaaccagaagagaggacaagcatttggacctctagtagctccacggta

SEQ ID NO: 86962 - DNA, 60 bp, Artificial
  Synthetic oligonucleotide
tgtaacactgcacttcaagcaaaatgaatgcagcatcccctcgaacaatcaagtagtgcc

SEQ ID NO: 86963 - DNA, 60 bp, Artificial
  Synthetic oligonucleotide
tcccctcgaacaatcaagtagtgccatgtgaaccaatcgtagtagaaaggaacataacgg

SEQ ID NO: 86964 - DNA, 60 bp, Artificial
  Synthetic oligonucleotide
catcctaacaacgactgtaacactgcacttcaagcaaaatgaatgcagcatcccctcgaa

SEQ ID NO: 86965 - DNA, 60 bp, Artificial
  Synthetic oligonucleotide
agaattcctcatcgaacccttttaatgaatgagttgggtgttccatttcatttggggacc

SEQ ID NO: 86966 - DNA, 60 bp, Artificial
  Synthetic oligonucleotide
ggcacaatacatgatagaattcctcatcgaacccttttaatgaatgagttgggtgttcca

SEQ ID NO: 86967 - DNA, 60 bp, Artificial
  Synthetic oligonucleotide
tttggggaccaaacaagtgtgcatagcatggtccagctcaagctgccatgatgggaaagc

SEQ ID NO: 86968 - DNA, 60 bp, Artificial
  Synthetic oligonucleotide
gttgacagtattggttcatggtctcaaaatattctcagaactcaggagtcagaatgcgtc

SEQ ID NO: 86969 - DNA, 60 bp, Artificial
  Synthetic oligonucleotide
ccccgttatccagacgttaggtgtgtttgcagagataattggaaaggctccaataggccc

SEQ ID NO: 86970 - DNA, 60 bp, Artificial
  Synthetic oligonucleotide
ttcctgttatccccgttatccagacgttaggtgtgtttgcagagataattggaaaggctc

SEQ ID NO: 86971 - DNA, 60 bp, Artificial
  Synthetic oligonucleotide
ggttcatggtctcaaaatattctcagaactcaggagtcagaatgcgtctgcatcaatgga

SEQ ID NO: 86972 - DNA, 60 bp, Artificial
  Synthetic oligonucleotide
aatggtagaatacagggattggtcgaaaccgcagtgtcagattacagggtttgctccttt

SEQ ID NO: 86973 - DNA, 60 bp, Artificial
  Synthetic oligonucleotide
cgtcgtgttttgtggcacttcaggtacctatggaacaggctcatggcctgatggagcgaa

SEQ ID NO: 86974 - DNA, 60 bp, Artificial
  Synthetic oligonucleotide
gtgcatcaggaagggctgatactagaatactattcattaaagaggggaaaattgtccata

SEQ ID NO: 86975 - DNA, 60 bp, Artificial
  Synthetic oligonucleotide
ggaaaggctccaataggcccattatagatatagatatggcagattatagcattgattcca

SEQ ID NO: 86976 - DNA, 60 bp, Artificial
  Synthetic oligonucleotide
attgattccagttatgtgtgctcaggacttgttggcgacacaccaaggaacgatgatagc

SEQ ID NO: 86977 - DNA, 60 bp, Artificial
  Synthetic oligonucleotide
gggtcattggtggttggaccacagctaattccaaatcacaggtaaatagacaagtcatag

SEQ ID NO: 86978 - DNA, 60 bp, Artificial
  Synthetic oligonucleotide
caagtcatagttgacaataataactggtctggttattctggcattttctctgttgaaggc

SEQ ID NO: 86979 - DNA, 60 bp, Artificial
  Synthetic oligonucleotide
tggagttgataagagggaggccacaggagactagagtatggtggacctcaaacagtatcg

SEQ ID NO: 86980 - DNA, 60 bp, Artificial
  Synthetic oligonucleotide
gggaggccacaggagactagagtatggtggacctcaaacagtatcgtcgtgttttgtggc

SEQ ID NO: 86981 - DNA, 60 bp, Artificial
  Synthetic oligonucleotide
acatttatgcaagccttacaactactgcttgaagtggagcaagagataaggactttctcg

SEQ ID NO: 86982 - DNA, 60 bp, Artificial
  Synthetic oligonucleotide
gaagataatatgcatctcagcaacaggaatgacactatccgtagtgagtcttctaatagg

SEQ ID NO: 86983 - DNA, 60 bp, Artificial
  Synthetic oligonucleotide
cgcaaaatgccataagcaccacattcccatatactggagaccctccatacagccatggaa

SEQ ID NO: 86984 - DNA, 60 bp, Artificial
  Synthetic oligonucleotide
agagtcccacccaggaatctttgaaaactcgtgtcttgaaacgatggaagttgttcagca

SEQ ID NO: 86985 - DNA, 60 bp, Artificial
  Synthetic oligonucleotide
gaagaaggctaaactggcaaatgttgtgagaaaaatgatgactaactcacaagacacaga

SEQ ID NO: 86986 - DNA, 53 bp, Artificial
  Synthetic oligonucleotide
gcgaccaaaagaattcggatggccatcaattagtgtcgaattgtttaaaaacg

SEQ ID NO: 86987 - DNA, 60 bp, Artificial
  Synthetic oligonucleotide
acgctgtggtgatgccagctcatggcccagccaagagcatggaatatgatgctgttgcta

SEQ ID NO: 86988 - DNA, 60 bp, Artificial
  Synthetic oligonucleotide
ttttagggtttgtattcacgctcaccgtgcccagtgagcgaggactgcagcgtagacgct

SEQ ID NO: 86989 - DNA, 60 bp, Artificial
  Synthetic oligonucleotide
ttttagggttcgtgtttacgctcaccgtgcccagtgagcgaggactgcagcgtagacggt

SEQ ID NO: 86990 - DNA, 60 bp, Artificial
  Synthetic oligonucleotide
acaagtgtagtaccaaatattggtagtaggccatgggtgagaggccaaagcggcaggatc

SEQ ID NO: 86991 - DNA, 60 bp, Artificial
  Synthetic oligonucleotide
agtgtggtgccaaatattggcagcagaccatgggtgagaggccaaagcggcaggatcagc

SEQ ID NO: 86992 - DNA, 60 bp, Artificial
  Synthetic oligonucleotide
gtaagaagagcaacagtatcagcagacccactagcatctctattggagatgtgccacagt

SEQ ID NO: 86993 - DNA, 60 bp, Artificial
  Synthetic oligonucleotide
atgatggaacaggcagttgtggtccagtgtcttctaatggggcatatggagtaaaagggt

SEQ ID NO: 86994 - DNA, 60 bp, Artificial
  Synthetic oligonucleotide
ggaacaggcagttgtggtccagtgtcttctaatggggcatatggagtaaaagggttttca

SEQ ID NO: 86995 - DNA, 60 bp, Artificial
  Synthetic oligonucleotide
agcaagatattgtagcaataactgattggtcagggtatagcgggagttttgtgcagcatc

SEQ ID NO: 86996 - DNA, 60 bp, Artificial
  Synthetic oligonucleotide
gccaggatgtcaatatgtatatcagggccgaacaacaatgcatctgcagtggtctggtac

SEQ ID NO: 86997 - DNA, 60 bp, Artificial
  Synthetic oligonucleotide
agcaaaagcagggtcaagatgaatccaaatcagaagattctatgcacttctgccattgct

SEQ ID NO: 86998 - DNA, 60 bp, Artificial
  Synthetic oligonucleotide
cgcgccctgataagctggccactatcatcgccgcccacagtatacaacagcagggtggaa

SEQ ID NO: 86999 - DNA, 60 bp, Artificial
  Synthetic oligonucleotide
atgtctcatgtgacccagatgaatgcaggttctatgccctcagccaagggacaacaatca

SEQ ID NO: 87000 - DNA, 60 bp, Artificial
  Synthetic oligonucleotide
catagcttcaagatccggatacgagatgctaaaggtgccaaatgcattgacagacgatag

SEQ ID NO: 87001 - DNA, 60 bp, Artificial
  Synthetic oligonucleotide
aatccccgaccgaatgacccaactgtaggtaaatgtaacgacccttatccaggcaataat

SEQ ID NO: 87002 - DNA, 60 bp, Artificial
  Synthetic oligonucleotide
aatgctcatgttacgggaagcgaacaggaattacttgcacatgcagggataattggcagg

SEQ ID NO: 87003 - DNA, 60 bp, Artificial
  Synthetic oligonucleotide
cctaggattgaacataggactacatctaaaaccgagctgcaattgctcacactcacaacc

SEQ ID NO: 87004 - DNA, 60 bp, Artificial
  Synthetic oligonucleotide
cacaggaatctgaatgcgtatgccacaacggtgtatgcccggtagtgttcacagatgggt

SEQ ID NO: 87005 - DNA, 60 bp, Artificial
  Synthetic oligonucleotide
gactggagtggttacagtgggtccttcatggactattgggctgagggggactgctaccga

SEQ ID NO: 87006 - DNA, 54 bp, Artificial
  Synthetic oligonucleotide
cactcactgagtgacatccacaccatggcgtctcaaggcaccaaacgatcttat

SEQ ID NO: 87007 - DNA, 60 bp, Artificial
  Synthetic oligonucleotide
gttcattgctgaggaattccaatggaacacagtcaaacaaaatgggaaatccggggcatg

SEQ ID NO: 87008 - DNA, 60 bp, Artificial
  Synthetic oligonucleotide
gggaaatttgagttcattgctgaggaattccaatggaacacagtcaaacaaaatgggaaa

SEQ ID NO: 87009 - DNA, 60 bp, Artificial
  Synthetic oligonucleotide
gggaaatttgagttcattgctgaggaattccaatggaacacagtcaagcagaatgggaaa

SEQ ID NO: 87010 - DNA, 60 bp, Artificial
  Synthetic oligonucleotide
gagcctacggagtatcttggcaaacaacgggaaatttgagttcattgctgaggaattcca

SEQ ID NO: 87011 - DNA, 60 bp, Artificial
  Synthetic oligonucleotide
cggagcatcttagcaaacaatgggaaatttgagttcattgctgaggaattccaatggaac

SEQ ID NO: 87012 - DNA, 60 bp, Artificial
  Synthetic oligonucleotide
agattgctatctatggcacataagaaagctgctcagcatgagagacatgtgtgatgcccc

SEQ ID NO: 87013 - DNA, 60 bp, Artificial
  Synthetic oligonucleotide
ctatggcacataagaaagctgctcagcatgagagacatgtgtgatgccccctttgatgac

SEQ ID NO: 87014 - DNA, 50 bp, Artificial
  Synthetic oligonucleotide
ctatggcacataagaaagctgctcagcatgagagacatgtgtgatgcccc

SEQ ID NO: 87015 - DNA, 58 bp, Artificial
  Synthetic oligonucleotide
ggagaccatcaaacagtgattcacccaacaataacgacccctgcagtaccgaactgca

SEQ ID NO: 87016 - DNA, 60 bp, Artificial
  Synthetic oligonucleotide
ggagaccatcaaacagtgattcacccaacaataacgacccctgcagtaccgaactgcagt

SEQ ID NO: 87017 - DNA, 60 bp, Artificial
  Synthetic oligonucleotide
gctggtccagagctcctcaacagggaaaatatgcaacaacccacatagaatccttgatgg

SEQ ID NO: 87018 - DNA, 60 bp, Artificial
  Synthetic oligonucleotide
agatgagtcttctaaccgaggtcgaaacgtacgttctctctatcgtcccatcaggccccc

SEQ ID NO: 87019 - DNA, 59 bp, Artificial
  Synthetic oligonucleotide
agatgagtcttctaaccgaggtcgaaacgtacgttctctctatcgtcccatcaggcccc

SEQ ID NO: 87020 - DNA, 60 bp, Artificial
  Synthetic oligonucleotide
aacgatttgcagaccaagaactgggtgatgccccattccttgaccggcttcgccgagatc

SEQ ID NO: 87021 - DNA, 60 bp, Artificial
  Synthetic oligonucleotide
tgcccggtagtgttcacagatgggtctgccactggacctgcagaaacaagaatatactat

SEQ ID NO: 87022 - DNA, 60 bp, Artificial
  Synthetic oligonucleotide
gaaacattcaaatggaacaatacacgataggtcccagtatcgcgccctgataagctggcc

SEQ ID NO: 87023 - DNA, 60 bp, Artificial
  Synthetic oligonucleotide
aattggcagggctcaaatagaccagtaattcaaatagatccagtggcgatgacacacact

SEQ ID NO: 87024 - DNA, 60 bp, Artificial
  Synthetic oligonucleotide
ggcagggctcaaatagaccagtaattcaaatagatccagtggcgatgacacacactagtc

SEQ ID NO: 87025 - DNA, 60 bp, Artificial
  Synthetic oligonucleotide
cagacgataggtcaaagcccactcaaggtcagacaatcgtattaaacactgactggagtg

SEQ ID NO: 87026 - DNA, 60 bp, Artificial
  Synthetic oligonucleotide
gccattgctatcgtaataggcacaattgcagtactcataggaatagcaaacctaggattg

SEQ ID NO: 87027 - DNA, 60 bp, Artificial
  Synthetic oligonucleotide
tgccattgctatcgtaataggcacaattgcagtactcataggaatagcaaacctaggatt

SEQ ID NO: 87028 - DNA, 60 bp, Artificial
  Synthetic oligonucleotide
gcccggtagtgttcacagatgggtctgccactggacctgcagaaacaagaatatactatt

SEQ ID NO: 87029 - DNA, 60 bp, Artificial
  Synthetic oligonucleotide
cgggaagcgaacaggaattacttgcacatgcagggataattggcagggctcaaatagacc

SEQ ID NO: 87030 - DNA, 60 bp, Artificial
  Synthetic oligonucleotide
ccttggacaatggaactggcctgatggggctaaaatagagtacttcctctaagatacaga

SEQ ID NO: 87031 - DNA, 60 bp, Artificial
  Synthetic oligonucleotide
acagaattccttggacaatggaactggcctgatggggctaaaatagagtacttcctctaa

SEQ ID NO: 87032 - DNA, 60 bp, Artificial
  Synthetic oligonucleotide
gtatcgcgccctgataagctggccactatcatcgccgcccacagtatacaacagcagggt

SEQ ID NO: 87033 - DNA, 51 bp, Artificial
  Synthetic oligonucleotide
acagcagggtggaatgcattggatggtcaagtactagttgccatgatggca

SEQ ID NO: 87034 - DNA, 60 bp, Artificial
  Synthetic oligonucleotide
acagcagggtggaatgcattggatggtcaagtactagttgccatgatggcaaagccagga

SEQ ID NO: 87035 - DNA, 60 bp, Artificial
  Synthetic oligonucleotide
ggtggaccagtaatagtatagtatcgatgtgttccagcacagaattccttggacaatgga

SEQ ID NO: 87036 - DNA, 59 bp, Artificial
  Synthetic oligonucleotide
ttttacgtggagttaatacgtggaagacccaaggaggatgaagtgtggtggaccagtaa

SEQ ID NO: 87037 - DNA, 60 bp, Artificial
  Synthetic oligonucleotide
aggatgaagtgtggtggaccagtaatagtatagtatcgatgtgttccagcacagaattcc

SEQ ID NO: 87038 - DNA, 60 bp, Artificial
  Synthetic oligonucleotide
agcccactcaaggtcagacaatcgtattaaacactgactggagtggttacagtgggtcct

SEQ ID NO: 87039 - DNA, 60 bp, Artificial
  Synthetic oligonucleotide
agtggtctggtacaatagaaggcctgttacagaaatcaatacatgggcccgaaacatact

SEQ ID NO: 87040 - DNA, 60 bp, Artificial
  Synthetic oligonucleotide
gccaaggtaccacactaaggggtcgacatgcaaatgggactatacatgacagaagcccgt

SEQ ID NO: 87041 - DNA, 60 bp, Artificial
  Synthetic oligonucleotide
gtcaatctgcatgtcaggacctaataacaatgcttcggcagtggtctggtacaatggaag

SEQ ID NO: 87042 - DNA, 60 bp, Artificial
  Synthetic oligonucleotide
gggtacggagttaaggggtttggattcaggcaaggcaatgatgtatggatgggaaggacc

SEQ ID NO: 87043 - DNA, 60 bp, Artificial
  Synthetic oligonucleotide
tggaccagcaaacagacaagcacaatacagagcattcaaagccaagcaggggaaaatagt

SEQ ID NO: 87044 - DNA, 60 bp, Artificial
  Synthetic oligonucleotide
gctcatgctaccccaatgagggtaaagtggaatgtgtttgtagagacaactggactggaa

SEQ ID NO: 87045 - DNA, 60 bp, Artificial
  Synthetic oligonucleotide
atggatgtcaatccgactttacttttcttgaaagttccagcgcaaaatgccataagcact

SEQ ID NO: 87046 - DNA, 60 bp, Artificial
  Synthetic oligonucleotide
taattcacaagacacagagctctctttcacaatcactggagacaacaccaaatggaatga

SEQ ID NO: 87047 - DNA, 60 bp, Artificial
  Synthetic oligonucleotide
agaaaagttgacaataacatattcatcatcaatgatgtgggagattaacggtccggaatc

SEQ ID NO: 87048 - DNA, 60 bp, Artificial
  Synthetic oligonucleotide
gacaataacatattcatcatcaatgatgtgggagataaacggtcctgaatcggtgcttgt

SEQ ID NO: 87049 - DNA, 60 bp, Artificial
  Synthetic oligonucleotide
agagaagttgacaataacatattcatcatcaatgatgtgggagattaacggtccggagtc

SEQ ID NO: 87050 - DNA, 60 bp, Artificial
  Synthetic oligonucleotide
tctctctatcgtcccgtcgggccccctcaaagccgagatcgcgcagagacttgaagatgt

SEQ ID NO: 87051 - DNA, 60 bp, Artificial
  Synthetic oligonucleotide
atgaatccaaatcagaagataatgtgcatctcagcaacaggaatgacactatccgtagta

SEQ ID NO: 87052 - DNA, 60 bp, Artificial
  Synthetic oligonucleotide
agcaatcgaggagtgcctgattaatgatccctgggttttgcttaatgcatcttggttcaa

SEQ ID NO: 87053 - DNA, 60 bp, Artificial
  Synthetic oligonucleotide
acatagaggaaataagcagggaatggtacatgctcatgccaaggcagaaaataacagggg

SEQ ID NO: 87054 - DNA, 60 bp, Artificial
  Synthetic oligonucleotide
gaacatagaggaaataagcagggaatggtacatgctcatgccaaggcagaaaataacagg

SEQ ID NO: 87055 - DNA, 60 bp, Artificial
  Synthetic oligonucleotide
gtctcaaggcaccaaacgatcttatgagcagatggaaaccagtggggaacgccagaatgc

SEQ ID NO: 87056 - DNA, 60 bp, Artificial
  Synthetic oligonucleotide
tgttccaccattgaagagctcagacggcagaaatagtgaatttagcttgtccttcatgaa

SEQ ID NO: 87057 - DNA, 60 bp, Artificial
  Synthetic oligonucleotide
cgagactctagcatacttactgacagccagacagcgaccaaaaggattcggatggccatc

SEQ ID NO: 87058 - DNA, 60 bp, Artificial
  Synthetic oligonucleotide
acggaaacgagactctagcatacttactgacagccagacagcgaccaaaaggattcggat

SEQ ID NO: 87059 - DNA, 60 bp, Artificial
  Synthetic oligonucleotide
gccttaaatacggtttgaaaagagggccttctacggaaggagtgcctgagtctatgaggg

SEQ ID NO: 87060 - DNA, 55 bp, Artificial
  Synthetic oligonucleotide
tgcctgcttcacgctacctaactgacatgactcttgaagagatgtcaagagactg

SEQ ID NO: 87061 - DNA, 60 bp, Artificial
  Synthetic oligonucleotide
tgcttgaagtggaacaagagataagaaccttctcgtttcagcttatttaatgataaaaaa

SEQ ID NO: 87062 - DNA, 60 bp, Artificial
  Synthetic oligonucleotide
cacactacaataaacaacataacaactgttgtttttcaagacccagagacacacttcaga

SEQ ID NO: 87063 - DNA, 60 bp, Artificial
  Synthetic oligonucleotide
ctacaccccacccggtttacaactgtagtgacactgtaataacaaaaaaccacactacaa

SEQ ID NO: 87064 - DNA, 60 bp, Artificial
  Synthetic oligonucleotide
agttgagaataacaaatgtgaaactacaccgaccactacaccccacccggtttacaactg

SEQ ID NO: 87065 - DNA, 60 bp, Artificial
  Synthetic oligonucleotide
agttattcatggtaaagttgagaataacaaatgtgaaactacaccgaccactacacccca

SEQ ID NO: 87066 - DNA, 60 bp, Artificial
  Synthetic oligonucleotide
gcattgctagtggggataggcaatttggcattcaatgcagttattcatggtaaagttgag

SEQ ID NO: 87067 - DNA, 60 bp, Artificial
  Synthetic oligonucleotide
ttatctaccatagcattgctagtggggataggcaatttggcattcaatgcagttattcat

SEQ ID NO: 87068 - DNA, 60 bp, Artificial
  Synthetic oligonucleotide
gaattgatggtagaaggggagtcaaagggttcggatttaaggtccagaatgatgtgtggc

SEQ ID NO: 87069 - DNA, 60 bp, Artificial
  Synthetic oligonucleotide
gtagttctccaagtggaattgatggtagaaggggagtcaaagggttcggatttaaggtcc

SEQ ID NO: 87070 - DNA, 60 bp, Artificial
  Synthetic oligonucleotide
gccggtcagggttcgaagtgatcaaagtttcaaatggctggattgattcgagaaaccagg

SEQ ID NO: 87071 - DNA, 60 bp, Artificial
  Synthetic oligonucleotide
gcagccggtcagggttcgaagtgatcaaagtttcaaatggctggattgattcgagaaacc

SEQ ID NO: 87072 - DNA, 60 bp, Artificial
  Synthetic oligonucleotide
aacgaaactatactggaaactggatatatatgcagcaaattccattcggacacacccagg

SEQ ID NO: 87073 - DNA, 60 bp, Artificial
  Synthetic oligonucleotide
tggatgcgcataaacaacgaaactatactggaaactggatatatatgcagcaaattccat

SEQ ID NO: 87074 - DNA, 60 bp, Artificial
  Synthetic oligonucleotide
ggatgctggtcttttgcattggctcaaggggcgcttctggggacaaagcacagcaatgga

SEQ ID NO: 87075 - DNA, 60 bp, Artificial
  Synthetic oligonucleotide
atgtaggatgctggtcttttgcattggctcaaggggcgcttctggggacaaagcacagca

SEQ ID NO: 87076 - DNA, 60 bp, Artificial
  Synthetic oligonucleotide
ccattcggacacacccaggccaagtgatccctctacagtgtcttgtagttctccaagtgg

SEQ ID NO: 87077 - DNA, 60 bp, Artificial
  Synthetic oligonucleotide
caaattccattcggacacacccaggccaagtgatccctctacagtgtcttgtagttctcc

SEQ ID NO: 87078 - DNA, 60 bp, Artificial
  Synthetic oligonucleotide
aagcacagcaatggaacaaataaggataggacaccatatagatccctaatcaaattccca

SEQ ID NO: 87079 - DNA, 60 bp, Artificial
  Synthetic oligonucleotide
acaaataaggataggacaccatatagatccctaatcaaattcccaattggaacagctcct

SEQ ID NO: 87080 - DNA, 59 bp, Artificial
  Synthetic oligonucleotide
caaattcccaattggaacagctcctgtacttgggaactacaaagagatgtgtgctgcat

SEQ ID NO: 87081 - DNA, 60 bp, Artificial
  Synthetic oligonucleotide
acaatgacgcaacagcacagataatatatgcagggaaaatgcgagactctataaaatcat

SEQ ID NO: 87082 - DNA, 60 bp, Artificial
  Synthetic oligonucleotide
gacgcaacagcacagataatatatgcagggaaaatgcgagactctataaaatcatggcgg

SEQ ID NO: 87083 - DNA, 56 bp, Artificial
  Synthetic oligonucleotide
ttgtgttgtagctgtgacagatggaccagcagacaataaggcagaccacagagtat

SEQ ID NO: 87084 - DNA, 60 bp, Artificial
  Synthetic oligonucleotide
tccagatgacaagatacaacatttggaagagtgttcatgttacacagatgttgacatcta

SEQ ID NO: 87085 - DNA, 60 bp, Artificial
  Synthetic oligonucleotide
ccagatgacaagatacaacatttggaagagtgttcatgttacacagatgttgacatctac

SEQ ID NO: 87086 - DNA, 60 bp, Artificial
  Synthetic oligonucleotide
ttgacatctactgtatttgcagagacaactggaaaggctctaacaggccatggatgcgca

SEQ ID NO: 87087 - DNA, 60 bp, Artificial
  Synthetic oligonucleotide
ctgtatttgcagagacaactggaaaggctctaacaggccatggatgcgcataaacaacga

SEQ ID NO: 87088 - DNA, 60 bp, Artificial
  Synthetic oligonucleotide
tagacaatgaacctggatcgggtaattggcctgatggtgctaacattgggtttatgccca

SEQ ID NO: 87089 - DNA, 60 bp, Artificial
  Synthetic oligonucleotide
gacaatgaacctggatcgggtaattggcctgatggtgctaacattgggtttatgcccaag

SEQ ID NO: 87090 - DNA, 60 bp, Artificial
  Synthetic oligonucleotide
aaatgaggatgtctcttggaccagcaacagcatagttactttctgtggactagacaatga

SEQ ID NO: 87091 - DNA, 60 bp, Artificial
  Synthetic oligonucleotide
ctcttggaccagcaacagcatagttactttctgtggactagacaatgaacctggatcggg

SEQ ID NO: 87092 - DNA, 52 bp, Artificial
  Synthetic oligonucleotide
tgttttcagccctgcttttatgttgaactaacacggggagtgccaaacaaaa

SEQ ID NO: 87093 - DNA, 60 bp, Artificial
  Synthetic oligonucleotide
tgttttcagccctgcttttatgttgaactaacacggggagtgccaaacaaaaatgaggat

SEQ ID NO: 87094 - DNA, 60 bp, Artificial
  Synthetic oligonucleotide
gaaaaggcagccatccaaacacttgtttccaataatgactggtccgggtattcaggcagc

SEQ ID NO: 87095 - DNA, 60 bp, Artificial
  Synthetic oligonucleotide
tcgagaaaccaggaaaaggcagccatccaaacacttgtttccaataatgactggtccggg

SEQ ID NO: 87096 - DNA, 60 bp, Artificial
  Synthetic oligonucleotide
gatgtctggacatacaatgctgaactgttggttctccttgagaacgaaaggacactggac

SEQ ID NO: 87097 - DNA, 60 bp, Artificial
  Synthetic oligonucleotide
ggatatgcagcagacagagaaagtactcaaaaggctatagacgggattacaaataaagtt

SEQ ID NO: 87098 - DNA, 60 bp, Artificial
  Synthetic oligonucleotide
aagaagagcacaattctgaacactgcagttcctataggatcctgcgttagtaaatgccac

SEQ ID NO: 87099 - DNA, 60 bp, Artificial
  Synthetic oligonucleotide
gtagaagttgtcactgcccaggaattagtggaatcgcaacatctaccggaattgtgtccc

SEQ ID NO: 87100 - DNA, 60 bp, Artificial
  Synthetic oligonucleotide
agtcatatcgcctgatctctcttacagagttgggtatttatgtgcagggctgcccagtga

SEQ ID NO: 87101 - DNA, 60 bp, Artificial
  Synthetic oligonucleotide
gtcaagggctttgcacctttctccaaagacaatgggataagaattggttccagaggacat

SEQ ID NO: 87102 - DNA, 60 bp, Artificial
  Synthetic oligonucleotide
tttcttgttcgcccaaagaatgcagaactttcttcctcactcaggggtccctgctcaatg

SEQ ID NO: 87103 - DNA, 60 bp, Artificial
  Synthetic oligonucleotide
tcttgttcgcccacggaatgcagaactttcttcctcactcaggggtccttgctcaatgac

SEQ ID NO: 87104 - DNA, 60 bp, Artificial
  Synthetic oligonucleotide
gcccacggaatgcagaactttcttcctcactcaggggtccttgctcaatgacaaacactc

SEQ ID NO: 87105 - DNA, 60 bp, Artificial
  Synthetic oligonucleotide
gcccaaagaatgcagaactttcttcctcactcaggggtccctgctcaatgacaaacactc

SEQ ID NO: 87106 - DNA, 60 bp, Artificial
  Synthetic oligonucleotide
cctgtactggttatctcaccggatctctcttacagagttgggtatttatgtgcagggctg

SEQ ID NO: 87107 - DNA, 60 bp, Artificial
  Synthetic oligonucleotide
actagtcatatcgcctgatctctcttacagagttgggtatttatgtgcagggctgcccag

SEQ ID NO: 87108 - DNA, 60 bp, Artificial
  Synthetic oligonucleotide
ggggctacttcaagatgcgcactgggaaaagctcaataatgaggtcagatgcacctattg

SEQ ID NO: 87109 - DNA, 60 bp, Artificial
  Synthetic oligonucleotide
agtcaatagagtccgaattcagtgagatcgaacaccagattggtaacgtcatcaattgga

SEQ ID NO: 87110 - DNA, 60 bp, Artificial
  Synthetic oligonucleotide
atgtatggaaagcataagaaacaacacctatgaccattcacattacagagaagaagctct

SEQ ID NO: 87111 - DNA, 60 bp, Artificial
  Synthetic oligonucleotide
ggggcatcgtgttttgttcttctagccgctgtcatgggtcttgtcttcttctgtctgaag

SEQ ID NO: 87112 - DNA, 60 bp, Artificial
  Synthetic oligonucleotide
gtccgaattcagtgagatcgaacaccagattggtaacgtcatcaattggactaaggattc

SEQ ID NO: 87113 - DNA, 60 bp, Artificial
  Synthetic oligonucleotide
gatcactggaaagctgaataggctcattgagaaaaccaatactgagttcgagtcaataga

SEQ ID NO: 87114 - DNA, 60 bp, Artificial
  Synthetic oligonucleotide
ctggaaagctgaataggctcattgagaaaaccaatactgagttcgagtcaatagagtccg

SEQ ID NO: 87115 - DNA, 60 bp, Artificial
  Synthetic oligonucleotide
gggagggaatggtggatggctggtatggtttcagacaccaaaacgctcagggcacaggcc

SEQ ID NO: 87116 - DNA, 60 bp, Artificial
  Synthetic oligonucleotide
gtggatggctggtatggtttcagacaccaaaacgctcagggcacaggccaagccgccgat

SEQ ID NO: 87117 - DNA, 60 bp, Artificial
  Synthetic oligonucleotide
gggagagggttggggattcaatcagaagcaccaatagacaatgattgtgagtctaaatgt

SEQ ID NO: 87118 - DNA, 60 bp, Artificial
  Synthetic oligonucleotide
aggacagtgggtcaatgccctaaatacgtgaacaaaaagagtttgatgcttgcaacagga

SEQ ID NO: 87119 - DNA, 60 bp, Artificial
  Synthetic oligonucleotide
gggtctgatagcaccgagccgagtcagcaaattgattgggagagggttggggattcaatc

SEQ ID NO: 87120 - DNA, 60 bp, Artificial
  Synthetic oligonucleotide
taccggaacatgggacactctcattgagcgagagaatgccattgcttattgctaccctgg

SEQ ID NO: 87121 - DNA, 60 bp, Artificial
  Synthetic oligonucleotide
aataatggagagtggaggaatcagcaaaataagcactggcttcacttatgggtcttccat

SEQ ID NO: 87122 - DNA, 60 bp, Artificial
  Synthetic oligonucleotide
ggaggaatcagcaaaataagcactggcttcacttatgggtcttccatcaattcggccggg

SEQ ID NO: 87123 - DNA, 60 bp, Artificial
  Synthetic oligonucleotide
cttttatgcagagctcaaatggctagtatcaaagagtaaaggacaaaacttccctcagac

SEQ ID NO: 87124 - DNA, 60 bp, Artificial
  Synthetic oligonucleotide
cgtgaagactctcacaaacgaacaggaagaagtgaccaatgctaccgaaacagtggagag

SEQ ID NO: 87125 - DNA, 60 bp, Artificial
  Synthetic oligonucleotide
cagtggagagtacaagtctaaacaggttatgtatgaaaggaaggagccataaagacctgg

SEQ ID NO: 87126 - DNA, 60 bp, Artificial
  Synthetic oligonucleotide
gtctaaacaggttatgtatgaaaggaaggagccataaagacctgggcaactgccatccga

SEQ ID NO: 87127 - DNA, 60 bp, Artificial
  Synthetic oligonucleotide
ttgtgatttacatcttaccggaacatgggacactctcattgagcgagagaatgccattgc

SEQ ID NO: 87128 - DNA, 60 bp, Artificial
  Synthetic oligonucleotide
atatgggacacgatcattgtctatattagttgggagttccacttaccagaataattttgt

SEQ ID NO: 87129 - DNA, 60 bp, Artificial
  Synthetic oligonucleotide
gctcttttgaacagactgaatatcaatccagtgaaactctcttctggctataaagacatc

SEQ ID NO: 87130 - DNA, 60 bp, Artificial
  Synthetic oligonucleotide
gcataagaaacaacacctatgaccattcacattacagagaagaagctcttttgaacagac

SEQ ID NO: 87131 - DNA, 60 bp, Artificial
  Synthetic oligonucleotide
gcagagctcaaatggctagtatcaaagagtaaaggacaaaacttccctcagactacgaac

SEQ ID NO: 87132 - DNA, 60 bp, Artificial
  Synthetic oligonucleotide
gaggacgggaaaggatgttttgaaatatatcatgcttgtgatgactcatgtatggaaagc

SEQ ID NO: 87133 - DNA, 60 bp, Artificial
  Synthetic oligonucleotide
agatgttaaatctatatgaaagagtgaggaaacaactcaggcagaatgcagaagaggacg

SEQ ID NO: 87134 - DNA, 60 bp, Artificial
  Synthetic oligonucleotide
gctactggtagcaatggagaaccagcacacaattgatatggctgattcagagatgttaaa

SEQ ID NO: 87135 - DNA, 60 bp, Artificial
  Synthetic oligonucleotide
gattcaataaccgacatctggacttatcaggctgagctactggtagcaatggagaaccag

SEQ ID NO: 87136 - DNA, 60 bp, Artificial
  Synthetic oligonucleotide
atcaattggactaaggattcaataaccgacatctggacttatcaggctgagctactggta

SEQ ID NO: 87137 - DNA, 60 bp, Artificial
  Synthetic oligonucleotide
ataattttgttccggttgttggggccagacctcaggtcaatggacaaagtggaagaatcg

SEQ ID NO: 87138 - DNA, 60 bp, Artificial
  Synthetic oligonucleotide
attgtctatattagttgggagttccacttaccagaataattttgttccggttgttggggc

SEQ ID NO: 87139 - DNA, 60 bp, Artificial
  Synthetic oligonucleotide
ggaagaatcgatttccactggacactagtacaaccaggcgataatatcaccttctcacac

SEQ ID NO: 87140 - DNA, 60 bp, Artificial
  Synthetic oligonucleotide
ccggttgttggggccagacctcaggtcaatggacaaagtggaagaatcgatttccactgg

SEQ ID NO: 87141 - DNA, 60 bp, Artificial
  Synthetic oligonucleotide
tagtagtaataatcgtgctccttggagcagtgagaggtcttgataaaatctgcctaggac

SEQ ID NO: 87142 - DNA, 60 bp, Artificial
  Synthetic oligonucleotide
ccctcagactacgaacacttatagaaacacggacacggctgaacatctcataatatgggg

SEQ ID NO: 87143 - DNA, 60 bp, Artificial
  Synthetic oligonucleotide
tcacaatgtacaaagtagtagtaataatcgtgctccttggagcagtgagaggtcttgata

SEQ ID NO: 87144 - DNA, 60 bp, Artificial
  Synthetic oligonucleotide
ggggaattcatcacccttctagcactcaagagaagaatgatctatatgggacacgatcat

SEQ ID NO: 87145 - DNA, 60 bp, Artificial
  Synthetic oligonucleotide
tgcctaggacatcatgcagtagccaatggaaccatcgtgaagactctcacaaacgaacag

SEQ ID NO: 87146 - DNA, 60 bp, Artificial
  Synthetic oligonucleotide
ggtcttgataaaatctgcctaggacatcatgcagtagccaatggaaccatcgtgaagact

SEQ ID NO: 87147 - DNA, 60 bp, Artificial
  Synthetic oligonucleotide
cttctcacacaatgggggtctgatagcaccgagccgagtcagcaaattgattgggagagg

SEQ ID NO: 87148 - DNA, 60 bp, Artificial
  Synthetic oligonucleotide
tcgatttccactggacactagtacaaccaggcgataatatcaccttctcacacaatgggg

SEQ ID NO: 87149 - DNA, 60 bp, Artificial
  Synthetic oligonucleotide
gaggattatttggagctattgcaggcttcatagaaggtggttggccaggattaataaatg

SEQ ID NO: 87150 - DNA, 60 bp, Artificial
  Synthetic oligonucleotide
gcaggtgcgaaatgaatccaaatcagaagataataacaattggtgtagtgaatacgactc

SEQ ID NO: 87151 - DNA, 60 bp, Artificial
  Synthetic oligonucleotide
cactggggatgataggaatgcaactgccagcttcatttatgatgggatgcttgttgacag

SEQ ID NO: 87152 - DNA, 60 bp, Artificial
  Synthetic oligonucleotide
ctttgacaatgggaatgatgtttggatgggaagaacaatcagtaaagattcgcgctcagg

SEQ ID NO: 87153 - DNA, 60 bp, Artificial
  Synthetic oligonucleotide
cgtattctgtggcacttcagggacctatggaacaggctcatggcctgatggggcgaatat

SEQ ID NO: 87154 - DNA, 60 bp, Artificial
  Synthetic oligonucleotide
gtcgtattctgtggcacttcagggacctatggaacaggctcatggcctgatggggcgaat

SEQ ID NO: 87155 - DNA, 60 bp, Artificial
  Synthetic oligonucleotide
gtattctgtggcacttcagggacctatggaacaggctcatggcctgatggggcgaatatc

SEQ ID NO: 87156 - DNA, 60 bp, Artificial
  Synthetic oligonucleotide
attctgtggcacttcagggacctatggaacaggctcatggcctgatggggcgaatatcaa

SEQ ID NO: 87157 - DNA, 58 bp, Artificial
  Synthetic oligonucleotide
gacaactgtccaccagaggagttcagattgcttcaaatgagaacatggagacaatgga

SEQ ID NO: 87158 - DNA, 60 bp, Artificial
  Synthetic oligonucleotide
gttatctatggcacataagaaaactactcagtatgagagacatgtgtgatgctccctttg

SEQ ID NO: 87159 - DNA, 60 bp, Artificial
  Synthetic oligonucleotide
ggcattcacagaagacggtgctatagtggctgaaatatctcctattccctccatgccagg

SEQ ID NO: 87160 - DNA, 60 bp, Artificial
  Synthetic oligonucleotide
gtttgaggaaatcagatggctaattgctgaatgcagaaacatactgacaaagactgaaaa

SEQ ID NO: 87161 - DNA, 60 bp, Artificial
  Synthetic oligonucleotide
aaatatacagagattcgcttggggaatctgtgatgagaatgggagacctccactccctcc

SEQ ID NO: 87162 - DNA, 60 bp, Artificial
  Synthetic oligonucleotide
gggaagaggcagcacacttggactcgatctaagggtggccacaatggaagggaaaaggat

SEQ ID NO: 87163 - DNA, 60 bp, Artificial
  Synthetic oligonucleotide
cgcctccggtcctgctcctcggtatattacagacatgagcatagaggagataagccggga

SEQ ID NO: 87164 - DNA, 60 bp, Artificial
  Synthetic oligonucleotide
gccgggaatggtacatgttgatgcctaggcagaaaataactggaggtctaatggtgaaaa

SEQ ID NO: 87165 - DNA, 60 bp, Artificial
  Synthetic oligonucleotide
gaggtctaatggtgaaaatggaccaagccataatggacaaaagaatcatcctcaaagcaa

SEQ ID NO: 87166 - DNA, 60 bp, Artificial
  Synthetic oligonucleotide
agagtaatggaaacttcattgccccagaatatgcatacaaaatcgtcaagaagggggact

SEQ ID NO: 87167 - DNA, 60 bp, Artificial
  Synthetic oligonucleotide
ccaacaataaagaggagttacaacaatactaatcaagaagatctcctagtactgtgggga

SEQ ID NO: 87168 - DNA, 60 bp, Artificial
  Synthetic oligonucleotide
gaggagttacaacaatactaatcaagaagatctcctagtactgtggggaatccatcatcc

SEQ ID NO: 87169 - DNA, 60 bp, Artificial
  Synthetic oligonucleotide
ccatgatgcctcatcaggagtaagctctgcatgttcatataatgggaggtcttctttttt

SEQ ID NO: 87170 - DNA, 60 bp, Artificial
  Synthetic oligonucleotide
cttcttttttcaggaatgtggtatggcttatcaaaaagaacaatgcatacccaacaataa

SEQ ID NO: 87171 - DNA, 60 bp, Artificial
  Synthetic oligonucleotide
aatggaattcttctggacaattttgaagccaaatgatgccatcaattttgagagtaatgg

SEQ ID NO: 87172 - DNA, 60 bp, Artificial
  Synthetic oligonucleotide
gacaattttgaagccaaatgatgccatcaattttgagagtaatggaaacttcattgcccc

SEQ ID NO: 87173 - DNA, 60 bp, Artificial
  Synthetic oligonucleotide
actgtggggaatccatcatcctaatgatgcggcagagcaaaccaagctctatcaaaaccc

SEQ ID NO: 87174 - DNA, 60 bp, Artificial
  Synthetic oligonucleotide
gggaatccatcatcctaatgatgcggcagagcaaaccaagctctatcaaaacccaaccac

SEQ ID NO: 87175 - DNA, 60 bp, Artificial
  Synthetic oligonucleotide
acctttacgacaaggttcgactacagcttaaggataatgcaagggaactgggcaatggtt

SEQ ID NO: 87176 - DNA, 60 bp, Artificial
  Synthetic oligonucleotide
gacaaggttcgactacagcttaaggataatgcaagggaactgggcaatggttgtttcgag

SEQ ID NO: 87177 - DNA, 60 bp, Artificial
  Synthetic oligonucleotide
ggttgtttcgagttctatcacaaatgtgacgatgaatgtatggaaagtgtaagaaacgga

SEQ ID NO: 87178 - DNA, 60 bp, Artificial
  Synthetic oligonucleotide
aagtgtaagaaacggaacatataactatccacagtattcagaagaggcaaaactaaacag

SEQ ID NO: 87179 - DNA, 60 bp, Artificial
  Synthetic oligonucleotide
acttggaaaggagaatagagaatttgaacaagaaaatggaagacgggtttctagatgttt

SEQ ID NO: 87180 - DNA, 60 bp, Artificial
  Synthetic oligonucleotide
atggaagacgggtttctagatgtttggacttataatgctgaacttctagttctcatggaa

SEQ ID NO: 87181 - DNA, 60 bp, Artificial
  Synthetic oligonucleotide
tctcatggaaaatgaaaggactctagattttcatgactcaaacatcaagaacctttacga

SEQ ID NO: 87182 - DNA, 60 bp, Artificial
  Synthetic oligonucleotide
aaggactctagattttcatgactcaaacatcaagaacctttacgacaaggttcgactaca

SEQ ID NO: 87183 - DNA, 60 bp, Artificial
  Synthetic oligonucleotide
gtgtaagaaacggaacatataactatccacagtattcagaagaggcaaaactaaacaggg

SEQ ID NO: 87184 - DNA, 60 bp, Artificial
  Synthetic oligonucleotide
taccaaatactgtcaatttattcaacagtggcgagttctctagcactggcaatcatgata

SEQ ID NO: 87185 - DNA, 60 bp, Artificial
  Synthetic oligonucleotide
ccagcatgccgttccacaacatacatcctctcaccattggggaatgtcccaaatacgtga

SEQ ID NO: 87186 - DNA, 58 bp, Artificial
  Synthetic oligonucleotide
ccatgatgcctcatcaggagtaagctctgcatgttcatataatgggaggtcttctttt

SEQ ID NO: 87187 - DNA, 60 bp, Artificial
  Synthetic oligonucleotide
cccaggggatttcaatgactacgaagaactgaaacatctattgagtagtacgaatcattt

SEQ ID NO: 87188 - DNA, 60 bp, Artificial
  Synthetic oligonucleotide
acgaatcattttgagaaaattcaaatcattcccagaagttcctggtccaaccatgatgcc

SEQ ID NO: 87189 - DNA, 60 bp, Artificial
  Synthetic oligonucleotide
acccaggggatttcaatgactacgaagaactgaaacatctattgagtagtacgaatcatt

SEQ ID NO: 87190 - DNA, 60 bp, Artificial
  Synthetic oligonucleotide
cgggaagctctgcagcttaaatggagtgaagcctctcattttgagggattgtagtgtagc

SEQ ID NO: 87191 - DNA, 60 bp, Artificial
  Synthetic oligonucleotide
cttaaatggagtgaagcctctcattttgagggattgtagtgtagctggatggctcctcgg

SEQ ID NO: 87192 - DNA, 60 bp, Artificial
  Synthetic oligonucleotide
aagaacgttactgtcacacatgcccaagacatacttgaaaagacacacaacgggaagctc

SEQ ID NO: 87193 - DNA, 60 bp, Artificial
  Synthetic oligonucleotide
gttactgtcacacatgcccaagacatacttgaaaagacacacaacgggaagctctgcagc

SEQ ID NO: 87194 - DNA, 60 bp, Artificial
  Synthetic oligonucleotide
cgtgaaatcagatagattggtccttgcaactgggcttaggaatgttcctcaaagagagac

SEQ ID NO: 87195 - DNA, 60 bp, Artificial
  Synthetic oligonucleotide
ccaaatacgtgaaatcagatagattggtccttgcaactgggcttaggaatgttcctcaaa

SEQ ID NO: 87196 - DNA, 60 bp, Artificial
  Synthetic oligonucleotide
caggggagcggatatgctgcagacaaagaatccactcaaaaggcaatagatggagtcacc

SEQ ID NO: 87197 - DNA, 60 bp, Artificial
  Synthetic oligonucleotide
ccatagcaacgagcaggggagcggatatgctgcagacaaagaatccactcaaaaggcaat

SEQ ID NO: 87198 - DNA, 60 bp, Artificial
  Synthetic oligonucleotide
gcaatactaaatgtcaaactccaatgggtgcaataaactccagcatgccgttccacaaca

SEQ ID NO: 87199 - DNA, 60 bp, Artificial
  Synthetic oligonucleotide
gaatatggtaactgcaatactaaatgtcaaactccaatgggtgcaataaactccagcatg

SEQ ID NO: 87200 - DNA, 60 bp, Artificial
  Synthetic oligonucleotide
aaaattcaaatcattcccagaagttcctggtccaaccatgatgcctcatcaggagtaagc

SEQ ID NO: 87201 - DNA, 60 bp, Artificial
  Synthetic oligonucleotide
ctccagcatgccgttccacaacatacatcctctcaccattggggaatgtcccaaatacgt

SEQ ID NO: 87202 - DNA, 60 bp, Artificial
  Synthetic oligonucleotide
atagctggtctatccttctggatgtgctccaatggatcattgcagtgcagaatttgcatc

SEQ ID NO: 87203 - DNA, 60 bp, Artificial
  Synthetic oligonucleotide
gatagctggtctatccttctggatgtgctccaatggatcattgcagtgcagaatttgcat

SEQ ID NO: 87204 - DNA, 60 bp, Artificial
  Synthetic oligonucleotide
aatcatgatagctggtctatccttctggatgtgctccaatggatcattgcagtgcagaat

SEQ ID NO: 87205 - DNA, 60 bp, Artificial
  Synthetic oligonucleotide
atttattcaacagtggcgagttctctagcactggcaatcatgatagctggtctatccttc

SEQ ID NO: 87206 - DNA, 60 bp, Artificial
  Synthetic oligonucleotide
ggaaggaatttaataacttggaaaggagaatagagaatttgaacaagaaaatggaagacg

SEQ ID NO: 87207 - DNA, 58 bp, Artificial
  Synthetic oligonucleotide
aaaaggcaatagatggagtcaccaatagggtcaactcgatcattgacaaaatgaacac

SEQ ID NO: 87208 - DNA, 60 bp, Artificial
  Synthetic oligonucleotide
ttaatggtatggggagtacaccaccccgcaactctaaaggaacaccaagacttgtacaaa

SEQ ID NO: 87209 - DNA, 60 bp, Artificial
  Synthetic oligonucleotide
agtggggtcctcgaattcagcaaatttgaagccttcacctcaaccggatggggagctgta

SEQ ID NO: 87210 - DNA, 60 bp, Artificial
  Synthetic oligonucleotide
taatggtatggggagtacaccaccccgcaactctaaaggaacaccaagacttgtacaaaa

SEQ ID NO: 87211 - DNA, 60 bp, Artificial
  Synthetic oligonucleotide
tgtgataacgaatgtattgaaaaagttaggaatggaacatatgaccacaaggaatttgag

SEQ ID NO: 87212 - DNA, 60 bp, Artificial
  Synthetic oligonucleotide
agtggggtcctcgaattcagcaaatttgaagccttcacctcaaacggatggggagcagta

SEQ ID NO: 87213 - DNA, 60 bp, Artificial
  Synthetic oligonucleotide
gtggggtcctcgaattcagcaaatttgaagccttcacctcaaacggatggggagcagtaa

SEQ ID NO: 87214 - DNA, 60 bp, Artificial
  Synthetic oligonucleotide
tttgaggaggagtccaggctgaacagacaagaaattgagggagtgaaactggattccagt

SEQ ID NO: 87215 - DNA, 60 bp, Artificial
  Synthetic oligonucleotide
gaggaggaatccagactgaacagacaagaaattgagggagtgaaactggattccagtggc

SEQ ID NO: 87216 - DNA, 58 bp, Artificial
  Synthetic oligonucleotide
aaaatggcggacaacatgaccacaacacaaattgaggtaggtccgggagcaaccaatg

SEQ ID NO: 87217 - DNA, 60 bp, Artificial
  Synthetic oligonucleotide
cacttcaggtacctatggaacaggctcatggcctgatggggcgaatatcaatttcatgcc

SEQ ID NO: 87218 - DNA, 59 bp, Artificial
  Synthetic oligonucleotide
agtggcaattgccggttcaatgtttgtatataatcagaaaaaacacccttgtttctact

SEQ ID NO: 87219 - DNA, 60 bp, Artificial
  Synthetic oligonucleotide
ggcagatattcaatagcagacaaaatatgcataggatatctaagcaataactcttcagac

SEQ ID NO: 87220 - DNA, 60 bp, Artificial
  Synthetic oligonucleotide
ggcagatattcaagagcagacaaaatatgtataggatatctaagcaataactcttcagac

SEQ ID NO: 87221 - DNA, 60 bp, Artificial
  Synthetic oligonucleotide
ggcagatattcaatagcagacaaaatatgtataggatatctaagcaataactcttcagac

SEQ ID NO: 87222 - DNA, 51 bp, Artificial
  Synthetic oligonucleotide
cagctgaagcttgcaactggactgagaaatgtcccatctattggtgaaaga

SEQ ID NO: 87223 - DNA, 57 bp, Artificial
  Synthetic oligonucleotide
cagctgaagcttgcaactggactgagaaatgttccatctattggtgaaagaggtcta

SEQ ID NO: 87224 - DNA, 60 bp, Artificial
  Synthetic oligonucleotide
gcagacaaaatatgtataggatatctaagcaataactcttcagacacagtagacacacta

SEQ ID NO: 87225 - DNA, 52 bp, Artificial
  Synthetic oligonucleotide
gaataggagatggacagagaagctggatgaaaatctattggcacctaatgca

SEQ ID NO: 87226 - DNA, 60 bp, Artificial
  Synthetic oligonucleotide
gcatacgagaggatgtgcaacatccttaaagggaaattccaaacagcagcacaacgagca

SEQ ID NO: 87227 - DNA, 60 bp, Artificial
  Synthetic oligonucleotide
gagaagccaaaggaaactcagctcccttgataataagggaaccttttattgcttgtggac

SEQ ID NO: 87228 - DNA, 60 bp, Artificial
  Synthetic oligonucleotide
ggagaaaccaaaggaaactcagctcccttgataataagggaaccttttattgcttgtgga

SEQ ID NO: 87229 - DNA, 60 bp, Artificial
  Synthetic oligonucleotide
cgactgctagtttcatttatgatgggatgcttgttgacagtattggttcatggtctcaaa

SEQ ID NO: 87230 - DNA, 60 bp, Artificial
  Synthetic oligonucleotide
agtcggaatcgaccctttccgtctgctccaaaacagccaagtcttcagtctcatcagacc

SEQ ID NO: 87231 - DNA, 60 bp, Artificial
  Synthetic oligonucleotide
tattggaaactggttatatatgcagcaaatttcactcagacactcccagacccagtgatc

SEQ ID NO: 87232 - DNA, 60 bp, Artificial
  Synthetic oligonucleotide
agcaaaagcaggtgcgaaatgaatccaaatcagagaatcatagcgattgggtctgtgaac

SEQ ID NO: 87233 - DNA, 60 bp, Artificial
  Synthetic oligonucleotide
gcaggtgcgaaatgaatccaaatcagagaatcatagcgattgggtctgtgaacacagcat

SEQ ID NO: 87234 - DNA, 60 bp, Artificial
  Synthetic oligonucleotide
gtgagagtgcaccaaccaccacaccttatccaattcacaactgcagcggaactgtgataa

SEQ ID NO: 87235 - DNA, 60 bp, Artificial
  Synthetic oligonucleotide
gagagtgcaccaaccaccacaccttatccaattcacaactgcagcggaactgtgataaca

SEQ ID NO: 87236 - DNA, 60 bp, Artificial
  Synthetic oligonucleotide
actgtgataacaaataatcacactacgatcaacaacataacaacggttgtatttcaagac

SEQ ID NO: 87237 - DNA, 60 bp, Artificial
  Synthetic oligonucleotide
aatcacactacgatcaacaacataacaacggttgtatttcaagacccagagaaacacttc

SEQ ID NO: 87238 - DNA, 60 bp, Artificial
  Synthetic oligonucleotide
atttcaagacccagagaaacacttcagacttccgttgccattatgccctttcagaggatt

SEQ ID NO: 87239 - DNA, 60 bp, Artificial
  Synthetic oligonucleotide
gacccagagaaacacttcagacttccgttgccattatgccctttcagaggattcttccct

SEQ ID NO: 87240 - DNA, 60 bp, Artificial
  Synthetic oligonucleotide
gaaccctatatcagctgtgacaatagaggatgttggtctttcgcgctagctcaaggagca

SEQ ID NO: 87241 - DNA, 60 bp, Artificial
  Synthetic oligonucleotide
ggaaactggttatatatgcagcaaatttcactcagacactcccagacccagtgatccctc

SEQ ID NO: 87242 - DNA, 60 bp, Artificial
  Synthetic oligonucleotide
gggaagggaaaatcataaagcatgagaagatcccagacgacaagatacaacatttggaag

SEQ ID NO: 87243 - DNA, 60 bp, Artificial
  Synthetic oligonucleotide
tcatgttacacagatgttgacatatactgcatctgtagagacaactggaaaggctctaac

SEQ ID NO: 87244 - DNA, 60 bp, Artificial
  Synthetic oligonucleotide
caatatcatatagcagccgatcaggattcgaagtgatcaaagtttcaaatggttggatta

SEQ ID NO: 87245 - DNA, 60 bp, Artificial
  Synthetic oligonucleotide
catatagcagccgatcaggattcgaagtgatcaaagtttcaaatggttggattaattcga

SEQ ID NO: 87246 - DNA, 60 bp, Artificial
  Synthetic oligonucleotide
cccagtgatccctctacaatttcgtgtaactctccaagtggaattgatggcagaagagga

SEQ ID NO: 87247 - DNA, 60 bp, Artificial
  Synthetic oligonucleotide
ccagtgatccctctacaatttcgtgtaactctccaagtggaattgatggcagaagaggag

SEQ ID NO: 87248 - DNA, 60 bp, Artificial
  Synthetic oligonucleotide
tagacaatgagcctggatcgggcaattggcctgatggtgctaatattgggtttatgccca

SEQ ID NO: 87249 - DNA, 60 bp, Artificial
  Synthetic oligonucleotide
cttggaccagcaatagcatagttacgttctgtggactagacaatgagcctggatcgggca

SEQ ID NO: 87250 - DNA, 60 bp, Artificial
  Synthetic oligonucleotide
gctgtgacaatagaggatgttggtctttcgcgctagctcaaggagcacttttaggaacga

SEQ ID NO: 87251 - DNA, 60 bp, Artificial
  Synthetic oligonucleotide
gacagatggaccagctgacaataaggccgaccaccgagtatactggatacgggaagggaa

SEQ ID NO: 87252 - DNA, 60 bp, Artificial
  Synthetic oligonucleotide
cagaatgccaatgtttacacggaacttgtgtcgtagcagtgacagatggaccagctgaca

SEQ ID NO: 87253 - DNA, 60 bp, Artificial
  Synthetic oligonucleotide
gcacttttaggaacgaagcatagcaatggaactaataaggatagaactccttacaggtcc

SEQ ID NO: 87254 - DNA, 60 bp, Artificial
  Synthetic oligonucleotide
tcaaggagcacttttaggaacgaagcatagcaatggaactaataaggatagaactcctta

SEQ ID NO: 87255 - DNA, 60 bp, Artificial
  Synthetic oligonucleotide
ctccttacaggtccttaattaggttccccattggaacagctcctgtacttgggaactacg

SEQ ID NO: 87256 - DNA, 60 bp, Artificial
  Synthetic oligonucleotide
gaactccttacaggtccttaattaggttccccattggaacagctcctgtacttgggaact

SEQ ID NO: 87257 - DNA, 60 bp, Artificial
  Synthetic oligonucleotide
ctgggaatgataatgacgccacagcgcagataatctatgcagggacaatgcgagactcta

SEQ ID NO: 87258 - DNA, 60 bp, Artificial
  Synthetic oligonucleotide
tgtttgtattactgggaatgataatgacgccacagcgcagataatctatgcagggacaat

SEQ ID NO: 87259 - DNA, 60 bp, Artificial
  Synthetic oligonucleotide
acccaagagtcagaatgccaatgtttacacggaacttgtgtcgtagcagtgacagatgga

SEQ ID NO: 87260 - DNA, 60 bp, Artificial
  Synthetic oligonucleotide
cagggacaatgcgagactctataaagtcatggcggagaaacatattgagaacccaagagt

SEQ ID NO: 87261 - DNA, 60 bp, Artificial
  Synthetic oligonucleotide
tgttttcagccttgtttttacgttgagctcacaagaggagtgccaaacaaaaatgaggat

SEQ ID NO: 87262 - DNA, 60 bp, Artificial
  Synthetic oligonucleotide
aaatgaggatgtctcttggaccagcaatagcatagttacgttctgtggactagacaatga

SEQ ID NO: 87263 - DNA, 60 bp, Artificial
  Synthetic oligonucleotide
cctaaagcttgctaccgggctcagaaatgtccctgcgattgctgcaagaggcctgtttgg

SEQ ID NO: 87264 - DNA, 60 bp, Artificial
  Synthetic oligonucleotide
gggaatgggaaactgttcagaagtgacttgaacattgaatcttgctcaactaaatgccag

SEQ ID NO: 87265 - DNA, 60 bp, Artificial
  Synthetic oligonucleotide
aatcaacgggaaagcaccgataagtcttggtgattgctcttttgctgggtggatccttgg

SEQ ID NO: 87266 - DNA, 60 bp, Artificial
  Synthetic oligonucleotide
aaggtacagggattgctgcagacaaagagtcaacccagaaagcaatagaccagataactt

SEQ ID NO: 87267 - DNA, 60 bp, Artificial
  Synthetic oligonucleotide
ggaatgaagaaggtacagggattgctgcagacaaagagtcaacccagaaagcaatagacc

SEQ ID NO: 87268 - DNA, 60 bp, Artificial
  Synthetic oligonucleotide
acataggaatgaagaaggtacagggattgctgcagacaaagagtcaacccagaaagcaat

SEQ ID NO: 87269 - DNA, 60 bp, Artificial
  Synthetic oligonucleotide
caatggttggtatggattccaacatagaaatgaagaaggtacagggattgctgcagacaa

SEQ ID NO: 87270 - DNA, 60 bp, Artificial
  Synthetic oligonucleotide
ggtacagggattgctgcagacaaagagtcaacccagaaagcaatagaccagataacttct

SEQ ID NO: 87271 - DNA, 60 bp, Artificial
  Synthetic oligonucleotide
ggtacggggattgctgcagacaaagagtcaacccagaaagcaatagaccagataacttct

SEQ ID NO: 87272 - DNA, 60 bp, Artificial
  Synthetic oligonucleotide
gggtgagaggccaaagcggcaggatcagcttctattggacaattgtggaaccaggagatc

SEQ ID NO: 87273 - DNA, 60 bp, Artificial
  Synthetic oligonucleotide
gggtgagaggccaaagcggcaggatcagcttctactggacaattgtagaaccaggagatc

SEQ ID NO: 87274 - DNA, 60 bp, Artificial
  Synthetic oligonucleotide
gggtgagaggccaaagcggcaggatcagcttctactggacaattgtagaaccaggggatc

SEQ ID NO: 87275 - DNA, 60 bp, Artificial
  Synthetic oligonucleotide
gggtgagaggccaaagcggcaggatcagcttttattggacaattgtagaaccaggagacc

SEQ ID NO: 87276 - DNA, 60 bp, Artificial
  Synthetic oligonucleotide
atttgaaatcgcaggaaccatgcgcaggcttgccgaccaaagtctcccaccgaacttctc

SEQ ID NO: 87277 - DNA, 60 bp, Artificial
  Synthetic oligonucleotide
atttgaaatcacagggaccatgcgcaggcttgccgaccaaagtctcccaccgaacttctc

SEQ ID NO: 87278 - DNA, 60 bp, Artificial
  Synthetic oligonucleotide
tgcttggcccctctgctgtagaaatagggaatggatgcttcgaaaccaaacacaagtgca

SEQ ID NO: 87279 - DNA, 60 bp, Artificial
  Synthetic oligonucleotide
ggtggaactttagtagcagaagccattcgatttataggaagagcaatggcagacagaggg

SEQ ID NO: 87280 - DNA, 60 bp, Artificial
  Synthetic oligonucleotide
gtggaactttagtagcagaagccattcgatttataggaagagcaatggcagatagagggc

SEQ ID NO: 87281 - DNA, 60 bp, Artificial
  Synthetic oligonucleotide
taggtgaattctataaccagatgatggtcaaagctggactcaacgatgacatggagagaa

SEQ ID NO: 87282 - DNA, 60 bp, Artificial
  Synthetic oligonucleotide
gcgaattctataaccagatgatggtcaaagctggactcaacgatgacatggagagaaacc

SEQ ID NO: 87283 - DNA, 60 bp, Artificial
  Synthetic oligonucleotide
accagatgatggtcaaagctggactcaacgatgacatggagagaaacctaatccaaaatg

SEQ ID NO: 87284 - DNA, 60 bp, Artificial
  Synthetic oligonucleotide
gctggactcaacgatgacatggagagaaacctaatccaaaatgcgcatgctgtggaaaga

SEQ ID NO: 87285 - DNA, 60 bp, Artificial
  Synthetic oligonucleotide
tagaccacaacaaaacaggaggcaccttttacaagatggtaagagatgataaaaccatct

SEQ ID NO: 87286 - DNA, 60 bp, Artificial
  Synthetic oligonucleotide
ggtggaactttagtagcagaagccattcgatttataggaagagcaatggcagatagaggg

SEQ ID NO: 87287 - DNA, 60 bp, Artificial
  Synthetic oligonucleotide
aactgggtgaattctataaccagatgatggtcaaagctggactcaacgatgacatggaga

SEQ ID NO: 87288 - DNA, 60 bp, Artificial
  Synthetic oligonucleotide
ctgggtgaattctataaccagatgatggtcaaagctggactcaacgatgacatggagaga

SEQ ID NO: 87289 - DNA, 60 bp, Artificial
  Synthetic oligonucleotide
aaactgggtgaattctataaccagatgatggtcaaagctggactcaacgatgacatggag

SEQ ID NO: 87290 - DNA, 60 bp, Artificial
  Synthetic oligonucleotide
aaactgggtgaattctataaccagatgatggtcaaagctggactcaacgatgacatggaa

SEQ ID NO: 87291 - DNA, 60 bp, Artificial
  Synthetic oligonucleotide
tgggtgaattctataaccagatgatggtcaaagctggactcaacgatgacatggagagaa

SEQ ID NO: 87292 - DNA, 60 bp, Artificial
  Synthetic oligonucleotide
tgggcgaattctataaccagatgatggtcaaagctggactcaacgatgacatggagagaa

SEQ ID NO: 87293 - DNA, 60 bp, Artificial
  Synthetic oligonucleotide
ctgggcgaattctataaccagatgatggtcaaagctggactcaacgatgacatggagaga

SEQ ID NO: 87294 - DNA, 60 bp, Artificial
  Synthetic oligonucleotide
ctgggtgaattctataaccagatgatggtcaaagctggactcaacgatgacatggaaaga

SEQ ID NO: 87295 - DNA, 60 bp, Artificial
  Synthetic oligonucleotide
gtggaactttagtagcagaagccattcgatttataggaagagcaatggcagacagagggc

SEQ ID NO: 87296 - DNA, 60 bp, Artificial
  Synthetic oligonucleotide
aaactgggcgaattctataaccagatgatggtcaaagctggactcaacgatgacatggag

SEQ ID NO: 87297 - DNA, 60 bp, Artificial
  Synthetic oligonucleotide
ggaatgcaataggggactgccccaagtatgtgaatgttaaatccctaaagcttgctaccg

SEQ ID NO: 87298 - DNA, 60 bp, Artificial
  Synthetic oligonucleotide
atggtgtttggataggaaggacaaagagcttggaatccagaagcggctttgagatggtat

SEQ ID NO: 87299 - DNA, 60 bp, Artificial
  Synthetic oligonucleotide
attaacgacgataggccttctcctccaaataacaagtctatgctcaatatggtttagcca

SEQ ID NO: 87300 - DNA, 56 bp, Artificial
  Synthetic oligonucleotide
ggtttagccattacaaccaggtgacacagacacacgaacaaccttgttccaacaac

SEQ ID NO: 87301 - DNA, 60 bp, Artificial
  Synthetic oligonucleotide
ggccttctcctccaaataacaagtctatgctcaatatggtttagccattacaaccaggtg

SEQ ID NO: 87302 - DNA, 59 bp, Artificial
  Synthetic oligonucleotide
ggttggtcatggcccgatggcgctctattgccctttgacatagacaagtgatttttcga

SEQ ID NO: 87303 - DNA, 55 bp, Artificial
  Synthetic oligonucleotide
ggttggtcatggcccgatggcgctctattgccctttgacatagacaagtgatttt

SEQ ID NO: 87304 - DNA, 60 bp, Artificial
  Synthetic oligonucleotide
tggtgtacaggatattatagacaacgacaattggtctggttacagcgggagtttcagcat

SEQ ID NO: 87305 - DNA, 60 bp, Artificial
  Synthetic oligonucleotide
gatggtatgggatgctaatggatgggtgtcaacagacaaggattcaaatggtgtacagga

SEQ ID NO: 87306 - DNA, 60 bp, Artificial
  Synthetic oligonucleotide
tgtctgtcgggacaattggcggggaagcaatcgaccatggataagattcaacagtgatct

SEQ ID NO: 87307 - DNA, 60 bp, Artificial
  Synthetic oligonucleotide
tgttcctgttacccgagtgggacagatattgagtgtgtctgtcgggacaattggcgggga

SEQ ID NO: 87308 - DNA, 60 bp, Artificial
  Synthetic oligonucleotide
taccatttcgaagaatgttcctgttacccgagtgggacagatattgagtgtgtctgtcgg

SEQ ID NO: 87309 - DNA, 60 bp, Artificial
  Synthetic oligonucleotide
gggaaaatagtaagtatgaaggatgtggatgcaacagggtaccatttcgaagaatgttcc

SEQ ID NO: 87310 - DNA, 60 bp, Artificial
  Synthetic oligonucleotide
aaatcagaaaggggaaaatagtaagtatgaaggatgtggatgcaacagggtaccatttcg

SEQ ID NO: 87311 - DNA, 60 bp, Artificial
  Synthetic oligonucleotide
cagatggaccatccgatgcgcaggctttctataagatactgaaaatcagaaaggggaaaa

SEQ ID NO: 87312 - DNA, 60 bp, Artificial
  Synthetic oligonucleotide
tctgataacagatggaccatccgatgcgcaggctttctataagatactgaaaatcagaaa

SEQ ID NO: 87313 - DNA, 60 bp, Artificial
  Synthetic oligonucleotide
cacattgaaaagctggaagggaaatattatgcgaacacaagagtccgagtgcgtatgcca

SEQ ID NO: 87314 - DNA, 60 bp, Artificial
  Synthetic oligonucleotide
taacagacacattgaaaagctggaagggaaatattatgcgaacacaagagtccgagtgcg

SEQ ID NO: 87315 - DNA, 60 bp, Artificial
  Synthetic oligonucleotide
cactggcccagatgctactgctgtagcagtgctgaaatataatggtataataacagacac

SEQ ID NO: 87316 - DNA, 60 bp, Artificial
  Synthetic oligonucleotide
ggaccagcggtagtagtattgcgttctgtggtgttaattctgataccacaggttggtcat

SEQ ID NO: 87317 - DNA, 60 bp, Artificial
  Synthetic oligonucleotide
gagatggtatgggatgctaatggatgggtgtcaacagacaaggattcaaatggtgtacag

SEQ ID NO: 87318 - DNA, 60 bp, Artificial
  Synthetic oligonucleotide
ggaaggacaaagagcttggaatccagaagcggctttgagatggtatgggatgctaatgga

SEQ ID NO: 87319 - DNA, 60 bp, Artificial
  Synthetic oligonucleotide
gtttcagcattagaggagagacaacaggtaggaattgcactgtcccatgtttctgggttg

SEQ ID NO: 87320 - DNA, 60 bp, Artificial
  Synthetic oligonucleotide
ccccaggcccgtggatggcacaggctcatgtaatagcccagttaataatggaaaaggaag

SEQ ID NO: 87321 - DNA, 60 bp, Artificial
  Synthetic oligonucleotide
taatggaaaaggaagatatggggtaaaggggttcagctttaggtatggggatggtgtttg

SEQ ID NO: 87322 - DNA, 60 bp, Artificial
  Synthetic oligonucleotide
ggaagatatggggtaaaggggttcagctttaggtatggggatggtgtttggataggaagg

SEQ ID NO: 87323 - DNA, 60 bp, Artificial
  Synthetic oligonucleotide
tatagacaacgacaattggtctggttacagcgggagtttcagcattagaggagagacaac

SEQ ID NO: 87324 - DNA, 60 bp, Artificial
  Synthetic oligonucleotide
ctgtcgggacaattggcggggaagcaatcgaccatggataagattcaacagtgatcttga

SEQ ID NO: 87325 - DNA, 60 bp, Artificial
  Synthetic oligonucleotide
acagtgatcttgattaccaaatcggctatgtatgtagtgggatatttggggacaacccca

SEQ ID NO: 87326 - DNA, 60 bp, Artificial
  Synthetic oligonucleotide
accaaatcggctatgtatgtagtgggatatttggggacaaccccaggcccgtggatggca

SEQ ID NO: 87327 - DNA, 60 bp, Artificial
  Synthetic oligonucleotide
gacaaccccaggcccgtggatggcacaggctcatgtaatagcccagttaataatggaaaa

SEQ ID NO: 87328 - DNA, 50 bp, Artificial
  Synthetic oligonucleotide
ttttcttaactcagggagcccttcttaatgacaaacactcaaatgggaca

SEQ ID NO: 87329 - DNA, 60 bp, Artificial
  Synthetic oligonucleotide
taatgacaaacactcaaatgggacagtaaaagacaggagtccctttcgcacattgatgag

SEQ ID NO: 87330 - DNA, 60 bp, Artificial
  Synthetic oligonucleotide
ggatcccgaggcgaggtatttgtcatacgggagcctttcatatcatgctccattagtgaa

SEQ ID NO: 87331 - DNA, 60 bp, Artificial
  Synthetic oligonucleotide
tgctccattagtgaatgtaggacctttttcttaactcagggagcccttcttaatgacaaa

SEQ ID NO: 87332 - DNA, 53 bp, Artificial
  Synthetic oligonucleotide
cactactctagtggaagagacttgtgcccaataaggggatgggcacctctgag

SEQ ID NO: 87333 - DNA, 60 bp, Artificial
  Synthetic oligonucleotide
gaattggatcccgaggcgaggtatttgtcatacgggagcctttcatatcatgctccatta

SEQ ID NO: 87334 - DNA, 60 bp, Artificial
  Synthetic oligonucleotide
ccacagtaactgagccctcagcccctgatgtgattcactactctagtggaagagacttgt

SEQ ID NO: 87335 - DNA, 60 bp, Artificial
  Synthetic oligonucleotide
caaatgggacagtaaaagacaggagtccctttcgcacattgatgagttgtcccataggag

SEQ ID NO: 87336 - DNA, 55 bp, Artificial
  Synthetic oligonucleotide
tctctgacaacatggaagtattgggtgaccacatagtagttgaagggctttcaac

SEQ ID NO: 87337 - DNA, 60 bp, Artificial
  Synthetic oligonucleotide
tgtgctttatgcgagaaacaagcatcgcactcgcatagagcccatagcagagcagcaagg

SEQ ID NO: 87338 - DNA, 60 bp, Artificial
  Synthetic oligonucleotide
gaaacaagcatcgcactcgcatagagcccatagcagagcagcaaggtcttcggtacctgg

SEQ ID NO: 87339 - DNA, 51 bp, Artificial
  Synthetic oligonucleotide
ttataatgctcgaaccacttcagattctttcaatttgttctttcattttat

SEQ ID NO: 87340 - DNA, 60 bp, Artificial
  Synthetic oligonucleotide
ctagcagaagagctgcaaaacaacattggagtgttgagatctctaggagcaagtcaaaag

SEQ ID NO: 87341 - DNA, 60 bp, Artificial
  Synthetic oligonucleotide
gtccaaaaactagcagaagagctgcaaaacaacattggagtgttgagatctctaggagca

SEQ ID NO: 87342 - DNA, 60 bp, Artificial
  Synthetic oligonucleotide
gagctctatgggaaattcagctcttgtgaggaaatacttataatgctcgaaccacttcag

SEQ ID NO: 87343 - DNA, 60 bp, Artificial
  Synthetic oligonucleotide
aaagaatggagaaggaattgccaaagatgtaatggaagtgctaaaacagagctctatggg

SEQ ID NO: 87344 - DNA, 60 bp, Artificial
  Synthetic oligonucleotide
gcagcaaggtcttcggtacctggagtaagacgagaaatgcagatggtttcagctatgaac

SEQ ID NO: 87345 - DNA, 60 bp, Artificial
  Synthetic oligonucleotide
agcagcaaggtcttcggtacctggagtaagacgagaaatgcagatggtttcagctatgaa

SEQ ID NO: 87346 - DNA, 60 bp, Artificial
  Synthetic oligonucleotide
cagctatgaacacagcaaagacaatgaatggaatgggaaagggagaagacgtccaaaaac

SEQ ID NO: 87347 - DNA, 58 bp, Artificial
  Synthetic oligonucleotide
cagctatgaacacagcaaagacaatgaatggaatgggaaagggagaagacgtccaaaa

SEQ ID NO: 87348 - DNA, 60 bp, Artificial
  Synthetic oligonucleotide
caagcaaacaatggagaagatgcaactgctggtctcactcacttgatgatctggcattcc

SEQ ID NO: 87349 - DNA, 60 bp, Artificial
  Synthetic oligonucleotide
gtcaagcaaacaatggagaagatgcaactgctggtctcactcacttgatgatctggcatt

SEQ ID NO: 87350 - DNA, 60 bp, Artificial
  Synthetic oligonucleotide
atggatacttttattacaaagaatttccagactacaataatacaaaaggccaaaaacaca

SEQ ID NO: 87351 - DNA, 60 bp, Artificial
  Synthetic oligonucleotide
atggatacttttattacaagaaacttccagactacaataatacaaaaggccaaaaacaca

SEQ ID NO: 87352 - DNA, 60 bp, Artificial
  Synthetic oligonucleotide
aacttccagactacaataatacaaaaggccaaaaacacaatggcagaatttatggaagat

SEQ ID NO: 87353 - DNA, 60 bp, Artificial
  Synthetic oligonucleotide
aacttccagactacaataatacaaaaggccaaaaacacaatggcagaatttagtgaagat

SEQ ID NO: 87354 - DNA, 60 bp, Artificial
  Synthetic oligonucleotide
ctcagacgaaaaggccacgaacccgatcgtgccttcctttgacatgagtaaagaaggatc

SEQ ID NO: 87355 - DNA, 60 bp, Artificial
  Synthetic oligonucleotide
gatgcagttctcctccttgactgtgaatgtaagaggatcaggaatgaggatactggtaag

SEQ ID NO: 87356 - DNA, 60 bp, Artificial
  Synthetic oligonucleotide
aataagagtacatgaggggtatgaggaattcacaatggttgggcggagagcaacagccat

SEQ ID NO: 87357 - DNA, 55 bp, Artificial
  Synthetic oligonucleotide
aaaagggatatacgtaatgtgttgtccttgagagtgttggtaaacggaacattcc

SEQ ID NO: 87358 - DNA, 60 bp, Artificial
  Synthetic oligonucleotide
gagtgaccacatagtaattgaggggctttctgctgaagagataataaaaatgggtgaaac

SEQ ID NO: 87359 - DNA, 60 bp, Artificial
  Synthetic oligonucleotide
caaaatgccataagcaccacattcccatatactggagatcctccatacagccatggaacg

SEQ ID NO: 87360 - DNA, 60 bp, Artificial
  Synthetic oligonucleotide
gcacaaaatgccataagcaccacattcccatatactggagatcctccatacagccatggg

SEQ ID NO: 87361 - DNA, 60 bp, Artificial
  Synthetic oligonucleotide
catctttaaatgatgatggattggataatcatactatactgctctactactcaactgctg

SEQ ID NO: 87362 - DNA, 60 bp, Artificial
  Synthetic oligonucleotide
atggcggacaacatgaccacaacacaaattgaggtgggtccgggaggaaccaatgccacc

SEQ ID NO: 87363 - DNA, 50 bp, Artificial
  Synthetic oligonucleotide
atggcggacaacatgaccacaacacaaattgaggtgggtccgggaccaac

SEQ ID NO: 87364 - DNA, 60 bp, Artificial
  Synthetic oligonucleotide
atggcggacaacatgaccacaacacaaattgaggtgggtccaggagcaaccaatgccacc

SEQ ID NO: 87365 - DNA, 60 bp, Artificial
  Synthetic oligonucleotide
atggcggacaacatgaccacaacacaaattgaggtgggtccgggaccaaccaatgccacc

SEQ ID NO: 87366 - DNA, 60 bp, Artificial
  Synthetic oligonucleotide
gaagggctctaataggcccgttatagatataaatatggcagattatagcattgactccag

SEQ ID NO: 87367 - DNA, 60 bp, Artificial
  Synthetic oligonucleotide
atcctcatcggtggacttgaatggaatgataactcaattcgagcatctgaaaatatacag

SEQ ID NO: 87368 - DNA, 60 bp, Artificial
  Synthetic oligonucleotide
cggtggacttgaatggaatgataactcaattcgagcatctgaaaatatacagagattcgc

SEQ ID NO: 87369 - DNA, 60 bp, Artificial
  Synthetic oligonucleotide
tgattgacggaatgccaagaaacatagcatggatggttcaaagatccttagcccaagagc

SEQ ID NO: 87370 - DNA, 60 bp, Artificial
  Synthetic oligonucleotide
tgtgatgtcccctgtattgggatagagatggtacacgatggtggaaaagagacttggcac

SEQ ID NO: 87371 - DNA, 60 bp, Artificial
  Synthetic oligonucleotide
tgtgatgtcccctgtattgggatagagatggtacacgatggtggaaaagagacttggcat

SEQ ID NO: 87372 - DNA, 60 bp, Artificial
  Synthetic oligonucleotide
gtctctctgagggcattcacagaagatggtgctattgtggctgaaatatctcccattccc

SEQ ID NO: 87373 - DNA, 60 bp, Artificial
  Synthetic oligonucleotide
cactccctccaaaacagaaatgctacatggcgagacgagttgagtcagaagtttgaagag

SEQ ID NO: 87374 - DNA, 60 bp, Artificial
  Synthetic oligonucleotide
gcaagcattgcaactcctacttgaagttgagagtgagataaggactttctcttttcagct

SEQ ID NO: 87375 - DNA, 60 bp, Artificial
  Synthetic oligonucleotide
cagaaaataactggaggcctaatggtgaaaatggaccaagccataatggataagaggatt

SEQ ID NO: 87376 - DNA, 60 bp, Artificial
  Synthetic oligonucleotide
gaggaaataagccgagaatggtatatgctgatgcctaggcagaaaataactggaggccta

SEQ ID NO: 87377 - DNA, 60 bp, Artificial
  Synthetic oligonucleotide
aaacctcaaaatagccattgcctccagtcctgctcctcggtatattactgatatgagcat

SEQ ID NO: 87378 - DNA, 60 bp, Artificial
  Synthetic oligonucleotide
atcgttgaagacatcctgaagagtgagacagatgaaaacctcaaaatagccattgcctcc

SEQ ID NO: 87379 - DNA, 60 bp, Artificial
  Synthetic oligonucleotide
atggaagggaaaaagatcgttgaagacatcctgaagagtgagacagatgaaaacctcaaa

SEQ ID NO: 87380 - DNA, 60 bp, Artificial
  Synthetic oligonucleotide
cattctcaaggggaaattccaaacagcagcacaacgagcaatgatggaccaggtgaggga

SEQ ID NO: 87381 - DNA, 60 bp, Artificial
  Synthetic oligonucleotide
cagctactgcttgaagtggagcaagagataagaactttctcgtttcagcttatctaatga

SEQ ID NO: 87382 - DNA, 56 bp, Artificial
  Synthetic oligonucleotide
tgctctaagcaagcaagctgtaagaagaatgctgtcaatgaatattgagggacgtg

SEQ ID NO: 87383 - DNA, 60 bp, Artificial
  Synthetic oligonucleotide
cagagaagaagcaatgcagaatagactgaaaatcgatccggtcaaattgagcagtggtta

SEQ ID NO: 87384 - DNA, 60 bp, Artificial
  Synthetic oligonucleotide
gagaagaagcaatgcagaatagactgaaaatcgatccggtcaaattgagcagtggttaca

SEQ ID NO: 87385 - DNA, 59 bp, Artificial
  Synthetic oligonucleotide
ttctgccgaagagataataaaaatgggtgaaacagttttggaggtagaagaattgcatt

SEQ ID NO: 87386 - DNA, 59 bp, Artificial
  Synthetic oligonucleotide
ttctgctgaagagataataaaaatgggtgaaacagttttggaggtagaagaattgcatt

SEQ ID NO: 87387 - DNA, 60 bp, Artificial
  Synthetic oligonucleotide
cttggaccagcaacagctcaaatggctcttcagctattcatcaaggattacagatacacg

SEQ ID NO: 87388 - DNA, 60 bp, Artificial
  Synthetic oligonucleotide
caatgatcttggaccagcaacagctcaaatggctcttcagctattcatcaaggattacag

SEQ ID NO: 87389 - DNA, 60 bp, Artificial
  Synthetic oligonucleotide
gcgtcaataggtgtttttatgtggagttgataagggggagaccacaggaaactagagtat

SEQ ID NO: 87390 - DNA, 60 bp, Artificial
  Synthetic oligonucleotide
gagggcaactgtctaccagaggagttcagattgcttcaaatgagaacatggaaacaatgg

SEQ ID NO: 87391 - DNA, 60 bp, Artificial
  Synthetic oligonucleotide
gaatggaatgggaaagggagaagacgtccaaaaactggcagaagagctgcaaagcaacat

SEQ ID NO: 87392 - DNA, 58 bp, Artificial
  Synthetic oligonucleotide
tgcttgaggtggagcaagagataagaaccttctcgtttcagcttatttaatgataaaa

SEQ ID NO: 87393 - DNA, 60 bp, Artificial
  Synthetic oligonucleotide
tgcttgaggtggagcaagagataagaaccttctcgtttcagcttatttaatgataaaaaa

SEQ ID NO: 87394 - DNA, 60 bp, Artificial
  Synthetic oligonucleotide
acaaaatgaacactcgaattctaatactcacccttacggcagtcatccacacaaatgcag

SEQ ID NO: 87395 - DNA, 60 bp, Artificial
  Synthetic oligonucleotide
aatcaacaacgagactatactggaaacagggtatgtgtgcagcaaatttcactcagacac

SEQ ID NO: 87396 - DNA, 60 bp, Artificial
  Synthetic oligonucleotide
ggacaaataaggacagaactccatacaggtccctaatcagattcccaattggaacagccc

SEQ ID NO: 87397 - DNA, 60 bp, Artificial
  Synthetic oligonucleotide
agcacagcaatgggacaaataaggacagaactccatacaggtccctaatcagattcccaa

SEQ ID NO: 87398 - DNA, 60 bp, Artificial
  Synthetic oligonucleotide
gagaacccaagagtcagaatgccaatgtttgtacggaacctgtgctgtggcagtaacaga

SEQ ID NO: 87399 - DNA, 60 bp, Artificial
  Synthetic oligonucleotide
gctttcaatgcagttattcatggtaaagttgaagaccataaaggtgagactgcaccaaac

SEQ ID NO: 87400 - DNA, 60 bp, Artificial
  Synthetic oligonucleotide
gacaaataaggacagaactccatacaggtccctaatcagattcccaattggaacagcccc

SEQ ID NO: 87401 - DNA, 60 bp, Artificial
  Synthetic oligonucleotide
caaataaggacagaactccatacaggtccctaatcagattcccaattggaacagctcccg

SEQ ID NO: 87402 - DNA, 60 bp, Artificial
  Synthetic oligonucleotide
taaaagaagggaaaatcataaaatacgagaaggtaccagatgacaagatacagcatttgg

SEQ ID NO: 87403 - DNA, 60 bp, Artificial
  Synthetic oligonucleotide
gggaaaatcataaaatacgagaaggtaccagatgacaagatacagcatttggaagaatgt

SEQ ID NO: 87404 - DNA, 60 bp, Artificial
  Synthetic oligonucleotide
gaaggaagaatcataaaatacgagaaggtaccagatgacaagatacagcatttggaagaa

SEQ ID NO: 87405 - DNA, 60 bp, Artificial
  Synthetic oligonucleotide
gaagggaaaatcataaaatacgagaaggtaccagatgacaagatacagcatttggaagaa

SEQ ID NO: 87406 - DNA, 60 bp, Artificial
  Synthetic oligonucleotide
tagcgattggatcagtgaacacagtgttatctaccatagcactgctgattggaataggta

SEQ ID NO: 87407 - DNA, 60 bp, Artificial
  Synthetic oligonucleotide
atagcgattggatcagtgaacacagtgttatctaccatagcactgctaattggaataggt

SEQ ID NO: 87408 - DNA, 60 bp, Artificial
  Synthetic oligonucleotide
gggtatgtatgcagtaaattccattcggacacacccaggcctagtgatccctctacaatt

SEQ ID NO: 87409 - DNA, 60 bp, Artificial
  Synthetic oligonucleotide
gcgattggatcagtgaacacagtgttatctaccatagcactgctaattggaataggtaac

SEQ ID NO: 87410 - DNA, 60 bp, Artificial
  Synthetic oligonucleotide
tggaataggtaacttagctttcaatgcagttattcatggtaaagttgaagaccataaagg

SEQ ID NO: 87411 - DNA, 60 bp, Artificial
  Synthetic oligonucleotide
ggaataggtaacttagctttcaatgcagttattcatggtaaagttgaggatcataaaggt

SEQ ID NO: 87412 - DNA, 60 bp, Artificial
  Synthetic oligonucleotide
aataggtaacttagctttcaatgcagttattcatggtaaagttgaagaccataaaggtga

SEQ ID NO: 87413 - DNA, 60 bp, Artificial
  Synthetic oligonucleotide
gcgattggatcagtgaacacagtgttatctaccatagcactgctgattggaataggtaac

SEQ ID NO: 87414 - DNA, 52 bp, Artificial
  Synthetic oligonucleotide
actcaaacacttgtttccaataatgattggtctgggtattcaggcagctttg

SEQ ID NO: 87415 - DNA, 60 bp, Artificial
  Synthetic oligonucleotide
ccattcagacacacccaggcctagtgatccctctacagtttcatgtagctctcctagtgg

SEQ ID NO: 87416 - DNA, 60 bp, Artificial
  Synthetic oligonucleotide
tgttttcagccttgcttttatgttgaactcacacgaggagtgccaaacaaaaatgagccc

SEQ ID NO: 87417 - DNA, 52 bp, Artificial
  Synthetic oligonucleotide
tgttttcagccttgcttttatgttgaactcacacgaggagtgccaaacaaaa

SEQ ID NO: 87418 - DNA, 52 bp, Artificial
  Synthetic oligonucleotide
tgctttcagccttgcttttatgttgaactcacacgaggggtgccaaacaaaa

SEQ ID NO: 87419 - DNA, 60 bp, Artificial
  Synthetic oligonucleotide
tgctttcagccttgcttttatgttgaactcacacgaggggtgccaaacaaaaatgaggcc

SEQ ID NO: 87420 - DNA, 60 bp, Artificial
  Synthetic oligonucleotide
aaatgaggccgtctcatggaccagcaacagtatagttactttctgtggactagacaatga

SEQ ID NO: 87421 - DNA, 60 bp, Artificial
  Synthetic oligonucleotide
aaatgagcccgtctcatggaccagcaacagtatagttactttctgtggactagacaatga

SEQ ID NO: 87422 - DNA, 60 bp, Artificial
  Synthetic oligonucleotide
gctcaaggcgcactcctgggaacaaagcacagcaatgggacaaataaggacagaactcca

SEQ ID NO: 87423 - DNA, 60 bp, Artificial
  Synthetic oligonucleotide
ctgttggtcttttgcactagctcagggcgcactcctgggaacaaagcacagcaatgggac

SEQ ID NO: 87424 - DNA, 60 bp, Artificial
  Synthetic oligonucleotide
tgaagtctgttggtcttttgcactagctcagggcgcactcctgggaacaaagcacagcaa

SEQ ID NO: 87425 - DNA, 60 bp, Artificial
  Synthetic oligonucleotide
cacaaagacaatgctctgagactggctgaaaacaaagatgtcttggtgacaagagaaccc

SEQ ID NO: 87426 - DNA, 60 bp, Artificial
  Synthetic oligonucleotide
cttcccatttcacaaggacaatgctctgagactggctgaaaacaaagatgtcttagtaac

SEQ ID NO: 87427 - DNA, 60 bp, Artificial
  Synthetic oligonucleotide
tcttcccgtttcacaaagacaatgctctgagactggctgaaaacaaagatgtcttggtga

SEQ ID NO: 87428 - DNA, 60 bp, Artificial
  Synthetic oligonucleotide
gctttcaatgcagttattcatggtaaagttgaggatcataaaggtgaaactgcaccaaac

SEQ ID NO: 87429 - DNA, 60 bp, Artificial
  Synthetic oligonucleotide
cttagctttcaatgcagttattcatggtaaagttgaagaccataaaggtgagactgcacc

SEQ ID NO: 87430 - DNA, 60 bp, Artificial
  Synthetic oligonucleotide
aaatacgagaaggtaccagatgacaagatacagcatttggaagaatgttcatgttacaca

SEQ ID NO: 87431 - DNA, 60 bp, Artificial
  Synthetic oligonucleotide
gaacccaagagtcagaatgccaatgtttgtacggaacctgtgttgtcgcagtaacagatg

SEQ ID NO: 87432 - DNA, 60 bp, Artificial
  Synthetic oligonucleotide
gtcctttgcactagctcaaggcgcactcctgggaacaaagcacagcaatgggacaaataa

SEQ ID NO: 87433 - DNA, 60 bp, Artificial
  Synthetic oligonucleotide
ggatcgggaaattggccggatggttccaacattgggtttatgcccaagtaacagaaaaaa

SEQ ID NO: 87434 - DNA, 50 bp, Artificial
  Synthetic oligonucleotide
tcctgtttatggatccctctgctggaattgaagggtttgagccatactgt

SEQ ID NO: 87435 - DNA, 53 bp, Artificial
  Synthetic oligonucleotide
tcctatttatgaatccctctgctggaattgaagggtttgagccatactgtatg

SEQ ID NO: 87436 - DNA, 60 bp, Artificial
  Synthetic oligonucleotide
ttataccaccatcactgaacctccaattccccaggcgatccactattcaagtgggaggga

SEQ ID NO: 87437 - DNA, 60 bp, Artificial
  Synthetic oligonucleotide
agcccttcatatcgtgttccattgatgaatgcagaacttttttcttgactcaaggtgccc

SEQ ID NO: 87438 - DNA, 60 bp, Artificial
  Synthetic oligonucleotide
agcccttcatatcgtgttccattgatgaatgcagaacttttttcttaactcaaggtgccc

SEQ ID NO: 87439 - DNA, 60 bp, Artificial
  Synthetic oligonucleotide
agatagtaaacacaaaggatgtggatgctacagggtatcactttgaggaatgttcctgct

SEQ ID NO: 87440 - DNA, 60 bp, Artificial
  Synthetic oligonucleotide
caaaggatgtggatgctacagggtatcactttgaggaatgttcctgctatccaagtgggg

SEQ ID NO: 87441 - DNA, 60 bp, Artificial
  Synthetic oligonucleotide
atttagtttcaggtatggagatggggtctggatagggaggacaaaaagcttggagtccag

SEQ ID NO: 87442 - DNA, 60 bp, Artificial
  Synthetic oligonucleotide
tggagtccaggagtgggtttgaaatggtttgggatgcaaacggatgggtttcaacagaca

SEQ ID NO: 87443 - DNA, 60 bp, Artificial
  Synthetic oligonucleotide
tcatgcgacagtccagtcaataatgggaaggggagatacggagtaaaaggatttagtttc

SEQ ID NO: 87444 - DNA, 60 bp, Artificial
  Synthetic oligonucleotide
gcgacagtccagtcaataatgggaaggggagatacggagtaaaaggatttagtttcaggt

SEQ ID NO: 87445 - DNA, 60 bp, Artificial
  Synthetic oligonucleotide
ggtagtgtaagcattttactgacaacaataggactgctactccaaataacaagcttgtgc

SEQ ID NO: 87446 - DNA, 60 bp, Artificial
  Synthetic oligonucleotide
tccaaataacaagcttgtgctcaatatggttcagtcactacaatcaggtaacccaaacaa

SEQ ID NO: 87447 - DNA, 60 bp, Artificial
  Synthetic oligonucleotide
cttgtgctcaatatggttcagtcactacaatcaggtaacccaaacaaccgggaaaccatg

SEQ ID NO: 87448 - DNA, 60 bp, Artificial
  Synthetic oligonucleotide
tcaacagacaagaactcaaatggcgtgcaggatattatagacaatgacaattggtctggc

SEQ ID NO: 87449 - DNA, 60 bp, Artificial
  Synthetic oligonucleotide
ctgaacctccaattccccaggcgatccactattcaagtgggagggatctatgcccagtga

SEQ ID NO: 87450 - DNA, 60 bp, Artificial
  Synthetic oligonucleotide
ctgaacctccaattccccaggcgatccactattcaagtgggagggatctatgcccggtga

SEQ ID NO: 87451 - DNA, 60 bp, Artificial
  Synthetic oligonucleotide
ggacaatgggatcagaattggatctaggggtgaggtatttgttatacgagagcccttcat

SEQ ID NO: 87452 - DNA, 60 bp, Artificial
  Synthetic oligonucleotide
gggatcagaattggatctaggggtgaggtatttgttatacgagagcccttcatatcgtgt

SEQ ID NO: 87453 - DNA, 60 bp, Artificial
  Synthetic oligonucleotide
tgtgcagtggggtattcggagataatcccaggcctgtggatggtactgggtcatgcgaca

SEQ ID NO: 87454 - DNA, 60 bp, Artificial
  Synthetic oligonucleotide
ggggtattcggagataatcccaggcctgtggatggtactgggtcatgcgacagtccagtc

SEQ ID NO: 87455 - DNA, 60 bp, Artificial
  Synthetic oligonucleotide
ttggtctggctacagtgggagtttcagtattaggggggagacaaccggcaggaactgcac

SEQ ID NO: 87456 - DNA, 60 bp, Artificial
  Synthetic oligonucleotide
gaactcaaatggcgtgcaggatattatagacaatgacaattggtctggctacagtgggag

SEQ ID NO: 87457 - DNA, 60 bp, Artificial
  Synthetic oligonucleotide
catgcttttgggttgaaatgataaggggacaacctaaggagaaaaccatatggactagtg

SEQ ID NO: 87458 - DNA, 60 bp, Artificial
  Synthetic oligonucleotide
ggaactgcactataccatgcttttgggttgaaatgataaggggacaacctaaggagaaaa

SEQ ID NO: 87459 - DNA, 60 bp, Artificial
  Synthetic oligonucleotide
ctgataccacaagttggtcatggcccgatggcgctctgttgccatttgacatagacaagt

SEQ ID NO: 87460 - DNA, 60 bp, Artificial
  Synthetic oligonucleotide
accatccgatgcacaggctttttacaagatattaaagatcaaaaaagggaagatagtaaa

SEQ ID NO: 87461 - DNA, 60 bp, Artificial
  Synthetic oligonucleotide
cactcaagagctggaaaggcaacattatgcgaacacaagagtctgagtgcgtgtgtcagg

SEQ ID NO: 87462 - DNA, 60 bp, Artificial
  Synthetic oligonucleotide
tattatcacagacacactcaagagctggaaaggcaacattatgcgaacacaagagtctga

SEQ ID NO: 87463 - DNA, 60 bp, Artificial
  Synthetic oligonucleotide
ccggtcctgatactactgctgttgcagtattaaaatacaatggtattatcacagacacac

SEQ ID NO: 87464 - DNA, 60 bp, Artificial
  Synthetic oligonucleotide
ggaattaccggtcctgatactactgctgttgcagtattaaaatacaatggtattatcaca

SEQ ID NO: 87465 - DNA, 56 bp, Artificial
  Synthetic oligonucleotide
ctagtaacagtcgctttgagtctgttgcttggtctgccactgcttgcagcgatgga

SEQ ID NO: 87466 - DNA, 60 bp, Artificial
  Synthetic oligonucleotide
cgcacactaatgagctgccctataggggttgctccttcccctagtaacagtcgctttgag

SEQ ID NO: 87467 - DNA, 60 bp, Artificial
  Synthetic oligonucleotide
gagcccttttcgcacactaatgagctgccctataggggttgctccttcccctagtaacag

SEQ ID NO: 87468 - DNA, 60 bp, Artificial
  Synthetic oligonucleotide
ggtgccctcctcaatgacaaacactcgaatggaacagtgaaagataggagcccttttcgc

SEQ ID NO: 87469 - DNA, 60 bp, Artificial
  Synthetic oligonucleotide
caaggtgccctcctcaatgacaaacactcgaatggaacagtgaaagataggagccctttt

SEQ ID NO: 87470 - DNA, 60 bp, Artificial
  Synthetic oligonucleotide
cataaccattggtagtgtaagcattttactgacaacaataggactgctactccaaataac

SEQ ID NO: 87471 - DNA, 60 bp, Artificial
  Synthetic oligonucleotide
gagtccaggagtgggtttgaaatggtttgggatgcaaacggatgggtttcaacagacaag

SEQ ID NO: 87472 - DNA, 60 bp, Artificial
  Synthetic oligonucleotide
catgcgggttcgccagcaataaaaccatagaatgtgcctgtagagataacagttacacag

SEQ ID NO: 87473 - DNA, 55 bp, Artificial
  Synthetic oligonucleotide
ggatttgccagcaataaaaccatagaatgtgcctgtagagataacagttacacag

SEQ ID NO: 87474 - DNA, 60 bp, Artificial
  Synthetic oligonucleotide
catgcgggttcgccagcaataaaaccatagaatgtgcctgtagagacaacagttacacag

SEQ ID NO: 87475 - DNA, 60 bp, Artificial
  Synthetic oligonucleotide
cattagatctccatgattctaatgttcgaaatctccatgaaaaggtcagacgaatgctga

SEQ ID NO: 87476 - DNA, 60 bp, Artificial
  Synthetic oligonucleotide
acattagatctccatgattctaatgttcgaaacctccatgaaaaagtcagacgaatgctg

SEQ ID NO: 87477 - DNA, 57 bp, Artificial
  Synthetic oligonucleotide
acattagatctccatgattctaatgttcgaaacctccatgaaaaggtcagacaaatg

SEQ ID NO: 87478 - DNA, 57 bp, Artificial
  Synthetic oligonucleotide
catgccatgatggtagagaatggacatatatcggagttgatggccctgacagtaatg

SEQ ID NO: 87479 - DNA, 60 bp, Artificial
  Synthetic oligonucleotide
gaatgtgcaacatcctcaaagggaagtttcaaacagcagcacaacgagcaatgatggacc

SEQ ID NO: 87480 - DNA, 60 bp, Artificial
  Synthetic oligonucleotide
gaatgtgcaacattctcaaggggaaatttcaaacagcagcacaacgagcaatgatggacc

SEQ ID NO: 87481 - DNA, 60 bp, Artificial
  Synthetic oligonucleotide
gaatgtgcaacatcctcaagggaaaattccaaacagcagcacaacgagcaatgatggacc

SEQ ID NO: 87482 - DNA, 60 bp, Artificial
  Synthetic oligonucleotide
gctagaaagagagttggtccgcaaaacgaggttcctcccagtggctggtggaacaagcag

SEQ ID NO: 87483 - DNA, 60 bp, Artificial
  Synthetic oligonucleotide
gctggaaagagagttggtccgcaaaacgaggttcctcccagtggctggtggaacaagcag

SEQ ID NO: 87484 - DNA, 60 bp, Artificial
  Synthetic oligonucleotide
gtgcatagcatggtccagctcaagttgccatgatgggaaagcatggttgcacgtttgtgt

SEQ ID NO: 87485 - DNA, 60 bp, Artificial
  Synthetic oligonucleotide
catagcatggtccagctcaagttgccatgatgggaaagcatggttgcacgtttgtgtcac

SEQ ID NO: 87486 - DNA, 60 bp, Artificial
  Synthetic oligonucleotide
gcagctatagatcaaataaccgggaaattgaacaggctagtagagaagacaaacacggag

SEQ ID NO: 87487 - DNA, 60 bp, Artificial
  Synthetic oligonucleotide
agcaaaagcaggggtcacaatgtacaaaatagtactagtactcacgctccttggagcggt

SEQ ID NO: 87488 - DNA, 60 bp, Artificial
  Synthetic oligonucleotide
tactcaggcagctatagatcaaataaccgggaaattgaacaggctagtagagaagacaaa

SEQ ID NO: 87489 - DNA, 60 bp, Artificial
  Synthetic oligonucleotide
agcaaaagcaggggtcacaatgtacaaaatagtgctagtactcgcgctccttggagcggt

SEQ ID NO: 87490 - DNA, 60 bp, Artificial
  Synthetic oligonucleotide
gagagagtgaggaagcaactaaggcaaaatgcagaagaagatgggaaagggtgttttgaa

SEQ ID NO: 87491 - DNA, 60 bp, Artificial
  Synthetic oligonucleotide
tgaatctatatgagagggtgaggaagcaactaaggcaaaatgcagaagaagatggaaaag

SEQ ID NO: 87492 - DNA, 60 bp, Artificial
  Synthetic oligonucleotide
gaatcctgctctcagaatgaaatggatgatggcaatgaaatatccgataaccgcagacaa

SEQ ID NO: 87493 - DNA, 60 bp, Artificial
  Synthetic oligonucleotide
gacttgtcggagacacaccaaggaacgatgatagctctagcagcagcaactgcagggatc

SEQ ID NO: 87494 - DNA, 60 bp, Artificial
  Synthetic oligonucleotide
cttgtcggagacacaccaaggaacgatgatagctctagcagcagcaactgcagggatcct

SEQ ID NO: 87495 - DNA, 60 bp, Artificial
  Synthetic oligonucleotide
ttgtggcacttcagggacctatggaacaggctcatggcctgatggggcgaatatcaattt

SEQ ID NO: 87496 - DNA, 53 bp, Artificial
  Synthetic oligonucleotide
tcaactcactcttcgagcgtttaatgaaggacattcaaagccaattcgagcag

SEQ ID NO: 87497 - DNA, 54 bp, Artificial
  Synthetic oligonucleotide
tcaactcactcttcgagcgttttaatgaaggacattcaaagccaattcgagcag

SEQ ID NO: 87498 - DNA, 60 bp, Artificial
  Synthetic oligonucleotide
gcttcaatcttcttcacaaatgtaatgactcatgcatggaaaccatcagaaatgggacct

SEQ ID NO: 87499 - DNA, 60 bp, Artificial
  Synthetic oligonucleotide
ggggatggttgcttcaatcttcttcacaaatgtaatgactcatgcatggaaactattaga

SEQ ID NO: 87500 - DNA, 60 bp, Artificial
  Synthetic oligonucleotide
tgaaggggatggttgcttcaatcttcttcacaaatgtaatgactcatgcatggaaactat

SEQ ID NO: 87501 - DNA, 60 bp, Artificial
  Synthetic oligonucleotide
tgaaggagatggttgcttcaatcttcttcacaaatgtaatgactcatgcatggaaaccat

SEQ ID NO: 87502 - DNA, 60 bp, Artificial
  Synthetic oligonucleotide
tgaaggagatggttgcttcaatcttcttcacaaatgtaatgactcatgcatggaaactat

SEQ ID NO: 87503 - DNA, 60 bp, Artificial
  Synthetic oligonucleotide
gcagacaaaatatgcataggatatctaagcaataactcttcagacacagtagacacacta

SEQ ID NO: 87504 - DNA, 60 bp, Artificial
  Synthetic oligonucleotide
gcttcaatcttcttcacaaatgtaatgactcatgcatggaaactatcagaaatgggacct

SEQ ID NO: 87505 - DNA, 60 bp, Artificial
  Synthetic oligonucleotide
attgaggtgggtccgggagcaaccaatgccaccataaactttgaagcaggaattctggag

SEQ ID NO: 87506 - DNA, 60 bp, Artificial
  Synthetic oligonucleotide
cagttctcctcactgactgtgaatgtgagaggatcaggaatgaggatactggtaagaggc

SEQ ID NO: 87507 - DNA, 60 bp, Artificial
  Synthetic oligonucleotide
caattctcctcactgactgtgaatgtgagaggatcaggaatgaggatactggtaagaggc

SEQ ID NO: 87508 - DNA, 60 bp, Artificial
  Synthetic oligonucleotide
tatattgagaacacaagagtctgaatgtgcctgcattaacggttcctgcttcaccataat

SEQ ID NO: 87509 - DNA, 60 bp, Artificial
  Synthetic oligonucleotide
agagtctgaatgtgcctgcattaacggttcctgcttcaccataatgactgatggaccaag

SEQ ID NO: 87510 - DNA, 60 bp, Artificial
  Synthetic oligonucleotide
gctcctgttatcctgatgctagcgaagtaatgtgtgtgtgcagagacaactggcatggtt

SEQ ID NO: 87511 - DNA, 58 bp, Artificial
  Synthetic oligonucleotide
cctaatgagctgtcctgttggtgaagctccttctccatacaattcaaggtttgagtcc

SEQ ID NO: 87512 - DNA, 60 bp, Artificial
  Synthetic oligonucleotide
cagcaaggataatggtataaggataggttccaagggtgatgtatttgtcatcagagagcc

SEQ ID NO: 87513 - DNA, 60 bp, Artificial
  Synthetic oligonucleotide
tgggctatatacagcaaggataatggtataaggataggttccaagggtgatgtatttgtc

SEQ ID NO: 87514 - DNA, 60 bp, Artificial
  Synthetic oligonucleotide
tcactgcacaggaactggtagagtcgcaaaacctcccggaattatgtccgagccccctga

SEQ ID NO: 87515 - DNA, 60 bp, Artificial
  Synthetic oligonucleotide
cggtgattatgcaaggctttacatttggggagtccaccacccttcaacagacacggagca

SEQ ID NO: 87516 - DNA, 60 bp, Artificial
  Synthetic oligonucleotide
agagcagaatgcagttctcctcactgactgtgaatgtgagaggatcagggatgaggatac

SEQ ID NO: 87517 - DNA, 60 bp, Artificial
  Synthetic oligonucleotide
gggaatgtttaatatgctatctaccgtgttgggagtagccgcactaggtatcagaaacat

SEQ ID NO: 87518 - DNA, 57 bp, Artificial
  Synthetic oligonucleotide
gaattcgaatggccatcaattaatgtcgaattgtttaaaaacgaccttgtttctact

SEQ ID NO: 87519 - DNA, 60 bp, Artificial
  Synthetic oligonucleotide
ggagttaatacgcggaagacccaaggaggacaaagtatggtggaccagtaatagtatagt

SEQ ID NO: 87520 - DNA, 60 bp, Artificial
  Synthetic oligonucleotide
cccactcaaggtcaaacaatcgtattaaacactgactggagtggctacagtgggtccttc

SEQ ID NO: 87521 - DNA, 60 bp, Artificial
  Synthetic oligonucleotide
ttttatgtggagttaatacgtggaagacccaaggaggacaaagtatggtggaccagtaat

SEQ ID NO: 87522 - DNA, 60 bp, Artificial
  Synthetic oligonucleotide
agacccaaggaggacaaagtatggtggaccagcaatagtatagtatcgatgtgttccagc

SEQ ID NO: 87523 - DNA, 60 bp, Artificial
  Synthetic oligonucleotide
gccaagggacaacaattagagggaaacactcaaatggaacaatacacgatagatcccagt

SEQ ID NO: 87524 - DNA, 60 bp, Artificial
  Synthetic oligonucleotide
aagacccaaggaggacaaagtatggtggaccagcaatagtatagtatcgatgtgttccag

SEQ ID NO: 87525 - DNA, 60 bp, Artificial
  Synthetic oligonucleotide
gcgtgtttttatgtggagttaatacgcggaagacccaaggaggacaaagtatggtggacc

SEQ ID NO: 87526 - DNA, 60 bp, Artificial
  Synthetic oligonucleotide
acgcggaaggcccaaggaggacaaagtatggtggaccagtaatagtatagtatcaatgtg

SEQ ID NO: 87527 - DNA, 60 bp, Artificial
  Synthetic oligonucleotide
ttatgtagagttaatacgcggaagacccaaggaggacaaagtatggtggaccagtaatag

SEQ ID NO: 87528 - DNA, 60 bp, Artificial
  Synthetic oligonucleotide
cgcggaaggcccaaggaggacaaagtatggtggaccagtaatagtatagtatcaatgtgt

SEQ ID NO: 87529 - DNA, 60 bp, Artificial
  Synthetic oligonucleotide
agttgtaactttcgaatttagtagtacagaccccagagtggactcaggaaagtggccaaa

SEQ ID NO: 87530 - DNA, 60 bp, Artificial
  Synthetic oligonucleotide
gagtggctgcttgggttcaaacagagatgaatctattgagcactctgacaagtaaaaggg

SEQ ID NO: 87531 - DNA, 60 bp, Artificial
  Synthetic oligonucleotide
ccaaacaccttagccaaagaatgtctagaaaagtactcaacactacgggatcaaactgac

SEQ ID NO: 87532 - DNA, 60 bp, Artificial
  Synthetic oligonucleotide
ttgttgaacaagaatcatcgatacaaggatatgacatgaccaaagcttgtttcaagggag

SEQ ID NO: 87533 - DNA, 60 bp, Artificial
  Synthetic oligonucleotide
atggaagcaattgttgagcaagaatcatcaatacaaggatatgacatgaccaaagcttgt

SEQ ID NO: 87534 - DNA, 60 bp, Artificial
  Synthetic oligonucleotide
attggtgcctctatatgctttttaaaacccaaagaccaggaaaggaaaagaagattcatc

SEQ ID NO: 87535 - DNA, 60 bp, Artificial
  Synthetic oligonucleotide
ctcaaacactgtgtcaagcttccaggtagattgctttctttggcatgtccgcaaaagatt

SEQ ID NO: 87536 - DNA, 60 bp, Artificial
  Synthetic oligonucleotide
ctgtgtcaagcttccaggtagattgctttctttggcatgtccgcaaaagatttgcagacc

SEQ ID NO: 87537 - DNA, 56 bp, Artificial
  Synthetic oligonucleotide
acgaggggtcttatttcttcggagacaatgcagaggagtatgacagttaaagaaaa

SEQ ID NO: 87538 - DNA, 60 bp, Artificial
  Synthetic oligonucleotide
gccccaaatatgtgaacaaaaggagcctgttacttgcaaccggaatgaggaatgttccag

SEQ ID NO: 87539 - DNA, 60 bp, Artificial
  Synthetic oligonucleotide
tccattaatactaaactcccttttcaaaatctttcaccgagaactgtgggtcaatgcccc

SEQ ID NO: 87540 - DNA, 60 bp, Artificial
  Synthetic oligonucleotide
ctattacttgcaaccggaatgaggaatgttccggagatcatccaagagagaggtctgttt

SEQ ID NO: 87541 - DNA, 60 bp, Artificial
  Synthetic oligonucleotide
gacgatagtaaggccaggtgataacatcactttttcacataacggtggactaatagcacc

SEQ ID NO: 87542 - DNA, 60 bp, Artificial
  Synthetic oligonucleotide
ggtgggtccattaatactaaactcccttttcaaaatctatcacctagaacggtgggtcaa

SEQ ID NO: 87543 - DNA, 60 bp, Artificial
  Synthetic oligonucleotide
gctttccatttcagtagggagttctacttatcaaaacaactttgtgcctgtggtgggagc

SEQ ID NO: 87544 - DNA, 60 bp, Artificial
  Synthetic oligonucleotide
ctatttcagtagggagttctacttatcaaaacaactttgtgccagtagtgggagcaagac

SEQ ID NO: 87545 - DNA, 60 bp, Artificial
  Synthetic oligonucleotide
ggcgcaactgtaaacgaggaggcattaagacagaaaatcatggaaagtggagggattgac

SEQ ID NO: 87546 - DNA, 60 bp, Artificial
  Synthetic oligonucleotide
gtatgggacccaatcgctttccatttcagtagggagttctacttatcaaaacaactttgt

SEQ ID NO: 87547 - DNA, 60 bp, Artificial
  Synthetic oligonucleotide
gcaaaacacctatcaatgggtgctaaaaaacttggtaacactgaaggctcagtttcttct

SEQ ID NO: 87548 - DNA, 66 bp, Artificial
  Synthetic oligonucleotide
ggaaaagatatagtgctttatccaatgacatttcacaaggaattaagagacaaagaatgacagttg

SEQ ID NO: 87549 - DNA, 60 bp, Artificial
  Synthetic oligonucleotide
gaaaagatatagtgctttatccaatgacatttcacaaggaattaagagacaaagaatgac

SEQ ID NO: 87550 - DNA, 60 bp, Artificial
  Synthetic oligonucleotide
tttgaataggagcaacgacctttttgatcaatgggggtatgaggaatcacccaaagcaag

SEQ ID NO: 87551 - DNA, 60 bp, Artificial
  Synthetic oligonucleotide
gcaaaacacttatcaatgggtgctaaaaaacttggtaacactgaaggctcagtttcttct

SEQ ID NO: 87552 - DNA, 60 bp, Artificial
  Synthetic oligonucleotide
gcaaaacacctaccaatgggtgctaaaaaatttggtaacactgaaggctcagtttcttct

SEQ ID NO: 87553 - DNA, 60 bp, Artificial
  Synthetic oligonucleotide
gcaaaacacctatcaatgggtgctaaaaaatttggtaacactgaaggctcagtttcttct

SEQ ID NO: 87554 - DNA, 55 bp, Artificial
  Synthetic oligonucleotide
agacataggaaccaaaggccaaatgtgctcaatagcagcagttacttggtggaat

SEQ ID NO: 87555 - DNA, 60 bp, Artificial
  Synthetic oligonucleotide
caagggaatacgacttaaaacaaatgctgaagacataggaaccaaaggccaaatgtgctc

SEQ ID NO: 87556 - DNA, 60 bp, Artificial
  Synthetic oligonucleotide
tgggacggagaagaggagttccatgtaagatgtggtgaatgcaggggaatattaaaaaag

SEQ ID NO: 87557 - DNA, 55 bp, Artificial
  Synthetic oligonucleotide
tagcttgtagaaaaataatcagaagatcaatagtcgcatcaaacccactagagct

SEQ ID NO: 87558 - DNA, 60 bp, Artificial
  Synthetic oligonucleotide
ttggaatacaagggaatacgacttaaaacaaatgctgaagacataggaaccaaaggccaa

SEQ ID NO: 87559 - DNA, 60 bp, Artificial
  Synthetic oligonucleotide
gttccatgtaagatgtggtgaatgcaggggaatattaaaaaagagcaaaatgagaatgga

SEQ ID NO: 87560 - DNA, 57 bp, Artificial
  Synthetic oligonucleotide
tgggacggagaagaggagttccatgtaagatgtggtgaatgcaggggaatattaaaa

SEQ ID NO: 87561 - DNA, 50 bp, Artificial
  Synthetic oligonucleotide
aaaatggcggacaacatgaccacaacacaaattgaggtgggtccgggagc

SEQ ID NO: 87562 - DNA, 60 bp, Artificial
  Synthetic oligonucleotide
ggcggacaacatgaccacaacacaaattgaggtgggtccgggaggaaccaatgccaccat

SEQ ID NO: 87563 - DNA, 60 bp, Artificial
  Synthetic oligonucleotide
ggcggacaacatgaccacaacacaaattgaggtgggtccaggagcaaccaatgccaccat

SEQ ID NO: 87564 - DNA, 60 bp, Artificial
  Synthetic oligonucleotide
gcaggaattctggagtgctatgaaaggctttcatggcaaagagcccttgactaccctggt

SEQ ID NO: 87565 - DNA, 60 bp, Artificial
  Synthetic oligonucleotide
gtgctatgaaaggctttcatggcaaagagcccttgactaccctggtcaagaccgcctaaa

SEQ ID NO: 87566 - DNA, 60 bp, Artificial
  Synthetic oligonucleotide
tgctatgaaaggctttcatggcaaagagcccttgactaccctggtcaagaccgcctaaac

SEQ ID NO: 87567 - DNA, 60 bp, Artificial
  Synthetic oligonucleotide
gctatgaaaggctttcatggcaaagagcccttgactaccctggtcaagaccgcctaaaca

SEQ ID NO: 87568 - DNA, 60 bp, Artificial
  Synthetic oligonucleotide
gaggaattccaatggaacacagtcaatcaaaatgggaaatccggggcatgcaaaagggca

SEQ ID NO: 87569 - DNA, 60 bp, Artificial
  Synthetic oligonucleotide
acaaggaagagatcaggaggatttggcgtcaagcaaacaatggagaagatgcaactgctg

SEQ ID NO: 87570 - DNA, 60 bp, Artificial
  Synthetic oligonucleotide
gtcgcactacttttagcctttattttgtgggcttgtcaaaacggaaacatccggtgccag

SEQ ID NO: 87571 - DNA, 60 bp, Artificial
  Synthetic oligonucleotide
gggagttcatcacccttcaacagacacagagcaaaccaacctatacaagaacaaccctgg

SEQ ID NO: 87572 - DNA, 60 bp, Artificial
  Synthetic oligonucleotide
caaacaagtgtagtccctaacattggtagcagaccttgggtgagaggacaaagtggaagg

SEQ ID NO: 87573 - DNA, 60 bp, Artificial
  Synthetic oligonucleotide
ccattcgacgtgccagattaccagagtttgagaagcatacttgccaacaatgggaaattt

SEQ ID NO: 87574 - DNA, 60 bp, Artificial
  Synthetic oligonucleotide
aagaagagcacaattctgaacactgcaattcccataggctcatgtgtcagcaaatgtcac

SEQ ID NO: 87575 - DNA, 60 bp, Artificial
  Synthetic oligonucleotide
tatgggttcagacaccagaatgcggaaggaacaggaacagcagcagacctcaaatccact

SEQ ID NO: 87576 - DNA, 60 bp, Artificial
  Synthetic oligonucleotide
gatgaagcaatcaacaaccgattccaaatccagggagtcaaattgacccagggatacaag

SEQ ID NO: 87577 - DNA, 60 bp, Artificial
  Synthetic oligonucleotide
gtcactgcacaagaactggtagaatcacaaaacctcccggaattatgcccgagccctctg

SEQ ID NO: 87578 - DNA, 60 bp, Artificial
  Synthetic oligonucleotide
gattgatttatggtcatacaatgcagagctgttagttgcactggaaaaccaacacactat

SEQ ID NO: 87579 - DNA, 60 bp, Artificial
  Synthetic oligonucleotide
tatgtcaaacagggctctctgaaacttgcaacaggaatgaggaacatccctgaaaaggca

SEQ ID NO: 87580 - DNA, 60 bp, Artificial
  Synthetic oligonucleotide
ccggaattatgcccgagccctctgagactagttgacggccagacttgcgatatcatcaat

SEQ ID NO: 87581 - DNA, 60 bp, Artificial
  Synthetic oligonucleotide
gggacgtattcatagagaggcccaacacaatagacacttgctacccattcgacgtgccag

SEQ ID NO: 87582 - DNA, 60 bp, Artificial
  Synthetic oligonucleotide
gtcaaactccccccatgtggtcaaaactgctactcaaggggaagtcaatgtgactggtgt

SEQ ID NO: 87583 - DNA, 60 bp, Artificial
  Synthetic oligonucleotide
ccccccatgtggtcaaaactgctactcaaggggaagtcaatgtgactggtgtgataccac

SEQ ID NO: 87584 - DNA, 58 bp, Artificial
  Synthetic oligonucleotide
ccccatgtggtcaaaactgctactcaaggggaagtcaatgtgactggtgtgataccac

SEQ ID NO: 87585 - DNA, 60 bp, Artificial
  Synthetic oligonucleotide
ggcccgaacaacaatgcatcagcagtaatctggtacaatagaaggcctgttacagaaatc

SEQ ID NO: 87586 - DNA, 60 bp, Artificial
  Synthetic oligonucleotide
cgacgataggtcaaagcccactcaaggtcagacaatcgtattaaacactgactggagtgg

SEQ ID NO: 87587 - DNA, 60 bp, Artificial
  Synthetic oligonucleotide
cccgttgaaattccaattaagcagaccatccccaatttcttctttgggagggacacagca

SEQ ID NO: 87588 - DNA, 60 bp, Artificial
  Synthetic oligonucleotide
cattgagattcaaattaagcagaccatccccaatttcttctttgggagggacacagcaga

SEQ ID NO: 87589 - DNA, 60 bp, Artificial
  Synthetic oligonucleotide
tctcttggggcaagtcaaaagaatggggaaggaattgcaaaggatgtaatggaagtgcta

SEQ ID NO: 87590 - DNA, 60 bp, Artificial
  Synthetic oligonucleotide
tctcttggagcaagtcaaaagaatggggaaggaattgcaaaggatgtaatggaagtgcta

SEQ ID NO: 87591 - DNA, 60 bp, Artificial
  Synthetic oligonucleotide
acgggacttgtgttgttgctgtcacagatggccctgctgctaatagtgcagatcacaggg

SEQ ID NO: 87592 - DNA, 60 bp, Artificial
  Synthetic oligonucleotide
ctggtcctttgctctcgcacaaggagcattgctagggactaaacatagcaatggaaccat

SEQ ID NO: 87593 - DNA, 60 bp, Artificial
  Synthetic oligonucleotide
gcaagtgcccagataatatatggagggaggatgacagactccattaaatcatggagaaag

SEQ ID NO: 87594 - DNA, 60 bp, Artificial
  Synthetic oligonucleotide
aatcaacaacgagactatactggaaacagggtatgtatgtagtaaattccactcggacac

SEQ ID NO: 87595 - DNA, 60 bp, Artificial
  Synthetic oligonucleotide
gtgcccagataatatatggagggaggatgacagactccattaaatcatggagaaaggaca

SEQ ID NO: 87596 - DNA, 60 bp, Artificial
  Synthetic oligonucleotide
gcgagactctataaagtcatggcggagaaacatattgagaacccaagagtcagaatgcca

SEQ ID NO: 87597 - DNA, 60 bp, Artificial
  Synthetic oligonucleotide
cggaaaaacatattgagaacccaagagtcagaatgccaatgtttgtacggaacctgtgct

SEQ ID NO: 87598 - DNA, 60 bp, Artificial
  Synthetic oligonucleotide
ccataagtgtgatgaccaatgtatggagagcataaggaacaacacttatgaccatgccca

SEQ ID NO: 87599 - DNA, 60 bp, Artificial
  Synthetic oligonucleotide
tgatcaatgtatggagagcataaggaacaacacttatgaccatacccaatacagaacaga

SEQ ID NO: 87600 - DNA, 60 bp, Artificial
  Synthetic oligonucleotide
gcccctgacagggcaagtttctttagaggagaatcactaggagtccagagtgatgtgcct

SEQ ID NO: 87601 - DNA, 60 bp, Artificial
  Synthetic oligonucleotide
gagcataaggaacaacacttatgaccatacccaatacagagcagagtcattacagaatag

SEQ ID NO: 87602 - DNA, 60 bp, Artificial
  Synthetic oligonucleotide
ttctggatcgactactgagcagaccaaactctatggaagtggaaacaagttgataactgt

SEQ ID NO: 87603 - DNA, 60 bp, Artificial
  Synthetic oligonucleotide
gagagcataaggaacaacacttatgaccatacccaatacagagcagagtcattacagaat

SEQ ID NO: 87604 - DNA, 60 bp, Artificial
  Synthetic oligonucleotide
ccaccgaacagaccaaactctatggaagtggaaacaagttgataacagtaggaagctcga

SEQ ID NO: 87605 - DNA, 60 bp, Artificial
  Synthetic oligonucleotide
ctactgagcagaccaaactctatggaagtggaaacaagttgataactgtaggaagctcga

SEQ ID NO: 87606 - DNA, 60 bp, Artificial
  Synthetic oligonucleotide
ttctggatcgaccaccgaacagaccaaactctatggaagtggaaacaagttgataacagt

SEQ ID NO: 87607 - DNA, 60 bp, Artificial
  Synthetic oligonucleotide
cccctgtattgggatagagatggtacacgatggtggaaaagagacttggcactcagcagc

SEQ ID NO: 87608 - DNA, 58 bp, Artificial
  Synthetic oligonucleotide
tgctcctagtggagtaatggtctcaatcaaagaacctggttggtattcttttggcttc

SEQ ID NO: 87609 - DNA, 57 bp, Artificial
  Synthetic oligonucleotide
ttggaagatggtactcccgaacgatgtctaaaactaacagaatggggatggaactgt

SEQ ID NO: 87610 - DNA, 60 bp, Artificial
  Synthetic oligonucleotide
cagttctcctccttgactgtgaatgtaagaggatcaggaatgaggatactggtaagaggc

SEQ ID NO: 87611 - DNA, 60 bp, Artificial
  Synthetic oligonucleotide
gggatgtcttcatagagcgacccaccgctgtggacacttgttatccatttgatgtgccgg

SEQ ID NO: 87612 - DNA, 60 bp, Artificial
  Synthetic oligonucleotide
agaatgggatgtcttcatagagcgacccaccgctgtggacacttgttatccatttgatgt

SEQ ID NO: 87613 - DNA, 60 bp, Artificial
  Synthetic oligonucleotide
ggaaaatttgagttcattgctgaggaattccaatggagcacagtcaagcaaaacggaaaa

SEQ ID NO: 87614 - DNA, 60 bp, Artificial
  Synthetic oligonucleotide
attgtggacatccaatagtatagtagcgctctgtggatccaaggagcgattgggatcttg

SEQ ID NO: 87615 - DNA, 60 bp, Artificial
  Synthetic oligonucleotide
gtctcactgagggctttcacagatgatggcgccattgtagctgaaatatctcccattcct

SEQ ID NO: 87616 - DNA, 60 bp, Artificial
  Synthetic oligonucleotide
gacgcaactgctggtctcacccatttgatgatctggcactccaacctgaatgatgccacc

SEQ ID NO: 87617 - DNA, 60 bp, Artificial
  Synthetic oligonucleotide
aggagtcaatgggtttcacctatagtggaataagaaccaatggggctacgagtgcctgca

SEQ ID NO: 87618 - DNA, 60 bp, Artificial
  Synthetic oligonucleotide
aaagagtcaatgggtttcacctatagtggaataagaaccaatggagcaacaagtgcctgc

SEQ ID NO: 87619 - DNA, 60 bp, Artificial
  Synthetic oligonucleotide
ctgtggactagacaatgaacctggatcgggaaattggccagatggttctaatattgggtt

SEQ ID NO: 87620 - DNA, 59 bp, Artificial
  Synthetic oligonucleotide
agtggaaattgccggttcaatgtttgtatataatcagaaaaaacacccttgtttctact

SEQ ID NO: 87621 - DNA, 60 bp, Artificial
  Synthetic oligonucleotide
gagttcattgctgaggaattccaatggaacacagtcaatcaaaatgggaaatccggggca

SEQ ID NO: 87622 - DNA, 60 bp, Artificial
  Synthetic oligonucleotide
tcattgctgaggaattccaatggaacacagtcaaacaaaacggaaaatccggggcatgca

SEQ ID NO: 87623 - DNA, 60 bp, Artificial
  Synthetic oligonucleotide
cctctggctgtgacgtggtggaacaggaatggaccaattacaagcactgtccactatccc

SEQ ID NO: 87624 - DNA, 60 bp, Artificial
  Synthetic oligonucleotide
tggctgtgacgtggtggaacaggaatggaccaacgacaagtacagtccattatccaaagg

SEQ ID NO: 87625 - DNA, 60 bp, Artificial
  Synthetic oligonucleotide
tgatgccggatcagacagggtaatggtatcacctctggctgtgacgtggtggaacaggaa

SEQ ID NO: 87626 - DNA, 60 bp, Artificial
  Synthetic oligonucleotide
gtcacctctggctgtgacgtggtggaacaggaatggaccaattacaagcactgtccacta

SEQ ID NO: 87627 - DNA, 60 bp, Artificial
  Synthetic oligonucleotide
gctgtgacgtggtggaacaggaatggaccaacgacaagtacagtccattatccaaaggtc

SEQ ID NO: 87628 - DNA, 60 bp, Artificial
  Synthetic oligonucleotide
tgcaagattgcccccttaatggttgcatatatgttggaaagagaactggttcgcaagacc

SEQ ID NO: 87629 - DNA, 60 bp, Artificial
  Synthetic oligonucleotide
gggatgagaatacttgtgagaggtaactcccctgtgttcaactacaacaaggcaaccaag

SEQ ID NO: 87630 - DNA, 60 bp, Artificial
  Synthetic oligonucleotide
ggaatgagaatacttgtgagaggtaactcccctgtgtttaactacaacaaagcaaccaag

SEQ ID NO: 87631 - DNA, 60 bp, Artificial
  Synthetic oligonucleotide
atgttggaaagagaactggttcgcaagaccaggttcttaccagtcgctggcgggacaagc

SEQ ID NO: 87632 - DNA, 60 bp, Artificial
  Synthetic oligonucleotide
ggggaaacaatgctatcaatcacgattctgtttctgctcatagcagaaggctcctctcag

SEQ ID NO: 87633 - DNA, 60 bp, Artificial
  Synthetic oligonucleotide
cactggggatgataggaatgcaactgctagcttcatttatgatgggatgcttgttgacag

SEQ ID NO: 87634 - DNA, 60 bp, Artificial
  Synthetic oligonucleotide
tgcgaaaggggagaaggctaatgtgttgatagggcaaggagacgtagtgttggtaatgaa

SEQ ID NO: 87635 - DNA, 60 bp, Artificial
  Synthetic oligonucleotide
ggaggtcgttttcccaaatgaagtgggagctagaatactgacatcagagtcgcagttgac

SEQ ID NO: 87636 - DNA, 60 bp, Artificial
  Synthetic oligonucleotide
ggtagcatacatgctagaaagagagttggtccgcaaaacgaggttcctcccagtggctgg

SEQ ID NO: 87637 - DNA, 60 bp, Artificial
  Synthetic oligonucleotide
ggggaaacaatgctatcaatcacgattctgtttctgctcatagcagagggttcctctcag

SEQ ID NO: 87638 - DNA, 60 bp, Artificial
  Synthetic oligonucleotide
aactaggaacactctgtgctttgtgcgagaaacaagcatcacactcacacagagctcata

SEQ ID NO: 87639 - DNA, 60 bp, Artificial
  Synthetic oligonucleotide
ggaacgctctgtgctttgtgcgagaaacaagcatcacattcacacagggctcatagcaga

SEQ ID NO: 87640 - DNA, 60 bp, Artificial
  Synthetic oligonucleotide
gggacgctctgtgctttgtgcgagaaacaagcatcacattcacacagggctcatagcaga

SEQ ID NO: 87641 - DNA, 60 bp, Artificial
  Synthetic oligonucleotide
acgctctgtgctttgtgcgagaaacaagcatcacattcacacagagctcatagcagagcg

SEQ ID NO: 87642 - DNA, 60 bp, Artificial
  Synthetic oligonucleotide
gctctgtgctttgtgcgagaaacaagcatcacattcacacagagctcatagcagagcggc

SEQ ID NO: 87643 - DNA, 60 bp, Artificial
  Synthetic oligonucleotide
gctctgtgctttgtgcgagaaacaagcatcacattcacacagggctcatagcagagcagc

SEQ ID NO: 87644 - DNA, 60 bp, Artificial
  Synthetic oligonucleotide
aactaggaacgctctgtgctttgtgcgagaaacaagcatcacattcacacagggctcata

SEQ ID NO: 87645 - DNA, 60 bp, Artificial
  Synthetic oligonucleotide
ccacatgagtgcagaatgtttgctctcagccaaggtaccacactacggggtcggcacgca

SEQ ID NO: 87646 - DNA, 60 bp, Artificial
  Synthetic oligonucleotide
gacactatccgtagtaagtctactaataggattggccaatttgggactgaacattgggct

SEQ ID NO: 87647 - DNA, 60 bp, Artificial
  Synthetic oligonucleotide
taatgaccccggaagcgggaactgtgatgcaccaataaccggagggagcccagatcctgg

SEQ ID NO: 87648 - DNA, 60 bp, Artificial
  Synthetic oligonucleotide
cactatccgtagtaagtctactaataggattggccaatttgggactgaacattgggcttc

SEQ ID NO: 87649 - DNA, 58 bp, Artificial
  Synthetic oligonucleotide
ttagggcgttgataagctgggaaatggggcaagcaccgagtccgtacaataccagagt

SEQ ID NO: 87650 - DNA, 60 bp, Artificial
  Synthetic oligonucleotide
cagggacaattggaaaggtgcaaatagaccagtaattaccatagacccaacaacaatgac

SEQ ID NO: 87651 - DNA, 60 bp, Artificial
  Synthetic oligonucleotide
gggcttcatttcaaggtaggagacacaccggaaacaggaacccctagcaccaatgagaca

SEQ ID NO: 87652 - DNA, 50 bp, Artificial
  Synthetic oligonucleotide
tgggatcttggtcatggcacgatggggctgaaatcatctacttcaagtag

SEQ ID NO: 87653 - DNA, 60 bp, Artificial
  Synthetic oligonucleotide
tgggatcttggtcatggcacgatggggctgaaatcatctacttcaagtagaaaagatttt

SEQ ID NO: 87654 - DNA, 60 bp, Artificial
  Synthetic oligonucleotide
caggagcgttcatcgattattgggctaatagagaatgcttcaatccttgcttttatgtgg

SEQ ID NO: 87655 - DNA, 60 bp, Artificial
  Synthetic oligonucleotide
aagatcagggtatgagatgttaaaagtcccgaatgcggaaacagacaaccagtccgctcc

SEQ ID NO: 87656 - DNA, 60 bp, Artificial
  Synthetic oligonucleotide
cataagcaaagattcaagatcagggtatgagatgttaaaagtcccgaatgcggaaacaga

SEQ ID NO: 87657 - DNA, 60 bp, Artificial
  Synthetic oligonucleotide
ctctcatgtggaccacatgagtgcagaatgtttgctctcagccaaggtaccacactacgg

SEQ ID NO: 87658 - DNA, 60 bp, Artificial
  Synthetic oligonucleotide
tgacacaagccggcctaatgaccccggaagcgggaactgtgatgcaccaataaccggagg

SEQ ID NO: 87659 - DNA, 60 bp, Artificial
  Synthetic oligonucleotide
ggaaaggtgcaaatagaccagtaattaccatagacccaacaacaatgactcatacgagca

SEQ ID NO: 87660 - DNA, 60 bp, Artificial
  Synthetic oligonucleotide
ggtgcaattgctggctttatagagaatggctggcaaggcctaatcgatggttggtatggg

SEQ ID NO: 87661 - DNA, 60 bp, Artificial
  Synthetic oligonucleotide
ggaagtagttttcccaaatgaagtgggagctagaatactaacatcggagtcacagctgac

SEQ ID NO: 87662 - DNA, 60 bp, Artificial
  Synthetic oligonucleotide
gaagtttcagacagcagcacaacgagcaatgatggaccaagtgcgagaaagccgaaaccc

SEQ ID NO: 87663 - DNA, 60 bp, Artificial
  Synthetic oligonucleotide
tgatcctttccgtctgctccaaaacagccaagtcttcagtcttataagaccaaacgaaaa

SEQ ID NO: 87664 - DNA, 60 bp, Artificial
  Synthetic oligonucleotide
accgagtgacatccacatcatggcgtctcaaggcaccaaacgatcttatgaacaaatgga

SEQ ID NO: 87665 - DNA, 54 bp, Artificial
  Synthetic oligonucleotide
tcaactcactcttcgagcgtcttaatgaaggacatccaaagccaattcgagcag

SEQ ID NO: 87666 - DNA, 60 bp, Artificial
  Synthetic oligonucleotide
tcaggtagaagttgtcactgcccaggaattagtggaatcacaacatctatcggagttgtg

SEQ ID NO: 87667 - DNA, 58 bp, Artificial
  Synthetic oligonucleotide
gtagaagttgtcactgcccaggaattagtggaatcgcaacatctaccggaattgtgtc

SEQ ID NO: 87668 - DNA, 60 bp, Artificial
  Synthetic oligonucleotide
cttgttcagtggaatcaaatctttcagtagaacggagttaatcgcacctacttcttgggg

SEQ ID NO: 87669 - DNA, 60 bp, Artificial
  Synthetic oligonucleotide
gcacttggggactgtcccaaatacataaaatcagggcagcttaagttagccactggactt

SEQ ID NO: 87670 - DNA, 60 bp, Artificial
  Synthetic oligonucleotide
caatacaactggtagggacgtcttggttatgtgggggatacatcaccctgtttctgaaga

SEQ ID NO: 87671 - DNA, 60 bp, Artificial
  Synthetic oligonucleotide
taatgttagaaatctgcatgatcaagtacgtagagcgctaaagaccaatgcaattgatga

SEQ ID NO: 87672 - DNA, 65 bp, Artificial
  Synthetic oligonucleotide
gcttcttgtgttattagaaaacgataaaactctagacatgcatgatgctaatgttagaaatctgc

SEQ ID NO: 87673 - DNA, 60 bp, Artificial
  Synthetic oligonucleotide
aagcttcttgtgttattagaaaacgataaaactctagacatgcatgatgctaatgttaga

SEQ ID NO: 87674 - DNA, 60 bp, Artificial
  Synthetic oligonucleotide
gcagacagaatagatgacgctgtaactgatgtatggtcatacaatgcaaagcttcttgtg

SEQ ID NO: 87675 - DNA, 63 bp, Artificial
  Synthetic oligonucleotide
gggacatataaccatacagaatatgaagaagaatcgaaattgaaaagacaggaaatagaaggc

SEQ ID NO: 87676 - DNA, 60 bp, Artificial
  Synthetic oligonucleotide
gagagaaatgcacttggggactgtcccaaatacataaaatcagggcagcttaagttagcc

SEQ ID NO: 87677 - DNA, 50 bp, Artificial
  Synthetic oligonucleotide
caattgatgaaggaaatggatgttttgaactcctccacaaatgtaatgac

SEQ ID NO: 87678 - DNA, 60 bp, Artificial
  Synthetic oligonucleotide
ctgcatgatcaagtacgtagagcgctaaagaccaatgcaattgatgaaggaaatggatgt

SEQ ID NO: 87679 - DNA, 60 bp, Artificial
  Synthetic oligonucleotide
gccccccgatatggttatattattgaggaatatggaaaaggacgaattttccaaagtcgc

SEQ ID NO: 87680 - DNA, 55 bp, Artificial
  Synthetic oligonucleotide
tgatgcatccaggggaatcaatcagtttcgaaagcaatggagggttgctggcccc

SEQ ID NO: 87681 - DNA, 60 bp, Artificial
  Synthetic oligonucleotide
ccaaagtcgcattcgagctggtaaatgcaatactaagtgtcaaacgtctgttggtgggat

SEQ ID NO: 87682 - DNA, 60 bp, Artificial
  Synthetic oligonucleotide
ggttatattattgaggaatatggaaaaggacgaattttccaaagtcgcattcgagctggt

SEQ ID NO: 87683 - DNA, 60 bp, Artificial
  Synthetic oligonucleotide
tcgtcctggatataatggccaaaagagttggatgaagatttactggtctttgatgcatcc

SEQ ID NO: 87684 - DNA, 60 bp, Artificial
  Synthetic oligonucleotide
ctggttcatggagtaagaaatacaacttggaaatcggaattcgtcctggatataatggcc

SEQ ID NO: 87685 - DNA, 60 bp, Artificial
  Synthetic oligonucleotide
tgatgcatccaggggaatcaatcagtttcgaaagcaatggagggttgctggccccccgat

SEQ ID NO: 87686 - DNA, 60 bp, Artificial
  Synthetic oligonucleotide
tggccaaaagagttggatgaagatttactggtctttgatgcatccaggggaatcaatcag

SEQ ID NO: 87687 - DNA, 60 bp, Artificial
  Synthetic oligonucleotide
tcttgtgccagcaacctggggatcagagaatggtcgtacttaattgaagatccttctgct

SEQ ID NO: 87688 - DNA, 60 bp, Artificial
  Synthetic oligonucleotide
gacatattgttctctgaacggaatcagtccagtgcatctgggggattgcagctttgaggg

SEQ ID NO: 87689 - DNA, 60 bp, Artificial
  Synthetic oligonucleotide
ccggttacaagttctgtagatctggttgagaccaaccacacagggacatattgttctctg

SEQ ID NO: 87690 - DNA, 60 bp, Artificial
  Synthetic oligonucleotide
ggtgttccggttacaagttctgtagatctggttgagaccaaccacacagggacatattgt

SEQ ID NO: 87691 - DNA, 60 bp, Artificial
  Synthetic oligonucleotide
ccaactcatctgaaaaggttgacacactgttagagaacggtgttccggttacaagttctg

SEQ ID NO: 87692 - DNA, 60 bp, Artificial
  Synthetic oligonucleotide
ggtatttaagcaccaactcatctgaaaaggttgacacactgttagagaacggtgttccgg

SEQ ID NO: 87693 - DNA, 60 bp, Artificial
  Synthetic oligonucleotide
tttctgaagacgaggcgaggaaactatatattaacagcaacccgtacacactggtttcta

SEQ ID NO: 87694 - DNA, 60 bp, Artificial
  Synthetic oligonucleotide
tccttctgctcctcatggactatgttacccaggagaattggataacaatggagagttgag

SEQ ID NO: 87695 - DNA, 60 bp, Artificial
  Synthetic oligonucleotide
gtgccagcaacctggggatcagagaatggtcgtacttaattgaagatccttctgctcctc

SEQ ID NO: 87696 - DNA, 60 bp, Artificial
  Synthetic oligonucleotide
gctcctcatggactatgttacccaggagaattggataacaatggagagttgaggcacttg

SEQ ID NO: 87697 - DNA, 60 bp, Artificial
  Synthetic oligonucleotide
catcagcctgtcaagataaaggggccagcagtttttatcggaatttagtatggtttgtgg

SEQ ID NO: 87698 - DNA, 60 bp, Artificial
  Synthetic oligonucleotide
aaggaatgggacatataaccatacagaatatgaagaagaatcgaaattgaaaagacagga

SEQ ID NO: 87699 - DNA, 60 bp, Artificial
  Synthetic oligonucleotide
gagagttgaggcacttgttcagtggaatcaaatctttcagtagaacggagttaatcgcac

SEQ ID NO: 87700 - DNA, 60 bp, Artificial
  Synthetic oligonucleotide
gaaggcataaagctgaagtcagaagatggtgtatacaaagcactatcaatttacagctgc

SEQ ID NO: 87701 - DNA, 60 bp, Artificial
  Synthetic oligonucleotide
aaagacaggaaatagaaggcataaagctgaagtcagaagatggtgtatacaaagcactat

SEQ ID NO: 87702 - DNA, 60 bp, Artificial
  Synthetic oligonucleotide
tggtttgtggagagagggaaaaaataccctgtgatccgcgggacctacaacaatacaact

SEQ ID NO: 87703 - DNA, 55 bp, Artificial
  Synthetic oligonucleotide
aaaataccctgtgatccgcgggacctacaacaatacaactggtagggacgtcttg

SEQ ID NO: 87704 - DNA, 60 bp, Artificial
  Synthetic oligonucleotide
ggcgaggaaactatatattaacagcaacccgtacacactggtttctactggttcatggag

SEQ ID NO: 87705 - DNA, 60 bp, Artificial
  Synthetic oligonucleotide
ctggtttctactggttcatggagtaagaaatacaacttggaaatcggaattcgtcctgga

SEQ ID NO: 87706 - DNA, 55 bp, Artificial
  Synthetic oligonucleotide
aaagcactatcaatttacagctgcattgcaagcagtgttgtattagtaggactca

SEQ ID NO: 87707 - DNA, 60 bp, Artificial
  Synthetic oligonucleotide
tgggcatgcaatagtggcaattgccgtttcaatatctgtatataagtagaaaaaaacacc

SEQ ID NO: 87708 - DNA, 60 bp, Artificial
  Synthetic oligonucleotide
gactccatacgaggtgaattcaatcaggtggaaaacaggataaatatgcttgcagacaga

SEQ ID NO: 87709 - DNA, 60 bp, Artificial
  Synthetic oligonucleotide
ttgcagacagaatagatgacgctgtaactgatgtatggtcatacaatgcaaagcttcttg

SEQ ID NO: 87710 - DNA, 50 bp, Artificial
  Synthetic oligonucleotide
tgcagacaaagaatcaacacaaaaggcaattgaccaaataacaaccaaaa

SEQ ID NO: 87711 - DNA, 60 bp, Artificial
  Synthetic oligonucleotide
tgactccatacgaggtgaattcaatcaggtggaaaacaggataaatatgcttgcagacag

SEQ ID NO: 87712 - DNA, 60 bp, Artificial
  Synthetic oligonucleotide
aatggttggtatggattccaacatcagaacgagcagggagtgggaattgctgcagacaaa

SEQ ID NO: 87713 - DNA, 60 bp, Artificial
  Synthetic oligonucleotide
ggttggtatggattccaacatcagaacgagcagggagtgggaattgctgcagacaaagaa

SEQ ID NO: 87714 - DNA, 60 bp, Artificial
  Synthetic oligonucleotide
tatttggggctattgcaggattcatagaaggtggttggccaggattaataaatggttggt

SEQ ID NO: 87715 - DNA, 60 bp, Artificial
  Synthetic oligonucleotide
ggggctattgcaggattcatagaaggtggttggccaggattaataaatggttggtatgga

SEQ ID NO: 87716 - DNA, 60 bp, Artificial
  Synthetic oligonucleotide
taagttagccactggacttagaaatgtacctgctatagcgagcagaggattatttggggc

SEQ ID NO: 87717 - DNA, 60 bp, Artificial
  Synthetic oligonucleotide
cactggacttagaaatgtacctgctatagcgagcagaggattatttggggctattgcagg

SEQ ID NO: 87718 - DNA, 60 bp, Artificial
  Synthetic oligonucleotide
cctgaattacaaccagcaatgctattcaacatctgcgtccatctggaggtctgctatgta

SEQ ID NO: 87719 - DNA, 60 bp, Artificial
  Synthetic oligonucleotide
aagctggggaatagcatggaactgatgatattcagctacaatcaagactattcgttaagt

SEQ ID NO: 87720 - DNA, 60 bp, Artificial
  Synthetic oligonucleotide
ctacaataatacaaaaggccaaaaacacaatggcagaatttagtgaagatcctgaattac

SEQ ID NO: 87721 - DNA, 60 bp, Artificial
  Synthetic oligonucleotide
atacaaaaggccaaaaacacaatggcagaatttagtgaagatcctgaattacaaccagca

SEQ ID NO: 87722 - DNA, 60 bp, Artificial
  Synthetic oligonucleotide
caaaaacacaatggcagaatttagtgaagatcctgaattacaaccagcaatgctattcaa

SEQ ID NO: 87723 - DNA, 60 bp, Artificial
  Synthetic oligonucleotide
aacacaatggcagaatttagtgaagatcctgaattacaaccagcaatgctattcaacatc

SEQ ID NO: 87724 - DNA, 60 bp, Artificial
  Synthetic oligonucleotide
tagtgaagatcctgaattacaaccagcaatgctattcaacatctgcgtccatctggaggt

SEQ ID NO: 87725 - DNA, 60 bp, Artificial
  Synthetic oligonucleotide
gaagatcctgaattacaaccagcaatgctattcaacatctgcgtccatctggaggtctgc

SEQ ID NO: 87726 - DNA, 60 bp, Artificial
  Synthetic oligonucleotide
cccttgggtaatacagagtgcatactggtttaatgaatggttgggctttgaaaaggaggg

SEQ ID NO: 87727 - DNA, 60 bp, Artificial
  Synthetic oligonucleotide
ccttgggtaatacagagtgcatactggtttaatgaatggttgggctttgaaaaggagggg

SEQ ID NO: 87728 - DNA, 60 bp, Artificial
  Synthetic oligonucleotide
tggacctaccagaaatagggccagacgtagcacccgtggagcatgtagggagtgaaagaa

SEQ ID NO: 87729 - DNA, 60 bp, Artificial
  Synthetic oligonucleotide
gacctaccagaaatagggccagacgtagcacccgtggagcatgtagggagtgaaagaagg

SEQ ID NO: 87730 - DNA, 60 bp, Artificial
  Synthetic oligonucleotide
ctctaaaggagcaatagagagaaatctagcaaggatgtctcccttagtatcagtcacacc

SEQ ID NO: 87731 - DNA, 60 bp, Artificial
  Synthetic oligonucleotide
ggccctggatctaccagaaatagggccagacgtagcacccgtggagcatgtagggagtga

SEQ ID NO: 87732 - DNA, 60 bp, Artificial
  Synthetic oligonucleotide
cctaaaggagcaatagagagaaatctagcaaggatgtctcccttagtatcagtcacacct

SEQ ID NO: 87733 - DNA, 60 bp, Artificial
  Synthetic oligonucleotide
ttggacaaacaatatctagactaagggatatatctgttccagctggtttctccaattttg

SEQ ID NO: 87734 - DNA, 60 bp, Artificial
  Synthetic oligonucleotide
cctaaaggagcaatagagagaaatctagcaaggatgtctcccttagtatcagccacaccc

SEQ ID NO: 87735 - DNA, 60 bp, Artificial
  Synthetic oligonucleotide
acatagaccctaaaggagcaatagagagaaatctagcaaggatgtctcccttagtatcag

SEQ ID NO: 87736 - DNA, 60 bp, Artificial
  Synthetic oligonucleotide
gaatagcatggaactgatgatattcagctacaatcaagactactcgttaagtgatgaatc

SEQ ID NO: 87737 - DNA, 60 bp, Artificial
  Synthetic oligonucleotide
gctggggaatagcatggaactgatgatattcagctacaatcaagactattcgttaagtaa

SEQ ID NO: 87738 - DNA, 60 bp, Artificial
  Synthetic oligonucleotide
ttggacaaacaatatctaaactaagggatatatctgttccagctggtttctccaattttg

SEQ ID NO: 87739 - DNA, 60 bp, Artificial
  Synthetic oligonucleotide
ttcgttaagtaatgaatcctcattggatgaggaaggaaaagggagagtgctaagcagact

SEQ ID NO: 87740 - DNA, 60 bp, Artificial
  Synthetic oligonucleotide
cctaaaggagcaatagagagaaatctagcaaggatgtctcccttagtatcagttacacct

SEQ ID NO: 87741 - DNA, 60 bp, Artificial
  Synthetic oligonucleotide
cctaaaggagcaatagagagaaatctagcaaggatgtctcccttagtatcagttacaccc

SEQ ID NO: 87742 - DNA, 60 bp, Artificial
  Synthetic oligonucleotide
atgcaagtaaaactagggacgctctgtgctttgtgcgagaaacaagcatcacattcacac

SEQ ID NO: 87743 - DNA, 60 bp, Artificial
  Synthetic oligonucleotide
aagatgagtcttctaaccgaggtcgaaacgtacgttctctctattatcccgtcaggcccc

SEQ ID NO: 87744 - DNA, 60 bp, Artificial
  Synthetic oligonucleotide
ttggaatttccagcatggtggaggccatggtgtctagggcccgaattgatgcacgaatcg

SEQ ID NO: 87745 - DNA, 60 bp, Artificial
  Synthetic oligonucleotide
ctgagccctggaatgatgatgggcatgttcaacatgctaagcacagttttgggagtctcg

SEQ ID NO: 87746 - DNA, 55 bp, Artificial
  Synthetic oligonucleotide
tcctagtggagtaatggtttcaatgaaagaacctggttggtattcttttggcttc

SEQ ID NO: 87747 - DNA, 60 bp, Artificial
  Synthetic oligonucleotide
gaagatggtactcccgaacgatgtctaaaactgaaagaatggggatggaactgtatgtca

SEQ ID NO: 87748 - DNA, 58 bp, Artificial
  Synthetic oligonucleotide
tgctcctagtggagtaatggtttcaatgaaagaacctggttggtattcttttggcttc

SEQ ID NO: 87749 - DNA, 60 bp, Artificial
  Synthetic oligonucleotide
ttggaagatggtactcccgaacgatgtctaaaactgaaagaatggggatggaactgtatg

SEQ ID NO: 87750 - DNA, 60 bp, Artificial
  Synthetic oligonucleotide
ggaagatggtactcccgaacgatgtctaaaactgaaagaatggggatggaactgtatgtc

SEQ ID NO: 87751 - DNA, 60 bp, Artificial
  Synthetic oligonucleotide
aggccaaaaatgaacaatgctaccttcaactatacaaacgttaaccctatttctcacatc

SEQ ID NO: 87752 - DNA, 60 bp, Artificial
  Synthetic oligonucleotide
ccaagattggaagatggtactcccgaacgatgtctaaaactgaaagaatggggatggaac

SEQ ID NO: 87753 - DNA, 60 bp, Artificial
  Synthetic oligonucleotide
acagctgcattgcaagcagtcttgttttggcagcaatcattatggggttcatcttctggg

SEQ ID NO: 87754 - DNA, 60 bp, Artificial
  Synthetic oligonucleotide
cagctgcattgcaagcagtcttgttttggcagcaatcattatggggttcatcttctgggc

SEQ ID NO: 87755 - DNA, 60 bp, Artificial
  Synthetic oligonucleotide
gcacactggatctttctgctcaatcgacgggaaagcaccgataagtcttggtgattgctc

SEQ ID NO: 87756 - DNA, 60 bp, Artificial
  Synthetic oligonucleotide
ttctgctctatcgacgggaaagcaccgataagtcttggtgattgctcctttgctggatgg

SEQ ID NO: 87757 - DNA, 60 bp, Artificial
  Synthetic oligonucleotide
ttctgctcaatcgacgggaaagcaccgataagtcttggtgattgctcctttgctgggtgg

SEQ ID NO: 87758 - DNA, 60 bp, Artificial
  Synthetic oligonucleotide
ctgctcaatcgacgggaaagcaccgataagtcttggtgattgctcctttgctgggtggat

SEQ ID NO: 87759 - DNA, 60 bp, Artificial
  Synthetic oligonucleotide
gataagtcttggtgattgctcctttgctggatggatccttgggaacccaatgtgtgatga

SEQ ID NO: 87760 - DNA, 60 bp, Artificial
  Synthetic oligonucleotide
acagctgcattgcaagcagtcttgttttggcagcaatcattatggggttcatcttttggg

SEQ ID NO: 87761 - DNA, 60 bp, Artificial
  Synthetic oligonucleotide
gcagtcttgttttggcagcaatcattatggggttcatcttttgggcgtgtagcaatgggt

SEQ ID NO: 87762 - DNA, 60 bp, Artificial
  Synthetic oligonucleotide
ggtggcattagaaaatcaacatactatagatgtgacagactccgaaatgaacaaactctt

SEQ ID NO: 87763 - DNA, 60 bp, Artificial
  Synthetic oligonucleotide
aattattggtggcattagaaaatcaacatactatagatgtgacagactccgaaatgaaca

SEQ ID NO: 87764 - DNA, 60 bp, Artificial
  Synthetic oligonucleotide
ggtggcattagaaaatcaacataccatagatgtgacagactccgaaatgaacaaactctt

SEQ ID NO: 87765 - DNA, 60 bp, Artificial
  Synthetic oligonucleotide
acacactatagatgtgacagactccgaaatgaacaaactctttgaacgagttaggcgaca

SEQ ID NO: 87766 - DNA, 60 bp, Artificial
  Synthetic oligonucleotide
tgaattattggtggcattagaaaatcaacatactatagatgtgacagactccgaaatgaa

SEQ ID NO: 87767 - DNA, 50 bp, Artificial
  Synthetic oligonucleotide
agcaaaagcaggggaaacaatgctatcaatcacgattctgttcctgctca

SEQ ID NO: 87768 - DNA, 60 bp, Artificial
  Synthetic oligonucleotide
acttgcacgtgcagggataattggcagggctcaaatagaccagtaattcaaatagatcca

SEQ ID NO: 87769 - DNA, 60 bp, Artificial
  Synthetic oligonucleotide
acaaagtatggtggaccagtaatagcatagtatcgatgtgttccagcacagaattccttg

SEQ ID NO: 87770 - DNA, 60 bp, Artificial
  Synthetic oligonucleotide
gatccggatacgagatgctaaaggtgccaaatgcactgaccgacgataggtcaaaaccca

SEQ ID NO: 87771 - DNA, 59 bp, Artificial
  Synthetic oligonucleotide
aatgcgtatgccataacggtgtctgcccggtagtgttcacagatgggtctgccactgga

SEQ ID NO: 87772 - DNA, 60 bp, Artificial
  Synthetic oligonucleotide
gttgatagggcaaggggacgtagtgttggtaatgaaacggaaacgggactctagtatact

SEQ ID NO: 87773 - DNA, 60 bp, Artificial
  Synthetic oligonucleotide
gggcaaggggacgtagtgttggtaatgaaacggaaacgggactctagtatacttactgac

SEQ ID NO: 87774 - DNA, 60 bp, Artificial
  Synthetic oligonucleotide
aaggcaaatgtgctaattggacaaggagacgtagtgttggtaatgaaacggaaacgggac

SEQ ID NO: 87775 - DNA, 60 bp, Artificial
  Synthetic oligonucleotide
aaggctaacgtgctaattgggcagggagacgtagtgttggtaatgaaacggaaacgggac

SEQ ID NO: 87776 - DNA, 60 bp, Artificial
  Synthetic oligonucleotide
ggcaaatgtgctaattggacaaggagacgtagtgttggtaatgaaacggaaacgggactc

SEQ ID NO: 87777 - DNA, 60 bp, Artificial
  Synthetic oligonucleotide
ggctaacgtgctaattgggcagggagacgtagtgttggtaatgaaacggaaacgggactc

SEQ ID NO: 87778 - DNA, 60 bp, Artificial
  Synthetic oligonucleotide
agctaatgtgttgataggacaaggagacgtagtgttggtaatgaaacggaaacgggactc

SEQ ID NO: 87779 - DNA, 60 bp, Artificial
  Synthetic oligonucleotide
atagaaatgcgactgctagtttcatttatgatgggatgcttgttgacagtatcggttcgt

SEQ ID NO: 87780 - DNA, 60 bp, Artificial
  Synthetic oligonucleotide
gggtatgaggaattcacaatggttgggagaagagcaacagctattctcaggaaggcaacc

SEQ ID NO: 87781 - DNA, 60 bp, Artificial
  Synthetic oligonucleotide
caatcgtattaaacactgactggagtggctacagtgggtccttcatggactattgggccg

SEQ ID NO: 87782 - DNA, 60 bp, Artificial
  Synthetic oligonucleotide
agtatagtatcgatgtgttccagcacagaattccttggacaatgggactggcctgatggg

SEQ ID NO: 87783 - DNA, 60 bp, Artificial
  Synthetic oligonucleotide
tatcaatgtgttccagcacagaattccttggacaatggaactggcctgatggggctaaaa

SEQ ID NO: 87784 - DNA, 60 bp, Artificial
  Synthetic oligonucleotide
agatctggatacgagatgctaaaggtgccaaatgcattgaccgacgataggtcaaaaccc

SEQ ID NO: 87785 - DNA, 60 bp, Artificial
  Synthetic oligonucleotide
gagaaccctatgtctcctgtgacccagatgagtgcaggttctatgctctcagccaaggga

SEQ ID NO: 87786 - DNA, 60 bp, Artificial
  Synthetic oligonucleotide
agaaccctatgtctcctgtgacccagatgagtgcaggttctatgctctcagccaagggac

SEQ ID NO: 87787 - DNA, 60 bp, Artificial
  Synthetic oligonucleotide
ttggacaatggaactggcctgatggggctaaaatagagtacttcctctaagatacagaaa

SEQ ID NO: 87788 - DNA, 55 bp, Artificial
  Synthetic oligonucleotide
tggacaatggaactggcctgatggggctaaaatagagtacttcctctaagataca

SEQ ID NO: 87789 - DNA, 60 bp, Artificial
  Synthetic oligonucleotide
tggacaatgggactggcctgatggggctaaaatagagtacttcctctaagatacagaaaa

SEQ ID NO: 87790 - DNA, 60 bp, Artificial
  Synthetic oligonucleotide
caaggtcaaacaatcgtattaaacactgactggagtggctacagtgggtccttcatggac

SEQ ID NO: 87791 - DNA, 60 bp, Artificial
  Synthetic oligonucleotide
ggacaaagtatggtggaccagtaatagtatagtatcgatgtgttccagcacagaattcct

SEQ ID NO: 87792 - DNA, 60 bp, Artificial
  Synthetic oligonucleotide
ccggatacgagatgctaaaggtgccaaatgcattgacagacgataggtcaaaacccactc

SEQ ID NO: 87793 - DNA, 60 bp, Artificial
  Synthetic oligonucleotide
gatccggatacgagatgctaaaggtgccaaatgcattgacagacgataggtcaaaaccca

SEQ ID NO: 87794 - DNA, 60 bp, Artificial
  Synthetic oligonucleotide
gcccactcaaggtcagacaatcgtattaaacactgactggagtggctacagtgggtcctt

SEQ ID NO: 87795 - DNA, 60 bp, Artificial
  Synthetic oligonucleotide
cagaattccttggacaatggaactggcctgatggggctaaaatagagtacttcctctaag

SEQ ID NO: 87796 - DNA, 60 bp, Artificial
  Synthetic oligonucleotide
cctgtgacccagatgagtgcaggttctatgctctcagccaagggacaacgatcagaggga

SEQ ID NO: 87797 - DNA, 60 bp, Artificial
  Synthetic oligonucleotide
taagggtgcatgagggatatgaagaattcacaatggttgggagaagagcaacagctattc

SEQ ID NO: 87798 - DNA, 60 bp, Artificial
  Synthetic oligonucleotide
aagtatacagagattcgcttggggagtccgtgatgagaatgggggacctccactccctcc

SEQ ID NO: 87799 - DNA, 60 bp, Artificial
  Synthetic oligonucleotide
agaatgttcctgaaatcccgagaaggagaaagagaggtttattcggcgccatagctgggt

SEQ ID NO: 87800 - DNA, 60 bp, Artificial
  Synthetic oligonucleotide
tcccgagaaggagaaagagaggtttattcggcgccatagctgggttcatcgaaaacggat

SEQ ID NO: 87801 - DNA, 60 bp, Artificial
  Synthetic oligonucleotide
ccagttggaatttccagcatggtggaggccatggtgtctagggcccgaattgatgcacga

SEQ ID NO: 87802 - DNA, 60 bp, Artificial
  Synthetic oligonucleotide
agatgagccttctaaccgaggtcgaaacgtacgttctctctatcgtcccgtcaggccccc

SEQ ID NO: 87803 - DNA, 59 bp, Artificial
  Synthetic oligonucleotide
agatgagccttctaaccgaggtcgaaacgtacgttctctctatcgtcccgtcaggcccc

SEQ ID NO: 87804 - DNA, 60 bp, Artificial
  Synthetic oligonucleotide
aggggtatgaagagttcacaatggttgggagaagagcaacagctattctcaggaaggcaa

SEQ ID NO: 87805 - DNA, 60 bp, Artificial
  Synthetic oligonucleotide
gggtatgaagagttcacaatggttgggagaagagcaacagctattctcaggaaggcaacc

SEQ ID NO: 87806 - DNA, 60 bp, Artificial
  Synthetic oligonucleotide
ccagctcatggcccagccaagaacatggaatatgatgctgttgctactacacactcctgg

SEQ ID NO: 87807 - DNA, 60 bp, Artificial
  Synthetic oligonucleotide
cagttcatacaggagaccagttggaatttccagcatggtggaggccatggtgtctagggc

SEQ ID NO: 87808 - DNA, 60 bp, Artificial
  Synthetic oligonucleotide
cgtgactctagcatacttactgacagtcagacagcgaccaaaagaattcgaatggccatc

SEQ ID NO: 87809 - DNA, 60 bp, Artificial
  Synthetic oligonucleotide
acggaaacgtgactctagcatacttactgacagtcagacagcgaccaaaagaattcgaat

SEQ ID NO: 87810 - DNA, 60 bp, Artificial
  Synthetic oligonucleotide
gcaacaaagaagaaaggcctgattctagctgagagaaaaatgagaagatgtgtaagtttt

SEQ ID NO: 87811 - DNA, 60 bp, Artificial
  Synthetic oligonucleotide
tcatacaggagaccggttggaatttccagcatggtggaggccatggtgtctagggccaga

SEQ ID NO: 87812 - DNA, 53 bp, Artificial
  Synthetic oligonucleotide
tgcaacagtatgtttcctcatgcagattgccatcctagcaacgactgtgacac

SEQ ID NO: 87813 - DNA, 60 bp, Artificial
  Synthetic oligonucleotide
taaccattgcaacagtatgtttcctcatgcagattgccatcctagcaacgactgtgacac

SEQ ID NO: 87814 - DNA, 60 bp, Artificial
  Synthetic oligonucleotide
gctccgtctctctaaccattgcaacagtatgtttcctcatgcagattgccatcctagcaa

SEQ ID NO: 87815 - DNA, 60 bp, Artificial
  Synthetic oligonucleotide
ggatacgagagggaagaataatgaagtatgaaaatgtccctaaaacaaagatacaacact

SEQ ID NO: 87816 - DNA, 60 bp, Artificial
  Synthetic oligonucleotide
gtcgggatagaccctttccgtctgctccaaaacagccaagtgttcagtctaatccgacca

SEQ ID NO: 87817 - DNA, 60 bp, Artificial
  Synthetic oligonucleotide
ggaaagcatcagaaacaacacctatgaccatacacaatatagagaagaggcactcctaaa

SEQ ID NO: 87818 - DNA, 60 bp, Artificial
  Synthetic oligonucleotide
tttggaagaatgttcatgttacacagatgttgacatatattgcgtttgcagagacaactg

SEQ ID NO: 87819 - DNA, 60 bp, Artificial
  Synthetic oligonucleotide
catttggaagaatgttcatgttacacagatgttgacatatactgcatctgtagagacaac

SEQ ID NO: 87820 - DNA, 60 bp, Artificial
  Synthetic oligonucleotide
ccacgaacccgatcgtgccttcctttgacatgaataaagaaggatcttatttcttcggag

SEQ ID NO: 87821 - DNA, 60 bp, Artificial
  Synthetic oligonucleotide
gccacgaacccgatcgtgccttcctttgacatgaataaagaaggatcttatttcttcgga

SEQ ID NO: 87822 - DNA, 60 bp, Artificial
  Synthetic oligonucleotide
tatgaggaattcacaatggttgggcggagagcaacagctatcctgaggaaagcaactaga

SEQ ID NO: 87823 - DNA, 60 bp, Artificial
  Synthetic oligonucleotide
tgcttgaagtggagcaagagataagaactttctcgtttcagcttatttaatgacaaaaaa

SEQ ID NO: 87824 - DNA, 51 bp, Artificial
  Synthetic oligonucleotide
agtgctgtagatgttgacgatggtcattttgtcaacatagagctggagtaa

SEQ ID NO: 87825 - DNA, 60 bp, Artificial
  Synthetic oligonucleotide
tggagtgggtccgcatgccatgatggtagagaatggacatatatcggagttgatggccct

SEQ ID NO: 87826 - DNA, 60 bp, Artificial
  Synthetic oligonucleotide
cccagagccggagtggacataccctcgtttatcttgccagggctcaacctttcagaaggc

SEQ ID NO: 87827 - DNA, 60 bp, Artificial
  Synthetic oligonucleotide
cccagaaccggagtggacataccctcgtttatcttgccagggctcaacctttcagaaagc

SEQ ID NO: 87828 - DNA, 60 bp, Artificial
  Synthetic oligonucleotide
gatgacacttcttctctcagaaccggagtggacataccctcgtttatcttgccagggctc

SEQ ID NO: 87829 - DNA, 60 bp, Artificial
  Synthetic oligonucleotide
atgacatttcttctcccagaaccggagtggacataccctcgtttatcttgccagggctca

SEQ ID NO: 87830 - DNA, 60 bp, Artificial
  Synthetic oligonucleotide
agagatgacatttcttctcccagaaccggagtggacataccctcgtttatcttgccaggg

SEQ ID NO: 87831 - DNA, 60 bp, Artificial
  Synthetic oligonucleotide
ctccattttccacatggcagcttggagtgggtccgcatgccatgatggtagagaatggac

SEQ ID NO: 87832 - DNA, 60 bp, Artificial
  Synthetic oligonucleotide
ctcagaaccggagtggacataccctcgtttatcttgccagggctcaacctttcagaaagc

SEQ ID NO: 87833 - DNA, 60 bp, Artificial
  Synthetic oligonucleotide
cataccctcgtttatcttgccagggctcaacctttcagaaagcactcctaattagccctc

SEQ ID NO: 87834 - DNA, 60 bp, Artificial
  Synthetic oligonucleotide
cctcgtttatcttgccagggctcaacctttcagaaagcactcctaattagccctcatagg

SEQ ID NO: 87835 - DNA, 60 bp, Artificial
  Synthetic oligonucleotide
tccacatggcagcttggagtgggtccgcatgccatgatggtagagaatggacatatatcg

SEQ ID NO: 87836 - DNA, 60 bp, Artificial
  Synthetic oligonucleotide
ggagtgggtccgcatgccatgatggtagagaatggacatatatcggagttgatggccctg

SEQ ID NO: 87837 - DNA, 60 bp, Artificial
  Synthetic oligonucleotide
cgggtccgcatgccatgatggtagagaatggacatatatcggagttgatggccctgacag

SEQ ID NO: 87838 - DNA, 60 bp, Artificial
  Synthetic oligonucleotide
tgctactgatgatcttacagtggaggatgaagaagatggtcatcggatcctcaactcact

SEQ ID NO: 87839 - DNA, 60 bp, Artificial
  Synthetic oligonucleotide
accaatggaaatgctttcattgggaagaaaatgtttcaaatatcagacaaaaacaaaacc

SEQ ID NO: 87840 - DNA, 60 bp, Artificial
  Synthetic oligonucleotide
gacaatgaacctggatcgggaaattggccggatggttctaagattgggtttatgcccaag

SEQ ID NO: 87841 - DNA, 60 bp, Artificial
  Synthetic oligonucleotide
ggcactatacatgatagaatccctcatcggacccttttgatgaatgagttgggtgttccg

SEQ ID NO: 87842 - DNA, 60 bp, Artificial
  Synthetic oligonucleotide
atggcacaatacatgatagaatccctcatcggacccttttgatgaatgagttgggtgttc

SEQ ID NO: 87843 - DNA, 60 bp, Artificial
  Synthetic oligonucleotide
ggcacgatacatgatagaatccctcatcggaccctcttgatgaacgaattgggtgtcccg

SEQ ID NO: 87844 - DNA, 60 bp, Artificial
  Synthetic oligonucleotide
ggcacaatacatgatagaatccctcatcggacccttttaatgaatgagttgggtgtcccg

SEQ ID NO: 87845 - DNA, 60 bp, Artificial
  Synthetic oligonucleotide
aaaaagaaatcctacataaacaggacaggaacatttgaattcacgagctttttctaccgt

SEQ ID NO: 87846 - DNA, 53 bp, Artificial
  Synthetic oligonucleotide
gacggagggctaccacaaagcggcagaattgttgttgattacatggtgcaaaa

SEQ ID NO: 87847 - DNA, 60 bp, Artificial
  Synthetic oligonucleotide
cagaagacggagggctaccacaaagcggcagaattgttgttgattacatggtgcaaaaac

SEQ ID NO: 87848 - DNA, 58 bp, Artificial
  Synthetic oligonucleotide
cagaagacggagggctaccacaaagcggcagaattgttgttgattacatggtgcaaaa

SEQ ID NO: 87849 - DNA, 60 bp, Artificial
  Synthetic oligonucleotide
caatgaccttggaccagcaacggctcaaatggctcttcagctatttatcaaggattacag

SEQ ID NO: 87850 - DNA, 60 bp, Artificial
  Synthetic oligonucleotide
gttgcacgtttgtgtcactggggatgatagaaatgcgactgctagtttcatttatgatgg

SEQ ID NO: 87851 - DNA, 60 bp, Artificial
  Synthetic oligonucleotide
tcaaggggaaattccaaacagcagcacaacgagcaatgatggaccaagtgagagagagcc

SEQ ID NO: 87852 - DNA, 60 bp, Artificial
  Synthetic oligonucleotide
gaaagagcgaccatcatggctgcattcacaggaaatgcagaaggaaggacatccgatatg

SEQ ID NO: 87853 - DNA, 60 bp, Artificial
  Synthetic oligonucleotide
cgaccatcatggctgcattcacaggaaatgcagaaggaaggacatccgatatgaggactg

SEQ ID NO: 87854 - DNA, 60 bp, Artificial
  Synthetic oligonucleotide
gaaggaaggacatccgatatgaggactgagatcatacggatgatggaaagtgcaagacca

SEQ ID NO: 87855 - DNA, 60 bp, Artificial
  Synthetic oligonucleotide
ccgatatgaggactgagatcatacggatgatggaaagtgcaagaccagaagatgtgtctt

SEQ ID NO: 87856 - DNA, 60 bp, Artificial
  Synthetic oligonucleotide
tgagatcatacggatgatggaaagtgcaagatcagaagatgtgtctttccaggggcgggg

SEQ ID NO: 87857 - DNA, 60 bp, Artificial
  Synthetic oligonucleotide
aactagagccctagtgcgcactgggatggaccccaggatgtgctccctcatgcagggatc

SEQ ID NO: 87858 - DNA, 60 bp, Artificial
  Synthetic oligonucleotide
acaatggtgatggagctcatcagaatgataaaaagaggtgtcaatgaccgtaacttctgg

SEQ ID NO: 87859 - DNA, 60 bp, Artificial
  Synthetic oligonucleotide
cactcacttgatgatctggcattctaacttgaatgacgccacgtatcagagaactagagc

SEQ ID NO: 87860 - DNA, 60 bp, Artificial
  Synthetic oligonucleotide
cgtatcagaggactagagccctagtgcgcactgggatggaccccaggatgtgctccctca

SEQ ID NO: 87861 - DNA, 60 bp, Artificial
  Synthetic oligonucleotide
agaagaatctggcgacaagcaaacaatggagaagatgcaactgctggcctcactcacttg

SEQ ID NO: 87862 - DNA, 60 bp, Artificial
  Synthetic oligonucleotide
caaacagcagcacaacgagctatgatggaccaagtcagggaaagccgtagtcctggaaat

SEQ ID NO: 87863 - DNA, 60 bp, Artificial
  Synthetic oligonucleotide
acctcccctttgaaagagcgaccatcatggctgcattcacaggaaatgcagaaggaagga

SEQ ID NO: 87864 - DNA, 60 bp, Artificial
  Synthetic oligonucleotide
caacccactttctcagtacaaaggaacctcccctttgaaagagcgaccatcatggctgca

SEQ ID NO: 87865 - DNA, 60 bp, Artificial
  Synthetic oligonucleotide
gacaaatcagtgtacaacccactttctcagtacaaaggaacctcccctttgaaagagcga

SEQ ID NO: 87866 - DNA, 60 bp, Artificial
  Synthetic oligonucleotide
gaggagcaagagtgttacccagagggcaactatccacaagaggcgttcaaattgcatcca

SEQ ID NO: 87867 - DNA, 60 bp, Artificial
  Synthetic oligonucleotide
caagtggatacgactttgagagggaaggatactcccttgtcgggatagaccctttccgtc

SEQ ID NO: 87868 - DNA, 60 bp, Artificial
  Synthetic oligonucleotide
tgggcttgctgtagcaagtggatacgactttgagagggaaggatattcccttgttgggat

SEQ ID NO: 87869 - DNA, 60 bp, Artificial
  Synthetic oligonucleotide
gaaagaatggtcctgtctgcgtttgatgagagaaggaacaggtacttggaggagcatccc

SEQ ID NO: 87870 - DNA, 60 bp, Artificial
  Synthetic oligonucleotide
ggtcctgtctgcgtttgatgagagaaggaacaggtacttggaggagcatcccagcgctgg

SEQ ID NO: 87871 - DNA, 60 bp, Artificial
  Synthetic oligonucleotide
tgaacgccagaatgccactgagattcgggcatctgtcgggaggatggttggaggaatcgg

SEQ ID NO: 87872 - DNA, 60 bp, Artificial
  Synthetic oligonucleotide
cgccagaatgccactgagattcgggcatctgtcgggaggatggttggaggaatcggaaga

SEQ ID NO: 87873 - DNA, 60 bp, Artificial
  Synthetic oligonucleotide
cccagcgctggaagggatcccaagaaaactggtggaccaatttacagaaggagagagggg

SEQ ID NO: 87874 - DNA, 54 bp, Artificial
  Synthetic oligonucleotide
aaggactttctcgtttcagcttatttaatgataaaaaacacccttgtttctact

SEQ ID NO: 87875 - DNA, 60 bp, Artificial
  Synthetic oligonucleotide
ctgaaggctcagtttcttctaggaaaagaagacatgttccaatgggatgcatttgaagca

SEQ ID NO: 87876 - DNA, 60 bp, Artificial
  Synthetic oligonucleotide
agtttcttctgggaaaagaagacatgttccaatgggatgcatttgaagcatttgaaagca

SEQ ID NO: 87877 - DNA, 60 bp, Artificial
  Synthetic oligonucleotide
agtttcttttgggaaaagaagacatgttccaatgggatgcatttgaagcatttgaaagca

SEQ ID NO: 87878 - DNA, 58 bp, Artificial
  Synthetic oligonucleotide
acaaaagtgagcctgaaagtaaaaggatgtctcttgaagagagaaaagcaattggggt

SEQ ID NO: 87879 - DNA, 59 bp, Artificial
  Synthetic oligonucleotide
aacaaaagtgagcctgaaagtaaaaggatgtctcttgaagagagaaaagcaattggggt

SEQ ID NO: 87880 - DNA, 60 bp, Artificial
  Synthetic oligonucleotide
caacaaaagtgagcctgaaagtaaaaggatgtctcttgaagagagaaaagcaattggggt

SEQ ID NO: 87881 - DNA, 60 bp, Artificial
  Synthetic oligonucleotide
caacaaaagtgagcctgaaagtaaaaggatgtctcttgaagagagaaaagcaattggagt

SEQ ID NO: 87882 - DNA, 57 bp, Artificial
  Synthetic oligonucleotide
caaaagtgagcctgaaagtaaaaggatgtctcttgaagagagaaaagcaattggggt

SEQ ID NO: 87883 - DNA, 60 bp, Artificial
  Synthetic oligonucleotide
gttgcactacttttagccttcattttgtgggcttgtcaaaacggaaacatccggtgccag

SEQ ID NO: 87884 - DNA, 60 bp, Artificial
  Synthetic oligonucleotide
gtagcagagaactcttctcaaaactacacaggaaaccctgtgatatgcatgggacatcat

SEQ ID NO: 87885 - DNA, 60 bp, Artificial
  Synthetic oligonucleotide
tctcaaaactacacaggaaaccctgtgatatgcatgggacatcatgctgttgctaatggg

SEQ ID NO: 87886 - DNA, 60 bp, Artificial
  Synthetic oligonucleotide
tctcaaaactacacgggaaaccctgtgatatgcatgggacatcatgctgttgccaatgga

SEQ ID NO: 87887 - DNA, 60 bp, Artificial
  Synthetic oligonucleotide
ctacacgggaaaccctgtgatatgcatgggacatcatgctgttgccaatggaaccatggt

SEQ ID NO: 87888 - DNA, 60 bp, Artificial
  Synthetic oligonucleotide
ccgatgatcaagtagaagtggtcactgcacaagaactggtagaatcgcagaacctcccgg

SEQ ID NO: 87889 - DNA, 60 bp, Artificial
  Synthetic oligonucleotide
agccccctgagactagttgacggtcagacttgcgatatcatcaatggagcattggggagc

SEQ ID NO: 87890 - DNA, 60 bp, Artificial
  Synthetic oligonucleotide
cctgagactagttgacggtcagacttgcgatatcatcaatggagcattggggagcccagg

SEQ ID NO: 87891 - DNA, 60 bp, Artificial
  Synthetic oligonucleotide
caagaacaaccctggaagagtcactgtgtctaccaaaactagtcaaacaagtgtagtccc

SEQ ID NO: 87892 - DNA, 60 bp, Artificial
  Synthetic oligonucleotide
tgtctctaccaaaactagtcaaacaagtgtagtccctaacattggtagtagaccctgggt

SEQ ID NO: 87893 - DNA, 60 bp, Artificial
  Synthetic oligonucleotide
tctaccaaaactagtcaaacaagtgtagtccctaatattggcagcagaccctgggtgaga

SEQ ID NO: 87894 - DNA, 56 bp, Artificial
  Synthetic oligonucleotide
agctgttagtcgcactggaaaaccagcacactatagatgtgactgactcagagatg

SEQ ID NO: 87895 - DNA, 60 bp, Artificial
  Synthetic oligonucleotide
agcaaatgtcacacagacaaaggctctctctccacaactaaacctttccagaatatctcg

SEQ ID NO: 87896 - DNA, 60 bp, Artificial
  Synthetic oligonucleotide
ctcaggcagccattgatcagatcaatgggaagttaaatcgtctcattgaaaagacaaatg

SEQ ID NO: 87897 - DNA, 60 bp, Artificial
  Synthetic oligonucleotide
caaatccactcaggcagccattgatcagatcaatgggaagctaaaccgtcttattgagaa

SEQ ID NO: 87898 - DNA, 56 bp, Artificial
  Synthetic oligonucleotide
aactgttagtagcactggaaaaccagcacactatagatgtgactgactcagagatg

SEQ ID NO: 87899 - DNA, 60 bp, Artificial
  Synthetic oligonucleotide
gtcacacagacaaaggctctctctccacaactaaacctttccagaacatctcgagaatag

SEQ ID NO: 87900 - DNA, 60 bp, Artificial
  Synthetic oligonucleotide
gagaggaaacccaggagtgaaagggtgggcctttgacaatgggaatgatgtttggatggg

SEQ ID NO: 87901 - DNA, 60 bp, Artificial
  Synthetic oligonucleotide
ggtttgaaaagagggccttctacggaaggagtgcctgagtctatgagggaagaatatcgg

SEQ ID NO: 87902 - DNA, 60 bp, Artificial
  Synthetic oligonucleotide
gaagggctctaataggcccgttatagatataaatatggcagattatagcattgattccag

SEQ ID NO: 87903 - DNA, 60 bp, Artificial
  Synthetic oligonucleotide
ggggaccataccttcggcaaaagcttcaatactccacgaagtcaaacctgttacatccgg

SEQ ID NO: 87904 - DNA, 60 bp, Artificial
  Synthetic oligonucleotide
aatctgcactgggataacatcttcaaactcaccccatgtggtcaaaactgctactcaagg

SEQ ID NO: 87905 - DNA, 60 bp, Artificial
  Synthetic oligonucleotide
gggaccataccttcggcaaaagcttcaatactccacgaagtcaaacctgttacatctggg

SEQ ID NO: 87906 - DNA, 60 bp, Artificial
  Synthetic oligonucleotide
gggaccataccttcggcaaaagcttcaatactccacgaagtcaaacctgttacatccggg

SEQ ID NO: 87907 - DNA, 60 bp, Artificial
  Synthetic oligonucleotide
ggagagatgaacagtcaattgctgaagcaataattgtggccatggtattttcacaagagg

SEQ ID NO: 87908 - DNA, 60 bp, Artificial
  Synthetic oligonucleotide
gctcttttgctgggtggatccttgggaacccaatgtgtgatgatttgattgggaaaacat

SEQ ID NO: 87909 - DNA, 60 bp, Artificial
  Synthetic oligonucleotide
ttacgggcaaccttcaaacattgaaaataagagtacatgaggggtatgaagagttcacga

SEQ ID NO: 87910 - DNA, 60 bp, Artificial
  Synthetic oligonucleotide
gaagagttcacaatggttgggagaagagcaacagctattctcagaaaggccaccagaaga

SEQ ID NO: 87911 - DNA, 60 bp, Artificial
  Synthetic oligonucleotide
taagagtgcatgaagggtatgaagagttcacaatggttgggagaagagcaacagccattc

SEQ ID NO: 87912 - DNA, 60 bp, Artificial
  Synthetic oligonucleotide
taagagtacatgaagggtatgaagagttcacaatggttgggagaagagcaacagccattc

SEQ ID NO: 87913 - DNA, 60 bp, Artificial
  Synthetic oligonucleotide
ctttgtcgcctgggatgatgatgggaatgtttaatatgctatctaccgtgttgggagtag

SEQ ID NO: 87914 - DNA, 60 bp, Artificial
  Synthetic oligonucleotide
caaagtggtttgccagtaggtggaaacgagaagaaggccaaactgtcaaatgcagtggcc

SEQ ID NO: 87915 - DNA, 57 bp, Artificial
  Synthetic oligonucleotide
acttccttcatttggggttgctggagtaaatgaatcagcagatatggcaataggaat

SEQ ID NO: 87916 - DNA, 60 bp, Artificial
  Synthetic oligonucleotide
tactgtaatgaaactggaatgtttgaatttacaagcatgttctacagagatggatttgta

SEQ ID NO: 87917 - DNA, 60 bp, Artificial
  Synthetic oligonucleotide
caaagtggtttgcccgtaggtggaaatgaaaagaaggccaaactgtcaaatgcagtggcc

SEQ ID NO: 87918 - DNA, 57 bp, Artificial
  Synthetic oligonucleotide
acttccttcatttggagttgctggagtaaatgaatcagcagatatggcaataggaat

SEQ ID NO: 87919 - DNA, 60 bp, Artificial
  Synthetic oligonucleotide
caacaatgggatgggtccagcaacagcacaaacagccatacaattattcatagctgatta

SEQ ID NO: 87920 - DNA, 60 bp, Artificial
  Synthetic oligonucleotide
gggatgggtccagcaacagcacaaacagccatacaattattcatagctgattatagatac

SEQ ID NO: 87921 - DNA, 60 bp, Artificial
  Synthetic oligonucleotide
tactgtaacgaaactggaatgtttgaatttacaagcatgttctatagagatggatttgta

SEQ ID NO: 87922 - DNA, 60 bp, Artificial
  Synthetic oligonucleotide
caagtgcctatgcacaattagattgcgttctggaggctttggatagaatggatgaggaac

SEQ ID NO: 87923 - DNA, 60 bp, Artificial
  Synthetic oligonucleotide
cattcttcaatgaagaaggaacggcatctttgtcgcctgggatgatgatgggaatgttta

SEQ ID NO: 87924 - DNA, 60 bp, Artificial
  Synthetic oligonucleotide
ccattcttcaatgaagaaggaacggcatctttgtcgcctgggatgatgatgggaatgttt

SEQ ID NO: 87925 - DNA, 60 bp, Artificial
  Synthetic oligonucleotide
tccatgattccaatgttcgaaacctccatgaaaaggtcagacgaatgctgaaggataatg

SEQ ID NO: 87926 - DNA, 60 bp, Artificial
  Synthetic oligonucleotide
ataggaggttcacccctgagatcagcacgaggcctaaagtaaatggtcaggctgggagaa

SEQ ID NO: 87927 - DNA, 60 bp, Artificial
  Synthetic oligonucleotide
ggagatcctccatacagccatggaacgggaacaggatacaccatggacacagtcaacaga

SEQ ID NO: 87928 - DNA, 60 bp, Artificial
  Synthetic oligonucleotide
ctttggcatgtccgcaaacgatttgcagaccaagaactgggtgatgccccattccttgat

SEQ ID NO: 87929 - DNA, 60 bp, Artificial
  Synthetic oligonucleotide
tcgcttggagaagcagtaatgaggatgggagacctccactccctccaaagcagaaacgga

SEQ ID NO: 87930 - DNA, 60 bp, Artificial
  Synthetic oligonucleotide
cagagattcgcttggagaagcagtaatgaggatgggagacctccactccctccaaagcag

SEQ ID NO: 87931 - DNA, 60 bp, Artificial
  Synthetic oligonucleotide
ccaatggaacacagtcaaacaaaatgggaaatccggggcatgcaaaagagcaaatgtgaa

SEQ ID NO: 87932 - DNA, 60 bp, Artificial
  Synthetic oligonucleotide
atggaacacagtcaagcaaaatgggaaatccggggcatgcaaaagagcaaatgtgaatga

SEQ ID NO: 87933 - DNA, 60 bp, Artificial
  Synthetic oligonucleotide
ggaacacagtcaaacaaaatgggaaatccggggcatgcaaaagagcaaatgtgaatgact

SEQ ID NO: 87934 - DNA, 56 bp, Artificial
  Synthetic oligonucleotide
aaaatgggaaatccggggcatgcaaaagagcaaatgtgaatgacttcttcaacaga

SEQ ID NO: 87935 - DNA, 60 bp, Artificial
  Synthetic oligonucleotide
ggcaccaaacgatcttatgagcagatggaaactagtggggaacgccaaaatgccactgaa

SEQ ID NO: 87936 - DNA, 60 bp, Artificial
  Synthetic oligonucleotide
ggcaccaaacgatcttatgagcagatggaaactggtggggagcgccagaatgccactgaa

SEQ ID NO: 87937 - DNA, 60 bp, Artificial
  Synthetic oligonucleotide
ggcaccaaacgatcttatgagcagatggaaactggtggagagcgccagaatgcaagcgaa

SEQ ID NO: 87938 - DNA, 60 bp, Artificial
  Synthetic oligonucleotide
ggcaccaaacgatcttatgagcagatggaaactggtggtgaacgccagaatgccactgag

SEQ ID NO: 87939 - DNA, 60 bp, Artificial
  Synthetic oligonucleotide
cagggtagataatcactcaccgagtgacatccacatcatggcgcctcaaggcaccaaacg

SEQ ID NO: 87940 - DNA, 60 bp, Artificial
  Synthetic oligonucleotide
cactgaccgtgaatgtgagaggatcaggaatgaggatactggtaagaggcaattctccag

SEQ ID NO: 87941 - DNA, 60 bp, Artificial
  Synthetic oligonucleotide
gcgaccgctagtttcatttatgatgggatgcttgtcgacagtatcagttcgtggtctcaa

SEQ ID NO: 87942 - DNA, 60 bp, Artificial
  Synthetic oligonucleotide
gcgactgctagtttcatttatgatgggatgcttgttgacagtatcggttcgtggtctcaa

SEQ ID NO: 87943 - DNA, 60 bp, Artificial
  Synthetic oligonucleotide
gacaatgaacctggatcgggaagttggccggatggttccaacattgggtttatgcccaag

SEQ ID NO: 87944 - DNA, 58 bp, Artificial
  Synthetic oligonucleotide
ggatcgggaaattggccggatggttccaacattgggtttatgcccaagtaacagaaaa

SEQ ID NO: 87945 - DNA, 60 bp, Artificial
  Synthetic oligonucleotide
gacaatgaacctggatcgggagattggccggatggttccaacattgggtttatgcccaag

SEQ ID NO: 87946 - DNA, 60 bp, Artificial
  Synthetic oligonucleotide
aggaatctttgaaaactcgtgtcttgaaacgatggaagttgtccaacaaacaagagtgga

SEQ ID NO: 87947 - DNA, 60 bp, Artificial
  Synthetic oligonucleotide
tccctttaatgacagactcagaagagatcaaaaggcattaaagggaagaggcagcacact

SEQ ID NO: 87948 - DNA, 52 bp, Artificial
  Synthetic oligonucleotide
gggtggtatggtttcaggcatcaaaatgcacaaggagaaggaactgcagctg

SEQ ID NO: 87949 - DNA, 60 bp, Artificial
  Synthetic oligonucleotide
aagtgcctgcagaagatcaggttcttccttctatgcggagatgaaatggttgctgtcgaa

SEQ ID NO: 87950 - DNA, 60 bp, Artificial
  Synthetic oligonucleotide
atcaggttcttccttctatgcggagatgaaatggttgctgtcgaattcagacaatgcggc

SEQ ID NO: 87951 - DNA, 60 bp, Artificial
  Synthetic oligonucleotide
gagtccagagtgatgtgcctttagactctagttgtggaggggattgctttcatagtgggg

SEQ ID NO: 87952 - DNA, 60 bp, Artificial
  Synthetic oligonucleotide
ccccaatgcgatcaattcctggagtttgaatcagatttgataattgaacgaagggaaggg

SEQ ID NO: 87953 - DNA, 60 bp, Artificial
  Synthetic oligonucleotide
gataattgaacgaagggaagggaacgatgtatgctatcctgggaagttcacaaatgaaga

SEQ ID NO: 87954 - DNA, 60 bp, Artificial
  Synthetic oligonucleotide
gtggccatggaaaatcagcacacaatagaccttgcggattcagaaatgaacaaactttat

SEQ ID NO: 87955 - DNA, 60 bp, Artificial
  Synthetic oligonucleotide
ggacacgagactcaatgactgaagtatggtcgtataatgctgagctgttggtggccatgg

SEQ ID NO: 87956 - DNA, 60 bp, Artificial
  Synthetic oligonucleotide
gagcattcatagcccctgacagggcaagtttctttagaggagaatcactaggagtccaga

SEQ ID NO: 87957 - DNA, 60 bp, Artificial
  Synthetic oligonucleotide
gtggcaaatggaacaaaggtgaacacactaacagagagggggattgaggtagtgaatgcc

SEQ ID NO: 87958 - DNA, 59 bp, Artificial
  Synthetic oligonucleotide
cactcaaattctggtattcattgcctgtttgctgattaaagctaaaggagacaaaatat

SEQ ID NO: 87959 - DNA, 60 bp, Artificial
  Synthetic oligonucleotide
cactgagacagatccttcgagggtcaggaggagtcgataaagagtcaatgggtttcacct

SEQ ID NO: 87960 - DNA, 60 bp, Artificial
  Synthetic oligonucleotide
tacgatagtcagttctctgccattccaaaacatcaattctagaacagtggggaaatgccc

SEQ ID NO: 87961 - DNA, 60 bp, Artificial
  Synthetic oligonucleotide
gggaagggaacgatgtatgctatcctgggaagttcacaaatgaagaatcactgagacaga

SEQ ID NO: 87962 - DNA, 60 bp, Artificial
  Synthetic oligonucleotide
cccaagggaaaaggccaacagacctgggacaatgtgggctcctaggaaccctaataggac

SEQ ID NO: 87963 - DNA, 60 bp, Artificial
  Synthetic oligonucleotide
tagaaaatgtccaaattgcgattgggcctattaccctccaaccccaggaaagtaccttga

SEQ ID NO: 87964 - DNA, 60 bp, Artificial
  Synthetic oligonucleotide
aaatgtccaaattgcgattgggcctattaccctccaaccccaggaaagtaccttgatgac

SEQ ID NO: 87965 - DNA, 60 bp, Artificial
  Synthetic oligonucleotide
ccagaagagagaacaagcatttggacctctagtagctccacggtattttgtggtgtttca

SEQ ID NO: 87966 - DNA, 60 bp, Artificial
  Synthetic oligonucleotide
ggaaaaccagaggagaggacaagcatttggacctctagtagctccacggtattttgtggt

SEQ ID NO: 87967 - DNA, 60 bp, Artificial
  Synthetic oligonucleotide
ggggtgaaaggatttggcttcagacaaggtaatagtgtgtgggcaggaagaacagttagc

SEQ ID NO: 87968 - DNA, 60 bp, Artificial
  Synthetic oligonucleotide
ggagtgaaaggatttggtttcagacaaggtaatagtgtgtgggcaggaagaacagttagc

SEQ ID NO: 87969 - DNA, 60 bp, Artificial
  Synthetic oligonucleotide
atggggtgaaaggatttggcttcagacaaggtaatagtgtgtgggcaggaagaacagtta

SEQ ID NO: 87970 - DNA, 60 bp, Artificial
  Synthetic oligonucleotide
gggaaaccagaagagaggacaagcatttggacctctagtagctccacggtattttgtggt

SEQ ID NO: 87971 - DNA, 60 bp, Artificial
  Synthetic oligonucleotide
atgataagaggaaaaccagaagagagaacaagcatttggacctctagtagctccacggta

SEQ ID NO: 87972 - DNA, 53 bp, Artificial
  Synthetic oligonucleotide
tgtgtgggcaggaagaacagttagcatttcgtcccgaagtggttttgaaattc

SEQ ID NO: 87973 - DNA, 53 bp, Artificial
  Synthetic oligonucleotide
tgtgtgggcaggaagaacagttagcatttcgtcccgaagtggttttgaaatcc

SEQ ID NO: 87974 - DNA, 60 bp, Artificial
  Synthetic oligonucleotide
gtcatggagaaagcaaattctaagaacacaagaatcgtcgtgtgtatgtatgaatgggaa

SEQ ID NO: 87975 - DNA, 60 bp, Artificial
  Synthetic oligonucleotide
ggaataatatcagtgacaaaagaaagcagtgtatcatcatcctgcaacaccaccgaggtt

SEQ ID NO: 87976 - DNA, 60 bp, Artificial
  Synthetic oligonucleotide
gggtcaagggggcatgtgtttgtcataagagaaccatttgtggcatgtggtcccacggaa

SEQ ID NO: 87977 - DNA, 60 bp, Artificial
  Synthetic oligonucleotide
gaatagggtcaagggggcatgtgtttgtcataagagaaccatttgtggcatgcagttcca

SEQ ID NO: 87978 - DNA, 60 bp, Artificial
  Synthetic oligonucleotide
gtctgttgcatggtcagccacagcatgccatgatggcagaaaatggctggcaatagggat

SEQ ID NO: 87979 - DNA, 60 bp, Artificial
  Synthetic oligonucleotide
gcctaccaagccaagtttgagtccgttgcatggtcagccacagcatgccatgatggcaaa

SEQ ID NO: 87980 - DNA, 60 bp, Artificial
  Synthetic oligonucleotide
acatattgcttcatattgcatcaatagtcataggaataatatcagtgacaaaagaaagca

SEQ ID NO: 87981 - DNA, 60 bp, Artificial
  Synthetic oligonucleotide
tgccatgatggcaaaaaatggctggcagtagggataagtggtgcggatgacgatgcttat

SEQ ID NO: 87982 - DNA, 60 bp, Artificial
  Synthetic oligonucleotide
gctggcagtagggataagtggtgcggatgacgatgcttatgctgtaatccattatggagg

SEQ ID NO: 87983 - DNA, 60 bp, Artificial
  Synthetic oligonucleotide
aaatggctggcagtagggataagtggtgcggatgacgatgcttatgctgtaatccattat

SEQ ID NO: 87984 - DNA, 59 bp, Artificial
  Synthetic oligonucleotide
caatagggataagtggtgcggatgacgatgcttatgctgtaatccattatgggggaatc

SEQ ID NO: 87985 - DNA, 54 bp, Artificial
  Synthetic oligonucleotide
caatagggataagtggtgcggatgacgatgcttatgctgtaatccattatgggg

SEQ ID NO: 87986 - DNA, 60 bp, Artificial
  Synthetic oligonucleotide
ggggcatgtgtttgtcataagagaaccatttgtggcatgtggtcccacggaatgtagaac

SEQ ID NO: 87987 - DNA, 60 bp, Artificial
  Synthetic oligonucleotide
ggggcatgtgtttgtcataagagaaccatttgtggcatgcagttccacggaatgtagaac

SEQ ID NO: 87988 - DNA, 51 bp, Artificial
  Synthetic oligonucleotide
cctgacacaaggtgccttactgaatgacaaacattccaataatacagtgaa

SEQ ID NO: 87989 - DNA, 60 bp, Artificial
  Synthetic oligonucleotide
acaaggtgccttactgaatgacaaacattccaataatacagtgaaagacagaagtcctta

SEQ ID NO: 87990 - DNA, 60 bp, Artificial
  Synthetic oligonucleotide
gccttactgaatgacaaacattccaataatacagtgaaagacagaagtccttatcgtgca

SEQ ID NO: 87991 - DNA, 60 bp, Artificial
  Synthetic oligonucleotide
gaatgacaaacattccaataatacagtgaaagacagaagtccttatcgtgcattgatgag

SEQ ID NO: 87992 - DNA, 60 bp, Artificial
  Synthetic oligonucleotide
tgacaaacattccaataatacagtgaaagacagaagtccttatcgtgcattgatgagtgt

SEQ ID NO: 87993 - DNA, 60 bp, Artificial
  Synthetic oligonucleotide
acaaacattccaataatacagtgaaagacagaagtccttatcgtgcattgatgagtgtgc

SEQ ID NO: 87994 - DNA, 60 bp, Artificial
  Synthetic oligonucleotide
gctagttacaagattttcaagtctcgtgagggaatggtgacaaatgaaagagaagtgtcg

SEQ ID NO: 87995 - DNA, 60 bp, Artificial
  Synthetic oligonucleotide
gcttaccaggccaagtttgagtctgttgcatggtcagccacagcatgccatgatggcaaa

SEQ ID NO: 87996 - DNA, 60 bp, Artificial
  Synthetic oligonucleotide
gtcatggagaaagcaaattctaagaacacaagaatcgtcatgtgtatgcatgaatgggaa

SEQ ID NO: 87997 - DNA, 60 bp, Artificial
  Synthetic oligonucleotide
ggagaaagcaaattctaagaacacaagaatcgtcatgtgtatgcatgaatgggaactgtt

SEQ ID NO: 87998 - DNA, 60 bp, Artificial
  Synthetic oligonucleotide
gaggtgggttatttatgtgctggaattccgacagacactccacgggttcaggacagtagt

SEQ ID NO: 87999 - DNA, 60 bp, Artificial
  Synthetic oligonucleotide
tatttatgtgctggaattccgacagacactccacgggttcaggacagtagtttcactggt

SEQ ID NO: 88000 - DNA, 60 bp, Artificial
  Synthetic oligonucleotide
ggtgacaaatgaaagagaagtgtcgtttcagggaggtcacattgaagaatgttcttgcta

SEQ ID NO: 88001 - DNA, 60 bp, Artificial
  Synthetic oligonucleotide
caaatgaaagagaagtgtcgtttcagggaggtcacattgaagaatgttcttgctacccca

SEQ ID NO: 88002 - DNA, 60 bp, Artificial
  Synthetic oligonucleotide
ccaatgcctaccaagccaagtttgagtccgttgcatggtcagccacagcatgccatgatg

SEQ ID NO: 88003 - DNA, 60 bp, Artificial
  Synthetic oligonucleotide
tgatggcaaaaaatggctggcagtagggataagtggtgcggatgacgatgcttatgctgt

SEQ ID NO: 88004 - DNA, 60 bp, Artificial
  Synthetic oligonucleotide
ttgcatcaatagtcataggaataatatcagtgacaaaagaaagcagtgtgtcctcatcct

SEQ ID NO: 88005 - DNA, 60 bp, Artificial
  Synthetic oligonucleotide
gctggaattccgacagacactccacgggttcaggacagtagtttcactggttcctgcact

SEQ ID NO: 88006 - DNA, 60 bp, Artificial
  Synthetic oligonucleotide
ttcaagtctcgtgagggaatggtgacaaatgaaagagaagtgtcgtttcagggaggtcac

SEQ ID NO: 88007 - DNA, 60 bp, Artificial
  Synthetic oligonucleotide
gggacgaataactatggagtgaaaggatttggcttcagacaaggtaatagtgtgtgggca

SEQ ID NO: 88008 - DNA, 53 bp, Artificial
  Synthetic oligonucleotide
ttgagccctggaatgatgatgggcatgttcaacatgctaagtacagttttggg

SEQ ID NO: 88009 - DNA, 60 bp, Artificial
  Synthetic oligonucleotide
tctggagtgctatgaaaggctttcatggcaaagagcccttgactaccctggtcaagaccg

SEQ ID NO: 88010 - DNA, 60 bp, Artificial
  Synthetic oligonucleotide
ttggatacctgagcaacaactcaacagagagagtggacacaataattgagagtaatgtca

SEQ ID NO: 88011 - DNA, 60 bp, Artificial
  Synthetic oligonucleotide
ggtacctgagcaacaactcaacagaaaaagtggacacaataattgagagtaatgtcacgg

SEQ ID NO: 88012 - DNA, 60 bp, Artificial
  Synthetic oligonucleotide
aagacttggcactcagcagcaacagccatttactgtttgatgggctcaggacaattgcta

SEQ ID NO: 88013 - DNA, 60 bp, Artificial
  Synthetic oligonucleotide
atggcgtctcaaggcaccaaacgatcttatgagcagatggaaactggtggtgaacgccag

SEQ ID NO: 88014 - DNA, 60 bp, Artificial
  Synthetic oligonucleotide
gaatggaatgggaaagggagaagacgtccaaaaactggcagaagaactgcaaagcaacat

SEQ ID NO: 88015 - DNA, 60 bp, Artificial
  Synthetic oligonucleotide
ctgacagtcagacagcgaccaaaagaattcggatggccatcaattagtgtcgaattgttt

SEQ ID NO: 88016 - DNA, 60 bp, Artificial
  Synthetic oligonucleotide
ctagtatacttactgacagtcagacagcgaccaaaagaattcggatggccatcaattagt

SEQ ID NO: 88017 - DNA, 60 bp, Artificial
  Synthetic oligonucleotide
acaaaacaggaggcaccttttataagatggtaagagatgataaaaccatctacttcagcc

SEQ ID NO: 88018 - DNA, 60 bp, Artificial
  Synthetic oligonucleotide
caaaacaggaggcaccttttataagatggtaagagatgataaaaccatctacttcagccc

SEQ ID NO: 88019 - DNA, 60 bp, Artificial
  Synthetic oligonucleotide
gcaagacaggaggcaccttttataagatggtaagagatgataaaaccatctacttcagcc

SEQ ID NO: 88020 - DNA, 60 bp, Artificial
  Synthetic oligonucleotide
caagacaggaggcaccttttataagatggtaagagatgataaaaccatctacttcagccc

SEQ ID NO: 88021 - DNA, 60 bp, Artificial
  Synthetic oligonucleotide
aaaaagggatatacgtaatgtgttgtccttgagagtgttggtgaacggaaccttcctcaa

SEQ ID NO: 88022 - DNA, 60 bp, Artificial
  Synthetic oligonucleotide
cggaaacgatgtatggttgggcaggacagtgtcaactagtggtagatcgggctttgaaat

SEQ ID NO: 88023 - DNA, 60 bp, Artificial
  Synthetic oligonucleotide
acatttgggtaacaagagaaccttatgtgtcatgtgaccccagtaaatgttaccagtttg

SEQ ID NO: 88024 - DNA, 60 bp, Artificial
  Synthetic oligonucleotide
ggagtgggtccgcatgccatgatggtagagaatggacatatgtcggagttgatggccctg

SEQ ID NO: 88025 - DNA, 60 bp, Artificial
  Synthetic oligonucleotide
cattttccacatggcagcttggagcgggtccgcatgccatgatggtagagaatggacata

SEQ ID NO: 88026 - DNA, 60 bp, Artificial
  Synthetic oligonucleotide
tatgaagagttcacaatggttgggagaagagcaacagctattctcaggaaggcaaccaga

SEQ ID NO: 88027 - DNA, 60 bp, Artificial
  Synthetic oligonucleotide
gatgatagaaatgcgactgctagtctcatttatgatgggatgcttgttgacagtattggt

SEQ ID NO: 88028 - DNA, 60 bp, Artificial
  Synthetic oligonucleotide
gctgcaatctattcgagaaattcttccctagcagttcatacaggagaccggttgggatct

SEQ ID NO: 88029 - DNA, 60 bp, Artificial
  Synthetic oligonucleotide
tgctgcaatctattcgagaaattcttccctagcagttcatacaggagaccggttgggatt

SEQ ID NO: 88030 - DNA, 60 bp, Artificial
  Synthetic oligonucleotide
cgacaggggttcaatctctacaactaaaccctttcataacatctcgaggatatcaatcgg

SEQ ID NO: 88031 - DNA, 60 bp, Artificial
  Synthetic oligonucleotide
cgacaggggttcaatctctacaactaaaccctttcagaacatctcgaggatatcaatcgg

SEQ ID NO: 88032 - DNA, 60 bp, Artificial
  Synthetic oligonucleotide
ccgacaggggttcaatctctacaactaaaccctttcagaacatttcgagaatatcaatcg

SEQ ID NO: 88033 - DNA, 60 bp, Artificial
  Synthetic oligonucleotide
cctcattgttcaggcacttagggacaacctggaacctggaaccttcgatcttggagggct

SEQ ID NO: 88034 - DNA, 60 bp, Artificial
  Synthetic oligonucleotide
gcaaaggatgtaatggaagtactaaagcagagctctatgggaaattcagctcttgtgaag

SEQ ID NO: 88035 - DNA, 60 bp, Artificial
  Synthetic oligonucleotide
gaaggaattgcaaaggatgtaatggaagtgctaaagcagagctctatgggaaattcagct

SEQ ID NO: 88036 - DNA, 60 bp, Artificial
  Synthetic oligonucleotide
ccacattagtccattatcaggaagtgctcagcatatagaggaatgttcctgttatccccg

SEQ ID NO: 88037 - DNA, 60 bp, Artificial
  Synthetic oligonucleotide
gtggtaggtcaggctttgaaatcatcaaagttacagaggggtggatcaactctcccaatc

SEQ ID NO: 88038 - DNA, 60 bp, Artificial
  Synthetic oligonucleotide
ggaacaagtggaaggaatgggggcagctctgatgtccatcaagcttcagttttgggctcc

SEQ ID NO: 88039 - DNA, 60 bp, Artificial
  Synthetic oligonucleotide
ggagcaggtggaaggaatgggggcagctctgatgtccatcaagcttcagttttgggctcc

SEQ ID NO: 88040 - DNA, 60 bp, Artificial
  Synthetic oligonucleotide
aaggagcaagtggaaggaatgggggcagctctgatgtccatcaagctccagttttgggct

SEQ ID NO: 88041 - DNA, 60 bp, Artificial
  Synthetic oligonucleotide
aactaggaacgctctgtgctttgtgcgagaaacaagcatcacactcacacagagctcata

SEQ ID NO: 88042 - DNA, 60 bp, Artificial
  Synthetic oligonucleotide
aactagggacgctctgtgctttgtgcgagaaacaagcatcacactcacacagagctcata

SEQ ID NO: 88043 - DNA, 60 bp, Artificial
  Synthetic oligonucleotide
ccccgaagaggttagtgaaacacagggaacagagaagttgacaataacatattcatcatc

SEQ ID NO: 88044 - DNA, 60 bp, Artificial
  Synthetic oligonucleotide
tcccccgaagaggttagtgaaacacagggaacagagaagttgacaataacatattcatca

SEQ ID NO: 88045 - DNA, 60 bp, Artificial
  Synthetic oligonucleotide
gtgggcctttgacaatggagatgatgtttggatgggaagaacaatcagtaaagattcgcg

SEQ ID NO: 88046 - DNA, 60 bp, Artificial
  Synthetic oligonucleotide
ggtgggcctttgacaatggagatgatgtttggatgggaagaacaatcagtaaagattcgc

SEQ ID NO: 88047 - DNA, 60 bp, Artificial
  Synthetic oligonucleotide
ggcctttgacagtggagatgatgtttggatgggaagaacaatcagtaaagattcgcgctc

SEQ ID NO: 88048 - DNA, 60 bp, Artificial
  Synthetic oligonucleotide
gggatcctaataatgagagagggaacccaggagtgaaagggtgggcctttgacaatggga

SEQ ID NO: 88049 - DNA, 60 bp, Artificial
  Synthetic oligonucleotide
tgacaatgggaatgatgtttggatgggaagaacaatcagtaaagattcgcgctcaggcta

SEQ ID NO: 88050 - DNA, 60 bp, Artificial
  Synthetic oligonucleotide
caatcggggattgtcccaagtatgtcaaacagggatccttgaaactagctacaggaatga

SEQ ID NO: 88051 - DNA, 60 bp, Artificial
  Synthetic oligonucleotide
caatcggggattgtcccaagtatgtcaaacagggatccttgaaacttgcaacagggatga

SEQ ID NO: 88052 - DNA, 60 bp, Artificial
  Synthetic oligonucleotide
cggggattgtcccaagtatgtcaaacagggatccttgaaacttgcaacagggatgaggaa

SEQ ID NO: 88053 - DNA, 60 bp, Artificial
  Synthetic oligonucleotide
cgccaggaatgatgatgggaatgtttaatatgctatctacagtattaggagtagccgcac

SEQ ID NO: 88054 - DNA, 60 bp, Artificial
  Synthetic oligonucleotide
gccaccataaactttgaagcaggaattctggagtgctatgaaaggctttcatggcaaaga

SEQ ID NO: 88055 - DNA, 60 bp, Artificial
  Synthetic oligonucleotide
ggcggacaacatgaccacaacacaaattgaggtgggtccgggagcaaccaatgccactat

SEQ ID NO: 88056 - DNA, 60 bp, Artificial
  Synthetic oligonucleotide
tgaagggaggctgatccaaaacagcataacaatagagagaatggttctctcagcatttga

SEQ ID NO: 88057 - DNA, 60 bp, Artificial
  Synthetic oligonucleotide
cagccggctgcaactgcattagctaatactatagaagtcttcagatcgaacggtttaacg

SEQ ID NO: 88058 - DNA, 60 bp, Artificial
  Synthetic oligonucleotide
gggatcctcatcggaggacttgaatggaatgataacacagttcgagtctctgagactcta

SEQ ID NO: 88059 - DNA, 57 bp, Artificial
  Synthetic oligonucleotide
gggatcctcatcggaggacttgaatggaatgataacacagttcgagtctctgagact

SEQ ID NO: 88060 - DNA, 60 bp, Artificial
  Synthetic oligonucleotide
gcaacaaagaagaaaggcctaattctagctgagagaaaaatgagaagatgtgtaagcttt

SEQ ID NO: 88061 - DNA, 60 bp, Artificial
  Synthetic oligonucleotide
ctgaaccctggaaactattcaatgcaagtaaaactaggaacgctttgtgctttatgcgag

SEQ ID NO: 88062 - DNA, 60 bp, Artificial
  Synthetic oligonucleotide
tgtacctgaaccctggaaactattcaatgcaagtaaaactaggaacgctttgtgctttat

SEQ ID NO: 88063 - DNA, 60 bp, Artificial
  Synthetic oligonucleotide
tggagtgggtccgcatgccatgatggtagagaatggacatatgtcggagttgatggccct

SEQ ID NO: 88064 - DNA, 60 bp, Artificial
  Synthetic oligonucleotide
actgaagtttagtggggtcctcgaattcagcaaatttgaagccttcacctcaaacggatg

SEQ ID NO: 88065 - DNA, 60 bp, Artificial
  Synthetic oligonucleotide
ttaagactgaagtttagtggggtcctcgaattcagcaaatttgaagccttcacctcaacc

SEQ ID NO: 88066 - DNA, 60 bp, Artificial
  Synthetic oligonucleotide
ccatgattctaatgttcgaaacctccatgaaaaggtcagacgaatgctgaaggataatgc

SEQ ID NO: 88067 - DNA, 60 bp, Artificial
  Synthetic oligonucleotide
taatgttcgaaacctccatgaaaaggtcagacgaatgctgaaggataatgctaaagatga

SEQ ID NO: 88068 - DNA, 60 bp, Artificial
  Synthetic oligonucleotide
ggttcacccctgagatcagcacgaggcctaaagtaaatggtcaggctgggagaatgacct

SEQ ID NO: 88069 - DNA, 60 bp, Artificial
  Synthetic oligonucleotide
ggttcacccctgagatcagcactaggcctaaagtaaatggtcaggctgggagaatgacct

SEQ ID NO: 88070 - DNA, 60 bp, Artificial
  Synthetic oligonucleotide
actgaagtttagtggggtcctcgaattcagcaaatttgaagtcttcacctcaaacggatg

SEQ ID NO: 88071 - DNA, 60 bp, Artificial
  Synthetic oligonucleotide
ggttcacccctgagatcagcacaaggcctaaagtaaatggtcaggctgggagaatgacct

SEQ ID NO: 88072 - DNA, 60 bp, Artificial
  Synthetic oligonucleotide
gcagcaatcatcatctgcattcaagcagacgaaatctgcattggatacctgagcaacaac

SEQ ID NO: 88073 - DNA, 60 bp, Artificial
  Synthetic oligonucleotide
gttcgaaacctccatgaaaaggtcagacgaatgctgaaggataatgctaaagatgaaggg

SEQ ID NO: 88074 - DNA, 60 bp, Artificial
  Synthetic oligonucleotide
acgtccaaaaactggcagaagagctgcaaagcaacattggagtactgagatctcttgggg

SEQ ID NO: 88075 - DNA, 60 bp, Artificial
  Synthetic oligonucleotide
ctggcagaagagctgcaaagcaacattggagtactgagatctcttggggcaagtcaaaag

SEQ ID NO: 88076 - DNA, 60 bp, Artificial
  Synthetic oligonucleotide
gaggaatcggaagattctacatacagatgtgcaccgaactcaaactgagtgacaatgagg

SEQ ID NO: 88077 - DNA, 60 bp, Artificial
  Synthetic oligonucleotide
ggcggcaggcaaacaatggagaagatgcgaccgctggtctcacccatttgatgatctggc

SEQ ID NO: 88078 - DNA, 60 bp, Artificial
  Synthetic oligonucleotide
atcaatacgtgggcccgaaacatactgcggacacaagaatctgaatgcgtatgccacaac

SEQ ID NO: 88079 - DNA, 60 bp, Artificial
  Synthetic oligonucleotide
caactctcccgaggagatctggagctgctggtgcagcagtaaagggagttggaacgatgg

SEQ ID NO: 88080 - DNA, 60 bp, Artificial
  Synthetic oligonucleotide
ccgaggagatctggagctgctggtgcagcagtaaagggagtcgggacgatggtgatggaa

SEQ ID NO: 88081 - DNA, 60 bp, Artificial
  Synthetic oligonucleotide
cagaccttggatgagaatcaacaacgagactatactggaaacagggtatgtatgtagtaa

SEQ ID NO: 88082 - DNA, 60 bp, Artificial
  Synthetic oligonucleotide
acctccaaacattgaaaataagagtacatgaggggtatgaggaattcacaatggttgggc

SEQ ID NO: 88083 - DNA, 60 bp, Artificial
  Synthetic oligonucleotide
gatgggaaagaatggctacatgtttgtattacagggaacgataatgacgccactgcgcag

SEQ ID NO: 88084 - DNA, 60 bp, Artificial
  Synthetic oligonucleotide
cttagtaacaagagaaccctacatcagctgcgacaatgaagtctgttggtcttttgcact

SEQ ID NO: 88085 - DNA, 60 bp, Artificial
  Synthetic oligonucleotide
cctttaaaggtttcttcccatttcacaaggacaatgctctgagactggctgaaaacaaag

SEQ ID NO: 88086 - DNA, 60 bp, Artificial
  Synthetic oligonucleotide
atgttacacagatgttgacatatattgcgtttgcagagacaactggaaaggctcaaacag

SEQ ID NO: 88087 - DNA, 60 bp, Artificial
  Synthetic oligonucleotide
cagaatgccaatgtttgtacggaacctgtgttgtcgcagtaacagatggaccagcagaca

SEQ ID NO: 88088 - DNA, 59 bp, Artificial
  Synthetic oligonucleotide
cagtttcatgtagctctcctagtggagttgatgggaagagaggagttaaaggattcgga

SEQ ID NO: 88089 - DNA, 60 bp, Artificial
  Synthetic oligonucleotide
acgaccaagcgaaagcagttactcaaacacttgtttccaataatgattggtctgggtatt

SEQ ID NO: 88090 - DNA, 53 bp, Artificial
  Synthetic oligonucleotide
gagacaactggaaaggctcaaacaggccatgggttcgcataaacaacgaaact

SEQ ID NO: 88091 - DNA, 60 bp, Artificial
  Synthetic oligonucleotide
tgtatgcagcaaattccattcagacacacccaggcctagtgatccctctacagtttcatg

SEQ ID NO: 88092 - DNA, 60 bp, Artificial
  Synthetic oligonucleotide
cattaaagggaagaggcagcacacttggactcgatttaagagtggctacaatggaaggga

SEQ ID NO: 88093 - DNA, 60 bp, Artificial
  Synthetic oligonucleotide
gggagtgcaaatgcagcgattcaagtgatcctctcgttattgccgcaagtatcgttggga

SEQ ID NO: 88094 - DNA, 60 bp, Artificial
  Synthetic oligonucleotide
catgataaaggcagtccgaggtgatctgaatttcgtaaacagagcaaaccaaagattgaa

SEQ ID NO: 88095 - DNA, 60 bp, Artificial
  Synthetic oligonucleotide
ttttgggattcgtgtttacgctcaccgtgcccagtgagcgaggactgcagcgtagacggt

SEQ ID NO: 88096 - DNA, 60 bp, Artificial
  Synthetic oligonucleotide
ttttagggttcgtgtttacgctcaccgtgcccagtgagcgaggactgcagcgtagacgat

SEQ ID NO: 88097 - DNA, 60 bp, Artificial
  Synthetic oligonucleotide
ggtccgggagcaaccaatgccaccataaactttgaagcaggaattttggagtgctatgaa

SEQ ID NO: 88098 - DNA, 60 bp, Artificial
  Synthetic oligonucleotide
tcaaataggatacatatgcagcggggtttttggagacaatccacgccccaatgatggaac

SEQ ID NO: 88099 - DNA, 56 bp, Artificial
  Synthetic oligonucleotide
tgtaagctttcatgaagcatttgaaatagcagaaggccacgaaagctcagcattac

SEQ ID NO: 88100 - DNA, 51 bp, Artificial
  Synthetic oligonucleotide
tgtgagttttcatgaagcatttgaaatagcagaaggccatgaaagctcagc

SEQ ID NO: 88101 - DNA, 56 bp, Artificial
  Synthetic oligonucleotide
tgtaagttttcatgaagcatttgaaatagcagaaggccatgaaagctcagcactac

SEQ ID NO: 88102 - DNA, 60 bp, Artificial
  Synthetic oligonucleotide
gcttcggcagtggtctggtacaatggaaggccagtcaccgaaattgcttcgtgggcagga

SEQ ID NO: 88103 - DNA, 60 bp, Artificial
  Synthetic oligonucleotide
tcctcggcagtggtctggtacaatggaaggccagtcaccgaaattgcttcgtgggcagga

SEQ ID NO: 88104 - DNA, 60 bp, Artificial
  Synthetic oligonucleotide
caccgaaattgcttcgtgggcaggaaatatattaaggactcaggaatcagaatgtgtatg

SEQ ID NO: 88105 - DNA, 60 bp, Artificial
  Synthetic oligonucleotide
ccgaaattgcttcgtgggcaggaaatatattaaggactcaggaatcagaatgtgtatgcc

SEQ ID NO: 88106 - DNA, 60 bp, Artificial
  Synthetic oligonucleotide
ccatgacggcatctcaagaatgtcaatctgcatgtcaggacctaataacaattcctcggc

SEQ ID NO: 88107 - DNA, 60 bp, Artificial
  Synthetic oligonucleotide
ggacctaataacaattcctcggcagtggtctggtacaatggaaggccagtcaccgaaatt

SEQ ID NO: 88108 - DNA, 53 bp, Artificial
  Synthetic oligonucleotide
attgtggacatccaatagtatagtagcgctctgtggatccaaagagcgattgg

SEQ ID NO: 88109 - DNA, 60 bp, Artificial
  Synthetic oligonucleotide
gcttttatgtggaattgatcagaggcatgccaaaagagagtagtgtattgtggacatcca

SEQ ID NO: 88110 - DNA, 60 bp, Artificial
  Synthetic oligonucleotide
ggtactcaggagcgttcatcgattattgggctaatagagaatgcttcaatccttgctttt

SEQ ID NO: 88111 - DNA, 60 bp, Artificial
  Synthetic oligonucleotide
taaccggagggagcccagatcctggcgtaaaaggatttgcattcttagatgggggaaatt

SEQ ID NO: 88112 - DNA, 60 bp, Artificial
  Synthetic oligonucleotide
cggggtcggcacgcaaatgggactatacatgacagaagcccgtttagggcgttgataagc

SEQ ID NO: 88113 - DNA, 60 bp, Artificial
  Synthetic oligonucleotide
ccttgcttttatgtggaattgatcagaggcatgccaaaagagagtagtgtattgtggaca

SEQ ID NO: 88114 - DNA, 60 bp, Artificial
  Synthetic oligonucleotide
gtcaaggtaccacactaaggggtcgacatgcaaatgggactatacatgacagaagcccgt

SEQ ID NO: 88115 - DNA, 60 bp, Artificial
  Synthetic oligonucleotide
cacactacggggtcggcacgcaaatgggactatacatgacagaagcccgtttagggcgtt

SEQ ID NO: 88116 - DNA, 60 bp, Artificial
  Synthetic oligonucleotide
ccacactaaggggtcgacatgcaaatgggactatacatgacagaagcccgtttagggcat

SEQ ID NO: 88117 - DNA, 60 bp, Artificial
  Synthetic oligonucleotide
acattgggcttcatttcaaggtaggagacacaccggaaacaggaacccctagcaccaatg

SEQ ID NO: 88118 - DNA, 60 bp, Artificial
  Synthetic oligonucleotide
aggataggggaggatgcccacatccttgtcacaagagaaccatatctctcatgtggacca

SEQ ID NO: 88119 - DNA, 60 bp, Artificial
  Synthetic oligonucleotide
cgattagaataggagaggatgcccacatccttgtcacaagagaaccatatctctcatgtg

SEQ ID NO: 88120 - DNA, 60 bp, Artificial
  Synthetic oligonucleotide
agcaaaagcaggggaaacaatgctatcaatcacgattctgtttctgctcatagcagaagg

SEQ ID NO: 88121 - DNA, 60 bp, Artificial
  Synthetic oligonucleotide
ggcacataagaaagctactcagcatgagagacatgtgtgatgctccctttaatgacagac

SEQ ID NO: 88122 - DNA, 60 bp, Artificial
  Synthetic oligonucleotide
actcagaagagatcaaaaggcattaaagggaagaggcagcacacttgggctcgacctacg

SEQ ID NO: 88123 - DNA, 60 bp, Artificial
  Synthetic oligonucleotide
tatctatggcacataagaaagctactcagcatgagagacatgtgtgatgctccctttaat

SEQ ID NO: 88124 - DNA, 60 bp, Artificial
  Synthetic oligonucleotide
cacaggaaccatgctcaggctcgccgaccaaagtctcccaccgaacttctccagccttga

SEQ ID NO: 88125 - DNA, 60 bp, Artificial
  Synthetic oligonucleotide
cacaggaaccatgcgcaggcttgctgaccaaagtctcccaccgaacttctccagccttga

SEQ ID NO: 88126 - DNA, 60 bp, Artificial
  Synthetic oligonucleotide
ggaaccatgcgccggcttgccgaccaaagtctcccaccgaacttctccagccttgaaaac

SEQ ID NO: 88127 - DNA, 60 bp, Artificial
  Synthetic oligonucleotide
acaggaaccatgcgcaggcttgccgatcaaagtctcccaccgaacttctccagccttgaa

SEQ ID NO: 88128 - DNA, 60 bp, Artificial
  Synthetic oligonucleotide
ggaaccatgcgcatgctcgccgaccaaagtctcccaccgaacttctccagccttgaaaac

SEQ ID NO: 88129 - DNA, 60 bp, Artificial
  Synthetic oligonucleotide
gccaaaggtcccgaaatagcagacagaccacctgcgaatgggcaacgaggaagaattgat

SEQ ID NO: 88130 - DNA, 60 bp, Artificial
  Synthetic oligonucleotide
gtctggttttggtgggactgatcattgccatgggtctttggatgtgctcaaatggctcaa

SEQ ID NO: 88131 - DNA, 60 bp, Artificial
  Synthetic oligonucleotide
gggattgacaagataagcaccgggtttacatatggagcagccatcaattcagctggaacc

SEQ ID NO: 88132 - DNA, 60 bp, Artificial
  Synthetic oligonucleotide
ccaatgctactgaaacagtggaaagcaaaagcctggacagactttgcatgaaaggtcgga

SEQ ID NO: 88133 - DNA, 60 bp, Artificial
  Synthetic oligonucleotide
accgggacatgggacactctaatagagagagataattctattgcctactgttatccgggc

SEQ ID NO: 88134 - DNA, 60 bp, Artificial
  Synthetic oligonucleotide
accggaacatgggacactctaatagagagagataattctattgcctactgttatccgggt

SEQ ID NO: 88135 - DNA, 60 bp, Artificial
  Synthetic oligonucleotide
cgggacatgggacactctaatagagagagataattctattgcctactgttatccgggcgc

SEQ ID NO: 88136 - DNA, 60 bp, Artificial
  Synthetic oligonucleotide
gggacactctaatagagagagataattctattgcctactgttatccgggtgccactgtga

SEQ ID NO: 88137 - DNA, 60 bp, Artificial
  Synthetic oligonucleotide
aaagtggagggattgacaagataagcaccgggtttacatatggagcagccatcaattcag

SEQ ID NO: 88138 - DNA, 60 bp, Artificial
  Synthetic oligonucleotide
tgttatattatggtttagcttcggggcgtcatgctttgtacttttggctgtcatcatggg

SEQ ID NO: 88139 - DNA, 60 bp, Artificial
  Synthetic oligonucleotide
tgttatattatggtttagcttcggggcgtcatgctttgtacttttggctgtcataatggg

SEQ ID NO: 88140 - DNA, 60 bp, Artificial
  Synthetic oligonucleotide
aaagatgttatattatggtttagcttcggggcgtcatgctttgtacttttggctgtcatc

SEQ ID NO: 88141 - DNA, 60 bp, Artificial
  Synthetic oligonucleotide
aaggatgttatattatggtttagcttcggggcgtcatgctttgtacttttggctgtcata

SEQ ID NO: 88142 - DNA, 60 bp, Artificial
  Synthetic oligonucleotide
aggattctataacagacatctggacataccaagctgaattgctggtagcaatggaaaatc

SEQ ID NO: 88143 - DNA, 60 bp, Artificial
  Synthetic oligonucleotide
gacatctggacataccaagctgaattgctggtagcaatggaaaatcagcacacaattgac

SEQ ID NO: 88144 - DNA, 60 bp, Artificial
  Synthetic oligonucleotide
tcaatgccccaaatatgtgaacaaaaggagcctgttacttgcaaccggaatgaggaatgt

SEQ ID NO: 88145 - DNA, 60 bp, Artificial
  Synthetic oligonucleotide
gtgggtcaatgccccaaatatgtgaacaaaaggagcctattgcttgcaactggaatgagg

SEQ ID NO: 88146 - DNA, 60 bp, Artificial
  Synthetic oligonucleotide
ggaagggatggtagatggttggtatggcttcagacaccagaatgcccaaggaaccggcca

SEQ ID NO: 88147 - DNA, 60 bp, Artificial
  Synthetic oligonucleotide
ggaagggatggtagatggttggtatggcttccgacatcagaatgcccaaggaactggtca

SEQ ID NO: 88148 - DNA, 59 bp, Artificial
  Synthetic oligonucleotide
aaagtggacggattgatttccattggacagtggtacagccaggtgataacatcactttt

SEQ ID NO: 88149 - DNA, 60 bp, Artificial
  Synthetic oligonucleotide
aaagtggacggattgatttccattggacagtggtacagccaggtgataacatcacttttt

SEQ ID NO: 88150 - DNA, 60 bp, Artificial
  Synthetic oligonucleotide
actgtgggtcaatgccccaaatatgtgaacaaaaggagcctattgcttgcaactggaatg

SEQ ID NO: 88151 - DNA, 60 bp, Artificial
  Synthetic oligonucleotide
ctcccttttcaaaatctttcaccgagaactgtgggtcaatgccccaaatatgtgaacaaa

SEQ ID NO: 88152 - DNA, 60 bp, Artificial
  Synthetic oligonucleotide
ggactaaggattctataacagacatttggacataccaagctgaattgctggtagcaatgg

SEQ ID NO: 88153 - DNA, 60 bp, Artificial
  Synthetic oligonucleotide
tggactaaggattctataacagacatttggacataccaagctgaattgctggtagcaatg

SEQ ID NO: 88154 - DNA, 60 bp, Artificial
  Synthetic oligonucleotide
cgcatccagccctgctcctcggtacattaccgatatgagcatagaggaaataagcaggga

SEQ ID NO: 88155 - DNA, 60 bp, Artificial
  Synthetic oligonucleotide
gtagcgatggtgttctcacaagaggattgcatgataaaggcagtccgaggtgatctgaat

SEQ ID NO: 88156 - DNA, 60 bp, Artificial
  Synthetic oligonucleotide
caagtgctctgcgccgcaacaaaaggctctagttgatcaagtgatcggaagtaggaaccc

SEQ ID NO: 88157 - DNA, 60 bp, Artificial
  Synthetic oligonucleotide
gctctgcgccgcaacaaaaggctctagttgatcaagtgatcggaagtaggaacccaggga

SEQ ID NO: 88158 - DNA, 60 bp, Artificial
  Synthetic oligonucleotide
cgccccaacaaaaggctctagttgatcaagtgatcggaagtagaaacccagggattgcag

SEQ ID NO: 88159 - DNA, 60 bp, Artificial
  Synthetic oligonucleotide
ggctttccttgaggaatcccatccagggatctttgaaaactcgtgtcttgaaacgatgga

SEQ ID NO: 88160 - DNA, 52 bp, Artificial
  Synthetic oligonucleotide
aactcactcttcgagcgttttaatgaaggacattcaaagccaattcgagcag

SEQ ID NO: 88161 - DNA, 60 bp, Artificial
  Synthetic oligonucleotide
aattgcttctcattgttcaggcacttagggacaacctggaacctggaaccttcgaccttg

SEQ ID NO: 88162 - DNA, 60 bp, Artificial
  Synthetic oligonucleotide
gaaagagagttggtccgcaaaacgaggttcctcccagtggctggtggaacaagcagtgtc

SEQ ID NO: 88163 - DNA, 60 bp, Artificial
  Synthetic oligonucleotide
gtgtggtgcgcaagtggcaggagcaaggtaataaaagggtccttgcctttaattggtgaa

SEQ ID NO: 88164 - DNA, 60 bp, Artificial
  Synthetic oligonucleotide
ggtgtggtgtgcaagtggcaggagcaaggtaataaaagggtccttgcctttaattggtga

SEQ ID NO: 88165 - DNA, 60 bp, Artificial
  Synthetic oligonucleotide
ttggaatcaatgggaacttaccaaatattgtcaatttattcaacagtggcgagttcctta

SEQ ID NO: 88166 - DNA, 60 bp, Artificial
  Synthetic oligonucleotide
cgtatgactacccgcagtattcagaagaggcaagactgaacagagaggaaataagtggag

SEQ ID NO: 88167 - DNA, 60 bp, Artificial
  Synthetic oligonucleotide
ataagtggagtaaaattggaatcaatgggaacttaccaaatattgtcaatttattcaaca

SEQ ID NO: 88168 - DNA, 60 bp, Artificial
  Synthetic oligonucleotide
aagaatgttactgtcacgcatgcccaagacatactggaaaagacacacaatgggaagctc

SEQ ID NO: 88169 - DNA, 60 bp, Artificial
  Synthetic oligonucleotide
ctgtcacgcatgcccaagacatactggaaaagacacacaatgggaagctctgcagtctaa

SEQ ID NO: 88170 - DNA, 60 bp, Artificial
  Synthetic oligonucleotide
atggagaaaatagtacttctttttgcagtagtcagtcttgtcaaaagtgaccagatttgc

SEQ ID NO: 88171 - DNA, 55 bp, Artificial
  Synthetic oligonucleotide
ttttgcagtagtcagtcttgtcaaaagtgaccagatttgcattggttaccatgca

SEQ ID NO: 88172 - DNA, 60 bp, Artificial
  Synthetic oligonucleotide
gtgataatgaatgtatggaaagtgtgagaaacggaacgtatgactacccgcagtattcag

SEQ ID NO: 88173 - DNA, 60 bp, Artificial
  Synthetic oligonucleotide
ctaataaggtcaactcaatcattgacaaaatgaacactcaatttggggccgttggaaagg

SEQ ID NO: 88174 - DNA, 60 bp, Artificial
  Synthetic oligonucleotide
actaataaggtcaactcaatcattgacaaaatgaacactcaatttggggccgttggaaag

SEQ ID NO: 88175 - DNA, 60 bp, Artificial
  Synthetic oligonucleotide
gaaccctagactttcatgactcaaatgtcaagaacctttacgacaaggttcgattacagc

SEQ ID NO: 88176 - DNA, 60 bp, Artificial
  Synthetic oligonucleotide
tagcaggcttcatagaaggagggtggcaaggaatggtagacggttggtatggataccacc

SEQ ID NO: 88177 - DNA, 60 bp, Artificial
  Synthetic oligonucleotide
ccctcaaagagaaacaagaggactatttggagctatagcaggcttcatagaaggagggtg

SEQ ID NO: 88178 - DNA, 56 bp, Artificial
  Synthetic oligonucleotide
ggataccaccatagcaacgagcagggaagtggatacgctgcagacaaagagtccac

SEQ ID NO: 88179 - DNA, 60 bp, Artificial
  Synthetic oligonucleotide
aaggagggtggcaaggaatggtagacggttggtatggataccaccatagcaacgagcagg

SEQ ID NO: 88180 - DNA, 60 bp, Artificial
  Synthetic oligonucleotide
ggggctcaggaatatccctcaaagagaaacaagaggactatttggagctatagcaggctt

SEQ ID NO: 88181 - DNA, 60 bp, Artificial
  Synthetic oligonucleotide
gccccaaatacgtgaagtcagatagattagtccttgcaacggggctcaggaatatccctc

SEQ ID NO: 88182 - DNA, 60 bp, Artificial
  Synthetic oligonucleotide
gaaaattcaaatcatccccaggagttcttggtctaatcatgatgcatcatcaggagtgag

SEQ ID NO: 88183 - DNA, 52 bp, Artificial
  Synthetic oligonucleotide
gatgaattcctcaatgtgccggaatggtcttacatagtggagaaggacaacc

SEQ ID NO: 88184 - DNA, 60 bp, Artificial
  Synthetic oligonucleotide
gagatcggtcccagaaatagctaccaggcccaaagtaaacgggcaaagtggaagaatgga

SEQ ID NO: 88185 - DNA, 60 bp, Artificial
  Synthetic oligonucleotide
catccccaggagttcttggtctaatcatgatgcatcatcaggagtgagctccgcatgtcc

SEQ ID NO: 88186 - DNA, 60 bp, Artificial
  Synthetic oligonucleotide
gaagaatggagttcttctggacaatcttaaagccaaatgatgccatcaatttcgagagta

SEQ ID NO: 88187 - DNA, 60 bp, Artificial
  Synthetic oligonucleotide
cggtcccagaaatagctaccaggcccaaagtaaacgggcaaagtggaagaatggagttct

SEQ ID NO: 88188 - DNA, 60 bp, Artificial
  Synthetic oligonucleotide
attggggaatgccccaaatacgtgaagtcagatagattagtccttgcaacggggctcagg

SEQ ID NO: 88189 - DNA, 60 bp, Artificial
  Synthetic oligonucleotide
ttcgaccttggagggctatatgaagcaatcgaggagtgcctgattaatgatccctgggtt

SEQ ID NO: 88190 - DNA, 60 bp, Artificial
  Synthetic oligonucleotide
ccttggagggctatatgaagcaatcgaggagtgcctgattaatgatccctgggttttgct

SEQ ID NO: 88191 - DNA, 60 bp, Artificial
  Synthetic oligonucleotide
ggtaagaggcaattctccagtgttcaattacaacaaggcaaccaagaggcttacagtcct

SEQ ID NO: 88192 - DNA, 51 bp, Artificial
  Synthetic oligonucleotide
gaattgcagtgacactataataacatacaataacactgtgataaacaacat

SEQ ID NO: 88193 - DNA, 51 bp, Artificial
  Synthetic oligonucleotide
aaactgcagtgacactataataacatacaataatactgtgataaacaacat

SEQ ID NO: 88194 - DNA, 60 bp, Artificial
  Synthetic oligonucleotide
tggaaactgggtatgtatgcagtaaattccattcggacacacccaggcctagtgatccct

SEQ ID NO: 88195 - DNA, 60 bp, Artificial
  Synthetic oligonucleotide
agtgatccctctacaatttcatgtagctctccgagtggaattgatgggaggagaggagtt

SEQ ID NO: 88196 - DNA, 53 bp, Artificial
  Synthetic oligonucleotide
tactgcgtttgcagagacaactggaaaggatcaaacaggccatgggttcgcat

SEQ ID NO: 88197 - DNA, 60 bp, Artificial
  Synthetic oligonucleotide
aacctgtgctgtggcagtaacagatggaccagcggacaataaggctgaccacagaatata

SEQ ID NO: 88198 - DNA, 60 bp, Artificial
  Synthetic oligonucleotide
acaatttcatgtagctctccgagtggaattgatgggaggagaggagttaaaggattcggg

SEQ ID NO: 88199 - DNA, 60 bp, Artificial
  Synthetic oligonucleotide
gtcttggtgacaagagaaccctacatcagctgtgacaatgaaggctgttggtcctttgca

SEQ ID NO: 88200 - DNA, 51 bp, Artificial
  Synthetic oligonucleotide
aaatgttgttcttcgggatccggaaaaacatttcaggcttccattgccctt

SEQ ID NO: 88201 - DNA, 60 bp, Artificial
  Synthetic oligonucleotide
ctgcacagataatatatgcagggaagatgcgagattctataaagtcatggcggaaaaaca

SEQ ID NO: 88202 - DNA, 60 bp, Artificial
  Synthetic oligonucleotide
gaaccctacatcagctgtgacaatgaaggctgttggtcctttgcactagctcaaggcgca

SEQ ID NO: 88203 - DNA, 61 bp, Artificial
  Synthetic oligonucleotide
caaatatattcaatatggagagaataaaagaacttagagatttgatgtcgcagtctcgcac

SEQ ID NO: 88204 - DNA, 60 bp, Artificial
  Synthetic oligonucleotide
tgacagtattggctcatggtctcaaaacatcctcagaactcaggagtcagaatgcgtctg

SEQ ID NO: 88205 - DNA, 60 bp, Artificial
  Synthetic oligonucleotide
ttatccgggcgctactgtgaatgaggaagcattaaggcagaaaatcatggaaagtggagg

SEQ ID NO: 88206 - DNA, 60 bp, Artificial
  Synthetic oligonucleotide
gggaaagggtgttttgaaatatatcacaaatgcgacgacagctgcatggaaagcatcaga

SEQ ID NO: 88207 - DNA, 60 bp, Artificial
  Synthetic oligonucleotide
gaagggatggtagatggttggtatggcttcagacaccagaatgcccaaggaaccggccag

SEQ ID NO: 88208 - DNA, 60 bp, Artificial
  Synthetic oligonucleotide
ctatgaaaggctttcatggcaaagagctcttgattatcctggtcaagatcgcctacacag

SEQ ID NO: 88209 - DNA, 60 bp, Artificial
  Synthetic oligonucleotide
gaaaggctttcatggcaaagagctcttgattatcctggtcaagatcgcctacacaggcta

SEQ ID NO: 88210 - DNA, 60 bp, Artificial
  Synthetic oligonucleotide
caacaagagtgagcctgagagtaaaaggatgtctcttaaagagagaaaagcaattggggt

SEQ ID NO: 88211 - DNA, 60 bp, Artificial
  Synthetic oligonucleotide
ataaaggatgaagtaaacactcagagagagggaaagttctgtttgacaataaaaagggat

SEQ ID NO: 88212 - DNA, 60 bp, Artificial
  Synthetic oligonucleotide
gcaatgtaatgtccttaagagtgttggtgaacggaaccttcctcaagtaccctaatggag

SEQ ID NO: 88213 - DNA, 60 bp, Artificial
  Synthetic oligonucleotide
ccctcatgaccacaacacaaattgaggtgggtccgggagcaaccaatgccaccataaact

SEQ ID NO: 88214 - DNA, 60 bp, Artificial
  Synthetic oligonucleotide
gagaaccttatgtgtcatgcggtcctggtaaatgttatcaatttgcactcgggcagggga

SEQ ID NO: 88215 - DNA, 60 bp, Artificial
  Synthetic oligonucleotide
tcaaatggcacgatacatgatagaatccctcatcggaccctcttgatgaacgaattgggt

SEQ ID NO: 88216 - DNA, 60 bp, Artificial
  Synthetic oligonucleotide
gggctttctgctgaagagataataaaaatgggtgaaacagttttggaggtagaagaactg

SEQ ID NO: 88217 - DNA, 60 bp, Artificial
  Synthetic oligonucleotide
gaccacatagtgattgaggggctttctgctgaagagataataaaaatgggtgaaacagtt

SEQ ID NO: 88218 - DNA, 60 bp, Artificial
  Synthetic oligonucleotide
gaccacatagtaattgaggggctttctgctgaagagataataaaaatgggtgaaacagtt

SEQ ID NO: 88219 - DNA, 60 bp, Artificial
  Synthetic oligonucleotide
gaccacatagtgattgaggggctttctgctgaagagataataaaaatgggtgaaacagtc

SEQ ID NO: 88220 - DNA, 60 bp, Artificial
  Synthetic oligonucleotide
ctgtggattagacaatgaacctggatcgggaaattggccggatggttctaagattgggtt

SEQ ID NO: 88221 - DNA, 60 bp, Artificial
  Synthetic oligonucleotide
atgcaagtaaaactaggaacgctctgtgctttgtgcgagaaacaagcatcacattcacac

SEQ ID NO: 88222 - DNA, 60 bp, Artificial
  Synthetic oligonucleotide
caatgccactataaactttgaagcaggaattctggagtgctatgaaaggctttcatggca

SEQ ID NO: 88223 - DNA, 55 bp, Artificial
  Synthetic oligonucleotide
caatgccactataaactttgaagcaggaattctggagtgctatgaaaggctttca

SEQ ID NO: 88224 - DNA, 60 bp, Artificial
  Synthetic oligonucleotide
gaaggaattgcaaaggatgtaatggaagtgctaaagcagagctccatgggaaattcagct

SEQ ID NO: 88225 - DNA, 56 bp, Artificial
  Synthetic oligonucleotide
gaaggaattgcaaaggatgtaatggaagtgctaaagcagagctccatgggaaattc

SEQ ID NO: 88226 - DNA, 60 bp, Artificial
  Synthetic oligonucleotide
cttacagtggaggatgaagaagatggccatcggatcctcaactcactcttcgagcgtctt

SEQ ID NO: 88227 - DNA, 60 bp, Artificial
  Synthetic oligonucleotide
tgctactgatgatcttacagtggaggatgaagaagatggccatcggatcctcaactcact

SEQ ID NO: 88228 - DNA, 60 bp, Artificial
  Synthetic oligonucleotide
gatatgacagtggaggatgaagaagatggccatcggatcctcaactcactcttcgagcgt

SEQ ID NO: 88229 - DNA, 60 bp, Artificial
  Synthetic oligonucleotide
ctactgatgatcttacagtggaggatgaagaagatggccatcggatcctcaactcactct

SEQ ID NO: 88230 - DNA, 60 bp, Artificial
  Synthetic oligonucleotide
ctgacagtggaggatgaagaagatggccatcggatcctcaactcactcttcgagcgtctt

SEQ ID NO: 88231 - DNA, 60 bp, Artificial
  Synthetic oligonucleotide
gatcttacagtggaggatgaagaagatggccatcggatcctcaactcactcttcgagcgt

SEQ ID NO: 88232 - DNA, 60 bp, Artificial
  Synthetic oligonucleotide
cgggagcaaccaatgccaccataaactttgaagcaggaattctggagtgctatgaaaggc

SEQ ID NO: 88233 - DNA, 60 bp, Artificial
  Synthetic oligonucleotide
caatgccaccataaactttgaagcaggaattctggagtgctatgaaaggctttcatggca

SEQ ID NO: 88234 - DNA, 55 bp, Artificial
  Synthetic oligonucleotide
caatgccaccataaactttgaagcaggaattctggagtgctatgaaaggctttca

SEQ ID NO: 88235 - DNA, 60 bp, Artificial
  Synthetic oligonucleotide
cccaggaatctttgaaaactcgtgtcttgaaacgatggaagttgtccaacaaacaagggt

SEQ ID NO: 88236 - DNA, 60 bp, Artificial
  Synthetic oligonucleotide
ccaggaatctttgaaaactcgtgtcttgaaacgatggaggttgttcagcagacaagggtg

SEQ ID NO: 88237 - DNA, 60 bp, Artificial
  Synthetic oligonucleotide
tcacgattctgtttctgctcatagcagagggctcctctcagaattacacagggaatcctg

SEQ ID NO: 88238 - DNA, 60 bp, Artificial
  Synthetic oligonucleotide
acatactgctctttgaatgggatcagcccaattcatcttggtgactgcagctttgaggga

SEQ ID NO: 88239 - DNA, 60 bp, Artificial
  Synthetic oligonucleotide
gcatcttggttcaactccttccttacacatgcactgaaatagttgtggcaatgctactat

SEQ ID NO: 88240 - DNA, 60 bp, Artificial
  Synthetic oligonucleotide
ctgaaccctggaaattattcaatgcaagtaaaactaggaacgctctgtgctttatgcgag

SEQ ID NO: 88241 - DNA, 60 bp, Artificial
  Synthetic oligonucleotide
cagttctcctccctgactgtaaatgtgagaggatcaggaatgaggatactggtaagaggc

SEQ ID NO: 88242 - DNA, 60 bp, Artificial
  Synthetic oligonucleotide
atggaagttgtattcccaaatgaagtgggagctagaatactaacatcagagtcacaactg

SEQ ID NO: 88243 - DNA, 60 bp, Artificial
  Synthetic oligonucleotide
tggaagttctacatatcaaaacaattttgttccagttgttggagcaagaccacaggtcaa

SEQ ID NO: 88244 - DNA, 60 bp, Artificial
  Synthetic oligonucleotide
tcaaaacaattttgttccagttgttggagcaagaccacaggtcaatggacagagtgggcg

SEQ ID NO: 88245 - DNA, 60 bp, Artificial
  Synthetic oligonucleotide
aataatggaaagtgggggaatcagtaaaataagcaccggctttacttatgggtcttccat

SEQ ID NO: 88246 - DNA, 60 bp, Artificial
  Synthetic oligonucleotide
gggaatcagtaaaataagcaccggctttacttatgggtcttccattaactcggccggaac

SEQ ID NO: 88247 - DNA, 51 bp, Artificial
  Synthetic oligonucleotide
ggtcttccattaactcggccggaaccactaaggcatgcatgagaaatgggg

SEQ ID NO: 88248 - DNA, 60 bp, Artificial
  Synthetic oligonucleotide
ggtcttccattaactcggccggaaccactaaggcatgcatgagaaatgggggaaatagct

SEQ ID NO: 88249 - DNA, 60 bp, Artificial
  Synthetic oligonucleotide
agaataaggggcaaaatttccctcagaccacaaacacctataggaacacagatacggaag

SEQ ID NO: 88250 - DNA, 60 bp, Artificial
  Synthetic oligonucleotide
gggcaaaatttccctcagaccacaaacacctataggaacacagatacggaagaacacctc

SEQ ID NO: 88251 - DNA, 60 bp, Artificial
  Synthetic oligonucleotide
gatacggaagaacacctcataatatggggaattcatcatccttccagtacacaggagaaa

SEQ ID NO: 88252 - DNA, 54 bp, Artificial
  Synthetic oligonucleotide
aagaacacctcataatatggggaattcatcatccttccagtacacaggagaaaa

SEQ ID NO: 88253 - DNA, 60 bp, Artificial
  Synthetic oligonucleotide
cagacaaaatgcagaagaggacaggaaaggatgttttgagatatatcatacttgtgatga

SEQ ID NO: 88254 - DNA, 60 bp, Artificial
  Synthetic oligonucleotide
ggcagactcggagatgctcaatctttatgagagagtgaggaaacaactcagacaaaatgc

SEQ ID NO: 88255 - DNA, 60 bp, Artificial
  Synthetic oligonucleotide
aattggcaacgtcattaattggaccaaagactcaataaccgacatttggacttatcaggc

SEQ ID NO: 88256 - DNA, 60 bp, Artificial
  Synthetic oligonucleotide
tcaatagagtctgagttcagtgagattgaacaccaaattggcaacgtcattaattggacc

SEQ ID NO: 88257 - DNA, 60 bp, Artificial
  Synthetic oligonucleotide
aacactgaatttgaatcaatagagtctgagttcagtgagattgaacaccaaattggcaac

SEQ ID NO: 88258 - DNA, 60 bp, Artificial
  Synthetic oligonucleotide
gggtacaggccaagccgctgattacaagagtactcaagcagctattgaccaaatcaccgg

SEQ ID NO: 88259 - DNA, 60 bp, Artificial
  Synthetic oligonucleotide
atggcagactcggagatgctcaatctttatgagagagtgaggaaacaactcagacaaaat

SEQ ID NO: 88260 - DNA, 60 bp, Artificial
  Synthetic oligonucleotide
caggcagagctattagtagcaatggaaaatcagcacacaattgacatggcagactcggag

SEQ ID NO: 88261 - DNA, 60 bp, Artificial
  Synthetic oligonucleotide
cttatcaggcagagctattagtagcaatggaaaatcagcacacaattgacatggcagact

SEQ ID NO: 88262 - DNA, 60 bp, Artificial
  Synthetic oligonucleotide
gcaacgtcattaattggaccaaagactcaataaccgacatttggacttatcaggcagagc

SEQ ID NO: 88263 - DNA, 60 bp, Artificial
  Synthetic oligonucleotide
ggtagacggttggtatggcttcagacaccaaaatgcccagggtacaggccaagccgctga

SEQ ID NO: 88264 - DNA, 60 bp, Artificial
  Synthetic oligonucleotide
tgggaagggatggtagacggttggtatggcttcagacaccaaaatgcccagggtacaggc

SEQ ID NO: 88265 - DNA, 60 bp, Artificial
  Synthetic oligonucleotide
gaggagtttgctgcttgcaacagggatgaggaatgtaccggaagtagtgcagggaagggg

SEQ ID NO: 88266 - DNA, 60 bp, Artificial
  Synthetic oligonucleotide
agaggagtttgctgcttgcaacagggatgaggaatgtaccggaagtagtgcagggaaggg

SEQ ID NO: 88267 - DNA, 53 bp, Artificial
  Synthetic oligonucleotide
ataaatacaaagcttcctttccaaaatctgtcacccaggacgataggccaatg

SEQ ID NO: 88268 - DNA, 60 bp, Artificial
  Synthetic oligonucleotide
catcaatagacagtaattgtgaatctaaatgtttttggagaggaggttctataaatacaa

SEQ ID NO: 88269 - DNA, 60 bp, Artificial
  Synthetic oligonucleotide
cgagttagcaaactgactggaaggggactgggaatccaatcagaggcatcaatagacagt

SEQ ID NO: 88270 - DNA, 60 bp, Artificial
  Synthetic oligonucleotide
gagtcgagttagcaaactgactggaaggggactgggaatccaatcagaggcatcaataga

SEQ ID NO: 88271 - DNA, 60 bp, Artificial
  Synthetic oligonucleotide
cgaccgggcgataacatcactttctcacacaatgggggtctaatagcaccgagtcgagtt

SEQ ID NO: 88272 - DNA, 60 bp, Artificial
  Synthetic oligonucleotide
cacaggtcaatggacagagtgggcggattgattttcactggacactggtgcgaccgggcg

SEQ ID NO: 88273 - DNA, 60 bp, Artificial
  Synthetic oligonucleotide
cagagaagaggcccttctgaacagactgaatatcaacccagtgaaactttcttcgggata

SEQ ID NO: 88274 - DNA, 60 bp, Artificial
  Synthetic oligonucleotide
ggggcatcatgctttgttcttttagccgttgtgatgggccttgttttcttctgtctgaaa

SEQ ID NO: 88275 - DNA, 60 bp, Artificial
  Synthetic oligonucleotide
agaggacaggaaaggatgttttgagatatatcatacttgtgatgattcatgcatggagag

SEQ ID NO: 88276 - DNA, 60 bp, Artificial
  Synthetic oligonucleotide
cttgtgatgattcatgcatggagagcataaggaacaacacctatgaccattcacaataca

SEQ ID NO: 88277 - DNA, 60 bp, Artificial
  Synthetic oligonucleotide
gcatggagagcataaggaacaacacctatgaccattcacaatacagagaagaggcccttc

SEQ ID NO: 88278 - DNA, 60 bp, Artificial
  Synthetic oligonucleotide
tcacaatacagagaagaggcccttctgaacagactgaatatcaacccagtgaaactttct

SEQ ID NO: 88279 - DNA, 60 bp, Artificial
  Synthetic oligonucleotide
tacaaagtagtagtaatgattgcgctccttggagcagtgagaggtcttgataaaatctgc

SEQ ID NO: 88280 - DNA, 60 bp, Artificial
  Synthetic oligonucleotide
tcacaatgtacaaagtagtagtaatgattgcgctccttggagcagtgagaggtcttgata

SEQ ID NO: 88281 - DNA, 60 bp, Artificial
  Synthetic oligonucleotide
ggagcgattgctggattcatagagaatggatgggaaggtctcattgacggatggtatggt

SEQ ID NO: 88282 - DNA, 60 bp, Artificial
  Synthetic oligonucleotide
tttgacactgacttgataatagaacgaagagaaggaaccgatgtgtgttaccccgggaag

SEQ ID NO: 88283 - DNA, 60 bp, Artificial
  Synthetic oligonucleotide
gacaatgaattcagtgaaatagaacaacaaattgggaatgtcattaactggacacgagac

SEQ ID NO: 88284 - DNA, 53 bp, Artificial
  Synthetic oligonucleotide
cggatggtatggtttcagacatcaaaatgcacaaggggaaggaactgcagctg

SEQ ID NO: 88285 - DNA, 56 bp, Artificial
  Synthetic oligonucleotide
acacattaacagagagaggaattgaagtagtaaatgccacggaaacagtggaaact

SEQ ID NO: 88286 - DNA, 60 bp, Artificial
  Synthetic oligonucleotide
ccccgggaagttcacaaatgaggaatcactgaggcagatccttcgaggatcaggaggaat

SEQ ID NO: 88287 - DNA, 60 bp, Artificial
  Synthetic oligonucleotide
cactgacttgataatagaacgaagagaaggaaccgatgtgtgttaccccgggaagttcac

SEQ ID NO: 88288 - DNA, 60 bp, Artificial
  Synthetic oligonucleotide
tgccctcgatatgtcaaacagacaagcctccttttggctacaggaatgagaaacgtccca

SEQ ID NO: 88289 - DNA, 60 bp, Artificial
  Synthetic oligonucleotide
cgctaggagtccagagtgatgttcctttggattctggttgtgagggggattgcttccaca

SEQ ID NO: 88290 - DNA, 60 bp, Artificial
  Synthetic oligonucleotide
gagatgaagtggttactgtcgaactcagacaatgcggcatttccccaaatgactaaatcg

SEQ ID NO: 88291 - DNA, 60 bp, Artificial
  Synthetic oligonucleotide
ggacacgagactcaatgactgaggtatggtcgtacaatgctgaattgctggtagcaatgg

SEQ ID NO: 88292 - DNA, 60 bp, Artificial
  Synthetic oligonucleotide
aatgtcattaactggacacgagactcaatgactgaggtatggtcgtacaatgctgaattg

SEQ ID NO: 88293 - DNA, 60 bp, Artificial
  Synthetic oligonucleotide
gggctacgagtgcctgcagaagatcaggttcttctttctatgcggagatgaagtggttac

SEQ ID NO: 88294 - DNA, 60 bp, Artificial
  Synthetic oligonucleotide
accaatggggctacgagtgcctgcagaagatcaggttcttctttctatgcggagatgaag

SEQ ID NO: 88295 - DNA, 60 bp, Artificial
  Synthetic oligonucleotide
gctgaattgctggtagcaatggaaaatcagcacacaatagatcttgcagactcagaaatg

SEQ ID NO: 88296 - DNA, 60 bp, Artificial
  Synthetic oligonucleotide
actcagaaatgaacaaactttacgagcgtgtcaggaaacaactaagggagaatgctgaag

SEQ ID NO: 88297 - DNA, 60 bp, Artificial
  Synthetic oligonucleotide
caaactttacgagcgtgtcaggaaacaactaagggagaatgctgaagaagatgggactgg

SEQ ID NO: 88298 - DNA, 60 bp, Artificial
  Synthetic oligonucleotide
aatgctgaagaagatgggactggatgctttgagatatttcacaagtgtgatgatcaatgt

SEQ ID NO: 88299 - DNA, 60 bp, Artificial
  Synthetic oligonucleotide
gggactggatgctttgagatatttcacaagtgtgatgatcaatgtatggagagcataagg

SEQ ID NO: 88300 - DNA, 56 bp, Artificial
  Synthetic oligonucleotide
acagaacagagtcactgcagaatagaatacagatagacccagtgagattgagtagt

SEQ ID NO: 88301 - DNA, 60 bp, Artificial
  Synthetic oligonucleotide
ggagtgcatcactctggatcggcgactgagcagaccaaactctatggaagtggaaacaag

SEQ ID NO: 88302 - DNA, 60 bp, Artificial
  Synthetic oligonucleotide
tgactaaatcgtatagaaatcccaggaacaaaccagctctgataatttggggagtgcatc

SEQ ID NO: 88303 - DNA, 60 bp, Artificial
  Synthetic oligonucleotide
gaaatcccaggaacaaaccagctctgataatttggggagtgcatcactctggatcggcga

SEQ ID NO: 88304 - DNA, 60 bp, Artificial
  Synthetic oligonucleotide
gattttcactggctactccttgatcctaatgacacagtgaccttcactttcaacggggca

SEQ ID NO: 88305 - DNA, 60 bp, Artificial
  Synthetic oligonucleotide
ctccttgatcctaatgacacagtgaccttcactttcaacggggcattcatagctcctgac

SEQ ID NO: 88306 - DNA, 60 bp, Artificial
  Synthetic oligonucleotide
ccccaagtccgggagcacggccacaggtgaatgggcaatcaggaagaattgattttcact

SEQ ID NO: 88307 - DNA, 60 bp, Artificial
  Synthetic oligonucleotide
cgggagcacggccacaggtgaatgggcaatcaggaagaattgattttcactggctactcc

SEQ ID NO: 88308 - DNA, 60 bp, Artificial
  Synthetic oligonucleotide
caacggggcattcatagctcctgacagggcaagtttctttagaggagagtcgctaggagt

SEQ ID NO: 88309 - DNA, 60 bp, Artificial
  Synthetic oligonucleotide
gcatcttggttcaactccttcctcatacatgcactgaaatagttgtggcaatgctactat

SEQ ID NO: 88310 - DNA, 60 bp, Artificial
  Synthetic oligonucleotide
atggaactgtatgtcaagtatgatggagacccatggactgacagtgacgcccttgctcct

SEQ ID NO: 88311 - DNA, 60 bp, Artificial
  Synthetic oligonucleotide
gatggaactgtatgtcaagtatgatggagacccatggactgacagtgacgcccttgcccc

SEQ ID NO: 88312 - DNA, 60 bp, Artificial
  Synthetic oligonucleotide
ggggatggaactgtatgtcaagtatgatggagacccatggactgacagtgacgcccttgc

SEQ ID NO: 88313 - DNA, 60 bp, Artificial
  Synthetic oligonucleotide
ggggatggaactgtatgtcaagtatgatggagacccatggactgacagtgacgcccttga

SEQ ID NO: 88314 - DNA, 60 bp, Artificial
  Synthetic oligonucleotide
gaactgtatgtcaagtatgatggagacccatggactgacagtgacgcccttgctcctagt

SEQ ID NO: 88315 - DNA, 59 bp, Artificial
  Synthetic oligonucleotide
aaaatgaacaatgctaccttcaactatacaaacgttaaccctatttctcacatcagggg

SEQ ID NO: 88316 - DNA, 60 bp, Artificial
  Synthetic oligonucleotide
atggacaatgctaccttcaactatacaaacgttaaccctatttctcacatcagggggagt

SEQ ID NO: 88317 - DNA, 60 bp, Artificial
  Synthetic oligonucleotide
caaaatgaacaatgctaccttcaactatacaaacgttaaccctatttctcacatcagggg

SEQ ID NO: 88318 - DNA, 56 bp, Artificial; identical to SEQ ID NO: 17651
  Synthetic oligonucleotide

SEQ ID NO: 88319 - DNA, 60 bp, Artificial
  Synthetic oligonucleotide
atgaacaatgctaccttcaactatacaaacgttaaccctatttctcacatcagggggagt

SEQ ID NO: 88320 - DNA, 60 bp, Artificial
  Synthetic oligonucleotide
acaatgctaccttcaactatacaaacgttaaccctatttctcacatcagggggagtatta

SEQ ID NO: 88321 - DNA, 56 bp, Artificial
  Synthetic oligonucleotide
atgaacaatgctaccttcaactatacaaacgttaaccctatttctcacatcagggg

SEQ ID NO: 88322 - DNA, 60 bp, Artificial
  Synthetic oligonucleotide
accctatttctcacatcagggggagtgttattatcactatatgtgtcagcttcactgtca

SEQ ID NO: 88323 - DNA, 52 bp, Artificial
  Synthetic oligonucleotide
acaatgctaccttcaactatacaaacgttaaccctatttctcacatcagggg

SEQ ID NO: 88324 - DNA, 60 bp, Artificial
  Synthetic oligonucleotide
cagggggagtgttattatcactatatgtgtcagcttcactgtcatacttactgtattcgg

SEQ ID NO: 88325 - DNA, 60 bp, Artificial
  Synthetic oligonucleotide
cagggggagtgttattatcactatatgtgtcagcttcactgtcatacttactatattcgg

SEQ ID NO: 88326 - DNA, 60 bp, Artificial
  Synthetic oligonucleotide
tatttctcacatcagggggagtgttattatcactatatgtgtcagcttcactgtcatact

SEQ ID NO: 88327 - DNA, 60 bp, Artificial
  Synthetic oligonucleotide
ttctcacatcagggggagtgttattatcactatatgtgtcagcttcactgtcatacttac

SEQ ID NO: 88328 - DNA, 58 bp, Artificial
  Synthetic oligonucleotide
ggggagtgttattatcactatatgtgtcagcttcactgtcatacttactgtattcgga

SEQ ID NO: 88329 - DNA, 60 bp, Artificial
  Synthetic oligonucleotide
tattgcttgtggaccaaaggaatgcaaacactttgctctaacccattatgcagctcaacc

SEQ ID NO: 88330 - DNA, 56 bp, Artificial
  Synthetic oligonucleotide
ggggagtgttattatcactatatgtgtcagcttcactgtcatacttactgtattcg

SEQ ID NO: 88331 - DNA, 58 bp, Artificial
  Synthetic oligonucleotide
ggggagtgttattatcactatatgtgtcagcttcactgtcatacttactatattcgga

SEQ ID NO: 88332 - DNA, 60 bp, Artificial
  Synthetic oligonucleotide
tgcttgtggaccaaaggaatgcaaacactttgctctaacccattatgcagctcaaccagg

SEQ ID NO: 88333 - DNA, 60 bp, Artificial
  Synthetic oligonucleotide
cttgtggaccaaaggaatgcaaacactttgctctaacccattatgcagctcaaccagggg

SEQ ID NO: 88334 - DNA, 60 bp, Artificial
  Synthetic oligonucleotide
tcatgccaaatcaattacacaaacactggtgtccaacaatgattggtcaggctattcagg

SEQ ID NO: 88335 - DNA, 60 bp, Artificial
  Synthetic oligonucleotide
gcaagtcaaaagaatggggaaggaattgcaaaggatgtaatggaagtgctaaagcagagc

SEQ ID NO: 88336 - DNA, 60 bp, Artificial
  Synthetic oligonucleotide
cagtattggttcatggtctcaaaatatcctcagaactcaggagtcagagtgtgtttgcat

SEQ ID NO: 88337 - DNA, 60 bp, Artificial
  Synthetic oligonucleotide
gtattggttcatggtctcaaaatatcctcagaactcaggagtcagagtgtgtttgcatca

SEQ ID NO: 88338 - DNA, 60 bp, Artificial
  Synthetic oligonucleotide
taatcactcaccgagtgacatccatatcatggcgtctcaaggcaccaaacgatcttatga

SEQ ID NO: 88339 - DNA, 60 bp, Artificial
  Synthetic oligonucleotide
cccaggggacatgctgggagcagatgtacactccaggaggggaggtgagaaatgatgatg

SEQ ID NO: 88340 - DNA, 60 bp, Artificial
  Synthetic oligonucleotide
tgatagaaatgcaactgctagtttcatttatgacgggaggcttgttgacagtattggttc

SEQ ID NO: 88341 - DNA, 60 bp, Artificial
  Synthetic oligonucleotide
tgaaaggctttcatggcaaagagcccttgactaccctggtcaagaccgcctaaacagact

SEQ ID NO: 88342 - DNA, 60 bp, Artificial
  Synthetic oligonucleotide
gaaaggctttcatggcaaagagcccttgactaccctggtcaagaccgcctaaacagacta

SEQ ID NO: 88343 - DNA, 56 bp, Artificial
  Synthetic oligonucleotide
ctctaacccattatgcagctcaaccagggggatactacaatggaacaagaaaggac

SEQ ID NO: 88344 - DNA, 60 bp, Artificial
  Synthetic oligonucleotide
ggatgtgcaacatcctcaaggggaaattccaaacagcagcacaacgagcaatgatggacc

SEQ ID NO: 88345 - DNA, 60 bp, Artificial
  Synthetic oligonucleotide
cacaaatgcaaccagacttgcctagacaggatagctgctggcacctttaatgcaggagat

SEQ ID NO: 88346 - DNA, 60 bp, Artificial
  Synthetic oligonucleotide
agcggcagaattgttgttgattacatggtgcaaaaacctggaaaaacaggaacaattgtc

SEQ ID NO: 88347 - DNA, 60 bp, Artificial
  Synthetic oligonucleotide
cacaagtgcaaccagacctgcctagacaggatagctgctggcacctttaatgcaggagaa

SEQ ID NO: 88348 - DNA, 60 bp, Artificial
  Synthetic oligonucleotide
cacaagtgcaaccagacttgcctagacaggatagctgctggcacctttaatgcaggagaa

SEQ ID NO: 88349 - DNA, 60 bp, Artificial
  Synthetic oligonucleotide
acaagtgcaaccagacctgcctcgacagaatagctgctggcacctttaatgcaggagaat

SEQ ID NO: 88350 - DNA, 60 bp, Artificial
  Synthetic oligonucleotide
cctgcttagacaggatagctgctggcacctttaatgcaggagaattttctcttcccacct

SEQ ID NO: 88351 - DNA, 60 bp, Artificial
  Synthetic oligonucleotide
ctttaaatgatgatggattggataatcatactatactgctctactactcaactgctgctt

SEQ ID NO: 88352 - DNA, 60 bp, Artificial
  Synthetic oligonucleotide
gacctgcttagacaggatagctgctggcacctttaatgcaggagaattttctcttcccac

SEQ ID NO: 88353 - DNA, 60 bp, Artificial
  Synthetic oligonucleotide
gacttgcctagacaggatagctgctggcacctttaatgcaggagaattttctcttcccac

SEQ ID NO: 88354 - DNA, 60 bp, Artificial
  Synthetic oligonucleotide
aagtgcaaccaaacctgcttagacaggatagctgctggcacctttaatgcaggagaattt

SEQ ID NO: 88355 - DNA, 60 bp, Artificial
  Synthetic oligonucleotide
cacaaatgcaaccagacttgcctagacaggatagctgctggcacctttaatgcaggagaa

SEQ ID NO: 88356 - DNA, 60 bp, Artificial
  Synthetic oligonucleotide
ctttaaatgatgatggattggataatcatactatactgctctactactcaactgcggctt

SEQ ID NO: 88357 - DNA, 60 bp, Artificial
  Synthetic oligonucleotide
cacaagtgcaaccagacctgcctcgacagaatagctgctggcacctttaatgcaggagaa

SEQ ID NO: 88358 - DNA, 60 bp, Artificial
  Synthetic oligonucleotide
cacaagtgcaaccagacctgcctagacagaatagctgctggcacctttaatgcaggagaa

SEQ ID NO: 88359 - DNA, 60 bp, Artificial
  Synthetic oligonucleotide
ccgaatattggatccaggccttgggtcagaggccaatcaggaagaataagcatctattgg

SEQ ID NO: 88360 - DNA, 60 bp, Artificial
  Synthetic oligonucleotide
gcttcaaaatatatcacaaatgtgacaacgcatgcatagagtcaatcaggaacgggacct

SEQ ID NO: 88361 - DNA, 60 bp, Artificial
  Synthetic oligonucleotide
aatggttgcttcaaaatatatcacaaatgtgacaacgcatgcatagagtcaatcaggaac

SEQ ID NO: 88362 - DNA, 60 bp, Artificial
  Synthetic oligonucleotide
gaaggaattctctgaagtagaaggaagaattcaggaccttgagaaatatgtcgaggacac

SEQ ID NO: 88363 - DNA, 60 bp, Artificial
  Synthetic oligonucleotide
gagaaggaattctctgaagtagaaggaagaattcaggaccttgagaaatatgtcgaggac

SEQ ID NO: 88364 - DNA, 60 bp, Artificial
  Synthetic oligonucleotide
ccgagtaatcgagaagacaaatgagaagtttcaccagattgagaaggaattctctgaagt

SEQ ID NO: 88365 - DNA, 60 bp, Artificial
  Synthetic oligonucleotide
ggaagttaaaccgagtaatcgagaagacaaatgagaagtttcaccagattgagaaggaat

SEQ ID NO: 88366 - DNA, 60 bp, Artificial
  Synthetic oligonucleotide
ataattctgttaatcatgaagaccatcatcattctaagctacttattctgtctggctttc

SEQ ID NO: 88367 - DNA, 60 bp, Artificial
  Synthetic oligonucleotide
catgaagaccatcatcattctaagctacttattctgtctggctttcagccaagaccactc

SEQ ID NO: 88368 - DNA, 60 bp, Artificial
  Synthetic oligonucleotide
cgtgactatgccaaatgatgacaactttgacaaattgtatgtctggggagttcatcaccc

SEQ ID NO: 88369 - DNA, 60 bp, Artificial
  Synthetic oligonucleotide
tattcgaaaagactaggagacaactgagggagaatgctgaagacatgggtaatggttgct

SEQ ID NO: 88370 - DNA, 60 bp, Artificial
  Synthetic oligonucleotide
ccataatcccgaatattggatccaggccttgggtcagaggccaatcaggaagaataagca

SEQ ID NO: 88371 - DNA, 60 bp, Artificial
  Synthetic oligonucleotide
cctaatggaagcattcccaatgacaagccctttcagaatgtaaacaagatcacttacgga

SEQ ID NO: 88372 - DNA, 60 bp, Artificial
  Synthetic oligonucleotide
cccaagcacaaaccaagagcaaaccgatctatacgttcaggcatcagggagggtaacagt

SEQ ID NO: 88373 - DNA, 60 bp, Artificial
  Synthetic oligonucleotide
acggatgatcaaattgaagtgactaatgccactgaactggtccagagctcctcaacaggg

SEQ ID NO: 88374 - DNA, 60 bp, Artificial
  Synthetic oligonucleotide
cggatgatcaaattgaagtgactaatgccactgaactggtccagagctcctcaacaggga

SEQ ID NO: 88375 - DNA, 56 bp, Artificial
  Synthetic oligonucleotide
ctcaacagggaaaatatgcaacaaccctcacagaatccttgatggaagagattgca

SEQ ID NO: 88376 - DNA, 60 bp, Artificial
  Synthetic oligonucleotide
tctggctttcagccaagaccactcagaaagtaacaacagcactgcaacactgtgcttggg

SEQ ID NO: 88377 - DNA, 60 bp, Artificial
  Synthetic oligonucleotide
gccaagaccactcagaaagtaacaacagcactgcaacactgtgcttgggacatcacgcag

SEQ ID NO: 88378 - DNA, 60 bp, Artificial
  Synthetic oligonucleotide
tgtgcttgggacatcacgcagtaccaaatgggacaatagtgaagacgataacggatgatc

SEQ ID NO: 88379 - DNA, 60 bp, Artificial
  Synthetic oligonucleotide
gtgcttgggacatcacgcagtaccaaatgggacaatagtgaagacgataacggatgatca

SEQ ID NO: 88380 - DNA, 60 bp, Artificial
  Synthetic oligonucleotide
tccgaatgtattactcctaatggaagcattcccaatgacaagccctttcagaatgtaaac

SEQ ID NO: 88381 - DNA, 60 bp, Artificial
  Synthetic oligonucleotide
taacagtaatggtaacctaatcgctcctcgagggtacttcaagatgcggactgggaaaag

SEQ ID NO: 88382 - DNA, 60 bp, Artificial
  Synthetic oligonucleotide
cagtaatggtaacctaatcgctcctcgagggtacttcaagatgcggactgggaaaagctc

SEQ ID NO: 88383 - DNA, 60 bp, Artificial
  Synthetic oligonucleotide
tgaaattggcaacaggaatgcggaatgtgcctgagaaacagaccaggggtctctttggtg

SEQ ID NO: 88384 - DNA, 60 bp, Artificial
  Synthetic oligonucleotide
aacaggaatgcggaatgtgcctgagaaacagaccaggggtctctttggtgcaatagcggg

SEQ ID NO: 88385 - DNA, 60 bp, Artificial
  Synthetic oligonucleotide
gtactgaacgtgactatgccaaatgatgacaactttgacaaattgtatgtctggggagtt

SEQ ID NO: 88386 - DNA, 55 bp, Artificial
  Synthetic oligonucleotide
gaatgtaaacaagatcacttacggagcatgccctaagtatgtcaaacagagcact

SEQ ID NO: 88387 - DNA, 60 bp, Artificial
  Synthetic oligonucleotide
acaatcgatttcaaatcaaaggcgtggagctaaaatctggatacaaagattggatcttat

SEQ ID NO: 88388 - DNA, 60 bp, Artificial
  Synthetic oligonucleotide
cgaaaagactaggagacaactgagggagaatgctgaagacatgggtaatggttgcttcaa

SEQ ID NO: 88389 - DNA, 60 bp, Artificial
  Synthetic oligonucleotide
gcaggtgcgagatgaatccaaatcagaagataataacaattggtgtagtgaacactactc

SEQ ID NO: 88390 - DNA, 60 bp, Artificial
  Synthetic oligonucleotide
gcaggtgcgagatgaatccaaatcagaagataataacaatcggggtagtgaacactactc

SEQ ID NO: 88391 - DNA, 60 bp, Artificial
  Synthetic oligonucleotide
cctgccctcaggatgaaatggatgatggcaatgaaatacccaataacggcagacaagagg

SEQ ID NO: 88392 - DNA, 60 bp, Artificial
  Synthetic oligonucleotide
gaaccctgccctcaggatgaaatggatgatggcaatgaaatacccaataacggcagacaa

SEQ ID NO: 88393 - DNA, 60 bp, Artificial
  Synthetic oligonucleotide
taagagtgaatgaggggtatgaagaattcacaatggttgggagaagagcaacagctattc

SEQ ID NO: 88394 - DNA, 54 bp, Artificial
  Synthetic oligonucleotide
atgaatccgaatcagaagataataacaatcggggtagtgaataccactctgtca

SEQ ID NO: 88395 - DNA, 60 bp, Artificial
  Synthetic oligonucleotide
atgaatccaaatcagaagataataacaatcggggtagtgaacaccactctgtcaacaata

SEQ ID NO: 88396 - DNA, 60 bp, Artificial
  Synthetic oligonucleotide
gccacctttctccgctctaatgccccttcaggaattgagtacaatgggaagtcactggga

SEQ ID NO: 88397 - DNA, 60 bp, Artificial
  Synthetic oligonucleotide
gctgatctgataatagaaagaagaaattcaagtgacatctgttacccaggaagattcact

SEQ ID NO: 88398 - DNA, 60 bp, Artificial
  Synthetic oligonucleotide
ctgttacccaggaagattcactaatgaggaagcactgagacaaataatcagagaatctgg

SEQ ID NO: 88399 - DNA, 60 bp, Artificial
  Synthetic oligonucleotide
taaagtgtgcacaaaagggaagaaagcggtggacctggggtcttgtggaatactgggaac

SEQ ID NO: 88400 - DNA, 60 bp, Artificial
  Synthetic oligonucleotide
cttgaattcaaagctgatctgataatagaaagaagaaattcaagtgacatctgttaccca

SEQ ID NO: 88401 - DNA, 60 bp, Artificial
  Synthetic oligonucleotide
cactaactgagagaggagtggaagtggtcaatgccacggagacagtggagattaccggaa

SEQ ID NO: 88402 - DNA, 60 bp, Artificial
  Synthetic oligonucleotide
gattaccggaatagataaagtgtgcacaaaagggaagaaagcggtggacctggggtcttg

SEQ ID NO: 88403 - DNA, 60 bp, Artificial
  Synthetic oligonucleotide
cgggcaccatgccgtagcaaatgggacaaaagtcaacacactaactgagagaggagtgga

SEQ ID NO: 88404 - DNA, 60 bp, Artificial
  Synthetic oligonucleotide
acactaactgagagaggagtggaagtggtcaatgccacggagacagtggagattaccgga

SEQ ID NO: 88405 - DNA, 60 bp, Artificial
  Synthetic oligonucleotide
aatacgtactaggggactgttcggtgcaattgcaggattcatcgaaaatggatgggaagg

SEQ ID NO: 88406 - DNA, 60 bp, Artificial
  Synthetic oligonucleotide
cgtactaggggactgttcggtgcaattgcaggattcatcgaaaatggatgggaagggctc

SEQ ID NO: 88407 - DNA, 60 bp, Artificial
  Synthetic oligonucleotide
cttacaatcacactgaatatcgacaggaagccttacaaaataggataatgatcaatccgg

SEQ ID NO: 88408 - DNA, 60 bp, Artificial
  Synthetic oligonucleotide
cattctagtcctcggactgtcaatggtgaaatctgacaagatttgtctcgggcaccatgc

SEQ ID NO: 88409 - DNA, 60 bp, Artificial
  Synthetic oligonucleotide
ttacccaggaagattcactaatgaggaagcactgagacaaataatcagagaatctggagg

SEQ ID NO: 88410 - DNA, 60 bp, Artificial
  Synthetic oligonucleotide
gggctttagatattcaggaataagaacagacggggcaaccagtgcgtgtaagagaacagt

SEQ ID NO: 88411 - DNA, 60 bp, Artificial
  Synthetic oligonucleotide
cactcaaatcattgtcattctagtcctcggactgtcaatggtgaaatctgacaagatttg

SEQ ID NO: 88412 - DNA, 60 bp, Artificial
  Synthetic oligonucleotide
gatagtagggctgtcggaaagtgccccagatatgtgaagcaatcaagcttgccgctggcc

SEQ ID NO: 88413 - DNA, 60 bp, Artificial
  Synthetic oligonucleotide
ataacagtaggaagctcaaagtaccaacaatcgttttcaccaagtccaggggccaggccc

SEQ ID NO: 88414 - DNA, 60 bp, Artificial
  Synthetic oligonucleotide
caggaacaccagaaaagaaccagccctaattgtctggggagtacatcattcaagttcctt

SEQ ID NO: 88415 - DNA, 60 bp, Artificial
  Synthetic oligonucleotide
agatattcaggaataagaacagacggggcaaccagtgcgtgtaagagaacagtgtcctct

SEQ ID NO: 88416 - DNA, 60 bp, Artificial
  Synthetic oligonucleotide
ccagaaaagaaccagccctaattgtctggggagtacatcattcaagttccttggatgagc

SEQ ID NO: 88417 - DNA, 60 bp, Artificial
  Synthetic oligonucleotide
catttcaaaacatcgatagtagggctgtcggaaagtgccccagatatgtgaagcaatcaa

SEQ ID NO: 88418 - DNA, 60 bp, Artificial
  Synthetic oligonucleotide
atgtgaaggggaatgcttctacagtggagggacaataaacagccctttaccatttcaaaa

SEQ ID NO: 88419 - DNA, 60 bp, Artificial
  Synthetic oligonucleotide
catgaagcatttgaaatagcagaaggccatgaaagctcagcattactatattgtctcatg

SEQ ID NO: 88420 - DNA, 60 bp, Artificial
  Synthetic oligonucleotide
gaagcatttgaaatagcagaaggccatgaaagctcagcgctactatattgtctcatggtc

SEQ ID NO: 88421 - DNA, 60 bp, Artificial
  Synthetic oligonucleotide
gaagcatttgaaatagcagaaggccatgaaagctcagcgctactatactgtctcatggtc

SEQ ID NO: 88422 - DNA, 60 bp, Artificial
  Synthetic oligonucleotide
catgaagcatttgaaatagcagaaggccatgaaagctcagcattactgtattgtctcatg

SEQ ID NO: 88423 - DNA, 60 bp, Artificial
  Synthetic oligonucleotide
catgaagcatttgaaatagcagaaggccatgaaagctcagcactactatattgtctcatg

SEQ ID NO: 88424 - DNA, 60 bp, Artificial
  Synthetic oligonucleotide
catgaagcatttgaaatagcagaaggccatgaaagctcagcgctactatattgtctcatg

SEQ ID NO: 88425 - DNA, 60 bp, Artificial
  Synthetic oligonucleotide
gtagtgtagctggatggctcctcggaaaccccatgtgtgatgaattcctcaatgtgccgg

SEQ ID NO: 88426 - DNA, 60 bp, Artificial
  Synthetic oligonucleotide
gtagtgtagctggatggctcctcggaaaccctatgtgtgacgaattccttaatgtgccag

SEQ ID NO: 88427 - DNA, 60 bp, Artificial
  Synthetic oligonucleotide
tgggtgcaataaactccagcatgccatttcacaacatacatcctctcaccattggggaat

SEQ ID NO: 88428 - DNA, 60 bp, Artificial
  Synthetic oligonucleotide
ggcaatggttgtttcgagttctatcacaaatgtgacgatgaatgtatggaaagtgtaaga

SEQ ID NO: 88429 - DNA, 60 bp, Artificial
  Synthetic oligonucleotide
aactaaacagggaagaaataagtggagtcaaattggaatcaatgggaacttaccaaatac

SEQ ID NO: 88430 - DNA, 60 bp, Artificial
  Synthetic oligonucleotide
cagggaagaaataagtggagtcaaattggaatcaatgggaacttaccaaatactgtcaat

SEQ ID NO: 88431 - DNA, 60 bp, Artificial
  Synthetic oligonucleotide
gccatggaacgggaacaggatacaccatggacacagtcaacagaacacatcaatactcag

SEQ ID NO: 88432 - DNA, 60 bp, Artificial
  Synthetic oligonucleotide
agccatggaacgggaacaggatacaccatggacacagtcaacagaacacatcaatactca

SEQ ID NO: 88433 - DNA, 60 bp, Artificial
  Synthetic oligonucleotide
cacttcaggcacttatggaacaggctcatggcctgatggggcgaatatcaatttcatgcc

SEQ ID NO: 88434 - DNA, 56 bp, Artificial
  Synthetic oligonucleotide
ggggctatatgaagcaattgaggagtgcctgattaatgatccctgggttttgctta

SEQ ID NO: 88435 - DNA, 60 bp, Artificial
  Synthetic oligonucleotide
tatgcaagccttacaactactacttgaagtggagcaagagataagaactttctcgtttca

SEQ ID NO: 88436 - DNA, 60 bp, Artificial
  Synthetic oligonucleotide
tggcagtagaccatgggtgagaggccaaagcggcaggatcagtttctattggacaattgt

SEQ ID NO: 88437 - DNA, 60 bp, Artificial
  Synthetic oligonucleotide
tggtcctttgccctcgcacaaggagcattgttagggactaaacatagcaatggaaccatt

SEQ ID NO: 88438 - DNA, 60 bp, Artificial
  Synthetic oligonucleotide
ggtcctttgccctcgcacaaggagcattgttagggactaaacatagcaatggaaccatta

SEQ ID NO: 88439 - DNA, 60 bp, Artificial
  Synthetic oligonucleotide
cttcctttgacatgagcaatgaaggatcttatttcttcggagacaatgcagaggaatatg

SEQ ID NO: 88440 - DNA, 60 bp, Artificial
  Synthetic oligonucleotide
ccctgggttttgcttaatgcatcttggttcaacttcttcctcacacatgcactgaaatag

SEQ ID NO: 88441 - DNA, 60 bp, Artificial
  Synthetic oligonucleotide
gtagataatcactcaccgagtgacatccacatcatggcgtctcaaggcaccaaacggtct

SEQ ID NO: 88442 - DNA, 60 bp, Artificial
  Synthetic oligonucleotide
ttctaggatttgtattcacgctcaccgtgcccagtgagcgaggactgcagcgtagacgct

SEQ ID NO: 88443 - DNA, 60 bp, Artificial
  Synthetic oligonucleotide
aattgcccccttgatggtagcatacatgctagaaagagagttggtccgcaaaacgaggtt

SEQ ID NO: 88444 - DNA, 60 bp, Artificial
  Synthetic oligonucleotide
gtgttgcatttaacccaggggacatgctgggagcagatgtacactccaggaggggaggtg

SEQ ID NO: 88445 - DNA, 60 bp, Artificial
  Synthetic oligonucleotide
caactggaagggctctaataggcccgttatagatataaatatggcagattatagcattga

SEQ ID NO: 88446 - DNA, 60 bp, Artificial
  Synthetic oligonucleotide
agtgaatgccacggagacggtggaaaccgcgaatatcgggaaaatctgcacccaagggaa

SEQ ID NO: 88447 - DNA, 60 bp, Artificial
  Synthetic oligonucleotide
gccacggagacggtggaaaccgcgaatatcgggaaaatctgcacccaagggaaaaggcca

SEQ ID NO: 88448 - DNA, 60 bp, Artificial
  Synthetic oligonucleotide
aactgcgaatatcgggaaaatctgcacccaagggaaaaggccaaccgacctgggacaatg

SEQ ID NO: 88449 - DNA, 60 bp, Artificial
  Synthetic oligonucleotide
tgataactgtaggaagctcgaaatatcagcaatcgttcaccccgagtccgggagcacggc

SEQ ID NO: 88450 - DNA, 60 bp, Artificial
  Synthetic oligonucleotide
tgataacagtaggaagctcgaaatatcagcaatcgttcaccccaagtccgggagcacggc

SEQ ID NO: 88451 - DNA, 60 bp, Artificial
  Synthetic oligonucleotide
ctgtaggaagctcgaaatatcagcaatcgttcaccccgagtccgggagcacggccacaag

SEQ ID NO: 88452 - DNA, 60 bp, Artificial
  Synthetic oligonucleotide
gaccatgcccaatacagagcagagtcattacagaataggatacagatagacccagtgaaa

SEQ ID NO: 88453 - DNA, 60 bp, Artificial
  Synthetic oligonucleotide
cagcacacaatagaccttgcggattcagaaatgaacaaactttatgagcgtgtcagaaaa

SEQ ID NO: 88454 - DNA, 60 bp, Artificial
  Synthetic oligonucleotide
gatcttgcagattcagaaatgaacaaactttatgagcgtgtcagaagacaactaagggag

SEQ ID NO: 88455 - DNA, 60 bp, Artificial
  Synthetic oligonucleotide
caaactttatgagcgtgtcagaaaacaactaagggagaatgctgaagaagatggaactgg

SEQ ID NO: 88456 - DNA, 60 bp, Artificial
  Synthetic oligonucleotide
gagcgtgtcagaaaacaactaagggagaatgctgaagaagatggaactggatgttttgaa

SEQ ID NO: 88457 - DNA, 60 bp, Artificial
  Synthetic oligonucleotide
atggaactggatgttttgaaatattccataagtgtgatgaccaatgtatggagagcataa

SEQ ID NO: 88458 - DNA, 60 bp, Artificial
  Synthetic oligonucleotide
ggaactggatgttttgaaatattccataagtgtgatgaccaatgtatggagagcataagg

SEQ ID NO: 88459 - DNA, 60 bp, Artificial
  Synthetic oligonucleotide
tcagcacacaatagatcttgcagattcagaaatgaacaaactttatgagcgtgtcagaag

SEQ ID NO: 88460 - DNA, 60 bp, Artificial
  Synthetic oligonucleotide
ggccaacagacctgggacaatgtgggctcctaggaaccctaataggacctccccaatgcg

SEQ ID NO: 88461 - DNA, 60 bp, Artificial
  Synthetic oligonucleotide
cgggaaaatctgcacccaagggaaaaggccaaccgacctgggacaatgtggactcctagg

SEQ ID NO: 88462 - DNA, 60 bp, Artificial
  Synthetic oligonucleotide
gattctacatacaaatgtgcactgaactcaaactgagtgacaacgaggggaggctgatcc

SEQ ID NO: 88463 - DNA, 60 bp, Artificial
  Synthetic oligonucleotide
gagttggtccgcaaaacgaggttcctcccagtggctggtggaacaagcagtgtctatatt

SEQ ID NO: 88464 - DNA, 60 bp, Artificial
  Synthetic oligonucleotide
acagtgattcacccaacaataacgacccctgcagtaccgaactgcagtgacactataata

SEQ ID NO: 88465 - DNA, 60 bp, Artificial
  Synthetic oligonucleotide
actggagtggctacagtgggtccttcatggactattgggccgagggggaatgctaccgag

SEQ ID NO: 88466 - DNA, 60 bp, Artificial
  Synthetic oligonucleotide
acatccgggtgctttcctataatgcacgacagaacaaaaatcagacagctacccaatctt

SEQ ID NO: 88467 - DNA, 60 bp, Artificial
  Synthetic oligonucleotide
gatagaagcccctatagaaccttaatgagctgtcctattggtgaagctccctctccatac

SEQ ID NO: 88468 - DNA, 60 bp, Artificial
  Synthetic oligonucleotide
gacatattgagaacacaagagtccgaatgtgcctgcataaatggttcttgctttaccata

SEQ ID NO: 88469 - DNA, 60 bp, Artificial
  Synthetic oligonucleotide
aatcaaacatacatcaacataagtaataccaatttgattgctgaacaggctatagctcca

SEQ ID NO: 88470 - DNA, 60 bp, Artificial
  Synthetic oligonucleotide
aacataagtaataccaatttgattgctgaacaggctatagctccaatgacactagcaggc

SEQ ID NO: 88471 - DNA, 60 bp, Artificial
  Synthetic oligonucleotide
gactcaaggggctttgttgaatgacaagcattccaatggaaccgttaaagatagaagccc

SEQ ID NO: 88472 - DNA, 60 bp, Artificial
  Synthetic oligonucleotide
atggaaccgttaaagatagaagcccctatagaaccttaatgagctgtcctattggtgaag

SEQ ID NO: 88473 - DNA, 60 bp, Artificial
  Synthetic oligonucleotide
atgaggccttgcttctgggttgaactgataagaggaaggcccaaggagaatacaatctgg

SEQ ID NO: 88474 - DNA, 60 bp, Artificial
  Synthetic oligonucleotide
gaggccttgcttctgggttgaactgataagaggaaggcccaaggagaatacaatctggac

SEQ ID NO: 88475 - DNA, 60 bp, Artificial
  Synthetic oligonucleotide
ggtatagcgggagttttgtccagcatccggaattaacaggactagactgcatgaggcctt

SEQ ID NO: 88476 - DNA, 60 bp, Artificial
  Synthetic oligonucleotide
ggagttttgtccagcatccggaattaacaggactagactgcatgaggccttgcttctggg

SEQ ID NO: 88477 - DNA, 60 bp, Artificial
  Synthetic oligonucleotide
cggtgaagcaagatatcgtagcaataactgattggtcagggtatagcgggagttttgtcc

SEQ ID NO: 88478 - DNA, 60 bp, Artificial
  Synthetic oligonucleotide
caatagtttctcggtgaagcaagatatcgtagcaataactgattggtcagggtatagcgg

SEQ ID NO: 88479 - DNA, 60 bp, Artificial
  Synthetic oligonucleotide
atgatttgggatcccaatggatggacagagacagacaatagtttctcggtgaagcaagat

SEQ ID NO: 88480 - DNA, 60 bp, Artificial
  Synthetic oligonucleotide
aggagtggatttgaaatgatttgggatcccaatggatggacagagacagacaatagtttc

SEQ ID NO: 88481 - DNA, 60 bp, Artificial
  Synthetic oligonucleotide
gtgtttggataggaagaactaaaagtactagttcaaggagtggatttgaaatgatttggg

SEQ ID NO: 88482 - DNA, 60 bp, Artificial
  Synthetic oligonucleotide
cctgatgctggcgaggtgatgtgtgtatgcagagacaactggcatggttcgaatcgacca

SEQ ID NO: 88483 - DNA, 60 bp, Artificial
  Synthetic oligonucleotide
ctgttatcctgatgctggcgaggtgatgtgtgtatgcagagacaactggcatggttcgaa

SEQ ID NO: 88484 - DNA, 60 bp, Artificial
  Synthetic oligonucleotide
ttgagtgctcctaattaccactatgaggaatgttcctgttatcctgatgctggcgaggtg

SEQ ID NO: 88485 - DNA, 60 bp, Artificial
  Synthetic oligonucleotide
gtcaaatcagtcgagttgagtgctcctaattaccactatgaggaatgttcctgttatcct

SEQ ID NO: 88486 - DNA, 60 bp, Artificial
  Synthetic oligonucleotide
ggaagttccgtttgacaataaaaagggatatacgtaatgtgttgtccttgagagtgttgg

SEQ ID NO: 88487 - DNA, 60 bp, Artificial
  Synthetic oligonucleotide
taagagtacatgaggggtatgaggaattcacaatggttgggagaagagcaacagctattc

SEQ ID NO: 88488 - DNA, 60 bp, Artificial
  Synthetic oligonucleotide
ctgagtcccggaatgatgatgggcatgttcaacatgctaagtacagttttgggagtctca

SEQ ID NO: 88489 - DNA, 60 bp, Artificial
  Synthetic oligonucleotide
ttgagtcccggaatgatgatgggcatgttcaacatgctaagtacagttctgggagtctca

SEQ ID NO: 88490 - DNA, 60 bp, Artificial
  Synthetic oligonucleotide
tattcattaaagaggggaaaattgttcatattagtccattgtcaggaagtgctcaacata

SEQ ID NO: 88491 - DNA, 60 bp, Artificial
  Synthetic oligonucleotide
gggaaaattgttcatattagtccattgtcaggaagtgctcaacatatagaggagtgttcc

SEQ ID NO: 88492 - DNA, 60 bp, Artificial
  Synthetic oligonucleotide
gctcaacatatagaggagtgttcctgttacccccgacaccctgacgttagatgtgtctgc

SEQ ID NO: 88493 - DNA, 60 bp, Artificial
  Synthetic oligonucleotide
gtgtctgcagagacaactggaaaggctctaacaggcccattatagacataaatatggcag

SEQ ID NO: 88494 - DNA, 60 bp, Artificial
  Synthetic oligonucleotide
ggcagattatagcattgattctagttatgtatgctcaggtctcgttggtgatacacccag

SEQ ID NO: 88495 - DNA, 60 bp, Artificial
  Synthetic oligonucleotide
ttgcaacaacatgcttcctcatgcagattgctatcctggcaaccactgtgacattgcatt

SEQ ID NO: 88496 - DNA, 60 bp, Artificial
  Synthetic oligonucleotide
ttcacgttcaggttatgagaccttcaaggtcattggtggttggtccacagctaactccaa

SEQ ID NO: 88497 - DNA, 60 bp, Artificial
  Synthetic oligonucleotide
ggttatgagaccttcaaggtcattggtggttggtccacagctaactccaaatcgcaggtc

SEQ ID NO: 88498 - DNA, 60 bp, Artificial
  Synthetic oligonucleotide
caataattggtccggttattctggtatcttctctattgagggcaaaagctgcgtcaatag

SEQ ID NO: 88499 - DNA, 60 bp, Artificial
  Synthetic oligonucleotide
gcttcctcatgcagattgctatcctggcaaccactgtgacattgcattttaagcaacatg

SEQ ID NO: 88500 - DNA, 60 bp, Artificial
  Synthetic oligonucleotide
gtattggttcgtggtctcaaaatattctcagaacacaggagtcagaatgtgtttgtatca

SEQ ID NO: 88501 - DNA, 60 bp, Artificial
  Synthetic oligonucleotide
ctcaaaatattctcagaacacaggagtcagaatgtgtttgtatcaacggaacttgcacag

SEQ ID NO: 88502 - DNA, 56 bp, Artificial
  Synthetic oligonucleotide
atcctaataacgaaagagggaatccaggagtgaaaggctgggcctttgacaatgga

SEQ ID NO: 88503 - DNA, 60 bp, Artificial
  Synthetic oligonucleotide
tggtccggttattctggtatcttctctattgagggcaaaagctgcgtcaataggtgtttt

SEQ ID NO: 88504 - DNA, 60 bp, Artificial
  Synthetic oligonucleotide
cgaattgggtgtcccgttccatttaggaaccaaacaagtatgcatagcatggtccagctc

SEQ ID NO: 88505 - DNA, 60 bp, Artificial
  Synthetic oligonucleotide
acatttgggtgacaagagaaccttatgtgtcatgcggtcctggtaaatgttatcaatttg

SEQ ID NO: 88506 - DNA, 60 bp, Artificial
  Synthetic oligonucleotide
gcaactgctagtttcatttatgacgggaggcttgttgacagtattggttcgtggtctcaa

SEQ ID NO: 88507 - DNA, 60 bp, Artificial
  Synthetic oligonucleotide
gggtgtcccgttccatttaggaaccaaacaagtatgcatagcatggtccagctcaagttg

SEQ ID NO: 88508 - DNA, 60 bp, Artificial
  Synthetic oligonucleotide
gcattttaagcaacatgaatgcaattcccctgcaatcaaccaagtgatcccatgtgagcc

SEQ ID NO: 88509 - DNA, 60 bp, Artificial
  Synthetic oligonucleotide
acattgcattttaagcaacatgaatgcaattcccctgcaatcaaccaagtgatcccatgt

SEQ ID NO: 88510 - DNA, 60 bp, Artificial
  Synthetic oligonucleotide
gagagaggtttgccctaaaatagcggactatagaaattggtcaaagccgcagtgtcaaat

SEQ ID NO: 88511 - DNA, 55 bp, Artificial
  Synthetic oligonucleotide
gatcccatgtgagccaattataatagaaaggaacataacagaaatagtgtatttg

SEQ ID NO: 88512 - DNA, 60 bp, Artificial
  Synthetic oligonucleotide
cccattatagatataaatatggcagattatagcattgattctagttatgtgtgctcaggg

SEQ ID NO: 88513 - DNA, 60 bp, Artificial
  Synthetic oligonucleotide
cctgaatggtcctatatagtggaaaaggaaaacccggtgaatggtctgtgctacccagga

SEQ ID NO: 88514 - DNA, 60 bp, Artificial
  Synthetic oligonucleotide
ggctcttaagtgtacctgaatggtcctatatagtggaaaaggaaaacccggtgaatggtc

SEQ ID NO: 88515 - DNA, 60 bp, Artificial
  Synthetic oligonucleotide
atgatcaaggatcaggatacgcagcagacaaagaatccactcaaaaggcaattgatggga

SEQ ID NO: 88516 - DNA, 57 bp, Artificial
  Synthetic oligonucleotide
agtgccccaagtatgtaaagtcagatagattggttttggcgacaggactgagaaatg

SEQ ID NO: 88517 - DNA, 60 bp, Artificial
  Synthetic oligonucleotide
cagaatgcaattgagagacaatgctaaggaaatagggaacggatgctttgagttttatca

SEQ ID NO: 88518 - DNA, 60 bp, Artificial
  Synthetic oligonucleotide
ccatgactctaatgtgaagaatctgtacgataaggtcagaatgcaattgagagacaatgc

SEQ ID NO: 88519 - DNA, 60 bp, Artificial
  Synthetic oligonucleotide
aggacacttgatttccatgactctaatgtgaagaatctgtacgataaggtcagaatgcaa

SEQ ID NO: 88520 - DNA, 60 bp, Artificial
  Synthetic oligonucleotide
ggatcaggatacgcagcagacaaagaatccactcaaaaggcaattgatgggataactaac

SEQ ID NO: 88521 - DNA, 60 bp, Artificial
  Synthetic oligonucleotide
tcttggaacgaaacgtcaccgtgactcatgccaaggacattcttgagaaaacgcataatg

SEQ ID NO: 88522 - DNA, 60 bp, Artificial
  Synthetic oligonucleotide
acgcataatggaaagttgtgcagattaaacgggatccctccattggaactgggggattgc

SEQ ID NO: 88523 - DNA, 54 bp, Artificial
  Synthetic oligonucleotide
acgcataatggaaagttgtgcagattaaacgggatccctccattggaactgggg

SEQ ID NO: 88524 - DNA, 60 bp, Artificial
  Synthetic oligonucleotide
gcagcattgcaggttggctccttggaaatccggaatgtgaccggctcttaagtgtacctg

SEQ ID NO: 88525 - DNA, 60 bp, Artificial
  Synthetic oligonucleotide
gggggattgcagcattgcaggttggctccttggaaatccggaatgtgaccggctcttaag

SEQ ID NO: 88526 - DNA, 60 bp, Artificial
  Synthetic oligonucleotide
gcaggggttataccatagacaaccgaacaaagacaatgaccatcacttttctcatcctcc

SEQ ID NO: 88527 - DNA, 50 bp, Artificial
  Synthetic oligonucleotide
gatggaagatggatttcttgatgtatggacatataatgccgaactcctag

SEQ ID NO: 88528 - DNA, 60 bp, Artificial
  Synthetic oligonucleotide
ctttctggatgtgttctaatgggtctctgcaatgcagaatttgcatatgactgtaagtca

SEQ ID NO: 88529 - DNA, 60 bp, Artificial
  Synthetic oligonucleotide
gggaaagagttcaacaatctagagagaagactggaaaacttaaataaaaagatggaagat

SEQ ID NO: 88530 - DNA, 60 bp, Artificial
  Synthetic oligonucleotide
agcaaaagcaggggttataccatagacaaccgaacaaagacaatgaccatcacttttctc

SEQ ID NO: 88531 - DNA, 60 bp, Artificial
  Synthetic oligonucleotide
agttttatcataaatgtgatgatgaatgcatgaatagtgtcaagaatggaacatatgatt

SEQ ID NO: 88532 - DNA, 60 bp, Artificial
  Synthetic oligonucleotide
gagaaaacacttgaaaattgtgaaaccaaatgtcagacccccttaggggcaataaataca

SEQ ID NO: 88533 - DNA, 60 bp, Artificial
  Synthetic oligonucleotide
aataaatacaacattgccctttcacaacattcacccattgacaataggtgagtgccccaa

SEQ ID NO: 88534 - DNA, 60 bp, Artificial
  Synthetic oligonucleotide
caaagtcaatggacaaggagggaggatggaattctcttggactctattggagacatggga

SEQ ID NO: 88535 - DNA, 60 bp, Artificial
  Synthetic oligonucleotide
gtcaatggacaaggagggaggatggaattctcttggactctattggagacatgggatgtc

SEQ ID NO: 88536 - DNA, 60 bp, Artificial
  Synthetic oligonucleotide
gtcattcttcaggaacatggtttggcttacaaagaaggggtcaaactacccaattgctaa

SEQ ID NO: 88537 - DNA, 60 bp, Artificial
  Synthetic oligonucleotide
cttcaggaacatggtttggcttacaaagaaggggtcaaactacccaattgctaaaaggtc

SEQ ID NO: 88538 - DNA, 60 bp, Artificial
  Synthetic oligonucleotide
caaaggacactgtaccaaaatgtgggaacatatgtttccgttggaacatcaacactaaat

SEQ ID NO: 88539 - DNA, 60 bp, Artificial
  Synthetic oligonucleotide
ccaaaatgtgggaacatatgtttccgttggaacatcaacactaaataagaggtcaatccc

SEQ ID NO: 88540 - DNA, 60 bp, Artificial
  Synthetic oligonucleotide
aagtagttaaaaggaaaagatatagtgctttatccaatgacatttcacaagggattaaga

SEQ ID NO: 88541 - DNA, 60 bp, Artificial
  Synthetic oligonucleotide
tttcacaagggattaagagacaaagaatgacagttgagtccatggggtgggccttgagct

SEQ ID NO: 88542 - DNA, 60 bp, Artificial
  Synthetic oligonucleotide
aagtagttaaaaggaaaagatatagtgctttatccaatgacatttcacaaggaattaaga

SEQ ID NO: 88543 - DNA, 60 bp, Artificial
  Synthetic oligonucleotide
tttatccaatgacatttcacaaggaattaagagacaaagaatgacagttgagtccatggg

SEQ ID NO: 88544 - DNA, 60 bp, Artificial
  Synthetic oligonucleotide
gcccgttaaagtagttaaaaggaaaagatatagtgctttatccaatgatatttcacaagg

SEQ ID NO: 88545 - DNA, 61 bp, Artificial
  Synthetic oligonucleotide
gcccgttaaagtagttaaaaggaaaagatatagtgctttatccaatgatatttcacaaggg

SEQ ID NO: 88546 - DNA, 60 bp, Artificial
  Synthetic oligonucleotide
aagagcagtgctcaaacaaatgagagaccaagaggttatgaaaactgaccagttcataaa

SEQ ID NO: 88547 - DNA, 60 bp, Artificial
  Synthetic oligonucleotide
gctcaaacaaatgagagaccaagaggttatgaaaactgaccagttcataaagttgttgcc

SEQ ID NO: 88548 - DNA, 60 bp, Artificial
  Synthetic oligonucleotide
agtttcttctgggaaaagaggacatgttccaatgggatgcatttgaagcatttgagagca

SEQ ID NO: 88549 - DNA, 60 bp, Artificial
  Synthetic oligonucleotide
agtttcttctaggaaaagaggacatgttccaatgggatgcatttgaagcatttgagagca

SEQ ID NO: 88550 - DNA, 60 bp, Artificial
  Synthetic oligonucleotide
taataatcttgtgcatggtattttctcaagacactaggatgttccaaggagtaaggggag

SEQ ID NO: 88551 - DNA, 59 bp, Artificial
  Synthetic oligonucleotide
aataatcttgtgcatggtattttctcaagacactaggatgttccaaggagtgagaggag

SEQ ID NO: 88552 - DNA, 60 bp, Artificial
  Synthetic oligonucleotide
tagttaaaaggaaaagatatagtgctttatccaatgacatttcacaaggaattaagagac

SEQ ID NO: 88553 - DNA, 60 bp, Artificial
  Synthetic oligonucleotide
ttggaatacaagggaatacaacttaaaacaaatgctgaagacataggaaccaaaggccaa

SEQ ID NO: 88554 - DNA, 60 bp, Artificial
  Synthetic oligonucleotide
ccttggaatacaagggaatacaacttaaaacaaatgctgaagacataggaaccaaaggcc

SEQ ID NO: 88555 - DNA, 60 bp, Artificial
  Synthetic oligonucleotide
tgtgatagatactgaacctttaaaatcatgtctggcagccatagacggaggtgatgtagc

SEQ ID NO: 88556 - DNA, 60 bp, Artificial
  Synthetic oligonucleotide
caagggaatacaacttaaaacaaatgctgaagacataggaaccaaaggccaaatgtgctc

SEQ ID NO: 88557 - DNA, 60 bp, Artificial
  Synthetic oligonucleotide
taataatcttgtgcatggtattttctcaagacactaggatgttccaaggagtgagaggag

SEQ ID NO: 88558 - DNA, 60 bp, Artificial
  Synthetic oligonucleotide
atttaataatcttgtgcatggtattttctcaagacactaggatgttccaaggagtgagag

SEQ ID NO: 88559 - DNA, 60 bp, Artificial
  Synthetic oligonucleotide
gaaagatttaataatcttatgcatggtattttctcaagacactaggatgttccaaggagt

SEQ ID NO: 88560 - DNA, 60 bp, Artificial
  Synthetic oligonucleotide
aaaaggaggacatgaaagatttaataatcttgtgcatggtattttctcaagacactagga

SEQ ID NO: 88561 - DNA, 60 bp, Artificial
  Synthetic oligonucleotide
tagttaaaaggaaaagatatagtgctttatccaatgatatttcacaaggaattaagagac

SEQ ID NO: 88562 - DNA, 60 bp, Artificial
  Synthetic oligonucleotide
aagatttaataatcttgtgcatggtattttctcaagacactaggatgttccaaggagtga

SEQ ID NO: 88563 - DNA, 52 bp, Artificial
  Synthetic oligonucleotide
attaagagacaaagaatgacagttgagtccatggggtgggccttgagctaat

SEQ ID NO: 88564 - DNA, 54 bp, Artificial
  Synthetic oligonucleotide
gggattaagagacaaagaatgacagttgagtccatggggtgggccttgagctaa

SEQ ID NO: 88565 - DNA, 54 bp, Artificial
  Synthetic oligonucleotide
ggaattaagagacaaagaatgacagttgagtccatggggtgggccttgagctaa

SEQ ID NO: 88566 - DNA, 60 bp, Artificial
  Synthetic oligonucleotide
tcacaagggattaagagacaaagaatgacagttgagtccatggggtgggccttgagctaa

SEQ ID NO: 88567 - DNA, 60 bp, Artificial
  Synthetic oligonucleotide
gatttaataatcttgtgcatggtattttctcaagacactaggatgttccaaggagtaagg

SEQ ID NO: 88568 - DNA, 60 bp, Artificial
  Synthetic oligonucleotide
gtgaagctctacaagaatcctgacactctttcgtcggtcacaacggatgaaatcaacaga

SEQ ID NO: 88569 - DNA, 60 bp, Artificial
  Synthetic oligonucleotide
gggctatccatcacccacccacttctgacgagcaggtgaagctctacaagaatcctgaca

SEQ ID NO: 88570 - DNA, 60 bp, Artificial
  Synthetic oligonucleotide
acattgtattcacatgggctatccatcacccacccacttctgacgagcaggtgaagctct

SEQ ID NO: 88571 - DNA, 60 bp, Artificial
  Synthetic oligonucleotide
cccggtgcaaactgatgagtataagaacactagggactcggacattgtattcacatgggc

SEQ ID NO: 88572 - DNA, 60 bp, Artificial
  Synthetic oligonucleotide
aacagcaggggagaatggattattattgggctgtcctaaagccagggcaaacagtgaaga

SEQ ID NO: 88573 - DNA, 60 bp, Artificial
  Synthetic oligonucleotide
gaatcttcagaccaaatatagggccacgacccctagttagggaacagcaggggagaatgg

SEQ ID NO: 88574 - DNA, 60 bp, Artificial
  Synthetic oligonucleotide
aatcaacagaatcttcagaccaaatatagggccacgacccctagttagggaacagcaggg

SEQ ID NO: 88575 - DNA, 60 bp, Artificial
  Synthetic oligonucleotide
caagaatcctgacactctttcgtcggtcacaacggatgaaatcaacagaatcttcagacc

SEQ ID NO: 88576 - DNA, 60 bp, Artificial
  Synthetic oligonucleotide
acagtgaagatacagactaatgggaacctgattgcacctgaatatggccacctaataacc

SEQ ID NO: 88577 - DNA, 60 bp, Artificial
  Synthetic oligonucleotide
ggggagaatggattattattgggctgtcctaaagccagggcaaacagtgaagatacagac

SEQ ID NO: 88578 - DNA, 60 bp, Artificial
  Synthetic oligonucleotide
cgactgatacggtaaacacactaattgagcaaaatgttccagtcactcaagtggaagaac

SEQ ID NO: 88579 - DNA, 60 bp, Artificial
  Synthetic oligonucleotide
gcaggggtcacaatggagaagttcattgtactgagcattgttttaacgactggtcttgct

SEQ ID NO: 88580 - DNA, 60 bp, Artificial
  Synthetic oligonucleotide
gggcatataatgcagaattgcttgttctgctggagaaccaaaagacactagacgagcacg

SEQ ID NO: 88581 - DNA, 60 bp, Artificial
  Synthetic oligonucleotide
cagacatatgggcatataatgcagaattgcttgttctgctggagaaccaaaagacactag

SEQ ID NO: 88582 - DNA, 60 bp, Artificial
  Synthetic oligonucleotide
ggaggatggcccggactggtggctggttggtatgggttccaacatcaaaactccgaggga

SEQ ID NO: 88583 - DNA, 60 bp, Artificial
  Synthetic oligonucleotide
ctggattcatagagggaggatggcccggactggtggctggttggtatgggttccaacatc

SEQ ID NO: 88584 - DNA, 60 bp, Artificial
  Synthetic oligonucleotide
cgtcattgacaaaatgaacaagcaatttggagtggtaaatcacgaattttcagaggttga

SEQ ID NO: 88585 - DNA, 60 bp, Artificial
  Synthetic oligonucleotide
aacgtcattgacaaaatgaacaagcaatttggagtggtaaatcacgaattttcagaggtt

SEQ ID NO: 88586 - DNA, 59 bp, Artificial
  Synthetic oligonucleotide
aaaacaacttgccagtaggccagtgcatgaccgaatgtcaactaaacgaaggtgtgatg

SEQ ID NO: 88587 - DNA, 60 bp, Artificial
  Synthetic oligonucleotide
gtgaagatacagactaatgggaacctgattgcacctgaatatggccacctaataaccggg

SEQ ID NO: 88588 - DNA, 60 bp, Artificial
  Synthetic oligonucleotide
gcaagcattacattgggaagtgccctaaatacataccatcaaacagtttgaagctggcga

SEQ ID NO: 88589 - DNA, 60 bp, Artificial
  Synthetic oligonucleotide
tcagaacaccagcaagcattacattgggaagtgccctaaatacataccatcaaacagttt

SEQ ID NO: 88590 - DNA, 60 bp, Artificial
  Synthetic oligonucleotide
agcaaaagcaggggtcacaatggagaagttcattgtactgagcattgttttaacgactgg

SEQ ID NO: 88591 - DNA, 60 bp, Artificial
  Synthetic oligonucleotide
ctggtcttgcttatgacaagatttgcattggctatcaaacgaacaactcgactgatacgg

SEQ ID NO: 88592 - DNA, 60 bp, Artificial
  Synthetic oligonucleotide
cattctacaggagcatgagatggcttactttgaaatcagggcaattcccggtgcaaactg

SEQ ID NO: 88593 - DNA, 60 bp, Artificial
  Synthetic oligonucleotide
agggcaattcccggtgcaaactgatgagtataagaacactagggactcggacattgtatt

SEQ ID NO: 88594 - DNA, 60 bp, Artificial
  Synthetic oligonucleotide
taacgactggtcttgcttatgacaagatttgcattggctatcaaacgaacaactcgactg

SEQ ID NO: 88595 - DNA, 60 bp, Artificial
  Synthetic oligonucleotide
atacattgtggagagaaccaaggaaatggaagggatctgctatccaggatcgatagagaa

SEQ ID NO: 88596 - DNA, 60 bp, Artificial
  Synthetic oligonucleotide
gagagaaccaaggaaatggaagggatctgctatccaggatcgatagagaaccaagaggag

SEQ ID NO: 88597 - DNA, 60 bp, Artificial
  Synthetic oligonucleotide
cgatagagaaccaagaggagttgagatcattgttctcttcaattaagaaatacgagagag

SEQ ID NO: 88598 - DNA, 60 bp, Artificial
  Synthetic oligonucleotide
tcaaatcaaggatcattctacaggagcatgagatggcttactttgaaatcagggcaattc

SEQ ID NO: 88599 - DNA, 60 bp, Artificial
  Synthetic oligonucleotide
cggaactagggtcaccactagtgcttgatgactgctctctggagggtttgattctaggta

SEQ ID NO: 88600 - DNA, 60 bp, Artificial
  Synthetic oligonucleotide
ctagggtcaccactagtgcttgatgactgctctctggagggtttgattctaggtaatccc

SEQ ID NO: 88601 - DNA, 60 bp, Artificial
  Synthetic oligonucleotide
attctaggtaatcccaaatgcgatctttatctgaatggcagagagtggtcatacattgtg

SEQ ID NO: 88602 - DNA, 60 bp, Artificial
  Synthetic oligonucleotide
ccaaatgcgatctttatctgaatggcagagagtggtcatacattgtggagagaaccaagg

SEQ ID NO: 88603 - DNA, 60 bp, Artificial
  Synthetic oligonucleotide
aactcgactgatacggtaaacacactaattgagcaaaatgttccagtcactcaagtggaa

SEQ ID NO: 88604 - DNA, 60 bp, Artificial
  Synthetic oligonucleotide
tgtacatggtcaggttaatccaattctatgcagcacggaactagggtcaccactagtgct

SEQ ID NO: 88605 - DNA, 60 bp, Artificial
  Synthetic oligonucleotide
tcaagtggaagaacttgtacatggtcaggttaatccaattctatgcagcacggaactagg

SEQ ID NO: 88606 - DNA, 60 bp, Artificial
  Synthetic oligonucleotide
ttagtattactgctcatgattattgggggtttcattttcggatgtcaaaatggaaatgtt

SEQ ID NO: 88607 - DNA, 54 bp, Artificial
  Synthetic oligonucleotide
tggaaatgttcgttgtactttctgtatttaattaaaaacacccttgtttctact

SEQ ID NO: 88608 - DNA, 60 bp, Artificial
  Synthetic oligonucleotide
agaattctacgtacaaaatcttgagcatttacagcagtgttgcctcaagcttagtattac

SEQ ID NO: 88609 - DNA, 60 bp, Artificial
  Synthetic oligonucleotide
cgtacaaaatcttgagcatttacagcagtgttgcctcaagcttagtattactgctcatga

SEQ ID NO: 88610 - DNA, 60 bp, Artificial
  Synthetic oligonucleotide
agaagagagtaagcttgagcggcaaaagattagtggagtgaaacttgaagagaattctac

SEQ ID NO: 88611 - DNA, 60 bp, Artificial
  Synthetic oligonucleotide
gagagtaagcttgagcggcaaaagattagtggagtgaaacttgaagagaattctacgtac

SEQ ID NO: 88612 - DNA, 60 bp, Artificial
  Synthetic oligonucleotide
cagaaggatattaaaagaaaatgcactagatactggggatgggtgttttgaaatattaca

SEQ ID NO: 88613 - DNA, 60 bp, Artificial
  Synthetic oligonucleotide
agaaaatgcactagatactggggatgggtgttttgaaatattacacaaatgtgacgacgg

SEQ ID NO: 88614 - DNA, 60 bp, Artificial
  Synthetic oligonucleotide
aagacactagacgagcacgatgcgaatgtcaggaacctccatgaccgggtcagaaggata

SEQ ID NO: 88615 - DNA, 60 bp, Artificial
  Synthetic oligonucleotide
gacactagacgagcacgatgcgaatgtcaggaacctccatgaccgggtcagaaggatatt

SEQ ID NO: 88616 - DNA, 60 bp, Artificial
  Synthetic oligonucleotide
ctgtggattagacaatgaacctggatcgggagattggccggatggttccaacattgggtt

SEQ ID NO: 88617 - DNA, 60 bp, Artificial
  Synthetic oligonucleotide
ctgtggattagacaatgaacctggatcgggaagttggccggatggttccaacattgggtt

SEQ ID NO: 88618 - DNA, 60 bp, Artificial
  Synthetic oligonucleotide
actcagacacccccaggccagctgacccctcaacaatatcatgtgactccccaagcaacg

SEQ ID NO: 88619 - DNA, 60 bp, Artificial
  Synthetic oligonucleotide
ttttgtggcacttcaggcacttatggaacaggctcatggcctgatggggcgaatatcaat

SEQ ID NO: 88620 - DNA, 60 bp, Artificial
  Synthetic oligonucleotide
ttgtggcacttcagggacatatggaacaggctcatggcctgatggggcgaatatcgattt

SEQ ID NO: 88621 - DNA, 60 bp, Artificial
  Synthetic oligonucleotide
cacttcagggacatatggaacaggctcatggcctgatggggcgaatatcgatttcatgcc

SEQ ID NO: 88622 - DNA, 60 bp, Artificial
  Synthetic oligonucleotide
atggaggacaacatgaccacaacacaaattgaggtgggtccgggagcaaccaatgccacc

SEQ ID NO: 88623 - DNA, 60 bp, Artificial
  Synthetic oligonucleotide
atggcggacaacatgaccacaacacaaattgaggtgggtccgggagcaaccaatgccacc

SEQ ID NO: 88624 - DNA, 60 bp, Artificial
  Synthetic oligonucleotide
atggcggacaacatgaccacaacacaaattgaggtgggtccgggagcaaccaatgccact

SEQ ID NO: 88625 - DNA, 60 bp, Artificial
  Synthetic oligonucleotide
ggaggacaacatgaccacaacacaaattgaggtgggtccgggagcaaccaatgccaccat

SEQ ID NO: 88626 - DNA, 60 bp, Artificial
  Synthetic oligonucleotide
tggcggacaacatgaccacaacacaaattgaggtgggtccgggagcaaccaatgccacca

SEQ ID NO: 88627 - DNA, 60 bp, Artificial
  Synthetic oligonucleotide
cggacaacatgaccacaacacaaattgaggtgggtccgggagcaaccaatgccaccataa

SEQ ID NO: 88628 - DNA, 60 bp, Artificial
  Synthetic oligonucleotide
ggcggacaacatgaccacaacacaaattgaggtgggtccgggagcaaccaatgccaccat

SEQ ID NO: 88629 - DNA, 60 bp, Artificial
  Synthetic oligonucleotide
cacaacacaaattgaggtgggtccgggagcaaccaatgccaccataaactttgaagcagg

SEQ ID NO: 88630 - DNA, 60 bp, Artificial
  Synthetic oligonucleotide
gacaacatgaccacaacacaaattgaggtgggtccgggagcaaccaatgccaccataaac

SEQ ID NO: 88631 - DNA, 60 bp, Artificial
  Synthetic oligonucleotide
ccattaataccaaactcccttttcaaaatctttccccgagaactgtgggtcaatgcccca

SEQ ID NO: 88632 - DNA, 60 bp, Artificial
  Synthetic oligonucleotide
ctaatagcacctagtagagtgagtaaactaaagggacgaggactaggcattcaatcagga

SEQ ID NO: 88633 - DNA, 60 bp, Artificial
  Synthetic oligonucleotide
gggtgctttgaaatatatcacaaatgcgacgacaactgcatggaaagcatcagaaacaac

SEQ ID NO: 88634 - DNA, 60 bp, Artificial
  Synthetic oligonucleotide
tccatttcagtggggagttctacttatcaaaacagctttgtgcctgtggtgggagcaaga

SEQ ID NO: 88635 - DNA, 60 bp, Artificial
  Synthetic oligonucleotide
gaagggatggtagatggttggtatggcttccgacatcagaatgcccaaggaactggtcag

SEQ ID NO: 88636 - DNA, 60 bp, Artificial
  Synthetic oligonucleotide
ccgatagggatggtgatagggactccagcctgtgacttgcacctcaccggaacatgggac

SEQ ID NO: 88637 - DNA, 60 bp, Artificial
  Synthetic oligonucleotide
cgggtgccactgtgaatgaggaagcattaagacagaaaattatggaaagtggagggattg

SEQ ID NO: 88638 - DNA, 60 bp, Artificial
  Synthetic oligonucleotide
atcaattcagctggaaccactaaagcatgcatgaggtatggaggaaacagtttctatgcg

SEQ ID NO: 88639 - DNA, 60 bp, Artificial
  Synthetic oligonucleotide
tgaagtggagcaagagataagaactttctcgtttcagcttatttaatgataaaaaacacc

SEQ ID NO: 88640 - DNA, 60 bp, Artificial
  Synthetic oligonucleotide
tggggaatggaagctagaagatgtctgcttcaatcaatgcaacaaatggaaccaattgtt

SEQ ID NO: 88641 - DNA, 60 bp, Artificial
  Synthetic oligonucleotide
ggggaatggaagctagaagatgtctgcttcaatcaatgcaacaaatggaggcaattgttg

SEQ ID NO: 88642 - DNA, 60 bp, Artificial
  Synthetic oligonucleotide
ggggaatggaagctagaagatgtctgcttcaatcaatgcaacaaatggaagcaattgttg

SEQ ID NO: 88643 - DNA, 60 bp, Artificial
  Synthetic oligonucleotide
ggggatggaagctagaagatgtctgcttcaatcaatgcaacaaatggaagcaattgttga

SEQ ID NO: 88644 - DNA, 60 bp, Artificial
  Synthetic oligonucleotide
gaaatggggaatggaagctagaagatgtctgcttcaatcaatgcaacaaatggaggcaat

SEQ ID NO: 88645 - DNA, 60 bp, Artificial
  Synthetic oligonucleotide
ccaaatgaaatgggggatggaagctagaagatgtctgcttcaatcaatgcaacaaatgga

SEQ ID NO: 88646 - DNA, 60 bp, Artificial
  Synthetic oligonucleotide
ccaaatgaaatggggaatggaagctagaagatgtctgcttcaatcaatgcaacaaatgga

SEQ ID NO: 88647 - DNA, 60 bp, Artificial
  Synthetic oligonucleotide
tccaaatgaaatggggaatggaagctagaagatgtctgcttcaatcaatgcaacaaatgg

SEQ ID NO: 88648 - DNA, 60 bp, Artificial
  Synthetic oligonucleotide
ccaacactgtgtcaagctttcaggtagactgctttctttggcatgttcgcaaacgatttg

SEQ ID NO: 88649 - DNA, 60 bp, Artificial
  Synthetic oligonucleotide
ggactccaacactgtgtcaagctttcaggtagactgctttctttggcatgtccgcgaacg

SEQ ID NO: 88650 - DNA, 60 bp, Artificial
  Synthetic oligonucleotide
cagggaagaacaccgatcttgaggcactcatggaatggctaaagacaagaccaatcctgt

SEQ ID NO: 88651 - DNA, 60 bp, Artificial
  Synthetic oligonucleotide
gtttgcaggaaagaacaccgatcttgaggcactcatggaatggctaaagacaagaccaat

SEQ ID NO: 88652 - DNA, 55 bp, Artificial
  Synthetic oligonucleotide
caatgccaccataaactttgaagcaggaattttagagtgctatgaaaggctttca

SEQ ID NO: 88653 - DNA, 60 bp, Artificial
  Synthetic oligonucleotide
caatgccaccataaactttgaagcaggaattttagagtgctatgaaaggctttcatggca

SEQ ID NO: 88654 - DNA, 59 bp, Artificial
  Synthetic oligonucleotide
caatgccaccataaactttgaagcaggaattttggattgctataaaaggctttcatggc

SEQ ID NO: 88655 - DNA, 60 bp, Artificial
  Synthetic oligonucleotide
caatgccaccataaactttgaagcaggaattttggattgctataaaaggctttcatggca

SEQ ID NO: 88656 - DNA, 60 bp, Artificial
  Synthetic oligonucleotide
aaaagggatatacgtaatgtgttgtccttgagagtgttggtaaacggaacattcctcaag

SEQ ID NO: 88657 - DNA, 60 bp, Artificial
  Synthetic oligonucleotide
aaagggatatacgtaatgtgttgtccttgagagtgttggtaaacggaacattcctcaaac

SEQ ID NO: 88658 - DNA, 60 bp, Artificial
  Synthetic oligonucleotide
aagggatatacgtaatgtgttgtccttgagagtgttggtaaacggaacattcctcaaaca

SEQ ID NO: 88659 - DNA, 60 bp, Artificial
  Synthetic oligonucleotide
agggatatacgtaatgtgttgtccttgagagtgttggtaaacggaacattcctcaaacac

SEQ ID NO: 88660 - DNA, 53 bp, Artificial
  Synthetic oligonucleotide
tcctatttatggatccatctgctggaattgaagggtttgagccatactgtatg

SEQ ID NO: 88661 - DNA, 53 bp, Artificial
  Synthetic oligonucleotide
tcctatttatgaatccatctgctggaattgaagggtttgagccatactgtatg

SEQ ID NO: 88662 - DNA, 53 bp, Artificial
  Synthetic oligonucleotide
tcctatttatgaatccatctgctggaattgaagggtttgagccatactgtgtg

SEQ ID NO: 88663 - DNA, 60 bp, Artificial
  Synthetic oligonucleotide
ctgacaacatggaggtattgagtgaccacatagtgattgaggggctttctgccgaagaga

SEQ ID NO: 88664 - DNA, 60 bp, Artificial
  Synthetic oligonucleotide
ctctctgacaacatggaggtattgagtgaccacatagtgattgaggggctttctgctgaa

SEQ ID NO: 88665 - DNA, 60 bp, Artificial
  Synthetic oligonucleotide
ctctctgacaacatggaggtattgagtgaccacatagtgattgaggggctttctgccgaa

SEQ ID NO: 88666 - DNA, 60 bp, Artificial
  Synthetic oligonucleotide
caaaactattaaaggaaaggggtttcttcggagctattgctggtttcttggagggaggat

SEQ ID NO: 88667 - DNA, 60 bp, Artificial
  Synthetic oligonucleotide
agcagaagacggagggctaccacaaagcggtagaattgttgttgattacatggtgcaaaa

SEQ ID NO: 88668 - DNA, 60 bp, Artificial
  Synthetic oligonucleotide
tgctgggcccctctgctgtagacatagggaatggatgcttcgaaaccaaacacaagtgca

SEQ ID NO: 88669 - DNA, 60 bp, Artificial
  Synthetic oligonucleotide
tcaactgctgcttctagtttggctgtaacattgatgatagctatctttattgtttatatg

SEQ ID NO: 88670 - DNA, 60 bp, Artificial
  Synthetic oligonucleotide
tttatgatgggatgcttgttgacagtattggttcctggtctcaaaatatcctcagaactc

SEQ ID NO: 88671 - DNA, 60 bp, Artificial
  Synthetic oligonucleotide
gtcccacccagggatctttgaaaactcgtgtcttgaaacgatggaagttgttcaacagac

SEQ ID NO: 88672 - DNA, 60 bp, Artificial
  Synthetic oligonucleotide
caagtggcaggagcaaggtaataaaagggtccttgcctttaattggtgaagcagattgcc

SEQ ID NO: 88673 - DNA, 60 bp, Artificial
  Synthetic oligonucleotide
gtctatcaaagaggtgttttattgcctcaaaaagtgtggtgcgcaagtggcaggagcaag

SEQ ID NO: 88674 - DNA, 60 bp, Artificial
  Synthetic oligonucleotide
aacaattgtctatcaaagaggtgttttattgcctcaaaaagtgtggtgcgcaagtggcag

SEQ ID NO: 88675 - DNA, 60 bp, Artificial
  Synthetic oligonucleotide
ctcagagctgatacaataagctcgcaaatagagcttgcagtcttgctttccaacgaagga

SEQ ID NO: 88676 - DNA, 60 bp, Artificial
  Synthetic oligonucleotide
caggagcaaggtaataaaagggtccttgcctttaattggtgaagcagattgcctccacga

SEQ ID NO: 88677 - DNA, 60 bp, Artificial
  Synthetic oligonucleotide
gcaggagcaaggtaataaaagggtccttgcctttaattggtgaagcagattgcctccacg

SEQ ID NO: 88678 - DNA, 53 bp, Artificial
  Synthetic oligonucleotide
tgttggtgaacggaaccttcctcaagtaccctaatggagacaagtctttatca

SEQ ID NO: 88679 - DNA, 60 bp, Artificial
  Synthetic oligonucleotide
tagaaaacgtccaaattgcgattgggcctattaccctccaaccccagaaaggtaccttga

SEQ ID NO: 88680 - DNA, 60 bp, Artificial
  Synthetic oligonucleotide
ctgttccaccattgaagagctcagacggcagaaatagtgaattttgcttgtccttcatga

SEQ ID NO: 88681 - DNA, 60 bp, Artificial
  Synthetic oligonucleotide
gtattaatagtatggggagttcaccaccctgcaactctaaaggaacaccaagacttgtac

SEQ ID NO: 88682 - DNA, 60 bp, Artificial
  Synthetic oligonucleotide
cctttgacatgagtaatgtgggatcttatttcttcggagacaatgcagaggagtatgaca

SEQ ID NO: 88683 - DNA, 60 bp, Artificial
  Synthetic oligonucleotide
ataatcactcactgagtgacatcaacaccatggcgtctcaaggcaccaaacgatcttatg

SEQ ID NO: 88684 - DNA, 60 bp, Artificial
  Synthetic oligonucleotide
gctccgtctctctaactattgcaacagtatgtttcctcatgcagattgccatcctaacaa

SEQ ID NO: 88685 - DNA, 60 bp, Artificial
  Synthetic oligonucleotide
gctccgtctctctaaccattgcaacagtatgtttcctcatgcagattgccatcctatcaa

SEQ ID NO: 88686 - DNA, 60 bp, Artificial
  Synthetic oligonucleotide
acccaatgtgtgatgatttgattgggaaaacatcatggtcctacatagtggagaaaccaa

SEQ ID NO: 88687 - DNA, 60 bp, Artificial
  Synthetic oligonucleotide
taagctcgcaaatagagcttgcagtcttgctttccaacgaaggaataataaatagtgaag

SEQ ID NO: 88688 - DNA, 60 bp, Artificial
  Synthetic oligonucleotide
cgcaaatagagcttgcagtcttgctttccaacgaaggaataataaatagtgaagatgagc

SEQ ID NO: 88689 - DNA, 59 bp, Artificial
  Synthetic oligonucleotide
caagtgaccctctcgttattgccgcaagtatcattgggatcttgcacttgatattgtgg

SEQ ID NO: 88690 - DNA, 60 bp, Artificial
  Synthetic oligonucleotide
gccagagatgtcaaagaagggaaagaagaaatagaccacagcaagacaggaggcaccttt

SEQ ID NO: 88691 - DNA, 59 bp, Artificial
  Synthetic oligonucleotide
caatgccaccataaactttgaagcaggaattctggagtgctatgaaaggctctcatggc

SEQ ID NO: 88692 - DNA, 60 bp, Artificial
  Synthetic oligonucleotide
caatgccaccataaactttgaagcaggaattctggagtgctatgaaaggctctcatggca

SEQ ID NO: 88693 - DNA, 60 bp, Artificial
  Synthetic oligonucleotide
gtccgggagcaaccaatgccaccataaactttgaagcaggaattctggagtgctatgaaa

SEQ ID NO: 88694 - DNA, 60 bp, Artificial
  Synthetic oligonucleotide
gaggtgggtccgggagcaaccaatgccaccataaactttgaagcaggaattctggagtgc

SEQ ID NO: 88695 - DNA, 60 bp, Artificial
  Synthetic oligonucleotide
gaggtaggtccgggagcaaccaatgccaccataaactttgaagcaggaattctggagtgc

SEQ ID NO: 88696 - DNA, 60 bp, Artificial
  Synthetic oligonucleotide
cgcgaacgatttgcagaccaagaactgggtgatgccccattccttgaccggcttcgccga

SEQ ID NO: 88697 - DNA, 60 bp, Artificial
  Synthetic oligonucleotide
cagcaaggacaatggtataaggataggttccaagggagatgtatttgttatcagagagcc

SEQ ID NO: 88698 - DNA, 60 bp, Artificial
  Synthetic oligonucleotide
gggctagccattcaattcagactggaagtcagaaccatcctgaaacatgcaatcaaagtg

SEQ ID NO: 88699 - DNA, 60 bp, Artificial
  Synthetic oligonucleotide
cctgttggtgaggctccctctccatacaattcaaggtttgagtctgttgcttggtcggca

SEQ ID NO: 88700 - DNA, 60 bp, Artificial
  Synthetic oligonucleotide
ctgcatgagaccttgcttctgggttgagctgatcaggggaagacccaaggagaatacaat

SEQ ID NO: 88701 - DNA, 60 bp, Artificial
  Synthetic oligonucleotide
gcactagctcaaggagtggatttgagatgatttgggatcccaatgggtggacagagacag

SEQ ID NO: 88702 - DNA, 60 bp, Artificial
  Synthetic oligonucleotide
atggcccagcattgagtatcaacgaactgagcaatcttgcaaaaggagagaaggctaatg

SEQ ID NO: 88703 - DNA, 60 bp, Artificial
  Synthetic oligonucleotide
gcccagcattgagtatcaacgaactgagcaatcttgcaaaaggagagaaggctaatgtgc

SEQ ID NO: 88704 - DNA, 60 bp, Artificial
  Synthetic oligonucleotide
cagagggttcctctcagaattacacagggaatcctgtgatatgcctgggacatcatgctg

SEQ ID NO: 88705 - DNA, 60 bp, Artificial
  Synthetic oligonucleotide
ggctcctctcagaattacacagggaatcctgtgatatgcctgggacatcatgctgtgccc

SEQ ID NO: 88706 - DNA, 60 bp, Artificial
  Synthetic oligonucleotide
tagcagagggttcctctcagaattacacagggaatcctgtgatatgcctgggacatcatg

SEQ ID NO: 88707 - DNA, 60 bp, Artificial
  Synthetic oligonucleotide
tctcagaattacacagggaatcctgtgatatgcctgggacatcatgctgtatccaatggg

SEQ ID NO: 88708 - DNA, 60 bp, Artificial
  Synthetic oligonucleotide
ggctcctctcagaattacacagggaatcctgtgatatgcctgggacaccatgctgtatcc

SEQ ID NO: 88709 - DNA, 60 bp, Artificial
  Synthetic oligonucleotide
tagcagaaggctcctctcagaattacacagggaatcctgtgatatgcctgggacaccatg

SEQ ID NO: 88710 - DNA, 57 bp, Artificial
  Synthetic oligonucleotide
acaaccagcaatgctattcaacatctgcgtccatctagaggtttgctatgtaataag

SEQ ID NO: 88711 - DNA, 60 bp, Artificial
  Synthetic oligonucleotide
aagctgggaaatagcatggaactgatgatattcagctacaatcaagactattcgttaagt

SEQ ID NO: 88712 - DNA, 60 bp, Artificial
  Synthetic oligonucleotide
gatccttagcccaagagcatggaatagagactccaaagtatctggctgatttgttcgatt

SEQ ID NO: 88713 - DNA, 60 bp, Artificial
  Synthetic oligonucleotide
gaagatcctgaattacaaccagcaatgctattcaacatctgcgtccatctagaggtctgc

SEQ ID NO: 88714 - DNA, 60 bp, Artificial
  Synthetic oligonucleotide
ggctgcttgggttcaaacagagatgaatctactgagcactcttacaagtaaaagggcact

SEQ ID NO: 88715 - DNA, 60 bp, Artificial
  Synthetic oligonucleotide
agttacacccaaaaagttaaaatgggaggacctaagaccaatagggcctcacatttacag

SEQ ID NO: 88716 - DNA, 60 bp, Artificial
  Synthetic oligonucleotide
gttgtgactttcgaatttagtagtacagatcccagagtggactcaggaaagtggccaaaa

SEQ ID NO: 88717 - DNA, 60 bp, Artificial
  Synthetic oligonucleotide
agttgtgactttcgaatttagtagtacagatcccagagtggactcaggaaagtggccaaa

SEQ ID NO: 88718 - DNA, 60 bp, Artificial
  Synthetic oligonucleotide
gaattgactttaaacttggacaaacaatatctaaactaagggatatatctgttccagctg

SEQ ID NO: 88719 - DNA, 60 bp, Artificial
  Synthetic oligonucleotide
caaacttggacaaacaatatctaaactaagggatatatctgttccagctggtttctccaa

SEQ ID NO: 88720 - DNA, 60 bp, Artificial
  Synthetic oligonucleotide
ggcagaatttagtgaagatcctgaattacaaccagcaatgctattcaacatctgcgtcca

SEQ ID NO: 88721 - DNA, 60 bp, Artificial
  Synthetic oligonucleotide
gctgggaaatagcatggaactgatgatattcagctacaatcaagactattcgttaagtaa

SEQ ID NO: 88722 - DNA, 60 bp, Artificial
  Synthetic oligonucleotide
agtcacacctaaaaagttgaaatgggaggacctaagaccaatagggcctcacatttacaa

SEQ ID NO: 88723 - DNA, 60 bp, Artificial
  Synthetic oligonucleotide
agttacacctaaaaagttgaaatgggaggacctaagaccaatagggcctcacatttacaa

SEQ ID NO: 88724 - DNA, 60 bp, Artificial
  Synthetic oligonucleotide
tatggaagatcctgaattacaaccagcaatgctattcaacatctgcgtccatctagaggt

SEQ ID NO: 88725 - DNA, 60 bp, Artificial
  Synthetic oligonucleotide
ggccagtacagtggatttgcaagagcagtgctcaaacaaatgagagaccaggaggttatg

SEQ ID NO: 88726 - DNA, 60 bp, Artificial
  Synthetic oligonucleotide
tttgcaagagcagtgctcaaacaaatgagagaccaggaggttatgaaaactgaccagttc

SEQ ID NO: 88727 - DNA, 60 bp, Artificial
  Synthetic oligonucleotide
gatactgaacctttaaaatcatgtctggcagccatagacggaggtgatgtagcctgtgac

SEQ ID NO: 88728 - DNA, 60 bp, Artificial
  Synthetic oligonucleotide
cttatgcatggtattttctcaagacactaggatgttccaaggagtgagaggagagataaa

SEQ ID NO: 88729 - DNA, 60 bp, Artificial
  Synthetic oligonucleotide
gacactgaacctttaaaatcatgtctggcagccatagacggaggtgatgtagcctgtgac

SEQ ID NO: 88730 - DNA, 60 bp, Artificial
  Synthetic oligonucleotide
gacactgaacctttaaaatcatgtctggcagccctggatggaggtgatgtagcctgtgac

SEQ ID NO: 88731 - DNA, 60 bp, Artificial
  Synthetic oligonucleotide
gtgatagacactgaacctttaaaatcatgtctggcagccctggatggaggtgatgtagcc

SEQ ID NO: 88732 - DNA, 51 bp, Artificial
  Synthetic oligonucleotide
tactgaaggtttcgaaagggtctacgaaagcttttttctcagaaagatgag

SEQ ID NO: 88733 - DNA, 60 bp, Artificial
  Synthetic oligonucleotide
tcccatatactggagatcctccatacagccatggaacgggaacaggatacaccatggaca

SEQ ID NO: 88734 - DNA, 60 bp, Artificial
  Synthetic oligonucleotide
tatctttctggatgtgctccaatggatcattgcaatgcagaatttgcatttaaacttgtg

SEQ ID NO: 88735 - DNA, 50 bp, Artificial
  Synthetic oligonucleotide
accaatggaaatgctttcattgggaagaaaatgtttcaaatatcagacaa

SEQ ID NO: 88736 - DNA, 60 bp, Artificial
  Synthetic oligonucleotide
atttgaatggatgtcaatccgactttacttttcttgaaggttccagcgcaaaatgccata

SEQ ID NO: 88737 - DNA, 60 bp, Artificial
  Synthetic oligonucleotide
tttgcaggaaagaataccgatcttgaagcactcatggaatggctaaagacaagaccaatc

SEQ ID NO: 88738 - DNA, 60 bp, Artificial
  Synthetic oligonucleotide
catcatggtcctacatagtggagaaaccaaatcccgccaatggaatatgttacccgggca

SEQ ID NO: 88739 - DNA, 60 bp, Artificial
  Synthetic oligonucleotide
tactggaccatagtgaaaccgggagaagcaataacatttgagtcaaatggcgcatttctc

SEQ ID NO: 88740 - DNA, 60 bp, Artificial
  Synthetic oligonucleotide
acagctgcattgcaagcagtcttgtgttggcagcaagcattatggggttcattttctggg

SEQ ID NO: 88741 - DNA, 60 bp, Artificial
  Synthetic oligonucleotide
cgctactatattgtctcatggtcatgtacctgaatcctggaaattattcaatgcaagtaa

SEQ ID NO: 88742 - DNA, 60 bp, Artificial
  Synthetic oligonucleotide
atagcagaaggccatgaaagctcagcgctactatattgtctcatggtcatgtacctgaac

SEQ ID NO: 88743 - DNA, 60 bp, Artificial
  Synthetic oligonucleotide
gatgaatccaaatcagaagattctatgcacttctgccactgctattgtaataggcacgat

SEQ ID NO: 88744 - DNA, 60 bp, Artificial
  Synthetic oligonucleotide
acaagagaaccctatgtctcgtgtgaaccagatgagtgcaggttctatgctctcagccaa

SEQ ID NO: 88745 - DNA, 60 bp, Artificial
  Synthetic oligonucleotide
agtaacgagagaaccctatgtctcctgtgatccagatgagtgcaggttctatgctctcag

SEQ ID NO: 88746 - DNA, 60 bp, Artificial
  Synthetic oligonucleotide
tcctgtgatccagatgagtgcaggttctatgctctcagccaagggacaacgattagaggg

SEQ ID NO: 88747 - DNA, 60 bp, Artificial
  Synthetic oligonucleotide
ccctatgtctcgtgtgaaccagatgagtgcaggttctatgctctcagccaagggacaaca

SEQ ID NO: 88748 - DNA, 60 bp, Artificial
  Synthetic oligonucleotide
agatgagtgcaggttctatgctctcagccaaggaacaacgattagagggaaacactcaaa

SEQ ID NO: 88749 - DNA, 60 bp, Artificial
  Synthetic oligonucleotide
cctgtgatccagatgagtgcaggttctatgctctcagccaagggacaacgattagaggga

SEQ ID NO: 88750 - DNA, 60 bp, Artificial
  Synthetic oligonucleotide
gacagactccgaaatgaacaaactctttgaacgagttaggcgacagttacgggagaatgc

SEQ ID NO: 88751 - DNA, 60 bp, Artificial
  Synthetic oligonucleotide
gcatactatagatgtgacagactccgaaatgaacaaactctttgaaagagttagacgcca

SEQ ID NO: 88752 - DNA, 60 bp, Artificial
  Synthetic oligonucleotide
acacagggaatcctgtgatatgcctgggacatcatgctgtatccaatgggacaatggtga

SEQ ID NO: 88753 - DNA, 60 bp, Artificial
  Synthetic oligonucleotide
acatactatagatgtgacagactccgaaatgaacaaactctttgaaagagtcaggcgcca

SEQ ID NO: 88754 - DNA, 60 bp, Artificial
  Synthetic oligonucleotide
atctgttccaccattgaagagctcagacggcagaaatagtgaattttgcttgtccttcat

SEQ ID NO: 88755 - DNA, 60 bp, Artificial
  Synthetic oligonucleotide
ggggactgtcccaagtatgtcaaacagggatccttgaaacttgctacgggaatgaggaac

SEQ ID NO: 88756 - DNA, 60 bp, Artificial
  Synthetic oligonucleotide
tcggggactgtcccaagtatgtcaaacagggatccttgaaacttgctacgggaatgagga

SEQ ID NO: 88757 - DNA, 60 bp, Artificial
  Synthetic oligonucleotide
tatcaatcggggactgtcccaagtatgtcaaacagggatccttgaaacttgctacgggaa

SEQ ID NO: 88758 - DNA, 60 bp, Artificial
  Synthetic oligonucleotide
cttggtttaactccttcctcacacatgcactgaaatagttgtggcaatgctactatttgc

SEQ ID NO: 88759 - DNA, 60 bp, Artificial
  Synthetic oligonucleotide
gcagggtagataatcactcaccgagtgacatccacatcatggcgtctcaaggcaccaaac

SEQ ID NO: 88760 - DNA, 60 bp, Artificial
  Synthetic oligonucleotide
gaagcacgcactttcttaaaatgtcgctgtttggagacacaattgcctacctgctttcac

SEQ ID NO: 88761 - DNA, 60 bp, Artificial
  Synthetic oligonucleotide
aggcactttcttaaaatgtcgctgtttggagacacaattgcctacctgctttcattgaca

SEQ ID NO: 88762 - DNA, 60 bp, Artificial
  Synthetic oligonucleotide
agcagaagcaggcactttcttaaaatgtcgctgtttggagacacaattgcctacctgctt

SEQ ID NO: 88763 - DNA, 60 bp, Artificial
  Synthetic oligonucleotide
gaagcaggcactttcttaaaatgtcgctgtttggagacacaattgcctacctgctttcac

SEQ ID NO: 88764 - DNA, 60 bp, Artificial
  Synthetic oligonucleotide
ttcattgacagaagatggagaaggcaaagcagaactagcagaaaaattacactgttggtt

SEQ ID NO: 88765 - DNA, 60 bp, Artificial
  Synthetic oligonucleotide
ctacctgctttcactaacagaagatggagaaggcaaagcagaactagcagaaaaattaca

SEQ ID NO: 88766 - DNA, 60 bp, Artificial
  Synthetic oligonucleotide
ggttcaaacagagatgaatctattgagcactctgacaagtaaaagggccctggatctacc

SEQ ID NO: 88767 - DNA, 60 bp, Artificial
  Synthetic oligonucleotide
aggcaccttttacaagatggtaagagatgataaaaccatctacttcagccctataagagt

SEQ ID NO: 88768 - DNA, 60 bp, Artificial
  Synthetic oligonucleotide
caaaacaggaggcaccttttacaagatggtaagagatgataaaaccatctacttcagccc

SEQ ID NO: 88769 - DNA, 60 bp, Artificial
  Synthetic oligonucleotide
ggaggcaccttttacaagatggtaagagatgataaaaccatctacttcagccctataaga

SEQ ID NO: 88770 - DNA, 60 bp, Artificial
  Synthetic oligonucleotide
cacaacaaaacaggaggcaccttttacaagatggtaagagatgataaaaccatctacttc

SEQ ID NO: 88771 - DNA, 60 bp, Artificial
  Synthetic oligonucleotide
ggaagttgtattcccaaatgaagtgggagctagaatactaacatcagagtcacaactgac

SEQ ID NO: 88772 - DNA, 60 bp, Artificial
  Synthetic oligonucleotide
tgtgtaacattctcaaagggaagtttcaaacagcagcacaacgagcaatgatggaccagg

SEQ ID NO: 88773 - DNA, 60 bp, Artificial
  Synthetic oligonucleotide
gttcttgaagcaatggctttccttgaagagtcccacccaggaatctttgaaaactcgtgt

SEQ ID NO: 88774 - DNA, 60 bp, Artificial
  Synthetic oligonucleotide
gccatgatggtagagaatggacatatatcggagttgatggtcctgacaatgatgcattgg

SEQ ID NO: 88775 - DNA, 60 bp, Artificial
  Synthetic oligonucleotide
caacattctcaaagggaaattccaaacagcagcacaacgagcaatgatggaccaggtgcg

SEQ ID NO: 88776 - DNA, 60 bp, Artificial
  Synthetic oligonucleotide
gtcccacccgggaatctttgaaaactcgtgtcttgaaacgatggaagttgtccaacaaac

SEQ ID NO: 88777 - DNA, 60 bp, Artificial
  Synthetic oligonucleotide
tgtgatgtcccctgtattgggatagagatggtacacgatggtggaaaaaagacttggcac

SEQ ID NO: 88778 - DNA, 60 bp, Artificial
  Synthetic oligonucleotide
caatctcgcactcgcgagatactaacaaggaccactgtggaccatatggccataatcaag

SEQ ID NO: 88779 - DNA, 60 bp, Artificial
  Synthetic oligonucleotide
ctgggtgaattctacaaccagatgatggtcaaagctggactcaacgatgacatggagaga

SEQ ID NO: 88780 - DNA, 60 bp, Artificial
  Synthetic oligonucleotide
aaactgggtgaattctacaaccagatgatggtcaaagctggactcaacgatgacatggag

SEQ ID NO: 88781 - DNA, 60 bp, Artificial
  Synthetic oligonucleotide
gacaccagaatgcggaaggaacaggaacagcagcagacctcaaatccactcaggcagcca

SEQ ID NO: 88782 - DNA, 60 bp, Artificial
  Synthetic oligonucleotide
gcaatcagcaaccgattccaaattcaaggagtcaaattgacccagggatacaaggacatc

SEQ ID NO: 88783 - DNA, 60 bp, Artificial
  Synthetic oligonucleotide
ccgagccctctgagactagttgacggccagacttgcgatatcatcaatggagcattgggg

SEQ ID NO: 88784 - DNA, 60 bp, Artificial
  Synthetic oligonucleotide
ctggcagaagagctgcaaagcaacattggagtattgagatctcttggagcaagtcaaaag

SEQ ID NO: 88785 - DNA, 60 bp, Artificial
  Synthetic oligonucleotide
cgtccaaaagctggcagaagagctgcaaagcaacattggagtattgagatctcttggagc

SEQ ID NO: 88786 - DNA, 60 bp, Artificial
  Synthetic oligonucleotide
acgtccaaaagctggcagaagagctgcaaagcaacattggagtattgagatctcttggag

SEQ ID NO: 88787 - DNA, 60 bp, Artificial
  Synthetic oligonucleotide
ctggcagaagagctgcaaagcaacattggagtattgagatctcttggggcaagtcaaaag

SEQ ID NO: 88788 - DNA, 60 bp, Artificial
  Synthetic oligonucleotide
cgtccaaaagctggcagaagagctgcaaagcaacattggagtattgagatctcttggggc

SEQ ID NO: 88789 - DNA, 60 bp, Artificial
  Synthetic oligonucleotide
acgtccaaaaactggcagaagagctgcaaagcaacattggagtattgagatctcttggag

SEQ ID NO: 88790 - DNA, 60 bp, Artificial
  Synthetic oligonucleotide
acgtccaaaagctggcagaagagctgcaaagcaacattggagtattgagatctcttgggg

SEQ ID NO: 88791 - DNA, 60 bp, Artificial
  Synthetic oligonucleotide
acgtccaaaaactggcagaagagctgcaaagcaacattggagtattgagatctcttgggg

SEQ ID NO: 88792 - DNA, 60 bp, Artificial
  Synthetic oligonucleotide
taggcccgttatagatataaatatggcagattatagcattgactccagctatgtgtgctc

SEQ ID NO: 88793 - DNA, 52 bp, Artificial
  Synthetic oligonucleotide
aactaggaacgctctgtgctttatgcgagaaacaagcatcacattcacaaag

SEQ ID NO: 88794 - DNA, 60 bp, Artificial
  Synthetic oligonucleotide
agcagaagcacgcactttcttaaaatgtcgctgtttggagacacaattgcctacctgctt

SEQ ID NO: 88795 - DNA, 60 bp, Artificial
  Synthetic oligonucleotide
caacgagagtgaacctgagagtaaaaggatgtctctgaaagagagaaaagcaattggggt

SEQ ID NO: 88796 - DNA, 60 bp, Artificial
  Synthetic oligonucleotide
ttgcgattgggcctattaccctccaaccccagaaaggtaccttgatgacatagaagagga

SEQ ID NO: 88797 - DNA, 60 bp, Artificial
  Synthetic oligonucleotide
gcttcttgctcgttgcactacttttagcctttattttgtgggcttgtcaaaatggaaaca

SEQ ID NO: 88798 - DNA, 60 bp, Artificial
  Synthetic oligonucleotide
gctttttgctcgtcgcactacttttagcctttattttgtgggcttgtcaaaacggaaaca

SEQ ID NO: 88799 - DNA, 60 bp, Artificial
  Synthetic oligonucleotide
cagttctcctccctgactgtgaatgtaagaggatcaggaatgaggatactggtaagaggc

SEQ ID NO: 88800 - DNA, 60 bp, Artificial
  Synthetic oligonucleotide
tggcggaccacatgaacaccacacaaattgaggtgggtccgggagcaaccaatgacacta

SEQ ID NO: 88801 - DNA, 57 bp, Artificial
  Synthetic oligonucleotide
ggagtattgaaagagacggaagagctgaaagcactcattgggtctatagatagcata

SEQ ID NO: 88802 - DNA, 60 bp, Artificial
  Synthetic oligonucleotide
gcagagtcttgaataaagcgccactggatctaatggactgcaccactgagggttggatcc

SEQ ID NO: 88803 - DNA, 60 bp, Artificial
  Synthetic oligonucleotide
gagaatagattctgcagagtcttgaataaagcgccactggatctaatggactgcaccact

SEQ ID NO: 88804 - DNA, 60 bp, Artificial
  Synthetic oligonucleotide
gagagtagattctgcagagtcttgaataaagcgccactggatctaatggactgcaccact

SEQ ID NO: 88805 - DNA, 60 bp, Artificial
  Synthetic oligonucleotide
cgaaaggagaatagacaatctaaacaaaagaatggaagatggatttttagacgtgtggac

SEQ ID NO: 88806 - DNA, 60 bp, Artificial
  Synthetic oligonucleotide
agaagaatgtgacagtgacacactcagtggagctcctagaaaaccagaaggagaatagat

SEQ ID NO: 88807 - DNA, 60 bp, Artificial
  Synthetic oligonucleotide
ggatcaccaataaagtcaattcaatcattgacaaaatgaacacacagtttgaggcagtag

SEQ ID NO: 88808 - DNA, 60 bp, Artificial
  Synthetic oligonucleotide
cgaaaggagaataggcaatctgaacaaaagaatggaagatggatttttagacgtgtggac

SEQ ID NO: 88809 - DNA, 60 bp, Artificial
  Synthetic oligonucleotide
gtcaattcaatcattgacaaaatgaacacacagtttgaggcagtagagcatgagttctca

SEQ ID NO: 88810 - DNA, 60 bp, Artificial
  Synthetic oligonucleotide
cagtggagctcctagaaaaccagaaggagaatagattctgcagagtcttgaataaagcgc

SEQ ID NO: 88811 - DNA, 60 bp, Artificial
  Synthetic oligonucleotide
gcacccagaaagctatagacggaatcaccaataaagtcaattcaatcattgacaaaatga

SEQ ID NO: 88812 - DNA, 60 bp, Artificial
  Synthetic oligonucleotide
cattggttaccatgcaaacaactcgacaacacaagtgaacacaatattagagaagaatgt

SEQ ID NO: 88813 - DNA, 56 bp, Artificial
  Synthetic oligonucleotide
gggtattgaaagagacggaagagctgaaagcactcattgggtctatagatagcata

SEQ ID NO: 88814 - DNA, 57 bp, Artificial
  Synthetic oligonucleotide
ggagtactgaaagagacggaggagctgaaagcactcattgggtctatagatagcata

SEQ ID NO: 88815 - DNA, 60 bp, Artificial
  Synthetic oligonucleotide
tggtatgcttacaagttcactagttccagaaacaagggagctattttcaaatcaggcctc

SEQ ID NO: 88816 - DNA, 60 bp, Artificial
  Synthetic oligonucleotide
tacggtatcgagcagtctggttttggtggggctgatcattgccatgggtctttggatgtg

SEQ ID NO: 88817 - DNA, 60 bp, Artificial
  Synthetic oligonucleotide
ttggtgggactgatcattgccatgggtctttggatgtgctcaaatggctcaatgcaatgc

SEQ ID NO: 88818 - DNA, 56 bp, Artificial
  Synthetic oligonucleotide
ggggtcttttagcacctagatatggatacatcattgagaagtacggtacaggacga

SEQ ID NO: 88819 - DNA, 60 bp, Artificial
  Synthetic oligonucleotide
tggaaactattagaaatgggacctacaatcatgaagattacagggaagagtcacagttga

SEQ ID NO: 88820 - DNA, 60 bp, Artificial
  Synthetic oligonucleotide
taaggacaatgcaataaggttaggtgagaacaaagacgtcatagtcacaagggagcctta

SEQ ID NO: 88821 - DNA, 60 bp, Artificial
  Synthetic oligonucleotide
ggatatgcacaaacagactgtgtcctggaagcaatggctttccttgaagagtcccaccca

SEQ ID NO: 88822 - DNA, 60 bp, Artificial
  Synthetic oligonucleotide
gggtatgcacaaacagactgtgtcctggaagcaatggctttccttgaagagtcccaccca

SEQ ID NO: 88823 - DNA, 60 bp, Artificial
  Synthetic oligonucleotide
cacaacacaaattgaggtgggtccgggagcaaccaatgccactataaactttgaagcagg

SEQ ID NO: 88824 - DNA, 60 bp, Artificial
  Synthetic oligonucleotide
gtggacatccttaggcagaatccaacagaggaacaagccgtggacatatgcaaggcagca

SEQ ID NO: 88825 - DNA, 60 bp, Artificial
  Synthetic oligonucleotide
atttgaaatcacaggaaccatgctcaggctcgccgaccaaagtctcccaccgaacttctc

SEQ ID NO: 88826 - DNA, 60 bp, Artificial
  Synthetic oligonucleotide
atttgaaattacaggaaccatgcgccggcttgccgaccaaagtctcccaccgaacttctc

SEQ ID NO: 88827 - DNA, 60 bp, Artificial
  Synthetic oligonucleotide
atgaacaatgctaccttcaactatacaaacgttaaccctattcctcacatcagggggagt

SEQ ID NO: 88828 - DNA, 60 bp, Artificial
  Synthetic oligonucleotide
acagtgattcacccaacaataacaacccctgcagtaccgaactgcagtgacactataata

SEQ ID NO: 88829 - DNA, 60 bp, Artificial
  Synthetic oligonucleotide
agcaaaagcagggtagataatcactcaccgagtgacatccgcatcatggcgtctcaaggc

SEQ ID NO: 88830 - DNA, 60 bp, Artificial
  Synthetic oligonucleotide
cagggtagataatcactcaccgagtgacatccgcatcatggcgtctcaaggcaccaaacg

SEQ ID NO: 88831 - DNA, 60 bp, Artificial
  Synthetic oligonucleotide
agcaaaagcagggtagataatcactcaccgagtgacatccacatcatggcgcctcaaggc

SEQ ID NO: 88832 - DNA, 55 bp, Artificial
  Synthetic oligonucleotide
agcgaaagcaggcaaaccatttgaatggatgtcaatccgactttacttttcttga

SEQ ID NO: 88833 - DNA, 60 bp, Artificial
  Synthetic oligonucleotide
gcccgttatagatataaatatggcagattatagcattgactccagctatgtgtgctcagg

SEQ ID NO: 88834 - DNA, 60 bp, Artificial
  Synthetic oligonucleotide
gctctctgtggatccaaggagcgattgggatcatggtcctggcatgatggtgctgaaatc

SEQ ID NO: 88835 - DNA, 60 bp, Artificial
  Synthetic oligonucleotide
gcgcaggcttgctgaccaaagtctcccaccgaacttctccagccttgaaaactttagagc

SEQ ID NO: 88836 - DNA, 60 bp, Artificial
  Synthetic oligonucleotide
cgcaggcttgctgaccaaagtctcccaccgaacttctccagccttgaaaactttagagcc

SEQ ID NO: 88837 - DNA, 60 bp, Artificial
  Synthetic oligonucleotide
ccttgaagagtcccacccaggaatctttgaaaactcgtgtcttgaaacgatggaagtcgt

SEQ ID NO: 88838 - DNA, 60 bp, Artificial
  Synthetic oligonucleotide
cccagggatctttgaaaactcgtgtcttgaaacgatggaagttgttcagcaaacaagagt

SEQ ID NO: 88839 - DNA, 60 bp, Artificial
  Synthetic oligonucleotide
gggatctttgaaaactcgtgtcttgaaacgatggaagttgttcagcaaacaagagtggac

SEQ ID NO: 88840 - DNA, 60 bp, Artificial
  Synthetic oligonucleotide
ggcgaacaacatgaccacaacacaaattgaggtgggtccgggagcaaccaatgccaccat

SEQ ID NO: 88841 - DNA, 60 bp, Artificial
  Synthetic oligonucleotide
ggcggaaaacatgaccacaacacaaattgaggtgggtccgggagcaaccaatgccaccat

SEQ ID NO: 88842 - DNA, 60 bp, Artificial
  Synthetic oligonucleotide
atggcgaacaacatgaccacaacacaaattgaggtgggtccgggagcaaccaatgccacc

SEQ ID NO: 88843 - DNA, 60 bp, Artificial
  Synthetic oligonucleotide
caacatgaccacaacacaaattgaggtgggtccgggagcaaccaatgccactataaactt

SEQ ID NO: 88844 - DNA, 60 bp, Artificial
  Synthetic oligonucleotide
ggtgtggtgcgcgagtggcaggagcaaagtaataaaagggtccttgcctttaattggtga

SEQ ID NO: 88845 - DNA, 60 bp, Artificial
  Synthetic oligonucleotide
acccccattgtactggcatacatgcttgagagagaactggttgcccgaagaaggttcctg

SEQ ID NO: 88846 - DNA, 60 bp, Artificial
  Synthetic oligonucleotide
ataggaagattctacatacagatgtgcactgagctcaagctcagtgacaatgagggaagg

SEQ ID NO: 88847 - DNA, 60 bp, Artificial
  Synthetic oligonucleotide
cgctactatattgtctcatggtcatgtacctgaaccctggaaattattcaatgcaagtaa

SEQ ID NO: 88848 - DNA, 60 bp, Artificial
  Synthetic oligonucleotide
atagcagaaggccatgaaagctcagcattactatattgtctcatggtcatgtacctgaac

SEQ ID NO: 88849 - DNA, 60 bp, Artificial
  Synthetic oligonucleotide
cgctactatattgtctcatggtcatgtacctgaaccctgggaattattcaatgcaagtaa

SEQ ID NO: 88850 - DNA, 60 bp, Artificial
  Synthetic oligonucleotide
gccccgtgtttgcagtagaaagacctattgctctaagcaagcaagctgtaagaagaatgc

SEQ ID NO: 88851 - DNA, 60 bp, Artificial
  Synthetic oligonucleotide
gccctgtgtttgcagtagaaagacctattgctctaagcaagcaagctgtaagaagaatgc

SEQ ID NO: 88852 - DNA, 60 bp, Artificial
  Synthetic oligonucleotide
gcagccccgtgtttgcagtagaaagacctattgctctaagcaagcaagctgtaagaagaa

SEQ ID NO: 88853 - DNA, 60 bp, Artificial
  Synthetic oligonucleotide
gcccagtgtttgcagtagaaagacctattgctctaagcaagcaagctgtaagaagaatgc

SEQ ID NO: 88854 - DNA, 60 bp, Artificial
  Synthetic oligonucleotide
gcttcgagcaaataacattcttgcaggcattgcaactcttacttgaagttgagagtgaga

SEQ ID NO: 88855 - DNA, 60 bp, Artificial
  Synthetic oligonucleotide
gtttcgagcagataacattgttgcaagcgttgcaactcttacttgaagttgagagtgaga

SEQ ID NO: 88856 - DNA, 60 bp, Artificial
  Synthetic oligonucleotide
agcttcgagcagataacgttcttacaagcattgcaactcttacttgaagttgagagtgag

SEQ ID NO: 88857 - DNA, 57 bp, Artificial
  Synthetic oligonucleotide
ccattgcaacaatatgtttcctcatgcagattgccatcctagcaacgactgtaacac

SEQ ID NO: 88858 - DNA, 60 bp, Artificial
  Synthetic oligonucleotide
ctcggacgaaaaggcgacgaacccgatcgtgccttcctttgacatgaataacgagggatc

SEQ ID NO: 88859 - DNA, 60 bp, Artificial
  Synthetic oligonucleotide
aggtaaaagacagaataaccagagtggaatacatcaaaagagcattatcattaaacacaa

SEQ ID NO: 88860 - DNA, 60 bp, Artificial
  Synthetic oligonucleotide
gttacaggatgtgcaatggtagatccaacaaatgggccattacccgaagataatgagccg

SEQ ID NO: 88861 - DNA, 56 bp, Artificial
  Synthetic oligonucleotide
gaaggaattgcaaaggatgtaatggaagtgctgaagcagagctccatgggaaattc

SEQ ID NO: 88862 - DNA, 60 bp, Artificial
  Synthetic oligonucleotide
tctggctagtgaaacaaaatgaaaaataccctgttgtaaaaggggattacaacaacacaa

SEQ ID NO: 88863 - DNA, 60 bp, Artificial
  Synthetic oligonucleotide
ggggtggcctggtctaatcaatggatggtatggtttccagcatcagaacgaacaggggac

SEQ ID NO: 88864 - DNA, 60 bp, Artificial
  Synthetic oligonucleotide
ctacgacatctcttcagtggagtgaactcctttagcagaacggagctaataagtcccagt

SEQ ID NO: 88865 - DNA, 58 bp, Artificial
  Synthetic oligonucleotide
cgctggatttgcatgatgctaatgtcaagaacctacatgagcaggtcaagagggcatt

SEQ ID NO: 88866 - DNA, 60 bp, Artificial
  Synthetic oligonucleotide
tcagagagtggtcatatttaattgaagaccctaatgcccctaataaactgtgttacccag

SEQ ID NO: 88867 - DNA, 60 bp, Artificial
  Synthetic oligonucleotide
ggggtcagcccaattcatcttggtgactgtagcttcgagggatggattgtaggaaacccc

SEQ ID NO: 88868 - DNA, 60 bp, Artificial
  Synthetic oligonucleotide
cactgggtggggtaaacaccaacaaaacttttcagaacatagagagaaatgcccttggag

SEQ ID NO: 88869 - DNA, 60 bp, Artificial
  Synthetic oligonucleotide
cagcatcagaacgaacaggggactggcattgctgcggataaagtttccacacagaaagcc

SEQ ID NO: 88870 - DNA, 60 bp, Artificial
  Synthetic oligonucleotide
gaatggagcaaacggtatgaactcgaaattgggaccagaataggagatggacagagaagc

SEQ ID NO: 88871 - DNA, 60 bp, Artificial
  Synthetic oligonucleotide
gtgatggtaggtctcatacttgcatttataatgtgggcatgcagtagtggaaattgccgg

SEQ ID NO: 88872 - DNA, 60 bp, Artificial
  Synthetic oligonucleotide
caaaatgtcaaacgtcactgggtggggtaaacaccaacaaaacttttcagaacatagaga

SEQ ID NO: 88873 - DNA, 60 bp, Artificial
  Synthetic oligonucleotide
ctgtgaccagctcaattgacctcgttgagacaaaccatactggaacatactgctcattga

SEQ ID NO: 88874 - DNA, 60 bp, Artificial
  Synthetic oligonucleotide
ttgacctcgttgagacaaaccatactggaacatactgctcattgaatggggtcagcccaa

SEQ ID NO: 88875 - DNA, 60 bp, Artificial
  Synthetic oligonucleotide
cagacacagtggacacactaacagagaatggagttcctgtgaccagctcaattgacctcg

SEQ ID NO: 88876 - DNA, 60 bp, Artificial
  Synthetic oligonucleotide
atagtgcttggcagatattcaagagcagacaaaatatgtataggatatctaagcaataac

SEQ ID NO: 88877 - DNA, 60 bp, Artificial
  Synthetic oligonucleotide
gcttcatagaaggggggtggcctggtctaatcaatggatggtatggtttccagcatcaga

SEQ ID NO: 88878 - DNA, 60 bp, Artificial
  Synthetic oligonucleotide
ataatgtttgagagtaatgggggtcttttagcacctagatatggatacatcattgagaag

SEQ ID NO: 88879 - DNA, 60 bp, Artificial
  Synthetic oligonucleotide
ataggaagattctacatacagatgtgcactgaactcaaactcagcgactatgaaggaagg

SEQ ID NO: 88880 - DNA, 60 bp, Artificial
  Synthetic oligonucleotide
ggattcttcccttttcacaaggacaatgcaatacgattgggtgagaacagagacgtcata

SEQ ID NO: 88881 - DNA, 60 bp, Artificial
  Synthetic oligonucleotide
acagtattgtcgtattttgtggcacttcaggcacctatggaacaggctcatggcctgatg

SEQ ID NO: 88882 - DNA, 60 bp, Artificial
  Synthetic oligonucleotide
caaacagtattgtcgtattttgtggcacttcagggacctatggaacaggctcatggcctg

SEQ ID NO: 88883 - DNA, 60 bp, Artificial
  Synthetic oligonucleotide
atggtggacctcaaacagtattgtcgtattttgtggcacttcagggacctatggaacagg

SEQ ID NO: 88884 - DNA, 60 bp, Artificial
  Synthetic oligonucleotide
atggtggacctcaaacagtattgtcgtattttgtggcacttcaggtacctatggaacagg

SEQ ID NO: 88885 - DNA, 60 bp, Artificial
  Synthetic oligonucleotide
gagactagagtatggtggacctcaaacagtattgtcgtattttgtggcacttcaggcact

SEQ ID NO: 88886 - DNA, 60 bp, Artificial
  Synthetic oligonucleotide
ggaaggccgcaggagactagggtatggtggacctcaaacagtattgtcgtattttgtggc

SEQ ID NO: 88887 - DNA, 60 bp, Artificial
  Synthetic oligonucleotide
agcttgcagtcttgctttccaacgaaggaataataaacagtgaagatgagcatctcttgg

SEQ ID NO: 88888 - DNA, 60 bp, Artificial
  Synthetic oligonucleotide
aaaataagagtgcatgaggggtatgaagaattcacaatggttgggagaagagcaacagcc

SEQ ID NO: 88889 - DNA, 60 bp, Artificial
  Synthetic oligonucleotide
gggtctggccaaataagttgcagcccagtgtttgcagtagaaagacctattgctctaagc

SEQ ID NO: 88890 - DNA, 60 bp, Artificial
  Synthetic oligonucleotide
gagggtctggccaaataagttgcagcccagtgtttgcagtagaaagacctattgctctaa

SEQ ID NO: 88891 - DNA, 60 bp, Artificial
  Synthetic oligonucleotide
acaaagggcggttactgcatcctcaaaatccctttgtaggacatttgtctattgagggca

SEQ ID NO: 88892 - DNA, 60 bp, Artificial
  Synthetic oligonucleotide
gccttgggcaccatgctgtggtaaatgggacaaaggtgaacacgctaacagagaagggga

SEQ ID NO: 88893 - DNA, 60 bp, Artificial
  Synthetic oligonucleotide
attcattgcttgtgtgctggttgaagctaagggagacaaaatatgccttgggcaccatgc

SEQ ID NO: 88894 - DNA, 60 bp, Artificial
  Synthetic oligonucleotide
ggacaatgtggactcctaggaaccctaataggacctccccaatgtgatcagttcctggag

SEQ ID NO: 88895 - DNA, 60 bp, Artificial
  Synthetic oligonucleotide
tgggacaatgtggactcctaggaaccctaataggacctccccaatgtgatcagttcctgg

SEQ ID NO: 88896 - DNA, 60 bp, Artificial
  Synthetic oligonucleotide
cactaaggcagatccttcgagggtcaggaggaatcgataaagagtcgatgggtttcacat

SEQ ID NO: 88897 - DNA, 60 bp, Artificial
  Synthetic oligonucleotide
cagagaaggggattgaagtagtgaatgctacggagacggtagaaactgcgaatatcggga

SEQ ID NO: 88898 - DNA, 60 bp, Artificial
  Synthetic oligonucleotide
ggttcttccttctatgcggagatgaagtggttgctgtcaaattctgacaatgcagcattc

SEQ ID NO: 88899 - DNA, 60 bp, Artificial
  Synthetic oligonucleotide
gcagatccttcgagggtcaggaggaatcgataaagagtcgatgggtttcacatatagtgg

SEQ ID NO: 88900 - DNA, 60 bp, Artificial
  Synthetic oligonucleotide
acgctaacagagaaggggattgaagtagtgaatgctacggagacggtagaaactgcgaat

SEQ ID NO: 88901 - DNA, 60 bp, Artificial
  Synthetic oligonucleotide
cactcaaattctggtattcattgcttgtgtgctggttgaagctaagggagacaaaatatg

SEQ ID NO: 88902 - DNA, 60 bp, Artificial
  Synthetic oligonucleotide
acaaaatatgccttgggcaccatgctgtggtaaatgggacaaaggtgaacacgctaacag

SEQ ID NO: 88903 - DNA, 60 bp, Artificial
  Synthetic oligonucleotide
cggccacaagtaaatggacagtctgggagaatcgatttccattggatgcttcttgatccc

SEQ ID NO: 88904 - DNA, 60 bp, Artificial
  Synthetic oligonucleotide
gggcattcatagcccctgacagagcaagtttcttcaaaggagaatcactaggagtccaga

SEQ ID NO: 88905 - DNA, 60 bp, Artificial
  Synthetic oligonucleotide
tcttccttctatgcggagatgaagtggttgctgtcaaattctgacaatgcagcattcccc

SEQ ID NO: 88906 - DNA, 60 bp, Artificial
  Synthetic oligonucleotide
ggagcacggccacaagtaaatggacagtctgggagaatcgatttccattggatgcttctt

SEQ ID NO: 88907 - DNA, 60 bp, Artificial
  Synthetic oligonucleotide
caacacttatgaccatgcccaatacagagcagagtcattacagaataggatacagataga

SEQ ID NO: 88908 - DNA, 60 bp, Artificial
  Synthetic oligonucleotide
gaatggaaacatgcggtgcactatttgtatataatttgagaaaaacacccttgtttctac

SEQ ID NO: 88909 - DNA, 60 bp, Artificial
  Synthetic oligonucleotide
ggcattcatagcccctgacagagcaagtttcttcaaaggagaatcactaggagtccagag

SEQ ID NO: 88910 - DNA, 60 bp, Artificial
  Synthetic oligonucleotide
caagcctccttttggctactggaatgaggaatgtcccagagaatccaaagaccagaggac

SEQ ID NO: 88911 - DNA, 60 bp, Artificial
  Synthetic oligonucleotide
actgctatttgcaactattttcctttatgtaaaggcagatgaaatctgtatcggctattt

SEQ ID NO: 88912 - DNA, 60 bp, Artificial
  Synthetic oligonucleotide
tcggctatttaagcaacaactcaacagacaaagttgacacaataatcgagaacaatgtta

SEQ ID NO: 88913 - DNA, 60 bp, Artificial
  Synthetic oligonucleotide
gcaactattttcctttatgtaaaggcagatgaaatctgtatcggctatttaagcaacaac

SEQ ID NO: 88914 - DNA, 60 bp, Artificial
  Synthetic oligonucleotide
tgttcaatcaatgggaaacaaccgataagccttggagattgctcctttgcagggtggata

SEQ ID NO: 88915 - DNA, 60 bp, Artificial
  Synthetic oligonucleotide
gctatttaagcaacaactcaacagacaaagttgacacaataatcgagaacaatgttacgg

SEQ ID NO: 88916 - DNA, 60 bp, Artificial
  Synthetic oligonucleotide
agggtggatattgggaaatcccatgtgtgatgacctaattggtaagacttcatggtccta

SEQ ID NO: 88917 - DNA, 60 bp, Artificial
  Synthetic oligonucleotide
gggaaacaaccgataagccttggagattgctcctttgcagggtggatattgggaaatccc

SEQ ID NO: 88918 - DNA, 60 bp, Artificial
  Synthetic oligonucleotide
catggtcctatattgtggagaagcctaacccaacaaacggaatttgttacccaggaacat

SEQ ID NO: 88919 - DNA, 60 bp, Artificial
  Synthetic oligonucleotide
gttggaaatggaaaactattcaggagtgaactgaatattgaatcatgctctaccaaatgt

SEQ ID NO: 88920 - DNA, 60 bp, Artificial
  Synthetic oligonucleotide
ctattcaggagtgaactgaatattgaatcatgctctaccaaatgtcaaacagaaatagga

SEQ ID NO: 88921 - DNA, 60 bp, Artificial
  Synthetic oligonucleotide
taccaaatgtcaaacagaaataggagggattaatacaaacaaaagcttccacagtgttca

SEQ ID NO: 88922 - DNA, 60 bp, Artificial
  Synthetic oligonucleotide
agaaataggagggattaatacaaacaaaagcttccacagtgttcatagaaacactatcgg

SEQ ID NO: 88923 - DNA, 60 bp, Artificial
  Synthetic oligonucleotide
tgaatgtcaagtccctgaaacttgccacgggacttagaaatgtcccagcaatagcatcaa

SEQ ID NO: 88924 - DNA, 60 bp, Artificial
  Synthetic oligonucleotide
gtcaagtccctgaaacttgccacgggacttagaaatgtcccagcaatagcatcaagaggc

SEQ ID NO: 88925 - DNA, 60 bp, Artificial
  Synthetic oligonucleotide
ggatggtacgggtttcaacacaggaatgaagaaggaacaggcatagcagcagacaaggag

SEQ ID NO: 88926 - DNA, 60 bp, Artificial
  Synthetic oligonucleotide
gcatagcagcagacaaggagtcaactcagaaggcaatagaccagataacgtccaaggtaa

SEQ ID NO: 88927 - DNA, 60 bp, Artificial
  Synthetic oligonucleotide
tccaaggtaaataatatcgtcgacagaatgaatacaaatttcgagtctgtacaacacgaa

SEQ ID NO: 88928 - DNA, 60 bp, Artificial
  Synthetic oligonucleotide
gatcacaaagaattcgaagaggaatcaaaaatcaatcgccaggagattgagggagtgaaa

SEQ ID NO: 88929 - DNA, 60 bp, Artificial
  Synthetic oligonucleotide
acagctgcattgcaagcagtctcgtattggcagcactcatcatgggtttcatcctctggg

SEQ ID NO: 88930 - DNA, 60 bp, Artificial
  Synthetic oligonucleotide
cattgcaagcagtctcgtattggcagcactcatcatgggtttcatcctctgggcgtgcag

SEQ ID NO: 88931 - DNA, 60 bp, Artificial
  Synthetic oligonucleotide
gggagtgaaattagactccagtgggaatgtgtataaaatactgtcaatttacagctgcat

SEQ ID NO: 88932 - DNA, 60 bp, Artificial
  Synthetic oligonucleotide
atgtagcagtgggttcagaaacctacaacagaagattcatcccagaaatcagcactaggc

SEQ ID NO: 88933 - DNA, 60 bp, Artificial
  Synthetic oligonucleotide
gaattcaggggcaggagtaactgctgcatgcaaattcggaagctccaattccttcttccg

SEQ ID NO: 88934 - DNA, 60 bp, Artificial
  Synthetic oligonucleotide
ggtcctatattgtggagaagcctaacccaacaaacggaatttgttacccaggaacattgg

SEQ ID NO: 88935 - DNA, 60 bp, Artificial
  Synthetic oligonucleotide
ccaggaacattggagaatgaagaagaactaagactgaaattcagtggaatcttggaattc

SEQ ID NO: 88936 - DNA, 60 bp, Artificial
  Synthetic oligonucleotide
cgaaacatggtctggctgatacatcaatcgggaacataccctgtaataaagaggaccttc

SEQ ID NO: 88937 - DNA, 60 bp, Artificial
  Synthetic oligonucleotide
gtaataaagaggaccttcaacaacaccaaaggaagagatgtgttggttgtttggggaatt

SEQ ID NO: 88938 - DNA, 60 bp, Artificial
  Synthetic oligonucleotide
gagtaactgctgcatgcaaattcggaagctccaattccttcttccgaaacatggtctggc

SEQ ID NO: 88939 - DNA, 60 bp, Artificial
  Synthetic oligonucleotide
ccttcttccgaaacatggtctggctgatacatcaatcgggaacataccctgtaataaaga

SEQ ID NO: 88940 - DNA, 60 bp, Artificial
  Synthetic oligonucleotide
gaccttcaacaacaccaaaggaagagatgtgttggttgtttggggaattcaccaccctgc

SEQ ID NO: 88941 - DNA, 60 bp, Artificial
  Synthetic oligonucleotide
ttggggaattcaccaccctgctacactgaaagagcatcaagacctatacaagaaggacag

SEQ ID NO: 88942 - DNA, 60 bp, Artificial
  Synthetic oligonucleotide
atcgtcgacagaatgaatacaaatttcgagtctgtacaacacgaattcagtgaaatagag

SEQ ID NO: 88943 - DNA, 60 bp, Artificial
  Synthetic oligonucleotide
ctccagtgggaatgtgtataaaatactgtcaatttacagctgcattgcaagcagtctcgt

SEQ ID NO: 88944 - DNA, 60 bp, Artificial
  Synthetic oligonucleotide
agtctaatggtgcattcctggctcctggatatgcttttgagattgtctctgttggaaatg

SEQ ID NO: 88945 - DNA, 60 bp, Artificial
  Synthetic oligonucleotide
gacaatagtcaaaccaggagagtcaataacatttgagtctaatggtgcattcctggctcc

SEQ ID NO: 88946 - DNA, 60 bp, Artificial
  Synthetic oligonucleotide
aatgacattttattggacaatagtcaaaccaggagagtcaataacatttgagtctaatgg

SEQ ID NO: 88947 - DNA, 60 bp, Artificial
  Synthetic oligonucleotide
ccagaaatcagcactaggcccaaggttaatggacaggctggacgaatgacattttattgg

SEQ ID NO: 88948 - DNA, 60 bp, Artificial
  Synthetic oligonucleotide
ttcatcccagaaatcagcactaggcccaaggttaatggacaggctggacgaatgacattt

SEQ ID NO: 88949 - DNA, 60 bp, Artificial
  Synthetic oligonucleotide
caacgaatgcatcgaaagggttagaaacggaacatatgatcacaaagaattcgaagagga

SEQ ID NO: 88950 - DNA, 60 bp, Artificial
  Synthetic oligonucleotide
agaaggacagttcctatgtagcagtgggttcagaaacctacaacagaagattcatcccag

SEQ ID NO: 88951 - DNA, 60 bp, Artificial
  Synthetic oligonucleotide
ccaccctgctacactgaaagagcatcaagacctatacaagaaggacagttcctatgtagc

SEQ ID NO: 88952 - DNA, 60 bp, Artificial
  Synthetic oligonucleotide
gaaaagaccctggacctccacgactccaatgtcagaaatctccatgaaaaggttagaagg

SEQ ID NO: 88953 - DNA, 60 bp, Artificial
  Synthetic oligonucleotide
gttttgcttgaaaatgaaaagaccctggacctccacgactccaatgtcagaaatctccat

SEQ ID NO: 88954 - DNA, 60 bp, Artificial
  Synthetic oligonucleotide
accataagtgtgacaacgaatgcatcgaaagggttagaaacggaacatatgatcacaaag

SEQ ID NO: 88955 - DNA, 57 bp, Artificial
  Synthetic oligonucleotide
aaatctccatgaaaaggttagaaggatgctaaaggacaatgccaaagacgagggaaa

SEQ ID NO: 88956 - DNA, 60 bp, Artificial
  Synthetic oligonucleotide
gtgaaatagaggaaaggataaaccaattgtcgaaacatgtagatgattctgtggttgaca

SEQ ID NO: 88957 - DNA, 60 bp, Artificial
  Synthetic oligonucleotide
acaacacgaattcagtgaaatagaggaaaggataaaccaattgtcgaaacatgtagatga

SEQ ID NO: 88958 - DNA, 60 bp, Artificial
  Synthetic oligonucleotide
tggttgacatctggtcatataatgcacaactcctcgttttgcttgaaaatgaaaagaccc

SEQ ID NO: 88959 - DNA, 60 bp, Artificial
  Synthetic oligonucleotide
atgtagatgattctgtggttgacatctggtcatataatgcacaactcctcgttttgcttg

SEQ ID NO: 88960 - DNA, 60 bp, Artificial
  Synthetic oligonucleotide
atgaccaaagcttgtttcaagggagacagagtgaatagtcccaaaactttcagtattggg

SEQ ID NO: 88961 - DNA, 60 bp, Artificial
  Synthetic oligonucleotide
catgaccaaagcttgtttcaagggagacagagtgaatagtcccaaaactttcagtattgg

SEQ ID NO: 88962 - DNA, 60 bp, Artificial
  Synthetic oligonucleotide
atcaagaatcatcgatacaagggtatgatatgaccaaagcttgtttcaagggagacagag

SEQ ID NO: 88963 - DNA, 55 bp, Artificial
  Synthetic oligonucleotide
agtgtacagcaggcagtgcttatgaatgtaaaataaaaatcctcttgttactact

SEQ ID NO: 88964 - DNA, 50 bp, Artificial
  Synthetic oligonucleotide
acagcaggcagtgcttgtgaatgtaaaataaaaatcctcttgttactact

SEQ ID NO: 88965 - DNA, 60 bp, Artificial
  Synthetic oligonucleotide
gaataaagactcacaacaagagtgagcctgagaataaaaggatgtctcttgaagagagaa

SEQ ID NO: 88966 - DNA, 60 bp, Artificial
  Synthetic oligonucleotide
aaaaagggatatatgcaatgtaatgtccttaagagtgttggtgaacggaaccttcctcaa

SEQ ID NO: 88967 - DNA, 60 bp, Artificial
  Synthetic oligonucleotide
ataaagactcacaacaagagtgagcctgagagtaaaaggatgtctcttaaagagagaaaa

SEQ ID NO: 88968 - DNA, 60 bp, Artificial
  Synthetic oligonucleotide
aaactctacaaagattcgcttggagaagcagtaatgaggatgggagacctccactccctc

SEQ ID NO: 88969 - DNA, 60 bp, Artificial
  Synthetic oligonucleotide
ttgcttgaagttgagcaagagataagaactttctcgtttcagcttatttaatgataaaaa

SEQ ID NO: 88970 - DNA, 60 bp, Artificial
  Synthetic oligonucleotide
cactgagtgacatcaacaccatggcgtctcaaggcaccaaacgatcttatgagcagatgg

SEQ ID NO: 88971 - DNA, 60 bp, Artificial
  Synthetic oligonucleotide
gacaatgagcctggatcgggcaattggcctgatggtgctaatattgggtttatgcccaag

SEQ ID NO: 88972 - DNA, 60 bp, Artificial
  Synthetic oligonucleotide
agacaatgaacctggatcgggcaattggcctgatggtgctaacattgggttatgcccaag

SEQ ID NO: 88973 - DNA, 60 bp, Artificial
  Synthetic oligonucleotide
tagacaatgaacctggatcgggcaattggcctgatggtgctaacattgggttatgcccaa

SEQ ID NO: 88974 - DNA, 60 bp, Artificial
  Synthetic oligonucleotide
tacatgctagaaagagagttagtccgcaaaacgaggttcctcccagtggctggtggaaca

SEQ ID NO: 88975 - DNA, 60 bp, Artificial
  Synthetic oligonucleotide
atacatgctagaaagagagttagtccgcaaaacgaggttcctcccagtggctggtggaac

SEQ ID NO: 88976 - DNA, 60 bp, Artificial
  Synthetic oligonucleotide
caaaaacacaatggcagaatttagtgaagatcctgaattacagccagcagtactattcaa

SEQ ID NO: 88977 - DNA, 56 bp, Artificial
  Synthetic oligonucleotide
atgaccaaagcttgtttcaagggagacagagtgaacagccccaaaactttcagtat

SEQ ID NO: 88978 - DNA, 60 bp, Artificial
  Synthetic oligonucleotide
gggagattctacatacaaatgtgcactgaactcaaactcagtgactacgaagggagactg

SEQ ID NO: 88979 - DNA, 60 bp, Artificial
  Synthetic oligonucleotide
gggaggttctacatacaaatgtgcactgaactcaaactcagtgactacgaagggagactg

SEQ ID NO: 88980 - DNA, 60 bp, Artificial
  Synthetic oligonucleotide
ccactaccgctgtgccctttcagaggtttcttcccttttcataaggacaatgcaataagg

SEQ ID NO: 88981 - DNA, 60 bp, Artificial
  Synthetic oligonucleotide
gtgggagatcaggctttgaaatcatcaaagttacagaaggatggattaattctcccaatc

SEQ ID NO: 88982 - DNA, 60 bp, Artificial
  Synthetic oligonucleotide
ctagtgggagatcaggctttgaaatcatcaaagttacagaaggatggattaattctccca

SEQ ID NO: 88983 - DNA, 60 bp, Artificial
  Synthetic oligonucleotide
agtcaaacaagtgtagtccctaacattggtagcagaccttgggtgagaggacaaagtgga

SEQ ID NO: 88984 - DNA, 60 bp, Artificial
  Synthetic oligonucleotide
accaagtagaagtggtcactgcacaagaactggtagaatcacaaaacctcccggaattat

SEQ ID NO: 88985 - DNA, 60 bp, Artificial
  Synthetic oligonucleotide
gttgcactacttttagccttcattttgtgggcttgtcagaacggaaacatccggtgccag

SEQ ID NO: 88986 - DNA, 60 bp, Artificial
  Synthetic oligonucleotide
gacgtgccagattaccagagtttgagaagcatacttgccaacaatgggaaatttgagttc

SEQ ID NO: 88987 - DNA, 60 bp, Artificial
  Synthetic oligonucleotide
aagtggtcactgcacaagaactggtagaatcgcagaacctcccggaattgtgtccgagcc

SEQ ID NO: 88988 - DNA, 60 bp, Artificial
  Synthetic oligonucleotide
gagcctggagacctgatagtcttcaacacaatagggaatctaattgccccaagagggcat

SEQ ID NO: 88989 - DNA, 60 bp, Artificial
  Synthetic oligonucleotide
tgatagtcttcaacacaatagggaatctaattgccccaagaggacattacaagctaaaca

SEQ ID NO: 88990 - DNA, 60 bp, Artificial
  Synthetic oligonucleotide
gctttttgctcgttgcactacttttagccttcattttgtgggcttgtcagaacggaaaca

SEQ ID NO: 88991 - DNA, 60 bp, Artificial
  Synthetic oligonucleotide
gctttttgctcgttgcactacttttagccttcattttgtgggcttgtcaaaacggaaaca

SEQ ID NO: 88992 - DNA, 60 bp, Artificial
  Synthetic oligonucleotide
tagtcaaacaagtgtagtccctaacattggtagtagaccctgggtgagaggacagagcgg

SEQ ID NO: 88993 - DNA, 60 bp, Artificial
  Synthetic oligonucleotide
ggaaggataagtttctattggactattgtagagcctggagacctgatagtcttcaacaca

SEQ ID NO: 88994 - DNA, 60 bp, Artificial
  Synthetic oligonucleotide
gtagagcctggagacctgatagtcttcaacacaatagggaatctaattgccccaagaggg

SEQ ID NO: 88995 - DNA, 60 bp, Artificial
  Synthetic oligonucleotide
ggatcctcaactcactcttcgagcgttttgatgaaggacatccaaagccaattcgagcag

SEQ ID NO: 88996 - DNA, 60 bp, Artificial
  Synthetic oligonucleotide
aattctggagtgctatgaaaggctttcatggcaaagagcccttgactaccctggtcaaga

SEQ ID NO: 88997 - DNA, 60 bp, Artificial
  Synthetic oligonucleotide
tggcagcagaccatgggtgagaggccaaagcggcaggatcagcttctattggacaattgt

SEQ ID NO: 88998 - DNA, 60 bp, Artificial
  Synthetic oligonucleotide
gcagcagaccatgggtgagaggccaaagcggcaggatcagcttctattggacaattgtag

SEQ ID NO: 88999 - DNA, 54 bp, Artificial
  Synthetic oligonucleotide
ctacctgctttcactaacagaagatggagaaggcaaagcagaactagcagaaaa

SEQ ID NO: 89000 - DNA, 60 bp, Artificial
  Synthetic oligonucleotide
gctgtttggagacacaattgcctacctgctttcattgacggaagatggagaaggcaaagc

SEQ ID NO: 89001 - DNA, 60 bp, Artificial
  Synthetic oligonucleotide
caatagctgggtttatagagaatggctggcaaggcctaattgatggttggtatgggttca

SEQ ID NO: 89002 - DNA, 60 bp, Artificial
  Synthetic oligonucleotide
cgtcgccttaaatacggtttgaaaagagggccttctacggaaggagtgcctgagtcgatg

SEQ ID NO: 89003 - DNA, 60 bp, Artificial
  Synthetic oligonucleotide
cgtcaccttaaatacggtttgaaaagagggccttctacggaaggagtgcctgagtctatg

SEQ ID NO: 89004 - DNA, 60 bp, Artificial
  Synthetic oligonucleotide
gactaggaaaagggtacatgttcgagagtaagagcatgaagcttcgaacacagataccgg

SEQ ID NO: 89005 - DNA, 60 bp, Artificial
  Synthetic oligonucleotide
cttatggtttagcttcggggcatcatgttttcttcttctagccattgcaatgggattggt

SEQ ID NO: 89006 - DNA, 60 bp, Artificial
  Synthetic oligonucleotide
ttacatccgggtgctttcctataatgcacgacagaacaaaaattagacagctgcccaatc

SEQ ID NO: 89007 - DNA, 60 bp, Artificial
  Synthetic oligonucleotide
gggaagagaatgaaaattataaaggagctatgggaaaacactaaaggaagagatggtcta

SEQ ID NO: 89008 - DNA, 60 bp, Artificial
  Synthetic oligonucleotide
gaatgaaaattataaaggagctatgggaaaacactaaaggaagagatggcctgttagtag

SEQ ID NO: 89009 - DNA, 60 bp, Artificial
  Synthetic oligonucleotide
aatgaaaattataaaggagctatgggaaaacactaaaggaagagatggcctgttagtagc

SEQ ID NO: 89010 - DNA, 60 bp, Artificial
  Synthetic oligonucleotide
gaatgaaaattataaaggagctatgggaaaacactaaaggaagagatggtctgttagtag

SEQ ID NO: 89011 - DNA, 60 bp, Artificial
  Synthetic oligonucleotide
aatgaaaattataaaggagctatgggaaaacactaaaggaagagatggtctgttagtagc

SEQ ID NO: 89012 - DNA, 60 bp, Artificial
  Synthetic oligonucleotide
gagaatgaaaattataaaggagctatgggaaaacactaaaggaagagatggtctgttggt

SEQ ID NO: 89013 - DNA, 60 bp, Artificial
  Synthetic oligonucleotide
cttcctttgacatgagtaatgtgggatcttatttcttcggagacaatgcagaggagtatg

SEQ ID NO: 89014 - DNA, 60 bp, Artificial
  Synthetic oligonucleotide
ggttgggcaggacagtgtcaactagtggtagatcgggctttgaaatcatcaaagttgcag

SEQ ID NO: 89015 - DNA, 60 bp, Artificial
  Synthetic oligonucleotide
gctcaagttgtcatgatgggaaagcatggttgcacgtttgtgtcactggggatgatagaa

SEQ ID NO: 89016 - DNA, 60 bp, Artificial
  Synthetic oligonucleotide
tcaattggtgtggatggcatgccattctgcagcatttgaggatttgagggtgtcaagttt

SEQ ID NO: 89017 - DNA, 60 bp, Artificial
  Synthetic oligonucleotide
ggtgtggatggcatgccattctgcagcatttgaggacctgagagtctcaagtttcatcag

SEQ ID NO: 89018 - DNA, 60 bp, Artificial
  Synthetic oligonucleotide
gagttcacaatggttgggagaagagcaacagctattctcagaaaagcaaccaggagattg

SEQ ID NO: 89019 - DNA, 60 bp, Artificial
  Synthetic oligonucleotide
tgtgagctttcatgaagcatttgaaatagcagaaggccatgaaagctcagcgctactata

SEQ ID NO: 89020 - DNA, 60 bp, Artificial
  Synthetic oligonucleotide
ctcatgctatggagcagaagaaatgattaaatgcatttgcagggacaattggaaaggtgc

SEQ ID NO: 89021 - DNA, 60 bp, Artificial
  Synthetic oligonucleotide
taatgaccccggaagcggaaactgtgatgcaccgataaccggagggagcccagatcctgg

SEQ ID NO: 89022 - DNA, 60 bp, Artificial
  Synthetic oligonucleotide
gggggaaattcctggttgggaaggaccataagcaaagattcaaggtcagggtatgagata

SEQ ID NO: 89023 - DNA, 60 bp, Artificial
  Synthetic oligonucleotide
gtatgagatactaaaagtcccgaatgcggaaacagacaatcagtccggtccagttgcaca

SEQ ID NO: 89024 - DNA, 60 bp, Artificial
  Synthetic oligonucleotide
agatactaaaagtcccgaatgcggaaacagacaatcagtccggtccagttgcacatcagg

SEQ ID NO: 89025 - DNA, 60 bp, Artificial
  Synthetic oligonucleotide
tggggctgaaatcatctactttaagtagaaaagattttggaaaaacacccttgtttctac

SEQ ID NO: 89026 - DNA, 60 bp, Artificial
  Synthetic oligonucleotide
aaggacaatgcgattaggataggggaggatgcccacatccttgtcacaagagaaccatat

SEQ ID NO: 89027 - DNA, 60 bp, Artificial
  Synthetic oligonucleotide
ccttgtgtgaagtaaactcatggcacattctatctaaggacaatgcgattaggatagggg

SEQ ID NO: 89028 - DNA, 60 bp, Artificial
  Synthetic oligonucleotide
caaacctttctaaacccttgtgtgaagtaaactcatggcacattctatctaaggacaatg

SEQ ID NO: 89029 - DNA, 60 bp, Artificial
  Synthetic oligonucleotide
cccgtttagggcattaataagttgggaaatggggcaagcaccgagtccatacaatatcag

SEQ ID NO: 89030 - DNA, 60 bp, Artificial
  Synthetic oligonucleotide
atgtggaccacatgaatgcagaatgtttgccctcagtcaaggtaccacactaaggggtcg

SEQ ID NO: 89031 - DNA, 60 bp, Artificial
  Synthetic oligonucleotide
agaaccatatctctcatgtggaccacatgaatgcagaatgtttgccctcagtcaaggtac

SEQ ID NO: 89032 - DNA, 60 bp, Artificial
  Synthetic oligonucleotide
aatagaggaattgacaggaagtgcacagcatatagaagagtgctcatgctatggagcaga

SEQ ID NO: 89033 - DNA, 60 bp, Artificial
  Synthetic oligonucleotide
gggaaaaatacagaaaatagaggaattgacaggaagtgcacagcatatagaagagtgctc

SEQ ID NO: 89034 - DNA, 60 bp, Artificial
  Synthetic oligonucleotide
ttctgatgttacaggatgtacaatgatagatccaacaaatgggccattacccgaagacaa

SEQ ID NO: 89035 - DNA, 60 bp, Artificial
  Synthetic oligonucleotide
ttctgatgttacaggatgcacaatggtagatccaacaaatgggccattacccgaagacaa

SEQ ID NO: 89036 - DNA, 60 bp, Artificial
  Synthetic oligonucleotide
gttacaggatgtgtaatggtagatccaacaaatgggccattacccgaagacaatgaaccg

SEQ ID NO: 89037 - DNA, 60 bp, Artificial
  Synthetic oligonucleotide
ggatgcacaatggtagatccaacaaatgggccattacccgaagacaatgagccgagtgcc

SEQ ID NO: 89038 - DNA, 60 bp, Artificial
  Synthetic oligonucleotide
ccagagtggaatacatcaaaagagcattatcattaaacacaatgacaaaagatgctgaaa

SEQ ID NO: 89039 - DNA, 65 bp, Artificial
  Synthetic oligonucleotide
cagaataaccagagtggaatacatcaaaagagcattatcattaaacacaatgacaaaagatgctg

SEQ ID NO: 89040 - DNA, 60 bp, Artificial
  Synthetic oligonucleotide
gtggaatacatcaaaagagcattatcattaaacacaatgacaaaagatgctgaaagaggc

SEQ ID NO: 89041 - DNA, 60 bp, Artificial
  Synthetic oligonucleotide
ttaaacacaatgacaaaagatgctgaaagaggcaaactaaaaagaagagcgattgccacc

SEQ ID NO: 89042 - DNA, 60 bp, Artificial
  Synthetic oligonucleotide
caacaatgggatgggtccagcaacggcacaaacagccatacaattattcatagctgatta

SEQ ID NO: 89043 - DNA, 60 bp, Artificial
  Synthetic oligonucleotide
gggatgggtccagcaacggcacaaacagccatacaattattcatagctgattatagatac

SEQ ID NO: 89044 - DNA, 60 bp, Artificial
  Synthetic oligonucleotide
agtgactatgaggggagactgatccaaaacagcataacaatagagagaatggttctttcg

SEQ ID NO: 89045 - DNA, 60 bp, Artificial
  Synthetic oligonucleotide
agcaacagccatttactgtttgatgggctcaggacaattgctatgggacactgtcacagg

SEQ ID NO: 89046 - DNA, 60 bp, Artificial
  Synthetic oligonucleotide
caacagccatttactgtttgatgggctcaggacaattgctatgggacactgtcacaggcg

SEQ ID NO: 89047 - DNA, 60 bp, Artificial
  Synthetic oligonucleotide
gccgaatctaggagacttctactgttaattcaggcattaaaagacaggaagggcccttgg

SEQ ID NO: 89048 - DNA, 60 bp, Artificial
  Synthetic oligonucleotide
gaattgacttcaaacttggacaaacaatatctaaactaagggacatatctgttccagctg

SEQ ID NO: 89049 - DNA, 60 bp, Artificial
  Synthetic oligonucleotide
tactattcaacatctgcgtccatctggaggtctgctatgtaataagtgatatgaactttc

SEQ ID NO: 89050 - DNA, 60 bp, Artificial
  Synthetic oligonucleotide
caacacttagaagagtgttcctgctatgtggacatcgatgtgtactgtatatgcagggac

SEQ ID NO: 89051 - DNA, 60 bp, Artificial
  Synthetic oligonucleotide
gagtggatgcatgtgtgcacgacagggaacgataatgatgcaagtgctcaaataatatat

SEQ ID NO: 89052 - DNA, 60 bp, Artificial
  Synthetic oligonucleotide
gcatgtgtgcacgacagggaacgataatgatgcaagtgctcaaataatatatgcagggag

SEQ ID NO: 89053 - DNA, 60 bp, Artificial
  Synthetic oligonucleotide
gcatgtatgcatgacaggaaacgataatgatgcaagtgctcaaataatatatgcagggag

SEQ ID NO: 89054 - DNA, 60 bp, Artificial
  Synthetic oligonucleotide
gatctccatgattctaatgttcgaaacctccatgaaaaggtcagacgaatgctgagggac

SEQ ID NO: 89055 - DNA, 60 bp, Artificial
  Synthetic oligonucleotide
ttacagctactgcttgaagtggagcaagagataagaactttctcgtttcagcttatctaa

SEQ ID NO: 89056 - DNA, 60 bp, Artificial
  Synthetic oligonucleotide
agcaaaagcaggtgcgagatgaatccaaatcagaagataataacaattggtgtagtgaac

SEQ ID NO: 89057 - DNA, 60 bp, Artificial
  Synthetic oligonucleotide
cacaagtggacacaatattagagaagaatgtgaccgtgacacactcagtggagctcctag

SEQ ID NO: 89058 - DNA, 60 bp, Artificial
  Synthetic oligonucleotide
gcaaacaactcgacaacacaagtggacacaatattagagaagaatgttacagtgacacac

SEQ ID NO: 89059 - DNA, 60 bp, Artificial
  Synthetic oligonucleotide
attggtgcctctatatgctttttaaaacccaaagaccaagaaagaaaaaggagattcatc

SEQ ID NO: 89060 - DNA, 60 bp, Artificial
  Synthetic oligonucleotide
gaagagcgattgcaaccgctggaatacaaatcagagggtttgtattagtagttgaaaact

SEQ ID NO: 89061 - DNA, 60 bp, Artificial
  Synthetic oligonucleotide
acaataagctcgcaaatagaacttgcagtcttgctttccaacgaaggaataataaacagt

SEQ ID NO: 89062 - DNA, 60 bp, Artificial
  Synthetic oligonucleotide
gaggcaatcaataacagattccagatacaaggagacaaattgactcaaggatacaaggac

SEQ ID NO: 89063 - DNA, 60 bp, Artificial
  Synthetic oligonucleotide
acctgaaccctggaaattattcaatgcaagtaaaactaggaacgctctgtgctttatgcg

SEQ ID NO: 89064 - DNA, 60 bp, Artificial
  Synthetic oligonucleotide
ggtcatgtacctgaaccctggaaattattcaatgcaagtaaaactaggaacgctctgtgc

SEQ ID NO: 89065 - DNA, 60 bp, Artificial
  Synthetic oligonucleotide
ttttgtggcacttcaggtacctatggaacaggctcatggcctgatggggcgaatatcaat

SEQ ID NO: 89066 - DNA, 60 bp, Artificial
  Synthetic oligonucleotide
gtatcagcagatccactagcatcactattagaaatgtgccatagcactcaaattggcggc

SEQ ID NO: 89067 - DNA, 58 bp, Artificial
  Synthetic oligonucleotide
tggcctgatggggcgaatatcaatttcatgcctatataagctttcgcaattttagaaa

SEQ ID NO: 89068 - DNA, 60 bp, Artificial
  Synthetic oligonucleotide
gcgactgctagtctcatttatgatgggatgcttgttgacagtattggttcatggtctcaa

SEQ ID NO: 89069 - DNA, 60 bp, Artificial
  Synthetic oligonucleotide
ggatcaagcagtgcttgtttgaggggcggtcgcaacagcttcttctcccgactaaactgg

SEQ ID NO: 89070 - DNA, 60 bp, Artificial
  Synthetic oligonucleotide
gcagtgcttgtttgaggggcggtcgcaacagcttcttctcccgactaaactggctaacca

SEQ ID NO: 89071 - DNA, 60 bp, Artificial
  Synthetic oligonucleotide
catcacccatcaagcgataatgagcaaacggatctctacaaggtggcaacagggagagta

SEQ ID NO: 89072 - DNA, 60 bp, Artificial
  Synthetic oligonucleotide
ggaaggaagaatacaagaccttgagaagtacgttgaggacactaagattgatttgtggtc

SEQ ID NO: 89073 - DNA, 60 bp, Artificial
  Synthetic oligonucleotide
attgatttgtggtcatacaatgctgaattgctagtagcactagagaatcagcacacaata

SEQ ID NO: 89074 - DNA, 53 bp, Artificial
  Synthetic oligonucleotide
ctgaattgctagtagcactagagaatcagcacacaatagatgtcacagactcc

SEQ ID NO: 89075 - DNA, 60 bp, Artificial
  Synthetic oligonucleotide
gcccactgcagtagacacatgttatccattcgacgtcccagattaccagagtctcagaag

SEQ ID NO: 89076 - DNA, 60 bp, Artificial
  Synthetic oligonucleotide
caggctgtgaccgtttgcaggacaccacttgggatgtcttcattgaaaggcccactgcag

SEQ ID NO: 89077 - DNA, 60 bp, Artificial
  Synthetic oligonucleotide
cacactgatgaactgtgcccaagccccttgaagcttgtcgacgggcaagactgcgacctc

SEQ ID NO: 89078 - DNA, 60 bp, Artificial
  Synthetic oligonucleotide
aaccacactgatgaactgtgcccaagccccttgaagcttgtcgacgggcaagactgcgac

SEQ ID NO: 89079 - DNA, 60 bp, Artificial
  Synthetic oligonucleotide
gtctcagaagcatcctagcaagcagtgggagtttggagttcatcgccgaacaattcacct

SEQ ID NO: 89080 - DNA, 52 bp, Artificial
  Synthetic oligonucleotide
ggaactgctgcagacctgaagtcaactcaggcagccattgatcagataaatg

SEQ ID NO: 89081 - DNA, 60 bp, Artificial
  Synthetic oligonucleotide
gagcacagtgcttaaaagtgacaaaaggattgggtcatgcacaagcccttgcttaactga

SEQ ID NO: 89082 - DNA, 60 bp, Artificial
  Synthetic oligonucleotide
agcaaaagcaggggaaaatgattgcactcatattggttgcactggctctgagccacactg

SEQ ID NO: 89083 - DNA, 60 bp, Artificial
  Synthetic oligonucleotide
gcaaaagcaggggaaaatgattgcactcatattggttgcactggctctgagccacactgc

SEQ ID NO: 89084 - DNA, 60 bp, Artificial
  Synthetic oligonucleotide
tatatgcttggggcatcatgcagtggaaaacggcacatctgttaaaacactaacagacaa

SEQ ID NO: 89085 - DNA, 60 bp, Artificial
  Synthetic oligonucleotide
gcaccggccaggcagctgattacaaaagtactcaagcagctatagatcaaataaccggga

SEQ ID NO: 89086 - DNA, 60 bp, Artificial
  Synthetic oligonucleotide
ggtggatggttggtatggcttcagacaccagaatgctcaaggcaccggccaggcagctga

SEQ ID NO: 89087 - DNA, 60 bp, Artificial
  Synthetic oligonucleotide
ggaagggatggtggatggttggtatggcttcagacaccagaatgctcaaggcaccggcca

SEQ ID NO: 89088 - DNA, 60 bp, Artificial
  Synthetic oligonucleotide
cggaatgaggaatgttccggagatcatccaagagagaggtctgtttggggcaatagctgg

SEQ ID NO: 89089 - DNA, 60 bp, Artificial
  Synthetic oligonucleotide
gaaacaacacctatgatcatacacaatatagagaagaggcactcctgaatagactcagca

SEQ ID NO: 89090 - DNA, 60 bp, Artificial
  Synthetic oligonucleotide
gggtgctttgaaatatatcacaactgcgatgatagctgtatggagagcattagaaacaac

SEQ ID NO: 89091 - DNA, 52 bp, Artificial
  Synthetic oligonucleotide
agaacatcaaatcggcaatgtaataaattggactaaagattctataacagac

SEQ ID NO: 89092 - DNA, 53 bp, Artificial
  Synthetic oligonucleotide
ataaccgggaaattgaacagactgatagagaagacgaacacggagttcgaatc

SEQ ID NO: 89093 - DNA, 60 bp, Artificial
  Synthetic oligonucleotide
cactcctgaatagactcagcattaatccggtgaagctctcttctgggtacaaagatgtta

SEQ ID NO: 89094 - DNA, 60 bp, Artificial
  Synthetic oligonucleotide
atgcttttggaaaggtgggtccattaatactaaactcccttttcaaaatctatcacctag

SEQ ID NO: 89095 - DNA, 60 bp, Artificial
  Synthetic oligonucleotide
tatcacctagaacggtgggtcaatgtcccaaatatgtgaataaaaagagcctattacttg

SEQ ID NO: 89096 - DNA, 60 bp, Artificial
  Synthetic oligonucleotide
cagtagggagttctacttatcaaaacaactttgtgccagtagtgggagcaagaccacaag

SEQ ID NO: 89097 - DNA, 60 bp, Artificial
  Synthetic oligonucleotide
cacaagtaaacggtcaaagtggacggattgatttccattggacgatagtaaggccaggtg

SEQ ID NO: 89098 - DNA, 50 bp, Artificial
  Synthetic oligonucleotide
ctatgcagaactaaaatggctagtgtcaaagaccaaaggacagaacttcc

SEQ ID NO: 89099 - DNA, 60 bp, Artificial
  Synthetic oligonucleotide
tccctctagcacacaagaaaagaatgacctgtatgggacccagtcactttctatttcagt

SEQ ID NO: 89100 - DNA, 60 bp, Artificial
  Synthetic oligonucleotide
cggctgggactactaaagcatgtatgaggaacggagggaacagcttctatgcagaactaa

SEQ ID NO: 89101 - DNA, 60 bp, Artificial
  Synthetic oligonucleotide
tccaggcgcaactgtaaacgaggaggcattaagacagaaaatcatggaaagtggagggat

SEQ ID NO: 89102 - DNA, 60 bp, Artificial
  Synthetic oligonucleotide
gggacatgggacactctgatagagagagagaattccattgcctattgttatccaggcgca

SEQ ID NO: 89103 - DNA, 60 bp, Artificial
  Synthetic oligonucleotide
ggagggattgacaagataagcactggatttacatacgggtcatccatcaattcggctggg

SEQ ID NO: 89104 - DNA, 60 bp, Artificial
  Synthetic oligonucleotide
ggacagactctgcatgaaaggtcggaattacaaagacttgggtaactgccatccgatagg

SEQ ID NO: 89105 - DNA, 60 bp, Artificial
  Synthetic oligonucleotide
gggatgataataggaactccggcctgtgacttgcacctcaccgggacatgggacactctg

SEQ ID NO: 89106 - DNA, 60 bp, Artificial
  Synthetic oligonucleotide
atccgatagggatgataataggaactccggcctgtgacttgcacctcaccgggacatggg

SEQ ID NO: 89107 - DNA, 54 bp, Artificial
  Synthetic oligonucleotide
tcaactcactcttcgagcgtcttaatgaaggacattcaaagccaattcgagcag

SEQ ID NO: 89108 - DNA, 60 bp, Artificial
  Synthetic oligonucleotide
cacaaattgaggtgggtccgggagcaaccaatgccaccataaactttgaagcaggaattc

SEQ ID NO: 89109 - DNA, 60 bp, Artificial
  Synthetic oligonucleotide
gatggctaattgcagagtgcagaagcatattaaccaaaactgagaacagcttcgagcaga

SEQ ID NO: 89110 - DNA, 60 bp, Artificial
  Synthetic oligonucleotide
cagatggctaattgcagaatgcaggaacatattaaccaaaactgagaacagcttcgagca

SEQ ID NO: 89111 - DNA, 60 bp, Artificial
  Synthetic oligonucleotide
gatggctaattgcagaatgcagaagcatattaaccaaaactgagaacagcttcgagcaga

SEQ ID NO: 89112 - DNA, 60 bp, Artificial
  Synthetic oligonucleotide
taatagtgcagatcacagggtttattggatacgagagggaaaaataatgaagtatgaaaa

SEQ ID NO: 89113 - DNA, 60 bp, Artificial
  Synthetic oligonucleotide
aatagtgaagtatgaaaatgtccctaaaacaaagatacaacacttagaagagtgttcctg

SEQ ID NO: 89114 - DNA, 60 bp, Artificial
  Synthetic oligonucleotide
gaccgtgactcactcagtgaatttgctcgaagacagccacaatgggaaactctgcagcct

SEQ ID NO: 89115 - DNA, 60 bp, Artificial
  Synthetic oligonucleotide
taagaaatgtcccatccattcaatccagaggactatttggagcaattgctgggttcattg

SEQ ID NO: 89116 - DNA, 60 bp, Artificial
  Synthetic oligonucleotide
ggcaacagggctaagaaacgtcccatccattcaatccagaggactatttggagcaatcgc

SEQ ID NO: 89117 - DNA, 60 bp, Artificial
  Synthetic oligonucleotide
gctaagaatggcaacagggctaagaaacgtcccatccattcaatccagaggactatttgg

SEQ ID NO: 89118 - DNA, 60 bp, Artificial
  Synthetic oligonucleotide
tggtatgctttcgcattgaataaggggtctgactctggaattataacatcagatgctcca

SEQ ID NO: 89119 - DNA, 60 bp, Artificial
  Synthetic oligonucleotide
atgggatagctcccctgcaactggggaagtgcaatgtggcgggatggctccttggcaatc

SEQ ID NO: 89120 - DNA, 60 bp, Artificial
  Synthetic oligonucleotide
cgggatagctcccctacaactgggaaagtgcaatgtggcgggatggctccttggcaatcc

SEQ ID NO: 89121 - DNA, 60 bp, Artificial
  Synthetic oligonucleotide
aacaataaggggaaagaagtgcttgtgctctggggggtgcaccaccctccaactgccggt

SEQ ID NO: 89122 - DNA, 60 bp, Artificial
  Synthetic oligonucleotide
aataaggggaaagaagtgcttgtgctctggggggtgcaccaccccccaactgtcaatgag

SEQ ID NO: 89123 - DNA, 60 bp, Artificial
  Synthetic oligonucleotide
ggagacaccataacgtttgaagccaccgggaatttgatagcaccatggtatgctttcgca

SEQ ID NO: 89124 - DNA, 60 bp, Artificial
  Synthetic oligonucleotide
tcctacttgaaaatgaaaggactctggacttccatgactccaatgtgagaaatttatatg

SEQ ID NO: 89125 - DNA, 60 bp, Artificial
  Synthetic oligonucleotide
ggataacgaagaagggaacttcatatccaaaactcagcaaatcatacacgaacaataagg

SEQ ID NO: 89126 - DNA, 60 bp, Artificial
  Synthetic oligonucleotide
taacagagaagggtacttcatatccaaaactcagcaaatcatacacgaacaataagggga

SEQ ID NO: 89127 - DNA, 60 bp, Artificial
  Synthetic oligonucleotide
gggaacttcatatccaaaactcagcaaatcatacacgaacaataaggggaaagaagtgct

SEQ ID NO: 89128 - DNA, 60 bp, Artificial
  Synthetic oligonucleotide
gcacgcagagtgcgatcgacgggatcacaaataaggtgaattcggtaattgagaagatga

SEQ ID NO: 89129 - DNA, 51 bp, Artificial
  Synthetic oligonucleotide
ttgagaagatgaacactcaattcactgcagtgggcaaggaattcaacaatt

SEQ ID NO: 89130 - DNA, 60 bp, Artificial
  Synthetic oligonucleotide
aagcacgcagagtgcgatcgacgggatcacaaataaggtgaattcggtaattgagaagat

SEQ ID NO: 89131 - DNA, 60 bp, Artificial
  Synthetic oligonucleotide
aatgaacagggatcaggatatgctgctgatcagaaaagcacgcagagtgcgatcgacggg

SEQ ID NO: 89132 - DNA, 60 bp, Artificial
  Synthetic oligonucleotide
gaacggcacatatgactatcccaagtattcagaagaatccaaattgaatcgagaagaaat

SEQ ID NO: 89133 - DNA, 60 bp, Artificial
  Synthetic oligonucleotide
gctttcgcattgaataaggggtctgactctggaattataacatcagatgctccagttcac

SEQ ID NO: 89134 - DNA, 60 bp, Artificial
  Synthetic oligonucleotide
cgaactgcttgtcctacttgaaaatgaaaggactctggactttcatgactccaatgtggg

SEQ ID NO: 89135 - DNA, 60 bp, Artificial
  Synthetic oligonucleotide
cacaagtgtaatgatgagtgcatggaaagtgtgaagaacggcacatatgactatcccaag

SEQ ID NO: 89136 - DNA, 60 bp, Artificial
  Synthetic oligonucleotide
ctatcccaagtattcagaagaatccaaattgaatcgagaagaaatagacggagtgaaact

SEQ ID NO: 89137 - DNA, 60 bp, Artificial
  Synthetic oligonucleotide
ggatatcatcatcagaatgaacagggatcaggatatgctgctgatcagaaaagcacgcag

SEQ ID NO: 89138 - DNA, 60 bp, Artificial
  Synthetic oligonucleotide
ccattcaatccagaggactatttggagcaattgctgggttcattgagggaggatggacag

SEQ ID NO: 89139 - DNA, 60 bp, Artificial
  Synthetic oligonucleotide
tgttttgagttctaccacaagtgtaatgatgagtgcatggaaagtgtgaagaacggcaca

SEQ ID NO: 89140 - DNA, 60 bp, Artificial
  Synthetic oligonucleotide
ctcaccgagtgacatccacatcatggcgtctcaaggcaccaaacgatcttatgagcagat

SEQ ID NO: 89141 - DNA, 60 bp, Artificial
  Synthetic oligonucleotide
gatatgcacaaacagactgtgtcctggaagcaatggctttccttgaagagtcccacccag

SEQ ID NO: 89142 - DNA, 60 bp, Artificial
  Synthetic oligonucleotide
tattgagtgaccacatagtgattgaggggctttctgctgaagagataataaaaatgggtg

SEQ ID NO: 89143 - DNA, 60 bp, Artificial
  Synthetic oligonucleotide
aaaagggatatacgtaatgtgttgtccttgagagtgttggtaaacggaacattcatcaag

SEQ ID NO: 89144 - DNA, 60 bp, Artificial
  Synthetic oligonucleotide
cccaattcatcttggtgactgcagctttgagggatggattgtaggaaacccatcctgtgc

SEQ ID NO: 89145 - DNA, 60 bp, Artificial
  Synthetic oligonucleotide
gaatgggatcagcccaattcatcttggtgactgcagctttgagggatggattgtaggaaa

SEQ ID NO: 89146 - DNA, 60 bp, Artificial
  Synthetic oligonucleotide
gctctttgaatgggatcagcccaattcatcttggtgactgcagctttgagggatggattg

SEQ ID NO: 89147 - DNA, 56 bp, Artificial
  Synthetic oligonucleotide
tacttgaagtagagcaagagataagaactttctcgtttcagcttatttaataataa

SEQ ID NO: 89148 - DNA, 60 bp, Artificial
  Synthetic oligonucleotide
ggcaggagattgaagggataaagttaaagactgaagacaatgtatataaggtactgtcaa

SEQ ID NO: 89149 - DNA, 60 bp, Artificial
  Synthetic oligonucleotide
ggcaggagattgaagggataaagttgaagactgaagacaatgtatataaggtactgtcaa

SEQ ID NO: 89150 - DNA, 60 bp, Artificial
  Synthetic oligonucleotide
tcacagttgaaaaggcaggagattgaagggataaagttgaagactgaagacaatgtatat

SEQ ID NO: 89151 - DNA, 60 bp, Artificial
  Synthetic oligonucleotide
aacaacacaacgggcagagatgttttagtactttgggggattcaccacccagacacagaa

SEQ ID NO: 89152 - DNA, 60 bp, Artificial
  Synthetic oligonucleotide
tcacagttgaaaaggcaggagattgaagggataaagttaaagactgaagacaatgtatat

SEQ ID NO: 89153 - DNA, 60 bp, Artificial
  Synthetic oligonucleotide
atgggacctacaaccatgaagactacagggaagagtcacagttgaaaaggcaggagattg

SEQ ID NO: 89154 - DNA, 56 bp, Artificial
  Synthetic oligonucleotide
gaaggaattgcaaaggatgtaatggaagtgctaaagcagagctctatgggaaattc

SEQ ID NO: 89155 - DNA, 60 bp, Artificial
  Synthetic oligonucleotide
tgtgtctttccaggggcggggagtattcgagctctcggacgaaaaggccacgaacccgat

SEQ ID NO: 89156 - DNA, 60 bp, Artificial
  Synthetic oligonucleotide
tgctggcctcacccacttgatgatctggcattctaacttgaacgacgccacgtatcagag

SEQ ID NO: 89157 - DNA, 60 bp, Artificial
  Synthetic oligonucleotide
tgtgatcatggaagttgttttcccaaatgaagtgggagctagaatactaacatcggagtc

SEQ ID NO: 89158 - DNA, 60 bp, Artificial
  Synthetic oligonucleotide
agagtaggatgcagttctcctcactgactgtgaatgtgagaggatcagggatgaggatac

SEQ ID NO: 89159 - DNA, 60 bp, Artificial
  Synthetic oligonucleotide
ttacgggcaacctccaaacattgaaaataagagtacatgaggggtatgaagagttcacaa

SEQ ID NO: 89160 - DNA, 60 bp, Artificial
  Synthetic oligonucleotide
cgggcaacctccaaacattgaaaataagagtacatgaggggtatgaagagttcacaatgg

SEQ ID NO: 89161 - DNA, 60 bp, Artificial
  Synthetic oligonucleotide
caagtgctctgcgccccaacaaaaggctctagttgatcaagtgatcggaagtagaaatcc

SEQ ID NO: 89162 - DNA, 60 bp, Artificial
  Synthetic oligonucleotide
caagtgctctgcgccccaacaaaaggctctagttgatcaagtgatcggaagtagaaaccc

SEQ ID NO: 89163 - DNA, 60 bp, Artificial
  Synthetic oligonucleotide
cgccccaacaaaaggctctagttgatcaagtgatcggaagtagaaatccagggattgcag

SEQ ID NO: 89164 - DNA, 60 bp, Artificial
  Synthetic oligonucleotide
gcgccccaacaaaaggctctagttgatcaagtgatcggaagtagaaatccagggattgca

SEQ ID NO: 89165 - DNA, 60 bp, Artificial
  Synthetic oligonucleotide
gctctgcgccccaacaaaaggctctagttgatcaagtgatcggaagtagaaacccaggga

SEQ ID NO: 89166 - DNA, 60 bp, Artificial
  Synthetic oligonucleotide
gctctgcgccccaacaaaaggctctagttgatcaagtgatcggaagtagaaatccaggga

SEQ ID NO: 89167 - DNA, 60 bp, Artificial
  Synthetic oligonucleotide
caaatgctctgcgccccaacaaaaggctctagttgatcaagtgatcggaagtagaaatcc

SEQ ID NO: 89168 - DNA, 60 bp, Artificial
  Synthetic oligonucleotide
cgagtgcccaaataatatatgcagggagaatgacagactccattaaatcatggagaaagg

SEQ ID NO: 89169 - DNA, 60 bp, Artificial
  Synthetic oligonucleotide
gataatatatgcagggagaatgacagactccattaaatcatggagaaaggacatattgag

SEQ ID NO: 89170 - DNA, 60 bp, Artificial
  Synthetic oligonucleotide
atacaggagaccggttgggatttccagcatggtggaggccatggtgtctagggcccgaat

SEQ ID NO: 89171 - DNA, 60 bp, Artificial
  Synthetic oligonucleotide
caaagtggtgcttcccataagcatttatgctaaaatacctcaactagggttcaatgttga

SEQ ID NO: 89172 - DNA, 60 bp, Artificial
  Synthetic oligonucleotide
gtggtgcttcccataagcatttatgctaaaatacctcaactagggttcaatgttgaagaa

SEQ ID NO: 89173 - DNA, 60 bp, Artificial
  Synthetic oligonucleotide
caaagtagtgcttcccataagcatttatgctaaaatacctcaactagggttcaatgttga

SEQ ID NO: 89174 - DNA, 60 bp, Artificial
  Synthetic oligonucleotide
tcacagacgatggcgccattgtagctgaaatatctcccattccttctatgccaggacatt

SEQ ID NO: 89175 - DNA, 60 bp, Artificial
  Synthetic oligonucleotide
aatagaatccccttggaatacaagggaatacaacttaaaacaaatgctgaagacatagga

SEQ ID NO: 89176 - DNA, 60 bp, Artificial
  Synthetic oligonucleotide
caagggaatacaacttaaaacaaatgctgaagacataggaactaaaggacaaatgtgttc

SEQ ID NO: 89177 - DNA, 60 bp, Artificial
  Synthetic oligonucleotide
ttggaatacaagggaatacaacttaaaacaaatgctgaagacataggaactaaaggacaa

SEQ ID NO: 89178 - DNA, 61 bp, Artificial
  Synthetic oligonucleotide
ggaaaagatatagtgctttatccaatgacatttcacaagggattaagagacaaagaatgac

SEQ ID NO: 89179 - DNA, 52 bp, Artificial
  Synthetic oligonucleotide
gagaggatcaggaatgaggatactggtaagaggcaattctccagtgttcaat

SEQ ID NO: 89180 - DNA, 60 bp, Artificial
  Synthetic oligonucleotide
ttgaggctgaagtttagtggggtcctcgaattcagcaaatttgaggccttcacttcaaat

SEQ ID NO: 89181 - DNA, 60 bp, Artificial
  Synthetic oligonucleotide
agatataaatatggcagattatagcattgattcaagttatgtgtgctcaggacttgttgg

SEQ ID NO: 89182 - DNA, 60 bp, Artificial
  Synthetic oligonucleotide
tgctactgatgatctgacagtggaggatgaagaagatggccatcggatcctcaactcact

SEQ ID NO: 89183 - DNA, 60 bp, Artificial
  Synthetic oligonucleotide
tgctactgatgatatgacagtggaggatgaagaagatggccatcggatcctcaactcact

SEQ ID NO: 89184 - DNA, 60 bp, Artificial
  Synthetic oligonucleotide
ccattcggggtgagtttaatcaagtggaaaagagaatcaacatgattgccgatcgagtcg

SEQ ID NO: 89185 - DNA, 60 bp, Artificial
  Synthetic oligonucleotide
cgggaattatgactccattcggggtgagtttaatcaagtggaaaagagaatcaacatgat

SEQ ID NO: 89186 - DNA, 60 bp, Artificial
  Synthetic oligonucleotide
tctaggagcaagtcaaaagaatggagaaggaattgccaaagatgtaatggaagtgctaaa

SEQ ID NO: 89187 - DNA, 53 bp, Artificial
  Synthetic oligonucleotide
aaaaattacactgttggttcggtgggaaagaatttgacctagactctgctttg

SEQ ID NO: 89188 - DNA, 60 bp, Artificial
  Synthetic oligonucleotide
aagtgctaaaacagagctctatgggaaattcagctcttgtgaggaaatacttataatgct

SEQ ID NO: 89189 - DNA, 50 bp, Artificial
  Synthetic oligonucleotide
aattacactgttggttcggtgggaaagaatttgacctagattctgctttg

SEQ ID NO: 89190 - DNA, 52 bp, Artificial
  Synthetic oligonucleotide
aaaattacactgttggttcggtgggaaagaatttgacctagactctgctttg

SEQ ID NO: 89191 - DNA, 60 bp, Artificial
  Synthetic oligonucleotide
acataaataggacaggaacatttgaattcacaagctttttctatcgctatggatttgtag

SEQ ID NO: 89192 - DNA, 60 bp, Artificial
  Synthetic oligonucleotide
ggcgacaagcaaacaatggagaagatgcaactgctggcctcactcacttgatgatctggc

SEQ ID NO: 89193 - DNA, 60 bp, Artificial
  Synthetic oligonucleotide
atctggcgacaagcaaacaatggagaagatgcaactgctggcctcacccacttgatgatc

SEQ ID NO: 89194 - DNA, 60 bp, Artificial
  Synthetic oligonucleotide
gttgcactgcttttagcctttattttgtgggcttgtcagaatgggaacatccggtgccag

SEQ ID NO: 89195 - DNA, 60 bp, Artificial
  Synthetic oligonucleotide
gttgcactacttttagcctttattttgtgggcttgtcaaaatggaaacatccggtgccag

SEQ ID NO: 89196 - DNA, 60 bp, Artificial
  Synthetic oligonucleotide
tgatgggatgcttgttgacagtattggttcctggtctcaaaatatcctcagaactcagga

SEQ ID NO: 89197 - DNA, 60 bp, Artificial
  Synthetic oligonucleotide
ggaatctttgaaaactcgtgtcttgaaacgatggaggttgttcaacaaacaagggtggac

SEQ ID NO: 89198 - DNA, 60 bp, Artificial
  Synthetic oligonucleotide
aaaggctctaataggcccattatagatataaatatggcagattatagcattgattctagt

SEQ ID NO: 89199 - DNA, 60 bp, Artificial
  Synthetic oligonucleotide
tgggtggtatggtttcagacatcaaaattcacaaggagagggaacagcggctgattacaa

SEQ ID NO: 89200 - DNA, 60 bp, Artificial
  Synthetic oligonucleotide
tggtttcagacatcaaaattcacaaggagagggaacagcggctgattacaaaagcactca

SEQ ID NO: 89201 - DNA, 60 bp, Artificial
  Synthetic oligonucleotide
cagacatcaaaattcacaaggagagggaacagcggctgattacaaaagcactcaatcagc

SEQ ID NO: 89202 - DNA, 60 bp, Artificial
  Synthetic oligonucleotide
ctgattacaaaagcactcaatcagcaattgatcaaataacaggaaagttaaatagattaa

SEQ ID NO: 89203 - DNA, 60 bp, Artificial
  Synthetic oligonucleotide
aaagcactcaatcagcaattgatcaaataacaggaaagttaaatagattaatagagaaga

SEQ ID NO: 89204 - DNA, 60 bp, Artificial
  Synthetic oligonucleotide
tagacaatgagttcaatgaagtggagaagcagatcggcaatgtgatcaattggacccgag

SEQ ID NO: 89205 - DNA, 60 bp, Artificial
  Synthetic oligonucleotide
tagacaatgagttcaatgaagtggagacgcagatcggcaatgtgatcaattggacccgag

SEQ ID NO: 89206 - DNA, 60 bp, Artificial
  Synthetic oligonucleotide
atgaagtggagacgcagatcggcaatgtgatcaattggacccgagactccataacagaag

SEQ ID NO: 89207 - DNA, 60 bp, Artificial
  Synthetic oligonucleotide
atgaagtggagaagcagatcggcaatgtgatcaattggacccgagactccataacagaag

SEQ ID NO: 89208 - DNA, 50 bp, Artificial
  Synthetic oligonucleotide
agcagtggttacaaagatgtaatactttggtttagcttcggggcatcatg

SEQ ID NO: 89209 - DNA, 60 bp, Artificial
  Synthetic oligonucleotide
acactcgaattctaatactcacccttacggcagtcatccacacaaatgcagacaaaatct

SEQ ID NO: 89210 - DNA, 60 bp, Artificial
  Synthetic oligonucleotide
tttgataatcgagaggcgagaggggaatgatgtctgttatcctgggaaatttgtgaatga

SEQ ID NO: 89211 - DNA, 60 bp, Artificial
  Synthetic oligonucleotide
gtcactggaccacctcaatgtgatcagtttctcgagttcacagccgatttgataatcgag

SEQ ID NO: 89212 - DNA, 60 bp, Artificial
  Synthetic oligonucleotide
gccagttgacgccaattgtgaaggggaatgctatcacagtggaggtacaataacaagcaa

SEQ ID NO: 89213 - DNA, 60 bp, Artificial
  Synthetic oligonucleotide
ataacaagcaatttacctttccaaaacgttaatagtagggcagtgggcaaatgcccaaga

SEQ ID NO: 89214 - DNA, 60 bp, Artificial
  Synthetic oligonucleotide
gcaaccgaaacagtggagcagatgaacattcctaggatttgtactaaggggaagaaagca

SEQ ID NO: 89215 - DNA, 60 bp, Artificial
  Synthetic oligonucleotide
gtactaaggggaagaaagcaattgaccttggtcagtgtgggttgcttggaattgtcactg

SEQ ID NO: 89216 - DNA, 60 bp, Artificial
  Synthetic oligonucleotide
agaccgtgtgagcttctttaaaggggaatccacagggattcaaagtgaagcgccagttga

SEQ ID NO: 89217 - DNA, 60 bp, Artificial
  Synthetic oligonucleotide
agaccgtgtgagcttctttaaaggggaatccacagggattcaaagtgaagtgccagttga

SEQ ID NO: 89218 - DNA, 60 bp, Artificial
  Synthetic oligonucleotide
tgtaccgagtccaggagcgagaccacaagtgaatggtcaatcaggaagaattgattttca

SEQ ID NO: 89219 - DNA, 60 bp, Artificial
  Synthetic oligonucleotide
ccgagtccaggagcgagaccacaagtgaatggtcaatcaggaagaattgattttcattgg

SEQ ID NO: 89220 - DNA, 60 bp, Artificial
  Synthetic oligonucleotide
cgccagttgacgccaattgtgaaggggaatgctatcacagtggaggtacaataacaagca

SEQ ID NO: 89221 - DNA, 60 bp, Artificial
  Synthetic oligonucleotide
cgtgtgagcttctttaaaggggaatccacagggattcaaagtgaagcgccagttgacgcc

SEQ ID NO: 89222 - DNA, 60 bp, Artificial
  Synthetic oligonucleotide
cgtgtgagcttctttaaaggggaatccacagggattcaaagtgaagtgccagttgacgcc

SEQ ID NO: 89223 - DNA, 60 bp, Artificial
  Synthetic oligonucleotide
ataacagttgggagttctaactatcagcaatcctttgtaccgagtccaggagcgagacca

SEQ ID NO: 89224 - DNA, 60 bp, Artificial
  Synthetic oligonucleotide
gcaatgggccttggtttcatatgtgtgaagaatggaaacatgcggtgcaccatttgtata

SEQ ID NO: 89225 - DNA, 60 bp, Artificial
  Synthetic oligonucleotide
ttgcaatgggccttggtttcatatgtgtgaagaatggaaacatgcggtgcaccatttgta

SEQ ID NO: 89226 - DNA, 59 bp, Artificial
  Synthetic oligonucleotide
cactcgaattctaatactcacccttacggcagtcatccacacaaatgcagacaaaatct

SEQ ID NO: 89227 - DNA, 60 bp, Artificial
  Synthetic oligonucleotide
agttgtcaatgcaaccgaaacagtggagcagatgaacattcctaggatttgtactaaggg

SEQ ID NO: 89228 - DNA, 60 bp, Artificial
  Synthetic oligonucleotide
agtgggagtaaactaataacagttgggagttctaactatcagcaatcctttgtaccgagt

SEQ ID NO: 89229 - DNA, 60 bp, Artificial
  Synthetic oligonucleotide
ctgggttcatcgaaaacggatgggaaggtctggttgatgggtggtatggtttcagacatc

SEQ ID NO: 89230 - DNA, 60 bp, Artificial
  Synthetic oligonucleotide
atagctgggttcatcgaaaacggatgggaaggtctggttgatgggtggtatggtttcaga

SEQ ID NO: 89231 - DNA, 60 bp, Artificial
  Synthetic oligonucleotide
attgtcactggaccacctcaatgtgatcagtttctcgagttcacagccgatttgataatc

SEQ ID NO: 89232 - DNA, 60 bp, Artificial
  Synthetic oligonucleotide
ggggaagaaagcaattgaccttggtcagtgtgggttgcttggaattgtcactggaccacc

SEQ ID NO: 89233 - DNA, 60 bp, Artificial
  Synthetic oligonucleotide
ggggaatccaccattctggatcaactaccgagcagaccaaactatatgggagtgggagta

SEQ ID NO: 89234 - DNA, 60 bp, Artificial
  Synthetic oligonucleotide
agccctgcgccaaatcctcaggggatcaggagggatcaacaaggaaacaacgggattcac

SEQ ID NO: 89235 - DNA, 60 bp, Artificial
  Synthetic oligonucleotide
ttgtgaatgaagaagccctgcgccaaatcctcaggggatcaggagggatcaacaaggaaa

SEQ ID NO: 89236 - DNA, 60 bp, Artificial
  Synthetic oligonucleotide
ggcgagaggggaatgatgtctgttatcctgggaaatttgtgaatgaagaagccctgcgcc

SEQ ID NO: 89237 - DNA, 60 bp, Artificial
  Synthetic oligonucleotide
gcaatttacctttccaaaacgttaatagtagggcagtgggcaaatgcccaaaatatgtga

SEQ ID NO: 89238 - DNA, 60 bp, Artificial
  Synthetic oligonucleotide
ataacaagcaatttacctttccaaaacgttaatagtagggcagtgggcaaatgcccaaaa

SEQ ID NO: 89239 - DNA, 60 bp, Artificial
  Synthetic oligonucleotide
atgcccaagatatgtgaaacaaaaaagcctgctgttggcaacaggaatgaagaatgttcc

SEQ ID NO: 89240 - DNA, 60 bp, Artificial
  Synthetic oligonucleotide
gcaatttacctttccaaaacgttaatagtagggcagtgggcaaatgcccaagatatgtga

SEQ ID NO: 89241 - DNA, 53 bp, Artificial
  Synthetic oligonucleotide
aaaagcctgctgttggcaacaggaatgaagaatgttcctgaaatcccgagaag

SEQ ID NO: 89242 - DNA, 60 bp, Artificial
  Synthetic oligonucleotide
atgcccaaaatatgtgaaacaaaaaagcctgctgttggcaacaggaatgaagaatgttcc

SEQ ID NO: 89243 - DNA, 60 bp, Artificial
  Synthetic oligonucleotide
cggcgccatagctgggttcatcgaaaacggatgggaaggtctggttgatgggtggtatgg

SEQ ID NO: 89244 - DNA, 60 bp, Artificial
  Synthetic oligonucleotide
ttcggcgccatagctgggttcatcgaaaacggatgggaaggtctggttgatgggtggtat

SEQ ID NO: 89245 - DNA, 60 bp, Artificial
  Synthetic oligonucleotide
accataaactttgaagcaggaattctggagtgctatgaaaggctttcatggcaaagagcc

SEQ ID NO: 89246 - DNA, 60 bp, Artificial
  Synthetic oligonucleotide
tcaaacagcagcacaacgagcaatgatggaccaagtgagggaaagccggaatcccgggaa

SEQ ID NO: 89247 - DNA, 60 bp, Artificial
  Synthetic oligonucleotide
caaacagcagcacaacgagcaatgatggaccaggtgcgagaaagcaggaatcccgggaat

SEQ ID NO: 89248 - DNA, 60 bp, Artificial
  Synthetic oligonucleotide
gtgttggtcatgaaacggaaacgggactctagcatacttactgacagccagacagcgacc

SEQ ID NO: 89249 - DNA, 60 bp, Artificial
  Synthetic oligonucleotide
ggcaaggagacgtggtgttggtcatgaaacggaaacgggactctagcatacttactgaca

SEQ ID NO: 89250 - DNA, 60 bp, Artificial
  Synthetic oligonucleotide
tagcaatgagactatactagaaacagggtatgtgtgtagcaaattccactcagacacccc

SEQ ID NO: 89251 - DNA, 60 bp, Artificial
  Synthetic oligonucleotide
gaaggaaaagtaataaagtatgaaaacgtccccaaaacaaggatacaacacttggaggag

SEQ ID NO: 89252 - DNA, 60 bp, Artificial
  Synthetic oligonucleotide
cggatggtcctgcggctaatagtgccgaccatagggtttactggatacgggaaggaaaag

SEQ ID NO: 89253 - DNA, 60 bp, Artificial
  Synthetic oligonucleotide
aggattagcaatgagactatactagaaacagggtatgtgtgtagcaaattccactcagac

SEQ ID NO: 89254 - DNA, 60 bp, Artificial
  Synthetic oligonucleotide
tatactgcatatgtagggacaattggaaaggttccaacaggccttggatgaggattagca

SEQ ID NO: 89255 - DNA, 60 bp, Artificial
  Synthetic oligonucleotide
agtaataaagtatgaaaacgtccccaaaacaaggatacaacacttggaggagtgttcctg

SEQ ID NO: 89256 - DNA, 60 bp, Artificial
  Synthetic oligonucleotide
cactactctatcaacaatagcccttctcattggaattggaaacctgattttcaacactgt

SEQ ID NO: 89257 - DNA, 60 bp, Artificial
  Synthetic oligonucleotide
tgtagtgaacactactctatcaacaatagcccttctcattggaattggaaacctgatttt

SEQ ID NO: 89258 - DNA, 60 bp, Artificial
  Synthetic oligonucleotide
ggttactcagggagcttcatcattgaaagcaacggctgtttccagccttgtttctatatt

SEQ ID NO: 89259 - DNA, 55 bp, Artificial
  Synthetic oligonucleotide
tttctatattgagcttatacgagggagacccaataagaatgatgatgtctcttgg

SEQ ID NO: 89260 - DNA, 60 bp, Artificial
  Synthetic oligonucleotide
tgtagcctggtcgagtagcagttgcttcgatgggaaggagtggatgcatatttgcatgac

SEQ ID NO: 89261 - DNA, 60 bp, Artificial
  Synthetic oligonucleotide
ttcaagcccccactaccgctgtgccctttcagaggtttcttcccttttcataaggacaat

SEQ ID NO: 89262 - DNA, 60 bp, Artificial
  Synthetic oligonucleotide
aaggttaggtgagaacaaagacgtcatagtcacaagggagccttacgttagttgcgacaa

SEQ ID NO: 89263 - DNA, 60 bp, Artificial
  Synthetic oligonucleotide
acctgattttcaacactgttatacatgagaaaataggggatcatcagacagtggtgtacc

SEQ ID NO: 89264 - DNA, 60 bp, Artificial
  Synthetic oligonucleotide
ctgttatacatgagaaaataggggatcatcagacagtggtgtacccgacagtaacgaccc

SEQ ID NO: 89265 - DNA, 60 bp, Artificial
  Synthetic oligonucleotide
gcccaaggggcattactggggactaaacacagcaatggaaccataaaggacagaacaccc

SEQ ID NO: 89266 - DNA, 56 bp, Artificial
  Synthetic oligonucleotide
cagaacaccctatagatcattgattaggttcccaataggaacagccccggtactag

SEQ ID NO: 89267 - DNA, 60 bp, Artificial
  Synthetic oligonucleotide
gggagccttacgttagttgcgacaataataattgctggtcctttgctctcgcccaagggg

SEQ ID NO: 89268 - DNA, 60 bp, Artificial
  Synthetic oligonucleotide
cttggaccagcaacagctcaaatggctcttcagctgttcatcaaggattacagatacacg

SEQ ID NO: 89269 - DNA, 60 bp, Artificial
  Synthetic oligonucleotide
aaagatacaacacttagaagagtgttcctgctatgtggacatcgatgtgtactgtatatg

SEQ ID NO: 89270 - DNA, 60 bp, Artificial
  Synthetic oligonucleotide
tgtgtggttgggcaggacagtgtcaactagtggtagatcaggctttgaaatcatcaaagt

SEQ ID NO: 89271 - DNA, 60 bp, Artificial
  Synthetic oligonucleotide
gggaaattccaaacagcagcacaacgagcaatgatggaccaggtgagggaaagccggaat

SEQ ID NO: 89272 - DNA, 60 bp, Artificial
  Synthetic oligonucleotide
gattgggcattcacagatgaacgatgtctgtttccaaagatcaaaggcactaaaaagagt

SEQ ID NO: 89273 - DNA, 55 bp, Artificial
  Synthetic oligonucleotide
gattgggcattcacagatgaacgatgtctgtttccaaagatcaaaggcactaaaa

SEQ ID NO: 89274 - DNA, 60 bp, Artificial
  Synthetic oligonucleotide
ggcattcacagatgaacgatgtctgtttccaaagatcaaaggcactaaaaagagttggac

SEQ ID NO: 89275 - DNA, 50 bp, Artificial
  Synthetic oligonucleotide
ggcattcacagatgaacgatgtctgtttccaaagatcaaaggcactaaaa

SEQ ID NO: 89276 - DNA, 53 bp, Artificial
  Synthetic oligonucleotide
agtgctgtggatgttgacgatggtcattttgtcaacatagagctggaataaaa

SEQ ID NO: 89277 - DNA, 60 bp, Artificial
  Synthetic oligonucleotide
caatgccactataaactttgaagcaggaattctggaatgctatgaaaggctttcatggca

SEQ ID NO: 89278 - DNA, 60 bp, Artificial
  Synthetic oligonucleotide
ccggagcaaccaatgccactataaactttgaagcaggaattctggaatgctatgaaaggc

SEQ ID NO: 89279 - DNA, 60 bp, Artificial
  Synthetic oligonucleotide
cccggagcaaccaatgccactataaactttgaagcaggaattctggaatgctatgaaagg

SEQ ID NO: 89280 - DNA, 55 bp, Artificial
  Synthetic oligonucleotide
caatgccactataaactttgaagcaggaattctggaatgctatgaaaggctttca

SEQ ID NO: 89281 - DNA, 60 bp, Artificial
  Synthetic oligonucleotide
cagtaatctatggaaaccccaaatgtgacatccatctaaaggatcaaggttggtcataca

SEQ ID NO: 89282 - DNA, 60 bp, Artificial
  Synthetic oligonucleotide
ggagcaccattggaactgcgagactgcaaaatcgaggcagtaatctatggaaaccccaaa

SEQ ID NO: 89283 - DNA, 60 bp, Artificial
  Synthetic oligonucleotide
tgtgcttctagaaaaccagaaaacattagacgaacatgattccaatgtcaaaaacctttt

SEQ ID NO: 89284 - DNA, 60 bp, Artificial
  Synthetic oligonucleotide
tttgacatacttcacaaatgcgacaatgagtgtatggagactataaagaatgggacttac

SEQ ID NO: 89285 - DNA, 60 bp, Artificial
  Synthetic oligonucleotide
aaaatagacgaccaaattgaagatctttgggcttacaatgcagagctccttgtgcttcta

SEQ ID NO: 89286 - DNA, 60 bp, Artificial
  Synthetic oligonucleotide
gaccaaattgaagatctttgggcttacaatgcagagctccttgtgcttctagaaaaccag

SEQ ID NO: 89287 - DNA, 60 bp, Artificial
  Synthetic oligonucleotide
gaccaaaaagaaaccagacacttatgatttcaatgaagggagttatgttaacaatgaaga

SEQ ID NO: 89288 - DNA, 60 bp, Artificial
  Synthetic oligonucleotide
ccagacacttatgatttcaatgaagggagttatgttaacaatgaagatggagacatcatt

SEQ ID NO: 89289 - DNA, 60 bp, Artificial
  Synthetic oligonucleotide
gctttcaacccaatattggtcccagaccattagtaagaggacagcaaggaagaatggatt

SEQ ID NO: 89290 - DNA, 60 bp, Artificial
  Synthetic oligonucleotide
ggatctgtagaaaatctggaggaactgagatttgtcttctccaatgcggcatcttacaag

SEQ ID NO: 89291 - DNA, 53 bp, Artificial
  Synthetic oligonucleotide
catcttacaagagaataagactatttgactattccaggtggaatgtaactagc

SEQ ID NO: 89292 - DNA, 58 bp, Artificial
  Synthetic oligonucleotide
tgcaatgcatcaacaggtggtcaatccttctataggagcatcaactggttgaccaaaa

SEQ ID NO: 89293 - DNA, 60 bp, Artificial
  Synthetic oligonucleotide
tgcaatgcatcaacaggtggtcaatccttctataggagcatcaactggttgaccaaaaag

SEQ ID NO: 89294 - DNA, 55 bp, Artificial
  Synthetic oligonucleotide
agcaaaagcaggggtcacaatggagaagttcatcgcaatagcaatgctcttggcg

SEQ ID NO: 89295 - DNA, 60 bp, Artificial
  Synthetic oligonucleotide
tgggaatttaatcgcacctgaatttggatatctacttaagggtgaaagccatggcagaat

SEQ ID NO: 89296 - DNA, 60 bp, Artificial
  Synthetic oligonucleotide
tggatctgtagaaaatctggaggaactgagatttgtcttctccaatgcggcatcttacaa

SEQ ID NO: 89297 - DNA, 60 bp, Artificial
  Synthetic oligonucleotide
ggagaggcccagcgcaccagaggggatgtgttaccctggatctgtagaaaatctggagga

SEQ ID NO: 89298 - DNA, 60 bp, Artificial
  Synthetic oligonucleotide
cgacttgcagtggggcttagaaatacaccttctgttgaacccaaagggctattcggagcc

SEQ ID NO: 89299 - DNA, 60 bp, Artificial
  Synthetic oligonucleotide
caacactgatttaggagcaccattggaactgcgagactgcaaaatcgaggcagtaatcta

SEQ ID NO: 89300 - DNA, 60 bp, Artificial
  Synthetic oligonucleotide
gagctcgtggaaacagagaaacattccgcttattgcaacactgatttaggagcaccattg

SEQ ID NO: 89301 - DNA, 60 bp, Artificial
  Synthetic oligonucleotide
gtcactcaaacaatggagctcgtggaaacagagaaacattccgcttattgcaacactgat

SEQ ID NO: 89302 - DNA, 56 bp, Artificial
  Synthetic oligonucleotide
ggggaatgtcccaaatatgtaaagaaggcaagcttacgacttgcagtggggcttag

SEQ ID NO: 89303 - DNA, 60 bp, Artificial
  Synthetic oligonucleotide
atggcagaataattcaaaatgaagacatacccattggaaactgcaaaacaaaatgtcaaa

SEQ ID NO: 89304 - DNA, 60 bp, Artificial
  Synthetic oligonucleotide
gggaatttaatcgcacctgaatttggatatctacttaagggtgaaagccatggcagaata

SEQ ID NO: 89305 - DNA, 60 bp, Artificial
  Synthetic oligonucleotide
caaaatgaagacatacccattggaaactgcaaaacaaaatgtcaaacatatgcaggagca

SEQ ID NO: 89306 - DNA, 60 bp, Artificial
  Synthetic oligonucleotide
tgcaagtagacattatatgggggaatgtcccaaatatgtaaagaaggcaagcttacgact

SEQ ID NO: 89307 - DNA, 60 bp, Artificial
  Synthetic oligonucleotide
tatgcaggagcaattaatagcagcaaaccctttcagaatgcaagtagacattatatgggg

SEQ ID NO: 89308 - DNA, 60 bp, Artificial
  Synthetic oligonucleotide
gcttacgacttgcagtggggcttagaaatacaccttctgttgaacccaaagggctattcg

SEQ ID NO: 89309 - DNA, 60 bp, Artificial
  Synthetic oligonucleotide
gtttcgagcaaataacatttatgcaagccctacaactgttgcttgaagttgagcaagaga

SEQ ID NO: 89310 - DNA, 60 bp, Artificial
  Synthetic oligonucleotide
ggacattgaagcagccactcgcgctggaaagcagataattgaacggattcttgatgagga

SEQ ID NO: 89311 - DNA, 60 bp, Artificial
  Synthetic oligonucleotide
aaatcattgaaggggagaagtatcacaattggcatggacattgaagcagccactcgcgct

SEQ ID NO: 89312 - DNA, 60 bp, Artificial
  Synthetic oligonucleotide
ccgataaggcactaaagatgaatattgcctcagtacctgcaccacgctatgtgactgaca

SEQ ID NO: 89313 - DNA, 60 bp, Artificial
  Synthetic oligonucleotide
gctccaaagcaggaacggaaaatggcgggaacagttgagtcagaagtttgaggagataag

SEQ ID NO: 89314 - DNA, 60 bp, Artificial
  Synthetic oligonucleotide
gcaaaagatttgcagaccaagatatgggtgatgccccatttctagatcggatccgccgag

SEQ ID NO: 89315 - DNA, 64 bp, Artificial
  Synthetic oligonucleotide
gagataagatggttgattgaagaagtaagacataagttgaaaacaacagaaaacagtttcgagc

SEQ ID NO: 89316 - DNA, 60 bp, Artificial
  Synthetic oligonucleotide
ggtcccctttgcattaggatggaccaggcaattttggacaagaacatcatactgaaagca

SEQ ID NO: 89317 - DNA, 60 bp, Artificial
  Synthetic oligonucleotide
agtgcctgcaattgcatcgggggagattgttatcttatgataactgatggctcagcttca

SEQ ID NO: 89318 - DNA, 60 bp, Artificial
  Synthetic oligonucleotide
caacatcctaagaacacaagaaagtgcctgcaattgcatcgggggagattgttatcttat

SEQ ID NO: 89319 - DNA, 60 bp, Artificial
  Synthetic oligonucleotide
cccaaccgtagaaaactccattttccacatggcagcttggagtgggtccgcatgccatga

SEQ ID NO: 89320 - DNA, 60 bp, Artificial
  Synthetic oligonucleotide
gatgacatttccacccccagagccggagtggacataccctcgtttatcttgccagggctc

SEQ ID NO: 89321 - DNA, 60 bp, Artificial
  Synthetic oligonucleotide
ggcactcagcagcaacagccatttactgtttgatgggctcaggacaattgctatgggaca

SEQ ID NO: 89322 - DNA, 60 bp, Artificial
  Synthetic oligonucleotide
cctcgtttatcttgccagggctcaacctttcagaaagcgctcctaattagccctcatagg

SEQ ID NO: 89323 - DNA, 60 bp, Artificial
  Synthetic oligonucleotide
attcccatacaccggtgttcccccttattcccatggaacgggaacaggctacacaataga

SEQ ID NO: 89324 - DNA, 60 bp, Artificial
  Synthetic oligonucleotide
ggagggatcagcatgacagtaacaggagacaatactaaatggaatgaatgcttaaatcca

SEQ ID NO: 89325 - DNA, 60 bp, Artificial
  Synthetic oligonucleotide
ggagggatcagcatgacagtgacgggagacaatactaaatggaatgaatgcttaaatcca

SEQ ID NO: 89326 - DNA, 60 bp, Artificial
  Synthetic oligonucleotide
ggagggatcagcatgacagtgacaggagacaatactaaatggaatgaatgcttaaatcca

SEQ ID NO: 89327 - DNA, 60 bp, Artificial
  Synthetic oligonucleotide
gccagaatgccactgaaatcagagcatctgttgggagaatggttggtggaatcgggaggt

SEQ ID NO: 89328 - DNA, 60 bp, Artificial
  Synthetic oligonucleotide
atgtcgctgtttggagacacaattgcctacctgctttcattgacagaagatggagaaggc

SEQ ID NO: 89329 - DNA, 60 bp, Artificial
  Synthetic oligonucleotide
atgtcgctgtttggagacacaattgcctacctgctttcattgacggaagatggagaaggc

SEQ ID NO: 89330 - DNA, 60 bp, Artificial
  Synthetic oligonucleotide
atgtcgctgtttggagacacaattgcctacctgctttcactaacagaagatggagaaggc

SEQ ID NO: 89331 - DNA, 60 bp, Artificial
  Synthetic oligonucleotide
gctgtttggagacacaattgcctacctgctttcattgacagaagatggagaaggcaaagc

SEQ ID NO: 89332 - DNA, 60 bp, Artificial
  Synthetic oligonucleotide
gctgtttggagacacaattgcctacctgctttcattaacagaagatggagaaggcaaagc

SEQ ID NO: 89333 - DNA, 60 bp, Artificial
  Synthetic oligonucleotide
gctgtttggagacacaattgcctacctgctttcactaacagaagatggagaaggcaaagc

SEQ ID NO: 89334 - DNA, 60 bp, Artificial
  Synthetic oligonucleotide
atgtcgctgtttggagacacaattgcctacctgctttcattaacagaagatggagaaggc

SEQ ID NO: 89335 - DNA, 60 bp, Artificial
  Synthetic oligonucleotide
ctgaagtggaaaggcctttcaagcctccactaccgctgtgccccttcagaggattcttcc

SEQ ID NO: 89336 - DNA, 60 bp, Artificial
  Synthetic oligonucleotide
ctgaagcggaaaggcccttcaagcctccactaccgctgtgccccttcagaggattcttcc

SEQ ID NO: 89337 - DNA, 60 bp, Artificial
  Synthetic oligonucleotide
ctgaagcggaaaggcctttcaagcctccactaccgctgtgccccttcagaggattcttcc

SEQ ID NO: 89338 - DNA, 60 bp, Artificial
  Synthetic oligonucleotide
gaagcggaaaggcccttcaagcctccactaccgctgtgccccttcagaggattcttccct

SEQ ID NO: 89339 - DNA, 60 bp, Artificial
  Synthetic oligonucleotide
ggcctttcaagcctccactaccgctgtgccccttcagaggattcttcccctttcacaagg

SEQ ID NO: 89340 - DNA, 60 bp, Artificial
  Synthetic oligonucleotide
gaagcggaaaggcctttcaagcctccactaccgctgtgccccttcagaggattcttcccc

SEQ ID NO: 89341 - DNA, 60 bp, Artificial
  Synthetic oligonucleotide
ctcatggtcatgtacctgaaccctggaaattattcaatgcaagtaaaactaggaacgctc

SEQ ID NO: 89342 - DNA, 60 bp, Artificial
  Synthetic oligonucleotide
ttgtctcatggtcatgtacctgaaccctggaaattattcaatgcaagtaaaactaggaac

SEQ ID NO: 89343 - DNA, 60 bp, Artificial
  Synthetic oligonucleotide
acttggctaaaaatatctgtgaaaatctagaacaaagtggtttgccagtaggtgggaacg

SEQ ID NO: 89344 - DNA, 60 bp, Artificial
  Synthetic oligonucleotide
acttggctaaaaatatctgtgaaaatctagaacagagtggtttgccggtaggtggaaacg

SEQ ID NO: 89345 - DNA, 60 bp, Artificial
  Synthetic oligonucleotide
ctgacacagaacaaaccaacttatataagaacaaccctggaagagtgactgtctctacca

SEQ ID NO: 89346 - DNA, 60 bp, Artificial
  Synthetic oligonucleotide
caactgacacagaacaaaccaacttatataagaacaaccctggaagagtgactgtctcta

SEQ ID NO: 89347 - DNA, 60 bp, Artificial
  Synthetic oligonucleotide
ctccagttatgtgtgctcaggacttgttggagacacgccaaggaacgatgatagctctag

SEQ ID NO: 89348 - DNA, 60 bp, Artificial
  Synthetic oligonucleotide
cgaatttagtagtacagaccccagagtggactcaggaaagtggccaaaatatactgtgtt

SEQ ID NO: 89349 - DNA, 60 bp, Artificial
  Synthetic oligonucleotide
ctagagtggactcaggaaagtggccaaaatatactgtctttaaaattggctccctatttg

SEQ ID NO: 89350 - DNA, 60 bp, Artificial
  Synthetic oligonucleotide
gagcaagaatcatcaatacaaggatatgacatgaccaaagcttgtttcaagggagacaga

SEQ ID NO: 89351 - DNA, 60 bp, Artificial
  Synthetic oligonucleotide
atgaccaaagcttgtttcaagggagacagagtaaatagccccaaaactttcagtattggg

SEQ ID NO: 89352 - DNA, 60 bp, Artificial
  Synthetic oligonucleotide
aaggaacgatgatagctctagcagcagcaactgcagggatcctaataatgagaggggaaa

SEQ ID NO: 89353 - DNA, 60 bp, Artificial
  Synthetic oligonucleotide
gcagggtggcaaatacataatggattccaacacgataacctcgtttcaggtagattgcta

SEQ ID NO: 89354 - DNA, 60 bp, Artificial
  Synthetic oligonucleotide
ccctgaaaactattcaatgcaagtaaaactaggaacgctctgtgctttatgcgagaaaca

SEQ ID NO: 89355 - DNA, 60 bp, Artificial
  Synthetic oligonucleotide
atgggacctacaatcatgaagattacagggaagagtcacagttgaaaaggcaggagattg

SEQ ID NO: 89356 - DNA, 60 bp, Artificial
  Synthetic oligonucleotide
agcaaaagcagggtggcaaatacataatggattccaacacgataacctcgtttcaggtag

SEQ ID NO: 89357 - DNA, 60 bp, Artificial
  Synthetic oligonucleotide
acaactcaacagagagagtggacacaataattgagagtaatgtcacggttactagctcgg

SEQ ID NO: 89358 - DNA, 60 bp, Artificial
  Synthetic oligonucleotide
gaaatctctaagaggaagaggcagcactcttggtctggacatcgaaacagccactcgtgc

SEQ ID NO: 89359 - DNA, 54 bp, Artificial
  Synthetic oligonucleotide
gatgattttgagaaagcaatggctcaccttggtgagattgggtacatataagca

SEQ ID NO: 89360 - DNA, 60 bp, Artificial
  Synthetic oligonucleotide
gatgattttgagaaagcaatggctcaccttggtgagattgggtacatataagcttcgaag

SEQ ID NO: 89361 - DNA, 51 bp, Artificial
  Synthetic oligonucleotide
gatgattttgagaaagcaatggctcaccttggtgagattgggtacatataa

SEQ ID NO: 89362 - DNA, 60 bp, Artificial
  Synthetic oligonucleotide
ggcggttacttcatcctcaaaatccctttgtaggacatttgtccattgagggcatcaaag

SEQ ID NO: 89363 - DNA, 60 bp, Artificial
  Synthetic oligonucleotide
ggcggttacttcatcctcaaaatccctttgtaggacatttgtctattgagggcatcaaag

SEQ ID NO: 89364 - DNA, 60 bp, Artificial
  Synthetic oligonucleotide
gaccctgagtacaaaggacggttactgcatcctcaaaatccctttgtaggacatttgtct

SEQ ID NO: 89365 - DNA, 60 bp, Artificial
  Synthetic oligonucleotide
ggcggttactgcatcctcaaaatccctttgtaggacatttgtctattgagggcatcaaag

SEQ ID NO: 89366 - DNA, 57 bp, Artificial
  Synthetic oligonucleotide
tataaaggagctatgggaaaacactaaaggaagagatggtctgttagtggcagatgg

SEQ ID NO: 89367 - DNA, 60 bp, Artificial
  Synthetic oligonucleotide
aacttgtatggaattggcacccggtatgttaggatgggaactgaaagtatgaattttgcc

SEQ ID NO: 89368 - DNA, 60 bp, Artificial
  Synthetic oligonucleotide
agccaggagaaaccttgaatgtggaatccaatgggaatttagtagctccttggtatgctt

SEQ ID NO: 89369 - DNA, 60 bp, Artificial
  Synthetic oligonucleotide
cacacaatttgaggcagtagaacatgagttctcaagtctcgaaaggagaatagacaatct

SEQ ID NO: 89370 - DNA, 60 bp, Artificial
  Synthetic oligonucleotide
taagaatggcacatatgactacccaaagtaccaggaagagagcagacttaataggcagga

SEQ ID NO: 89371 - DNA, 60 bp, Artificial
  Synthetic oligonucleotide
ccaagagcacgtggaccggggtagatactaatagtggagttacgagcgcttgcccctaca

SEQ ID NO: 89372 - DNA, 60 bp, Artificial
  Synthetic oligonucleotide
agagaaaatgaacgggaactatgattcaataagaggggaattcaatcaagtagaaaagag

SEQ ID NO: 89373 - DNA, 60 bp, Artificial
  Synthetic oligonucleotide
acatgctcgctgatcgggttgatgatgcagtgactgacatttggtcttacaatgctaagc

SEQ ID NO: 89374 - DNA, 60 bp, Artificial
  Synthetic oligonucleotide
tagaaaagagaatcaacatgctcgctgatcgggttgatgatgcagtgactgacatttggt

SEQ ID NO: 89375 - DNA, 60 bp, Artificial
  Synthetic oligonucleotide
gtattgtgatggtaggtctcatactcgcatttataatgtgggcatgcagcagtggcaatt

SEQ ID NO: 89376 - DNA, 60 bp, Artificial
  Synthetic oligonucleotide
tatttgattgaagaccctaatgcccctaataagctgtgttttccaggggaattggacaac

SEQ ID NO: 89377 - DNA, 60 bp, Artificial
  Synthetic oligonucleotide
tcagggagtggtcatatttgattgaagaccctaatgcccctaataagctgtgttttccag

SEQ ID NO: 89378 - DNA, 60 bp, Artificial
  Synthetic oligonucleotide
cctgtgctacaaacatcaacatcagggagtggtcatatttgattgaagaccctaatgccc

SEQ ID NO: 89379 - DNA, 60 bp, Artificial
  Synthetic oligonucleotide
attacaacaacacaacaggcagagatgttttagtcctttggggaattcaccacccagaca

SEQ ID NO: 89380 - DNA, 60 bp, Artificial
  Synthetic oligonucleotide
gagggatggattgtaggaaacccatcctgtgctacaaacatcaacatcagggagtggtca

SEQ ID NO: 89381 - DNA, 60 bp, Artificial
  Synthetic oligonucleotide
tttgggggattcaccacccagacacagaaacaacagccacaaagctatatgtcaacaaaa

SEQ ID NO: 89382 - DNA, 60 bp, Artificial
  Synthetic oligonucleotide
caggcagagatgttttagtcctttggggaattcaccacccagacacagaaacaacagcca

SEQ ID NO: 89383 - DNA, 55 bp, Artificial
  Synthetic oligonucleotide
cacccagacacagaaacaacagccacaaagctatatgtcaacaaaaacccctaca

SEQ ID NO: 89384 - DNA, 60 bp, Artificial
  Synthetic oligonucleotide
cctaatgcccctaataagctgtgttttccaggggaattggacaacaatggtgaactacgg

SEQ ID NO: 89385 - DNA, 60 bp, Artificial
  Synthetic oligonucleotide
ggggaattggacaacaatggtgaactacggcatctctttagtggagtgaactcttttagc

SEQ ID NO: 89386 - DNA, 60 bp, Artificial
  Synthetic oligonucleotide
caacaatggtgaactacggcatctctttagtggagtgaactcttttagcagaacagagct

SEQ ID NO: 89387 - DNA, 60 bp, Artificial
  Synthetic oligonucleotide
tggagtgaactcttttagcagaacagagctaataagtcccagcaaatggggagatgttct

SEQ ID NO: 89388 - DNA, 60 bp, Artificial
  Synthetic oligonucleotide
cagagctaataagtccaagcaaatggggagatgttctggatggagtaactgcttcttgtc

SEQ ID NO: 89389 - DNA, 59 bp, Artificial
  Synthetic oligonucleotide
caccctggagaaagaataatgtttgaaagcaatgggggtcttttagcacctagatacgg

SEQ ID NO: 89390 - DNA, 60 bp, Artificial
  Synthetic oligonucleotide
ggagatggacagagaagctggatgaaaatctattggcacctaatgcaccctggagaaaga

SEQ ID NO: 89391 - DNA, 60 bp, Artificial
  Synthetic oligonucleotide
ggagggtggcctggtctaattaacggatggtatggttttcagcatcaaaacgaacagggg

SEQ ID NO: 89392 - DNA, 60 bp, Artificial
  Synthetic oligonucleotide
taattaacggatggtatggtttccagcatcaaaacgaacaggggactggcattgccgcgg

SEQ ID NO: 89393 - DNA, 60 bp, Artificial
  Synthetic oligonucleotide
cagctgaagcttgcaactggactgagaaatgttccatctattggtgaaaggggtctattt

SEQ ID NO: 89394 - DNA, 60 bp, Artificial
  Synthetic oligonucleotide
atggtttccagcatcaaaacgaacaggggactggcattgccgcggataaagcttccaccc

SEQ ID NO: 89395 - DNA, 60 bp, Artificial
  Synthetic oligonucleotide
agcatcaaaacgaacaggggactggcattgccgcggataaagcttccacccagaaagcca

SEQ ID NO: 89396 - DNA, 56 bp, Artificial
  Synthetic oligonucleotide
agcaaaagcaggggatattgtcaaaacaacaagaatggccgtcaaagtgctccact

SEQ ID NO: 89397 - DNA, 60 bp, Artificial
  Synthetic oligonucleotide
ggtctggctagtgaaacaaaatgacaggtaccctgttgtaagaggggattacaacaacac

SEQ ID NO: 89398 - DNA, 60 bp, Artificial
  Synthetic oligonucleotide
cagacacagtagacacactaacagagaatggagtacctgtgacaagctcaattgacctcg

SEQ ID NO: 89399 - DNA, 60 bp, Artificial
  Synthetic oligonucleotide
gcaactgtccagactgcaattgggctgattaccctccaaccccaggaaagtaccttgatg

SEQ ID NO: 89400 - DNA, 60 bp, Artificial
  Synthetic oligonucleotide
ctgaaccctggaaattattcaatgcaagtaaaactagggacgctctgtgctttgtgcgag

SEQ ID NO: 89401 - DNA, 60 bp, Artificial
  Synthetic oligonucleotide
aagtgcttacaggcaacctccaaacattgaaaataagagtacatgaggggtatgaggaat

SEQ ID NO: 89402 - DNA, 60 bp, Artificial
  Synthetic oligonucleotide
cattgcctccagtcctgctcctcggtatattactgatatgagcatagaggaaataagccg

SEQ ID NO: 89403 - DNA, 60 bp, Artificial
  Synthetic oligonucleotide
gaacaatacaaaagattggaatatgggacggagaagaggaattccatgtaagatgtggcg

SEQ ID NO: 89404 - DNA, 60 bp, Artificial
  Synthetic oligonucleotide
ctaatgtcgcagtctcgcacccgcgagatactaaccaaaaccactgtggaccacatggcc

SEQ ID NO: 89405 - DNA, 60 bp, Artificial
  Synthetic oligonucleotide
gagatttaatgtcgcagtctcgcacccgcgagatactgacaaaaaccaccgtggaccata

SEQ ID NO: 89406 - DNA, 60 bp, Artificial
  Synthetic oligonucleotide
gagatctaatgtcgcagtctcgcacccgcgagatactaaccaaaaccactgtggaccaca

SEQ ID NO: 89407 - DNA, 60 bp, Artificial
  Synthetic oligonucleotide
caggaagacaagagaagaaccccgcactcagaatgaagtggatgatggcaatgaaatatc

SEQ ID NO: 89408 - DNA, 60 bp, Artificial
  Synthetic oligonucleotide
gaggaatcggaagattctacatacaaatgtgcactgaactcaaactgagtgacaacgagg

SEQ ID NO: 89409 - DNA, 60 bp, Artificial
  Synthetic oligonucleotide
agccaggagaaactttgaatgtggaatccaatggaaatttaatagctccttggtatgctt

SEQ ID NO: 89410 - DNA, 60 bp, Artificial
  Synthetic oligonucleotide
gcagagtcttgaataaagcgccactggatctaatggactgcaccactgaaggttggatac

SEQ ID NO: 89411 - DNA, 60 bp, Artificial
  Synthetic oligonucleotide
gtatgcttacaagttcactagttccagaaacaagggagctattttcaaatcaggcctccc

SEQ ID NO: 89412 - DNA, 60 bp, Artificial
  Synthetic oligonucleotide
ccaggagaaactttgaatgtggaatccaatggaaatttaatagctccttggtatgcttac

SEQ ID NO: 89413 - DNA, 60 bp, Artificial
  Synthetic oligonucleotide
caaaagtaagagcctaaaactagcaactggtctgaggaatgtcccacaggtgaaaacacg

SEQ ID NO: 89414 - DNA, 60 bp, Artificial
  Synthetic oligonucleotide
gttcactagttccagaaacaagggagctattttcaaatcagacctcccaattgagagttg

SEQ ID NO: 89415 - DNA, 60 bp, Artificial
  Synthetic oligonucleotide
caatttgaggcagtagagcatgagttctcaaatctcgaaaggagaataggcaatctgaac

SEQ ID NO: 89416 - DNA, 60 bp, Artificial
  Synthetic oligonucleotide
agaagaatgttacagtgacacactcagtggagctcctagagagcaagaaggagagtagat

SEQ ID NO: 89417 - DNA, 60 bp, Artificial
  Synthetic oligonucleotide
tttctcagaaagatgagacttgacaatgccacttggggccgaataacttttggcccagtt

SEQ ID NO: 89418 - DNA, 60 bp, Artificial
  Synthetic oligonucleotide
cttttttctcagaaagatgagacttgacaatgccacttggggccgaataacttttggccc

SEQ ID NO: 89419 - DNA, 60 bp, Artificial
  Synthetic oligonucleotide
ctcagaaagatgagacttgacaatgccacttggggccgaataacctttggccctgttgag

SEQ ID NO: 89420 - DNA, 60 bp, Artificial
  Synthetic oligonucleotide
ctcagaaagatgagacttgacaatgccacttggggccgaataacttttggcccagttgaa

SEQ ID NO: 89421 - DNA, 60 bp, Artificial
  Synthetic oligonucleotide
acactgaaggctcagtttcttctaggaaaagaagacatgttccaatgggatgcatttgaa

SEQ ID NO: 89422 - DNA, 57 bp, Artificial
  Synthetic oligonucleotide
ttacttgaagttgagagtgagataaggacattctcttttcagcttatttagtactaa

SEQ ID NO: 89423 - DNA, 60 bp, Artificial
  Synthetic oligonucleotide
gaatgcacatgcggatttgccagcaataaaaccatagaatgtgcctgtagagataacagt

SEQ ID NO: 89424 - DNA, 60 bp, Artificial
  Synthetic oligonucleotide
tgcacatgcgggttcgccagcaataaaaccatagaatgtgcctgtagagacaacagttac

SEQ ID NO: 89425 - DNA, 60 bp, Artificial
  Synthetic oligonucleotide
tgcacatgcgggttcgccagcaataaaaccatagaatgtgcctgtagagataacagttac

SEQ ID NO: 89426 - DNA, 60 bp, Artificial
  Synthetic oligonucleotide
ggatcctcaactcactcttcgagcgttttgatgaaggacattcaaagccaattcgagcag

SEQ ID NO: 89427 - DNA, 54 bp, Artificial
  Synthetic oligonucleotide
tcaactcactcttcgagcgttttgatgaaggacattcaaagccaattcgagcag

SEQ ID NO: 89428 - DNA, 60 bp, Artificial
  Synthetic oligonucleotide
cttacagtggaggatgaagaagatggtcatcggatcctcaactcactcttcgagcgtctt

SEQ ID NO: 89429 - DNA, 60 bp, Artificial
  Synthetic oligonucleotide
ttattgcctcaaaaagtgtggtgcgcaagtggcaggagcaaggtaataaaagggtccttg

SEQ ID NO: 89430 - DNA, 60 bp, Artificial
  Synthetic oligonucleotide
ttattgcctcaaaaagtgtggtgcgcaagtggcaggagcaaggtaataaaagggtcctta

SEQ ID NO: 89431 - DNA, 60 bp, Artificial
  Synthetic oligonucleotide
cacaacaaaagtgagcctgaaagtaaaaggatgtctcttgaagagagaaaagcaattgga

SEQ ID NO: 89432 - DNA, 60 bp, Artificial
  Synthetic oligonucleotide
acaaatcagaggatttgtattagtagttgaaaacttggctaaaaatatctgtgaaaatct

SEQ ID NO: 89433 - DNA, 60 bp, Artificial
  Synthetic oligonucleotide
tagaccatgggtgagaggccaaagcggcaggatcagcttctactggacaattgtagaacc

SEQ ID NO: 89434 - DNA, 60 bp, Artificial
  Synthetic oligonucleotide
tagaccatgggtgagaggccaaagcggcaggatcagcttctattggacaattgtggaacc

SEQ ID NO: 89435 - DNA, 60 bp, Artificial
  Synthetic oligonucleotide
gcctacggagcatcttagcaaacaatgggaaatttgagttcattgctgaggaattccaat

SEQ ID NO: 89436 - DNA, 60 bp, Artificial
  Synthetic oligonucleotide
tagctccagtaacactagcaggcaattcctctctctgtctcatcagtggatgggctatat

SEQ ID NO: 89437 - DNA, 60 bp, Artificial
  Synthetic oligonucleotide
ccagtaacactagcaggcaattcctctctctgtctcatcagtggatgggctatatacagc

SEQ ID NO: 89438 - DNA, 60 bp, Artificial
  Synthetic oligonucleotide
cactagcaggcaattcctctctctgtcccatcagtggatgggctatatacagcaaggaca

SEQ ID NO: 89439 - DNA, 60 bp, Artificial
  Synthetic oligonucleotide
cgaccatgggtgtccttcaatcagaatctagagtatcaaataggatacatatgcagcggg

SEQ ID NO: 89440 - DNA, 59 bp, Artificial
  Synthetic oligonucleotide
atatggagtaaaggggttttcatttaaatacggtaatggtgtttggataggaagaacta

SEQ ID NO: 89441 - DNA, 60 bp, Artificial
  Synthetic oligonucleotide
tgtttctgggttgagctgatcagaggaagacccaaggagaatacaatctggaccagtggg

SEQ ID NO: 89442 - DNA, 60 bp, Artificial
  Synthetic oligonucleotide
cttctgggttgagctgatcaggggaagacccaaggagaatacaatctggaccagtgggag

SEQ ID NO: 89443 - DNA, 60 bp, Artificial
  Synthetic oligonucleotide
tgtatttgtcatcagagagccttttatttcatgctctcacttggagtgcaggactttctt

SEQ ID NO: 89444 - DNA, 60 bp, Artificial
  Synthetic oligonucleotide
agagccttttatttcatgctctcacttggagtgcaggactttctttctaactcaaggggc

SEQ ID NO: 89445 - DNA, 60 bp, Artificial
  Synthetic oligonucleotide
ggtaatcaaatcagttgagttgaatgcccctaattaccactatgaggagtgttcctgtta

SEQ ID NO: 89446 - DNA, 60 bp, Artificial
  Synthetic oligonucleotide
ccggcccagacaacggggcggtggctgtattgaaatacaatggcataataacagatacta

SEQ ID NO: 89447 - DNA, 60 bp, Artificial
  Synthetic oligonucleotide
ccggcccagacaatggggcagtggctgtattgaaatacaatggcataataacagacacta

SEQ ID NO: 89448 - DNA, 60 bp, Artificial
  Synthetic oligonucleotide
agagccttttatttcatgctctcatttggaatgcaggactttctttctaactcaaggggc

SEQ ID NO: 89449 - DNA, 60 bp, Artificial
  Synthetic oligonucleotide
atgctagcgaagtaatgtgtgtgtgcagagacaactggcatggttcaaatcgaccatggg

SEQ ID NO: 89450 - DNA, 60 bp, Artificial
  Synthetic oligonucleotide
ggtagttaaatcagttgagttgaatgcccctaattaccactatgaggagtgctcctgtta

SEQ ID NO: 89451 - DNA, 60 bp, Artificial
  Synthetic oligonucleotide
tgtatttgttatcagagagccttttatttcatgctctcatttggaatgcaggactttctt

SEQ ID NO: 89452 - DNA, 60 bp, Artificial
  Synthetic oligonucleotide
accaaacattggcagtaggccatgggtgagaggccaaagcggcaggatcagcttctactg

SEQ ID NO: 89453 - DNA, 60 bp, Artificial
  Synthetic oligonucleotide
gggatgtattcatagaaagacccaatgcagtggacacttgctacccattcgatgtgccag

SEQ ID NO: 89454 - DNA, 60 bp, Artificial
  Synthetic oligonucleotide
catagaaagacccaatgcaatggacacttgctacccattcgatgtgccagattaccagag

SEQ ID NO: 89455 - DNA, 60 bp, Artificial
  Synthetic oligonucleotide
gcatgggacatcatgctgttgccaatggaaccatggtaaagaccctaaccgatgatcaag

SEQ ID NO: 89456 - DNA, 60 bp, Artificial
  Synthetic oligonucleotide
atgcatgggacatcatgctgttgccaatggaaccatggtaaagaccctaaccgatgatca

SEQ ID NO: 89457 - DNA, 60 bp, Artificial
  Synthetic oligonucleotide
gctctctctccacaactaaacctttccagaacatctcgagaatagcaattggggattgcc

SEQ ID NO: 89458 - DNA, 60 bp, Artificial
  Synthetic oligonucleotide
acacggagcaaactaacctatacaaaaacaaccctggaagagtcactgtctctaccaaaa

SEQ ID NO: 89459 - DNA, 60 bp, Artificial
  Synthetic oligonucleotide
acagacacggagcaaactaacctatacaaaaacaaccctggaagagtcactgtctctacc

SEQ ID NO: 89460 - DNA, 60 bp, Artificial
  Synthetic oligonucleotide
accgattccaaattcaaggagtcaaattgactcagggatacaaggacatcattctttgga

SEQ ID NO: 89461 - DNA, 60 bp, Artificial
  Synthetic oligonucleotide
gacaaaggctctctctccacaactaaacctttccagaatatctcgagaatagcaattggg

SEQ ID NO: 89462 - DNA, 60 bp, Artificial
  Synthetic oligonucleotide
tcgagaatagcaattggggattgccccaagtatgttaaacagggctctttaaaacttgca

SEQ ID NO: 89463 - DNA, 60 bp, Artificial
  Synthetic oligonucleotide
gaatatctcgagaatagcaattggggattgccccaagtatgttaagcagggctctttaaa

SEQ ID NO: 89464 - DNA, 60 bp, Artificial
  Synthetic oligonucleotide
cccaggcagccattgatcagatcaatgggaagttaaatcgtcttattgagaagacaaatg

SEQ ID NO: 89465 - DNA, 57 bp, Artificial
  Synthetic oligonucleotide
tcgagaatagcaattggggattgccccaagtatgttaaacagggctctttaaaactt

SEQ ID NO: 89466 - DNA, 60 bp, Artificial
  Synthetic oligonucleotide
ggatacaaagattgatttatggtcatataatgcagagctgttagtcgcactggaaaacca

SEQ ID NO: 89467 - DNA, 60 bp, Artificial
  Synthetic oligonucleotide
ggacacaaagattgatttatggtcatataatgcagaactgttagtagcactggaaaacca

SEQ ID NO: 89468 - DNA, 60 bp, Artificial
  Synthetic oligonucleotide
tgccaatggaaccatggtaaagaccctaaccgatgatcaagtagaagtggtcactgcaca

SEQ ID NO: 89469 - DNA, 60 bp, Artificial
  Synthetic oligonucleotide
ggtaaagaccctaaccgatgatcaagtagaagtggtcactgcacaggaactggtagagtc

SEQ ID NO: 89470 - DNA, 60 bp, Artificial
  Synthetic oligonucleotide
aacctcccggaattgtgtccgagccccctgagactagttgacggtcagacttgcgatatc

SEQ ID NO: 89471 - DNA, 60 bp, Artificial
  Synthetic oligonucleotide
agaatgggatgtattcatagaaagacccaatgcagtggacacttgctacccattcgatgt

SEQ ID NO: 89472 - DNA, 60 bp, Artificial
  Synthetic oligonucleotide
agaatgggatgtattcatagaaagacccaatgcaatggacacttgctacccattcgatgt

SEQ ID NO: 89473 - DNA, 60 bp, Artificial
  Synthetic oligonucleotide
tctgcagcctgaatgggatagctcccctgcaactggggaagtgcaatgtggcgggatggc

SEQ ID NO: 89474 - DNA, 60 bp, Artificial
  Synthetic oligonucleotide
caaccgaagattcactccggagatagcagctagacctaaagttagaggacaggcaggcag

SEQ ID NO: 89475 - DNA, 60 bp, Artificial
  Synthetic oligonucleotide
ggtcgatgatgggttcttggatgtttggacatacaatgccgaactgctcgtcctacttga

SEQ ID NO: 89476 - DNA, 60 bp, Artificial
  Synthetic oligonucleotide
gttcatacaggagaccggttgggatttccagcatggtggaggccatggtgtctagggcca

SEQ ID NO: 89477 - DNA, 60 bp, Artificial
  Synthetic oligonucleotide
caatgccactataaactttgaagcaggaattttggagtgctatgaaaggctttcatggca

SEQ ID NO: 89478 - DNA, 55 bp, Artificial
  Synthetic oligonucleotide
caatgccactataaactttgaagcaggaattttggagtgctatgaaaggctttca

SEQ ID NO: 89479 - DNA, 60 bp, Artificial
  Synthetic oligonucleotide
cctgctctcagaatgaaatggatgatggcaatgaaatatccgataaccgcagacaaaaga

SEQ ID NO: 89480 - DNA, 59 bp, Artificial
  Synthetic oligonucleotide
ctgcactcagaatgaaatggatgatggcaatgaagtatccaataacagcagacaagaga

SEQ ID NO: 89481 - DNA, 60 bp, Artificial
  Synthetic oligonucleotide
tgctcaggacttgttggagacacaccaaggaacgatgatagctctagcagcagcaactgc

SEQ ID NO: 89482 - DNA, 60 bp, Artificial
  Synthetic oligonucleotide
caggacttgttggagacacaccaaggaacgatgatagctctagcagcagcaactgcaggg

SEQ ID NO: 89483 - DNA, 57 bp, Artificial
  Synthetic oligonucleotide
aattccttcatttggagttgctggagtaaatgaatcagcagatatggcaataggaat

SEQ ID NO: 89484 - DNA, 60 bp, Artificial
  Synthetic oligonucleotide
gaatgcgtatgccacaatggtgtctgcccggtagtgttcacagatgggtctgccactgga

SEQ ID NO: 89485 - DNA, 60 bp, Artificial
  Synthetic oligonucleotide
ttgccaccgctgggatacaaatcagagggtttgtattagtagttgaaaacttggctaaaa

SEQ ID NO: 89486 - DNA, 60 bp, Artificial
  Synthetic oligonucleotide
atggaccctgaatacaaagggcggttacttcatcctcaaaatccctttgtaggacatttg

SEQ ID NO: 89487 - DNA, 60 bp, Artificial
  Synthetic oligonucleotide
aattgccaccgctgggatacaaatcagagggtttgtattagtagttgaaaacttggctaa

SEQ ID NO: 89488 - DNA, 60 bp, Artificial
  Synthetic oligonucleotide
ttgccaccgctgggatacaaatcagaggatttgtattagtagttgaaaacttggctaaaa

SEQ ID NO: 89489 - DNA, 60 bp, Artificial
  Synthetic oligonucleotide
tttgtcgcctgggatgatgatgggaatgtttaatatgctatctaccgtgttgggagtagc

SEQ ID NO: 89490 - DNA, 60 bp, Artificial
  Synthetic oligonucleotide
gccaccgctgggatacaaatcagagggtttgtattagtagttgaaaacttggctaagaat

SEQ ID NO: 89491 - DNA, 60 bp, Artificial
  Synthetic oligonucleotide
gtcgcctgggatgatgatgggaatgtttaatatgctatctaccgtgttgggagtagccgc

SEQ ID NO: 89492 - DNA, 60 bp, Artificial
  Synthetic oligonucleotide
cgcctgggatgatgatgggaatgtttaatatgctatctaccgtgttgggagtagccgcac

SEQ ID NO: 89493 - DNA, 60 bp, Artificial
  Synthetic oligonucleotide
ccaagtgcctatgcacaattagattgcgttctggaggctttggatagaatggatgaggaa

SEQ ID NO: 89494 - DNA, 60 bp, Artificial
  Synthetic oligonucleotide
acaaatcagagggtttgtattagtagttgaaaacttggctaaaaatatctgtgaaaatct

SEQ ID NO: 89495 - DNA, 60 bp, Artificial
  Synthetic oligonucleotide
attataaaggagctatgggaaaacactaaaggaagagatggtctgttggtagcagatggg

SEQ ID NO: 89496 - DNA, 60 bp, Artificial
  Synthetic oligonucleotide
aattataaaggagctatgggaaaacactaaaggaagagatggtctgttggtagcagatgg

SEQ ID NO: 89497 - DNA, 60 bp, Artificial
  Synthetic oligonucleotide
ggaccctgaatacaaagggcggttacttcatcctcaaaatccctttgtaggacatttgtc

SEQ ID NO: 89498 - DNA, 60 bp, Artificial
  Synthetic oligonucleotide
gattgccaccgctggaatacaaatcagagggtttgtattagtagttgaaaacttggctaa

SEQ ID NO: 89499 - DNA, 60 bp, Artificial
  Synthetic oligonucleotide
aaggaacggcatctttgtcgcctgggatgatgatgggaatgtttaatatgctatctaccg

SEQ ID NO: 89500 - DNA, 60 bp, Artificial
  Synthetic oligonucleotide
accctgaatacaaagggcggttacttcatcctcaaaatccctttgtaggacatttgtcta

SEQ ID NO: 89501 - DNA, 60 bp, Artificial
  Synthetic oligonucleotide
gggtttgtattagtagttgaaaacttggctaaaaatatctgtgaaaatctagaacaaagt

SEQ ID NO: 89502 - DNA, 60 bp, Artificial
  Synthetic oligonucleotide
gaaggaacggcatctttgtcgcctgggatgatgatgggaatgtttaatatgctatctacc

SEQ ID NO: 89503 - DNA, 60 bp, Artificial
  Synthetic oligonucleotide
ggcaccttttacaagatgataagagatgataaaaccatctacttcagccctataagaatt

SEQ ID NO: 89504 - DNA, 58 bp, Artificial
  Synthetic oligonucleotide
ccttttataagatggtaagagatgataaaaccatctacttcagccctataaaaattac

SEQ ID NO: 89505 - DNA, 60 bp, Artificial
  Synthetic oligonucleotide
aggcaccttttacaagatgataagagatgataaaaccatctacttcagccctataagaat

SEQ ID NO: 89506 - DNA, 60 bp, Artificial
  Synthetic oligonucleotide
gggggtccaatctacagaaggagagatggaaaatggatgagagaattgatcctctatgat

SEQ ID NO: 89507 - DNA, 60 bp, Artificial
  Synthetic oligonucleotide
caggcaccagaatgcagaaggaacaggaacagcagcagacctcaaatccactcaggcagc

SEQ ID NO: 89508 - DNA, 60 bp, Artificial
  Synthetic oligonucleotide
ggcaccagaatgcagaaggaacaggaacagcagcagacctcaaatccactcaggcagcca

SEQ ID NO: 89509 - DNA, 60 bp, Artificial
  Synthetic oligonucleotide
ggggagattgttatcttatgataactgatggctcagcttcaggaattagtaaatgcagat

SEQ ID NO: 89510 - DNA, 60 bp, Artificial
  Synthetic oligonucleotide
ctgaggcaataattgtggccatggtattttcacaagaggattgcatgatcaaggcagttc

SEQ ID NO: 89511 - DNA, 60 bp, Artificial
  Synthetic oligonucleotide
gggatgagaatactcgtgaggggtaactcccctgtgtttaactacaataaggcaaccaag

SEQ ID NO: 89512 - DNA, 60 bp, Artificial
  Synthetic oligonucleotide
tgagaatactcgtgaggggtaactcccctgtgtttaactacaataaggcaaccaagaggc

SEQ ID NO: 89513 - DNA, 60 bp, Artificial
  Synthetic oligonucleotide
ttgagtatcaacgaactgagcaatcttgcgaaaggagaaaaagctaatgtgttgataggg

SEQ ID NO: 89514 - DNA, 60 bp, Artificial
  Synthetic oligonucleotide
cgggcaaccttcaaacattgaaaataagagtacatgaggggtatgaagagttcacgatgg

SEQ ID NO: 89515 - DNA, 60 bp, Artificial
  Synthetic oligonucleotide
gctgtgatcacctgaatggtgcagaatgggatgtcttcatagagcgacccaccgctgtgg

SEQ ID NO: 89516 - DNA, 60 bp, Artificial
  Synthetic oligonucleotide
aaacacaatgactaaagatgctgaaagaggcaaactaaaaagaagagcaattgccaccgc

SEQ ID NO: 89517 - DNA, 60 bp, Artificial
  Synthetic oligonucleotide
gatgctgaaagaggcaaactaaaaagaagagcgattgccaccgctggaatacaaatcaga

SEQ ID NO: 89518 - DNA, 60 bp, Artificial
  Synthetic oligonucleotide
tagatcccgaattgatgacccacacaagcaagtatttgtgttcaaaggtcctaactgaca

SEQ ID NO: 89519 - DNA, 60 bp, Artificial
  Synthetic oligonucleotide
gatcccgaattgatgacccacacaagcaagtatttgtgttcaaaggtcctaactgacaca

SEQ ID NO: 89520 - DNA, 60 bp, Artificial
  Synthetic oligonucleotide
cctggagtgaaaggatttgcattcctggatggagagaactcatggctcgggaggacaatt

SEQ ID NO: 89521 - DNA, 60 bp, Artificial
  Synthetic oligonucleotide
ggatttgcattcctggatggagagaactcatggctcgggaggacaattagcaaagactcc

SEQ ID NO: 89522 - DNA, 60 bp, Artificial
  Synthetic oligonucleotide
gaggacaattagcaaagactccagatcaggctacgaaatgctaaaagtcccaaatgcaga

SEQ ID NO: 89523 - DNA, 60 bp, Artificial
  Synthetic oligonucleotide
caattagcaaagactccagatcaggctacgaaatgctaaaagtcccaaatgcagaaaccg

SEQ ID NO: 89524 - DNA, 60 bp, Artificial
  Synthetic oligonucleotide
tctcacatcaggtaatcgtcaacaaccaaaactggtcggggtactctggagcattcatag

SEQ ID NO: 89525 - DNA, 60 bp, Artificial
  Synthetic oligonucleotide
ggtaatcgtcaacaaccaaaactggtcggggtactctggagcattcatagactactgggc

SEQ ID NO: 89526 - DNA, 60 bp, Artificial
  Synthetic oligonucleotide
gcattcatagactactgggcaaacaaagaatgcttcaatccttgtttttatgtagaacta

SEQ ID NO: 89527 - DNA, 60 bp, Artificial
  Synthetic oligonucleotide
tgtagaactaatcagagggaggcccaaagagagtagtgtactgtggacttcaaatagcat

SEQ ID NO: 89528 - DNA, 60 bp, Artificial
  Synthetic oligonucleotide
aaagacaacgcaataaggataggagaggacgctcatatactagtcacaagggagccctac

SEQ ID NO: 89529 - DNA, 60 bp, Artificial
  Synthetic oligonucleotide
tatactagtcacaagggagccctacttgtcctgtgatccacaaggctgcaggatgtttgc

SEQ ID NO: 89530 - DNA, 60 bp, Artificial
  Synthetic oligonucleotide
gaggacatttctaaacctaactaagcctttatgtgaagcaaactcatggcacattctgtc

SEQ ID NO: 89531 - DNA, 60 bp, Artificial
  Synthetic oligonucleotide
tggcacattctgtcaaaagacaacgcaataaggataggagaggacgctcatatactagtc

SEQ ID NO: 89532 - DNA, 60 bp, Artificial
  Synthetic oligonucleotide
gccaaggcacaacgctcagagggagacatgcgaacgggactatacatgataggagcccgt

SEQ ID NO: 89533 - DNA, 60 bp, Artificial
  Synthetic oligonucleotide
gggactatacatgataggagcccgttcagggccctcataagctgggagatgggtcaagca

SEQ ID NO: 89534 - DNA, 60 bp, Artificial
  Synthetic oligonucleotide
ggagccctacttgtcctgtgatccacaaggctgcaggatgtttgccttgagccaaggcac

SEQ ID NO: 89535 - DNA, 60 bp, Artificial
  Synthetic oligonucleotide
ggatgtttgccttgagccaaggcacaacgctcagagggagacatgcgaacgggactatac

SEQ ID NO: 89536 - DNA, 60 bp, Artificial
  Synthetic oligonucleotide
gataggagcccgttcagggccctcataagctgggagatgggtcaagcacccagtccatac

SEQ ID NO: 89537 - DNA, 56 bp, Artificial
  Synthetic oligonucleotide
gggtcaagcacccagtccatacaatgctagggtcgaatgcatagggtggtcaagca

SEQ ID NO: 89538 - DNA, 60 bp, Artificial
  Synthetic oligonucleotide
gaggaatgttcatgctatggagcagtaggggtgatcaaatgtatatgcagggacaattgg

SEQ ID NO: 89539 - DNA, 60 bp, Artificial
  Synthetic oligonucleotide
gcccaacatatcgaggaatgttcatgctatggagcagtaggggtgatcaaatgtatatgc

SEQ ID NO: 89540 - DNA, 60 bp, Artificial
  Synthetic oligonucleotide
ggtccagcaaacaatagggcagcaactaagataatctatttcaaagagggaaagatacag

SEQ ID NO: 89541 - DNA, 60 bp, Artificial
  Synthetic oligonucleotide
agatggtccagcaaacaatagggcagcaactaagataatctatttcaaagagggaaagat

SEQ ID NO: 89542 - DNA, 60 bp, Artificial
  Synthetic oligonucleotide
gagtcagagtgtgtgtgccataaaggggtctgtccggtagtcatgacagatggtccagca

SEQ ID NO: 89543 - DNA, 60 bp, Artificial
  Synthetic oligonucleotide
caagagtcagagtgtgtgtgccataaaggggtctgtccggtagtcatgacagatggtcca

SEQ ID NO: 89544 - DNA, 60 bp, Artificial
  Synthetic oligonucleotide
tatgcatgtcggggccgaacaacaatgcatcagcggtggtgtggtatggaggtaggccag

SEQ ID NO: 89545 - DNA, 60 bp, Artificial
  Synthetic oligonucleotide
tatcgagaatgtctatatgcatgtcggggccgaacaacaatgcatcagcggtggtgtggt

SEQ ID NO: 89546 - DNA, 60 bp, Artificial
  Synthetic oligonucleotide
caaatagcattgtagctctctgtggatccaaggagcgattgggatcatggtcctggcatg

SEQ ID NO: 89547 - DNA, 50 bp, Artificial
  Synthetic oligonucleotide
ggggcaaatcgaccggtaatcactatagatcccgaattgatgacccacac

SEQ ID NO: 89548 - DNA, 60 bp, Artificial
  Synthetic oligonucleotide
atgtatatgcagggacaattggaagggggcaaatcgaccggtaatcactatagatcccga

SEQ ID NO: 89549 - DNA, 60 bp, Artificial
  Synthetic oligonucleotide
gcctgctgataggaattgccaatttaggcctaaacatcggactccattataaggtgggtg

SEQ ID NO: 89550 - DNA, 60 bp, Artificial
  Synthetic oligonucleotide
taaggtgggtgatacaccggatgtgaacattccaaacgtgaacgagaccaatccaacgac

SEQ ID NO: 89551 - DNA, 60 bp, Artificial
  Synthetic oligonucleotide
gactccattataaggtgggtgatacaccggatgtgaacattccaaacgtgaacgagacca

SEQ ID NO: 89552 - DNA, 60 bp, Artificial
  Synthetic oligonucleotide
aggagaggacatttctaaacctaactaagcctttatgtgaagcaaactcatggcacattc

SEQ ID NO: 89553 - DNA, 60 bp, Artificial
  Synthetic oligonucleotide
cactcagaataatttcacaaatatcactaacattatattgaacaaagacgaggagaggac

SEQ ID NO: 89554 - DNA, 60 bp, Artificial
  Synthetic oligonucleotide
tcctggcatgatggtgctgaaatcatctactttaagtaggaatgatttaggcaaaacacc

SEQ ID NO: 89555 - DNA, 60 bp, Artificial
  Synthetic oligonucleotide
ccctttgatggtagcatacatgctagaaagagagttggtccgcaaaacgaggttcctccc

SEQ ID NO: 89556 - DNA, 60 bp, Artificial
  Synthetic oligonucleotide
agtcctacataaacaggacaggaacatttgaattcacaagctttttctatcgctatggat

SEQ ID NO: 89557 - DNA, 60 bp, Artificial
  Synthetic oligonucleotide
gtctcaaggcaccaaacgatcttatgagcagatggagactggtggagaacgccagaatgc

SEQ ID NO: 89558 - DNA, 60 bp, Artificial
  Synthetic oligonucleotide
gtctcaaggcaccaaacgatcttatgagcagatggaaactagtggggaacgccaaaatgc

SEQ ID NO: 89559 - DNA, 60 bp, Artificial
  Synthetic oligonucleotide
gtctcaaggcaccaaacgatcttatgagcagatggaaactggtggggagcgccagaatgc

SEQ ID NO: 89560 - DNA, 60 bp, Artificial
  Synthetic oligonucleotide
gtctcaaggcaccaaacgatcttatgagcagatggaaactgggggggaacgccagaatgc

SEQ ID NO: 89561 - DNA, 60 bp, Artificial
  Synthetic oligonucleotide
taaatatggcagattatagcattgattctagttatgtatgctcaggtctcgttggtgata

SEQ ID NO: 89562 - DNA, 54 bp, Artificial
  Synthetic oligonucleotide
cctgctgctaatagtgcagatcacagggtttattggatacgagaggggagaata

SEQ ID NO: 89563 - DNA, 60 bp, Artificial
  Synthetic oligonucleotide
cagctccttgttctattggaaaatgaaaagacattagatctccatgattctaatgttcga

SEQ ID NO: 89564 - DNA, 61 bp, Artificial
  Synthetic oligonucleotide
cacagcttcttgttctattggaaaatgaaaagacattagatctccatgattctaatgttcg

SEQ ID NO: 89565 - DNA, 60 bp, Artificial
  Synthetic oligonucleotide
tacaatgcacagcttcttgttctattggaaaatgaaaagacattagatctccatgattct

SEQ ID NO: 89566 - DNA, 60 bp, Artificial
  Synthetic oligonucleotide
atacaatgcacagcttcttgttctattggaaaatgaaaagacattagatctccatgattc

SEQ ID NO: 89567 - DNA, 60 bp, Artificial
  Synthetic oligonucleotide
tgaatgttaaatccctaaagcttgctaccgggctcagaaatgtccctgcgattgctgcaa

SEQ ID NO: 89568 - DNA, 60 bp, Artificial
  Synthetic oligonucleotide
gaatgttaaatccctaaagcttgctaccgggctcagaaatgtccctgcgattgccgcaag

SEQ ID NO: 89569 - DNA, 60 bp, Artificial
  Synthetic oligonucleotide
ctgccctaagtatgtgaatgttaaatccctaaagcttgctaccgggctcagaaatgtccc

SEQ ID NO: 89570 - DNA, 60 bp, Artificial
  Synthetic oligonucleotide
gccagtaggtcaacacagcatgcttgaggctatggcccacagattaagaatggacgcacg

SEQ ID NO: 89571 - DNA, 60 bp, Artificial
  Synthetic oligonucleotide
taatgatccctgggttttgcttaatgcatcttggttcaacttcttcctcacacatgcact

SEQ ID NO: 89572 - DNA, 60 bp, Artificial
  Synthetic oligonucleotide
gacaatgggaatgatgtttggatgggaagaacaatcagtaaagattcgcgctcaggttac

SEQ ID NO: 89573 - DNA, 60 bp, Artificial
  Synthetic oligonucleotide
tgcagggatcctaataatgagagagggaacccaggagtgaaagggtgggcctttgacaat

SEQ ID NO: 89574 - DNA, 60 bp, Artificial
  Synthetic oligonucleotide
aggcaccttttacaagatggtaagagatgataaaaccatctacttcagccctataagaat

SEQ ID NO: 89575 - DNA, 60 bp, Artificial
  Synthetic oligonucleotide
tcccattgagattccaattaagcagaccatccccaatttcttctttgggagggacacagc

SEQ ID NO: 89576 - DNA, 60 bp, Artificial
  Synthetic oligonucleotide
gagattcaaattaagcagaccatccccaatttcttctttgggagggacacagcagaggat

SEQ ID NO: 89577 - DNA, 60 bp, Artificial
  Synthetic oligonucleotide
gagattccaattaagcagaccatccccaatttcttctttgggagggacacagcagaggat

SEQ ID NO: 89578 - DNA, 60 bp, Artificial
  Synthetic oligonucleotide
ttccaattaagcagaccatccccaatttcttctttgggagggacacagcagaggattatg

SEQ ID NO: 89579 - DNA, 59 bp, Artificial
  Synthetic oligonucleotide
accttttacaagatggtaagagatgataaaaccatctacttcagccctataagaattac

SEQ ID NO: 89580 - DNA, 60 bp, Artificial
  Synthetic oligonucleotide
ggcaccttttacaagatggtaagagatgataaaaccatctacttcagccctataagagtt

SEQ ID NO: 89581 - DNA, 60 bp, Artificial
  Synthetic oligonucleotide
ggcaccttttacaagatggtaagagatgataaaaccatctacttcagccctataagaatt

SEQ ID NO: 89582 - DNA, 60 bp, Artificial
  Synthetic oligonucleotide
ttgatattccaattaagcagaccatccccaatttcttctttgggagggacacagcagagg

SEQ ID NO: 89583 - DNA, 60 bp, Artificial
  Synthetic oligonucleotide
ccattgagattccaattaagcagaccatccccaatttcttctttgggagggacacagcag

SEQ ID NO: 89584 - DNA, 60 bp, Artificial
  Synthetic oligonucleotide
ccgttgagattccaattaagcagaccatccccaatttcttctttgggagggacacagcag

SEQ ID NO: 89585 - DNA, 60 bp, Artificial
  Synthetic oligonucleotide
tcccgttgagattccaattaagcagaccatccccaatttcttctttgggagggacacagc

SEQ ID NO: 89586 - DNA, 60 bp, Artificial
  Synthetic oligonucleotide
taagttgcagcccagtgtttgcagtagaaagacctattgctctaagcaagcaagctgtaa

SEQ ID NO: 89587 - DNA, 60 bp, Artificial
  Synthetic oligonucleotide
tgcagccccgtgtttgcagtagaaagacctattgctctaagcaagcaagctgtaagaaga

SEQ ID NO: 89588 - DNA, 60 bp, Artificial
  Synthetic oligonucleotide
gaaccccgcactcagaatgaagtggatgatggcaatgaaatacccaattacagcagacaa

SEQ ID NO: 89589 - DNA, 60 bp, Artificial
  Synthetic oligonucleotide
ccccgcactcagaatgaagtggatgatggcaatgaaatacccaattacggcagacaagag

SEQ ID NO: 89590 - DNA, 60 bp, Artificial
  Synthetic oligonucleotide
gaaccccgcactcagaatgaagtggatgatggcaatgaaatacccaattacggcagacaa

SEQ ID NO: 89591 - DNA, 60 bp, Artificial
  Synthetic oligonucleotide
gcaaaggatgtaatggaagtgctaaagcagagctctatgggaaattcagctcttgtgaag

SEQ ID NO: 89592 - DNA, 60 bp, Artificial
  Synthetic oligonucleotide
gccaaggatgtaatggaagtgctaaagcagagctctatgggaaattcagctcttgtgaag

SEQ ID NO: 89593 - DNA, 60 bp, Artificial
  Synthetic oligonucleotide
ctcggacgaaaaggcgacgaacccgatcgtgccttcctttgacatgagtaacgaaggatc

SEQ ID NO: 89594 - DNA, 60 bp, Artificial
  Synthetic oligonucleotide
ctcggacgaaaaggcgacgaacccgatcgtgccttcctttgacatgagtaacgaggggtc

SEQ ID NO: 89595 - DNA, 60 bp, Artificial
  Synthetic oligonucleotide
ccttactacacaggggagcatgcaaaagccataggaaattgcccaatatgggtgaaaaca

SEQ ID NO: 89596 - DNA, 60 bp, Artificial
  Synthetic oligonucleotide
ccttactacacaggagagcatgcaaaagccataggaaattgcccaatatgggtgaaaaca

SEQ ID NO: 89597 - DNA, 60 bp, Artificial
  Synthetic oligonucleotide
aggaaagaggtttcttcggagctattgctggtttcttggaaggaggatgggaaggaatga

SEQ ID NO: 89598 - DNA, 60 bp, Artificial
  Synthetic oligonucleotide
ggagagcatgcaaaggccataggaaattgcccaatatgggtgaaaacacccttgaagctg

SEQ ID NO: 89599 - DNA, 60 bp, Artificial
  Synthetic oligonucleotide
gaacatgcaaaagccataggaaattgcccaatatgggtgaaaacacccttgaagctggcc

SEQ ID NO: 89600 - DNA, 60 bp, Artificial
  Synthetic oligonucleotide
ccttactacacaggggaacatgcaaaagccataggaaattgcccaatatgggtgaaaaca

SEQ ID NO: 89601 - DNA, 60 bp, Artificial
  Synthetic oligonucleotide
ggggaacatgcaaaagccataggaaattgcccaatatgggtgaaaacacccttgaagctg

SEQ ID NO: 89602 - DNA, 60 bp, Artificial
  Synthetic oligonucleotide
taagctcgcaaatagagcttgcagtcttgctttccaacgaaggaataataaacagtgaag

SEQ ID NO: 89603 - DNA, 60 bp, Artificial
  Synthetic oligonucleotide
gagcatgcaaaggccataggaaattgcccaatatgggtgaaaacacccttgaagctggcc

SEQ ID NO: 89604 - DNA, 60 bp, Artificial
  Synthetic oligonucleotide
gagcatgcaaaagccataggaaattgcccaatatgggtgaaaacacccttgaagctggcc

SEQ ID NO: 89605 - DNA, 60 bp, Artificial
  Synthetic oligonucleotide
ggaaaggggtttcttcggagctattgctggtttcttggaaggaggatgggaaggaatgat

SEQ ID NO: 89606 - DNA, 60 bp, Artificial
  Synthetic oligonucleotide
tcggagctattgctggtttcttggaaggaggatgggaaggaatgattgcaggttggcacg

SEQ ID NO: 89607 - DNA, 60 bp, Artificial
  Synthetic oligonucleotide
aggaaaggggtttcttcggagctattgctggtttcttggaaggaggatgggaaggaatga

SEQ ID NO: 89608 - DNA, 60 bp, Artificial
  Synthetic oligonucleotide
gccataggaaattgcccaatatgggtgaaaacacccttgaagctggccaatggaaccaaa

SEQ ID NO: 89609 - DNA, 60 bp, Artificial
  Synthetic oligonucleotide
ggaaaggggtttcttcggagctattgctggtttcttggagggaggatgggaaggaatgat

SEQ ID NO: 89610 - DNA, 60 bp, Artificial
  Synthetic oligonucleotide
caccaggagggatcagcatgacagtaacaggagacaatactaaatggaatgaatgcttaa

SEQ ID NO: 89611 - DNA, 60 bp, Artificial
  Synthetic oligonucleotide
gggtttgtattagtagttgaaaacttggctaaaaatatctgtgaaaatctagaacagagt

SEQ ID NO: 89612 - DNA, 60 bp, Artificial
  Synthetic oligonucleotide
agtgctttatccaatgacatttcacaaggaattaagagacaaagaatgacagttgagtcc

SEQ ID NO: 89613 - DNA, 60 bp, Artificial
  Synthetic oligonucleotide
gcaaaagccataggaaattgcccaatatgggtgaaaacacctttgaagcttgccaatgga

SEQ ID NO: 89614 - DNA, 60 bp, Artificial
  Synthetic oligonucleotide
caaaagccataggaaattgcccaatatgggtgaaaacacctttgaagcttgccaatggaa

SEQ ID NO: 89615 - DNA, 60 bp, Artificial
  Synthetic oligonucleotide
tgcaaaagccataggaaattgcccaatatgggtgaaaacacctttgaagcttgccaatgg

SEQ ID NO: 89616 - DNA, 60 bp, Artificial
  Synthetic oligonucleotide
gccataggaaattgcccaatatgggtgaaaacacctttgaagcttgccaatggaaccaaa

SEQ ID NO: 89617 - DNA, 60 bp, Artificial
  Synthetic oligonucleotide
gcaaaacacttatcaatgggtgataaaaaacttggtaacactgaaggctcagtttcttct

SEQ ID NO: 89618 - DNA, 60 bp, Artificial
  Synthetic oligonucleotide
caaatcagggggtttgtattagtagttgaaaacttggctaaaaatatctgtgaaaatcta

SEQ ID NO: 89619 - DNA, 60 bp, Artificial
  Synthetic oligonucleotide
caaatcagagggtttgtattagtagttgaaaacttggctaaaaatatctgtgaaaatcta

SEQ ID NO: 89620 - DNA, 60 bp, Artificial
  Synthetic oligonucleotide
tcagagggtttgtattagtagttgaaaacttggctaaaaatatctgtgaaaatctagaac

SEQ ID NO: 89621 - DNA, 60 bp, Artificial
  Synthetic oligonucleotide
ggatttgtattagtagttgaaaacttggctaaaaatatctgtgaaaatctagaacaaagt

SEQ ID NO: 89622 - DNA, 60 bp, Artificial
  Synthetic oligonucleotide
ggtgaaaacacccttgaatctggccaatggaaccaaatatagacctcctgcaaaactatt

SEQ ID NO: 89623 - DNA, 60 bp, Artificial
  Synthetic oligonucleotide
ggtgaaaacacccttgaagctggccaatggaaccaaatatagacctcctgcaaaactatt

SEQ ID NO: 89624 - DNA, 60 bp, Artificial
  Synthetic oligonucleotide
gaatgcaaacactttgctctaacccattatgcagcccaaccagggggatactataatgga

SEQ ID NO: 89625 - DNA, 60 bp, Artificial
  Synthetic oligonucleotide
tggggaatggaagctagaagatgtctgcttcaatcaatgcaacaaatggaagcaattgtt

SEQ ID NO: 89626 - DNA, 60 bp, Artificial
  Synthetic oligonucleotide
ggggaatggaagctagaagatgtctgcttcaatcaatgcaacaaatggaagcaatcgttg

SEQ ID NO: 89627 - DNA, 60 bp, Artificial
  Synthetic oligonucleotide
ggggaatggaagctagaagatgtctgcttcaatcaatgcaacaaatggaagcaattgtcg

SEQ ID NO: 89628 - DNA, 60 bp, Artificial
  Synthetic oligonucleotide
ccaccgctgggatacaaatcagaggatttgtattagtagttgaaaacttggctaaaaata

SEQ ID NO: 89629 - DNA, 60 bp, Artificial
  Synthetic oligonucleotide
tgggcccctctgctgtagacatagggaatggatgcttcgaaaccaaacacaagtgcaacc

SEQ ID NO: 89630 - DNA, 60 bp, Artificial
  Synthetic oligonucleotide
ggcccctctgctgtagacatagggaatggatgcttcgaaaccaaacacaagtgcaaccag

SEQ ID NO: 89631 - DNA, 60 bp, Artificial
  Synthetic oligonucleotide
atactgggtccctctgctgtagacatagggaatggatgcttcgaaaccaaacacaagtgc

SEQ ID NO: 89632 - DNA, 60 bp, Artificial
  Synthetic oligonucleotide
cagctcccttgataataagggaaccttttattgcttgtggaccaaaggagtgcaaacact

SEQ ID NO: 89633 - DNA, 60 bp, Artificial
  Synthetic oligonucleotide
aataagggaaccttttattgcttgtggaccaaaggagtgcaaacactttgctctaaccca

SEQ ID NO: 89634 - DNA, 60 bp, Artificial
  Synthetic oligonucleotide
tggagtggatccgcatgccatgatggtagagaatggacatatatcggagttgatggccct

SEQ ID NO: 89635 - DNA, 60 bp, Artificial
  Synthetic oligonucleotide
tggagcgggtccgcatgccatgatggtagagaatggacatatatcggagttgatggcccc

SEQ ID NO: 89636 - DNA, 60 bp, Artificial
  Synthetic oligonucleotide
cggatccgcatgccatgatggtagagaatggacatatatcggagttgatggccctgacag

SEQ ID NO: 89637 - DNA, 60 bp, Artificial
  Synthetic oligonucleotide
cgggtccgcatgccatgatggtagagaatggacatatatcggagttgatggccctgacaa

SEQ ID NO: 89638 - DNA, 60 bp, Artificial
  Synthetic oligonucleotide
gggtccgcatgccatgatggtagagaatggacatatatcggagttgatggccctgacagt

SEQ ID NO: 89639 - DNA, 60 bp, Artificial
  Synthetic oligonucleotide
ggagtggatccgcatgccatgatggtagagaatggacatatatcggagttgatggccctg

SEQ ID NO: 89640 - DNA, 60 bp, Artificial
  Synthetic oligonucleotide
cgaatttagcagtacagacccaagagtggactcaggaaagtggccaaaatatactgtgtt

SEQ ID NO: 89641 - DNA, 60 bp, Artificial
  Synthetic oligonucleotide
cgaatttagtagtacagacccaagagtggactcaggaaagtggccaaaatatactgtgtt

SEQ ID NO: 89642 - DNA, 60 bp, Artificial
  Synthetic oligonucleotide
ggaacaggtggaaggaatgggggcagctctgatgtccatcaagctccagttttgggctcc

SEQ ID NO: 89643 - DNA, 60 bp, Artificial
  Synthetic oligonucleotide
caaagtagttcttcccataagcatttacgccaaaatacctcaactagggttcaatgttga

SEQ ID NO: 89644 - DNA, 55 bp, Artificial
  Synthetic oligonucleotide
agacataggaaccaaaggccaaatgtgctcaatagcagcagttacctggtggaat

SEQ ID NO: 89645 - DNA, 50 bp, Artificial
  Synthetic oligonucleotide
taggaaccaaaggccaaatgtgctcaatagcagcagttacttggtggaat

SEQ ID NO: 89646 - DNA, 60 bp, Artificial
  Synthetic oligonucleotide
gggagcaaccaatgccaccataaactttgaagcaggaattctggagtgctatgaaaggct

SEQ ID NO: 89647 - DNA, 60 bp, Artificial
  Synthetic oligonucleotide
aggtgggtccgggagcaaccaatgccaccataaactttgaagcaggaattctggagtgct

SEQ ID NO: 89648 - DNA, 60 bp, Artificial
  Synthetic oligonucleotide
gggtccgggagcaaccaatgccaccataaactttgaagcaggaattctggagtgctatga

SEQ ID NO: 89649 - DNA, 60 bp, Artificial
  Synthetic oligonucleotide
cgggagcaaccaatgccaccataaactttgaagcaggaattctggagtgctatgaaagac

SEQ ID NO: 89650 - DNA, 60 bp, Artificial
  Synthetic oligonucleotide
ccgggagcaaccaatgccaccataaactttgaagcaggaattctggagtgctatgaaagg

SEQ ID NO: 89651 - DNA, 54 bp, Artificial
  Synthetic oligonucleotide
tcaattcactcttcgagcgtcttaatgaaggacattcaaagccaattcgagcag

SEQ ID NO: 89652 - DNA, 60 bp, Artificial
  Synthetic oligonucleotide
aaccaatgccaccataaactttgaagcaggaattctggagtgctatgaaaggctttcatg

SEQ ID NO: 89653 - DNA, 58 bp, Artificial
  Synthetic oligonucleotide
aaccaatgccaccataaactttgaagcaggaattctggagtgctatgaaaggctttca

SEQ ID NO: 89654 - DNA, 60 bp, Artificial
  Synthetic oligonucleotide
ccgggagcaaccaatgccaccataaactttgaagcaggaattctggagtgctatgaaaga

SEQ ID NO: 89655 - DNA, 54 bp, Artificial
  Synthetic oligonucleotide
tcaacccactcttcgagcgtcttaatgaaggacattcaaagccaattcgagcag

SEQ ID NO: 89656 - DNA, 60 bp, Artificial
  Synthetic oligonucleotide
caaccaatgccaccataaactttgaagcaggaattctggagtgctatgaaaggctttcat

SEQ ID NO: 89657 - DNA, 59 bp, Artificial
  Synthetic oligonucleotide
caaccaatgccaccataaactttgaagcaggaattctggagtgctatgaaaggctttca

SEQ ID NO: 89658 - DNA, 60 bp, Artificial
  Synthetic oligonucleotide
ggtgggtccgggagcaaccaatgccaccataaactttgaagcaggaattctggagtgcta

SEQ ID NO: 89659 - DNA, 60 bp, Artificial
  Synthetic oligonucleotide
cgccccaacaaaaggctctagttgatcaagtgatcggaagcagaaatccggggattgcag

SEQ ID NO: 89660 - DNA, 60 bp, Artificial
  Synthetic oligonucleotide
cgccccaacaaaaggctctagttgatcaagtgatcggaagtagaagtccagggattgcag

SEQ ID NO: 89661 - DNA, 60 bp, Artificial
  Synthetic oligonucleotide
gcaccccaacaaaaggctctagttgatcaagtgatcggaagtagaaatccagggattgca

SEQ ID NO: 89662 - DNA, 60 bp, Artificial
  Synthetic oligonucleotide
gctccccaacaaaaggctctagttgatcaagtgatcggaagtagaaacccagggattgca

SEQ ID NO: 89663 - DNA, 60 bp, Artificial
  Synthetic oligonucleotide
gcgccccaacaaaaggctctagttgatcaagtgatcggaagcagaaatccggggattgca

SEQ ID NO: 89664 - DNA, 60 bp, Artificial
  Synthetic oligonucleotide
gcgccccaacaaaaggctctagttgatcaagtgatcggaagtagaagtccagggattgca

SEQ ID NO: 89665 - DNA, 60 bp, Artificial
  Synthetic oligonucleotide
gctctgcgccccaacaaaaggctctagttgatcaagtgatcggaagtaggaacccaggga

SEQ ID NO: 89666 - DNA, 60 bp, Artificial
  Synthetic oligonucleotide
gctctgcaccccaacaaaaggctctagttgatcaagtgatcggaagtagaaatccaggga

SEQ ID NO: 89667 - DNA, 60 bp, Artificial
  Synthetic oligonucleotide
caagtgctctgcgccccaacaaaaggctctagttgatcaagtgatcggaagtaggaaccc

SEQ ID NO: 89668 - DNA, 60 bp, Artificial
  Synthetic oligonucleotide
gcgccccaacaaaaggctctagttgatcaagtgatcggaagtagaaacccagggattgca

SEQ ID NO: 89669 - DNA, 60 bp, Artificial
  Synthetic oligonucleotide
atgtcgctgtttggagacacaattgcctacctgctttcactaatagaagatggagaaggc

SEQ ID NO: 89670 - DNA, 60 bp, Artificial
  Synthetic oligonucleotide
aagatgtcgttgtttggagacacaattgcctacctgctttcattgacagaagatggagaa

SEQ ID NO: 89671 - DNA, 60 bp, Artificial
  Synthetic oligonucleotide
ggtaaaaacacctttgaagcttgccaatggaaccaaatatagacctcctgcaaaactatt

SEQ ID NO: 89672 - DNA, 60 bp, Artificial
  Synthetic oligonucleotide
aaacacctttgaagcttgccaatggaaccaaatatagacctcctgcaaaactattaaagg

SEQ ID NO: 89673 - DNA, 60 bp, Artificial
  Synthetic oligonucleotide
cccaatatgggtgaaaacacctttgaagcttgccaatggaaccaaatatagacctcctgc

SEQ ID NO: 89674 - DNA, 60 bp, Artificial
  Synthetic oligonucleotide
ctttgtcacctgggatgatgatgggaatgtttaatatgctatctaccgtgttgggagtag

SEQ ID NO: 89675 - DNA, 60 bp, Artificial
  Synthetic oligonucleotide
aacatcctaaggacacaagaaagtgcctgcaattgcatcgggggagattgttatcttatg

SEQ ID NO: 89676 - DNA, 60 bp, Artificial
  Synthetic oligonucleotide
aacatcctaaggacacaagaaagtgcctgcaattgcatcgggggagactgttatcttatg

SEQ ID NO: 89677 - DNA, 60 bp, Artificial
  Synthetic oligonucleotide
cacaggagaacatgcaaaagccataggaaattgcccaatatgggtgaaaacacctttgaa

SEQ ID NO: 89678 - DNA, 60 bp, Artificial
  Synthetic oligonucleotide
ctacacaggagaacatgcaaaagccataggaaattgcccaatatgggtgaaaacaccttt

SEQ ID NO: 89679 - DNA, 54 bp, Artificial
  Synthetic oligonucleotide
tcaactcactcttcgagcgtctcaatgaaggacattcaaagccaattcgagcag

SEQ ID NO: 89680 - DNA, 54 bp, Artificial
  Synthetic oligonucleotide
tcaactcactcttcgaacgtcttaatgaaggacattcaaagccaattcgagcag

SEQ ID NO: 89681 - DNA, 60 bp, Artificial
  Synthetic oligonucleotide
ggatcctcaactcactcttcgagcgttttaatgaaggacattcaaagccaattcgagcag

SEQ ID NO: 89682 - DNA, 60 bp, Artificial
  Synthetic oligonucleotide
ggaggggtcagcatgacagtaacaggagacaatactaaatggaatgaatgtttaaaccca

SEQ ID NO: 89683 - DNA, 60 bp, Artificial
  Synthetic oligonucleotide
ccaagtgcctatgcacagttagattgcgttctggaggctttggatagaatggatgaggaa

SEQ ID NO: 89684 - DNA, 60 bp, Artificial
  Synthetic oligonucleotide
tgtgagcttccatgaagcatttgaaatagcagaaggccatgaaagctcagcgttactata

SEQ ID NO: 89685 - DNA, 60 bp, Artificial
  Synthetic oligonucleotide
aagatgtgtgagctttcatgaagcatttgaaatagcagaaggccatgaaagctcagcgct

SEQ ID NO: 89686 - DNA, 60 bp, Artificial
  Synthetic oligonucleotide
cttgcccgggatcaacctttcagaaagcactcctaattagccctcatagattcggagaaa

SEQ ID NO: 89687 - DNA, 60 bp, Artificial
  Synthetic oligonucleotide
caacatcctaagaacacaagaaagtgcctgcaattgcatcgggggaaattgttatcttat

SEQ ID NO: 89688 - DNA, 60 bp, Artificial
  Synthetic oligonucleotide
tgcacatgcggatttgccagcaataaaaccatagaatgtgcctgtagagataacagttac

SEQ ID NO: 89689 - DNA, 60 bp, Artificial
  Synthetic oligonucleotide
ccttactatacaggagaacatgcaaaagccataggaaattgcccaatatgggtgaaaaca

SEQ ID NO: 89690 - DNA, 60 bp, Artificial
  Synthetic oligonucleotide
acgttaaccctatttctcacatcagggggagtgttattatcactatatgtgtcagcctta

SEQ ID NO: 89691 - DNA, 60 bp, Artificial
  Synthetic oligonucleotide
caagtgcctatgcacaattagattgcgttctggaggctttggatagaatggatgaagaac

SEQ ID NO: 89692 - DNA, 60 bp, Artificial
  Synthetic oligonucleotide
ccaagtgcctatgcacaattagattgcgttctggaggctttggatagaatggatgaagaa

SEQ ID NO: 89693 - DNA, 60 bp, Artificial
  Synthetic oligonucleotide
gccaagtgcctatgcgcaattagattgcgttctggaggctttggatagaatggatgaaga

SEQ ID NO: 89694 - DNA, 60 bp, Artificial
  Synthetic oligonucleotide
atggaccctgaatacaaagggcggttacttcaccctcaaaatccctttgtaggacatttg

SEQ ID NO: 89695 - DNA, 60 bp, Artificial
  Synthetic oligonucleotide
gcacaatggtagatccaacaaatggaccattacccgaagataatgagccgagtgcctatg

SEQ ID NO: 89696 - DNA, 60 bp, Artificial
  Synthetic oligonucleotide
caatggtagatccaacaaatggaccattacccgaagataatgagccgagtgcctatgcgc

SEQ ID NO: 89697 - DNA, 52 bp, Artificial
  Synthetic oligonucleotide
gatgattttgagaaagcaatggctcaccttggtgagattgggtacatataag

SEQ ID NO: 89698 - DNA, 60 bp, Artificial
  Synthetic oligonucleotide
tctcttggagcaagtcaaaagaatggagaaggaattgcaaaggatgtaatggaagtgcta

SEQ ID NO: 89699 - DNA, 60 bp, Artificial
  Synthetic oligonucleotide
tattcaatgcaagtaaaactaggaacgctctgtgctttgtgcgagaaacaagcatcacat

SEQ ID NO: 89700 - DNA, 60 bp, Artificial
  Synthetic oligonucleotide
tctcttggggcaagtcaaaagaatggagaaggaattgcaaaggatgtaatggaagtgcta

SEQ ID NO: 89701 - DNA, 60 bp, Artificial
  Synthetic oligonucleotide
tcccttggggcaagtcaaaagaatggagaaggaattgcaaaggatgtaatggaagtgtta

SEQ ID NO: 89702 - DNA, 60 bp, Artificial
  Synthetic oligonucleotide
atgaaggcaataattgtactactcatggtagtaacatccaatgcagatcgaatctgcact

SEQ ID NO: 89703 - DNA, 60 bp, Artificial
  Synthetic oligonucleotide
aaaatgaaggcaataattgtactactcatggtagtaacatccaatgcagatcgaatctgc

SEQ ID NO: 89704 - DNA, 60 bp, Artificial
  Synthetic oligonucleotide
catgaaggcaataattgtactactcatggtagtaacatccaatgcagatcgaatctgcac

SEQ ID NO: 89705 - DNA, 60 bp, Artificial
  Synthetic oligonucleotide
aatgaaggcaataattgtactactcatggtagtaacatccaatgcagatcgaatctgcac

SEQ ID NO: 89706 - DNA, 60 bp, Artificial
  Synthetic oligonucleotide
gacctcctgcaaaactattaaaggaaaggggtttcttcggagctattgctggtttcctag

SEQ ID NO: 89707 - DNA, 60 bp, Artificial
  Synthetic oligonucleotide
ttcggagaaaccaaaggaaactcagctcccttgataataagggaaccttttattgcttgt

SEQ ID NO: 89708 - DNA, 60 bp, Artificial
  Synthetic oligonucleotide
atcagccctcatagattcggagaaaccaaaggaaactcagctcccttgataataagggaa

SEQ ID NO: 89709 - DNA, 60 bp, Artificial
  Synthetic oligonucleotide
attagccctcatagattcggagaaaccaaaggaaactcagctcccttgataataagggaa

SEQ ID NO: 89710 - DNA, 60 bp, Artificial
  Synthetic oligonucleotide
attagcccccatagattcggagaaaccaaaggaaactcagctcccttgataataagggaa

SEQ ID NO: 89711 - DNA, 60 bp, Artificial
  Synthetic oligonucleotide
acagccatacaattgttcatagctgattatagatacacctacaaatgccacaggggagat

SEQ ID NO: 89712 - DNA, 59 bp, Artificial
  Synthetic oligonucleotide
ggagagatcaaaggaaactcagctcccttgataataagagaaccttttgttgcttgtgg

SEQ ID NO: 89713 - DNA, 60 bp, Artificial
  Synthetic oligonucleotide
gaagcatttgaaatagcagaaggccatgaaagctcagtgctactatactgtctcatggtc

SEQ ID NO: 89714 - DNA, 60 bp, Artificial
  Synthetic oligonucleotide
gctttcatgaagcatttgaaatagcagaaggccatgaaagctcagcgctactatattgtc

SEQ ID NO: 89715 - DNA, 60 bp, Artificial
  Synthetic oligonucleotide
gtcgctgtttggagacacaattgcctacctgctttcattgacagaagatggagaaggcaa

SEQ ID NO: 89716 - DNA, 60 bp, Artificial
  Synthetic oligonucleotide
taaaatgtcgctgtttggagacacaattgcctacctgctttcactaatagaagatggaga

SEQ ID NO: 89717 - DNA, 60 bp, Artificial
  Synthetic oligonucleotide
aagatgtcgctgtttggagacacaattgcctacctgctttcattgacagaagatggagaa

SEQ ID NO: 89718 - DNA, 60 bp, Artificial
  Synthetic oligonucleotide
aaaatgtcgctgtttggagacacaattgcctacctgctttcattgacagaagatggagaa

SEQ ID NO: 89719 - DNA, 60 bp, Artificial
  Synthetic oligonucleotide
aatgtcgctgtttggagacacaattgcctacctgctttcattgacagaagatggagaagg

SEQ ID NO: 89720 - DNA, 60 bp, Artificial
  Synthetic oligonucleotide
aaatgtcgctgtttggagacacaattgcctacctgctttcattgacagaagatggagaag

SEQ ID NO: 89721 - DNA, 60 bp, Artificial
  Synthetic oligonucleotide
aaaagaagagcgattgcaaccgctggaatacaaatcagagggtttgtattagtagttgaa

SEQ ID NO: 89722 - DNA, 60 bp, Artificial
  Synthetic oligonucleotide
ggggcaaactaaaaagaagagcgattgcaaccgctggaatacaaatcagagggtttgtat

SEQ ID NO: 89723 - DNA, 60 bp, Artificial
  Synthetic oligonucleotide
aaacgttaaccctatttctcacatcagggggagtattattatcactatatgtgtcagctt

SEQ ID NO: 89724 - DNA, 60 bp, Artificial
  Synthetic oligonucleotide
aacgttaaccctatttctcacatcagggggagtattattatcactatatgtgtcagcttc

SEQ ID NO: 89725 - DNA, 60 bp, Artificial
  Synthetic oligonucleotide
acgttaaccctatttctcacatcagggggagtattattatcactatatgtgtcagcttca

SEQ ID NO: 89726 - DNA, 60 bp, Artificial
  Synthetic oligonucleotide
attagccctcatagattcggagaagccaaaggaaactcagctcccttgataataagggaa

SEQ ID NO: 89727 - DNA, 60 bp, Artificial
  Synthetic oligonucleotide
gaaggaacggcatctttgtcgcctggaatgatgatgggaatgtttaatatgctatctacc

SEQ ID NO: 89728 - DNA, 60 bp, Artificial
  Synthetic oligonucleotide
aaggaacggcatctttgtcgcctggaatgatgatgggaatgtttaatatgctatctaccg

SEQ ID NO: 89729 - DNA, 60 bp, Artificial
  Synthetic oligonucleotide
cgcctggaatgatgatgggaatgtttaatatgctatctaccgtgttgggagtagccgcac

SEQ ID NO: 89730 - DNA, 60 bp, Artificial
  Synthetic oligonucleotide
ctttgtcgcctggaatgatgatgggaatgtttaatatgctatctaccgtgttgggagtag

SEQ ID NO: 89731 - DNA, 60 bp, Artificial
  Synthetic oligonucleotide
ggagggatcagcatgacagtaacaggagacaatactaaatggaatgaatgtttaaaccca

SEQ ID NO: 89732 - DNA, 55 bp, Artificial
  Synthetic oligonucleotide
ggatttgctagcaataaaaccatagaatgtgcctgtagagataacagttacacag

SEQ ID NO: 89733 - DNA, 52 bp, Artificial
  Synthetic oligonucleotide
cttgcccgggctcaacctttcagaaagcactcctaattagccctcatagatt

SEQ ID NO: 89734 - DNA, 51 bp, Artificial
  Synthetic oligonucleotide
agcagaccatccccaatttcttctttgggagggacacagcagaggattacg

SEQ ID NO: 89735 - DNA, 51 bp, Artificial
  Synthetic oligonucleotide
atggaaggaataaacgacttttaccgaacatgtaaattattgggaataaac

SEQ ID NO: 89736 - DNA, 52 bp, Artificial
  Synthetic oligonucleotide
aaaattacactgttggttcggtgggaaagaatttgacctagactctgccttg

SEQ ID NO: 89737 - DNA, 52 bp, Artificial
  Synthetic oligonucleotide
aaaattacattgttggttcggtgggaaagaatttgacctagactctgccttg

SEQ ID NO: 89738 - DNA, 60 bp, Artificial
  Synthetic oligonucleotide
gccaatggaaccaaatatagacctcctgcaaaactattaaaggaaaggggtttcttcgga

SEQ ID NO: 89739 - DNA, 60 bp, Artificial
  Synthetic oligonucleotide
caaaactattgaaggaaaggggtttcttcggagctattgctggtttcttagaaggaggat

SEQ ID NO: 89740 - DNA, 60 bp, Artificial
  Synthetic oligonucleotide
tgtacctaaaccctgaaaactattcaatgcaagtaaaactaggaacgctctgtgctttat

SEQ ID NO: 89741 - DNA, 60 bp, Artificial
  Synthetic oligonucleotide
atgcaagtaaaactaggaacgctctgtgctttgtgcgaaaaacaagcatcacattcacac

SEQ ID NO: 89742 - DNA, 60 bp, Artificial
  Synthetic oligonucleotide
ctgaaccctggaaattattcaacgcaagtaaaactaggaacgctctgtgctttgtgcgag

SEQ ID NO: 89743 - DNA, 60 bp, Artificial
  Synthetic oligonucleotide
atgcaagtaaaactaggaacgctctgtgctttgtgcgaaaaacaagcatcacattcgcac

SEQ ID NO: 89744 - DNA, 60 bp, Artificial
  Synthetic oligonucleotide
gaagcttgccaatggaaccaaatatagacctcctgcaaaactattgaaggaaaggggttt

SEQ ID NO: 89745 - DNA, 60 bp, Artificial
  Synthetic oligonucleotide
actacacaggggaacatgcaaaggccataggaaattgcccaatatgggtgaaaacaccct

SEQ ID NO: 89746 - DNA, 60 bp, Artificial
  Synthetic oligonucleotide
atgccagagatgtcaaagaagggaaagaagaaatagatcacaacaaaacaggaggcacct

SEQ ID NO: 89747 - DNA, 59 bp, Artificial
  Synthetic oligonucleotide
aaagaatgccagagatgtcaaagaagggaaagaagaaatagatcacaacaaaacaggag

SEQ ID NO: 89748 - DNA, 60 bp, Artificial
  Synthetic oligonucleotide
aaagaatgccagagatgtcaaagaagggaaagaagaaatagatcacaacaaaacaggagg

SEQ ID NO: 89749 - DNA, 60 bp, Artificial
  Synthetic oligonucleotide
gccagagatgtcaaagaagggaaagaagaaatagatcacaacaaaacaggaggcaccttt

SEQ ID NO: 89750 - DNA, 60 bp, Artificial
  Synthetic oligonucleotide
gggtgttgcaatcaaaggaggtggaactttagtggctgaagccattcgatttataggaag

SEQ ID NO: 89751 - DNA, 60 bp, Artificial
  Synthetic oligonucleotide
agcaacagccatttactgtttaatgggctcaggacaattgctatgggacactgtcacggg

SEQ ID NO: 89752 - DNA, 60 bp, Artificial
  Synthetic oligonucleotide
ctccacgaagtcagacctgttacatccggatgctttcctataatgcacgacagaacaaaa

SEQ ID NO: 89753 - DNA, 60 bp, Artificial
  Synthetic oligonucleotide
aatgccaccataaactttgaagcaggaattctggagtgctatgaaaggctttcatggcaa

SEQ ID NO: 89754 - DNA, 60 bp, Artificial
  Synthetic oligonucleotide
tacaggatgtacaatggtagatccaacaaatggaccattacccgaagacaatgagccaag

SEQ ID NO: 89755 - DNA, 59 bp, Artificial
  Synthetic oligonucleotide
ctatgaaagactttcatggcaaagagcccttgactaccctggtcaagaccgcctaaaca

SEQ ID NO: 89756 - DNA, 55 bp, Artificial
  Synthetic oligonucleotide
aggctttcatggcaaagagcccttgactaccctggtcaagaccgcctaaacagac

SEQ ID NO: 89757 - DNA, 51 bp, Artificial
  Synthetic oligonucleotide
tttcatggcaaagagcccttgactaccctggtcaagaccgcctaaacagac

SEQ ID NO: 89758 - DNA, 59 bp, Artificial
  Synthetic oligonucleotide
tgaaagactttcatggcaaagagcccttgactaccctggtcaagaccgcctaaacagac

SEQ ID NO: 89759 - DNA, 56 bp, Artificial
  Synthetic oligonucleotide
tgaaagactttcatggcaaagagcccttgactaccctggtcaagaccgcctaaaca

SEQ ID NO: 89760 - DNA, 60 bp, Artificial
  Synthetic oligonucleotide
catgcggatttgccagcaataaaaccatagaatgtgcctgtagagataacagttacacag

SEQ ID NO: 89761 - DNA, 60 bp, Artificial
  Synthetic oligonucleotide
atgcaagtaaaactaggaacgctctgtgctttatgcgagaaacaagcatcacattcacac

SEQ ID NO: 89762 - DNA, 60 bp, Artificial
  Synthetic oligonucleotide
atgctaccctcaactatacaaacgttaaccctatttctcacatcagggggagtgttatta

SEQ ID NO: 89763 - DNA, 60 bp, Artificial
  Synthetic oligonucleotide
caactgtagaaaactccattttccacatggcagcttggagtggatccgcatgccatgatg

SEQ ID NO: 89764 - DNA, 60 bp, Artificial
  Synthetic oligonucleotide
cccaactgtagaaaactccattttccacatggcagcttggagtggatccgcatgccatga

SEQ ID NO: 89765 - DNA, 60 bp, Artificial
  Synthetic oligonucleotide
gatgattttgagaaagcaatggctcaccttggtgagattgggtacacataagctccgaag

SEQ ID NO: 89766 - DNA, 60 bp, Artificial
  Synthetic oligonucleotide
ttcagcggactaaatcacataatgattgggcattcacagatgaacgatgtctgtttccaa

SEQ ID NO: 89767 - DNA, 60 bp, Artificial
  Synthetic oligonucleotide
tttcagtggactaaatcacataatgattgggcattcacagatgaacgatgtctgtttcca

SEQ ID NO: 89768 - DNA, 60 bp, Artificial
  Synthetic oligonucleotide
cagcggactaaatcacataatgattgggcattcacagatgaacgatgtctgtttccaaag

SEQ ID NO: 89769 - DNA, 60 bp, Artificial
  Synthetic oligonucleotide
attttcttctaggaaaagaagacatgttccaatgggatgcatttgaagcatttgaaagca

SEQ ID NO: 89770 - DNA, 60 bp, Artificial
  Synthetic oligonucleotide
agtttcttctagggaaagaagacatgttccaatgggatgcatttgaagcatttgaaagca

SEQ ID NO: 89771 - DNA, 60 bp, Artificial
  Synthetic oligonucleotide
agtttcttctaggaaaagaagacatgttccaatgggatgcatttgaagcatttgaaagca

SEQ ID NO: 89772 - DNA, 60 bp, Artificial
  Synthetic oligonucleotide
gaatctgcactgggataacatcgtcaaactcacctcatgtggtcaaaacagctactcaag

SEQ ID NO: 89773 - DNA, 60 bp, Artificial
  Synthetic oligonucleotide
gcagatcgaatctgcactgggataacatcgtcaaactcacctcatgtggtcaaaacagct

SEQ ID NO: 89774 - DNA, 60 bp, Artificial
  Synthetic oligonucleotide
gatgtacaatggtagatccaacaaatggaccattacccgaagacaatgagccaagtgcct

SEQ ID NO: 89775 - DNA, 60 bp, Artificial
  Synthetic oligonucleotide
ggtagatccaacaaatggaccattacccgaagacaatgagccaagtgcctatgcacagtt

SEQ ID NO: 89776 - DNA, 60 bp, Artificial
  Synthetic oligonucleotide
tgacatgaccaaagcttgtttcaagggagacagagtaaatagccccaaaactttcagtat

SEQ ID NO: 89777 - DNA, 60 bp, Artificial
  Synthetic oligonucleotide
atatgacatgaccaaagcttgtttcaagggagacagagtaaatagccccaaaactttcag

SEQ ID NO: 89778 - DNA, 60 bp, Artificial
  Synthetic oligonucleotide
atggaccctgaatacaaagggcggttacttcatcctcaaaatccctttgtgggacatttg

SEQ ID NO: 89779 - DNA, 60 bp, Artificial
  Synthetic oligonucleotide
acctaatggaccctgaatacaaagggcggttacttcatcctcaaaatccctttgtaggac

SEQ ID NO: 89780 - DNA, 60 bp, Artificial
  Synthetic oligonucleotide
acctaatggaccctgaatacaaagggcggttacttcatcctcaaaatccctttgtgggac

SEQ ID NO: 89781 - DNA, 60 bp, Artificial
  Synthetic oligonucleotide
caaacttggacaaacaatatctaaactgagggatatatctgttccagctggtttctccaa

SEQ ID NO: 89782 - DNA, 60 bp, Artificial
  Synthetic oligonucleotide
ctgaaccctggaaattattcaatgcaagtaaaactaggaacgctctgtgctttgtgcgag

SEQ ID NO: 89783 - DNA, 60 bp, Artificial
  Synthetic oligonucleotide
cctgaatcctggaaattattcaatgcaagtaaaactaggaacgctctgtgctttgtgcga

SEQ ID NO: 89784 - DNA, 60 bp, Artificial
  Synthetic oligonucleotide
tggtcatgtacctgaaccctggaaattattcaatgcaagtaaaactaggaacgctctgtg

SEQ ID NO: 89785 - DNA, 60 bp, Artificial
  Synthetic oligonucleotide
ctgaatcctggaaattattcaatgcaagtaaaactaggaacgctctgtgctttgtgcgag

SEQ ID NO: 89786 - DNA, 60 bp, Artificial
  Synthetic oligonucleotide
gatgattttgagaaagcaatggctcaccttggtgagattgggtacatataagtgtcaaag

SEQ ID NO: 89787 - DNA, 60 bp, Artificial
  Synthetic oligonucleotide
ggagggatcagcatgacagtaacaggagacaatacaaaatggaatgaatgtttaaaccca

SEQ ID NO: 89788 - DNA, 60 bp, Artificial
  Synthetic oligonucleotide
tcagaaggaagggaagttccgtttgacaataaaaagggatatacgtaatgtattgtcctt

SEQ ID NO: 89789 - DNA, 60 bp, Artificial
  Synthetic oligonucleotide
gacaaacaatatctagactaagggatatatctgttccagctggtttctccaattttgaag

SEQ ID NO: 89790 - DNA, 60 bp, Artificial
  Synthetic oligonucleotide
gcttggacaaacaatatctagactaagggatatatctgttccagctggtttctccaattt

SEQ ID NO: 89791 - DNA, 60 bp, Artificial
  Synthetic oligonucleotide
caaacaatatctagactaagggatatatctgttccagctggtttctccaattttgaaggg

SEQ ID NO: 89792 - DNA, 60 bp, Artificial
  Synthetic oligonucleotide
ctttaaacttggacaaacaatatctagactaagggatatatctgttccagctggtttctc

SEQ ID NO: 89793 - DNA, 60 bp, Artificial
  Synthetic oligonucleotide
ctttaagcttggacaaacaatatctagactaagggatatatctgttccagctggtttctc

SEQ ID NO: 89794 - DNA, 60 bp, Artificial
  Synthetic oligonucleotide
ctttgaacttggacaaacaatatctagactaagggatatatctgttccagctggtttctc

SEQ ID NO: 89795 - DNA, 60 bp, Artificial
  Synthetic oligonucleotide
ttgactttaagcttggacaaacaatatctagactaagggatatatctgttccagctggtt

SEQ ID NO: 89796 - DNA, 60 bp, Artificial
  Synthetic oligonucleotide
ttgactttaaacttggacaaacaatatctagactaagggatatatctgttccagctggtt

SEQ ID NO: 89797 - DNA, 60 bp, Artificial
  Synthetic oligonucleotide
ttaactttaaacttggacaaacaatatctagactaagggatatatctgttccagctggtt

SEQ ID NO: 89798 - DNA, 60 bp, Artificial
  Synthetic oligonucleotide
ggagaaaccaaaggaaactcagctcccttgataataagggaacctttcattgcttgtgga

SEQ ID NO: 89799 - DNA, 60 bp, Artificial
  Synthetic oligonucleotide
tattgcttgtggaccaaaggagtgtaaacactttgctctaacccattatgcagctcaacc

SEQ ID NO: 89800 - DNA, 60 bp, Artificial
  Synthetic oligonucleotide
ttgcttgtggaccaaaggagtgtaaacactttgctctaacccattatgcagctcaaccag

SEQ ID NO: 89801 - DNA, 60 bp, Artificial
  Synthetic oligonucleotide
tgctctaagcaagcaagctgtaagaagaatgctgtcaatgaatattgagggacgtgatgc

SEQ ID NO: 89802 - DNA, 56 bp, Artificial
  Synthetic oligonucleotide
tgctctgagcaagcaagctgtaagaagaatgctgtcaatgaatattgagggacgtg

SEQ ID NO: 89803 - DNA, 56 bp, Artificial
  Synthetic oligonucleotide
tgccctaagcaagcaagctgtaagaagaatgctgtcaatgaatattgagggacgtg

SEQ ID NO: 89804 - DNA, 60 bp, Artificial
  Synthetic oligonucleotide
ctctaagcaagcaagctgtaagaagaatgctgtcaatgaatattgagggacgtgatgcag

SEQ ID NO: 89805 - DNA, 60 bp, Artificial
  Synthetic oligonucleotide
cccaactgtagaaaactccattttccacatggcagcttggagtgggtccgcatgccatga

SEQ ID NO: 89806 - DNA, 60 bp, Artificial
  Synthetic oligonucleotide
cccaactgtagaaaactccattttccacatggcagcttggagcggatccgcatgccatga

SEQ ID NO: 89807 - DNA, 60 bp, Artificial
  Synthetic oligonucleotide
cccaactgtagaaaactccattttccacatggcagcttggagtggatctgcatgccatga

SEQ ID NO: 89808 - DNA, 60 bp, Artificial
  Synthetic oligonucleotide
cagctcccttgataataagggaaccttttattgcttgtggaccaaaggaatgcaaacact

SEQ ID NO: 89809 - DNA, 60 bp, Artificial
  Synthetic oligonucleotide
aataagggaaccttttattgcttgtggaccaaaggaatgcaaacactttgctctaaccca

SEQ ID NO: 89810 - DNA, 60 bp, Artificial
  Synthetic oligonucleotide
ccttgataataagggaaccttttattgcttgtggaccaaaggaatgcaaacactttgctc

SEQ ID NO: 89811 - DNA, 60 bp, Artificial
  Synthetic oligonucleotide
actcatggtagtaacatccaatgcagatcgaatctgcactgggataacatcgtcaaactc

SEQ ID NO: 89812 - DNA, 60 bp, Artificial
  Synthetic oligonucleotide
acaaattgaggtgggtccgggagcaaccaatgccaccataaactttgaagcaggaattct

SEQ ID NO: 89813 - DNA, 60 bp, Artificial
  Synthetic oligonucleotide
attgaggtgggtccgggagcaaccaatgccaccataaactttgaagcaggaattttggag

SEQ ID NO: 89814 - DNA, 60 bp, Artificial
  Synthetic oligonucleotide
aggatgattttgagaaagcaatggctcaccttggtgagattgggtacatataagcttcga

SEQ ID NO: 89815 - DNA, 60 bp, Artificial
  Synthetic oligonucleotide
ctcaagatgatgaatgactcaatggctaagaaaaccagtggaaatgctttcattgggaag

SEQ ID NO: 89816 - DNA, 60 bp, Artificial
  Synthetic oligonucleotide
gatcaaaggaggtggaactttagtggctgaagccattcgatttataggaagagcaatggc

SEQ ID NO: 89817 - DNA, 60 bp, Artificial
  Synthetic oligonucleotide
ggggcaagtcaaaagaatggagaaggaattgcaaaggatgtaatggaagtgctaaagcag

SEQ ID NO: 89818 - DNA, 60 bp, Artificial
  Synthetic oligonucleotide
atacatcaaaagagcattatcattaaacacaatgacaaaagatgctgaaaggggcaaatt

SEQ ID NO: 89819 - DNA, 60 bp, Artificial
  Synthetic oligonucleotide
ccaagagtgacatggcaaacagaatccccttggaatacaagggaatacaacttaaaacaa

SEQ ID NO: 89820 - DNA, 60 bp, Artificial
  Synthetic oligonucleotide
gcccgggctcaacctttcagaaagcactcctaattagccctcatagattcggagaaacca

SEQ ID NO: 89821 - DNA, 60 bp, Artificial
  Synthetic oligonucleotide
agcattcgaaatagcagaaggccatgaaagctcagcgttactatattgtctcatggtcat

SEQ ID NO: 89822 - DNA, 60 bp, Artificial
  Synthetic oligonucleotide
tccaaatgaaatggggaatggaagctagaagatgtctgcttcaatcaatgcaacaaatag

SEQ ID NO: 89823 - DNA, 60 bp, Artificial
  Synthetic oligonucleotide
cttgccagggttcaacctttcagaaagcactcctaattagccctcatagattcggagaag

SEQ ID NO: 89824 - DNA, 53 bp, Artificial
  Synthetic oligonucleotide
gacggaggactaccacaaagcggcagaattgttgttgattacatggtgcaaaa

SEQ ID NO: 89825 - DNA, 60 bp, Artificial
  Synthetic oligonucleotide
cgaatttagtagtacagatcccagagtggactcaggaaagtggccaaaatatactgtgtt

SEQ ID NO: 89826 - DNA, 60 bp, Artificial
  Synthetic oligonucleotide
acttttgaatttagtagtacagatcccagagtggactcaggaaagtggccaaaatatact

SEQ ID NO: 89827 - DNA, 60 bp, Artificial
  Synthetic oligonucleotide
agtacagatcccagagtggactcaggaaagtggccaaaatatactgtatttagaattggt

SEQ ID NO: 89828 - DNA, 60 bp, Artificial
  Synthetic oligonucleotide
cgaatttagtagtacagatccaagagtggactcaggaaagtggccaaaatatactgtgtt

SEQ ID NO: 89829 - DNA, 60 bp, Artificial
  Synthetic oligonucleotide
gaagcatttgaaatagcagaaggccatgaaagctcagcgttactatattgtctcatggtc

SEQ ID NO: 89830 - DNA, 60 bp, Artificial
  Synthetic oligonucleotide
atttgaaatagcagaaggccatgaaagctcagcgctactatattgtctcatggtcatgta

SEQ ID NO: 89831 - DNA, 60 bp, Artificial
  Synthetic oligonucleotide
gaagcatttgaaatagcagaaggccatgaaagctcagcgctactatattgcctcatggtc

SEQ ID NO: 89832 - DNA, 60 bp, Artificial
  Synthetic oligonucleotide
gaagcatttgaaatagcagaaggccatgaaagctcagcattgctatattgtctcatggtc

SEQ ID NO: 89833 - DNA, 60 bp, Artificial
  Synthetic oligonucleotide
gaagcatttgaaatagcagaaggccatgaaagctcagcgctactgtattgtctcatggtc

SEQ ID NO: 89834 - DNA, 60 bp, Artificial
  Synthetic oligonucleotide
atttgaaatagcagaaggccatgaaagctcagcgctactatactgtctcatggtcatgta

SEQ ID NO: 89835 - DNA, 60 bp, Artificial
  Synthetic oligonucleotide
cttgcccgggctcaacctttcagaaagcactcctaattagccctcatagattcggagaaa

SEQ ID NO: 89836 - DNA, 60 bp, Artificial
  Synthetic oligonucleotide
cttgccctggctcaacctttcagaaagcactcctaattagccctcatagattcggagaaa

SEQ ID NO: 89837 - DNA, 60 bp, Artificial
  Synthetic oligonucleotide
cttgccagggctcaacctttcagaaagcactcctaattagccctcatagattcggagaag

SEQ ID NO: 89838 - DNA, 60 bp, Artificial
  Synthetic oligonucleotide
cggagaaaccaaaggaaactcagctcccttgataataagggaaccttttattgcttgtgg

SEQ ID NO: 89839 - DNA, 60 bp, Artificial
  Synthetic oligonucleotide
ggaaactcagctcccttgataataagggaaccttttattgcttgtggaccaaaggaatgc

SEQ ID NO: 89840 - DNA, 60 bp, Artificial
  Synthetic oligonucleotide
ggaaactcagctcccttgataataagggaaccttttattgcttgtggaccaaatgaatgc

SEQ ID NO: 89841 - DNA, 60 bp, Artificial
  Synthetic oligonucleotide
agactcacaacaagagtgagcctgagaataaaaggatgtctcttgaagagagaaaagaaa

SEQ ID NO: 89842 - DNA, 60 bp, Artificial
  Synthetic oligonucleotide
agactcacaacaagagtgagcctgagaataaaaggatgtctcttgaagagagaaaagcaa

SEQ ID NO: 89843 - DNA, 60 bp, Artificial
  Synthetic oligonucleotide
caacatcctaagaacacaagaaagtgcctgcaactgcatcggaggagattgttatcttat

SEQ ID NO: 89844 - DNA, 60 bp, Artificial
  Synthetic oligonucleotide
caacatcctaagaacacaagaaagtgcctgcaattgcatcggaggaaattgttatcttat

SEQ ID NO: 89845 - DNA, 60 bp, Artificial
  Synthetic oligonucleotide
caacatcctaagaacacaagaaagtgcctgcaactgcatcgggggaaattgttatcttat

SEQ ID NO: 89846 - DNA, 60 bp, Artificial
  Synthetic oligonucleotide
caacatcctaagaacacaagaaagtgcctgcaattgcattgggggaaattgttatcttat

SEQ ID NO: 89847 - DNA, 60 bp, Artificial
  Synthetic oligonucleotide
caacatcctaagaacacaagaaagtgcctgcaactgcatcgggggagattgttatcttat

SEQ ID NO: 89848 - DNA, 60 bp, Artificial
  Synthetic oligonucleotide
cccaacagtagaaaactccattttccacatggcagcttggagcgggtccgcatgccatga

SEQ ID NO: 89849 - DNA, 50 bp, Artificial
  Synthetic oligonucleotide
ttaagatgaatataaatccttattttctcttcatagatgtacccatacag

SEQ ID NO: 89850 - DNA, 60 bp, Artificial
  Synthetic oligonucleotide
ggaggatgaagaagatggccatcggatcctcaactcactcttcgagcgtcttaatgaagg

SEQ ID NO: 89851 - DNA, 60 bp, Artificial
  Synthetic oligonucleotide
cttacagtggaggatgaagaagatggccatcggatcctcaactcactcttcgagcgtctc

SEQ ID NO: 89852 - DNA, 60 bp, Artificial
  Synthetic oligonucleotide
ctaggaacactctgtgctttatgcgagaaacaagcatcacattcacacagggctcatagc

SEQ ID NO: 89853 - DNA, 60 bp, Artificial
  Synthetic oligonucleotide
ggaacgctctgtgctttatgcgagaaacaagcatcacattcacacagggctcatagcaga

SEQ ID NO: 89854 - DNA, 60 bp, Artificial
  Synthetic oligonucleotide
tgctactgatgatcttacagtggaggatgaagaagatggccctcggatcctcaactcact

SEQ ID NO: 89855 - DNA, 60 bp, Artificial
  Synthetic oligonucleotide
caagggaatacaacttaaaacaaatgctgaagacataggaactaaaggccaaatgtgctc

SEQ ID NO: 89856 - DNA, 60 bp, Artificial
  Synthetic oligonucleotide
gtgatgtagcttgtgacataataagagctgcattaggactaaagatcagacaaagacaaa

SEQ ID NO: 89857 - DNA, 60 bp, Artificial
  Synthetic oligonucleotide
gtgacataataagagctgcattaggactaaagatcagacaaagacaaagattcggacggc

SEQ ID NO: 89858 - DNA, 60 bp, Artificial
  Synthetic oligonucleotide
gacggaggtgatgtcgcctgtgacataataagagctgcattaggactaaagatcagacaa

SEQ ID NO: 89859 - DNA, 60 bp, Artificial
  Synthetic oligonucleotide
cggaggtgatgtcgcctgtgacataataagagctgcattaggactaaagatcagacaaag

SEQ ID NO: 89860 - DNA, 60 bp, Artificial
  Synthetic oligonucleotide
agagcatactgaagaatgcacatgcggatttgccagcaataaaaccatagaatgtgcctg

SEQ ID NO: 89861 - DNA, 60 bp, Artificial
  Synthetic oligonucleotide
aacatccaatgcagatcgaatctgcactgggataacatcttcaaactcacctcatgtggt

SEQ ID NO: 89862 - DNA, 60 bp, Artificial
  Synthetic oligonucleotide
ccaatgcagatcgaatctgcactgggataacatcttcaaactcacctcatgtggtcaaaa

SEQ ID NO: 89863 - DNA, 60 bp, Artificial
  Synthetic oligonucleotide
aatgcagatcgaatctgcactgggataacatcttcaaactcacctcatgtggtcaaaaca

SEQ ID NO: 89864 - DNA, 60 bp, Artificial
  Synthetic oligonucleotide
caatgcagatcgaatctgcactgggataacatcttcaaactcacctcatgtggtcaaaac

SEQ ID NO: 89865 - DNA, 60 bp, Artificial
  Synthetic oligonucleotide
aacgcagatcgaatctgcactgggataacatcttcaaactcacctcatgtggtcaaaaca

SEQ ID NO: 89866 - DNA, 60 bp, Artificial
  Synthetic oligonucleotide
aatcataaaggagctatgggaaaacactaaaggaagagatggtctattggtagcagatgg

SEQ ID NO: 89867 - DNA, 60 bp, Artificial
  Synthetic oligonucleotide
gttatcttatgataactgatggctcagcttcaggaattagtaaatgcagatttcttaaga

SEQ ID NO: 89868 - DNA, 51 bp, Artificial
  Synthetic oligonucleotide
atggaaggaataaacgatttttaccgaacatgtaaattattgggaataaac

SEQ ID NO: 89869 - DNA, 60 bp, Artificial
  Synthetic oligonucleotide
ttaaaatgtcgctgtttggagacacaattgcctacttgctttcattgacagaagatggag

SEQ ID NO: 89870 - DNA, 60 bp, Artificial
  Synthetic oligonucleotide
gaacatgcaaaagccataggaaattgcccaatatgggtgaaaacacccttgaatctggcc

SEQ ID NO: 89871 - DNA, 60 bp, Artificial
  Synthetic oligonucleotide
ctggtttcttagaaggaggatgggaaggaatgattgcaggttggcacggatacacatccc

SEQ ID NO: 89872 - DNA, 60 bp, Artificial
  Synthetic oligonucleotide
tgctggtttcttagaaggaggatgggaaggaatgattgcaggttggcacggatacacatc

SEQ ID NO: 89873 - DNA, 60 bp, Artificial
  Synthetic oligonucleotide
gtaaacactcagaaagaagggaagttccgtttgacaataaaaagggatatacgtaatgta

SEQ ID NO: 89874 - DNA, 60 bp, Artificial
  Synthetic oligonucleotide
ccaatgccaccataaactttgaagcaggaattttggagtgctatgaaaggctttcatggc

SEQ ID NO: 89875 - DNA, 56 bp, Artificial
  Synthetic oligonucleotide
ccaatgccaccataaactttgaagcaggaattttggagtgctatgaaaggctttca

SEQ ID NO: 89876 - DNA, 60 bp, Artificial
  Synthetic oligonucleotide
actcagctcccttgataataagggaaccttttattgcttgtggaccaaaggaatgcaaac

SEQ ID NO: 89877 - DNA, 60 bp, Artificial
  Synthetic oligonucleotide
gagattccaattaagcagaccatccccagtttcttctttgggagggacacagcagaggat

SEQ ID NO: 89878 - DNA, 60 bp, Artificial
  Synthetic oligonucleotide
ttccaattaagcaaaccatccccaatttcttctttgggagggacacagcagaggattatg

SEQ ID NO: 89879 - DNA, 60 bp, Artificial
  Synthetic oligonucleotide
ttatcttatgataactgatggctcagcttcagggattagtgaatgcagattccttaagat

SEQ ID NO: 89880 - DNA, 60 bp, Artificial
  Synthetic oligonucleotide
caatcttatgcatggtattttctcaagacactaggatgttccaaggagtgagaggagaga

SEQ ID NO: 89881 - DNA, 60 bp, Artificial
  Synthetic oligonucleotide
cacaagtgcaaccagacctgtctcgacagaatagctgctggcacctttaatgcaggagaa

SEQ ID NO: 89882 - DNA, 60 bp, Artificial
  Synthetic oligonucleotide
tttcttcggagctattgctggtttcttagaaggaggatgggaaggaatgattgcaggttg

SEQ ID NO: 89883 - DNA, 60 bp, Artificial
  Synthetic oligonucleotide
caggaattctggagtgctatgaaaggctttcatggcaaagagcccttgactaccctggtc

SEQ ID NO: 89884 - DNA, 60 bp, Artificial
  Synthetic oligonucleotide
ctggagtgctatgaaaggctttcatggcaaagagcccttgactaccctggtcaagaccgc

SEQ ID NO: 89885 - DNA, 60 bp, Artificial
  Synthetic oligonucleotide
agtgctatgaaaggctttcatggcaaagagcccttgactaccctggtcaagaccgcctaa

SEQ ID NO: 89886 - DNA, 60 bp, Artificial
  Synthetic oligonucleotide
aattttggagtgctatgaaaggctttcatggcaaagagcccttgactaccctggtcaaga

SEQ ID NO: 89887 - DNA, 60 bp, Artificial
  Synthetic oligonucleotide
gagaaagcaatggctcaccttggtgagattgggtacacataagctccgaagatgtccatg

SEQ ID NO: 89888 - DNA, 60 bp, Artificial
  Synthetic oligonucleotide
ctatacaaacgttaaccctatttctcacatcagggggagtgttattatcactatatgtgt

SEQ ID NO: 89889 - DNA, 60 bp, Artificial
  Synthetic oligonucleotide
actatacaaacgttaaccctatttctcacatcagggggagtgttattatcactatatgtg

SEQ ID NO: 89890 - DNA, 60 bp, Artificial
  Synthetic oligonucleotide
aactatacaaacgttaaccctatttctcacatcagggggagtgttattatcactatatgt

SEQ ID NO: 89891 - DNA, 60 bp, Artificial
  Synthetic oligonucleotide
acaaacgttaaccctatttctcacatcagggggagtgttattatcactatatgtgtcagc

SEQ ID NO: 89892 - DNA, 60 bp, Artificial
  Synthetic oligonucleotide
atacaaacgttaaccctatttctcacatcagggggagtgttattatcactatatgtgtca

SEQ ID NO: 89893 - DNA, 60 bp, Artificial
  Synthetic oligonucleotide
gagcatgcaaaggccataggaaattgcccaatatgggtgaaaacacccttgaagctagcc

SEQ ID NO: 89894 - DNA, 60 bp, Artificial
  Synthetic oligonucleotide
gaacatgcaaaggccataggaaattgcccaatatgggtgaaaacacccttgaagctggcc

SEQ ID NO: 89895 - DNA, 60 bp, Artificial
  Synthetic oligonucleotide
ggagagcatgcaaaggccataggaaattgcccaatatgggtgaaaacacccttgaagcta

SEQ ID NO: 89896 - DNA, 60 bp, Artificial
  Synthetic oligonucleotide
ggccataggaaattgcccaatatgggtgaaaacacccttgaagctagccaatggaaccaa

SEQ ID NO: 89897 - DNA, 60 bp, Artificial
  Synthetic oligonucleotide
agcatgcaaaggccataggaaattgcccaatatgggtgaaaacacccttgaagctagcca

SEQ ID NO: 89898 - DNA, 60 bp, Artificial
  Synthetic oligonucleotide
ttcggagaaaccaaaggaaactcagctcccttgataataagggaacctttcattgcttgt

SEQ ID NO: 89899 - DNA, 60 bp, Artificial
  Synthetic oligonucleotide
gggtttgtattagtagttgaaaacttggctaaaaatatctgtgagaatctagaacaaagt

SEQ ID NO: 89900 - DNA, 60 bp, Artificial
  Synthetic oligonucleotide
tcacataatgattgggcattcacagatgaacgatgtctgtttccaaagatcaaaggcact

SEQ ID NO: 89901 - DNA, 50 bp, Artificial
  Synthetic oligonucleotide
ttcatggcaaagagcccttgactaccctggtcaagaccgcctaaacagac

SEQ ID NO: 89902 - DNA, 60 bp, Artificial
  Synthetic oligonucleotide
ctacctgctttcattgacagaagatggagaaggcaaagcagaactagcagaaaaattaca

SEQ ID NO: 89903 - DNA, 60 bp, Artificial
  Synthetic oligonucleotide
gacagaagatggagaaggcaaagcagaactagcagaaaaattacactgttggtttggtgg

SEQ ID NO: 89904 - DNA, 60 bp, Artificial
  Synthetic oligonucleotide
ctgctttcattgacagaagatggagaaggcaaagcagaactagcagaaaaattacactgt

SEQ ID NO: 89905 - DNA, 60 bp, Artificial
  Synthetic oligonucleotide
agatggagaaggcaaagcagaactagcagaaaaattacactgttggttcggtgggaaaga

SEQ ID NO: 89906 - DNA, 60 bp, Artificial
  Synthetic oligonucleotide
ctagggaaagaagacatgttccaatgggatgcatttgaagcatttgaaagcataatcccc

SEQ ID NO: 89907 - DNA, 60 bp, Artificial
  Synthetic oligonucleotide
ctaggaaaagaagacatgttccaatgggatgcatttgaagcatttgaaagcataatcccc

SEQ ID NO: 89908 - DNA, 60 bp, Artificial
  Synthetic oligonucleotide
tgctggtttcctagaaggaggatgggaaggaatgattgcaggttggcacggatacacatc

SEQ ID NO: 89909 - DNA, 60 bp, Artificial
  Synthetic oligonucleotide
aggccaaaaacacaatggcagaatttagtgaagatcctgaactacaaccagcaatgctat

SEQ ID NO: 89910 - DNA, 60 bp, Artificial
  Synthetic oligonucleotide
gccaaaaacacaatggcagaatttagtgaagatcctgaattacaaccagcaatgctattc

SEQ ID NO: 89911 - DNA, 60 bp, Artificial
  Synthetic oligonucleotide
aatacaaaaggccaaaaacacaatggcagaatttagtgaagatcctgaattacaaccagc

SEQ ID NO: 89912 - DNA, 60 bp, Artificial
  Synthetic oligonucleotide
acaaaaggccaaaaacacaatggcagaatttagtgaagatcctgaattacaaccagcaat

SEQ ID NO: 89913 - DNA, 60 bp, Artificial
  Synthetic oligonucleotide
acaaaaggccaaaaacacaatggcagaatttagtgaagatcctgaattacagccagcagt

SEQ ID NO: 89914 - DNA, 60 bp, Artificial
  Synthetic oligonucleotide
caaaaggccaaaaacacaatggcagaatttagtgaagatcctgaactacaaccagcaatg

SEQ ID NO: 89915 - DNA, 60 bp, Artificial
  Synthetic oligonucleotide
ctacaataatacaaaaggccaaaaacacaatggcagaatttagtgaagatcctgaactac

SEQ ID NO: 89916 - DNA, 60 bp, Artificial
  Synthetic oligonucleotide
ataatacaaaaggccaaaaacacaatggcagaatttagtgaagatcctgaactacaacca

SEQ ID NO: 89917 - DNA, 60 bp, Artificial
  Synthetic oligonucleotide
ataatacaaaaggccaaaaacacaatggcagaatttagtgaagatcctgaattacaacca

SEQ ID NO: 89918 - DNA, 60 bp, Artificial
  Synthetic oligonucleotide
taatacaaaaggccaaaaacacaatggcagaatttagtgaagatcctgaattacagccag

SEQ ID NO: 89919 - DNA, 60 bp, Artificial
  Synthetic oligonucleotide
cacaatggcagaatttagtgaagatcctgaattacagccagcagtactattcaacatctg

SEQ ID NO: 89920 - DNA, 60 bp, Artificial
  Synthetic oligonucleotide
cacaatggcagaatttagtgaagatcctgaattacaaccagcaatgctattcaacatctg

SEQ ID NO: 89921 - DNA, 51 bp, Artificial
  Synthetic oligonucleotide
acacaatggcagaatttagtgaagatcctgaactacaaccagcaatgctat

SEQ ID NO: 89922 - DNA, 60 bp, Artificial
  Synthetic oligonucleotide
ccaaaaacacaatggcagaatttagtgaagatcctgaattacaaccagcaatgctattca

SEQ ID NO: 89923 - DNA, 60 bp, Artificial
  Synthetic oligonucleotide
gccaaaaacacaatggcagaatttagtgaagatcctgaactacaaccagcaatgctattc

SEQ ID NO: 89924 - DNA, 60 bp, Artificial
  Synthetic oligonucleotide
caaaaacacaatggcagaatttagtgaagatcctgaactacaaccagcaatgctattcaa

SEQ ID NO: 89925 - DNA, 59 bp, Artificial
  Synthetic oligonucleotide
aaaacacaatggcagaatttagtgaagatcctgaactacaaccagcaatgctattcaac

SEQ ID NO: 89926 - DNA, 59 bp, Artificial
  Synthetic oligonucleotide
aaaacacaatggcagaatttagtgaagatcctgaattacaaccagcaatgctattcaac

SEQ ID NO: 89927 - DNA, 60 bp, Artificial
  Synthetic oligonucleotide
aaaacacaatggcagaatttagtgaagatcctgaattacagccagcagtactattcaaca

SEQ ID NO: 89928 - DNA, 51 bp, Artificial
  Synthetic oligonucleotide
gatgattttgagaaagcaatggctcaccttggcgagattgggtacatataa

SEQ ID NO: 89929 - DNA, 60 bp, Artificial
  Synthetic oligonucleotide
gtgacgtcgcctgtgacataataagagctgcattaggactaaagatcagacaaagacaaa

SEQ ID NO: 89930 - DNA, 60 bp, Artificial
  Synthetic oligonucleotide
acaaaacacctatcaatgggtgctgaaaaatttggtaacactgaaggctcagtttcttct

SEQ ID NO: 89931 - DNA, 60 bp, Artificial
  Synthetic oligonucleotide
cgggaacggaacaatacagaagattggaatatgggacggagaagaggagttccatgtgag

SEQ ID NO: 89932 - DNA, 60 bp, Artificial
  Synthetic oligonucleotide
atagggaacggaacaatacagaagattggaatatgggacggggaagaggagttccatgta

SEQ ID NO: 89933 - DNA, 60 bp, Artificial
  Synthetic oligonucleotide
gggtcccctctattttcctacaatccacaaacagaagtcctaactatatgcggcagaatg

SEQ ID NO: 89934 - DNA, 60 bp, Artificial
  Synthetic oligonucleotide
gaacggaacaatacagaagattggaatatgggacggggaagaggagttccatgtaagatg

SEQ ID NO: 89935 - DNA, 60 bp, Artificial
  Synthetic oligonucleotide
gacgtcgcctgtgacataataagagctgcattaggactaaagatcagacaaagacaaaga

SEQ ID NO: 89936 - DNA, 60 bp, Artificial
  Synthetic oligonucleotide
cgcctgtgacataataagagctgcattaggactaaagatcagacaaagacaaagatttgg

SEQ ID NO: 89937 - DNA, 60 bp, Artificial
  Synthetic oligonucleotide
gcaaaacacctatcaatgggtgctgaaaaatttggtaacactgaaggctcagtttcttct

SEQ ID NO: 89938 - DNA, 60 bp, Artificial
  Synthetic oligonucleotide
cggaacaatacagaagattggaatatgggacggggaagaggagttccatgtaagatgtgg

SEQ ID NO: 89939 - DNA, 60 bp, Artificial
  Synthetic oligonucleotide
gtgacataataagagctgcattaggactaaagatcagacaaagacaaagatttggacggc

SEQ ID NO: 89940 - DNA, 60 bp, Artificial
  Synthetic oligonucleotide
ggcctgtgacataataagagctgcattaggactaaagatcagacaaagacaaagatttgg

SEQ ID NO: 89941 - DNA, 60 bp, Artificial
  Synthetic oligonucleotide
tttgcaagagcagtgctcaaacaaatgagagaccaagaggtcatgaaaactgaccagttc

SEQ ID NO: 89942 - DNA, 60 bp, Artificial
  Synthetic oligonucleotide
tttgcaagagcagtgctcaaacaaatgagagaccaagaggttatgaaaactgaccagttc

SEQ ID NO: 89943 - DNA, 60 bp, Artificial
  Synthetic oligonucleotide
caatgccaccataaactttgaagcaggaattctggagtgctatgaaagactttcatggca

SEQ ID NO: 89944 - DNA, 55 bp, Artificial
  Synthetic oligonucleotide
caatgccaccataaactttgaagcaggaattctggagtgctatgaaagactttca

SEQ ID NO: 89945 - DNA, 59 bp, Artificial
  Synthetic oligonucleotide
caatgccaccataaactttgaagcaggaattctggagtgctttgaaaggctttcatggc

SEQ ID NO: 89946 - DNA, 60 bp, Artificial
  Synthetic oligonucleotide
caatgccaccataaactttgaagcaggaattctggagtgctttgaaaggctttcatggca

SEQ ID NO: 89947 - DNA, 60 bp, Artificial
  Synthetic oligonucleotide
caatgccaccataaactttgaagcaggaattttggagtgctacgaaaggctttcatggca

SEQ ID NO: 89948 - DNA, 60 bp, Artificial
  Synthetic oligonucleotide
caatgccaccataaactttgaagcaggaattttggagtgctatgaaaggctttcatggca

SEQ ID NO: 89949 - DNA, 59 bp, Artificial
  Synthetic oligonucleotide
caatgccaccataaactttgaagcaggaattttggagtgctacgaaaggctttcatggc

SEQ ID NO: 89950 - DNA, 60 bp, Artificial
  Synthetic oligonucleotide
attgccaccgctggaatacaaatcagagggtttgtattagtagttgaaaacttggctaaa

SEQ ID NO: 89951 - DNA, 60 bp, Artificial
  Synthetic oligonucleotide
ttgccaccgctggaatacaaatcagagggtttgtattagtagttgaaaacttggctaaaa

SEQ ID NO: 89952 - DNA, 57 bp, Artificial
  Synthetic oligonucleotide
caaccgctggaatacaaatcagagggtttgtattagtagttgaaaacttggctaaaa

SEQ ID NO: 89953 - DNA, 60 bp, Artificial
  Synthetic oligonucleotide
caaccgctggaatacaaatcagagggtttgtattagtagttgaaaacttggctaaaaata

SEQ ID NO: 89954 - DNA, 60 bp, Artificial
  Synthetic oligonucleotide
tgaaggcaataattgtactactcatggtagtaacatccaatgcagaccgaatctgcactg

SEQ ID NO: 89955 - DNA, 60 bp, Artificial
  Synthetic oligonucleotide
aatgaaggcaataattgtactactcatggtagtaacatccaaagcagatcgaatctgcac

SEQ ID NO: 89956 - DNA, 60 bp, Artificial
  Synthetic oligonucleotide
gaaggcaataattgtactactcatggtagtaacatccaaagcagatcgaatctgcactgg

SEQ ID NO: 89957 - DNA, 60 bp, Artificial
  Synthetic oligonucleotide
aggcaataattgtactactcatggtagtaacatccaacgcagatcgaatctgcactggga

SEQ ID NO: 89958 - DNA, 60 bp, Artificial
  Synthetic oligonucleotide
atgaaggcaataattgtactactcatggtagtaacatctaatgcagatcgaatctgcact

SEQ ID NO: 89959 - DNA, 60 bp, Artificial
  Synthetic oligonucleotide
atgaaggcaataattgtactactcatggtagtaacatccaacgcagatcgaatctgcact

SEQ ID NO: 89960 - DNA, 60 bp, Artificial
  Synthetic oligonucleotide
atgaaggcaataattgtactactcatggtagtaacatccaaagcagatcgaatctgcact

SEQ ID NO: 89961 - DNA, 60 bp, Artificial
  Synthetic oligonucleotide
atctactcaagatgatgaatgactcaatggctaagaaaaccaatggaaatgctttcatcg

SEQ ID NO: 89962 - DNA, 60 bp, Artificial
  Synthetic oligonucleotide
atctactcaagatgatgaatgactcaatggctaagaaaaccaatgggaatgctttcattg

SEQ ID NO: 89963 - DNA, 60 bp, Artificial
  Synthetic oligonucleotide
atctactcaagatgatgaatgactcaatggctaagaaaaccagtggaaatgctttcattg

SEQ ID NO: 89964 - DNA, 60 bp, Artificial
  Synthetic oligonucleotide
accaatgccaccataaactttgaagcaggaattctggagtgctatgaaagactttcatgg

SEQ ID NO: 89965 - DNA, 57 bp, Artificial
  Synthetic oligonucleotide
accaatgccaccataaactttgaagcaggaattctggagtgctatgaaagactttca

SEQ ID NO: 89966 - DNA, 60 bp, Artificial
  Synthetic oligonucleotide
caggagcaaccaatgccaccataaactttgaagcaggaattctggagtgctatgaaaggc

SEQ ID NO: 89967 - DNA, 60 bp, Artificial
  Synthetic oligonucleotide
aattttggagtgctatgaaaggttttcatggcaaagagcccttgactaccctggtcaaga

SEQ ID NO: 89968 - DNA, 60 bp, Artificial
  Synthetic oligonucleotide
tctcttggggcaagtcaaaagaatggggaaggaattgcaaaggatgtaatggaagtacta

SEQ ID NO: 89969 - DNA, 60 bp, Artificial
  Synthetic oligonucleotide
ctagcagaagagctgcaaagcaacattggagtattgagatctcttggagcaagtcaaaag

SEQ ID NO: 89970 - DNA, 60 bp, Artificial
  Synthetic oligonucleotide
ccgttcttcaatgaagaaggaacggcatctttgtcgcctggaatgatgatgggaatgttt

SEQ ID NO: 89971 - DNA, 60 bp, Artificial
  Synthetic oligonucleotide
cattcttcaatgaagaaggaacggcatctttgtcgcctggaatgatgatgggaatgttta

SEQ ID NO: 89972 - DNA, 60 bp, Artificial
  Synthetic oligonucleotide
cattcttcaatgaagaaggaacggcatctttgtcacctggaatgatgatgggaatgttta

SEQ ID NO: 89973 - DNA, 60 bp, Artificial
  Synthetic oligonucleotide
ccattcttcaatgaagaaggaacggcatctttgtcgcctggaatgatgatgggaatgttt

SEQ ID NO: 89974 - DNA, 60 bp, Artificial
  Synthetic oligonucleotide
gggtttcttcggagctattgctggtttcttagaaggaggatgggaaggaatgattgcagg

SEQ ID NO: 89975 - DNA, 60 bp, Artificial
  Synthetic oligonucleotide
ttaaaggaaaggggtttcttcggagctattgctggtttcttagaaggaggatgggaagga

SEQ ID NO: 89976 - DNA, 60 bp, Artificial
  Synthetic oligonucleotide
gctttcattgggaagaaaatgtttcaaatatcagacaaaaacaaaaccaatcccgttgaa

SEQ ID NO: 89977 - DNA, 55 bp, Artificial
  Synthetic oligonucleotide
gattgggcattcacagatgaatgatgtctgtttccaaagatcaaaggcactaaaa

SEQ ID NO: 89978 - DNA, 60 bp, Artificial
  Synthetic oligonucleotide
gattgggcattcacagatgaatgatgtctgtttccaaagatcaaaggcactaaaaagagt

SEQ ID NO: 89979 - DNA, 60 bp, Artificial
  Synthetic oligonucleotide
gcgaattctataaccagatgatggtcaaagctggactcaacgatgacatggagaggaacc

SEQ ID NO: 89980 - DNA, 60 bp, Artificial
  Synthetic oligonucleotide
tgggcgaattctataaccagatgatggtcaaagctggactcaacgatgacatggagagga

SEQ ID NO: 89981 - DNA, 60 bp, Artificial
  Synthetic oligonucleotide
gccgagtgcctatgcgcaattagattgcgttctggaggctttggatagaatggatgaaga

SEQ ID NO: 89982 - DNA, 60 bp, Artificial
  Synthetic oligonucleotide
cagaaagaagggaagttccgtttgacaataaaaagggatatacgtaatgtgttgtccttg

SEQ ID NO: 89983 - DNA, 60 bp, Artificial
  Synthetic oligonucleotide
cttgcccgggctcaacttttcagaaagcactcctaattagccctcatagattcggagaaa

SEQ ID NO: 89984 - DNA, 60 bp, Artificial
  Synthetic oligonucleotide
aacaaatggaagcaattgttgaacaagaatcatcgatacaaggatatgacatgaccaaag

SEQ ID NO: 89985 - DNA, 60 bp, Artificial
  Synthetic oligonucleotide
caacaaatggaagcaattgttgaacaagaatcatcgatacaaggatatgacatgaccaaa

SEQ ID NO: 89986 - DNA, 60 bp, Artificial
  Synthetic oligonucleotide
aatcataaaggagctatgggaaaacactaaaggaagagatggtctgttggtagcagatgg

SEQ ID NO: 89987 - DNA, 60 bp, Artificial
  Synthetic oligonucleotide
aaatcataaaggagctatgggaaaacactaaaggaagagatggtctgttagtggcagatg

SEQ ID NO: 89988 - DNA, 60 bp, Artificial
  Synthetic oligonucleotide
tccaaatgaaatgggggatggaagctagaagatgtctgcttcaatcaatgcaacaaatgg

SEQ ID NO: 89989 - DNA, 60 bp, Artificial
  Synthetic oligonucleotide
tggagcgggtccgcatgtcatgatggtagagaatggacatatatcggagttgatggcccc

SEQ ID NO: 89990 - DNA, 60 bp, Artificial
  Synthetic oligonucleotide
ccccaacaaaaggctctagttgatcaagtgatcggaagtagaaatccagggattgcagac

SEQ ID NO: 89991 - DNA, 60 bp, Artificial
  Synthetic oligonucleotide
ccccaacaaaaggctctagttgatcaagtgatcggaagtagaaacccagggattgcagac

SEQ ID NO: 89992 - DNA, 60 bp, Artificial
  Synthetic oligonucleotide
cgcctcaacaaaaggctctagttgatcaagtgatcggaagtagaaatccagggattgcag

SEQ ID NO: 89993 - DNA, 60 bp, Artificial
  Synthetic oligonucleotide
gcgcctcaacaaaaggctctagttgatcaagtgatcggaagtagaaatccagggattgca

SEQ ID NO: 89994 - DNA, 60 bp, Artificial
  Synthetic oligonucleotide
caaatgctctgcaccccaacaaaaggctctagttgatcaagtgatcggaagtagaaatcc

SEQ ID NO: 89995 - DNA, 60 bp, Artificial
  Synthetic oligonucleotide
gggtttgtattagtagtagaaaacttggctaaaaatatctgtgaaaatctagaacaaagt

SEQ ID NO: 89996 - DNA, 56 bp, Artificial
  Synthetic oligonucleotide
ttgccaccgctggaatacaaatcagagggtttgtattagtagttgaaaacttggct

SEQ ID NO: 89997 - DNA, 60 bp, Artificial
  Synthetic oligonucleotide
gattgccaccgctggaatacaaatcagagggtttgtattagtagttgaaaacttggccaa

SEQ ID NO: 89998 - DNA, 60 bp, Artificial
  Synthetic oligonucleotide
agctattgctggtttcttagaaggaggatgggaaggaatgattgcaggttggcacggata

SEQ ID NO: 89999 - DNA, 60 bp, Artificial
  Synthetic oligonucleotide
ggagctattgctggtttcttagaaggaggatgggaaggaatgattgcaggttggcacgga

SEQ ID NO: 90000 - DNA, 60 bp, Artificial
  Synthetic oligonucleotide
ttgctggtttcttagaaggaggatgggaaggaatgattgcaggttggcacggatacacat

SEQ ID NO: 90001 - DNA, 60 bp, Artificial
  Synthetic oligonucleotide
cggagctattgctggtttcttagaaggaggatgggaaggaatgattgcaggttggcacgg

SEQ ID NO: 90002 - DNA, 60 bp, Artificial
  Synthetic oligonucleotide
aagactcacaacaaaagtgagcctgaaagtaaaaggatgtctcttgaagagagaaaagca

SEQ ID NO: 90003 - DNA, 60 bp, Artificial
  Synthetic oligonucleotide
aagactcacaacaaaagtgagcctgaaagtaaaaggatgtctcttgaagagagaaaagct

SEQ ID NO: 90004 - DNA, 60 bp, Artificial
  Synthetic oligonucleotide
gactcacaacaaaagtgagcctgaaagtaaaaggatgtctcttgaagagagaaaagctat

SEQ ID NO: 90005 - DNA, 60 bp, Artificial
  Synthetic oligonucleotide
gactcacaacaaaagtgagcctgaaagtaaaaggatgtctcttgaagagagaaaagcaat

SEQ ID NO: 90006 - DNA, 60 bp, Artificial
  Synthetic oligonucleotide
cacaacaaaagtgagcctgaaagtaaaaggatgtctcttgaagagagaaaagcaattggg

SEQ ID NO: 90007 - DNA, 60 bp, Artificial
  Synthetic oligonucleotide
gcagctctgatgtccatcaagctccagttttgggctccaatgaccagatctggggggaat

SEQ ID NO: 90008 - DNA, 60 bp, Artificial
  Synthetic oligonucleotide
ggggcaagtcaaaagaatggagaaggaattgcaaaggatgtaatggaagtgttaaagcag

SEQ ID NO: 90009 - DNA, 60 bp, Artificial
  Synthetic oligonucleotide
tcaactcactcttcgagcgtcttaatgaaggacattcaaagccaattcgagcagctgaaa

SEQ ID NO: 90010 - DNA, 60 bp, Artificial
  Synthetic oligonucleotide
atgacagtaacaggagacaatactaaatggaatgaatgcttaaatccaagaatctttttg

SEQ ID NO: 90011 - DNA, 57 bp, Artificial
  Synthetic oligonucleotide
gcttccttcatttggagttgctggagtaaatgaatcagcagatatggcaataggaat

SEQ ID NO: 90012 - DNA, 57 bp, Artificial
  Synthetic oligonucleotide
actcccttcatttggggttgctggagtaaatgaatcagcagatatggcaataggaat

SEQ ID NO: 90013 - DNA, 60 bp, Artificial
  Synthetic oligonucleotide
acagaagatggagaaggcaaagcagaactagcagaaaaattacactgttggttcggtggg

SEQ ID NO: 90014 - DNA, 60 bp, Artificial
  Synthetic oligonucleotide
gacagaagatggagaaggcaaagcagaactagcagaaaaattacactgttggttcggtgg

SEQ ID NO: 90015 - DNA, 60 bp, Artificial
  Synthetic oligonucleotide
ccctctgctgtggacatagggaatggatgcttcgaaaccaaacacaagtgcaaccagacc

SEQ ID NO: 90016 - DNA, 60 bp, Artificial
  Synthetic oligonucleotide
tgggtccctctgctgtggacatagggaatggatgcttcgaaaccaaacacaagtgcaacc

SEQ ID NO: 90017 - DNA, 52 bp, Artificial
  Synthetic oligonucleotide
acggagggctaccacaaagcggcagaattgttgttgattacatggtgcaaaa

SEQ ID NO: 90018 - DNA, 60 bp, Artificial
  Synthetic oligonucleotide
gtgacataataagagctgcattagggctaaagatcagacaaagacaaagatttggacgac

SEQ ID NO: 90019 - DNA, 53 bp, Artificial
  Synthetic oligonucleotide
aaggagctatgggaaaacactaaaggaagagatggtctgttagtggcagatgg

SEQ ID NO: 90020 - DNA, 57 bp, Artificial
  Synthetic oligonucleotide
tataaaggagctatgggaaaacactaaaggaagagatggtctattagtggcagatgg

SEQ ID NO: 90021 - DNA, 60 bp, Artificial
  Synthetic oligonucleotide
ctgttttcaaagatcaaaggcactaaaaagagttggacttgacccttcattaatcagtac

SEQ ID NO: 90022 - DNA, 60 bp, Artificial
  Synthetic oligonucleotide
ctgtttccaaagatcaaaggcactaaaaagagttggacttgacccttcattaatcagtac

SEQ ID NO: 90023 - DNA, 60 bp, Artificial
  Synthetic oligonucleotide
aatcaaaggaggtggaactttagtggctgaagccattcgatttataggaagagcaatggc

SEQ ID NO: 90024 - DNA, 60 bp, Artificial
  Synthetic oligonucleotide
ctatactgctctactactcaactgctgcttccagtttggctgtaacattgatgatagcta

SEQ ID NO: 90025 - DNA, 51 bp, Artificial
  Synthetic oligonucleotide
attaagagacaaagaatgacagttgagtccatggggtgggccttgagctaa

SEQ ID NO: 90026 - DNA, 51 bp, Artificial
  Synthetic oligonucleotide
attaagagacaacgaatgacagttgagtccatggggtgggccttgagctaa

SEQ ID NO: 90027 - DNA, 60 bp, Artificial
  Synthetic oligonucleotide
cacaagggattaagagacaaagaatgacagttgagtccatggggtgggccttgagctaat

SEQ ID NO: 90028 - DNA, 60 bp, Artificial
  Synthetic oligonucleotide
catttcacaaggaattaagagacaaagaatgacagttgagtccatggggtgggccttgag

SEQ ID NO: 90029 - DNA, 60 bp, Artificial
  Synthetic oligonucleotide
gacatttcacaaggaattaagagacagagaatgacagttgagtccatggggtgggccttg

SEQ ID NO: 90030 - DNA, 60 bp, Artificial
  Synthetic oligonucleotide
gacatttcacaaggaattaagagacaaagaatgacagttgagtccatggggtgggccttg

SEQ ID NO: 90031 - DNA, 60 bp, Artificial
  Synthetic oligonucleotide
tgctttatccaatgacatttcacaaggaattaagagacaaagaatgacagttgagtccat

SEQ ID NO: 90032 - DNA, 60 bp, Artificial
  Synthetic oligonucleotide
gctttatccaatgacatttcacaaggaattaagagacaaagaatgacagttgagtccatg

SEQ ID NO: 90033 - DNA, 54 bp, Artificial
  Synthetic oligonucleotide
ggaataaagagacaaagaatgacagttgagtccatggggtgggccttgagctaa

SEQ ID NO: 90034 - DNA, 55 bp, Artificial
  Synthetic oligonucleotide
ggaattaagagacaaagaatgacagttgagtccatggggtgggccttgagctaat

SEQ ID NO: 90035 - DNA, 60 bp, Artificial
  Synthetic oligonucleotide
tgaaaggttttcatggcaaagagcccttgactaccctggtcaagaccgcctaaacaggct

SEQ ID NO: 90036 - DNA, 60 bp, Artificial
  Synthetic oligonucleotide
gcatactgaagaatgcacatgcggatttgccagcaataaaaccatagaatgtgcctgtag

SEQ ID NO: 90037 - DNA, 60 bp, Artificial
  Synthetic oligonucleotide
caagcattaaaggacagaaagggcccttgggtgttcgacttagagggaatgtattctgga

SEQ ID NO: 90038 - DNA, 60 bp, Artificial
  Synthetic oligonucleotide
gcgattgcaaccgctggaatacaaatcagagggtttgtattagtagttgaaaacttggct

SEQ ID NO: 90039 - DNA, 60 bp, Artificial
  Synthetic oligonucleotide
tttcttaaaatgtcgctgtttggagacacaattgcctacctgctttcattgacagaagat

SEQ ID NO: 90040 - DNA, 60 bp, Artificial
  Synthetic oligonucleotide
ttcttaaaatgtcgctgtttggagacacaattgcctacctgctttcattgacagaagatg

SEQ ID NO: 90041 - DNA, 60 bp, Artificial
  Synthetic oligonucleotide
gctgggaaatagcatggaactgatgatattcagctacaatcaagactactcgttaagtaa

SEQ ID NO: 90042 - DNA, 60 bp, Artificial
  Synthetic oligonucleotide
aagctgggaaatagcatggaactgatgatattcagctacaatcaagactactcgttaagt

SEQ ID NO: 90043 - DNA, 53 bp, Artificial
  Synthetic oligonucleotide
tgagatgggaggacctaagaccaatagggcctcacatttacaaccatgagcta

SEQ ID NO: 90044 - DNA, 60 bp, Artificial
  Synthetic oligonucleotide
ctgggaaatagcatggaactgatgatattcagctacaatcaagactattcgttaagtaat

SEQ ID NO: 90045 - DNA, 53 bp, Artificial
  Synthetic oligonucleotide
tgaaatgggaggacctgagaccaatagggcctcacatttacaaccatgagcta

SEQ ID NO: 90046 - DNA, 56 bp, Artificial
  Synthetic oligonucleotide
gccctgacagtaatgcattgctcaaaataaaatatggagaagcatatactgacaca

SEQ ID NO: 90047 - DNA, 60 bp, Artificial
  Synthetic oligonucleotide
ggtagagaatggacatatatcggagttgatggccctgacagtaatgcattgctcaaaata

SEQ ID NO: 90048 - DNA, 60 bp, Artificial
  Synthetic oligonucleotide
tagttaagaggaaaagatatagtgctttatccaatgacatttcacaaggaattaagagac

SEQ ID NO: 90049 - DNA, 54 bp, Artificial
  Synthetic oligonucleotide
gaaagcaatggctcaccttggtgagattgggtacacataagctccgaagatgtc

SEQ ID NO: 90050 - DNA, 60 bp, Artificial
  Synthetic oligonucleotide
ccaatgcagatcgaatctgcactgggataacatcgtcaaactcacctcatgtggtcaaaa

SEQ ID NO: 90051 - DNA, 60 bp, Artificial
  Synthetic oligonucleotide
catccaaagcagatcgaatctgcactgggataacatcgtcaaactcacctcatgtggtca

SEQ ID NO: 90052 - DNA, 60 bp, Artificial
  Synthetic oligonucleotide
tccaatgcagatcgaatctgcactgggataacatcgtcaaactcacctcatgtggtcaaa

SEQ ID NO: 90053 - DNA, 60 bp, Artificial
  Synthetic oligonucleotide
aacatccaatgcagatcgaatctgcactgggataacatcgtcaaactcacctcatgtggt

SEQ ID NO: 90054 - DNA, 60 bp, Artificial
  Synthetic oligonucleotide
caatgcagatcgaatctgcactgggataacatcgtcaaactcacctcatgtggtcaaaac

SEQ ID NO: 90055 - DNA, 60 bp, Artificial
  Synthetic oligonucleotide
aatgcagatcgaatctgcactgggataacatcgtcaaactcacctcatgtggtcaaaaca

SEQ ID NO: 90056 - DNA, 60 bp, Artificial
  Synthetic oligonucleotide
ccaaagcagatcgaatctgcactgggataacatcgtcaaactcacctcatgtggtcaaaa

SEQ ID NO: 90057 - DNA, 60 bp, Artificial
  Synthetic oligonucleotide
caatgcagatcgaatctgcactgggataacatcgtcaaactcatctcatgtggtcaaaac

SEQ ID NO: 90058 - DNA, 60 bp, Artificial
  Synthetic oligonucleotide
cttagaaggaggatgggaaggaatgattgcaggttggcacggatacacatcccatggggc

SEQ ID NO: 90059 - DNA, 60 bp, Artificial
  Synthetic oligonucleotide
aatcataaaggagttatgggaaaacactaaaggaagagatggtctattagtagcagatgg

SEQ ID NO: 90060 - DNA, 60 bp, Artificial
  Synthetic oligonucleotide
aatcataagggagttatgggaaaacactaaaggaagagatggtctattagtagcagatgg

SEQ ID NO: 90061 - DNA, 60 bp, Artificial
  Synthetic oligonucleotide
aatcataaaggagttatgggaaaacactaaaggaagagatggtctattggtagcagatgg

SEQ ID NO: 90062 - DNA, 60 bp, Artificial
  Synthetic oligonucleotide
tgcttgtggaccaaatgaatgcaaacactttgctctaacccattatgcagctcaaccagg

SEQ ID NO: 90063 - DNA, 60 bp, Artificial
  Synthetic oligonucleotide
cttgtggaccaaatgaatgcaaacactttgctctaacccattatgcagctcaaccagggg

SEQ ID NO: 90064 - DNA, 51 bp, Artificial
  Synthetic oligonucleotide
tgcaaacactttgctctaacccattatgcagctcaaccagggggatactac

SEQ ID NO: 90065 - DNA, 60 bp, Artificial
  Synthetic oligonucleotide
ccaatgcagatcgaatctgcactgggataacatcgtcaaactcaccccatgtggtcaaaa

SEQ ID NO: 90066 - DNA, 60 bp, Artificial
  Synthetic oligonucleotide
caatgcagatcgaatctgcactgggataacatcgtcaaactcaccccatgtggtcaaaac

SEQ ID NO: 90067 - DNA, 60 bp, Artificial
  Synthetic oligonucleotide
aatgcagatcgaatctgcactgggataacatcgtcaaactcaccccatgtggtcaaaact

SEQ ID NO: 90068 - DNA, 60 bp, Artificial
  Synthetic oligonucleotide
cataacaaaagtgagcctgaaagtaaaaggatgtctcttgaagagagaaaagcaattggg

SEQ ID NO: 90069 - DNA, 60 bp, Artificial
  Synthetic oligonucleotide
gcgccccaacaaaaggctctagttgatcaagtaatcggaagcagaaatccagggattgca

SEQ ID NO: 90070 - DNA, 60 bp, Artificial
  Synthetic oligonucleotide
ctgattctagctgagagaaaaatgagaagatgtgtgagctttcatgaagcatttgaaata

SEQ ID NO: 90071 - DNA, 60 bp, Artificial
  Synthetic oligonucleotide
tactattgattcaagcattaaaggacagaaagggcccttgggtgttcgacttagagggaa

SEQ ID NO: 90072 - DNA, 60 bp, Artificial
  Synthetic oligonucleotide
tactgttgattcaagcattaaaggacagaaagggcccttgggtgttcgacttagagggaa

SEQ ID NO: 90073 - DNA, 60 bp, Artificial
  Synthetic oligonucleotide
tactgttgattcaagcattaaaggacagaaagggcccttgggtgttcgacttagaaggaa

SEQ ID NO: 90074 - DNA, 60 bp, Artificial
  Synthetic oligonucleotide
tactattgattcaagcattaaaggacagaaagggcccttgggtattcgatttagagggaa

SEQ ID NO: 90075 - DNA, 60 bp, Artificial
  Synthetic oligonucleotide
tactattgattcaagcattaaaggacagaaagggcccttgggtgttcgatttagagggaa

SEQ ID NO: 90076 - DNA, 60 bp, Artificial
  Synthetic oligonucleotide
actgttgattcaagcattaaaggacagaaagggcccttgggtgttcgacttagaaggaat

SEQ ID NO: 90077 - DNA, 60 bp, Artificial
  Synthetic oligonucleotide
caagcattaaaggacagaaagggcccttgggtattcgatttagagggaatgtattctgga

SEQ ID NO: 90078 - DNA, 60 bp, Artificial
  Synthetic oligonucleotide
caagcattaaaggacagaaagggcccttgggtgttcgatttagagggaatgtattctgga

SEQ ID NO: 90079 - DNA, 60 bp, Artificial
  Synthetic oligonucleotide
caagcattaaaggacagaaagggcccttgggtgttcgacttagaaggaatgtattctgga

SEQ ID NO: 90080 - DNA, 54 bp, Artificial
  Synthetic oligonucleotide
aatgccaccataaactttgaagcaggaattctggagtgctatgaaaggctttca

SEQ ID NO: 90081 - DNA, 60 bp, Artificial
  Synthetic oligonucleotide
aaactaggaacgctctgtgctttgtgcgagaaacaagcatcacattcacacagggctcac

SEQ ID NO: 90082 - DNA, 60 bp, Artificial
  Synthetic oligonucleotide
ggaacgctctgtgctttgtgcgagaaacaagcatcacattcacacagggctcacagcaga

SEQ ID NO: 90083 - DNA, 60 bp, Artificial
  Synthetic oligonucleotide
acgctctgtgctttgtgcgagaaacaagcatcacattcacacagggctcatagcagagca

SEQ ID NO: 90084 - DNA, 60 bp, Artificial
  Synthetic oligonucleotide
ctgtgctttgtgcgagaaacaagcatcacattcacacagggctcatagcagagcagcgag

SEQ ID NO: 90085 - DNA, 60 bp, Artificial
  Synthetic oligonucleotide
aaactaggaacgctctgtgctttgtgcgagaaacaagcatcacattcacacagggctcat

SEQ ID NO: 90086 - DNA, 60 bp, Artificial
  Synthetic oligonucleotide
ttgtcgcctgggatgatgatgggaatgtttaatatgctatctaccgtgttgggagtagcc

SEQ ID NO: 90087 - DNA, 60 bp, Artificial
  Synthetic oligonucleotide
aaggaacggcatctttgtcacctggaatgatgatgggaatgtttaatatgctatctaccg

SEQ ID NO: 90088 - DNA, 57 bp, Artificial
  Synthetic oligonucleotide
aaaatgagaagatgtgtgagctttcatgaagcatttgaaatagcagaaggccatgaa

SEQ ID NO: 90089 - DNA, 60 bp, Artificial
  Synthetic oligonucleotide
tgtgagctttcatgaagcatttgaaatagcagaaggccatgaaagctcagcattgctata

SEQ ID NO: 90090 - DNA, 60 bp, Artificial
  Synthetic oligonucleotide
tgttagctttcatgaagcatttgaaatagcagaaggccatgaaagctcagcgctactgta

SEQ ID NO: 90091 - DNA, 60 bp, Artificial
  Synthetic oligonucleotide
tgtgagcttccatgaagcatttgaaatagcagaaggccatgaaagctcagcgctactata

SEQ ID NO: 90092 - DNA, 60 bp, Artificial
  Synthetic oligonucleotide
tgtgagctttcatgaagcatttgaaatagcagaaggccatgaaagctcagcgctactgta

SEQ ID NO: 90093 - DNA, 58 bp, Artificial
  Synthetic oligonucleotide
ccttttacaagatggtaagagatgataaaaccatctacttcagccctataagaattac

SEQ ID NO: 90094 - DNA, 59 bp, Artificial
  Synthetic oligonucleotide
ctatgaaaggctttcatggcaaagagcccttgactaccctggtcaagaccgcctaaaca

SEQ ID NO: 90095 - DNA, 59 bp, Artificial
  Synthetic oligonucleotide
tgaaaggctttcatggcaaagagcccttgactaccctggtcaagaccgcctaaacagac

SEQ ID NO: 90096 - DNA, 60 bp, Artificial
  Synthetic oligonucleotide
tgaaaggctttcatggcaaagagcccttgactaccctggtcaagaccgcctaaacaggct

SEQ ID NO: 90097 - DNA, 56 bp, Artificial
  Synthetic oligonucleotide
tgaaaggctttcatggcaaagagcccttgactaccctggtcaagaccgcctaaaca

SEQ ID NO: 90098 - DNA, 60 bp, Artificial
  Synthetic oligonucleotide
tatgaaaggctttcatggcaaagagcccttgactaccctggtcaagaccgcctaaacaga

SEQ ID NO: 90099 - DNA, 60 bp, Artificial
  Synthetic oligonucleotide
tctcttggagcaagtcaaaagaatggggaaggaattgcaaaggatgtaatggaagtacta

SEQ ID NO: 90100 - DNA, 60 bp, Artificial
  Synthetic oligonucleotide
tctcttggagcaagtcaaaagagtggggaaggaattgcaaaggatgtaatggaagtgcta

SEQ ID NO: 90101 - DNA, 60 bp, Artificial
  Synthetic oligonucleotide
tctctcggagcaagtcaaaagaatggggaaggaattgcaaaggatgtaatggaagtgcta

SEQ ID NO: 90102 - DNA, 60 bp, Artificial
  Synthetic oligonucleotide
ccgaagataatgagccgagtgcctatgcgcaattagattgcgttctggaggctttggata

SEQ ID NO: 90103 - DNA, 60 bp, Artificial
  Synthetic oligonucleotide
gcccagtgtttgcagtagaaagacctattgctctaagcaagcaagctgtaagaaggatgc

SEQ ID NO: 90104 - DNA, 60 bp, Artificial
  Synthetic oligonucleotide
gatttaataatcttatgcatggtattttctcaagacactaggatgttccaaggagtgaga

SEQ ID NO: 90105 - DNA, 60 bp, Artificial
  Synthetic oligonucleotide
atttaataatcttgtgcatggtattttctcaagacactaggatgttccaaggagtgaggg

SEQ ID NO: 90106 - DNA, 60 bp, Artificial
  Synthetic oligonucleotide
taataatcttgtgcatggtattttctcaagacactaggatgttccaaggagtgaggggag

SEQ ID NO: 90107 - DNA, 60 bp, Artificial
  Synthetic oligonucleotide
atgagagatttaataatcttatgcatggtattttctcaagacactaggatgttccaagga

SEQ ID NO: 90108 - DNA, 60 bp, Artificial
  Synthetic oligonucleotide
atgaaagatttaataatcttgtgcatggtattttctcaagacactaggatgttccaagga

SEQ ID NO: 90109 - DNA, 60 bp, Artificial
  Synthetic oligonucleotide
gatttaataatcttgtgcatggtattttctcaagacactaggatgttccaaggagtgaga

SEQ ID NO: 90110 - DNA, 60 bp, Artificial
  Synthetic oligonucleotide
gatttaataatcttgtgcatggtattttctcaagacactaggatgttccaaggagtgagg

SEQ ID NO: 90111 - DNA, 50 bp, Artificial
  Synthetic oligonucleotide
atgcatggtattttctcaagacactaggatgttccaaggagtgagaggag

SEQ ID NO: 90112 - DNA, 60 bp, Artificial
  Synthetic oligonucleotide
taataatcttatgcatggtattttctcaagacactaggatgttccaaggagtgagaggag

SEQ ID NO: 90113 - DNA, 60 bp, Artificial
  Synthetic oligonucleotide
taataatcttgtgcatggtattttctcaagacactaggatgttccaaggagtgaggggtg

SEQ ID NO: 90114 - DNA, 60 bp, Artificial
  Synthetic oligonucleotide
taatcttatgcatggtattttctcaagacactaggatgttccaaggagtgagaggagaga

SEQ ID NO: 90115 - DNA, 60 bp, Artificial
  Synthetic oligonucleotide
gaagattggaatatgggacggagaagaggagttccatgtaagatgtggtgaatgcagggg

SEQ ID NO: 90116 - DNA, 50 bp, Artificial
  Synthetic oligonucleotide
atgcatggtattttctcaagacactaggatgttccaaggggtgagaggag

SEQ ID NO: 90117 - DNA, 60 bp, Artificial
  Synthetic oligonucleotide
ataatgattgggcattcacagatgaatgatgtctgtttccaaagatcaaaggcactaaaa

SEQ ID NO: 90118 - DNA, 60 bp, Artificial
  Synthetic oligonucleotide
tcacataatgattgggcattcacagatgaatgatgtctgtttccaaagatcaaaggcact

SEQ ID NO: 90119 - DNA, 60 bp, Artificial
  Synthetic oligonucleotide
cacataatgattgggcattcacagatgaatgatgtctgtttccaaagatcaaaggcacta

SEQ ID NO: 90120 - DNA, 60 bp, Artificial
  Synthetic oligonucleotide
gggatgatgatgggaatgtttaatatgctatctaccgtgttgggagtagccgcactaggg

SEQ ID NO: 90121 - DNA, 60 bp, Artificial
  Synthetic oligonucleotide
aacgttaaccctatttctcacatcagggggagtgttattatcactatatgtgtcagcttc

SEQ ID NO: 90122 - DNA, 60 bp, Artificial
  Synthetic oligonucleotide
tttgagaaagcaatggctcaccttggtgagattgggtacatataagcttcgaagatgtct

SEQ ID NO: 90123 - DNA, 60 bp, Artificial
  Synthetic oligonucleotide
ggcctgattctagctgagagaaaaatgagaagatgtgtgagcttccatgaagcattcgaa

SEQ ID NO: 90124 - DNA, 60 bp, Artificial
  Synthetic oligonucleotide
gaagggggatgggaaggaatgattgcaggttggcacggatacacatctcacggagcacat

SEQ ID NO: 90125 - DNA, 60 bp, Artificial
  Synthetic oligonucleotide
aggaggatgggaaggaatgattgcaggttggcacggatacacatctcacggagcacatgg

SEQ ID NO: 90126 - DNA, 60 bp, Artificial
  Synthetic oligonucleotide
aggatgggaaggaatgattgcaggttggcacggatacacatctcacggagcacatggagt

SEQ ID NO: 90127 - DNA, 60 bp, Artificial
  Synthetic oligonucleotide
tcttaaaatgtcgctgtttggagacacaattgcctacctgctttcattgacagaagatgg

SEQ ID NO: 90128 - DNA, 60 bp, Artificial
  Synthetic oligonucleotide
aaaatgtcgctgtttggagacacaattgcctacctgctttcattaacagaagatggagaa

SEQ ID NO: 90129 - DNA, 60 bp, Artificial
  Synthetic oligonucleotide
taagatgtcgctgtttggagacacaattgcctacctgctttcattgacagaagatggaga

SEQ ID NO: 90130 - DNA, 60 bp, Artificial
  Synthetic oligonucleotide
gatgtcgctgtttggagacacaattgcctacctgctttcattgacagaagatggagaagg

SEQ ID NO: 90131 - DNA, 60 bp, Artificial
  Synthetic oligonucleotide
aagatgtcgctgtttggagacacaattgcctacctgctttcattaacagaagatggagaa

SEQ ID NO: 90132 - DNA, 60 bp, Artificial
  Synthetic oligonucleotide
agatgtcgctgtttggagacacaattgcctacctgctttcattgacagaagatggagaag

SEQ ID NO: 90133 - DNA, 60 bp, Artificial
  Synthetic oligonucleotide
ttcttagatgtcgctgtttggagacacaattgcctacctgctttcattgacagaagatgg

SEQ ID NO: 90134 - DNA, 60 bp, Artificial
  Synthetic oligonucleotide
taaaatgtcgctgtttggagacacaattgcctacctgctttcactaacagaagatggaga

SEQ ID NO: 90135 - DNA, 60 bp, Artificial
  Synthetic oligonucleotide
ttctaaaatgtcgctgtttggagacacaattgcctacctgctttcattgacagaagatgg

SEQ ID NO: 90136 - DNA, 60 bp, Artificial
  Synthetic oligonucleotide
aatgtcgttgtttggagacacaattgcctacctgctttcattgacagaagatggagaagg

SEQ ID NO: 90137 - DNA, 60 bp, Artificial
  Synthetic oligonucleotide
ttcttaatgtcgctgtttggagacacaattgcctacctgctttcattgacagaagatgga

SEQ ID NO: 90138 - DNA, 60 bp, Artificial
  Synthetic oligonucleotide
ttcaaaatgtcgctgtttggagacacaattgcctacctgctttcattgacagaagatgga

SEQ ID NO: 90139 - DNA, 60 bp, Artificial
  Synthetic oligonucleotide
gagaaagcaatggctcaccttggtgagattgggtacacataagctccgaagatgtctatg

SEQ ID NO: 90140 - DNA, 60 bp, Artificial
  Synthetic oligonucleotide
aaagcaatggctcaccttggtgagattgggtacacataagctccgaagatgtccatgggg

SEQ ID NO: 90141 - DNA, 60 bp, Artificial
  Synthetic oligonucleotide
ggaaactcagctcccttgataataagggaaccttttattgcttgtggaccaacggaatgc

SEQ ID NO: 90142 - DNA, 60 bp, Artificial
  Synthetic oligonucleotide
tggctgcttgggttcaaacagagatgaatctattgagcactctgacaagtaaaagagctc

SEQ ID NO: 90143 - DNA, 60 bp, Artificial
  Synthetic oligonucleotide
tggcagcttgggttcaaacagagatgaatctattgagcactctgacaagtaaaagagctc

SEQ ID NO: 90144 - DNA, 60 bp, Artificial
  Synthetic oligonucleotide
ggttcaaacagagatgaatctattgagcactctgacaagtaaaagagctctggacctacc

SEQ ID NO: 90145 - DNA, 60 bp, Artificial
  Synthetic oligonucleotide
gcttgggttcaaacagagatgaatctattgagcactctgacaagtaaaagagctctggac

SEQ ID NO: 90146 - DNA, 60 bp, Artificial
  Synthetic oligonucleotide
gtggctgcttgggttcaaacagagatgaatctattgagcactctgacaagtaaaagagct

SEQ ID NO: 90147 - DNA, 60 bp, Artificial
  Synthetic oligonucleotide
agccacacctaaaaagttgaaatgggaggacctaagaccaatagggcctcacatttacaa

SEQ ID NO: 90148 - DNA, 60 bp, Artificial
  Synthetic oligonucleotide
acacctaaaaagttgaaatgggaggacctaagaccaatagggcctcacatttacaaccat

SEQ ID NO: 90149 - DNA, 60 bp, Artificial
  Synthetic oligonucleotide
cttcaagcttggacaaacaatatctagactaagggatatatctgttccagctggtttctc

SEQ ID NO: 90150 - DNA, 60 bp, Artificial
  Synthetic oligonucleotide
gaaatggggaatggaagctagaagatgtctgcttcaatcaatgcaacaaatggaagcaat

SEQ ID NO: 90151 - DNA, 60 bp, Artificial
  Synthetic oligonucleotide
tgaaatggggaatggaagctagaagatgtctgcttcaatcaatgcaacaaatggaagcaa

SEQ ID NO: 90152 - DNA, 60 bp, Artificial
  Synthetic oligonucleotide
ggggaatggaagctagaagatgcctgcttcaatcaatgcaacaaatggaagcaattgttg

SEQ ID NO: 90153 - DNA, 60 bp, Artificial
  Synthetic oligonucleotide
ggggaatggaggctagaagatgtctgcttcaatcaatgcaacaaatggaagcaattgttg

SEQ ID NO: 90154 - DNA, 56 bp, Artificial
  Synthetic oligonucleotide
ggggcagctctgatgtccataaagctccagttttgggctccaatgaccagatctgg

SEQ ID NO: 90155 - DNA, 58 bp, Artificial
  Synthetic oligonucleotide
ggggcagctctgatgtcaatcaagctccagttttgggctccaatgaccagatctgggg

SEQ ID NO: 90156 - DNA, 56 bp, Artificial
  Synthetic oligonucleotide
ggggcagctctgatgtccatcaagctccagttttgggctccaatgaccagatctgg

SEQ ID NO: 90157 - DNA, 60 bp, Artificial
  Synthetic oligonucleotide
aatgggagcagctctgatgtccatcaagctccagttttgggctccaatgaccagatctgg

SEQ ID NO: 90158 - DNA, 56 bp, Artificial
  Synthetic oligonucleotide
ggggcagctttgatgtccatcaagctccagttttgggctccaatgaccagatctgg

SEQ ID NO: 90159 - DNA, 56 bp, Artificial
  Synthetic oligonucleotide
ggggcggctctgatgtccatcaagctccagttttgggctccaatgaccagatctgg

SEQ ID NO: 90160 - DNA, 55 bp, Artificial
  Synthetic oligonucleotide
ggggcagctctgatgtccatcaagctccagttttgggctccaatgaccagatctg

SEQ ID NO: 90161 - DNA, 60 bp, Artificial
  Synthetic oligonucleotide
ggggcagctctgatgtccatcaagctccagttttgggctccaatgaccagatctggaggg

SEQ ID NO: 90162 - DNA, 60 bp, Artificial
  Synthetic oligonucleotide
tatccacaaaatgaaggcaataattgtactactcatggtagtaacatccaatgcagatcg

SEQ ID NO: 90163 - DNA, 60 bp, Artificial
  Synthetic oligonucleotide
tgccagggttcaacctttcagaaagcactcctaattagccctcatagattcggagaagcc

SEQ ID NO: 90164 - DNA, 60 bp, Artificial
  Synthetic oligonucleotide
gaaagatttaataatcttgtgcatggtattttctcaagacactaggatgttccaaggagt

SEQ ID NO: 90165 - DNA, 54 bp, Artificial
  Synthetic oligonucleotide
gatttaataatcttgtgcatggtattttctcaagacactaggatgttccaagga

SEQ ID NO: 90166 - DNA, 52 bp, Artificial
  Synthetic oligonucleotide
caccaggagggatcagcatgacagtaacaggagacaatactaaatggaatga

SEQ ID NO: 90167 - DNA, 60 bp, Artificial
  Synthetic oligonucleotide
acgttaaccctatttctcacatcagggggagtgttattatcactatatgtgtcagcttca

SEQ ID NO: 90168 - DNA, 60 bp, Artificial
  Synthetic oligonucleotide
cgttaaccctatttctcacatcagggggagtgttattatcactatatgtgtcagccttac

SEQ ID NO: 90169 - DNA, 60 bp, Artificial
  Synthetic oligonucleotide
cgttaaccctatttctcacatcagggggagtgttattatcactatatgtgtcagcttcat

SEQ ID NO: 90170 - DNA, 60 bp, Artificial
  Synthetic oligonucleotide
cgttaaccctatttctcacatcagggggagtgttattatcactatatgtgtcagcttcac

SEQ ID NO: 90171 - DNA, 60 bp, Artificial
  Synthetic oligonucleotide
ttttgagaaagcaatggctcaccttggtgagattgggtacacataagctccgaagatgtc

SEQ ID NO: 90172 - DNA, 60 bp, Artificial
  Synthetic oligonucleotide
tttgagaaagcaatggctcaccttggtgagattgggtacacataagctccgaagatgtct

SEQ ID NO: 90173 - DNA, 60 bp, Artificial
  Synthetic oligonucleotide
gattcaggaaagtggccaaaatatactgtgtttaggattggctccctatttgtgagtggg

SEQ ID NO: 90174 - DNA, 60 bp, Artificial
  Synthetic oligonucleotide
ccttgggtaatacagagtgcatactggttcaatgaatggttgggctttgaaaaggagggg

SEQ ID NO: 90175 - DNA, 60 bp, Artificial
  Synthetic oligonucleotide
ccttgggtgatacagagtgcatactggttcaatgaatggttgggctttgaaaaggagggg

SEQ ID NO: 90176 - DNA, 60 bp, Artificial
  Synthetic oligonucleotide
cccttgggtaatacagagtgcatactggttcaatgaatggttgggctttgaaaaggaggg

SEQ ID NO: 90177 - DNA, 60 bp, Artificial
  Synthetic oligonucleotide
cccctgggtaatacagagtgcatactggttcaatgaatggttgggctttgaaaaggaggg

SEQ ID NO: 90178 - DNA, 60 bp, Artificial
  Synthetic oligonucleotide
aggatatgacatgaccaaagcttgtttcaagggagacagagtaaatagccccaaaacttt

SEQ ID NO: 90179 - DNA, 60 bp, Artificial
  Synthetic oligonucleotide
ggtaatacagagtgcatactggttcaatgaatggttgggctttgaaaaggaggggagtaa

SEQ ID NO: 90180 - DNA, 60 bp, Artificial
  Synthetic oligonucleotide
gactcaggaaagtggccaaaatatactgtgtttaggattggctccctatttgtgagtggg

SEQ ID NO: 90181 - DNA, 60 bp, Artificial
  Synthetic oligonucleotide
caggaaagtggccaaaatatactgtgtttaggattggctccctatttgtgagtgggaggg

SEQ ID NO: 90182 - DNA, 59 bp, Artificial
  Synthetic oligonucleotide
ggtaatacagagtgcatactggttcaatgaatggttgggctttgaaaaggaggggagta

SEQ ID NO: 90183 - DNA, 60 bp, Artificial
  Synthetic oligonucleotide
ccctgggtaatacagagtgcatactggttcaatgaatggttgggctttgaaaaggagggg

SEQ ID NO: 90184 - DNA, 60 bp, Artificial
  Synthetic oligonucleotide
cccttgggtgatacagagtgcatactggttcaatgaatggttgggctttgaaaaggaggg

SEQ ID NO: 90185 - DNA, 60 bp, Artificial
  Synthetic oligonucleotide
ttcaagcctagatcagcattaaaatgcaagggtttccatgttccagcaaaggaacaagtg

SEQ ID NO: 90186 - DNA, 60 bp, Artificial
  Synthetic oligonucleotide
gttcaagcctagatcagcattaaaatgcaagggtttccatgttccagcaaaggaacaggt

SEQ ID NO: 90187 - DNA, 60 bp, Artificial
  Synthetic oligonucleotide
ttcaagcctagatcagcattaaaatgcaagggtttccatgttccagcaaaagaacaggta

SEQ ID NO: 90188 - DNA, 60 bp, Artificial
  Synthetic oligonucleotide
gagtactctatggttgggtatgaagccatggctctttacaatatggcaacacctgtttcc

SEQ ID NO: 90189 - DNA, 60 bp, Artificial
  Synthetic oligonucleotide
gcttcccataagcatttacgccaaaatacctcaactagggttcaatgttgaagagtactc

SEQ ID NO: 90190 - DNA, 60 bp, Artificial
  Synthetic oligonucleotide
tggtgttgcaatcaaaggaggtggaactttagtggctgaagccattcgatttataggaag

SEQ ID NO: 90191 - DNA, 60 bp, Artificial
  Synthetic oligonucleotide
ttcaaacctagatcagcattaaaatgcaagggtttccatgttccagcaaaggaacaggta

SEQ ID NO: 90192 - DNA, 60 bp, Artificial
  Synthetic oligonucleotide
ttcaagcctagatcagcattaaaatgcaagggtttccatgttccagcaaaggaacaagta

SEQ ID NO: 90193 - DNA, 60 bp, Artificial
  Synthetic oligonucleotide
ggaacaagtggaaggaatgggggcagctctgatgtccatcaagctccagttttgggctcc

SEQ ID NO: 90194 - DNA, 60 bp, Artificial
  Synthetic oligonucleotide
ttcaagcctagatcagcattaaaatgcaagggtttccatgttccagcaaaggaacaggtg

SEQ ID NO: 90195 - DNA, 60 bp, Artificial
  Synthetic oligonucleotide
tcagcattaaaatgcaagggtttccatgttccagcaaaggaacaggtggaaggaatgggg

SEQ ID NO: 90196 - DNA, 60 bp, Artificial
  Synthetic oligonucleotide
ttcaagcctagatcagcattaaaatgcaagggtttccatattccagcaaaggaacaggtg

SEQ ID NO: 90197 - DNA, 60 bp, Artificial
  Synthetic oligonucleotide
ttcaagcctagatcagcattaaaatgcaagggtttccatgttccagcaaaggaacaggta

SEQ ID NO: 90198 - DNA, 60 bp, Artificial
  Synthetic oligonucleotide
ggaacaggtagaaggaatgggggcagctctgatgtccatcaagctccagttttgggctcc

SEQ ID NO: 90199 - DNA, 60 bp, Artificial
  Synthetic oligonucleotide
taaaatgcaagggtttccatgttccagcaaaggaacaggtggaaggaatgggggcagctc

SEQ ID NO: 90200 - DNA, 60 bp, Artificial
  Synthetic oligonucleotide
aggaacaggtggaaggaatgggggcagctctgatgtccatcaagctccagttttgggctc

SEQ ID NO: 90201 - DNA, 60 bp, Artificial
  Synthetic oligonucleotide
cacataatggttgggcattcacagatgaatgatgtctgtttccaaagatcaaaggcacta

SEQ ID NO: 90202 - DNA, 60 bp, Artificial
  Synthetic oligonucleotide
gttatcttatgataactgatggctcagcttcaggtgttagtgaatgcaggtttcttaaga

SEQ ID NO: 90203 - DNA, 60 bp, Artificial
  Synthetic oligonucleotide
gttatcttatgataactgatggctcagcttcaggtgttagtgaatgcagatttcttaaga

SEQ ID NO: 90204 - DNA, 60 bp, Artificial
  Synthetic oligonucleotide
ccaaaggaaactcagctcccttgataataagggaacctttcattgcttgtggaccaaagg

SEQ ID NO: 90205 - DNA, 60 bp, Artificial
  Synthetic oligonucleotide
atatccacaaaatgaaggcaataattgtactactcatggtagcaacatccaatgcagatc

SEQ ID NO: 90206 - DNA, 60 bp, Artificial
  Synthetic oligonucleotide
atatccacaaaatgaaggcaataattgtactactcatggtagtaacatccaaagcagatc

SEQ ID NO: 90207 - DNA, 60 bp, Artificial
  Synthetic oligonucleotide
atatccacaaaatgaaggcaataattgtactactcatggtagtaacatccaacgcagatc

SEQ ID NO: 90208 - DNA, 58 bp, Artificial
  Synthetic oligonucleotide
ggggagtgttattatcactatatgtgtcagcttcattgtcatacttactatattcgga

SEQ ID NO: 90209 - DNA, 60 bp, Artificial
  Synthetic oligonucleotide
cagaagatggagaaggcaaagcagaactagcagaaaaattacactgttggttcggtggga

SEQ ID NO: 90210 - DNA, 60 bp, Artificial
  Synthetic oligonucleotide
ctcatggtcatgtacctgaatcctggaaattattcaatgcaagtaaaactaggaacactc

SEQ ID NO: 90211 - DNA, 60 bp, Artificial
  Synthetic oligonucleotide
actgctgcttctagtttggctgtaacattgatgatagctatctttattgtttatatgatc

SEQ ID NO: 90212 - DNA, 60 bp, Artificial
  Synthetic oligonucleotide
cagtttcttctaggaaaagaggacatgttccaatgggatgcatttgaagcatttgagagc

SEQ ID NO: 90213 - DNA, 60 bp, Artificial
  Synthetic oligonucleotide
agtttcttctaggaaaagaggacatgttccaatgggatgcatttgaagcatttgaaagca

SEQ ID NO: 90214 - DNA, 60 bp, Artificial
  Synthetic oligonucleotide
ctaggaaaagaggacatgttccaatgggatgcatttgaagcatttgaaagcataatcccc

SEQ ID NO: 90215 - DNA, 60 bp, Artificial
  Synthetic oligonucleotide
tttcttctaggaaaagaggacatgttccaatgggatgcatttgaagcatttgagagcata

SEQ ID NO: 90216 - DNA, 60 bp, Artificial
  Synthetic oligonucleotide
aaaaggaaaagatatagtgctttatccaatgacatttcacaaggaattaagagacaaaga

SEQ ID NO: 90217 - DNA, 61 bp, Artificial
  Synthetic oligonucleotide
ggaaaaggtatagtgctttatccaatgacatttcacaaggaattaagagacaaagaatgac

SEQ ID NO: 90218 - DNA, 60 bp, Artificial
  Synthetic oligonucleotide
cacaaggaattaagagacaaagaatgacagttgagtccatggggtgggccttgagctaat

SEQ ID NO: 90219 - DNA, 60 bp, Artificial
  Synthetic oligonucleotide
tttcacaaggaattaagagacaaagaatgacagttgagtccatggggtgggccttgagct

SEQ ID NO: 90220 - DNA, 61 bp, Artificial
  Synthetic oligonucleotide
ggaagagatatagtgctttatccaatgacatttcacaaggaattaagagacaaagaatgac

SEQ ID NO: 90221 - DNA, 60 bp, Artificial
  Synthetic oligonucleotide
acaaggaattaagagacaaagaatgacagttgagtccatggggtgggccttgagctaata

SEQ ID NO: 90222 - DNA, 59 bp, Artificial
  Synthetic oligonucleotide
acaaggaattaagagacaaagaatgacagttgagtccatggggtgggccttgagctaat

SEQ ID NO: 90223 - DNA, 60 bp, Artificial
  Synthetic oligonucleotide
cgctgtttggagacacaattgcctacctgctttcattgacagaagatggagaaggcaaag

SEQ ID NO: 90224 - DNA, 53 bp, Artificial
  Synthetic oligonucleotide
gctttcatggcaaagagcccttgactaccctggtcaagaccgcctaaacagac

SEQ ID NO: 90225 - DNA, 60 bp, Artificial
  Synthetic oligonucleotide
atgataacatattgttccacaaaacagtaatagctaacagctccataatagctgacatgg

SEQ ID NO: 90226 - DNA, 60 bp, Artificial
  Synthetic oligonucleotide
ctatgaaaggctttcatggcaaagagcccttgactaccctggtcaagaccgcctaaacag

SEQ ID NO: 90227 - DNA, 60 bp, Artificial
  Synthetic oligonucleotide
aggctttcatggcaaagagcccttgactaccctggtcaagaccgcctaaacagactaaag

SEQ ID NO: 90228 - DNA, 60 bp, Artificial
  Synthetic oligonucleotide
tggagtgctatgaaaggctttcatggcaaagagcccttgactaccctggtcaagaccgcc

SEQ ID NO: 90229 - DNA, 60 bp, Artificial
  Synthetic oligonucleotide
agtggccaaaatatactgtgtttaggattggctccctatttgtgagtgggagggaaaagt

SEQ ID NO: 90230 - DNA, 60 bp, Artificial
  Synthetic oligonucleotide
agtggccaaaatatactgtgtttaggattggctccctatttgtgagtgggagggaaaaat

SEQ ID NO: 90231 - DNA, 58 bp, Artificial
  Synthetic oligonucleotide
agtggccaaaatatactgtgtttaggattggctccctatttgtgagtgggagggaaaa

SEQ ID NO: 90232 - DNA, 60 bp, Artificial
  Synthetic oligonucleotide
agtggccaaaatatactgtgtttaggattggctccctatttgtgagtgggagggaaaaac

SEQ ID NO: 90233 - DNA, 60 bp, Artificial
  Synthetic oligonucleotide
ggaattaagagacaaagaatgacagttgagtccatggggtgggccttgagctaatataaa

SEQ ID NO: 90234 - DNA, 60 bp, Artificial
  Synthetic oligonucleotide
gggattaagagacaaagaatgacagttgagtccatggggtgggccttgagctaatataaa

SEQ ID NO: 90235 - DNA, 54 bp, Artificial
  Synthetic oligonucleotide
gagacaaagaatgacagttgagtccatggggtgggccttgagctaatataaatt

SEQ ID NO: 90236 - DNA, 60 bp, Artificial
  Synthetic oligonucleotide
ggggggatcagcatgacagtaacaggagacaatactaaatggaatgaatgcttaaatcca

SEQ ID NO: 90237 - DNA, 60 bp, Artificial
  Synthetic oligonucleotide
ggggatcagcatgacagtaacaggagacaatactaaatggaatgaatgcttaaatccaag

SEQ ID NO: 90238 - DNA, 60 bp, Artificial
  Synthetic oligonucleotide
caagcattaaaggacagaaaaggcccttgggtgttcgacttagagggaatgtattctgga

SEQ ID NO: 90239 - DNA, 60 bp, Artificial
  Synthetic oligonucleotide
acaaagggcggttacttcatcctcaaaatccctttgtaggacatttgtctattgagggca

SEQ ID NO: 90240 - DNA, 60 bp, Artificial
  Synthetic oligonucleotide
gacctgttacatccgggtgctttcctataatgcacgacagaacaaaaatcaggcaactag

SEQ ID NO: 90241 - DNA, 60 bp, Artificial
  Synthetic oligonucleotide
ccggatgctttcctataatgcacgacagaacaaaaatcagacagctacccaatcttctca

SEQ ID NO: 90242 - DNA, 60 bp, Artificial
  Synthetic oligonucleotide
ggggcaaattaaaaagaagagcgattgcaaccgctggaatacaaatcagagggtttgtat

SEQ ID NO: 90243 - DNA, 55 bp, Artificial
  Synthetic oligonucleotide
aaaagaagagcgattgcaaccgctggaatacaaatcagagggtttgtattagtag

SEQ ID NO: 90244 - DNA, 60 bp, Artificial
  Synthetic oligonucleotide
gcgccccagcaaaaggctctagttgatcaagtgatcggaagtagaaacccagggattgca

SEQ ID NO: 90245 - DNA, 60 bp, Artificial
  Synthetic oligonucleotide
cgccccagcaaaaggctctagttgatcaagtgatcggaagtagaaacccagggattgcag

SEQ ID NO: 90246 - DNA, 60 bp, Artificial
  Synthetic oligonucleotide
cattgcttgtggaccaaaggaatgcaaacactttgctctaacccattatgcagcccaacc

SEQ ID NO: 90247 - DNA, 60 bp, Artificial
  Synthetic oligonucleotide
tgcttgtggaccaaaggaatgcaaacactttgctctaacccattatgcagcccaaccagg

SEQ ID NO: 90248 - DNA, 60 bp, Artificial
  Synthetic oligonucleotide
cttgtggaccaaaggaatgcaaacactttgctctaacccattatgcagcccaaccagggg

SEQ ID NO: 90249 - DNA, 52 bp, Artificial
  Synthetic oligonucleotide
ataatacaaaaggccaaaaacacaatggcagaatttagtgaagatcctgaac

SEQ ID NO: 90250 - DNA, 60 bp, Artificial
  Synthetic oligonucleotide
ggggccaaataaagagacaataaacagagaggtatcaattttgagacacagttaccaaaa

SEQ ID NO: 90251 - DNA, 60 bp, Artificial
  Synthetic oligonucleotide
agcctaaaatccctaacaaatgtagagtggctgcttgggttcaaacagagatgaatctat

SEQ ID NO: 90252 - DNA, 60 bp, Artificial
  Synthetic oligonucleotide
gaaggaggatgggaaggaatgattgcaggttggcacggatacacatcccatggagcacat

SEQ ID NO: 90253 - DNA, 60 bp, Artificial
  Synthetic oligonucleotide
gaaggaggatgggaaggaatgattgcaggttggcacggatacacatctcatggagcacat

SEQ ID NO: 90254 - DNA, 60 bp, Artificial
  Synthetic oligonucleotide
gaaggaggatgggaaggaatgattgcaggttggcacggatacacatcccatggggcacat

SEQ ID NO: 90255 - DNA, 60 bp, Artificial
  Synthetic oligonucleotide
ggaatgattgcaggttggcacggatacacatctcatggagcacatggggtggcagtggca

SEQ ID NO: 90256 - DNA, 60 bp, Artificial
  Synthetic oligonucleotide
aggaatgattgcaggttggcacggatacacatcccatggggcacatggagtagcggtggc

SEQ ID NO: 90257 - DNA, 60 bp, Artificial
  Synthetic oligonucleotide
aggaatgattgcaggttggcacggatacacatcccatggggcacatggagtagcagtggc

SEQ ID NO: 90258 - DNA, 60 bp, Artificial
  Synthetic oligonucleotide
gaggatgggaaggaatgattgcaggttggcacggatacacatcccatggggcacatggag

SEQ ID NO: 90259 - DNA, 60 bp, Artificial
  Synthetic oligonucleotide
ggaatgattgcaggttggcacggatacacatcccatggggcacatggagtagcagtggca

SEQ ID NO: 90260 - DNA, 60 bp, Artificial
  Synthetic oligonucleotide
ggaatgattgcaggttggcacggatacacatcccatggggcacatggagtagcggtggca

SEQ ID NO: 90261 - DNA, 60 bp, Artificial
  Synthetic oligonucleotide
caaattgaggtgggtccgagagcaaccaatgccaccataaactttgaagcaggaattctg

SEQ ID NO: 90262 - DNA, 60 bp, Artificial
  Synthetic oligonucleotide
gaacaacatgaccacaacacaaattgaggtgggtccgggagcaaccaatgccaccataaa

SEQ ID NO: 90263 - DNA, 60 bp, Artificial
  Synthetic oligonucleotide
gcgtaatgtattgtccttgagagtgttggtaaacggaacattcctcaaacaccccaatgg

SEQ ID NO: 90264 - DNA, 60 bp, Artificial
  Synthetic oligonucleotide
gtccttgagagtgttggtaaacggaacattcctcaaacaccccaatggatacaagtcctt

SEQ ID NO: 90265 - DNA, 60 bp, Artificial
  Synthetic oligonucleotide
tggcgaacaacatgaccacaacacaaattgaggtgggtccgggagcaaccaatgccacca

SEQ ID NO: 90266 - DNA, 60 bp, Artificial
  Synthetic oligonucleotide
gaggtgggtccgggagcaaccaatgccaccataaactttgaagcaggaattttggagtgc

SEQ ID NO: 90267 - DNA, 60 bp, Artificial
  Synthetic oligonucleotide
aaaaatggcgaacaacatgaccacaacacaaattgaggtgggtccgggagcaaccaatgc

SEQ ID NO: 90268 - DNA, 60 bp, Artificial
  Synthetic oligonucleotide
aaacttggacaaacaatatctagactaagggatatatctgttccagctggtttctccaat

SEQ ID NO: 90269 - DNA, 60 bp, Artificial
  Synthetic oligonucleotide
ggagaaaccaaaggaaactcagcccccttgataataagggaaccttttattgcttgtgga

SEQ ID NO: 90270 - DNA, 60 bp, Artificial
  Synthetic oligonucleotide
gcaaaacacctaccaatgggtgctgaaaaatttggtaacactgaaggctcagtttcttct

SEQ ID NO: 90271 - DNA, 60 bp, Artificial
  Synthetic oligonucleotide
gcaaaacacctatcaatgggtgatgaaaaatttggtaacactgaaggctcagtttcttct

SEQ ID NO: 90272 - DNA, 60 bp, Artificial
  Synthetic oligonucleotide
gcaaaacacttatcagtgggtgctaaaaaacttggtaacactgaaggctcagtttcttct

SEQ ID NO: 90273 - DNA, 60 bp, Artificial
  Synthetic oligonucleotide
attagccctcatagatttggagaagccaaaggaaactcagctcccttgataataagggaa

SEQ ID NO: 90274 - DNA, 60 bp, Artificial
  Synthetic oligonucleotide
cctaattagccctcatagattcggagaaaccaaaggaaactcagctcccttgataataag

SEQ ID NO: 90275 - DNA, 60 bp, Artificial
  Synthetic oligonucleotide
gccctcatagattcggagaagccaaaggaaactcagctcccttgataataagggaacctt

SEQ ID NO: 90276 - DNA, 60 bp, Artificial
  Synthetic oligonucleotide
tagccctcatagattcggagaagccaaaggaaactcagctcccttgataataagggaacc

SEQ ID NO: 90277 - DNA, 60 bp, Artificial
  Synthetic oligonucleotide
gccctcatagatttggagaagccaaaggaaactcagctcccttgataataagggaacctt

SEQ ID NO: 90278 - DNA, 60 bp, Artificial
  Synthetic oligonucleotide
ggggcaaactaaaaagaagagcaattgcaaccgctggaatacaaatcagagggtttgtat

SEQ ID NO: 90279 - DNA, 51 bp, Artificial
  Synthetic oligonucleotide
agaagagcaattgctaccgctggaatacaaatcagagggtttgtattagta

SEQ ID NO: 90280 - DNA, 60 bp, Artificial
  Synthetic oligonucleotide
gattgccaccgctggaatacaaatcagagggtttgtattagtagtcgaaaacttggctaa

SEQ ID NO: 90281 - DNA, 60 bp, Artificial
  Synthetic oligonucleotide
caatcaatgcaacaaatggaagcaattgttgaacaagaatcatcgatacaaggatatgac

SEQ ID NO: 90282 - DNA, 60 bp, Artificial
  Synthetic oligonucleotide
tgataataagggaaccttttattgcttgtggaccaaaggaatgcaaacactttgctctaa

SEQ ID NO: 90283 - DNA, 60 bp, Artificial
  Synthetic oligonucleotide
ggaaactcagctcccttgataataagggaaccttttattgcttgtggaccaaaagaatgc

SEQ ID NO: 90284 - DNA, 60 bp, Artificial
  Synthetic oligonucleotide
aaatgaatgcaaacactttgctctaacccattatgcagcccaaccagggggatactacaa

SEQ ID NO: 90285 - DNA, 60 bp, Artificial
  Synthetic oligonucleotide
cggagttgatggccccgacagtaatgcattgctcaaaataaaatatggagaagcatatac

SEQ ID NO: 90286 - DNA, 60 bp, Artificial
  Synthetic oligonucleotide
ctcatggccatgtacctgaatcctggaaattattcaatgcaagtaaaactaggaacgctc

SEQ ID NO: 90287 - DNA, 60 bp, Artificial
  Synthetic oligonucleotide
ctcatggtcatgtacctgaatcctggaaattattcaatgcaagtaaaactaggaacgctc

SEQ ID NO: 90288 - DNA, 60 bp, Artificial
  Synthetic oligonucleotide
ggtgaaaacacctttgaagctcgccaatggaaccaaatatagacctcctgcaaaactatt

SEQ ID NO: 90289 - DNA, 60 bp, Artificial
  Synthetic oligonucleotide
cccaatatgggtgaaaacacccttgaagctggccaatggaaccaaatatagacctcctgc

SEQ ID NO: 90290 - DNA, 60 bp, Artificial
  Synthetic oligonucleotide
ggtgaaaacacctttgaaacttgccaatggaaccaaatatagacctcctgcaaaactatt

SEQ ID NO: 90291 - DNA, 60 bp, Artificial
  Synthetic oligonucleotide
gcaagtaaaactaggaacgctctgtgctttgtgcgagaaacaagcatcacattcacacag

SEQ ID NO: 90292 - DNA, 60 bp, Artificial
  Synthetic oligonucleotide
ccgtcgaaattccaattaagcagaccatccccaatttcttctttgggagggacacagcag

SEQ ID NO: 90293 - DNA, 60 bp, Artificial
  Synthetic oligonucleotide
tcccgtcgaaattccaattaagcagaccatccccaatttcttctttgggagggacacagc

SEQ ID NO: 90294 - DNA, 60 bp, Artificial
  Synthetic oligonucleotide
aaacaaaaccaatcccgttgaaattccaattaagcagaccatccccaatttcttctttgg

SEQ ID NO: 90295 - DNA, 60 bp, Artificial
  Synthetic oligonucleotide
tctttgtcgcctggaatgatgatgggaatgtttaatatgctatctaccgtgttgggagta

SEQ ID NO: 90296 - DNA, 60 bp, Artificial
  Synthetic oligonucleotide
cgcctggaatgatgatgggaatgtttaatatgctatctaccgtgttgggagtagcagcac

SEQ ID NO: 90297 - DNA, 51 bp, Artificial
  Synthetic oligonucleotide
tttaagatgaatataaatccttattttctcttcatagatgtacccatacag

SEQ ID NO: 90298 - DNA, 50 bp, Artificial
  Synthetic oligonucleotide
tttagatgaatataaatccttattttctcttcatagatgtgcccatacag

SEQ ID NO: 90299 - DNA, 54 bp, Artificial
  Synthetic oligonucleotide
aaaagaagagcgattgccaccgctggaatacaaatcagagggtttgtattagta

SEQ ID NO: 90300 - DNA, 60 bp, Artificial
  Synthetic oligonucleotide
ggagggataagcatgacagtaacaggagacaatactaaatggaatgaatgcttaaatcca

SEQ ID NO: 90301 - DNA, 60 bp, Artificial
  Synthetic oligonucleotide
ggagggaccagcatgacagtaacaggagacaatactaaatggaatgaatgcctaaaccca

SEQ ID NO: 90302 - DNA, 60 bp, Artificial
  Synthetic oligonucleotide
ggagggataagcatgacagtaacaggagacaatactaaatggaatgaatgtttaaaccca

SEQ ID NO: 90303 - DNA, 60 bp, Artificial
  Synthetic oligonucleotide
caaataagatccaaatgaaatggggaatggaagctagaagatgtctgcttcaatcaatgc

SEQ ID NO: 90304 - DNA, 60 bp, Artificial
  Synthetic oligonucleotide
gatgattttgagaaagcaatggctcaccttggtgagattgggtacatataagctccgaag

SEQ ID NO: 90305 - DNA, 60 bp, Artificial
  Synthetic oligonucleotide
gatgattttgagaaagcaatggctcaccttggtgtgattgggtacacataagctccgaag

SEQ ID NO: 90306 - DNA, 60 bp, Artificial
  Synthetic oligonucleotide
gatgattttgagaaagcaatggctcaccttggtgagattgggtacacataagctctgaag

SEQ ID NO: 90307 - DNA, 60 bp, Artificial
  Synthetic oligonucleotide
tttgattataaaaccaagagatttatagaagttggaataacaaaaggattggctgatgat

SEQ ID NO: 90308 - DNA, 60 bp, Artificial
  Synthetic oligonucleotide
gaagagcgattgcaaccgctgggatacaaatcagagggtttgtattagtagttgaaaact

SEQ ID NO: 90309 - DNA, 60 bp, Artificial
  Synthetic oligonucleotide
gattgcaaccgctggaatacaaatcagagggtttgtattagtagttgaaaacctggctaa

SEQ ID NO: 90310 - DNA, 60 bp, Artificial
  Synthetic oligonucleotide
gccctcatagattcggagaaaccaaaggaaactcagctcccttgataataagggaacctt

SEQ ID NO: 90311 - DNA, 60 bp, Artificial
  Synthetic oligonucleotide
ccccatagattcggagaaaccaaaggaaactcagctcccttgataataagggaacctttt

SEQ ID NO: 90312 - DNA, 60 bp, Artificial
  Synthetic oligonucleotide
cctaacaaatgtagagtggctgcttgggttcaaacagagatgaatctattgagcactctg

SEQ ID NO: 90313 - DNA, 60 bp, Artificial
  Synthetic oligonucleotide
atatctagactaagggatatatctgttccagctggtttctccaattttgaaggaatgagg

SEQ ID NO: 90314 - DNA, 60 bp, Artificial
  Synthetic oligonucleotide
tccaatgcagatcgaatctgcactgggataacatcgtcaaactcaccccatgtggtcaaa

SEQ ID NO: 90315 - DNA, 60 bp, Artificial
  Synthetic oligonucleotide
actgaggcaaataggccaaaaatgaacaatgctaccttcaactatacaaacgttaaccct

SEQ ID NO: 90316 - DNA, 60 bp, Artificial
  Synthetic oligonucleotide
cttgtggaccaaaggaatgcaaacactttgctctaacccattatgcagctcagccagggg

SEQ ID NO: 90317 - DNA, 60 bp, Artificial
  Synthetic oligonucleotide
tgcttgtggaccaaaggaatgcaaacactttgctctaacccattatgcagctcagccagg

SEQ ID NO: 90318 - DNA, 60 bp, Artificial
  Synthetic oligonucleotide
gggggcaccttttacaagatggtaagagatgataaaaccatctacttcagccctataaga

SEQ ID NO: 90319 - DNA, 60 bp, Artificial
  Synthetic oligonucleotide
gggcaccttttacaagatggtaagagatgataaaaccatctacttcagccctataagagt

SEQ ID NO: 90320 - DNA, 60 bp, Artificial
  Synthetic oligonucleotide
ggggcaccttttacaagatggtaagagatgataaaaccatctacttcagccctataagaa

SEQ ID NO: 90321 - DNA, 60 bp, Artificial
  Synthetic oligonucleotide
ggcaccttttacaagatggtaagagatgataaaaccatctacttcagccctataagagtc

SEQ ID NO: 90322 - DNA, 59 bp, Artificial
  Synthetic oligonucleotide
ggggcaccttttacaagatggtaagagatgataaaaccatctacttcagccctataaga

SEQ ID NO: 90323 - DNA, 60 bp, Artificial
  Synthetic oligonucleotide
ccttttacaagatggtaagagatgataaaaccatctacttcagccctataagaattacct

SEQ ID NO: 90324 - DNA, 56 bp, Artificial
  Synthetic oligonucleotide
ttttacaagatggtaagagatgataaaaccatctacttcagccctataagaattac

SEQ ID NO: 90325 - DNA, 60 bp, Artificial
  Synthetic oligonucleotide
accttttacaagatggtaagagatgataaaaccatctacttcagccctataagaattacc

SEQ ID NO: 90326 - DNA, 60 bp, Artificial
  Synthetic oligonucleotide
caccttttacaagatggtaagagatgataaaaccatctacttcagccctataagaattac

SEQ ID NO: 90327 - DNA, 60 bp, Artificial
  Synthetic oligonucleotide
taaacagagaggtatcaattttgagacacagttaccaaaaagaaatccaggccaaagaaa

SEQ ID NO: 90328 - DNA, 60 bp, Artificial
  Synthetic oligonucleotide
agagaggtatcaattttgagacacagttaccaaaaagaaatccaggccaaagaaacaatg

SEQ ID NO: 90329 - DNA, 60 bp, Artificial
  Synthetic oligonucleotide
tggtttcttagaaggaggatgggaaggaatgattgcaggttggcacggatacacatccca

SEQ ID NO: 90330 - DNA, 54 bp, Artificial
  Synthetic oligonucleotide
atgggaggacctaagaccaatagggcctcacatttacaaccatgagctaccaga

SEQ ID NO: 90331 - DNA, 60 bp, Artificial
  Synthetic oligonucleotide
ccttagctcaagagcatggaatagagactcccaagtatctggctgatttgtttgattata

SEQ ID NO: 90332 - DNA, 60 bp, Artificial
  Synthetic oligonucleotide
ttgtctcatggtcatgtacctgaaccctgggaattattcaatgcaagtaaaactaggaac

SEQ ID NO: 90333 - DNA, 60 bp, Artificial
  Synthetic oligonucleotide
ctcatggtcatgtatctgaatcctgggaattattcaatgcaagtaaaactaggaacgctc

SEQ ID NO: 90334 - DNA, 60 bp, Artificial
  Synthetic oligonucleotide
ctcatggtcatgtacctaaatcctggaaattattcaatgcaagtaaaactaggaacgctc

SEQ ID NO: 90335 - DNA, 60 bp, Artificial
  Synthetic oligonucleotide
cccaaaaggagcaatagagagaaatctagcaaggatgtctcccttagtatcagtcacacc

SEQ ID NO: 90336 - DNA, 60 bp, Artificial
  Synthetic oligonucleotide
ccctaaaggagcaatagagagaaatctagcaaggatgtctcccttagtatcagtcacacc

SEQ ID NO: 90337 - DNA, 60 bp, Artificial
  Synthetic oligonucleotide
cccgaaaggagcaatagagagaaatctagcaaggatgtctcccttagtatcagtcacacc

SEQ ID NO: 90338 - DNA, 60 bp, Artificial
  Synthetic oligonucleotide
aaggagcaatagagagaaatctagcaaggatgtctcccttagtatcagtcacacctaaaa

SEQ ID NO: 90339 - DNA, 60 bp, Artificial
  Synthetic oligonucleotide
gaagcttgccaatggaaccaaatataggcctcctgcaaaactattaaaggaaaggggttt

SEQ ID NO: 90340 - DNA, 60 bp, Artificial
  Synthetic oligonucleotide
atcggaaacggaacaatacagaagattggaatatgggacggagaagaggagttccatgta

SEQ ID NO: 90341 - DNA, 60 bp, Artificial
  Synthetic oligonucleotide
atcgggaacggaacaatacagaagattggaatatgggacggagaagaggagttccatgtg

SEQ ID NO: 90342 - DNA, 60 bp, Artificial
  Synthetic oligonucleotide
cgggaacgggacaatacagaagattggaatatgggacggagaagaggagttccatgtaag

SEQ ID NO: 90343 - DNA, 60 bp, Artificial
  Synthetic oligonucleotide
atcggaaacggaacaatacagaagattggaatatgggacggagaagaggagttccatgtg

SEQ ID NO: 90344 - DNA, 60 bp, Artificial
  Synthetic oligonucleotide
atcgggaacggaacaatacagaagattggaatatgggacggagaagaggagttccatgta

SEQ ID NO: 90345 - DNA, 60 bp, Artificial
  Synthetic oligonucleotide
cgggaacggaacaatacagaagattggaatatgggacggggaagaggagttccatgtaag

SEQ ID NO: 90346 - DNA, 60 bp, Artificial
  Synthetic oligonucleotide
cgggaacggaacaatacagaagattggaatatgggacggagaagaggagttccatgtaag

SEQ ID NO: 90347 - DNA, 60 bp, Artificial
  Synthetic oligonucleotide
cggaacaatacagaagattggaatatgggacggagaagaggagttccatgtgagatgtgg

SEQ ID NO: 90348 - DNA, 60 bp, Artificial
  Synthetic oligonucleotide
cggaacaatacagaagattggaatatgggacggagaagaggagttccatgtaagatgtgg

SEQ ID NO: 90349 - DNA, 60 bp, Artificial
  Synthetic oligonucleotide
gaacggaacaatacagaagattggaatatgggacggagaagaggagttccatgtaagatg

SEQ ID NO: 90350 - DNA, 60 bp, Artificial
  Synthetic oligonucleotide
ccaaatgaaatggggaatggaggctagaagatgtctgcttcaatcaatgcaacaaatgga

SEQ ID NO: 90351 - DNA, 57 bp, Artificial
  Synthetic oligonucleotide
tataaaggagctatgggaaaacactaaaggaagagatggtctgttggtggcagatgg

SEQ ID NO: 90352 - DNA, 57 bp, Artificial
  Synthetic oligonucleotide
tataaaggagctatgggaaaacactaaaggaagagatggtctgttagtggcggatgg

SEQ ID NO: 90353 - DNA, 57 bp, Artificial
  Synthetic oligonucleotide
cataaaggagctatgggaaaacactaaaggaagagatggtctgttagtggcagatgg

SEQ ID NO: 90354 - DNA, 60 bp, Artificial
  Synthetic oligonucleotide
tataaaggagctatgggaaaacactaaaggaagagatggtctgttagtggcagatggtgg

SEQ ID NO: 90355 - DNA, 60 bp, Artificial
  Synthetic oligonucleotide
tgctactgatgatcttacagtggaggatgaagaagatggccatcggatcctcaattcact

SEQ ID NO: 90356 - DNA, 60 bp, Artificial
  Synthetic oligonucleotide
ccaccataaactttgaagcaggaattctggagtgctatgaaaggctttcatggcaaagag

SEQ ID NO: 90357 - DNA, 60 bp, Artificial
  Synthetic oligonucleotide
aggaattctggagtgctatgaaaggctttcatggcaaagagcccttgactaccctggtca

SEQ ID NO: 90358 - DNA, 60 bp, Artificial
  Synthetic oligonucleotide
attctggagtgctatgaaaggctttcatggcaaagagcccttgactaccctggtcaagac

SEQ ID NO: 90359 - DNA, 60 bp, Artificial
  Synthetic oligonucleotide
aggaattttggagtgctatgaaaggctttcatggcaaagagcccttgactaccctggtca

SEQ ID NO: 90360 - DNA, 60 bp, Artificial
  Synthetic oligonucleotide
cttacagtggaggatgaagaagatggccatcggatcctcaattcactcttcgagcgtctt

SEQ ID NO: 90361 - DNA, 60 bp, Artificial
  Synthetic oligonucleotide
gggagcaaccaatgccaccataaactttgaagcaggaattttggagtgctatgaaaggct

SEQ ID NO: 90362 - DNA, 57 bp, Artificial
  Synthetic oligonucleotide
accaatgccaccataaactttgaagcaggaattctggagtgctatgaaaggctttca

SEQ ID NO: 90363 - DNA, 60 bp, Artificial
  Synthetic oligonucleotide
accaatgccaccataaactttgaagcaggaattctggagtgctatgaaaggctttcatgg

SEQ ID NO: 90364 - DNA, 56 bp, Artificial
  Synthetic oligonucleotide
ccaatgccaccataaactttgaagcaggaattctggagtgctatgaaaggctttca

SEQ ID NO: 90365 - DNA, 60 bp, Artificial
  Synthetic oligonucleotide
cgatcttacagtggaggatgaagaagatggccatcggatcctcaactcactcttcgagcg

SEQ ID NO: 90366 - DNA, 60 bp, Artificial
  Synthetic oligonucleotide
tgctattgacgatcttacagtggaggatgaagaagatggccatcggatcctcaactcact

SEQ ID NO: 90367 - DNA, 60 bp, Artificial
  Synthetic oligonucleotide
tgccactgatgatcttacagtggaggatgaagaagatggccatcggatcctcaactcact

SEQ ID NO: 90368 - DNA, 60 bp, Artificial
  Synthetic oligonucleotide
ccaatgccaccataaactttgaagcaggaattctggagtgctatgaaaggctttcatggc

SEQ ID NO: 90369 - DNA, 60 bp, Artificial
  Synthetic oligonucleotide
ggtgggtccgggagcaaccaatgccaccataaactttgaagcaggaattttggagtgcta

SEQ ID NO: 90370 - DNA, 60 bp, Artificial
  Synthetic oligonucleotide
ggtgggtccaggagcaaccaatgccaccataaactttgaagcaggaattctggagtgcta

SEQ ID NO: 90371 - DNA, 60 bp, Artificial
  Synthetic oligonucleotide
aggtgggtccaggagcaaccaatgccaccataaactttgaagcaggaattctggagtgct

SEQ ID NO: 90372 - DNA, 60 bp, Artificial
  Synthetic oligonucleotide
tgggtccgggagcaaccaatgccaccataaactttgaagcaggaattctggagtgctatg

SEQ ID NO: 90373 - DNA, 60 bp, Artificial
  Synthetic oligonucleotide
agacacaattgcctacctgctttcattgacagaagatggagaaggcaaagcagaactagc

SEQ ID NO: 90374 - DNA, 60 bp, Artificial
  Synthetic oligonucleotide
cacaattgcctacctgctttcattgacagaagatggagaaggcaaagcagaactagcaga

SEQ ID NO: 90375 - DNA, 60 bp, Artificial
  Synthetic oligonucleotide
acagaagatggagaaggcaaagcagaactagcagaaaaattacactgttggtttggtggg

SEQ ID NO: 90376 - DNA, 60 bp, Artificial
  Synthetic oligonucleotide
cagaagatggagaaggcaaagcagaactagcagaaaaattacactgttggtttggtggga

SEQ ID NO: 90377 - DNA, 56 bp, Artificial
  Synthetic oligonucleotide
agatggagaaggcaaagcagaactagcagaaaaattacactgttggtttggtggga

SEQ ID NO: 90378 - DNA, 60 bp, Artificial
  Synthetic oligonucleotide
agatggagaaggcaaagcagaactagcagaaaaattacactgttggtttggtgggaaaga

SEQ ID NO: 90379 - DNA, 60 bp, Artificial
  Synthetic oligonucleotide
gatggagaaggcaaagcagaactagcagaaaaattacactgttggtttggtgggaaagaa

SEQ ID NO: 90380 - DNA, 60 bp, Artificial
  Synthetic oligonucleotide
atggagaaggcaaagcagaactagcagaaaaattacactgttggtttggtgggaaagaat

SEQ ID NO: 90381 - DNA, 60 bp, Artificial
  Synthetic oligonucleotide
ggagacacaattgcctacctgctttcattgacagaagatggagaaggcaaagcagaacta

SEQ ID NO: 90382 - DNA, 60 bp, Artificial
  Synthetic oligonucleotide
gctgggaaatagcatggaactgatgatattcagctacaatcaagactattcattaagtaa

SEQ ID NO: 90383 - DNA, 60 bp, Artificial
  Synthetic oligonucleotide
agaaacctaatccaaaatgcgcatgctgtggaaagaattctattggctgccactgatgac

SEQ ID NO: 90384 - DNA, 60 bp, Artificial
  Synthetic oligonucleotide
aaacctaatccaaaatgcgcatgctgtggaaagaattctattggctgccactgatgacaa

SEQ ID NO: 90385 - DNA, 60 bp, Artificial
  Synthetic oligonucleotide
ggagagaaacctaatccaaaatgcgcatgctgtggaaagaattctattggctgccactga

SEQ ID NO: 90386 - DNA, 60 bp, Artificial
  Synthetic oligonucleotide
ggagagaaacctaattcaaaatgcgcatgctgtggaaagaattctattggctgccactga

SEQ ID NO: 90387 - DNA, 60 bp, Artificial
  Synthetic oligonucleotide
tgacatggagagaaacctaatccaaaatgcgcatgctgtggaaagaattctattggctgc

SEQ ID NO: 90388 - DNA, 60 bp, Artificial
  Synthetic oligonucleotide
atggagagaaacctaatccaaaatgcgcatgctgtggaaagaattctattggctgccact

SEQ ID NO: 90389 - DNA, 60 bp, Artificial
  Synthetic oligonucleotide
ccaaaatgcgcatgctgtggaaagaattctattggctgccactgatgacaagaaaactga

SEQ ID NO: 90390 - DNA, 60 bp, Artificial
  Synthetic oligonucleotide
tcccgttgaaattccaattaagcagaccatccccaatttcttctttgggagggacacagc

SEQ ID NO: 90391 - DNA, 60 bp, Artificial
  Synthetic oligonucleotide
ttccaattaagcagaccatccccagtttcttctttgggagggacacagcagaggattatg

SEQ ID NO: 90392 - DNA, 60 bp, Artificial
  Synthetic oligonucleotide
ccgttgaaattccaattaagcagaccatccccaatttcttctttgggagggacacagcag

SEQ ID NO: 90393 - DNA, 60 bp, Artificial
  Synthetic oligonucleotide
tcccattgaaattccaattaagcagaccatccccaatttcttctttgggagggacacagc

SEQ ID NO: 90394 - DNA, 51 bp, Artificial
  Synthetic oligonucleotide
gcccgggctcaacctttcagaaagcactcctaattagccctcatagattcg

SEQ ID NO: 90395 - DNA, 60 bp, Artificial
  Synthetic oligonucleotide
aagatggagaaggcaaagcagaactagcagaaaaattacactgttggttcggtgggaaag

SEQ ID NO: 90396 - DNA, 60 bp, Artificial
  Synthetic oligonucleotide
agaagatggagaaggcaaagcagaactagcagaaaaattacactgttggttcggtgggaa

SEQ ID NO: 90397 - DNA, 60 bp, Artificial
  Synthetic oligonucleotide
gatggagaaggcaaagcagaactagcagaaaaattacactgttggttcggtgggaaagaa

SEQ ID NO: 90398 - DNA, 60 bp, Artificial
  Synthetic oligonucleotide
agatggagaaggcaaagcagaactagcagaaaaattacactgctggttcggtgggaaaga

SEQ ID NO: 90399 - DNA, 60 bp, Artificial
  Synthetic oligonucleotide
tggagaaggcaaagcagaactagcagaaaaattacactgttggttcggtgggaaagaatt

SEQ ID NO: 90400 - DNA, 60 bp, Artificial
  Synthetic oligonucleotide
atggagaaggcaaagcagaactagcagaaaaattacactgttggttcggtgggaaagaat

SEQ ID NO: 90401 - DNA, 60 bp, Artificial
  Synthetic oligonucleotide
atggagaaggcaaagcagaactagcagaaaaattacactgttggttcggtggaaaagaat

SEQ ID NO: 90402 - DNA, 60 bp, Artificial
  Synthetic oligonucleotide
cagaagatggagaaggcaaagcagaactagcagaaaagttacactgttggttcggtggga

SEQ ID NO: 90403 - DNA, 60 bp, Artificial
  Synthetic oligonucleotide
acagaagatggagaaggcaaagcagaactagcagaaaagttacactgttggttcggtggg

SEQ ID NO: 90404 - DNA, 60 bp, Artificial
  Synthetic oligonucleotide
aaacgttaaccctatttctcacatcagggggagtgttattatcactatatgtgtcagctt

SEQ ID NO: 90405 - DNA, 60 bp, Artificial
  Synthetic oligonucleotide
aggcaataattgtactactcatggtagtaacatccaaagcagatcgaatctgcactggga

SEQ ID NO: 90406 - DNA, 60 bp, Artificial
  Synthetic oligonucleotide
atgaaggcactaattgtactactcatggtagtaacatccaatgcagatcgaatctgcact

SEQ ID NO: 90407 - DNA, 60 bp, Artificial
  Synthetic oligonucleotide
aaggcaataattgtactactcatggtagtaacatccaatgcagatcgaatctgcactagg

SEQ ID NO: 90408 - DNA, 60 bp, Artificial
  Synthetic oligonucleotide
ggaccccgaatacaaagggcggttacttcatcctcaaaatccctttgtaggacatttgtc

SEQ ID NO: 90409 - DNA, 60 bp, Artificial
  Synthetic oligonucleotide
cacaaaatgaaggcaataattgtactactcatggtagtaacatccaatgcagatcgaatc

SEQ ID NO: 90410 - DNA, 60 bp, Artificial
  Synthetic oligonucleotide
acaaaatgaaggcaataattgtactactcatggtagtaacatccaatgcagatcgaatct

SEQ ID NO: 90411 - DNA, 60 bp, Artificial
  Synthetic oligonucleotide
ccttattacacaggagaacatgcaaaagccataggaaattgcccaatatgggtgaaaaca

SEQ ID NO: 90412 - DNA, 60 bp, Artificial
  Synthetic oligonucleotide
agacctcctgcaaaactattaaaggaaaggggtttcttcggagctattgctggtttctta

SEQ ID NO: 90413 - DNA, 60 bp, Artificial
  Synthetic oligonucleotide
gaaacttgccaatggaaccaaatatagacctcctgcaaaactattaaaggaaaggggttt

SEQ ID NO: 90414 - DNA, 60 bp, Artificial
  Synthetic oligonucleotide
gaacatgcaaaagccataggaaattgcccaatatgggtgaaaacacctttgaagctcgcc

SEQ ID NO: 90415 - DNA, 60 bp, Artificial
  Synthetic oligonucleotide
ctattaaaggaaaggggtttcttcggagctattgctggtttcttagaaggaggatgggaa

SEQ ID NO: 90416 - DNA, 60 bp, Artificial
  Synthetic oligonucleotide
atgaaggcaataattgtactactcatggtagcaacatccaatgcagatcgaatctgcact

SEQ ID NO: 90417 - DNA, 59 bp, Artificial
  Synthetic oligonucleotide
aaaatgaacaatgctaccttcaactatacaaacgttaaccctattcctcacatcagggg

SEQ ID NO: 90418 - DNA, 60 bp, Artificial
  Synthetic oligonucleotide
aataggccaaaaatgaacaatgctaccttcaactatacaaacgttaaccctattcctcac

SEQ ID NO: 90419 - DNA, 57 bp, Artificial
  Synthetic oligonucleotide
aaaatgaacaatgctaccttcaactatacaaacgttaaccctattcctcacatcagg

SEQ ID NO: 90420 - DNA, 60 bp, Artificial
  Synthetic oligonucleotide
ctgaaggctcagtttcttctagggaaagaagacatgttccaatgggatgcatttgaagca

SEQ ID NO: 90421 - DNA, 60 bp, Artificial
  Synthetic oligonucleotide
gaagcgtttgaaatagcagaaggccatgaaagctcagcgttactatattgtctcatggtc

SEQ ID NO: 90422 - DNA, 60 bp, Artificial
  Synthetic oligonucleotide
ggtggaactttagtagcagaagccattcgatttataggaagagcaatggcagacagagga

SEQ ID NO: 90423 - DNA, 60 bp, Artificial
  Synthetic oligonucleotide
gtggaatacatcaaaagagcattatcattaaacacaatgacaaaagatgctgaaaggggc

SEQ ID NO: 90424 - DNA, 60 bp, Artificial
  Synthetic oligonucleotide
ctgaggcaaataggccaaaaatgaacaatgctaccttcaactatacaaacgttaacccta

SEQ ID NO: 90425 - DNA, 60 bp, Artificial
  Synthetic oligonucleotide
ccaaatgaaatggggaatggaagctagaagatgcctgcttcaatcaatgcaacaaatgga

SEQ ID NO: 90426 - DNA, 60 bp, Artificial
  Synthetic oligonucleotide
cttgaagctggccaatggaaccaaatatagacctcctgcaaaactattaaaggaaagggg

SEQ ID NO: 90427 - DNA, 60 bp, Artificial
  Synthetic oligonucleotide
gaagctcgccaatggaaccaaatatagacctcctgcaaaactattaaaggaaaggggttt

SEQ ID NO: 90428 - DNA, 60 bp, Artificial
  Synthetic oligonucleotide
tattgcttgtggaccaaaggaatgcaaacactttgctctaacccattatgcagcccaacc

SEQ ID NO: 90429 - DNA, 60 bp, Artificial
  Synthetic oligonucleotide
cttttattgcttgtggaccaaaggaatgcaaacactttgctctaacccattatgcagccc

SEQ ID NO: 90430 - DNA, 60 bp, Artificial
  Synthetic oligonucleotide
aattctataaccagatgatggtcaaagctggactcaacgatgacatggagagaaacctaa

SEQ ID NO: 90431 - DNA, 60 bp, Artificial
  Synthetic oligonucleotide
caattagactggttacggaagaactttatcttttaagtaaaagaattgatgataacatat

SEQ ID NO: 90432 - DNA, 60 bp, Artificial
  Synthetic oligonucleotide
gagacaattagactggtcacagaagaactttatcttttaagtaaaagaattgatgataac

SEQ ID NO: 90433 - DNA, 60 bp, Artificial
  Synthetic oligonucleotide
ctcctgggatgatgatgggaatgtttaatatgctatctaccgtgttgggagtagccgcac

SEQ ID NO: 90434 - DNA, 60 bp, Artificial
  Synthetic oligonucleotide
tttgtcacctgggatgatgatgggaatgtttaatatgctatctaccgtgttgggagtagc

SEQ ID NO: 90435 - DNA, 60 bp, Artificial
  Synthetic oligonucleotide
ctttgtctcctgggatgatgatgggaatgtttaatatgctatctaccgtgttgggagtag

SEQ ID NO: 90436 - DNA, 60 bp, Artificial
  Synthetic oligonucleotide
ctgcatctttgtcacctgggatgatgatgggaatgtttaatatgctatctaccgtgttgg

SEQ ID NO: 90437 - DNA, 60 bp, Artificial
  Synthetic oligonucleotide
cagctcccttgacaataagggaaccttttattgcttgtggaccaaaggaatgcaaacact

SEQ ID NO: 90438 - DNA, 60 bp, Artificial
  Synthetic oligonucleotide
agaaagcaatggctcaccttggtgagattgggtacatataagcttcgaagatgtctatgg

SEQ ID NO: 90439 - DNA, 60 bp, Artificial
  Synthetic oligonucleotide
agaaagcaatggctcaccttggtgagattgggtacatataagctccgaagatgtctatgg

SEQ ID NO: 90440 - DNA, 60 bp, Artificial
  Synthetic oligonucleotide
ttttgagaaagcaatggctcaccttggtgagattgggtacacataagctctgaagatgtc

SEQ ID NO: 90441 - DNA, 60 bp, Artificial
  Synthetic oligonucleotide
ggaatgattgcaggttggcacggatacacatctcacggagcacatggagtggcagtggcg

SEQ ID NO: 90442 - DNA, 60 bp, Artificial
  Synthetic oligonucleotide
ggaatgattgcaggttggcacggatacacatctcacggagcacacggagtggcagtggca

SEQ ID NO: 90443 - DNA, 60 bp, Artificial
  Synthetic oligonucleotide
ggaatgattgcaggttggcacggatacacatctcacggagcacatggagtggcagtggca

SEQ ID NO: 90444 - DNA, 60 bp, Artificial
  Synthetic oligonucleotide
gaaggaggatgggaaggaatgattgcaggttggcacggatacacatctcacggagcacat

SEQ ID NO: 90445 - DNA, 60 bp, Artificial
  Synthetic oligonucleotide
gaaggaggatgggaaggaatgattgcaggttggcacggatacacatctcacggagcacac

SEQ ID NO: 90446 - DNA, 60 bp, Artificial
  Synthetic oligonucleotide
aataggccaaaaatgaacaatgctaccttcaactatacaaacgttaaccctatttctcac

SEQ ID NO: 90447 - DNA, 58 bp, Artificial
  Synthetic oligonucleotide
aaaatgaacaatgctaccttcaactatacaaacgttaaccctatttctcacatcaggg

SEQ ID NO: 90448 - DNA, 59 bp, Artificial
  Synthetic oligonucleotide
aaaatgaataatgctaccttcaactatacaaacgttaaccctatttctcacatcagggg

SEQ ID NO: 90449 - DNA, 51 bp, Artificial
  Synthetic oligonucleotide
atggaaggaataaacgacttttaccgaacatgtaaattattgggaattaac

SEQ ID NO: 90450 - DNA, 50 bp, Artificial
  Synthetic oligonucleotide
aaatgaatgcaaacactttgctctaacccattatgcagcccaaccagggg

SEQ ID NO: 90451 - DNA, 60 bp, Artificial
  Synthetic oligonucleotide
gctcaagaacatggaatagagactcccaagtatctggctgatttgtttgattataaaacc

SEQ ID NO: 90452 - DNA, 60 bp, Artificial
  Synthetic oligonucleotide
gctcaagagcatggaatagagactcccaagtatctggctgatttgtttgattataaaacc

SEQ ID NO: 90453 - DNA, 60 bp, Artificial
  Synthetic oligonucleotide
caggaaaatggccaaaatatactgtgtttaggattggctccctatttgtgagtgggagag

SEQ ID NO: 90454 - DNA, 60 bp, Artificial
  Synthetic oligonucleotide
caggaaagtggccaaaatatactgtgtttaggattggctccctatttgtgagtgggagag

SEQ ID NO: 90455 - DNA, 60 bp, Artificial
  Synthetic oligonucleotide
caagcactaaaggacagaaagggcccttgggtgttcgacttagagggaatgtattctgga

SEQ ID NO: 90456 - DNA, 60 bp, Artificial
  Synthetic oligonucleotide
ccaagcattaaaggacagaaagggcccttgggtgttcgacttagagggaatgtattctgg

SEQ ID NO: 90457 - DNA, 60 bp, Artificial
  Synthetic oligonucleotide
cccgaaaggagcaatagaaagaaatctagcaaggatgtctcccttagtatcagtcacacc

SEQ ID NO: 90458 - DNA, 52 bp, Artificial
  Synthetic oligonucleotide
ccccttgataataagggaaccttttattgcttgtggaccaacggaatgcaaa

SEQ ID NO: 90459 - DNA, 60 bp, Artificial
  Synthetic oligonucleotide
ccttgataataagggaaccttttattgcttgtggaccaaaggagtgtaaacactttgctc

SEQ ID NO: 90460 - DNA, 60 bp, Artificial
  Synthetic oligonucleotide
aataagggaaccttttattgcttgtggaccaaaggagtgtaaacactttgctctaaccca

SEQ ID NO: 90461 - DNA, 60 bp, Artificial
  Synthetic oligonucleotide
aataagggaaccttttattgcttgtggaccaacggaatgcaaacactttgctctaaccca

SEQ ID NO: 90462 - DNA, 60 bp, Artificial
  Synthetic oligonucleotide
gaagagcaattgcaaccgctggaatacaaatcagagggtttgtattagtagttgaaaact

SEQ ID NO: 90463 - DNA, 60 bp, Artificial
  Synthetic oligonucleotide
gattgcaaccgctggaatacaaatcagagggtttgtattagtagttgaaaacttggctaa

SEQ ID NO: 90464 - DNA, 60 bp, Artificial
  Synthetic oligonucleotide
aatacaacttaaaacaaatgctgaagacataggaaccaaaggccaaatgtgctcaatagc

SEQ ID NO: 90465 - DNA, 60 bp, Artificial
  Synthetic oligonucleotide
aaatgctgaagacataggaaccaaaggccaaatgtgctcaatagcagcagttacttggtg

SEQ ID NO: 90466 - DNA, 60 bp, Artificial
  Synthetic oligonucleotide
ttaaaacaaatgctgaagacataggaaccaaaggccaaatgtgctcaatagcagcagtta

SEQ ID NO: 90467 - DNA, 60 bp, Artificial
  Synthetic oligonucleotide
ctttaaacttggacagacaatatctagactaagggatatatctgttccagctggtttctc

SEQ ID NO: 90468 - DNA, 60 bp, Artificial
  Synthetic oligonucleotide
gaaggaacggcatctttgtcacctggaatgatgatgggaatgtttaatatgctatctacc

SEQ ID NO: 90469 - DNA, 60 bp, Artificial
  Synthetic oligonucleotide
aaggaactgcatctttgtcacctgggatgatgatgggaatgtttaatatgctatctaccg

SEQ ID NO: 90470 - DNA, 56 bp, Artificial
  Synthetic oligonucleotide
ttgccaccgctggagtacaaatcagagggtttgtattagtagttgaaaacttggct

SEQ ID NO: 90471 - DNA, 60 bp, Artificial
  Synthetic oligonucleotide
gtgatgtcgcctgtgacataataagagctgcattaggactaaagatcagacaaagacaaa

SEQ ID NO: 90472 - DNA, 60 bp, Artificial
  Synthetic oligonucleotide
gtgacataataagagctgcattaggactgaagatcagacaaagacaaagatttggacgac

SEQ ID NO: 90473 - DNA, 60 bp, Artificial
  Synthetic oligonucleotide
gtgacataataagagctgcattaggactgaagatcagacaaagacaaagatttggacggc

SEQ ID NO: 90474 - DNA, 60 bp, Artificial
  Synthetic oligonucleotide
cttttgaatttagtagtacagaccccagagtggactcaggaaagtggccaaaatatactg

SEQ ID NO: 90475 - DNA, 60 bp, Artificial
  Synthetic oligonucleotide
atggaactgtatgtcaagtatgatggagacccatggactgacagtgatgcccttgctcct

SEQ ID NO: 90476 - DNA, 60 bp, Artificial
  Synthetic oligonucleotide
gggactgtatgtcaagtatgatggagacccatgggctgacagtgatgcccttgctcttag

SEQ ID NO: 90477 - DNA, 60 bp, Artificial
  Synthetic oligonucleotide
atgggactgtatgtcaagtatgatggagacccatgggctgacagtgatgcccttgctctt

SEQ ID NO: 90478 - DNA, 60 bp, Artificial
  Synthetic oligonucleotide
tctgtagggaccgaaagacttgagtcggttggagtgtgtgtcggagctttacacagagcg

SEQ ID NO: 90479 - DNA, 60 bp, Artificial
  Synthetic oligonucleotide
gtggatactttcctttctgtagggaccgaaagacttgagtcggttggagtgtgtgtcgga

SEQ ID NO: 90480 - DNA, 60 bp, Artificial
  Synthetic oligonucleotide
gatgacaatgatggggaaaacagtacattggcatctaagagtagttaagtctaaaggaga

SEQ ID NO: 90481 - DNA, 57 bp, Artificial
  Synthetic oligonucleotide
tgggagacacgaggaaggaaggatactgtcacgcaatcattttcggaaaaggggaag

SEQ ID NO: 90482 - DNA, 60 bp, Artificial
  Synthetic oligonucleotide
gagtgttaaaccgaaaacccaaagatatggaaggttatcagacaaatggatggagcttga

SEQ ID NO: 90483 - DNA, 60 bp, Artificial
  Synthetic oligonucleotide
gtttgaacagagtgttaaaccgaaaacccaaagatatggaaggttatcagacaaatggat

SEQ ID NO: 90484 - DNA, 60 bp, Artificial
  Synthetic oligonucleotide
cttgaaaagtttatctttactgcaagcaaaacagaagtggatactttcctttctgtaggg

SEQ ID NO: 90485 - DNA, 60 bp, Artificial
  Synthetic oligonucleotide
acaaatggatggagcttgaaaagtttatctttactgcaagcaaaacagaagtggatactt

SEQ ID NO: 90486 - DNA, 60 bp, Artificial
  Synthetic oligonucleotide
ctaaaggagactggatggcgcaacaactctgtgcaaacaaaagcagaatatggcaacatg

SEQ ID NO: 90487 - DNA, 60 bp, Artificial
  Synthetic oligonucleotide
gcaaagccttgattcagaaaattgcagtcagtacccaatgagtggttatttacttgtaaa

SEQ ID NO: 90488 - DNA, 60 bp, Artificial
  Synthetic oligonucleotide
tgcaaagccttgattcagaaaattgcagtcagtacccaatgagtggttatttacttgtaa

SEQ ID NO: 90489 - DNA, 60 bp, Artificial
  Synthetic oligonucleotide
ttggggtgttgtggggagtatggaggacatggtgaaggaagtggaggaaataggggagca

SEQ ID NO: 90490 - DNA, 60 bp, Artificial
  Synthetic oligonucleotide
ccagcaacaatagacgaagtgagaaccgcaggagaaaggtttgaacagagtgttaaaccg

SEQ ID NO: 90491 - DNA, 60 bp, Artificial
  Synthetic oligonucleotide
ggggaaaacagtacattggcatctaagagtagttaagtctaaaggagactggatggcgca

SEQ ID NO: 90492 - DNA, 60 bp, Artificial
  Synthetic oligonucleotide
caagatggataacctccgtgaatgcataaaccgcaaaagaagactacttgccttaccaga

SEQ ID NO: 90493 - DNA, 60 bp, Artificial
  Synthetic oligonucleotide
gagacatctatacatgtgtgttgctttctgtgatcaacacaaaaccactggagacgaatc

SEQ ID NO: 90494 - DNA, 60 bp, Artificial
  Synthetic oligonucleotide
aacacaaaaccactggagacgaatcaagattcaccaacctggaattacttgaccaagatg

SEQ ID NO: 90495 - DNA, 60 bp, Artificial
  Synthetic oligonucleotide
gatggataacctccgtgaatgcataaaccgcaaaagaagactacttgccttaccagatgt

SEQ ID NO: 90496 - DNA, 60 bp, Artificial
  Synthetic oligonucleotide
ctttctaagtgatttgagacatctatacatgtgtgttgctttctgtgatcaacacaaaac

SEQ ID NO: 90497 - DNA, 60 bp, Artificial
  Synthetic oligonucleotide
gagacgaatcaagattcaccaacctggaattacttgaccaagatgaagcactaggtgccc

SEQ ID NO: 90498 - DNA, 60 bp, Artificial
  Synthetic oligonucleotide
gaccaagatgaagcactaggtgcccaaagagcttttgaagccaaacatggaataaaagga

SEQ ID NO: 90499 - DNA, 53 bp, Artificial
  Synthetic oligonucleotide
tatcacacggagtgctagacatgggacttgtggaaacaggggtgaatgcagta

SEQ ID NO: 90500 - DNA, 60 bp, Artificial
  Synthetic oligonucleotide
acggaataccaatgaagataaatcaggtaggatccacgagaacaccaacaccgatcagca

SEQ ID NO: 90501 - DNA, 60 bp, Artificial
  Synthetic oligonucleotide
ccaagatgaagcactaggtgcccaaagagcttttgaagccaaacatggaataaaaggagg

SEQ ID NO: 90502 - DNA, 60 bp, Artificial
  Synthetic oligonucleotide
aataaaaggaggttctttaggagacgttcttgaccatgaactgaaaaaggtcattgaatt

SEQ ID NO: 90503 - DNA, 60 bp, Artificial
  Synthetic oligonucleotide
gaagatgaaaatattctgtggatggaccctcaattctgtgaaattgatgaaagttttcct

SEQ ID NO: 90504 - DNA, 50 bp, Artificial
  Synthetic oligonucleotide
atactggataacaaggcgttcaccgttgaaagtggtgaatgcataataac

SEQ ID NO: 90505 - DNA, 60 bp, Artificial
  Synthetic oligonucleotide
cttgtaaagaactagaagatgaaaatattctgtggatggaccctcaattctgtgaaattg

SEQ ID NO: 90506 - DNA, 60 bp, Artificial
  Synthetic oligonucleotide
ctcagaaaattgcaaccattagtagatggagggcaatgaggttagacagcatgtttcatg

SEQ ID NO: 90507 - DNA, 60 bp, Artificial
  Synthetic oligonucleotide
tagacagcatgtttcatgtttctagtgcctggcatcattcacctgcgtgtgaagctgcat

SEQ ID NO: 90508 - DNA, 60 bp, Artificial
  Synthetic oligonucleotide
gagaagaagagaccagcaacaatagacgaagtgagaaccgcaggagaaaggtttgaacag

SEQ ID NO: 90509 - DNA, 60 bp, Artificial
  Synthetic oligonucleotide
gaagctgcatcggcaatgctgagaaagtttgtggagatagtacatgccatcaaccagaaa

SEQ ID NO: 90510 - DNA, 60 bp, Artificial
  Synthetic oligonucleotide
ggatggcgcaacaactctgtgcaaacaaaagcagaatatggcaacatgaccctgagctag

SEQ ID NO: 90511 - DNA, 60 bp, Artificial
  Synthetic oligonucleotide
tggcaacatgaccctgagctagtaacagaaggagtgacagttctaatgacgcctttttct

SEQ ID NO: 90512 - DNA, 57 bp, Artificial
  Synthetic oligonucleotide
tggcaacatgaccctgagctagtaacagaaggagtgacagttctaatgacgcctttt

SEQ ID NO: 90513 - DNA, 60 bp, Artificial
  Synthetic oligonucleotide
gcctttttctcagaaaattgcaaccattagtagatggagggcaatgaggttagacagcat

SEQ ID NO: 90514 - DNA, 60 bp, Artificial
  Synthetic oligonucleotide
catgtttctagtgcctggcatcattcacctgcgtgtgaagctgcatcggcaatgctgaga

SEQ ID NO: 90515 - DNA, 60 bp, Artificial
  Synthetic oligonucleotide
ggcaatgctgagaaagtttgtggagatagtacatgccatcaaccagaaaagagattgggg

SEQ ID NO: 90516 - DNA, 60 bp, Artificial
  Synthetic oligonucleotide
caaccagaaaagagattggggtgttgtggggagtatggaggacatggtgaaggaagtgga

SEQ ID NO: 90517 - DNA, 60 bp, Artificial
  Synthetic oligonucleotide
gaagcttatatgctctcgcttagagaagctggaccataacctgagcaaagcagtcttagg

SEQ ID NO: 90518 - DNA, 60 bp, Artificial
  Synthetic oligonucleotide
gaagcttatatgctctcgcttagagaagctggaccttaacctgagtaaaacagtcttagg

SEQ ID NO: 90519 - DNA, 60 bp, Artificial
  Synthetic oligonucleotide
gaagcttatatgctctcgcttagagaagctggaccataacctgagcaaagtagtcttggg

SEQ ID NO: 90520 - DNA, 60 bp, Artificial
  Synthetic oligonucleotide
gaagcttatatgctctcgcttagagaagctggaccataacctgagtaaagcagtcctggg

SEQ ID NO: 90521 - DNA, 60 bp, Artificial
  Synthetic oligonucleotide
gaagcttatatgctctcgcttagagaagctggaccataacctgagcaaaacagtcttggg

SEQ ID NO: 90522 - DNA, 60 bp, Artificial
  Synthetic oligonucleotide
gaagcttatatgctctcgcttagagaagctggaccttaacatgagcaaagcagtcttagg

SEQ ID NO: 90523 - DNA, 60 bp, Artificial
  Synthetic oligonucleotide
gaagcttatatgctctcgcttagagaagctggaccttaacctgagtaaagcagtcttagg

SEQ ID NO: 90524 - DNA, 60 bp, Artificial
  Synthetic oligonucleotide
atattgacaaggctgaagcttatatgctctcgcttagagaagctggaccttaacctgagc

SEQ ID NO: 90525 - DNA, 60 bp, Artificial
  Synthetic oligonucleotide
caaggtctgcattgctgcctcttctggaaacgtaggcggagtcaacttggtgaacggatg

SEQ ID NO: 90526 - DNA, 60 bp, Artificial
  Synthetic oligonucleotide
gcagctttcatgtataagtctagaggtagaaacccacctgcaaatctgtctgttgcttga

SEQ ID NO: 90527 - DNA, 60 bp, Artificial
  Synthetic oligonucleotide
gggatagcactgtttctagcagggtggaaggcttgtgtttggatagcagctttcatgtat

SEQ ID NO: 90528 - DNA, 60 bp, Artificial
  Synthetic oligonucleotide
gttttgggatagcactgtttctagcagggtggaaggcttgtgtttggatagcagctttca

SEQ ID NO: 90529 - DNA, 60 bp, Artificial
  Synthetic oligonucleotide
ccaccacagcttagcaacatcttcatctctatgggagtggcaggttttgggatagcactg

SEQ ID NO: 90530 - DNA, 60 bp, Artificial
  Synthetic oligonucleotide
tgctattccaccacagcttagcaacatcttcatctctatgggagtggcaggttttgggat

SEQ ID NO: 90531 - DNA, 60 bp, Artificial
  Synthetic oligonucleotide
ggcagaaacattacagacgtaaacaacagagtagatgctattccaccacagcttagcaac

SEQ ID NO: 90532 - DNA, 60 bp, Artificial
  Synthetic oligonucleotide
atgattggtaaacttggcagaaacattacagacgtaaacaacagagtagatgctattcca

SEQ ID NO: 90533 - DNA, 60 bp, Artificial
  Synthetic oligonucleotide
cagaggcactgacatgtccaggtgtagattgggacagaattgatgcagcttcatgcgagt

SEQ ID NO: 90534 - DNA, 60 bp, Artificial
  Synthetic oligonucleotide
aacttttttaacagaggcactgacatgtccaggtgtagattgggacagaattgatgcagc

SEQ ID NO: 90535 - DNA, 50 bp, Artificial
  Synthetic oligonucleotide
gtctcttgatctggttacaaacttcaagggaattctacaagccaagaacg

SEQ ID NO: 90536 - DNA, 60 bp, Artificial
  Synthetic oligonucleotide
cctggataggtgactcccgaagcgatcaatcaagggtgaaccaacagtctcttgatctgg

SEQ ID NO: 90537 - DNA, 60 bp, Artificial
  Synthetic oligonucleotide
gagcggaaggttcccaagtgattggtaccaacctactacaaagtataggattctatacat

SEQ ID NO: 90538 - DNA, 60 bp, Artificial
  Synthetic oligonucleotide
atgagcggaaggttcccaagtgattggtaccaacctactacaaagtataggattctatac

SEQ ID NO: 90539 - DNA, 60 bp, Artificial
  Synthetic oligonucleotide
gtggcaagggacctgtacctgggagcatgtcgaggagatgtaagagtgacaccaaccttc

SEQ ID NO: 90540 - DNA, 60 bp, Artificial
  Synthetic oligonucleotide
atgacactagacaatgtggcaagggacctgtacctgggagcatgtcgaggagatgtaaga

SEQ ID NO: 90541 - DNA, 60 bp, Artificial
  Synthetic oligonucleotide
gagtgacaccaaccttcgtgggagcagctgagcttggactgattgggagaacagatgcct

SEQ ID NO: 90542 - DNA, 60 bp, Artificial
  Synthetic oligonucleotide
agatgtaagagtgacaccaaccttcgtgggagcagctgagcttggactgattgggagaac

SEQ ID NO: 90543 - DNA, 60 bp, Artificial
  Synthetic oligonucleotide
aacaaccctactattgtagtagttggactaaatggaatgtcaggaatctacaaggtctgc

SEQ ID NO: 90544 - DNA, 60 bp, Artificial
  Synthetic oligonucleotide
ttgggagaacagatgccttaacagaattttctgtaaaggtgctgactttcaacaacccta

SEQ ID NO: 90545 - DNA, 60 bp, Artificial
  Synthetic oligonucleotide
gcgcctgtttacagtcgtctatgtcttagaaaccatcctgacaccacctggataggtgac

SEQ ID NO: 90546 - DNA, 60 bp, Artificial
  Synthetic oligonucleotide
accacctggataggtgactcccgaagcgatcaatcaagggtgaaccaacagtctcttgat

SEQ ID NO: 90547 - DNA, 60 bp, Artificial
  Synthetic oligonucleotide
gtatatccttctgatgggtttgattctcttcacggctctgcttcgattagaactttttta

SEQ ID NO: 90548 - DNA, 57 bp, Artificial
  Synthetic oligonucleotide
gtatatccttctgatgggtttgattctcttcacggctctgcttcgattagaactttt

SEQ ID NO: 90549 - DNA, 60 bp, Artificial
  Synthetic oligonucleotide
gatcttctagcaatgctcctttgtgtacacatatcaaaagaaacattgagttggatgagt

SEQ ID NO: 90550 - DNA, 60 bp, Artificial
  Synthetic oligonucleotide
aaagaaacattgagttggatgagtacgttgacacaccaaacactgggggcgtatatcctt

SEQ ID NO: 90551 - DNA, 60 bp, Artificial
  Synthetic oligonucleotide
gcggatacttcagcgctcctctgagattcgacaacttcaaaggacagatctacgtgtcag

SEQ ID NO: 90552 - DNA, 60 bp, Artificial
  Synthetic oligonucleotide
atgtgtcatacttagatcttctagcaatgctcctttgtgtacacatatcaaaagaaacat

SEQ ID NO: 90553 - DNA, 60 bp, Artificial
  Synthetic oligonucleotide
ggtctgcattgctgcctcttctggaaacgtaggcggagtcaacttggtgaacggatgcgg

SEQ ID NO: 90554 - DNA, 60 bp, Artificial
  Synthetic oligonucleotide
tgaacggatgcggatacttcagcgctcctctgagattcgacaacttcaaaggacagatct

SEQ ID NO: 90555 - DNA, 60 bp, Artificial
  Synthetic oligonucleotide
gtagtagttggactaaatggaatgtcaggaatctacaaggtctgcattgctgcctcttct

SEQ ID NO: 90556 - DNA, 60 bp, Artificial
  Synthetic oligonucleotide
atctcctacaatgacgccagcgtccgtagaaatgaagggaaagaaacttcctattaattt

SEQ ID NO: 90557 - DNA, 60 bp, Artificial
  Synthetic oligonucleotide
caacaaaagccaggttgagaacagaatcctcttttgcacctagaacatgggaagatgcga

SEQ ID NO: 90558 - DNA, 60 bp, Artificial
  Synthetic oligonucleotide
cctctttagggagagacttgacctgggagaaggtgcccctgacgaaaccgacaactcacc

SEQ ID NO: 90559 - DNA, 60 bp, Artificial
  Synthetic oligonucleotide
atattgccctctttagggagagacttgacctgggagaaggtgcccctgacgaaaccgaca

SEQ ID NO: 90560 - DNA, 60 bp, Artificial
  Synthetic oligonucleotide
aaacctggaagatattcagtaagaagctctccaagattccttttaatgcccgaaagaagt

SEQ ID NO: 90561 - DNA, 60 bp, Artificial
  Synthetic oligonucleotide
aggctgaaaaaataaagatatgccttcaaaagcaagtgaacagtagcttcagcctacaca

SEQ ID NO: 90562 - DNA, 60 bp, Artificial
  Synthetic oligonucleotide
gctgaaaaaataaagatatgccttcaaaagcaagtgaacagtagcttcagcctacacaat

SEQ ID NO: 90563 - DNA, 60 bp, Artificial
  Synthetic oligonucleotide
tcacagaggctgaaaaaataaagatatgccttcaaaagcaagtgaacagtagcttcagcc

SEQ ID NO: 90564 - DNA, 60 bp, Artificial
  Synthetic oligonucleotide
aggctgaaaaaataaagatatgccttcaaaagcaagcgaacagtagcttcagcctacaca

SEQ ID NO: 90565 - DNA, 60 bp, Artificial
  Synthetic oligonucleotide
ctcacagaggctgaaaaaataaagatatgccttcaaaagcaagtgaacagtagcttcagc

SEQ ID NO: 90566 - DNA, 60 bp, Artificial
  Synthetic oligonucleotide
cctggaagatattcagtaagaagctctccaagattccttttaatgcctgagagaagttat

SEQ ID NO: 90567 - DNA, 60 bp, Artificial
  Synthetic oligonucleotide
caggaggaggtgtgacaaaagaatcagctgaaaaagggtttgaaaaaattggaaatgaca

SEQ ID NO: 90568 - DNA, 60 bp, Artificial
  Synthetic oligonucleotide
gaggaggtgtgacaaaagaatcagctgaaaaagggtttgaaaaaattggaaatgacatac

SEQ ID NO: 90569 - DNA, 60 bp, Artificial
  Synthetic oligonucleotide
ccttgataataagggaaccttttattgcttgtggaccaaaggagtgcaaacactttgctc

SEQ ID NO: 90570 - DNA, 60 bp, Artificial
  Synthetic oligonucleotide
ggctggtgtcagtctaacacgcactgctggtgtccacctaaacctacaattgttcccacc

SEQ ID NO: 90571 - DNA, 60 bp, Artificial
  Synthetic oligonucleotide
atgctgaaagaggcaaactaaaaagaagagcgattgcaaccgctggaatacaaatcagag

SEQ ID NO: 90572 - DNA, 60 bp, Artificial
  Synthetic oligonucleotide
gggctttctgctgaagagataataaaaatgggtgaaacagttttggaggtagaagaattg

SEQ ID NO: 90573 - DNA, 60 bp, Artificial
  Synthetic oligonucleotide
caagaattttgtgtttttgtcagaaaaagaaattgctgtaaacatggaagttgaaaaatt

SEQ ID NO: 90574 - DNA, 60 bp, Artificial
  Synthetic oligonucleotide
aacaagaattttgtgtttttgtctgagcaagaaattgctgtaaacatggaagttgaaaaa

SEQ ID NO: 90575 - DNA, 50 bp, Artificial
  Synthetic oligonucleotide
tttagatgaatataaatccttattttctcttcatagatgtacccatacag

SEQ ID NO: 90576 - DNA, 50 bp, Artificial
  Synthetic oligonucleotide
ttaagatgaatataaatccttattttctcttcatagatgtgcccatacag

SEQ ID NO: 90577 - DNA, 60 bp, Artificial
  Synthetic oligonucleotide
ggaacggcatctttgtcgcctggaatgatgatgggaatgtttaatatgctatctaccgtg

SEQ ID NO: 90578 - DNA, 60 bp, Artificial
  Synthetic oligonucleotide
aaggaacggcatctttatcgcctggaatgatgatgggaatgtttaatatgctatctaccg

SEQ ID NO: 90579 - DNA, 60 bp, Artificial
  Synthetic oligonucleotide
tttgtcgccagggatgatgatgggaatgtttaatatgctatctaccgtgttgggagtagc

SEQ ID NO: 90580 - DNA, 60 bp, Artificial
  Synthetic oligonucleotide
ctttatcgcctgggatgatgatgggaatgtttaatatgctatctaccgtgttgggagtag

SEQ ID NO: 90581 - DNA, 60 bp, Artificial
  Synthetic oligonucleotide
ctttgtcgccagggatgatgatgggaatgtttaatatgctatctaccgtgttgggagtag

SEQ ID NO: 90582 - DNA, 60 bp, Artificial
  Synthetic oligonucleotide
cacctgggatgatgatgggaatgtttaatatgctatctaccgtgttgggagtagccgcac

SEQ ID NO: 90583 - DNA, 60 bp, Artificial
  Synthetic oligonucleotide
gtctcttacaatgacgccagcgtccgtagaaatgaagggaaagaaacctcctattgattt

SEQ ID NO: 90584 - DNA, 60 bp, Artificial
  Synthetic oligonucleotide
aatgtcgctgtttggagacacaattgcctacctgctttcactaacagaagatggagaagg

SEQ ID NO: 90585 - DNA, 51 bp, Artificial
  Synthetic oligonucleotide
agatggagaaggcaaagcagaactagcagaaaaattacactgttggttcgg

SEQ ID NO: 90586 - DNA, 60 bp, Artificial
  Synthetic oligonucleotide
taaaatgtcgctgtttggagacacaattgcctacctgctttcattgacagaagatggaga

SEQ ID NO: 90587 - DNA, 60 bp, Artificial
  Synthetic oligonucleotide
taaaatgtcgctgtttggagacacaattgcctacctgctttcattgacagaagatgggga

SEQ ID NO: 90588 - DNA, 60 bp, Artificial
  Synthetic oligonucleotide
aaaatgtcgctgtttggagacacaattgcctacctgctttcactaacagaagatggagaa

SEQ ID NO: 90589 - DNA, 60 bp, Artificial
  Synthetic oligonucleotide
atgagggagttgctgtcaggactggactatgaagctagatgcatatcacaatcagggtgg

SEQ ID NO: 90590 - DNA, 60 bp, Artificial
  Synthetic oligonucleotide
gggagttgctgtcaggactggactatgaagctagatgcatatcacaatcagggtgggtga

SEQ ID NO: 90591 - DNA, 60 bp, Artificial
  Synthetic oligonucleotide
aatgagggagttgctgtcaggactggactatgaagctagatgcatatcacaatcagggtg

SEQ ID NO: 90592 - DNA, 60 bp, Artificial
  Synthetic oligonucleotide
tgtcaggactggactatgaagctagatgcatatcacaatcagggtgggtgaatgaaacca

SEQ ID NO: 90593 - DNA, 60 bp, Artificial
  Synthetic oligonucleotide
atgatagctatttttattgtttatatggtctccagagacaatgtttcttgctccatctgt

SEQ ID NO: 90594 - DNA, 60 bp, Artificial
  Synthetic oligonucleotide
ccttactacacaggggaacatgcaaaggccataggaaattgcccaatatgggtgaaaaca

SEQ ID NO: 90595 - DNA, 60 bp, Artificial
  Synthetic oligonucleotide
aatgaaggcaataattgtactactcatggtagtaacatccaatgcagaccgaatctgcac

SEQ ID NO: 90596 - DNA, 60 bp, Artificial
  Synthetic oligonucleotide
aatgaaggcaataattgtactactcatggtagtaacatccaacgcagatcgaatctgcac

SEQ ID NO: 90597 - DNA, 60 bp, Artificial
  Synthetic oligonucleotide
ggcaataattgtactactcatggtagtaacatccaacgcagatcgaatctgcactgggat

SEQ ID NO: 90598 - DNA, 60 bp, Artificial
  Synthetic oligonucleotide
gaaggcaataattgtactactcatggtagtaacatccaacgcagatcgaatctgcactgg

SEQ ID NO: 90599 - DNA, 60 bp, Artificial
  Synthetic oligonucleotide
caggagaacatgcaaaagccataggaaattgcccaatatgggtgaaaacacctttgaagc

SEQ ID NO: 90600 - DNA, 60 bp, Artificial
  Synthetic oligonucleotide
gaacatgcaaaagccataggaaattgcccaatatgggtgaaaacacctttaaagcttgcc

SEQ ID NO: 90601 - DNA, 60 bp, Artificial
  Synthetic oligonucleotide
cacaaaatgaaggcaataattgtactactcatggtagtaacatccaacgcagatcgaatc

SEQ ID NO: 90602 - DNA, 60 bp, Artificial
  Synthetic oligonucleotide
acgtccaaaaactggcagaagagctgcaaagcaacatcggagtactgagatctcttgggg

SEQ ID NO: 90603 - DNA, 60 bp, Artificial
  Synthetic oligonucleotide
acgtccaaaaactggcagaagagctgcaaagcaatattggagtattgagatctcttgggg

SEQ ID NO: 90604 - DNA, 60 bp, Artificial
  Synthetic oligonucleotide
gaaaacgtcaacaaaagccagattgagaacagaatcctcttttgcacctagaacatggga

SEQ ID NO: 90605 - DNA, 60 bp, Artificial
  Synthetic oligonucleotide
gagtagaaaagaatcaggaggaggtgtgacaaaagaatcagctgaaaaagggtttgaaaa

SEQ ID NO: 90606 - DNA, 60 bp, Artificial
  Synthetic oligonucleotide
gactgacatcaaactgaatttccagaaaaacatttatgaattggcttcacaatcacattg

SEQ ID NO: 90607 - DNA, 60 bp, Artificial
  Synthetic oligonucleotide
gcccaaagctggagcctctgtcttgaatcaaagtacatggattggctttggagattcaag

SEQ ID NO: 90608 - DNA, 60 bp, Artificial
  Synthetic oligonucleotide
aagaatacctccttcctcccaaatttggaagatgccccttggctgcaaaggaagaatcaa

SEQ ID NO: 90609 - DNA, 60 bp, Artificial
  Synthetic oligonucleotide
cagcccttttacggaagaatacctccttcctcccaaatttggaagatgccccttggctgc

SEQ ID NO: 90610 - DNA, 60 bp, Artificial
  Synthetic oligonucleotide
ggactggactatgaagctagatgcatatcacaatcagggtgggtgaatgaaaccagccct

SEQ ID NO: 90611 - DNA, 60 bp, Artificial
  Synthetic oligonucleotide
tcaaactgaatttccagaaaaacatttatgaattggcttcacaatcacattgcatgagct

SEQ ID NO: 90612 - DNA, 60 bp, Artificial
  Synthetic oligonucleotide
ggctatctgctcgggagtagaaaagaatcaggaggaggtgtgacaaaagaatcagctgaa

SEQ ID NO: 90613 - DNA, 60 bp, Artificial
  Synthetic oligonucleotide
aagaatcaggaggaggtgtgacaaaagaatcagctgaaaaagggtttgagaaaattggaa

SEQ ID NO: 90614 - DNA, 60 bp, Artificial
  Synthetic oligonucleotide
agcttgttaagcccaaagctggagcctctgtcttgaatcaaagtacatggattggctttg

SEQ ID NO: 90615 - DNA, 60 bp, Artificial
  Synthetic oligonucleotide
caggaattggaggctatctgcttggaagtagaaaagaatcaggaggaggtgtgacaaaag

SEQ ID NO: 90616 - DNA, 51 bp, Artificial
  Synthetic oligonucleotide
caaagaaaatgttcagaacatgtctggatttaacttcgaggtaatggtgcc

SEQ ID NO: 90617 - DNA, 53 bp, Artificial
  Synthetic oligonucleotide
tacaaagaaaatgttcagaacatgtctggatttaacttcgaggtaatggtgcc

SEQ ID NO: 90618 - DNA, 60 bp, Artificial
  Synthetic oligonucleotide
ctggggaggatggtacctcaagtacgtcaggtatgctggacctcttgcgggatcaagtgg

SEQ ID NO: 90619 - DNA, 60 bp, Artificial
  Synthetic oligonucleotide
acaggtggcttctttcctgtcggactcaaaggttcctggggaggatggtacctcaagtac

SEQ ID NO: 90620 - DNA, 60 bp, Artificial
  Synthetic oligonucleotide
gcctagcgtctaccatagtgatgggtgcactggttcagcagcgaggttctggaaacggga

SEQ ID NO: 90621 - DNA, 60 bp, Artificial
  Synthetic oligonucleotide
tacgagaagcctagcgtctaccatagtgatgggtgcactggttcagcagcgaggttctgg

SEQ ID NO: 90622 - DNA, 60 bp, Artificial
  Synthetic oligonucleotide
ccaggtgaagggtcctgcgaacttgcctctgaaaacatggattttccaagttgtcctctg

SEQ ID NO: 90623 - DNA, 60 bp, Artificial
  Synthetic oligonucleotide
ggtgaagggtcctgcgaacttgcctctgaaaacatggattttccaagttgtcctctgggg

SEQ ID NO: 90624 - DNA, 60 bp, Artificial
  Synthetic oligonucleotide
tacgagaagcctagcgtctaccatagtgatgggtgcactgggtcagcagcgaggttctgg

SEQ ID NO: 90625 - DNA, 60 bp, Artificial
  Synthetic oligonucleotide
ctggggaatggagatgacttctgtctgtcgctggcgctaagcacaatgagatggtctggg

SEQ ID NO: 90626 - DNA, 60 bp, Artificial
  Synthetic oligonucleotide
ttgtcctctggggaatggagatgacttctgtctgtcgctggcgctaagcacaatgagatg

SEQ ID NO: 90627 - DNA, 60 bp, Artificial
  Synthetic oligonucleotide
gttcattgtacaccagtgatgatctggtcgtatggaaatttgtccaagaaaagccatcac

SEQ ID NO: 90628 - DNA, 60 bp, Artificial
  Synthetic oligonucleotide
attggaagttttgttcattgtacaccagtgatgatctggtcgtatggaaatttgtccaag

SEQ ID NO: 90629 - DNA, 60 bp, Artificial
  Synthetic oligonucleotide
gcctagcgtctaccatagtgatgggtgcactgggtcagcagcgaggttctggaaacggga

SEQ ID NO: 90630 - DNA, 60 bp, Artificial
  Synthetic oligonucleotide
gggctggacttcacttcagaatgtgattggttgaaaacttgttatgtaaacaagaatttt

SEQ ID NO: 90631 - DNA, 60 bp, Artificial
  Synthetic oligonucleotide
ggctggacttcacttcagaatgtgattggttgaaaacttgttatgtaaacaagaattttg

SEQ ID NO: 90632 - DNA, 60 bp, Artificial
  Synthetic oligonucleotide
ccagggttgtatccatggttgaaatggacggagacggcttatcgttcatctacgagaagc

SEQ ID NO: 90633 - DNA, 60 bp, Artificial
  Synthetic oligonucleotide
actgaacggaattatagaccagatcaacaaggtgaacctgctgctagaaggagaaattga

SEQ ID NO: 90634 - DNA, 60 bp, Artificial
  Synthetic oligonucleotide
ggaattatagaccagatcaacaaggtgaacctgctgctagaaggagaaattgaagcagtg

SEQ ID NO: 90635 - DNA, 60 bp, Artificial
  Synthetic oligonucleotide
ttggggatcggaggtgcttggtttcaagcttatttgaatggagaagtccaaggagacggt

SEQ ID NO: 90636 - DNA, 60 bp, Artificial
  Synthetic oligonucleotide
cttggggatcggaggtgcttggtttcaagcttatttgaatgaagaagtccaaggagacgg

SEQ ID NO: 90637 - DNA, 60 bp, Artificial
  Synthetic oligonucleotide
aacggaaagaattaagactggaaaggtggacttggatagctgttgcactcagcatggatg

SEQ ID NO: 90638 - DNA, 60 bp, Artificial
  Synthetic oligonucleotide
aacggaaaggattaagactggaaaggtggacttggatagctgttgcactcagcatggatg

SEQ ID NO: 90639 - DNA, 60 bp, Artificial
  Synthetic oligonucleotide
ggaattatagaccagatcaacaaggtgaacctgctgctagaaggagaaattgaagcggtg

SEQ ID NO: 90640 - DNA, 60 bp, Artificial
  Synthetic oligonucleotide
gtctgcagaaccaagtggagattggactgataggggaatatctgaacattagcagctggt

SEQ ID NO: 90641 - DNA, 60 bp, Artificial
  Synthetic oligonucleotide
ggtgtctccttttggtggtgagcatgacatctccaaatgtgggaggaaaggattaaaagt

SEQ ID NO: 90642 - DNA, 60 bp, Artificial
  Synthetic oligonucleotide
aaaggattaaaagttttcatctgcggaggtacaacaggttatgtaaccagaggatgtcca

SEQ ID NO: 90643 - DNA, 60 bp, Artificial
  Synthetic oligonucleotide
ttcatctgcggaggtacaacaggttatgtaaccagaggatgtccaccggaggaatgcagg

SEQ ID NO: 90644 - DNA, 60 bp, Artificial
  Synthetic oligonucleotide
aggatgtccaccggaggaatgcagggggaggaaaggaaggatgatgtctctagaaccaac

SEQ ID NO: 90645 - DNA, 60 bp, Artificial
  Synthetic oligonucleotide
gacagagaccatcacggaaagccctgctctggcagaatggaccacttcccgaagcagact

SEQ ID NO: 90646 - DNA, 60 bp, Artificial
  Synthetic oligonucleotide
cgcagacgttgtttgaagcaatccagggcacccagatggagaactgtgcagtgaaggctg

SEQ ID NO: 90647 - DNA, 60 bp, Artificial
  Synthetic oligonucleotide
cgcagacgttgtttgaagcaatccagggcacccaaatggagaactgtgcagtgaaggctg

SEQ ID NO: 90648 - DNA, 60 bp, Artificial
  Synthetic oligonucleotide
tgaaggtgtctccttttggtggtgagcatgacatctccaaatgtgggaggaaaggattaa

SEQ ID NO: 90649 - DNA, 60 bp, Artificial
  Synthetic oligonucleotide
gcctgcagaaccaagtggaaattggactgataggggaatatctgaacattagcagctggc

SEQ ID NO: 90650 - DNA, 60 bp, Artificial
  Synthetic oligonucleotide
aatatctgaacattagcagctggttggaaaccaaaacattgacgaagacagaggagggtc

SEQ ID NO: 90651 - DNA, 60 bp, Artificial
  Synthetic oligonucleotide
tgctgtggatttaccttggggatcggaggtgcttggtttcaagcttatttgaatgaagaa

SEQ ID NO: 90652 - DNA, 60 bp, Artificial
  Synthetic oligonucleotide
tgctgtggatttactttggggatcggaggtgcttggtttcaagcttatttgaatggagaa

SEQ ID NO: 90653 - DNA, 60 bp, Artificial
  Synthetic oligonucleotide
gcagctggttggaaaccaaaacattgacgaagacagaggagggtcttatgaaggacggtt

SEQ ID NO: 90654 - DNA, 60 bp, Artificial
  Synthetic oligonucleotide
aatatctgaacattagcagctggctggaaaccaaaacattgacgaagacagaggagggtc

SEQ ID NO: 90655 - DNA, 60 bp, Artificial
  Synthetic oligonucleotide
ctgttggaatccctactataggttatgtcgacaatattaaggaggtgacagggacgagtt

SEQ ID NO: 90656 - DNA, 60 bp, Artificial
  Synthetic oligonucleotide
gtgtcctcctgatactgttggaatccctactataggttatgtcgacaatattaaggaagt

SEQ ID NO: 90657 - DNA, 52 bp, Artificial
  Synthetic oligonucleotide
acattatcgttggactgattgtagttgtgttggtggtgctgggacttaagct

SEQ ID NO: 90658 - DNA, 60 bp, Artificial
  Synthetic oligonucleotide
tgttggaatccctactataggttatgtcgacaatattaaggaagtgacagggacgagttg

SEQ ID NO: 90659 - DNA, 60 bp, Artificial
  Synthetic oligonucleotide
gaggagggtcttatgaaggacggttggtgccggtctagcaatcattgctggtgtcctcct

SEQ ID NO: 90660 - DNA, 60 bp, Artificial
  Synthetic oligonucleotide
gcagctggctggaaaccaaaacattgacgaagacagaggagggtcttatgaaggacggtt

SEQ ID NO: 90661 - DNA, 60 bp, Artificial
  Synthetic oligonucleotide
gtgtcctcctgatactgttggaatccctactataggttatgtcgacaatattaaggaggt

SEQ ID NO: 90662 - DNA, 60 bp, Artificial
  Synthetic oligonucleotide
ggagggtcttatgaaggacggttggtgccggtctagcaatcattgctggtgtcctcctga

SEQ ID NO: 90663 - DNA, 58 bp, Artificial
  Synthetic oligonucleotide
ccaacctcgctgaccagcatggatggtctaaatacagcttcaacctgagagcattccc

SEQ ID NO: 90664 - DNA, 58 bp, Artificial
  Synthetic oligonucleotide
ccaacctcgctaaccagcatggatggtctaaatacagcttcaacctgagagcattccc

SEQ ID NO: 90665 - DNA, 60 bp, Artificial
  Synthetic oligonucleotide
gctagggttcgctagaactagttcttttacactaagagccaacctcgctgaccagcatgg

SEQ ID NO: 90666 - DNA, 60 bp, Artificial
  Synthetic oligonucleotide
gctagggttcgctagaactagttcttttacactaagagccaacctcgctaaccagcatgg

SEQ ID NO: 90667 - DNA, 60 bp, Artificial
  Synthetic oligonucleotide
tgtaccagacaggctagggttcgctagaactagttcttttacactaagagccaacctcgc

SEQ ID NO: 90668 - DNA, 60 bp, Artificial
  Synthetic oligonucleotide
ggatgtacaaaagggattagggtggaggttccatcgcctgtactggtatcggccaaatgc

SEQ ID NO: 90669 - DNA, 60 bp, Artificial
  Synthetic oligonucleotide
agcatggatgtacaaaagggattagggtggaggttccatcgcctgtactggtatcggcca

SEQ ID NO: 90670 - DNA, 60 bp, Artificial
  Synthetic oligonucleotide
gactggaaaggtggacttggatagctgttgcactcagcatggatgtacaaaagggattag

SEQ ID NO: 90671 - DNA, 60 bp, Artificial
  Synthetic oligonucleotide
acaattcctaggactggttatgttaggagtgctcctggaggtgtactattgacagagacc

SEQ ID NO: 90672 - DNA, 60 bp, Artificial
  Synthetic oligonucleotide
tattgacagagaccatcacggaaagccctgctctggcagaatggaccacttcccgaagca

SEQ ID NO: 90673 - DNA, 60 bp, Artificial
  Synthetic oligonucleotide
aaagaggttctttgtgagccttgtacctgtgacaacccaacatgtctaggtttaacaatt

SEQ ID NO: 90674 - DNA, 60 bp, Artificial
  Synthetic oligonucleotide
ggttctttgtgagccttgtacctgtgacaacccaacatgtctaggtttaacaattcctag

SEQ ID NO: 90675 - DNA, 60 bp, Artificial
  Synthetic oligonucleotide
tttaacaattcctaggactggttatgttaggagtgctcctggaggtgtactattgacaga

SEQ ID NO: 90676 - DNA, 60 bp, Artificial
  Synthetic oligonucleotide
aaagaggttctttgtgaaccttgtacctgtgacaacccaacatgtctaggtttaacaatt

SEQ ID NO: 90677 - DNA, 60 bp, Artificial
  Synthetic oligonucleotide
ggttctttgtgaaccttgtacctgtgacaacccaacatgtctaggtttaacaattcctag

SEQ ID NO: 90678 - DNA, 59 bp, Artificial
  Synthetic oligonucleotide
accttttacaagatggtaagagatgataaaaccatctacttcagtcctataagaattac

SEQ ID NO: 90679 - DNA, 60 bp, Artificial
  Synthetic oligonucleotide
tcacattatgattggacattcacagatgaacgatgtctgtttccaaagatcaaaggcact

SEQ ID NO: 90680 - DNA, 60 bp, Artificial
  Synthetic oligonucleotide
ataatgattgggcattcacaaatgaacgatgtctgtttccaaagatcaaaggcactaaaa

SEQ ID NO: 90681 - DNA, 60 bp, Artificial
  Synthetic oligonucleotide
ataatgattgggcattcacagatgaacgatgtctgtttccaaagatcaaaggcactaaaa

SEQ ID NO: 90682 - DNA, 60 bp, Artificial
  Synthetic oligonucleotide
tccccttggaatacaagggaatacaacttaaaacaaatgctgaagacataggaaccaaag

SEQ ID NO: 90683 - DNA, 60 bp, Artificial
  Synthetic oligonucleotide
ttggaacacaagggaatacaacttaaaacaaatgctgaagacataggaacaaaaggccaa

SEQ ID NO: 90684 - DNA, 60 bp, Artificial
  Synthetic oligonucleotide
ttggaatacaagggaatacaacttaaaacaaatgctgaagacataggaactaaaggccaa

SEQ ID NO: 90685 - DNA, 60 bp, Artificial
  Synthetic oligonucleotide
gtctcctacaatgacgccagcgtccgtagaaatgaagggaaagaaacctcctattgattt

SEQ ID NO: 90686 - DNA, 60 bp, Artificial
  Synthetic oligonucleotide
gctagaagaactgaaaaatgctactttattccaagttactaaagtagacgacagggattg

SEQ ID NO: 90687 - DNA, 54 bp, Artificial
  Synthetic oligonucleotide
tgggctggtctaatggaaaaagccaaggcaatgggagacccaactgaagaggaa

SEQ ID NO: 90688 - DNA, 60 bp, Artificial
  Synthetic oligonucleotide
caatagaagaagttgaaacaggaggagatccctccttttcagtaagaagtgaaggaggat

SEQ ID NO: 90689 - DNA, 60 bp, Artificial
  Synthetic oligonucleotide
gctaagagagggaacgatcgtgctaatgcaaatagggaaagacaagtggctttgcagagt

SEQ ID NO: 90690 - DNA, 60 bp, Artificial
  Synthetic oligonucleotide
gcaatatcaagtccgttcgatgtggaatacgatgatggatacgttttcacgaggatgaaa

SEQ ID NO: 90691 - DNA, 60 bp, Artificial
  Synthetic oligonucleotide
gttgacacttgtcaagaacacgtcaatagacaggatgcagccggactctgctatgatggg

SEQ ID NO: 90692 - DNA, 60 bp, Artificial
  Synthetic oligonucleotide
gaacacgtcaatagacaggatgcagccggactctgctatgatggggaagatggtgctgga

SEQ ID NO: 90693 - DNA, 60 bp, Artificial
  Synthetic oligonucleotide
tattgtgtttcagagaaggtcaaggaacattcttcagcggaagaggaaattggtcaggac

SEQ ID NO: 90694 - DNA, 60 bp, Artificial
  Synthetic oligonucleotide
caacatgtctcagaaggtggtgatgggagctagcgtcatcggatggggccaactgaacca

SEQ ID NO: 90695 - DNA, 60 bp, Artificial
  Synthetic oligonucleotide
gtccgttcgatgtggaatacgatgatggatacgttttcacgaggatgaaagggaactttg

SEQ ID NO: 90696 - DNA, 60 bp, Artificial
  Synthetic oligonucleotide
aaccccaagacactacaggaaacacttctggtaggggcaccatgcccctcaacggaacca

SEQ ID NO: 90697 - DNA, 60 bp, Artificial
  Synthetic oligonucleotide
cagccaagatcaatatgtctcagaaggtggtgatgggagctagcgtcatcggatggggcc

SEQ ID NO: 90698 - DNA, 53 bp, Artificial
  Synthetic oligonucleotide
tggtcaggactgatggaaaaatgtctggttgagatgagactgtgtccgtgctt

SEQ ID NO: 90699 - DNA, 60 bp, Artificial
  Synthetic oligonucleotide
caaggctggtctctagtttgaaaggactaaaaaaccttctacctggggtaaaccccaaga

SEQ ID NO: 90700 - DNA, 60 bp, Artificial
  Synthetic oligonucleotide
gtttcagagaaggtcaaggaacattcttcagcggaagaggaaattggtcaggactgatgg

SEQ ID NO: 90701 - DNA, 60 bp, Artificial
  Synthetic oligonucleotide
ctaagaatggactttatatcagaaaacacgatcagcgacaaaaccacgctagaagaactg

SEQ ID NO: 90702 - DNA, 60 bp, Artificial
  Synthetic oligonucleotide
ctttgcagagtaagaacaggggacagaagagttaggacagacacagacatacaaagagcc

SEQ ID NO: 90703 - DNA, 60 bp, Artificial
  Synthetic oligonucleotide
aagtggctttgcagagtaagaacaggggacagaagagttaggacagacacagacatacaa

SEQ ID NO: 90704 - DNA, 60 bp, Artificial
  Synthetic oligonucleotide
atcggatctggacaattttcctgaaccatcagcagatgaactgctaagagagggaacgat

SEQ ID NO: 90705 - DNA, 60 bp, Artificial
  Synthetic oligonucleotide
atggactttatatcagaaaacacgatcagcgacaaaaccacgttagaagaactgaaaaat

SEQ ID NO: 90706 - DNA, 60 bp, Artificial
  Synthetic oligonucleotide
atgaactgctaagagagggaacgatcgtgctaatgcaaatagggaaagacaagtggcttt

SEQ ID NO: 90707 - DNA, 60 bp, Artificial
  Synthetic oligonucleotide
acgatggaaagcctcaaacaacaacttcaaggacctgtcggaatctggagagcttcaggg

SEQ ID NO: 90708 - DNA, 60 bp, Artificial
  Synthetic oligonucleotide
gcctcaaacaacaacttcaaggacctgtcggaatctggagagcttcaggggtgtctgcta

SEQ ID NO: 90709 - DNA, 60 bp, Artificial
  Synthetic oligonucleotide
aaatgctactttattccaagttactaaagtagacgacagggattgtctaaaagcaagaag

SEQ ID NO: 90710 - DNA, 60 bp, Artificial
  Synthetic oligonucleotide
gaaggggaacttagaagtagttagggagaaaggagatgatactagtcagtcaggctcttt

SEQ ID NO: 90711 - DNA, 60 bp, Artificial
  Synthetic oligonucleotide
caggctctttttacgaaggagttttgcaagtgggtagcatgataggcacaacgatggaaa

SEQ ID NO: 90712 - DNA, 60 bp, Artificial
  Synthetic oligonucleotide
cgagggagttttgcaagtgggtagcatgataggcacaacgatggaaagcctcaaacaaca

SEQ ID NO: 90713 - DNA, 60 bp, Artificial
  Synthetic oligonucleotide
agggagttttgcaagtgggtagcatgataggcacaacgatggaaagcctcaaacaacaac

SEQ ID NO: 90714 - DNA, 60 bp, Artificial
  Synthetic oligonucleotide
gaagtgaaggaggatcgaagattgaaggaagaattgcattctctctccattcagaagtgt

SEQ ID NO: 90715 - DNA, 60 bp, Artificial
  Synthetic oligonucleotide
aggagtgaaggaggatcgaagattgaaggaagaattgcattctctctccattcagaagtg

SEQ ID NO: 90716 - DNA, 60 bp, Artificial
  Synthetic oligonucleotide
gtctaagagcaagaagaatatgtaatgcacctaaagggcactgggctggtctaatggaaa

SEQ ID NO: 90717 - DNA, 60 bp, Artificial
  Synthetic oligonucleotide
cagggattgtctaaaagcaagaagaatatgtaatgcacctaaagggcactgggctggtct

SEQ ID NO: 90718 - DNA, 60 bp, Artificial
  Synthetic oligonucleotide
aaactggctaaatacgagtacatgggagagaacttgttgacacttgtcaagaacacgtca

SEQ ID NO: 90719 - DNA, 60 bp, Artificial
  Synthetic oligonucleotide
atagcactggagcaaaaactggctaaatacgagtacatgggagagaacttgttgacactt

SEQ ID NO: 90720 - DNA, 60 bp, Artificial
  Synthetic oligonucleotide
taaaaaagcagacagatcggatctggacaattttcctgaaccatcagcagatgaactgct

SEQ ID NO: 90721 - DNA, 60 bp, Artificial
  Synthetic oligonucleotide
tggtttcacttcagaagctaacaaaagagcactcaccaacatctcaggaacaggttacta

SEQ ID NO: 90722 - DNA, 60 bp, Artificial
  Synthetic oligonucleotide
ggtagagaagtgtcgaagtacagcttgattattgtcatgagatgctgcattggtttcact

SEQ ID NO: 90723 - DNA, 60 bp, Artificial
  Synthetic oligonucleotide
gtgtcgaagtacagcttgattattgtcatgagatgctgcattggtttcacttcagaagct

SEQ ID NO: 90724 - DNA, 55 bp, Artificial
  Synthetic oligonucleotide
caggttactacattagtgtcgcacagccaacagtggtgaaactagccggagaatg

SEQ ID NO: 90725 - DNA, 60 bp, Artificial
  Synthetic oligonucleotide
tagatccaaaactggtgaggtgcaatatgtttcggccaaactgaagaagggaatgaccac

SEQ ID NO: 90726 - DNA, 60 bp, Artificial
  Synthetic oligonucleotide
agctaacaaaagagcactcaccaacatctcaggaacaggttactacattagtgtcgcaca

SEQ ID NO: 90727 - DNA, 60 bp, Artificial
  Synthetic oligonucleotide
gttgtgagcggaaaactggttatgggtctggacaagatgagcagagtagcgaaggggaac

SEQ ID NO: 90728 - DNA, 60 bp, Artificial
  Synthetic oligonucleotide
gagaagataagtacatgtcaaaggtgtcatacgaatgcagagttgtgagcggaaaactgg

SEQ ID NO: 90729 - DNA, 60 bp, Artificial
  Synthetic oligonucleotide
gatcaacatgtctcagaaggtggtgatgggagctagcgtcatcggatggggccaactgaa

SEQ ID NO: 90730 - DNA, 60 bp, Artificial
  Synthetic oligonucleotide
aagactacccagataagaagagtctgtacgaaaaggcaaccttcgaagccaaacagatag

SEQ ID NO: 90731 - DNA, 60 bp, Artificial
  Synthetic oligonucleotide
caagagagagagaagataagtacatgtcaaaggtgtcatacgaatgcagagttgtgagcg

SEQ ID NO: 90732 - DNA, 60 bp, Artificial
  Synthetic oligonucleotide
aagagtgaacacagacggtgagatcggagataaaggaatatcgctactcacaagagagag

SEQ ID NO: 90733 - DNA, 60 bp, Artificial
  Synthetic oligonucleotide
gtctcctacaatgacgccagcgtccgtagaaatgaagggaaagaaacttcccattgattt

SEQ ID NO: 90734 - DNA, 60 bp, Artificial
  Synthetic oligonucleotide
gctactgttgttacaggtggcttctttcctgtcgggctcaaaggttcctggggaggatgg

SEQ ID NO: 90735 - DNA, 60 bp, Artificial
  Synthetic oligonucleotide
aggaatgactaggagaaacaacttcatggacagattcattggaagctttgttcactgtac

SEQ ID NO: 90736 - DNA, 60 bp, Artificial
  Synthetic oligonucleotide
gtcaggaatgactaggagaaacaacttcatggacagattcattggaagctttgttcactg

SEQ ID NO: 90737 - DNA, 60 bp, Artificial
  Synthetic oligonucleotide
ggagaaacaacttcatggacagattcattggaagctttgttcactgtacaccagtcatga

SEQ ID NO: 90738 - DNA, 60 bp, Artificial
  Synthetic oligonucleotide
atgagatggtcaggaatgactaggagaaacaacttcatggacagattcattggaagcttt

SEQ ID NO: 90739 - DNA, 60 bp, Artificial
  Synthetic oligonucleotide
atgagatggtcgggaatgactaggagaaacaacttcatggacagattcattggaagcttt

SEQ ID NO: 90740 - DNA, 60 bp, Artificial
  Synthetic oligonucleotide
gtcgggaatgactaggagaaacaacttcatggacagattcattggaagctttgttcactg

SEQ ID NO: 90741 - DNA, 60 bp, Artificial
  Synthetic oligonucleotide
gatggtctgggatgaccaagagaaacaacttcatggacagattcattggaagttttgttc

SEQ ID NO: 90742 - DNA, 60 bp, Artificial
  Synthetic oligonucleotide
cttgctactgttgttacaggtggcttctttcctgtcgggctcaaaggttcctggggagga

SEQ ID NO: 90743 - DNA, 60 bp, Artificial
  Synthetic oligonucleotide
cttgctactgttgttacaggtggcttctttcctgtcggactcaaaggttcctggggagga

SEQ ID NO: 90744 - DNA, 60 bp, Artificial
  Synthetic oligonucleotide
caatgagatggtctgggatgaccaagagaaacaacttcatggacagattcattggaagtt

SEQ ID NO: 90745 - DNA, 60 bp, Artificial
  Synthetic oligonucleotide
cagatcccagagtggactcaggaaagtggccaaaatatactgtatttagaattggttcct

SEQ ID NO: 90746 - DNA, 60 bp, Artificial
  Synthetic oligonucleotide
gtacagatcccagagtggactcaggaaagtggccaaaatatactgtatttagaattggtt

SEQ ID NO: 90747 - DNA, 60 bp, Artificial
  Synthetic oligonucleotide
gccgaaatagcagaggcttttctagagccagaagctgtaagaatagccaaagaagcagta

SEQ ID NO: 90748 - DNA, 60 bp, Artificial
  Synthetic oligonucleotide
gctgctgattttcttaggaaagaaaacatgtttaacgaaatcttcttaccagacaatgaa

SEQ ID NO: 90749 - DNA, 60 bp, Artificial
  Synthetic oligonucleotide
atgtcaaaaacttttgccgaaatagcagaggcttttctagagccagaagctgtaagaata

SEQ ID NO: 90750 - DNA, 60 bp, Artificial
  Synthetic oligonucleotide
gtatcggccaaatgcaatgaaatttcattcagagtagtgccgttccattttgtaccagac

SEQ ID NO: 90751 - DNA, 60 bp, Artificial
  Synthetic oligonucleotide
gaaccaagcctcaagcctgcagaaccaagtggaaattggactgataggggaatatctgaa

SEQ ID NO: 90752 - DNA, 59 bp, Artificial
  Synthetic oligonucleotide
atgaaatttcattcagagtagtgccgttccattttgtaccagacaggctagggttcgct

SEQ ID NO: 90753 - DNA, 60 bp, Artificial
  Synthetic oligonucleotide
agaccagatgatggaagcataacagggccttgcgaatctaatggggacaaagggcgtgga

SEQ ID NO: 90754 - DNA, 60 bp, Artificial
  Synthetic oligonucleotide
agaccagatgatggaagcataacagggccttgcgaatccaatggggacaaagggcgtgga

SEQ ID NO: 90755 - DNA, 60 bp, Artificial
  Synthetic oligonucleotide
agaccagatgatggaagcataacagggccttgcgaatctaatgggggcaaagggagtgga

SEQ ID NO: 90756 - DNA, 60 bp, Artificial
  Synthetic oligonucleotide
agaccagatgatggaagcataacagggccttgcgaatctaatggggacaaagggagtgga

SEQ ID NO: 90757 - DNA, 60 bp, Artificial
  Synthetic oligonucleotide
agaccagatgatggaagcataacagggccttgcgaatctaatggggaaaaagggcgtgga

SEQ ID NO: 90758 - DNA, 60 bp, Artificial
  Synthetic oligonucleotide
cagaccagatgatggaagcataacagggccttgcgaatctaatggggacaaagggcgtgg

SEQ ID NO: 90759 - DNA, 52 bp, Artificial
  Synthetic oligonucleotide
agtgaacagtagcttcagcctacacaatggcttcggaggaaatttgtatgcc

SEQ ID NO: 90760 - DNA, 51 bp, Artificial
  Synthetic oligonucleotide
gtgaacagtagcttcagcctacacaatggcttcgaaggaaatttgtatgcc

SEQ ID NO: 90761 - DNA, 51 bp, Artificial
  Synthetic oligonucleotide
gtgaacagtagcttcagcctacacaatggcttcggaggaaatttgtatgcc

SEQ ID NO: 90762 - DNA, 60 bp, Artificial
  Synthetic oligonucleotide
gaaaacgtcaacaaaagccaggttgagaacagaatcctcttttgcacctagaacatggga

SEQ ID NO: 90763 - DNA, 60 bp, Artificial
  Synthetic oligonucleotide
cgccagcgtccgtagaaatgaagggaaagaaatttcctattgattttgctccaagcaaca

SEQ ID NO: 90764 - DNA, 60 bp, Artificial
  Synthetic oligonucleotide
ctgcaattgcatcgggggagattgttatcttatgataactgatggctcagcttcagggat

SEQ ID NO: 90765 - DNA, 53 bp, Artificial
  Synthetic oligonucleotide
aagaagatctgtggatgcctcatcgctagacaggtggccggaattgaaacagg

SEQ ID NO: 90766 - DNA, 60 bp, Artificial
  Synthetic oligonucleotide
ctttgatggagaatttgtgtccaatcttgctatggaattgccagctttcactactgcagg

SEQ ID NO: 90767 - DNA, 60 bp, Artificial
  Synthetic oligonucleotide
tttacaagtatgttctttgatggagaatttgtgtccaatcttgctatggaattgccagct

SEQ ID NO: 90768 - DNA, 60 bp, Artificial
  Synthetic oligonucleotide
atggaaatcaacccatatttgatgtttctaaacaacgacgtcacatcgctgatatcaaca

SEQ ID NO: 90769 - DNA, 60 bp, Artificial
  Synthetic oligonucleotide
ggaaatcaacccatatttgatgtttctaaacaacgacgtcacatcgctgatatcaacaac

SEQ ID NO: 90770 - DNA, 60 bp, Artificial
  Synthetic oligonucleotide
aacgacgttacatcgctgatatcaacaacatacccctatacagggccacctccaatgtca

SEQ ID NO: 90771 - DNA, 60 bp, Artificial
  Synthetic oligonucleotide
cgttacatcgctgatatcaacaacatacccctatacagggccacctccaatgtcacatgg

SEQ ID NO: 90772 - DNA, 53 bp, Artificial
  Synthetic oligonucleotide
atgccaacaacctgaggcttatttagcacttttggcttacatcaccaaagact

SEQ ID NO: 90773 - DNA, 60 bp, Artificial
  Synthetic oligonucleotide
ttgaaaaaacatcgaaggttttcaatataccaagaagaaagttttgcaattgtcttgaag

SEQ ID NO: 90774 - DNA, 60 bp, Artificial
  Synthetic oligonucleotide
ggtggtaatgagaagaaagcaaaacttaagactactgttacttctctcaatgccaggatg

SEQ ID NO: 90775 - DNA, 60 bp, Artificial
  Synthetic oligonucleotide
tggtggtaatgagaagaaagcaaaacttaagactactgttacttctctcaatgccaggat

SEQ ID NO: 90776 - DNA, 60 bp, Artificial
  Synthetic oligonucleotide
aagacggtttaatgctgtatgcaagttaattggtataaacatgtctcttgaaaaatcgta

SEQ ID NO: 90777 - DNA, 52 bp, Artificial
  Synthetic oligonucleotide
tggactccaatcttctgatgactttgttctttttgcagttgcttcaaactgg

SEQ ID NO: 90778 - DNA, 57 bp, Artificial
  Synthetic oligonucleotide
gctgtcaacagttcttggagtaagtacattatgttatatggatgaagaactaaaagc

SEQ ID NO: 90779 - DNA, 60 bp, Artificial
  Synthetic oligonucleotide
gacttatgcagtgttgctccagtgcttttctgtaataagtttgtgaaacttggacaagga

SEQ ID NO: 90780 - DNA, 60 bp, Artificial
  Synthetic oligonucleotide
cccaataagggttgaagaaaatgaagcagtagtttcaactcatagcttcagaaccagagc

SEQ ID NO: 90781 - DNA, 60 bp, Artificial
  Synthetic oligonucleotide
atggcccaataagggttgaagaaaatgaagcagtagtttcaactcatagcttcagaacca

SEQ ID NO: 90782 - DNA, 60 bp, Artificial
  Synthetic oligonucleotide
gcttcagaactagagcaaacagaaccctattgaatacagatatgagagcaatgatggcag

SEQ ID NO: 90783 - DNA, 60 bp, Artificial
  Synthetic oligonucleotide
ttcaactcatagcttcagaactagagcaaacagaaccctattgaatacagatatgagagc

SEQ ID NO: 90784 - DNA, 60 bp, Artificial
  Synthetic oligonucleotide
gaaccagagcaaacagaaccctattgaatacagatatgagagcaatgatggcagaagaga

SEQ ID NO: 90785 - DNA, 60 bp, Artificial
  Synthetic oligonucleotide
ttcagaaccagagcaaacagaaccctattgaatacagatatgagagcaatgatggcagaa

SEQ ID NO: 90786 - DNA, 54 bp, Artificial
  Synthetic oligonucleotide
aactattagagagagctaaaatgaaaagagacattggggcaatagaagattcag

SEQ ID NO: 90787 - DNA, 50 bp, Artificial
  Synthetic oligonucleotide
attagagagagctaaaatgaaaagagacattggggcaatagaagattcag

SEQ ID NO: 90788 - DNA, 52 bp, Artificial
  Synthetic oligonucleotide
gatatcaacaacatacccctatacagggccacctccaatgtcacatggatca

SEQ ID NO: 90789 - DNA, 60 bp, Artificial
  Synthetic oligonucleotide
gtcaaaacaatggtgagaagggagaaagataaaagaagtgggaaggagataaaaactaaa

SEQ ID NO: 90790 - DNA, 60 bp, Artificial
  Synthetic oligonucleotide
ggtggtaatgagaagaaagcaaaacttaagaccactgttacttctctcaatgccaggatg

SEQ ID NO: 90791 - DNA, 51 bp, Artificial
  Synthetic oligonucleotide
gtcaaaacaatggtgagaagggagaaagataaaagaagtgggaaggagata

SEQ ID NO: 90792 - DNA, 60 bp, Artificial
  Synthetic oligonucleotide
ctattaataccatggccaaagatggggaaagagggaaattgcaaagaagagcaattgcaa

SEQ ID NO: 90793 - DNA, 60 bp, Artificial
  Synthetic oligonucleotide
ccatggccaaagatggggaaagagggaaattgcaaagaagagcaattgcaacacccggta

SEQ ID NO: 90794 - DNA, 60 bp, Artificial
  Synthetic oligonucleotide
actgtagcacagaaaatatgtgagaaattgaaagaaagcggtctacctgttggtggtaat

SEQ ID NO: 90795 - DNA, 60 bp, Artificial
  Synthetic oligonucleotide
ttgaaaaaacatcgaaagttttcaatataccaagaagaaagttttgcaattgtcttgaag

SEQ ID NO: 90796 - DNA, 60 bp, Artificial
  Synthetic oligonucleotide
ctctagacttacggaaggaagacaaacatatgattggacttctgaaagaaacatgccagc

SEQ ID NO: 90797 - DNA, 60 bp, Artificial
  Synthetic oligonucleotide
gacttacggaaggaagacaaacatatgattggacttctgaaagaaacatgccagcggcca

SEQ ID NO: 90798 - DNA, 60 bp, Artificial
  Synthetic oligonucleotide
gagcgacttatagagtccatccttgggattcaaaagtgaaaggtgggagaatgaaaataa

SEQ ID NO: 90799 - DNA, 60 bp, Artificial
  Synthetic oligonucleotide
gctgatggtgggaaactgatgaacaacattagcacccttcatattcctgaggaagtactg

SEQ ID NO: 90800 - DNA, 60 bp, Artificial
  Synthetic oligonucleotide
gcacatggcccaataagggttgaagaaaatgaagcagtagtttcaactcatagcttcaga

SEQ ID NO: 90801 - DNA, 60 bp, Artificial
  Synthetic oligonucleotide
gcacagaaaatatgtgagaaattgaaagaaagcggtctacctgttggtggtaatgagaag

SEQ ID NO: 90802 - DNA, 60 bp, Artificial
  Synthetic oligonucleotide
tggtggtaatgagaagaaagcaaaacttaagaccactgttacttctctcaatgccaggat

SEQ ID NO: 90803 - DNA, 60 bp, Artificial
  Synthetic oligonucleotide
tttagagcgacttatagagtccatccttgggattcaagagtgaaaggtgggagaatgaaa

SEQ ID NO: 90804 - DNA, 60 bp, Artificial
  Synthetic oligonucleotide
tttagagcgacttatagagtccatccttgggattcaaaagtgaaaggtgggagaatgaaa

SEQ ID NO: 90805 - DNA, 60 bp, Artificial
  Synthetic oligonucleotide
gcttatcaccttctactgctttaatggccttaaggatatgtctccaagaatttagagcga

SEQ ID NO: 90806 - DNA, 60 bp, Artificial
  Synthetic oligonucleotide
ctgctttaatggccttaaggatatgtctccaagaatttagagcgacttatagagtccatc

SEQ ID NO: 90807 - DNA, 60 bp, Artificial
  Synthetic oligonucleotide
gagcgacttatagagtccatccttgggattcaagagtgaaaggtgggagaatgaaaataa

SEQ ID NO: 90808 - DNA, 60 bp, Artificial
  Synthetic oligonucleotide
ttattaattgctgatggtgggaaactgatgaacaacattagcacccttcatattcctgag

SEQ ID NO: 90809 - DNA, 60 bp, Artificial
  Synthetic oligonucleotide
taattgctgatggtgggaaactgatgaacaacattagcacccttcatattcctgaggaag

SEQ ID NO: 90810 - DNA, 60 bp, Artificial
  Synthetic oligonucleotide
gactacccagataagaagagtctgtacgaaaaggcaacgttcgaagccaaacagatagtg

SEQ ID NO: 90811 - DNA, 60 bp, Artificial
  Synthetic oligonucleotide
aagactacccagataagaagagtctgtacgaaaaggcaacgttcgaagccaaacagatag

SEQ ID NO: 90812 - DNA, 60 bp, Artificial
  Synthetic oligonucleotide
catccaacgcagatcgaatctgcactgggataacatcttcaaactcacctcatgtggtca

SEQ ID NO: 90813 - DNA, 60 bp, Artificial
  Synthetic oligonucleotide
gattgcaaccgctggaatacaaatcagagggtttgtattggtagttgaaaacttggctaa

SEQ ID NO: 90814 - DNA, 60 bp, Artificial
  Synthetic oligonucleotide
ggctggtgtcagtctaacacgcactgttggtgtccgcctaaacctacaattgttcccacc

SEQ ID NO: 90815 - DNA, 60 bp, Artificial
  Synthetic oligonucleotide
taatcgaccagataaacaaagtggacacacttcttgaaggagaaattgaagcagtgagga

SEQ ID NO: 90816 - DNA, 60 bp, Artificial
  Synthetic oligonucleotide
agaaactcaacggaataatcgaccagataaacaaagtggacacacttcttgaaggagaaa

SEQ ID NO: 90817 - DNA, 60 bp, Artificial
  Synthetic oligonucleotide
aagacttggcactcagcagcaacagccatttactgtttaatgggctcaggacagttgcta

SEQ ID NO: 90818 - DNA, 50 bp, Artificial
  Synthetic oligonucleotide
gacttggcactcagcagcaacagccatttactgtttaatgggctcaggac

SEQ ID NO: 90819 - DNA, 60 bp, Artificial
  Synthetic oligonucleotide
gagacttggcactcagcagcaacagccatttactgtttaatgggctcaggacagctgctg

SEQ ID NO: 90820 - DNA, 60 bp, Artificial
  Synthetic oligonucleotide
aagacttggcactcagcagcaacagccatttactgtttaatgggctcaggacagttacta

SEQ ID NO: 90821 - DNA, 52 bp, Artificial
  Synthetic oligonucleotide
aagacttggcactcagcagcaacagccatttactgtttaatgggctcaggac

SEQ ID NO: 90822 - DNA, 60 bp, Artificial
  Synthetic oligonucleotide
aagacttggcactcagcagcaacagccatttactgtttaatgggctcaggacaactacta

SEQ ID NO: 90823 - DNA, 60 bp, Artificial
  Synthetic oligonucleotide
aagacttggcactcagcagcaacagccatttactgtttaatgggctcaggacaattgcta

SEQ ID NO: 90824 - DNA, 60 bp, Artificial
  Synthetic oligonucleotide
cgttgaaattccaattaagcagaccatccccaatttcttctttgggagggacacagcaga

SEQ ID NO: 90825 - DNA, 60 bp, Artificial
  Synthetic oligonucleotide
ccgttgaaattccaattaagcaaaccatccccaatttcttctttgggagggacacagcag

SEQ ID NO: 90826 - DNA, 60 bp, Artificial
  Synthetic oligonucleotide
tcccgttgaaattccaattaagcaaaccatccccaatttcttctttgggagggacacagc

SEQ ID NO: 90827 - DNA, 60 bp, Artificial
  Synthetic oligonucleotide
tcctgttgaaattccaattaagcaaaccatccccaatttcttctttgggagggacacagc

SEQ ID NO: 90828 - DNA, 60 bp, Artificial
  Synthetic oligonucleotide
gaaggaattgcaaaggatgtaatggaagtgctgaagcagagctccatgggaaattcagct

SEQ ID NO: 90829 - DNA, 60 bp, Artificial
  Synthetic oligonucleotide
ctgccaagctgaagaaggggatgaccacagggaagctagaattgattaagaaagcagata

SEQ ID NO: 90830 - DNA, 60 bp, Artificial
  Synthetic oligonucleotide
tcacacttgtcaaaaacacttctatagacagaatgcagcctgattctgcaatgatgggga

SEQ ID NO: 90831 - DNA, 60 bp, Artificial
  Synthetic oligonucleotide
tagaacacacacggtatcctctgagcagttgaatgggagaatgattactgtccaatcgca

SEQ ID NO: 90832 - DNA, 60 bp, Artificial
  Synthetic oligonucleotide
cacacacggtatcctctgagcagttgaatgggagaatgattactgtccaatcgcaaggcc

SEQ ID NO: 90833 - DNA, 60 bp, Artificial
  Synthetic oligonucleotide
tccaatcgcaaggcctagaaacaatagcgatatcgagtccttttgatgtggaatacgacg

SEQ ID NO: 90834 - DNA, 60 bp, Artificial
  Synthetic oligonucleotide
aatcggaagagactacaagggagctatcttatgcttcagagaaggacaagggacattctt

SEQ ID NO: 90835 - DNA, 60 bp, Artificial
  Synthetic oligonucleotide
agggaaagttgatgaaacaagaggacccttagaaaggacatcagctcctcttatgagaga

SEQ ID NO: 90836 - DNA, 60 bp, Artificial
  Synthetic oligonucleotide
catgaagagagggcaaagcaaaactgtagtggcaagtgctagatacacattccaaaagat

SEQ ID NO: 90837 - DNA, 60 bp, Artificial
  Synthetic oligonucleotide
catgaggtgctgcattggtttcacgtctgaagctaataagagagctttaactaacatctc

SEQ ID NO: 90838 - DNA, 60 bp, Artificial
  Synthetic oligonucleotide
tcacgtctgaagctaataagagagctttaactaacatctctggaactggatactacatta

SEQ ID NO: 90839 - DNA, 60 bp, Artificial
  Synthetic oligonucleotide
gaagagatggcatctggtagggaagtgtctaaatacagtttgataattgtcatgaggtgc

SEQ ID NO: 90840 - DNA, 60 bp, Artificial
  Synthetic oligonucleotide
ggaagtgtctaaatacagtttgataattgccatgaggtgctgcattggtttcacgtctga

SEQ ID NO: 90841 - DNA, 60 bp, Artificial
  Synthetic oligonucleotide
cagtttgataattgccatgaggtgctgcattggtttcacgtctgaagctaataagagagc

SEQ ID NO: 90842 - DNA, 57 bp, Artificial
  Synthetic oligonucleotide
aaaagagtctctacgaaaaggcaacgttcgaagccaaacagatagtctttgctatgg

SEQ ID NO: 90843 - DNA, 60 bp, Artificial
  Synthetic oligonucleotide
gccaaacagatagtctttgctatgggagaaagtgttggagtatatgtcagagtaaccaca

SEQ ID NO: 90844 - DNA, 60 bp, Artificial
  Synthetic oligonucleotide
caagggagctatcttatgcttcagagaaggacaagggacattcttcagtgggagaggcaa

SEQ ID NO: 90845 - DNA, 60 bp, Artificial
  Synthetic oligonucleotide
ggcaagactaccctgacaaaaagagtctctacgaaaaagcaacgttcgaagccaaacaga

SEQ ID NO: 90846 - DNA, 60 bp, Artificial
  Synthetic oligonucleotide
tacgtcttcacaaggatgaaaggagactttgtggcaatcggaagagactacaagggagct

SEQ ID NO: 90847 - DNA, 60 bp, Artificial
  Synthetic oligonucleotide
gagctttaactaacatctctggaactggatactacattagtgttgcacaacctaccgtag

SEQ ID NO: 90848 - DNA, 60 bp, Artificial
  Synthetic oligonucleotide
ggcctagaaacaatagcgatatcgagtccttttgatgtggaatacgacgatggatacgtc

SEQ ID NO: 90849 - DNA, 60 bp, Artificial
  Synthetic oligonucleotide
gaatacgacgatggatacgtcttcacaaggatgaaaggagactttgtggcaatcggaaga

SEQ ID NO: 90850 - DNA, 60 bp, Artificial
  Synthetic oligonucleotide
aaagcagatagatctgacttggacaacttcccagaaccgtcggctgatgaactgttgaga

SEQ ID NO: 90851 - DNA, 60 bp, Artificial
  Synthetic oligonucleotide
gacttggacaacttcccagaaccgtcggctgatgaactgttgagagaaggaacaattgtg

SEQ ID NO: 90852 - DNA, 60 bp, Artificial
  Synthetic oligonucleotide
gggaagctagaattgattaagaaagcagatagatctgacttggacaacttcccagaaccg

SEQ ID NO: 90853 - DNA, 60 bp, Artificial
  Synthetic oligonucleotide
agaacaggtgataggagagtgaggaccgacacagacatacagagggcagaagcaaaatct

SEQ ID NO: 90854 - DNA, 60 bp, Artificial
  Synthetic oligonucleotide
cccagaaccgtcggctgatgaactgttgagagaaggaacaattgtgttaatgcaaatcgg

SEQ ID NO: 90855 - DNA, 60 bp, Artificial
  Synthetic oligonucleotide
agcggaccaggcgtttacttcttaagcacgaaagaaatagtgactgcagaagggaaagtt

SEQ ID NO: 90856 - DNA, 60 bp, Artificial
  Synthetic oligonucleotide
gtcatgggagccagtgtgataggatggggacaactgaaccaaagcggaccaggcgtttac

SEQ ID NO: 90857 - DNA, 60 bp, Artificial
  Synthetic oligonucleotide
agaaagttgtcatgggagccagtgtgataggatggggacaactgaaccaaagcggaccag

SEQ ID NO: 90858 - DNA, 60 bp, Artificial
  Synthetic oligonucleotide
gagcttcaatgggatctgccaagataaacatgtctcagaaagttgtcatgggagccagtg

SEQ ID NO: 90859 - DNA, 60 bp, Artificial
  Synthetic oligonucleotide
tagagctgcagtaggagcttcaatgggatctgccaagataaacatgtctcagaaagttgt

SEQ ID NO: 90860 - DNA, 60 bp, Artificial
  Synthetic oligonucleotide
ccccaaaaccctacaagaaaccttactagtaggtgcaccatgtccttcaacagaaccagc

SEQ ID NO: 90861 - DNA, 60 bp, Artificial
  Synthetic oligonucleotide
caccgttacagtcttgggtgtttccaaatcagagggagcaacaggaccgagacttgtgtc

SEQ ID NO: 90862 - DNA, 60 bp, Artificial
  Synthetic oligonucleotide
gtcttataacaccgttacagtcttgggtgtttccaaatcagagggagcaacaggaccgag

SEQ ID NO: 90863 - DNA, 60 bp, Artificial
  Synthetic oligonucleotide
gtgctagatacacattccaaaagatgatggaaaagatggcatctggtagggaagtgtcta

SEQ ID NO: 90864 - DNA, 60 bp, Artificial
  Synthetic oligonucleotide
ccgtagtaaaactagcaggagaatggttgatcacacctgtgggtaggtctaagacagggg

SEQ ID NO: 90865 - DNA, 60 bp, Artificial
  Synthetic oligonucleotide
gcacaacctaccgtagtaaaactagcaggagaatggttgatcacgcctgtgggtaggtct

SEQ ID NO: 90866 - DNA, 60 bp, Artificial
  Synthetic oligonucleotide
tactacattagtgttgcacaacctaccgtagtaaaactagcaggagaatggttgatcacg

SEQ ID NO: 90867 - DNA, 60 bp, Artificial
  Synthetic oligonucleotide
caggggaagttcagtatgtatctgccaagctgaagaaggggatgaccacagggaagctag

SEQ ID NO: 90868 - DNA, 60 bp, Artificial
  Synthetic oligonucleotide
ggtaggtctaagacaggggaagttcagtatgtatctgccaagctgaagaaggggatgacc

SEQ ID NO: 90869 - DNA, 60 bp, Artificial
  Synthetic oligonucleotide
gaggaaaaggaggagttaaagaagatcgtcgagtcttataacaccgttacagtcttgggt

SEQ ID NO: 90870 - DNA, 60 bp, Artificial
  Synthetic oligonucleotide
gttgatcacgcctgtgggtaggtctaggacaggggaagttcagtatgtatctgccaagct

SEQ ID NO: 90871 - DNA, 60 bp, Artificial
  Synthetic oligonucleotide
cagctatggaaaggtgcatgaagagagggcaaagcaaaactgtagtggcaagtgctagat

SEQ ID NO: 90872 - DNA, 60 bp, Artificial
  Synthetic oligonucleotide
ccaagttaccaaagtagacgacagagactgcttgaaggcaagaagaatatgtaacgcacc

SEQ ID NO: 90873 - DNA, 60 bp, Artificial
  Synthetic oligonucleotide
aggcaagaagaatatgtaacgcacctaaaggacactggtctggtctgatagacaaagccc

SEQ ID NO: 90874 - DNA, 60 bp, Artificial
  Synthetic oligonucleotide
atgagcagagtcgcaaaagggaacctagaagtagtgagggaaaaaggagatgacacaagt

SEQ ID NO: 90875 - DNA, 60 bp, Artificial
  Synthetic oligonucleotide
agtcagtcagattccttttatgaaggtgtactacaggtaggtagcatgattgggaccaca

SEQ ID NO: 90876 - DNA, 60 bp, Artificial
  Synthetic oligonucleotide
aaagaagatcgtcgagtcttataacaccgttacagtcttgggtgtttccaaatcagaggg

SEQ ID NO: 90877 - DNA, 60 bp, Artificial
  Synthetic oligonucleotide
gggcaaagcaaaactgtagtggcaagtgctagatacacattccaaaagatgatggaagag

SEQ ID NO: 90878 - DNA, 58 bp, Artificial
  Synthetic oligonucleotide
aattccttcatttggagttgctggagtaaatgaatcagcagatatggcaataggaatg

SEQ ID NO: 90879 - DNA, 60 bp, Artificial
  Synthetic oligonucleotide
ggaatatgggacggagaagaggagttccatgtaagatgtggtgaatgcaggggaatatta

SEQ ID NO: 90880 - DNA, 60 bp, Artificial
  Synthetic oligonucleotide
gatttaataatcttgtgcatggtattttctcaagacactaggatgttccaaggggtgagg

SEQ ID NO: 90881 - DNA, 60 bp, Artificial
  Synthetic oligonucleotide
taataatcttgtgcatggtattttctcaagacactaggatgttccaaggggtgaggggag

SEQ ID NO: 90882 - DNA, 60 bp, Artificial
  Synthetic oligonucleotide
gagatttaataatcttgtgcatggtattttctcaagacactaggatgttccaaggagtga

SEQ ID NO: 90883 - DNA, 61 bp, Artificial
  Synthetic oligonucleotide
gaagacatgaaagatttaataatcttgtgcatggtattttctcaagacactaggatgttcc

SEQ ID NO: 90884 - DNA, 60 bp, Artificial
  Synthetic oligonucleotide
ggaactgtatgtcaagtatgatggagacccatggactgacagtgacgcccttgctcttag

SEQ ID NO: 90885 - DNA, 60 bp, Artificial
  Synthetic oligonucleotide
atggaattgtatgtcaagtatgatggagacccatggactgacagtgacgcccttgctctt

SEQ ID NO: 90886 - DNA, 60 bp, Artificial
  Synthetic oligonucleotide
caacatcctaagaacacaagaaagtgcctgcaattgcattgggggagattgttatcttat

SEQ ID NO: 90887 - DNA, 60 bp, Artificial
  Synthetic oligonucleotide
cagagtggaatacatcaaaagagcattgtcattaaacacaatgacaaaagatgctgaaag

SEQ ID NO: 90888 - DNA, 60 bp, Artificial
  Synthetic oligonucleotide
acttagctaaaaatatctgtgaaaatctagaacaaagtggtttgcccgtaggtggaaatg

SEQ ID NO: 90889 - DNA, 60 bp, Artificial
  Synthetic oligonucleotide
acttggctaaaaatatctgtgaaaatctagaacaaagtggtttgcccgtaggtggaaatg

SEQ ID NO: 90890 - DNA, 60 bp, Artificial
  Synthetic oligonucleotide
acttggctaaaaatatctgtgaaaatctagaacaaagtggtttgccagtaggtggaaacg

SEQ ID NO: 90891 - DNA, 60 bp, Artificial
  Synthetic oligonucleotide
ccattcttcaatgaagaaggaacggcatctttgtcacctggaatgatgatgggaatgttt

SEQ ID NO: 90892 - DNA, 60 bp, Artificial
  Synthetic oligonucleotide
acttggctaaaaatatctgtgaaaatctagaacaaagtggtttaccagtaggtggaaacg

SEQ ID NO: 90893 - DNA, 60 bp, Artificial
  Synthetic oligonucleotide
acttggctaaaaatatctgtgaaaatctagaacaaagtggtttgcctgtaggtggaaatg

SEQ ID NO: 90894 - DNA, 60 bp, Artificial
  Synthetic oligonucleotide
atgaaaacgtcaacaaaagccagattgagaacagaatcctcttttgcacctagaacatgg

SEQ ID NO: 90895 - DNA, 60 bp, Artificial
  Synthetic oligonucleotide
ggaacactctgtgctttgtgcgagaaacaagcatcacattcacacagggctcatagcaga

SEQ ID NO: 90896 - DNA, 60 bp, Artificial
  Synthetic oligonucleotide
ggaacgctttgtgctttgtgcgagaaacaagcatcacattcacacagggctcatagcaga

SEQ ID NO: 90897 - DNA, 60 bp, Artificial
  Synthetic oligonucleotide
aattataaaggagctatgggaaaacactaaaggaagagatggtctattggtagcagatgg

SEQ ID NO: 90898 - DNA, 60 bp, Artificial
  Synthetic oligonucleotide
aactaggaacactctgtgctttgtgcgagaaacaagcatcacactcacacagagctcaca

SEQ ID NO: 90899 - DNA, 60 bp, Artificial
  Synthetic oligonucleotide
gccatacaattgttcatagctgattatagatacacctacaaatgccacaggggagattcc

SEQ ID NO: 90900 - DNA, 60 bp, Artificial
  Synthetic oligonucleotide
aacagaagatggagaaggcaaagcagaactagcagaaaaattacattgttggttcggtgg

SEQ ID NO: 90901 - DNA, 60 bp, Artificial
  Synthetic oligonucleotide
gtctcctacaatgacgccagcgtccgtagaaatgaagggaaagaaacttcctattaattt

SEQ ID NO: 90902 - DNA, 59 bp, Artificial
  Synthetic oligonucleotide
gtctcctacaatgacgccagcgtccgtagaaatgaagggaaagaaacttcccattgatt

SEQ ID NO: 90903 - DNA, 60 bp, Artificial
  Synthetic oligonucleotide
agagaaggcactcaaatcagcaattcagcagtttttgcagtggaaaggaaaataaccaca

SEQ ID NO: 90904 - DNA, 60 bp, Artificial
  Synthetic oligonucleotide
catttgctcaaagatttgctcttcaggcaaatacttcaagagaaggcactcaaatcagca

SEQ ID NO: 90905 - DNA, 60 bp, Artificial
  Synthetic oligonucleotide
cggaattggagttcttatagctgacgcgaaaggtttaataaatggaaagagagaaggcaa

SEQ ID NO: 90906 - DNA, 60 bp, Artificial
  Synthetic oligonucleotide
aaaagcacatcggaattggagttcttatagctgacgcgaaaggtttaataaatggaaaga

SEQ ID NO: 90907 - DNA, 60 bp, Artificial
  Synthetic oligonucleotide
caagatgggcagcatttgctcaaagatttgctcttcaggcaaatacttcaagagaaggca

SEQ ID NO: 90908 - DNA, 60 bp, Artificial
  Synthetic oligonucleotide
agtttcaacagtgctttctcccttattgagattcacaagatgggcagcatttgctcaaag

SEQ ID NO: 90909 - DNA, 60 bp, Artificial
  Synthetic oligonucleotide
tgaaaattcagagatcggacaagccaagaagatgaaacccttggatcaattggccagcac

SEQ ID NO: 90910 - DNA, 60 bp, Artificial
  Synthetic oligonucleotide
cggacaagccaagaagatgaaacccttggatcaattggccagcactagtagcaacattcc

SEQ ID NO: 90911 - DNA, 60 bp, Artificial
  Synthetic oligonucleotide
gagaagagggaaaagaaagcaagagaagcccaaagagcggacagcaacttcaacgcagat

SEQ ID NO: 90912 - DNA, 60 bp, Artificial
  Synthetic oligonucleotide
gatggaaagtatcaagagaagagggaaaagaaagcaagagaagcccaaagagcggacagc

SEQ ID NO: 90913 - DNA, 60 bp, Artificial
  Synthetic oligonucleotide
aataaccacagatgtccaaagagttgaagagctactaaataaagttcaagctcacgaaga

SEQ ID NO: 90914 - DNA, 60 bp, Artificial
  Synthetic oligonucleotide
taaccacagatgtccaaagagttgaagagctactaaataaagttcaagctcacgaagacg

SEQ ID NO: 90915 - DNA, 60 bp, Artificial
  Synthetic oligonucleotide
gggtccggccaaataagttgcagcccagtgtttgcagtagaaagacctattgctctaagc

SEQ ID NO: 90916 - DNA, 60 bp, Artificial
  Synthetic oligonucleotide
gggagcaaccaatgccaccataaactttgaagcaggaattttggagtgctacgaaaggct

SEQ ID NO: 90917 - DNA, 60 bp, Artificial
  Synthetic oligonucleotide
cacaataaaacaggaggcaccttttacaagatggtaagagatgataaaaccatctacttc

SEQ ID NO: 90918 - DNA, 60 bp, Artificial
  Synthetic oligonucleotide
aaacaggaggcaccttttacaagatggtaagagatgataaaaccatctacttcagcccta

SEQ ID NO: 90919 - DNA, 60 bp, Artificial
  Synthetic oligonucleotide
gggcaccttttacaagatggtaagagatgataaaaccatctacttcagccctataagaat

SEQ ID NO: 90920 - DNA, 57 bp, Artificial
  Synthetic oligonucleotide
ggggcaccttttacaagatggtaagagatgataaaaccatctacttcagccctataa

SEQ ID NO: 90921 - DNA, 53 bp, Artificial
  Synthetic oligonucleotide
tacaagatggtaagagatgataaaaccatctacttcagccctataagaattac

SEQ ID NO: 90922 - DNA, 60 bp, Artificial
  Synthetic oligonucleotide
gtctactacaatgacgccagcgtccgtagaaatgaaggggaagaaatttcctattgattt

SEQ ID NO: 90923 - DNA, 60 bp, Artificial
  Synthetic oligonucleotide
gtctcctacaatgacgccagcgtccgtagaaatgaaggggaagaaatttcctattgattt

SEQ ID NO: 90924 - DNA, 60 bp, Artificial
  Synthetic oligonucleotide
atattgccctttctagggagagacttgacctgggagaggatgctcctgacgaaaccgaca

SEQ ID NO: 90925 - DNA, 50 bp, Artificial
  Synthetic oligonucleotide
cacaccagacatccgaataggaacaatcacagcttggttgagatgcaaaa

SEQ ID NO: 90926 - DNA, 55 bp, Artificial
  Synthetic oligonucleotide
cacaccagacatccgaataggaacaatcacagcttggttgagatgcaaaaacaag

SEQ ID NO: 90927 - DNA, 60 bp, Artificial
  Synthetic oligonucleotide
cctttctagggagagacttgacctgggagaggatgctcctgacgaaaccgacaactcacc

SEQ ID NO: 90928 - DNA, 60 bp, Artificial
  Synthetic oligonucleotide
cctttctagggagagacttgacctgggagaggatgctcctgacgaaaccgacatctcacc

SEQ ID NO: 90929 - DNA, 52 bp, Artificial
  Synthetic oligonucleotide
ctttaagatgaatataaatccttattttctcttcatagatgtgcccatacag

SEQ ID NO: 90930 - DNA, 53 bp, Artificial
  Synthetic oligonucleotide
aagaagatctgtggatacctcatcgctaaacaagtggccggaattgaaacagg

SEQ ID NO: 90931 - DNA, 60 bp, Artificial
  Synthetic oligonucleotide
cgctagcgtccgtagaaatgaagggaaagaaacttcctattgattttgctccaagcaaca

SEQ ID NO: 90932 - DNA, 58 bp, Artificial
  Synthetic oligonucleotide
caagttcagcgaaaaggatgagttgcaggggtactatgaggagtgtctggaagcctct

SEQ ID NO: 90933 - DNA, 60 bp, Artificial
  Synthetic oligonucleotide
ttacaaagaaaatgttcagaacatgtctggagtgaacttcgaggtaatggttcctgaaca

SEQ ID NO: 90934 - DNA, 60 bp, Artificial
  Synthetic oligonucleotide
aagaaaatgttcaaaacatgtccggagtgaacttcgaggtaatggttcctgaacaaggtg

SEQ ID NO: 90935 - DNA, 60 bp, Artificial
  Synthetic oligonucleotide
ctcgggaatggagatgacttctgtttgtcactggccctgagcacaatgagatggtcggga

SEQ ID NO: 90936 - DNA, 60 bp, Artificial
  Synthetic oligonucleotide
aatggagatgacttctgtttgtcactggccctgagcacaatgagatggtcaggaatgact

SEQ ID NO: 90937 - DNA, 60 bp, Artificial
  Synthetic oligonucleotide
ggggaggatggtatctcaagtacgtcaggtatgctggacctcttgaaggatcaagtgggt

SEQ ID NO: 90938 - DNA, 60 bp, Artificial
  Synthetic oligonucleotide
agagctggatccagggttgtatccatggttgaaatggacagagacggcgtatcattcatc

SEQ ID NO: 90939 - DNA, 60 bp, Artificial
  Synthetic oligonucleotide
gccctctcgggaatggagatgacttctgtttgtcactggcactgagcacaatgagatggt

SEQ ID NO: 90940 - DNA, 60 bp, Artificial
  Synthetic oligonucleotide
gccctctcgggaatggagatgacttctgtttgtcactggccctgagcacaatgagatggt

SEQ ID NO: 90941 - DNA, 60 bp, Artificial
  Synthetic oligonucleotide
gaaaatgttcaaaacatgtccggagtgaacttcgaggtaatggttcctgaacaaggtgga

SEQ ID NO: 90942 - DNA, 60 bp, Artificial
  Synthetic oligonucleotide
cctgctacggggacgacgaacctgacgaggggtcatgtgaacttgcatctgagaacatgg

SEQ ID NO: 90943 - DNA, 60 bp, Artificial
  Synthetic oligonucleotide
gggatcatgtgtttcctgctacggggacgacgaacctgacgaggggtcatgtgaacttgc

SEQ ID NO: 90944 - DNA, 60 bp, Artificial
  Synthetic oligonucleotide
caagttcagcgaaaaggatgagttgcaggggtactatgaggagtgtctggaagcctctat

SEQ ID NO: 90945 - DNA, 60 bp, Artificial
  Synthetic oligonucleotide
gatgggatcatgtgtttcttgctacggggacgacgaacctgacgaggggtcatgtgaact

SEQ ID NO: 90946 - DNA, 60 bp, Artificial
  Synthetic oligonucleotide
tgtgtttcctgctacggggacgacgaacctgacgaggggtcatgtgaacttgcatctgag

SEQ ID NO: 90947 - DNA, 60 bp, Artificial
  Synthetic oligonucleotide
ccctctcgggaatggagatgacttctgtttgtcactggccctgagcacaatgagatggtc

SEQ ID NO: 90948 - DNA, 60 bp, Artificial
  Synthetic oligonucleotide
ccctctcgggaatggagatgacttctgtttgtcactggcactgagcacaatgagatggtc

SEQ ID NO: 90949 - DNA, 58 bp, Artificial
  Synthetic oligonucleotide
caagttcagcgaaaaggaagagttgcaggggtactatgaggagtgtctggaagcctct

SEQ ID NO: 90950 - DNA, 60 bp, Artificial
  Synthetic oligonucleotide
cagggttgtatccatggttgaaatggacagagacggcgtatcattcatctacgagaagcc

SEQ ID NO: 90951 - DNA, 60 bp, Artificial
  Synthetic oligonucleotide
gatgggatcatgtgtttcctgctacggggacgacgaacctgacgaggggtcatgtgaact

SEQ ID NO: 90952 - DNA, 51 bp, Artificial
  Synthetic oligonucleotide
atcattcatctacgagaagcctagcatctaccatagtgatgggtgcactgg

SEQ ID NO: 90953 - DNA, 60 bp, Artificial
  Synthetic oligonucleotide
tcagaacatgtctggagtgaacttcgaggtaatggttcctgaacaaggtggaaaagtggt

SEQ ID NO: 90954 - DNA, 60 bp, Artificial
  Synthetic oligonucleotide
ttcctgaacaaggtggaaaagtggttttcagtcttactgagatgggatcatgtgtttcct

SEQ ID NO: 90955 - DNA, 60 bp, Artificial
  Synthetic oligonucleotide
ggtaatggttcctgaacaaggtggaaaagtggttttcagtcttactgagatgggatcatg

SEQ ID NO: 90956 - DNA, 60 bp, Artificial
  Synthetic oligonucleotide
gaggtaatggttcctgaacaaggtggaaaagtggttttcagtcttactgagatgggatca

SEQ ID NO: 90957 - DNA, 60 bp, Artificial
  Synthetic oligonucleotide
ctggggaggatggtatctcaagtacgtcaggtatgctggacctcttgaaggatcaagtgg

SEQ ID NO: 90958 - DNA, 60 bp, Artificial
  Synthetic oligonucleotide
gaaaagtggttttcagtcttactgagatgggatcatgtgtttcctgctacggggacgacg

SEQ ID NO: 90959 - DNA, 60 bp, Artificial
  Synthetic oligonucleotide
acaaggtggaaaagtggttttcagtcttactgagatgggatcatgtgtttcctgctacgg

SEQ ID NO: 90960 - DNA, 60 bp, Artificial
  Synthetic oligonucleotide
cctgaacaaggtggaaaagtggttttcagtcttactgagatgggatcatgtgtttcctgc

SEQ ID NO: 90961 - DNA, 50 bp, Artificial
  Synthetic oligonucleotide
tggaagctttgttcactgtacaccagtcatgatttggttgtacgagaaaa

SEQ ID NO: 90962 - DNA, 60 bp, Artificial
  Synthetic oligonucleotide
tgggatcatgtgtttcctgctacggggacgacgaacctgacgaggggtcatgtgaacttg

SEQ ID NO: 90963 - DNA, 60 bp, Artificial
  Synthetic oligonucleotide
gggatcatgtgtttcttgctacggggacgacgaacctgacgaggggtcatgtgaacttgc

SEQ ID NO: 90964 - DNA, 60 bp, Artificial
  Synthetic oligonucleotide
acttctgtttgtcactggccctgagcacaatgagatggtcaggaatgactaggagaaaca

SEQ ID NO: 90965 - DNA, 60 bp, Artificial
  Synthetic oligonucleotide
ggagatgacttctgtttgtcactggccctgagcacaatgagatggtcaggaatgactagg

SEQ ID NO: 90966 - DNA, 60 bp, Artificial
  Synthetic oligonucleotide
atggacagattcattggaagctttgttcactgtacaccagtcatgatttggttgtacgag

SEQ ID NO: 90967 - DNA, 60 bp, Artificial
  Synthetic oligonucleotide
ctggccctgagcacaatgagatggtcaggaatgactaggagaaacaacttcatggacaga

SEQ ID NO: 90968 - DNA, 60 bp, Artificial
  Synthetic oligonucleotide
gttgctcctgagaccaggacagcaataatttcagcaataacaggagggaaatcagcctgc

SEQ ID NO: 90969 - DNA, 60 bp, Artificial
  Synthetic oligonucleotide
aatgttgctcctgagaccaggacagcaataatttcagcaataacaggagggaaatcagcc

SEQ ID NO: 90970 - DNA, 60 bp, Artificial
  Synthetic oligonucleotide
tccaaagacaaacagaaagtttggccatattatgtaatcacacttttggaagtaatataa

SEQ ID NO: 90971 - DNA, 60 bp, Artificial
  Synthetic oligonucleotide
cctgcttctgcttgcaatctaaagacctgtctaaaactatttaacaatactgatgcggta

SEQ ID NO: 90972 - DNA, 60 bp, Artificial
  Synthetic oligonucleotide
caagtcaacctgcttctgcttgcaatctaaagacctgtctaaaactatttaacaatactg

SEQ ID NO: 90973 - DNA, 60 bp, Artificial
  Synthetic oligonucleotide
ctatttaacaatactgatgcggtaactgttcattgttttaatgaaacccaaggatacatg

SEQ ID NO: 90974 - DNA, 60 bp, Artificial
  Synthetic oligonucleotide
gagtaatgtctcagaaagtggaagaacagctttaaaaattcatgaagtaagaaaagccag

SEQ ID NO: 90975 - DNA, 60 bp, Artificial
  Synthetic oligonucleotide
gatgcggtaactgttcattgttttaatgaaacccaaggatacatgctaacattagcctct

SEQ ID NO: 90976 - DNA, 60 bp, Artificial
  Synthetic oligonucleotide
aacaatactgatgcggtaactgttcattgttttaatgaaaaccaaggatacatgctaaca

SEQ ID NO: 90977 - DNA, 60 bp, Artificial
  Synthetic oligonucleotide
ctataacaagtcaacctgcttctgcttgcaatctaaagacctgtctaaaactatttaaca

SEQ ID NO: 90978 - DNA, 60 bp, Artificial
  Synthetic oligonucleotide
aaaatcagcctgcaaatcagcagctaaactgattaagaatgaacatcttcccctaatgtc

SEQ ID NO: 90979 - DNA, 60 bp, Artificial
  Synthetic oligonucleotide
gttgctcctgagaccaggacagcaataatttcagcaataacaggaggaaaatcagcctgc

SEQ ID NO: 90980 - DNA, 60 bp, Artificial
  Synthetic oligonucleotide
ctatttaacaatactgatgcggtaactgttcattgttttaatgaaaaccaaggatacatg

SEQ ID NO: 90981 - DNA, 60 bp, Artificial
  Synthetic oligonucleotide
gtctcagaaagtggaagaacagctttaaagattcatgaagtaagaaaagccagcacagca

SEQ ID NO: 90982 - DNA, 60 bp, Artificial
  Synthetic oligonucleotide
ggaaatggttgaagaagtatatgatcacccagacgactacacaccagacatccgaatagg

SEQ ID NO: 90983 - DNA, 60 bp, Artificial
  Synthetic oligonucleotide
gagtaatgtctcagaaagtggaagaacagctttaaagattcatgaagtaagaaaagccag

SEQ ID NO: 90984 - DNA, 60 bp, Artificial
  Synthetic oligonucleotide
gaaatcagcctgcaaatcagcagctaaactgattaagaatgaacatcttcccctaatgtc

SEQ ID NO: 90985 - DNA, 60 bp, Artificial
  Synthetic oligonucleotide
atcagcagctaaactgattaagaatgaacatcttcccctaatgtctggagaagccaccac

SEQ ID NO: 90986 - DNA, 53 bp, Artificial
  Synthetic oligonucleotide
aaccatggaaaaaggcaagcgacatgctgaataaagcaacttctagtttgaaa

SEQ ID NO: 90987 - DNA, 60 bp, Artificial
  Synthetic oligonucleotide
gagacttcttaggagtggagtcaatgatgaaaatgagggcctttagagatgaccaaataa

SEQ ID NO: 90988 - DNA, 60 bp, Artificial
  Synthetic oligonucleotide
gagacttcttgggagtggagtcaatgatgaaaatgagggccttcagagatgaccaaataa

SEQ ID NO: 90989 - DNA, 60 bp, Artificial
  Synthetic oligonucleotide
gggagtggagtcaatgatgaaaatgagggccttcagagatgaccaaataatggaaatggt

SEQ ID NO: 90990 - DNA, 60 bp, Artificial
  Synthetic oligonucleotide
gagtggagtcaatgatgaaaatgagggcctttagagatgaccaaataatggaaatggttg

SEQ ID NO: 90991 - DNA, 60 bp, Artificial
  Synthetic oligonucleotide
gaccaaataatggaaatggttgaagaagtatatgatcacccagacgactacacaccagac

SEQ ID NO: 90992 - DNA, 60 bp, Artificial
  Synthetic oligonucleotide
gaaaccgacatctcaccaattcctttttccaatgatggtatttttgaaatttaattacct

SEQ ID NO: 90993 - DNA, 54 bp, Artificial
  Synthetic oligonucleotide
gaaaccgacaactcaccaattcctttttccaatgatggtatttttgaaatttaa

SEQ ID NO: 90994 - DNA, 60 bp, Artificial
  Synthetic oligonucleotide
gaaaccgacaactcaccaattcctttttccaatgatggtatttttgaaatttaattacct

SEQ ID NO: 90995 - DNA, 60 bp, Artificial
  Synthetic oligonucleotide
catagtaattgaggggctttctgctgaagagataataaaaatgggtgaaacagttttgga

SEQ ID NO: 90996 - DNA, 60 bp, Artificial
  Synthetic oligonucleotide
gttaagtaatgaatcctcattggatgaggaagggaaaggaagagtgctaagcagactaac

SEQ ID NO: 90997 - DNA, 60 bp, Artificial
  Synthetic oligonucleotide
ttcgttaagtaatgaatcctcattggatgaggaagggaaaggaagagtgctaagcagact

SEQ ID NO: 90998 - DNA, 60 bp, Artificial
  Synthetic oligonucleotide
ctcatggtcatgtacctgaaccctggaaattattcaatgcaagtaaaactaggaacactc

SEQ ID NO: 90999 - DNA, 60 bp, Artificial
  Synthetic oligonucleotide
gaatcagattaaagcagcaattgccgatagaaccatggtaataagtgaaaatgatcattc

SEQ ID NO: 91000 - DNA, 60 bp, Artificial
  Synthetic oligonucleotide
agcaattgccgatagaaccatggtaataagtgaaaatgatcattcagagtttctaggagg

SEQ ID NO: 91001 - DNA, 60 bp, Artificial
  Synthetic oligonucleotide
gcaggggatccgaaatgtcgaaaacttttgccgaaatagcagagacttttctagagccag

SEQ ID NO: 91002 - DNA, 60 bp, Artificial
  Synthetic oligonucleotide
aattctataaccagatgatggtcaaagctggactcaacgatgacatggaaagaaacctaa

SEQ ID NO: 91003 - DNA, 60 bp, Artificial
  Synthetic oligonucleotide
atgcattaaaagcggattcgttatggctaccgatgaaatctctctcactgtactccgaag

SEQ ID NO: 91004 - DNA, 60 bp, Artificial
  Synthetic oligonucleotide
gatgcattaaaagcggattcgttatggctaccgatgaaatctctctcaatatactccgaa

SEQ ID NO: 91005 - DNA, 60 bp, Artificial
  Synthetic oligonucleotide
gatgcattaaaagcggattcgttatggctaccgatgaaatctctctcactatactccaga

SEQ ID NO: 91006 - DNA, 60 bp, Artificial
  Synthetic oligonucleotide
gatgcattaaaagcggattcgttatggctaccgatgaaatctctctcactatactccgaa

SEQ ID NO: 91007 - DNA, 60 bp, Artificial
  Synthetic oligonucleotide
gatgcattaatagcggattcgttatggctaccgatgaaatctctctcactatactccaaa

SEQ ID NO: 91008 - DNA, 60 bp, Artificial
  Synthetic oligonucleotide
gatgcattaaaagcggattcgttatggctaccgatgaaatctctctcactgtactccgaa

SEQ ID NO: 91009 - DNA, 60 bp, Artificial
  Synthetic oligonucleotide
atgcattaaaagcggattcgttatggctaccgatgaaatctctctcattatactccagag

SEQ ID NO: 91010 - DNA, 60 bp, Artificial
  Synthetic oligonucleotide
atgcattaatagcggattcgttatggctaccgatgaaatctctctcactatactccaaag

SEQ ID NO: 91011 - DNA, 60 bp, Artificial
  Synthetic oligonucleotide
atgcattaaaagcggattcgttatggctaccgatgaaatctctctcactatactccagag

SEQ ID NO: 91012 - DNA, 60 bp, Artificial
  Synthetic oligonucleotide
atgcattaaaagcggattcgttatggctaccgatgaaatctctctcactatactccgaag

SEQ ID NO: 91013 - DNA, 60 bp, Artificial
  Synthetic oligonucleotide
atgcattaaaagcggattcgttatggctaccgatgaaatctctctcaatatactccgaag

SEQ ID NO: 91014 - DNA, 60 bp, Artificial
  Synthetic oligonucleotide
gatgcattaaaagcggattcgttatggctaccgatgaaatctctctcattatactccaga

SEQ ID NO: 91015 - DNA, 60 bp, Artificial
  Synthetic oligonucleotide
gatgcattaaaagcggattcgttatggctaccgatgaaatctctctcactatactccaaa

SEQ ID NO: 91016 - DNA, 60 bp, Artificial
  Synthetic oligonucleotide
atgcattaaaagcggattcgttatggctaccgatgaaatctctctcactatactccaaag

SEQ ID NO: 91017 - DNA, 60 bp, Artificial
  Synthetic oligonucleotide
ttgtctgagcaagaaattgctgtaaacatggaagttgaaaaatacatttgtaatgagaac

SEQ ID NO: 91018 - DNA, 60 bp, Artificial
  Synthetic oligonucleotide
ggtcatgtacctgaaccctgggaattattcaatgcaagtaaaactaggaacgctctgtgc

SEQ ID NO: 91019 - DNA, 60 bp, Artificial
  Synthetic oligonucleotide
cagtttcttctaggaaaagaagacatgttccaatgggatgcatttgaagcatttgaaagc

SEQ ID NO: 91020 - DNA, 60 bp, Artificial
  Synthetic oligonucleotide
ccaagtataatttcaacctaagaggatttcctggagaagagttcattaagtgttgtggat

SEQ ID NO: 91021 - DNA, 60 bp, Artificial
  Synthetic oligonucleotide
caagcatcaagtcttcagaaccaagtggaaatcggactaataggtgaatatttgaacatt

SEQ ID NO: 91022 - DNA, 60 bp, Artificial
  Synthetic oligonucleotide
tgtgagaacccaacatgtctaggaataacaatcccacaggcaggtttcgtaagaagcgct

SEQ ID NO: 91023 - DNA, 60 bp, Artificial
  Synthetic oligonucleotide
cccaacatgtctaggaataacaatcccacaggcaggtttcgtaagaagcgctccaggagg

SEQ ID NO: 91024 - DNA, 60 bp, Artificial
  Synthetic oligonucleotide
aagaagcgctccaggaggtgtacttctaactgagacaatcacggaaagaccacaactaac

SEQ ID NO: 91025 - DNA, 60 bp, Artificial
  Synthetic oligonucleotide
gctccaggaggtgtacttctaactgagacaatcacggaaagaccacaactaacagagtgg

SEQ ID NO: 91026 - DNA, 60 bp, Artificial
  Synthetic oligonucleotide
agatggggaaacaaagaacggaaaagtatctcagacactattcgaagccatccaaggtac

SEQ ID NO: 91027 - DNA, 54 bp, Artificial
  Synthetic oligonucleotide
aaaagtatctcagacactattcgaagccatccaaggtacacagatggagaactg

SEQ ID NO: 91028 - DNA, 60 bp, Artificial
  Synthetic oligonucleotide
tccaaggtacacagatggagaactgtgcagtgaaagctgtgttagacacaacatttgtca

SEQ ID NO: 91029 - DNA, 60 bp, Artificial
  Synthetic oligonucleotide
tgttgtggatttacgttgggagtcggaggagcgtggtttcaagcctacttaaatggaatg

SEQ ID NO: 91030 - DNA, 60 bp, Artificial
  Synthetic oligonucleotide
gttgggagtcggaggagcgtggtttcaagcctacttaaatggaatggttcaaggtgacgg

SEQ ID NO: 91031 - DNA, 60 bp, Artificial
  Synthetic oligonucleotide
gcagtgaggaggattgcctatatgaaccaagcatcaagtcttcagaaccaagtggaaatc

SEQ ID NO: 91032 - DNA, 60 bp, Artificial
  Synthetic oligonucleotide
cacttcttgaaggagaaattgaagcagtgaggaggattgcctatatgaaccaagcatcaa

SEQ ID NO: 91033 - DNA, 60 bp, Artificial
  Synthetic oligonucleotide
gaaggagaaattgaagcagtgaggaggattgcctatatgaaccaagcatcaagtcttcag

SEQ ID NO: 91034 - DNA, 60 bp, Artificial
  Synthetic oligonucleotide
aagtcttcagaaccaagtggaaatcggactaataggtgaatatttgaacattagcagttg

SEQ ID NO: 91035 - DNA, 60 bp, Artificial
  Synthetic oligonucleotide
cattcagtacctgacaagctagggtttgcacgcacaagctcattcacactaaaagctaac

SEQ ID NO: 91036 - DNA, 60 bp, Artificial
  Synthetic oligonucleotide
acaactgacagaatcaaaacaggaatgttggacatcacaagttgctgtacacaacatgga

SEQ ID NO: 91037 - DNA, 60 bp, Artificial
  Synthetic oligonucleotide
acttacaactgacagaatcaaaacaggaatgttggacatcacaagttgctgtacacaaca

SEQ ID NO: 91038 - DNA, 60 bp, Artificial
  Synthetic oligonucleotide
gggagaatgatggctctcgaacccactacggattgtggtgtcgaaaaaggacttacaact

SEQ ID NO: 91039 - DNA, 60 bp, Artificial
  Synthetic oligonucleotide
acacagatggagaactgtgcagtgaaagctgtgttagacacaacatttgtcaacctaacc

SEQ ID NO: 91040 - DNA, 60 bp, Artificial
  Synthetic oligonucleotide
cagtacctgacaagctagggtttgcacgcacaagctcattcacactaaaagctaacttcg

SEQ ID NO: 91041 - DNA, 60 bp, Artificial
  Synthetic oligonucleotide
agactattattggataagttagaaatttgtatctgattatgcattattaattgtataaat

SEQ ID NO: 91042 - DNA, 60 bp, Artificial
  Synthetic oligonucleotide
aatgtcaagaagtcactttcagagtggttccattccattcagtacctgacaagctagggt

SEQ ID NO: 91043 - DNA, 60 bp, Artificial
  Synthetic oligonucleotide
tacttgtatcttcaaaatgtcaagaagtcactttcagagtggttccattccattcagtac

SEQ ID NO: 91044 - DNA, 60 bp, Artificial
  Synthetic oligonucleotide
tcccaccattggatatgttgacagtataaaagaagtaacgggtacaagttggtggatggt

SEQ ID NO: 91045 - DNA, 60 bp, Artificial
  Synthetic oligonucleotide
taaacctacaattgttcccaccattggatatgttgacagtataaaagaagtaacgggtac

SEQ ID NO: 91046 - DNA, 60 bp, Artificial
  Synthetic oligonucleotide
acctaagaggatttcctggagaagagttcattaagtgttgtggatttacgttgggagtcg

SEQ ID NO: 91047 - DNA, 56 bp, Artificial
  Synthetic oligonucleotide
taacgggtacaagttggtggatggttatgatacattacattattgtggggttaata

SEQ ID NO: 91048 - DNA, 60 bp, Artificial
  Synthetic oligonucleotide
ccaagtggaaatcggactaataggtgaatatttgaacattagcagttggttggagactac

SEQ ID NO: 91049 - DNA, 60 bp, Artificial
  Synthetic oligonucleotide
gtcttcagaaccaagtggaaatcggactaataggtgaatatttgaacattagcagttggt

SEQ ID NO: 91050 - DNA, 60 bp, Artificial
  Synthetic oligonucleotide
ttgatgaagaatggctggtgtcagtctaacacgcactgctggtgtccacctaaacctaca

SEQ ID NO: 91051 - DNA, 60 bp, Artificial
  Synthetic oligonucleotide
ttgatgaagaatggctggtgtcagtctaacacgcactgttggtgtccgcctaaacctaca

SEQ ID NO: 91052 - DNA, 60 bp, Artificial
  Synthetic oligonucleotide
aaatggaatggttcaaggtgacggtgccgcatctgcagacgacgtgaaagagaaactcaa

SEQ ID NO: 91053 - DNA, 60 bp, Artificial
  Synthetic oligonucleotide
ggaatggttcaaggtgacggtgccgcatctgcagacgacgtgaaagagaaactcaacgga

SEQ ID NO: 91054 - DNA, 51 bp, Artificial
  Synthetic oligonucleotide
cgggtacaagttggtggatggttatgatacattacattattgtggggttaa

SEQ ID NO: 91055 - DNA, 60 bp, Artificial
  Synthetic oligonucleotide
agatatgccttcaaaagcaagtgaacagtagcttcagcctacacaatgtcttcggaggaa

SEQ ID NO: 91056 - DNA, 60 bp, Artificial
  Synthetic oligonucleotide
gatatgccttcaaaagcaagtgaacagtagcttcagcctacacaatggctttggaggaaa

SEQ ID NO: 91057 - DNA, 60 bp, Artificial
  Synthetic oligonucleotide
gggcttagcaataactgctactatttcattggcagctttggtgatctctgggatcgccat

SEQ ID NO: 91058 - DNA, 60 bp, Artificial
  Synthetic oligonucleotide
gggcttagcaataactgctgttatttcattggcagctttggtgatctctgggatcgccat

SEQ ID NO: 91059 - DNA, 60 bp, Artificial
  Synthetic oligonucleotide
gcaataacagctgctatttcattggcagctttggtgatctctgggatcgccatctgccga

SEQ ID NO: 91060 - DNA, 56 bp, Artificial
  Synthetic oligonucleotide
aaaataaagatatgccttcaaaagcaagtgaacagtagcttcagcctacacaatgg

SEQ ID NO: 91061 - DNA, 60 bp, Artificial
  Synthetic oligonucleotide
gggcttagcaataactgctgctaatctaatggcagctttggtgatctctgggatcgccat

SEQ ID NO: 91062 - DNA, 60 bp, Artificial
  Synthetic oligonucleotide
taaagatatgccttcaaaagcaagtgaacagtagcttcagcctacacaatggctttggag

SEQ ID NO: 91063 - DNA, 60 bp, Artificial
  Synthetic oligonucleotide
gggcttagcaataactgctgctatttcattggcagctttggtgatctctgggatcgccat

SEQ ID NO: 91064 - DNA, 60 bp, Artificial
  Synthetic oligonucleotide
gggcttggcgataactgctgctatttcattggcagctttggtgatctctgggatcgccat

SEQ ID NO: 91065 - DNA, 60 bp, Artificial
  Synthetic oligonucleotide
gggcttagcaataacagctgctatttcattggcagctttggtgatctctgggatcgccat

SEQ ID NO: 91066 - DNA, 60 bp, Artificial
  Synthetic oligonucleotide
agcaataactgctgctatttcattggcagctttggtgatctctgggatcgccatctgcag

SEQ ID NO: 91067 - DNA, 60 bp, Artificial
  Synthetic oligonucleotide
gcaataactgctactatttcattggcagctttggtgatctctgggatcgccatctgcaga

SEQ ID NO: 91068 - DNA, 60 bp, Artificial
  Synthetic oligonucleotide
gcaataactgctgctaatctaatggcagctttggtgatctctgggatcgccatctgcaga

SEQ ID NO: 91069 - DNA, 60 bp, Artificial
  Synthetic oligonucleotide
gcaataactgctgctatttcattggcagctttggtgatctctgggatcgccatctgccga

SEQ ID NO: 91070 - DNA, 60 bp, Artificial
  Synthetic oligonucleotide
gcaataactgctgctatttcattggcagctttggtgatctctgggatcgccatctgcaga

SEQ ID NO: 91071 - DNA, 60 bp, Artificial
  Synthetic oligonucleotide
gcaataactgctgttatttcattggcagctttggtgatctctgggatcgccatctgcaga

SEQ ID NO: 91072 - DNA, 60 bp, Artificial
  Synthetic oligonucleotide
ggcgataactgctgctatttcattggcagctttggtgatctctgggatcgccatctgcag

SEQ ID NO: 91073 - DNA, 60 bp, Artificial
  Synthetic oligonucleotide
aaatgttggtgacccaactgaaatagtattaagggacatgaacaacaaagatgcaaggca

SEQ ID NO: 91074 - DNA, 60 bp, Artificial
  Synthetic oligonucleotide
tagttaaaaggaaaagatatagtgctttatccaatgacatttcacaaggaattaagaggc

SEQ ID NO: 91075 - DNA, 60 bp, Artificial
  Synthetic oligonucleotide
agttaaaaggaaaagatatagtgctttatccaatgacatttcacaaggaattaagagaca

SEQ ID NO: 91076 - DNA, 60 bp, Artificial
  Synthetic oligonucleotide
ttaaaaggaaaagatatagtgctttatccaatgacatttcacaaggaattaagagacaaa

SEQ ID NO: 91077 - DNA, 60 bp, Artificial
  Synthetic oligonucleotide
cctaaaggagcaatagaaagaaatctagcaaggatgtctcccttagtatcagccacaccc

SEQ ID NO: 91078 - DNA, 60 bp, Artificial
  Synthetic oligonucleotide
cctaaaggagcaatagagagaaatctagcaaggatgtctcccttagtatcagccacacct

SEQ ID NO: 91079 - DNA, 60 bp, Artificial
  Synthetic oligonucleotide
actaagggatatatctgttccagctggtttctccaattttgaaggaatgaggagctacat

SEQ ID NO: 91080 - DNA, 60 bp, Artificial
  Synthetic oligonucleotide
ccctaaaggagcagtagagagaaatctagcaaggatgtctcccttagtatcagtcacacc

SEQ ID NO: 91081 - DNA, 60 bp, Artificial
  Synthetic oligonucleotide
ggatggaagctagaagatgtctgcttcaatcaatgcaacaaatggaagcaattgttgagc

SEQ ID NO: 91082 - DNA, 60 bp, Artificial
  Synthetic oligonucleotide
tatagatcctaaaggagcaatagagagaaatctagcaaggatgtctcccttagtatcagt

SEQ ID NO: 91083 - DNA, 60 bp, Artificial
  Synthetic oligonucleotide
atgaaatggggaatggaagctagaagatgtctgcttcaatcaatgcaacaaatggaagca

SEQ ID NO: 91084 - DNA, 60 bp, Artificial
  Synthetic oligonucleotide
cctaaaggagcaatagagagaaatctagcaaggatgtctcccttagtatcagccacgcct

SEQ ID NO: 91085 - DNA, 60 bp, Artificial
  Synthetic oligonucleotide
cctaaaggagcaatagagagaaatctagcaaggatgtctcccttagtatcagttactcct

SEQ ID NO: 91086 - DNA, 60 bp, Artificial
  Synthetic oligonucleotide
cccaaaggagcaatagagagaaatctagcaaggatgtctcccttagtatcagtcacacct

SEQ ID NO: 91087 - DNA, 60 bp, Artificial
  Synthetic oligonucleotide
acgccagcgtctgtagaaatgaaggggaagaaatttcctattgattttgctccaagcaac

SEQ ID NO: 91088 - DNA, 60 bp, Artificial
  Synthetic oligonucleotide
cgccagcgtccgtagaaatgaaggggaagaaatttcctattgattttgctccaagcaaca

SEQ ID NO: 91089 - DNA, 60 bp, Artificial
  Synthetic oligonucleotide
ccaccacaatgacgccagcgtccgtagaaatgaaggggaagaaatttcctattgattttg

SEQ ID NO: 91090 - DNA, 60 bp, Artificial
  Synthetic oligonucleotide
aataagggaaccttttattgcttgtggaccaaaagagtgcaaacactttgctctaaccca

SEQ ID NO: 91091 - DNA, 60 bp, Artificial
  Synthetic oligonucleotide
ctcgttaagtaatgaatcctcattggatgaggaagggaaagggagagtgctaagcagact

SEQ ID NO: 91092 - DNA, 60 bp, Artificial
  Synthetic oligonucleotide
gttaagtaatgaatcctcattggatgaggaagggaaagggagagtgctaagcagactaac

SEQ ID NO: 91093 - DNA, 60 bp, Artificial
  Synthetic oligonucleotide
gttaagtaatgaatcctcattggatgaggaagggaaagggagagtgctaagcagactcac

SEQ ID NO: 91094 - DNA, 60 bp, Artificial
  Synthetic oligonucleotide
gctgggaaatagcatggaactgatgatattcagctacaatcaagactattcgttgagtaa

SEQ ID NO: 91095 - DNA, 60 bp, Artificial
  Synthetic oligonucleotide
ttcgttgagtaatgaatcctcattggatgaggaagggaaagggagagtgctaagcagact

SEQ ID NO: 91096 - DNA, 60 bp, Artificial
  Synthetic oligonucleotide
aaatagcatggaactgatgatattcagctacaatcaagactactcgttaagtaatgaatc

SEQ ID NO: 91097 - DNA, 60 bp, Artificial
  Synthetic oligonucleotide
agccacacccaaaaagttgaaatgggaggacctaagaccaatagggcctcacatttacaa

SEQ ID NO: 91098 - DNA, 60 bp, Artificial
  Synthetic oligonucleotide
agccacgcctaaaaagttgaaatgggaggacctaagaccaatagggcctcacatttacaa

SEQ ID NO: 91099 - DNA, 60 bp, Artificial
  Synthetic oligonucleotide
ggggaatggaagctagaagatgtttgcttcaatcaatgcaacaaatggaagcaattgttg

SEQ ID NO: 91100 - DNA, 60 bp, Artificial
  Synthetic oligonucleotide
ttcgttaagtaatgaatcctcattggatgaggaagggaaagggagagtgctaagcagact

SEQ ID NO: 91101 - DNA, 60 bp, Artificial
  Synthetic oligonucleotide
gttgagtaatgaatcctcattggatgaggaagggaaagggagagtgctaagcagactaac

SEQ ID NO: 91102 - DNA, 60 bp, Artificial
  Synthetic oligonucleotide
tcaatcaatgcaacaaatggaagcaattgttgaacaagaatcatcgatacaaggatatga

SEQ ID NO: 91103 - DNA, 60 bp, Artificial
  Synthetic oligonucleotide
ctgaagaatgcacatgcggatttgccagcaataaaaccatagaatgtgcttgtagagata

SEQ ID NO: 91104 - DNA, 60 bp, Artificial
  Synthetic oligonucleotide
ggagcgggtccgcatgccatgatggtagagaatggacatatatcggagttgatggccctg

SEQ ID NO: 91105 - DNA, 60 bp, Artificial
  Synthetic oligonucleotide
tggagcgggtccgcatgccatgatggtagagaatggacatatatcggagttgatggccct

SEQ ID NO: 91106 - DNA, 60 bp, Artificial
  Synthetic oligonucleotide
cgccagcgtctgtagaaatgaaggagaagaaatttcctattgattttgctccaagcaaca

SEQ ID NO: 91107 - DNA, 60 bp, Artificial
  Synthetic oligonucleotide
tcaactcactcttcgagcgttttaatgaaggacattcaaagccaattcgagcagctgaca

SEQ ID NO: 91108 - DNA, 60 bp, Artificial
  Synthetic oligonucleotide
ggctgaagcttatatgctctcgcttagagaagctggaccttaacctgagcaaagcagtct

SEQ ID NO: 91109 - DNA, 60 bp, Artificial
  Synthetic oligonucleotide
cgccagcgtccgtagaaatgaagggaaagaaacctcctattgattttgctccaagcaaca

SEQ ID NO: 91110 - DNA, 60 bp, Artificial
  Synthetic oligonucleotide
gatttaataatcttgtgtatggtattttctcaagacactaggatgttccaaggagtgagg

SEQ ID NO: 91111 - DNA, 60 bp, Artificial
  Synthetic oligonucleotide
gtgatgtagcctgtgacataataagagctgcattaggactaaagatcagacaaagacaaa

SEQ ID NO: 91112 - DNA, 60 bp, Artificial
  Synthetic oligonucleotide
ataatcttgtgcatggtattttctcaagacactaggatgttccaaggagtgaggggagaa

SEQ ID NO: 91113 - DNA, 60 bp, Artificial
  Synthetic oligonucleotide
taataatcttgtgtatggtattttctcaagacactaggatgttccaaggagtgaggggag

SEQ ID NO: 91114 - DNA, 60 bp, Artificial
  Synthetic oligonucleotide
atgaaaacatcaacaaaagccaggctgagaacagaatcctcttttgcacctagaacatgg

SEQ ID NO: 91115 - DNA, 55 bp, Artificial
  Synthetic oligonucleotide
catcaacaaaagccaggctgagaacagaatcctcttttgcacctagaacatggga

SEQ ID NO: 91116 - DNA, 60 bp, Artificial
  Synthetic oligonucleotide
atgaaaacgtcaacaaaagccaggctgagaacagaatcctcttttgcacctagaacatgg

SEQ ID NO: 91117 - DNA, 60 bp, Artificial
  Synthetic oligonucleotide
gaagcttatatgctctcgcttagagaagctggaccataacctgagcaaagcagtcttggg

SEQ ID NO: 91118 - DNA, 60 bp, Artificial
  Synthetic oligonucleotide
atttagtagtacagatcccagagtggactcaggaaagtggccaaaatatactgtgtttag

SEQ ID NO: 91119 - DNA, 60 bp, Artificial
  Synthetic oligonucleotide
cgtccaaaagctggcagaagagctgcaaagcaacattggagtgctgagatctcttggggc

SEQ ID NO: 91120 - DNA, 60 bp, Artificial
  Synthetic oligonucleotide
acgtccaaaagctggcagaagagctgcaaagcaacattggagtgctgagatctcttgggg

SEQ ID NO: 91121 - DNA, 60 bp, Artificial
  Synthetic oligonucleotide
tgtttaaaagcgtgtttgaatcagcggacataaatcctccaattggggctatgagcattg

SEQ ID NO: 91122 - DNA, 60 bp, Artificial
  Synthetic oligonucleotide
atatttagagcacatggcccaataagggttgaagaaaatgaagcagtagtttcaactcat

SEQ ID NO: 91123 - DNA, 60 bp, Artificial
  Synthetic oligonucleotide
acatgtttaaaagcgtgtttgaatcagcggacataaatcctccaattggggctatgagca

SEQ ID NO: 91124 - DNA, 60 bp, Artificial
  Synthetic oligonucleotide
ctttctatgtggaggggacgactttcgagttcaactctatgttcgtaagagacgggaaag

SEQ ID NO: 91125 - DNA, 60 bp, Artificial
  Synthetic oligonucleotide
gtctcctacaatgacgccagcgtctgtagaaatgaaggaaaagaaacttcctattgattt

SEQ ID NO: 91126 - DNA, 51 bp, Artificial
  Synthetic oligonucleotide
agatggagaaggcaaagcagagctagcagaaaaattacactgttggttcgg

SEQ ID NO: 91127 - DNA, 52 bp, Artificial
  Synthetic oligonucleotide
aagatggagaaggcaaagcagagctagcagaaaaattacactgttggttcgg

SEQ ID NO: 91128 - DNA, 56 bp, Artificial
  Synthetic oligonucleotide
acagaagatggagaaggcaaagcagagctagcagaaaaattacactgttggttcgg

SEQ ID NO: 91129 - DNA, 60 bp, Artificial
  Synthetic oligonucleotide
tgacatggaaagaaacctaatccaaaatgcgcatgctgtggaaagaattctattggctgc

SEQ ID NO: 91130 - DNA, 51 bp, Artificial
  Synthetic oligonucleotide
tataaaggagctatgggaaaacactaaaggaagagatggtctgttagtagc

SEQ ID NO: 91131 - DNA, 60 bp, Artificial
  Synthetic oligonucleotide
cgtccaaaagttggcagaagagctgcaaagcaacattggagtgctgagatctcttggggc

SEQ ID NO: 91132 - DNA, 60 bp, Artificial
  Synthetic oligonucleotide
gttatcttatgataactgatggctcagcttcaggaattagtaaatgcagattccttaaga

SEQ ID NO: 91133 - DNA, 60 bp, Artificial
  Synthetic oligonucleotide
ggcaagactaccctgacaaaaagagtctctacgaaaaggcaacgttcgaagccaaacaga

SEQ ID NO: 91134 - DNA, 53 bp, Artificial
  Synthetic oligonucleotide
aagaagatctgtggatacctcatcgctagacaagtggccggaattgaaacagg

SEQ ID NO: 91135 - DNA, 60 bp, Artificial
  Synthetic oligonucleotide
cgtcaaaacagaaagacgccagatgagcaacgcaaagccaatgctctcataataaatgag

SEQ ID NO: 91136 - DNA, 60 bp, Artificial
  Synthetic oligonucleotide
cagttgttgaattgacaagccgctcaagaattgttcaaattctcaaatctcattggggaa

SEQ ID NO: 91137 - DNA, 59 bp, Artificial
  Synthetic oligonucleotide
ccagacttactctgaaagatgagtttgccaatttctgtgcatatgcaggaagaagagcc

SEQ ID NO: 91138 - DNA, 60 bp, Artificial
  Synthetic oligonucleotide
gatcagactagttaaaagagctggttcaggcaccaatataacctaccatgcagttgttga

SEQ ID NO: 91139 - DNA, 60 bp, Artificial
  Synthetic oligonucleotide
aagagctggttcaggcaccaatataacctaccatgcagttgttgaattgacaagccgctc

SEQ ID NO: 91140 - DNA, 60 bp, Artificial
  Synthetic oligonucleotide
tgaaaattcagagattggacaagccaagaagatgaaacctttggatcaattgaccagcac

SEQ ID NO: 91141 - DNA, 60 bp, Artificial
  Synthetic oligonucleotide
gagattggacaagccaagaagatgaaacctttggatcaattgaccagcactagtagcaac

SEQ ID NO: 91142 - DNA, 51 bp, Artificial
  Synthetic oligonucleotide
caaacagaagtcctaactatatgcggcagaatgatgtcattaaaagggaaa

SEQ ID NO: 91143 - DNA, 56 bp, Artificial
  Synthetic oligonucleotide
atccacaaacagaagtcctaactatatgcggcagaatgatgtcattaaaagggaaa

SEQ ID NO: 91144 - DNA, 60 bp, Artificial
  Synthetic oligonucleotide
cttttaagtaaaagaattgatgataacatattgttccacaaaacagtaatagccaacagc

SEQ ID NO: 91145 - DNA, 60 bp, Artificial
  Synthetic oligonucleotide
atgttgatggcccaactgaaatagtattaagggacatgaacaacaaggatgcaaggcaaa

SEQ ID NO: 91146 - DNA, 60 bp, Artificial
  Synthetic oligonucleotide
tgaaaggagttattgctttgacatgaaagaaaaaggaccagtcactgctgttcaatccat

SEQ ID NO: 91147 - DNA, 60 bp, Artificial
  Synthetic oligonucleotide
cgaaagaagttattgctttgacatgaaagaaaaaggaccagtcactgctgtccaatccat

SEQ ID NO: 91148 - DNA, 60 bp, Artificial
  Synthetic oligonucleotide
ttactgtaatgaaactggaatgtttgaatttacaagcatgttctacagagatggatttgt

SEQ ID NO: 91149 - DNA, 60 bp, Artificial
  Synthetic oligonucleotide
gcaataactactcctatttcattggcagctttggtgatctctgggatcgccatctgcaga

SEQ ID NO: 91150 - DNA, 60 bp, Artificial
  Synthetic oligonucleotide
agcaataactactcctatttcattggcagctttggtgatctctgggatcgccatctgcag

SEQ ID NO: 91151 - DNA, 60 bp, Artificial
  Synthetic oligonucleotide
gggcttagcaataactactcctatttcattggcagctttggtgatctctgggatcgccat

SEQ ID NO: 91152 - DNA, 60 bp, Artificial
  Synthetic oligonucleotide
aaagcaagtgaacagtagcttcagcctacacaatggcttcggaggaaatttgtatgccac

SEQ ID NO: 91153 - DNA, 59 bp, Artificial
  Synthetic oligonucleotide
aaaagcaagtgaacagtagcttcagcctacacaatggcttcggaggaaatttgtatgcc

SEQ ID NO: 91154 - DNA, 60 bp, Artificial
  Synthetic oligonucleotide
gccttcaaaagcaagtgaacagtagcttcagcctacacaatggcttcggaggaaatttgt

SEQ ID NO: 91155 - DNA, 60 bp, Artificial
  Synthetic oligonucleotide
gatatgccttcaaaagcaagtgaacagtagcttcagcctacacaatggcttcggaggaaa

SEQ ID NO: 91156 - DNA, 60 bp, Artificial
  Synthetic oligonucleotide
caaaagcaagtgaacagtagcttcagcctacacaatggcttcggaggaaatttgtatgcc

SEQ ID NO: 91157 - DNA, 60 bp, Artificial
  Synthetic oligonucleotide
ccttcaaaagcaagtgaacagtagcttcagcctacacaatggcttcggaggaaatttgta

SEQ ID NO: 91158 - DNA, 60 bp, Artificial
  Synthetic oligonucleotide
aaataaagatatgccttcaaaagcaagtgaacagtagcttcagcctacacaatggcttcg

SEQ ID NO: 91159 - DNA, 60 bp, Artificial
  Synthetic oligonucleotide
aaaataaagatatgccttcaaaagcaagtgaacagtagcttcagcctacacaatggcttc

SEQ ID NO: 91160 - DNA, 60 bp, Artificial
  Synthetic oligonucleotide
agatatgccttcaaaagcaagtgaacagtagcttcagcctacacaatggcttcggaggaa

SEQ ID NO: 91161 - DNA, 60 bp, Artificial
  Synthetic oligonucleotide
aaagatatgccttcaaaagcaagtgaacagtagcttcagcctacacaatggcttcggagg

SEQ ID NO: 91162 - DNA, 60 bp, Artificial
  Synthetic oligonucleotide
catggagatcaagaaatgagggagttgctgtcaggactagactatgaagctagatgcata

SEQ ID NO: 91163 - DNA, 60 bp, Artificial
  Synthetic oligonucleotide
catggagatcaagaaatgagggagttgctgtcaggactggactatgaagctagatgcata

SEQ ID NO: 91164 - DNA, 59 bp, Artificial
  Synthetic oligonucleotide
gatcaccatggagatcaagaaatgagggagttgctgtcaggactggactatgaagctag

SEQ ID NO: 91165 - DNA, 60 bp, Artificial
  Synthetic oligonucleotide
catggagatcaagaaatgagggagttgctgtcaggactggactatgaagctagatgtgta

SEQ ID NO: 91166 - DNA, 54 bp, Artificial
  Synthetic oligonucleotide
caagtgaacagtagcttcagcctacacaatggcttcggaggaaatttgtatgcc

SEQ ID NO: 91167 - DNA, 59 bp, Artificial
  Synthetic oligonucleotide
gatcaccatggagatcaagaaatgagggagttgctgtcagggctggactatgaagctag

SEQ ID NO: 91168 - DNA, 56 bp, Artificial
  Synthetic oligonucleotide
agcaagtgaacagtagcttcagcctacacaatggctttggaggaaatttgtatgcc

SEQ ID NO: 91169 - DNA, 55 bp, Artificial
  Synthetic oligonucleotide
gcaagtgaacagtagcttcagcctacacaatggcttcggaggaaatttgtatgcc

SEQ ID NO: 91170 - DNA, 58 bp, Artificial
  Synthetic oligonucleotide
aaagcaagtgaacagtagcttcagcctacacaatggcttcggaggaaatttgtatgcc

SEQ ID NO: 91171 - DNA, 56 bp, Artificial
  Synthetic oligonucleotide
agcaagtgaacagtagcttcagcctacacaatggcttcggaggaaatttgtatgcc

SEQ ID NO: 91172 - DNA, 50 bp, Artificial
  Synthetic oligonucleotide
cggaaaagacaaggtattaaatagattcctttggggtctggccttgaaac

SEQ ID NO: 91173 - DNA, 60 bp, Artificial
  Synthetic oligonucleotide
atattgacaagactgaagcttatatgctctcgcttagagaagctggaccttaacctgagc

SEQ ID NO: 91174 - DNA, 60 bp, Artificial
  Synthetic oligonucleotide
atattgacaagactgaagcttatatgctctcgcttagagaagctggaccataacctgagc

SEQ ID NO: 91175 - DNA, 60 bp, Artificial
  Synthetic oligonucleotide
atattgacaagactgaagcttatatgctctcgcttagagaagctggaccataacctgagt

SEQ ID NO: 91176 - DNA, 60 bp, Artificial
  Synthetic oligonucleotide
attgacaagactgaagcttatatgctctcgcttagagaagctggaccttaacctgagcaa

SEQ ID NO: 91177 - DNA, 60 bp, Artificial
  Synthetic oligonucleotide
atattgacaagactgaagcttatatgctctcgcttagagaagctggaccttaacctgagt

SEQ ID NO: 91178 - DNA, 60 bp, Artificial
  Synthetic oligonucleotide
atattgacaagactgaagcttatatgctctcgcttagagaagctggaccttaacatgagc

SEQ ID NO: 91179 - DNA, 58 bp, Artificial
  Synthetic oligonucleotide
ggggcagctctgatgtccatcaagctccagttttgggctccaatgaccagatctgggg

SEQ ID NO: 91180 - DNA, 56 bp, Artificial
  Synthetic oligonucleotide
ggggcagctctaatgtccatcaagctccagttttgggctccaatgaccagatctgg

SEQ ID NO: 91181 - DNA, 55 bp, Artificial
  Synthetic oligonucleotide
gcagctctgatgtccatcaagctccagttttgggctccaatgaccagatctgggg

SEQ ID NO: 91182 - DNA, 60 bp, Artificial
  Synthetic oligonucleotide
gtatcggccaaatgcaatgaaatttcgttcagagtagtgccgttccattctgtaccagac

SEQ ID NO: 91183 - DNA, 60 bp, Artificial
  Synthetic oligonucleotide
caatgaaatttcgttcagagtagtgccgttccattctgtaccagacaggctagggttcgc

SEQ ID NO: 91184 - DNA, 60 bp, Artificial
  Synthetic oligonucleotide
gaaccaagcctcaagtctgcagaaccaagtggagattggactgataggggaatatctgaa

SEQ ID NO: 91185 - DNA, 60 bp, Artificial
  Synthetic oligonucleotide
ttaaggaagtgacagggacgagttggtggatggtgatgattcattacattatcgttggac

SEQ ID NO: 91186 - DNA, 60 bp, Artificial
  Synthetic oligonucleotide
atcgttggactgattgtagttgtgttggtagtgctgggacttaagctgtggggatgcatt

SEQ ID NO: 91187 - DNA, 60 bp, Artificial
  Synthetic oligonucleotide
cgacatggagagaaacctaatccaaaatgcgcatgctgtggaaagaattctattggctgc

SEQ ID NO: 91188 - DNA, 60 bp, Artificial
  Synthetic oligonucleotide
ggaatgggggcagctctgatgtccatcaagctccagttttgggctccaatgaccagatct

SEQ ID NO: 91189 - DNA, 56 bp, Artificial
  Synthetic oligonucleotide
ggggcagctctgatgtccatcaagcttcagttttgggctccaatgaccagatctgg

SEQ ID NO: 91190 - DNA, 60 bp, Artificial
  Synthetic oligonucleotide
gaagcttatatgctctcgcttagagaagttggaccataacctgagcaaagcagtcttggg

SEQ ID NO: 91191 - DNA, 52 bp, Artificial
  Synthetic oligonucleotide
atgctctcgcttagagaagctagaccataacctgagcaaagcagtcttggga

SEQ ID NO: 91192 - DNA, 60 bp, Artificial
  Synthetic oligonucleotide
ggactgaccgtggagtttcctgttccagaaggaaaaactgtgaaggtcaaaaccttgaac

SEQ ID NO: 91193 - DNA, 60 bp, Artificial
  Synthetic oligonucleotide
aaccttgaaccaattggtgaacgggatgatcagtcgagcgacgatgaccctctactgtgt

SEQ ID NO: 91194 - DNA, 60 bp, Artificial
  Synthetic oligonucleotide
cagaggtggtttacgcaatgggagttcttctgacactggggggagagagcggactgaccg

SEQ ID NO: 91195 - DNA, 60 bp, Artificial
  Synthetic oligonucleotide
gaaagatccaccatcgggaggcatggcaacgctgatgagagaccacatcaggaactggct

SEQ ID NO: 91196 - DNA, 60 bp, Artificial
  Synthetic oligonucleotide
ggtgaacgggatgatcagtcgagcgacgatgaccctctactgtgtgatgaaagatccacc

SEQ ID NO: 91197 - DNA, 60 bp, Artificial
  Synthetic oligonucleotide
tgcaaagattggctatctaccatgcatgagagaagcaaacccaaaaccacgggagctgat

SEQ ID NO: 91198 - DNA, 60 bp, Artificial
  Synthetic oligonucleotide
tctactgtgtgatgaaagatccaccatcgggaggcatggcaacgctgatgagagaccaca

SEQ ID NO: 91199 - DNA, 50 bp, Artificial
  Synthetic oligonucleotide
aaaatgggcaatggtgtatggtatgatttcacccgacatggcagaggaga

SEQ ID NO: 91200 - DNA, 60 bp, Artificial
  Synthetic oligonucleotide
atttcacccgacatggcagaggagaagacgatgctgaaggagctgaaaacaatgctacac

SEQ ID NO: 91201 - DNA, 60 bp, Artificial
  Synthetic oligonucleotide
gctacacagcaggatgcagatgtatgctctgggtgcaagttcgaaagccctagagaattt

SEQ ID NO: 91202 - DNA, 60 bp, Artificial
  Synthetic oligonucleotide
cccgacatggcagaggagaagacgatgctgaaggagctgaaaacaatgctacacagcagg

SEQ ID NO: 91203 - DNA, 60 bp, Artificial
  Synthetic oligonucleotide
aatgctacacagcaggatgcagatgtatgctctgggtgcaagttcgaaagccctagagaa

SEQ ID NO: 91204 - DNA, 60 bp, Artificial
  Synthetic oligonucleotide
gccaggacgcggatggtggagaggaaaaatgggcaatggtgtatggtatgatttcacccg

SEQ ID NO: 91205 - DNA, 60 bp, Artificial
  Synthetic oligonucleotide
atatagatcctagaggagcaatagagagaaatctagcaaggatgtctcccttagtatcag

SEQ ID NO: 91206 - DNA, 60 bp, Artificial
  Synthetic oligonucleotide
gaaaacgtcaacaaaagccagattgagaacagaattttcttttgcacctagaacgtggga

SEQ ID NO: 91207 - DNA, 60 bp, Artificial
  Synthetic oligonucleotide
atgaaaacgtcaacaaaagccagattgagaacagaattttcttttgcacctagaacgtgg

SEQ ID NO: 91208 - DNA, 60 bp, Artificial
  Synthetic oligonucleotide
gtctcctacaatgacgccagcgtccgtagaaatgaaggaaaagaaacttcctattgattt

SEQ ID NO: 91209 - DNA, 60 bp, Artificial
  Synthetic oligonucleotide
ggggaatgaagtaggtggagacggagggtctggccaaataagttgcagcccagtgtttgc

SEQ ID NO: 91210 - DNA, 60 bp, Artificial
  Synthetic oligonucleotide
gggaaatgaagtaggtggagacggagggtctggccaaataagttgcagcccagtgtttgc

SEQ ID NO: 91211 - DNA, 60 bp, Artificial
  Synthetic oligonucleotide
gtctcctacaatgacgccagcgtctgtagaaatgaaggagaagaaatttcctattgattt

SEQ ID NO: 91212 - DNA, 60 bp, Artificial
  Synthetic oligonucleotide
ttcttaaaatgtcgctgtttggagacacaattgcctacctgctttcactaacagaagatg

SEQ ID NO: 91213 - DNA, 60 bp, Artificial
  Synthetic oligonucleotide
tttctgctgaagagataataaaaatgggtgaaacagtcttggaggtagaagaactgcagt

SEQ ID NO: 91214 - DNA, 60 bp, Artificial
  Synthetic oligonucleotide
catgaagcatttgaaatagcagaaggccatgaaagctcagcattgctatattgtctcatg

SEQ ID NO: 91215 - DNA, 60 bp, Artificial
  Synthetic oligonucleotide
cgttactatattgtctcatggtcatgtacctgaatcctggaaattattcaatgcaagtaa

SEQ ID NO: 91216 - DNA, 60 bp, Artificial
  Synthetic oligonucleotide
aaaatccatgaacgaagaatttgtggttttaaacaaaggaaagtctgcaaacgacatcat

SEQ ID NO: 91217 - DNA, 60 bp, Artificial
  Synthetic oligonucleotide
acacaaatgcgatgtgcaaattctgtgtaaagaactggatagtggcaacaggtttcaggg

SEQ ID NO: 91218 - DNA, 60 bp, Artificial
  Synthetic oligonucleotide
acgacatcatttcagacacaaatgcgatgtgcaaattctgtgtaaagaactggatagtgg

SEQ ID NO: 91219 - DNA, 60 bp, Artificial
  Synthetic oligonucleotide
ggtttcaggggaagaacgatgtcagatttaattgaacaccatttcagatgcatgcaaggg

SEQ ID NO: 91220 - DNA, 60 bp, Artificial
  Synthetic oligonucleotide
tggatagtggcaacaggtttcaggggaagaacgatgtcagatttaattgaacaccatttc

SEQ ID NO: 91221 - DNA, 60 bp, Artificial
  Synthetic oligonucleotide
tacttcaagaagcttcagactactctctttcttgaagaacagcgagaggaccaaactcga

SEQ ID NO: 91222 - DNA, 51 bp, Artificial
  Synthetic oligonucleotide
caagtacaacgaaaggcttaaaagaaaacagctaagcaaagaagaagtgaa

SEQ ID NO: 91223 - DNA, 60 bp, Artificial
  Synthetic oligonucleotide
ccaaactcgagccgagagcagtgttcacagcaggagttccatggagggcattcatcttcg

SEQ ID NO: 91224 - DNA, 60 bp, Artificial
  Synthetic oligonucleotide
ctaggtctgaaggggaagggaggtagactgacagtaaaagacttgaaagcaaggaagctt

SEQ ID NO: 91225 - DNA, 60 bp, Artificial
  Synthetic oligonucleotide
cagaaacccattactaggtctgaaggggaagggaggtagactgacagtaaaagacttgaa

SEQ ID NO: 91226 - DNA, 60 bp, Artificial
  Synthetic oligonucleotide
aacaaggccaaaaggatgtacgaaacagtcgtggacagaaacccattactaggtctgaag

SEQ ID NO: 91227 - DNA, 60 bp, Artificial
  Synthetic oligonucleotide
ttcaatgatgcaatgaacaaggccaaaaggatgtacgaaacagtcgtggacagaaaccca

SEQ ID NO: 91228 - DNA, 60 bp, Artificial
  Synthetic oligonucleotide
gaactgttaaaacgaggaacccaaaagataaaatcttcaatgatgcaatgaacaaggcca

SEQ ID NO: 91229 - DNA, 60 bp, Artificial
  Synthetic oligonucleotide
cggacatgagaagaagaactgttaaaacgaggaacccaaaagataaaatcttcaatgatg

SEQ ID NO: 91230 - DNA, 60 bp, Artificial
  Synthetic oligonucleotide
atcttgggacacttcgaaaacagcacttgtggtcataaggaaaaatgaaacggacatgag

SEQ ID NO: 91231 - DNA, 60 bp, Artificial
  Synthetic oligonucleotide
agctgtgaacagaggacattggaaagctgccaagtacatcaaatcttgctgcagcataga

SEQ ID NO: 91232 - DNA, 60 bp, Artificial
  Synthetic oligonucleotide
cgagccgagagcagtgttcacagcaggagttccatggagggcattcatcttcgtcctaga

SEQ ID NO: 91233 - DNA, 60 bp, Artificial
  Synthetic oligonucleotide
ttcatcttcgtcctagaacagacaatgctggtggtaaacaaactggacccgaattcagtg

SEQ ID NO: 91234 - DNA, 60 bp, Artificial
  Synthetic oligonucleotide
cctagaacagacaatgctggtggtaaacaaactggacccgaattcagtgatatggatggg

SEQ ID NO: 91235 - DNA, 60 bp, Artificial
  Synthetic oligonucleotide
gaattcagtgatatggatgggaagtgatgcaaagataaacaccacaaactccaggataaa

SEQ ID NO: 91236 - DNA, 60 bp, Artificial
  Synthetic oligonucleotide
ggatgggaagtgatgcaaagataaacaccacaaactccaggataaaggaaatagggatga

SEQ ID NO: 91237 - DNA, 60 bp, Artificial
  Synthetic oligonucleotide
ccaggataaaggaaatagggatgaaaaatcaaggacaaacactagtgacactcacaggag

SEQ ID NO: 91238 - DNA, 60 bp, Artificial
  Synthetic oligonucleotide
ctcacaggagataactccaaatacaacgagagcatgtgcccagaggtgatgatggtgttc

SEQ ID NO: 91239 - DNA, 60 bp, Artificial
  Synthetic oligonucleotide
ctccaaatacaacgagagcatgtgcccagaggtgatgatggtgttcctaagagaactagg

SEQ ID NO: 91240 - DNA, 60 bp, Artificial
  Synthetic oligonucleotide
cctaagagaactaggaataaaaggaccaatgttggaagtactggactatgcgctgtggca

SEQ ID NO: 91241 - DNA, 60 bp, Artificial
  Synthetic oligonucleotide
ggcgtggctgacttggggctggtgaaatatctaatcaacaacaagtacgatgaagcagaa

SEQ ID NO: 91242 - DNA, 60 bp, Artificial
  Synthetic oligonucleotide
gatgaagcagaaaagacaagtttaaggaagtcaatggaagaagcattcgaaaaatccatg

SEQ ID NO: 91243 - DNA, 60 bp, Artificial
  Synthetic oligonucleotide
caaacagttggaagacgagaacttagacgaaactgtaggcgtggctgacttggggctggt

SEQ ID NO: 91244 - DNA, 60 bp, Artificial
  Synthetic oligonucleotide
gggaaaacaaagagatttatcattgacctgttcggaatgaagagaatgtgggacatcgga

SEQ ID NO: 91245 - DNA, 60 bp, Artificial
  Synthetic oligonucleotide
gtgggacatcggaaacaaacagttggaagacgagaacttagacgaaactgtaggcgtggc

SEQ ID NO: 91246 - DNA, 60 bp, Artificial
  Synthetic oligonucleotide
ctctgatcagtatgtcaaacgatgtatcttgtctttatgtttacgatggaccaatgagag

SEQ ID NO: 91247 - DNA, 60 bp, Artificial
  Synthetic oligonucleotide
caaggaagcttattgatgaagtagaagttgttaagaagagaaagcatgtttgattgtgtg

SEQ ID NO: 91248 - DNA, 60 bp, Artificial
  Synthetic oligonucleotide
ccaagaccgtgggaattacctcagagctttgatggaattgccttaaaagaagctgtgaac

SEQ ID NO: 91249 - DNA, 60 bp, Artificial
  Synthetic oligonucleotide
ttacctcagagctttgatggaattgccttaaaagaagctgtgaacagaggacattggaaa

SEQ ID NO: 91250 - DNA, 60 bp, Artificial
  Synthetic oligonucleotide
cggtaaagtgatggcaaacggaggaaactttgagaacatgacagttcctggaggattagg

SEQ ID NO: 91251 - DNA, 60 bp, Artificial
  Synthetic oligonucleotide
cctggaggattaggaccatctacagatctctttgtcgtggggaaacaagcaagaaactcc

SEQ ID NO: 91252 - DNA, 60 bp, Artificial
  Synthetic oligonucleotide
tggagatgtgcaaaataggaatcacaaatgttgagaaagtttactatggaaacagaaaat

SEQ ID NO: 91253 - DNA, 60 bp, Artificial
  Synthetic oligonucleotide
ggctagagatggctcttaaagtgagcaaagccgcaggtctgaacgtatcacagaagaagt

SEQ ID NO: 91254 - DNA, 60 bp, Artificial
  Synthetic oligonucleotide
tcaaggagttgaatggatggacgacggatttgtgagagtgaggagaggaatgttgatggg

SEQ ID NO: 91255 - DNA, 51 bp, Artificial
  Synthetic oligonucleotide
cctataaagaagagaaccggcaagtctaccgtggtgataaaagcagattcc

SEQ ID NO: 91256 - DNA, 60 bp, Artificial
  Synthetic oligonucleotide
ctgtggcaattttcacagaagagtgtaaaacctgtcgcacctataaagaagagaaccggc

SEQ ID NO: 91257 - DNA, 60 bp, Artificial
  Synthetic oligonucleotide
tggactatgcgctgtggcaattttcacagaagagtgtaaaacctgtcgcacctataaaga

SEQ ID NO: 91258 - DNA, 60 bp, Artificial
  Synthetic oligonucleotide
tcctcttttagtttcacaccagaagctgtgtacacattacagagctcagacgacttcgtt

SEQ ID NO: 91259 - DNA, 60 bp, Artificial
  Synthetic oligonucleotide
ggcaaacaacgcttttaccacagcttctacaattgcctcctcttttagtttcacaccaga

SEQ ID NO: 91260 - DNA, 60 bp, Artificial
  Synthetic oligonucleotide
tgttgatgggaatggcaaacaacgcttttaccacagcttctacaattgcctcctctttta

SEQ ID NO: 91261 - DNA, 60 bp, Artificial
  Synthetic oligonucleotide
gatggacgacggatttgtgagagtgaggagaggaatgttgatgggaatggcaaacaacgc

SEQ ID NO: 91262 - DNA, 60 bp, Artificial
  Synthetic oligonucleotide
cgacttcgttacaggtagctgtggaagagacgtgcaacacgcaagacaaaggctagagat

SEQ ID NO: 91263 - DNA, 60 bp, Artificial
  Synthetic oligonucleotide
acaaagggcggttacttcatcctcaaaatccctttgtgggacatttgtctattgaaggca

SEQ ID NO: 91264 - DNA, 60 bp, Artificial
  Synthetic oligonucleotide
acaaagggcggttacttcatcctcaaaatccctttgtgggacatttgtctattgagggca

SEQ ID NO: 91265 - DNA, 60 bp, Artificial
  Synthetic oligonucleotide
cggtgaaaacaagttccagagaatcatggacactctatgtacaagcttcctgattgaccc

SEQ ID NO: 91266 - DNA, 60 bp, Artificial
  Synthetic oligonucleotide
gtacaagcttcctgattgaccctccaagaactaccaaatgcttcattccacctatttcca

SEQ ID NO: 91267 - DNA, 60 bp, Artificial
  Synthetic oligonucleotide
gaagatgtcgcacagaggagcaacgcctcctgactagcgcactgaaaatcagcgacggtg

SEQ ID NO: 91268 - DNA, 60 bp, Artificial
  Synthetic oligonucleotide
gaaaatcagcgacggtgaaaacaagttccagagaatcatggacactctatgtacaagctt

SEQ ID NO: 91269 - DNA, 57 bp, Artificial
  Synthetic oligonucleotide
agaggacgcctgcaagatctgcagagaagccaaactgaaagtgggggtaaacagtac

SEQ ID NO: 91270 - DNA, 60 bp, Artificial
  Synthetic oligonucleotide
ctagaacatgcgttgcagtgtcaatggttgcaacagctttttgttctgcagatatcatcg

SEQ ID NO: 91271 - DNA, 60 bp, Artificial
  Synthetic oligonucleotide
gcttcctgattgaccctccaagaactaccaaatgcttcattccacctatttccagtctca

SEQ ID NO: 91272 - DNA, 53 bp, Artificial
  Synthetic oligonucleotide
cctatttccagtctcatgatgtacatccaagaaggcaactctgtactggcaat

SEQ ID NO: 91273 - DNA, 60 bp, Artificial
  Synthetic oligonucleotide
gatatcatcgagaatgcagtgcctggttccgaaaggtacagatccaacatcaaggctaac

SEQ ID NO: 91274 - DNA, 60 bp, Artificial
  Synthetic oligonucleotide
gaatgcagtgcctggttccgaaaggtacagatccaacatcaaggctaacacaaccaaacc

SEQ ID NO: 91275 - DNA, 60 bp, Artificial
  Synthetic oligonucleotide
gtctacgttgacaaaaagattagagaattcctggtagaagagaaaatgaaggacatgagc

SEQ ID NO: 91276 - DNA, 60 bp, Artificial
  Synthetic oligonucleotide
aagattagagaattcctggtagaagagaaaatgaaggacatgagcacaagagtgtctggg

SEQ ID NO: 91277 - DNA, 60 bp, Artificial
  Synthetic oligonucleotide
ggacatgagcacaagagtgtctggggcagtggcagcagcaattgaaagatcagttgaatt

SEQ ID NO: 91278 - DNA, 60 bp, Artificial
  Synthetic oligonucleotide
cagttgaatttgacaatttctcaaaagaagcagcagctaacattgaaatggctggtgtag

SEQ ID NO: 91279 - DNA, 60 bp, Artificial
  Synthetic oligonucleotide
agcaaagattgctcaaatcccaaaaataatacagaaaacgtataagagatggccgataaa

SEQ ID NO: 91280 - DNA, 60 bp, Artificial
  Synthetic oligonucleotide
ggtatgacttattcttttgatgtcagagacaacaccttggttgtaagaagatctaccgct

SEQ ID NO: 91281 - DNA, 60 bp, Artificial
  Synthetic oligonucleotide
gtctggtagacaacagaaggaagaacaaaggggtctcaaacatggcctacaatctgtctc

SEQ ID NO: 91282 - DNA, 60 bp, Artificial
  Synthetic oligonucleotide
aatctgtctctattcatagggatggtgtttcctgctctcactactttcttcagtgctatc

SEQ ID NO: 91283 - DNA, 60 bp, Artificial
  Synthetic oligonucleotide
acttgctgtgttcaaccaaggggcaattagagaaatgctaggagacggaacatcagagac

SEQ ID NO: 91284 - DNA, 60 bp, Artificial
  Synthetic oligonucleotide
agttggcaagtgaacgtgactgacagcttcggaggacttgctgtgttcaaccaaggggca

SEQ ID NO: 91285 - DNA, 60 bp, Artificial
  Synthetic oligonucleotide
gaaatcagctattgttatctctggtgtgggactgttctctattgactttgaaggggtaga

SEQ ID NO: 91286 - DNA, 60 bp, Artificial
  Synthetic oligonucleotide
gctgtgttcaaccaaggggcaattagagaaatgctaggagacggaacatcagagacaact

SEQ ID NO: 91287 - DNA, 60 bp, Artificial
  Synthetic oligonucleotide
gacttagattgtctaacgtgaggtatgaagcaagacctgaaacatcacaaagcaacacag

SEQ ID NO: 91288 - DNA, 60 bp, Artificial
  Synthetic oligonucleotide
caaggctaacacaaccaaaccaaaaaaggactccacttacacaattcaaggacttagatt

SEQ ID NO: 91289 - DNA, 60 bp, Artificial
  Synthetic oligonucleotide
agcaacacagacagaagttggcaagtgaacgtgactgacagcttcggaggacttgctgtg

SEQ ID NO: 91290 - DNA, 60 bp, Artificial
  Synthetic oligonucleotide
acgtgaggtatgaagcaagacctgaaacatcacaaagcaacacagacagaagttggcaag

SEQ ID NO: 91291 - DNA, 60 bp, Artificial
  Synthetic oligonucleotide
atgtaacttcctaattaccctatattgtttgaatatataatgaaactattgtgtgttaaa

SEQ ID NO: 91292 - DNA, 60 bp, Artificial
  Synthetic oligonucleotide
gttatctctggtgtgggactgttctctattgactttgaaggggtagaggaagcggaaaga

SEQ ID NO: 91293 - DNA, 60 bp, Artificial
  Synthetic oligonucleotide
gggcaaacattccgagcaagtacctaagacacatgaggaactgcggaggagtagctctgg

SEQ ID NO: 91294 - DNA, 60 bp, Artificial
  Synthetic oligonucleotide
ctggcagaaggggcaaacattccgagcaagtacctaagacacatgaggaactgcggagga

SEQ ID NO: 91295 - DNA, 60 bp, Artificial
  Synthetic oligonucleotide
gaagtaaacttgaacgatctcaaagcagcattcaggcagagtagacctaaaagatcggac

SEQ ID NO: 91296 - DNA, 60 bp, Artificial
  Synthetic oligonucleotide
aaagtcaagcaagttgaagtaaacttgaacgatctcaaagcagcattcaggcagagtaga

SEQ ID NO: 91297 - DNA, 60 bp, Artificial
  Synthetic oligonucleotide
gggtggacatggctgatgtaaccaagctgaacgtagtcacggctaacggaaaagtcaagc

SEQ ID NO: 91298 - DNA, 60 bp, Artificial
  Synthetic oligonucleotide
agaaggtgaaatgagcatctggcaaaatggacaagcaatcatgagaattctggcactggc

SEQ ID NO: 91299 - DNA, 60 bp, Artificial
  Synthetic oligonucleotide
cagtgctatcctatcagaaggtgaaatgagcatctggcaaaatggacaagcaatcatgag

SEQ ID NO: 91300 - DNA, 60 bp, Artificial
  Synthetic oligonucleotide
catagggatggtgtttcctgctctcactactttcttcagtgctatcctatcagaaggtga

SEQ ID NO: 91301 - DNA, 60 bp, Artificial
  Synthetic oligonucleotide
gtaagaggaagatgtcgcacagaggagcaacgcctcctgactagcgcactgaaaatcagc

SEQ ID NO: 91302 - DNA, 60 bp, Artificial
  Synthetic oligonucleotide
ctgcggaggagtagctctggacctgatgggaatgaagaggatcaaaaactcacctgaagg

SEQ ID NO: 91303 - DNA, 60 bp, Artificial
  Synthetic oligonucleotide
aggaggtggaactttagtggctgaagccattcgatttataggaagagcaatggcagacag

SEQ ID NO: 91304 - DNA, 60 bp, Artificial
  Synthetic oligonucleotide
tggaggacaacatgaccacaacacaaattgaggtgggtccgggagcaaccaatgccacca

SEQ ID NO: 91305 - DNA, 60 bp, Artificial
  Synthetic oligonucleotide
aaatggaggacaacatgaccacaacacaaattgaggtgggtccgggagcaaccaatgcca

SEQ ID NO: 91306 - DNA, 60 bp, Artificial
  Synthetic oligonucleotide
aaaatggcggacaacatgaccacaacacaaattgaggtgggtccaggagcaaccaatgcc

SEQ ID NO: 91307 - DNA, 60 bp, Artificial
  Synthetic oligonucleotide
aaatggcggacaacatgaccacaacacaaattgaggtgggtccgggagcaaccaatgcca

SEQ ID NO: 91308 - DNA, 53 bp, Artificial
  Synthetic oligonucleotide
aaaatggcggacaacatgaccacaacacaaattgaggtgggtccgggagcaac

SEQ ID NO: 91309 - DNA, 57 bp, Artificial
  Synthetic oligonucleotide
aaaatggcggacaacatgaccacaacacaaattgaggtgggtccgggagcaaccaat

SEQ ID NO: 91310 - DNA, 59 bp, Artificial
  Synthetic oligonucleotide
aaaatggcgaacaacatgaccacaacacaaattgaggtgggtccgggagcaaccaatgc

SEQ ID NO: 91311 - DNA, 60 bp, Artificial
  Synthetic oligonucleotide
aaaatggcggacaacatgaccacaacacaaattgaggtgggtccgggagcaaccaatgcc

SEQ ID NO: 91312 - DNA, 54 bp, Artificial
  Synthetic oligonucleotide
tcaactcactcttcgagcgtttcaatgaaggacattcaaagccaattcgagcag

SEQ ID NO: 91313 - DNA, 60 bp, Artificial
  Synthetic oligonucleotide
cttacagtggaggatgaagaagatggccatcggatcctcaactcactcttcgagcgtttc

SEQ ID NO: 91314 - DNA, 60 bp, Artificial
  Synthetic oligonucleotide
gagacaattagactggttacggaagaactttatcttttaagtaaaagaattgatgataac

SEQ ID NO: 91315 - DNA, 60 bp, Artificial
  Synthetic oligonucleotide
gagacaattagactggttacagaagaactttatcttttaagtaaaagaattgatgataac

SEQ ID NO: 91316 - DNA, 55 bp, Artificial
  Synthetic oligonucleotide
aaaatggcgaacaacatgaccacaacacaaattgaggtgggtccgggagcaacca

SEQ ID NO: 91317 - DNA, 51 bp, Artificial
  Synthetic oligonucleotide
aaaatggcggacaacatgaccacaacacaaattgaggtgggtccaggagca

SEQ ID NO: 91318 - DNA, 58 bp, Artificial
  Synthetic oligonucleotide
aaaatggcggacaacatgaccacaacacaaattgaggtgggtccgggagcaaccaatg

SEQ ID NO: 91319 - DNA, 56 bp, Artificial
  Synthetic oligonucleotide
aaaatggcggacaacatgaccacaacacaaattgaggtgggtccaggagcaaccaa

SEQ ID NO: 91320 - DNA, 60 bp, Artificial
  Synthetic oligonucleotide
aaaatggaggacaacatgaccacaacacaaattgaggtgggtccgggagcaaccaatgcc

SEQ ID NO: 91321 - DNA, 60 bp, Artificial
  Synthetic oligonucleotide
gttggtgacccaactgaaatagtattaagggacatgaacaacaaagatgcaaggcaaaag

SEQ ID NO: 91322 - DNA, 59 bp, Artificial
  Synthetic oligonucleotide
aaaatggcggacaacatgaccacaacacaaattgaggtgggtccgggagcaaccaatgc

SEQ ID NO: 91323 - DNA, 60 bp, Artificial
  Synthetic oligonucleotide
atgttgatggcccaactgaaatagtattaagggacatgaacaacaaagatgcaaggcaaa

SEQ ID NO: 91324 - DNA, 60 bp, Artificial
  Synthetic oligonucleotide
gagacaattagactggtcacggaagaactttatcttttaagtaaaagaattgatgacagc

SEQ ID NO: 91325 - DNA, 60 bp, Artificial
  Synthetic oligonucleotide
gagacaattagactggtcacggaagaactttatcttttaagtaaaagaattgatgataac

SEQ ID NO: 91326 - DNA, 60 bp, Artificial
  Synthetic oligonucleotide
gttgatggcccaactgaaatagtattaagggacatgaacaacaaagatgcaaggcaaaag

SEQ ID NO: 91327 - DNA, 53 bp, Artificial
  Synthetic oligonucleotide
aaaatggcgaacaacatgaccacaacacaaattgaggtgggtccgggagcaac

SEQ ID NO: 91328 - DNA, 60 bp, Artificial
  Synthetic oligonucleotide
ctggtcacggaagaactttatcttttaagtaaaagaattgatgacagcatattgttccac

SEQ ID NO: 91329 - DNA, 60 bp, Artificial
  Synthetic oligonucleotide
gtcccctacaatgacgccagcgtccgtagaaatgaagggaaagaaacttcctattgattt

SEQ ID NO: 91330 - DNA, 60 bp, Artificial
  Synthetic oligonucleotide
gtctcctacaatgacgccagcgtccgtagaaatgaagggaaagaaacttcctattgattt

SEQ ID NO: 91331 - DNA, 60 bp, Artificial
  Synthetic oligonucleotide
atctcctacaatgacgccagcgtccgtagaaatgaagggaaagaaacttcctattgattt

SEQ ID NO: 91332 - DNA, 60 bp, Artificial
  Synthetic oligonucleotide
gtctcttacaatgacgccagcgtccgtagaaatgaagggaaagaaacttcctattgattt

SEQ ID NO: 91333 - DNA, 60 bp, Artificial
  Synthetic oligonucleotide
acaacagttagaatgaagaaaggagagtcagttattggaagagaagtccctctttattta

SEQ ID NO: 91334 - DNA, 60 bp, Artificial
  Synthetic oligonucleotide
gaagaaaggagagtcagttattggaagagaagtccctctttatttatactgtaggacaac

SEQ ID NO: 91335 - DNA, 60 bp, Artificial
  Synthetic oligonucleotide
tctttatttatactgtaggacaactgccctttccaaaatcaagaatgactggctatcaaa

SEQ ID NO: 91336 - DNA, 60 bp, Artificial
  Synthetic oligonucleotide
ctgtaggacaactgccctttccaaaatcaagaatgactggctatcaaaggctagaagatg

SEQ ID NO: 91337 - DNA, 60 bp, Artificial
  Synthetic oligonucleotide
atgcaagaagggcttccggtgccctcagaaatggactgtttatttggtatatgcgtcaag

SEQ ID NO: 91338 - DNA, 60 bp, Artificial
  Synthetic oligonucleotide
caaggatgatggaatgtacacaataataacatttgaattctcaataagagagcctaattt

SEQ ID NO: 91339 - DNA, 60 bp, Artificial
  Synthetic oligonucleotide
aagagctggtgaaattctcattgatttcttcaagaaagggaatctttctgcaatcagacc

SEQ ID NO: 91340 - DNA, 59 bp, Artificial
  Synthetic oligonucleotide
aagggaatctttctgcaatcagacccaaagacaaaccattacaagggaaatatcccata

SEQ ID NO: 91341 - DNA, 60 bp, Artificial
  Synthetic oligonucleotide
ataaatttcgacaaatacgtctaccaaagggaccaatggcaccctatacccacaagttct

SEQ ID NO: 91342 - DNA, 60 bp, Artificial
  Synthetic oligonucleotide
tgatccagaaagatcaagagctggtgaaattctcattgatttcttcaagaaagggaatct

SEQ ID NO: 91343 - DNA, 60 bp, Artificial
  Synthetic oligonucleotide
aattgagggatgaaagtgttcctttaccttttcaaacttatgaacagatgaaagattact

SEQ ID NO: 91344 - DNA, 60 bp, Artificial
  Synthetic oligonucleotide
gaataaatttcgacaaatacgtctaccaaagggaccaatggcaccctatacccacaagtt

SEQ ID NO: 91345 - DNA, 60 bp, Artificial
  Synthetic oligonucleotide
agacaatgaagaaaccatcattgaaatgaagaaaggaaaaacatttctaaaattgaggga

SEQ ID NO: 91346 - DNA, 60 bp, Artificial
  Synthetic oligonucleotide
aacatttctaaaattgagggatgaaagtgttcctttaccttttcaaacttatgaacagat

SEQ ID NO: 91347 - DNA, 60 bp, Artificial
  Synthetic oligonucleotide
aaggccctatggaggaacaaaaattgagaattttcagttttcttgcaactgctgctgatt

SEQ ID NO: 91348 - DNA, 60 bp, Artificial
  Synthetic oligonucleotide
atcttcttaccagacaatgaagaaaccatcattgaaatgaagaaaggaaaaacatttcta

SEQ ID NO: 91349 - DNA, 60 bp, Artificial
  Synthetic oligonucleotide
agcctaatttagaaaaacatcaaaaatatactgtatttgaagcaggacacacaacagtta

SEQ ID NO: 91350 - DNA, 60 bp, Artificial
  Synthetic oligonucleotide
gagccagaagctgtgagaatagccaaagaagcagtagaagaatatggggatcacgaaaga

SEQ ID NO: 91351 - DNA, 60 bp, Artificial
  Synthetic oligonucleotide
gacttttctagagccagaagctgtgagaatagccaaagaagcagtagaagaatatgggga

SEQ ID NO: 91352 - DNA, 60 bp, Artificial
  Synthetic oligonucleotide
agcctaatttagaaaaacatcaaaaatatactgtatttgaagctggacacacaacagtta

SEQ ID NO: 91353 - DNA, 52 bp, Artificial
  Synthetic oligonucleotide
gtggattgggaagaaaaatggagagttaattgctcaacctttaagagaagct

SEQ ID NO: 91354 - DNA, 53 bp, Artificial
  Synthetic oligonucleotide
accatatgtctaagagagtcagcaaaggctgaagaaaatctagttgaaaagac

SEQ ID NO: 91355 - DNA, 60 bp, Artificial
  Synthetic oligonucleotide
aaatcaatgcaagaagggcttccggtgccctcagaaatggactgtttatttggtatatgc

SEQ ID NO: 91356 - DNA, 60 bp, Artificial
  Synthetic oligonucleotide
ctgttggggcactaatgactgaatgtagactatttcctgggaaaataaaagtggtgccca

SEQ ID NO: 91357 - DNA, 60 bp, Artificial
  Synthetic oligonucleotide
gggtgcccatggcagaataccctcctgctgataatgaattggaagattacgctgaacatc

SEQ ID NO: 91358 - DNA, 60 bp, Artificial
  Synthetic oligonucleotide
gatgggtgcccatggcagaataccctcctgctgataatgaattggaagattacgctgaac

SEQ ID NO: 91359 - DNA, 60 bp, Artificial
  Synthetic oligonucleotide
ttcttactgttggggcactaatgactgaatgtagactatttcctgggaaaataaaagtgg

SEQ ID NO: 91360 - DNA, 59 bp, Artificial
  Synthetic oligonucleotide
tacgctgaacatctaaataaaaccatggaaggggtcttgcaaggaacaaattgcgcaag

SEQ ID NO: 91361 - DNA, 60 bp, Artificial
  Synthetic oligonucleotide
atgatcattcagagtttctaggaggaattggaagagcctctaaaaagatcccagaggttt

SEQ ID NO: 91362 - DNA, 60 bp, Artificial
  Synthetic oligonucleotide
cattcagagtttctaggaggaattggaagagcctctaaaaagatcccagaggtttctctg

SEQ ID NO: 91363 - DNA, 60 bp, Artificial
  Synthetic oligonucleotide
gtggatgtgggcaataaaagattctgaccttactggatgggtgcccatggcagaataccc

SEQ ID NO: 91364 - DNA, 60 bp, Artificial
  Synthetic oligonucleotide
atggttcaatgctgagtggatgtgggcaataaaagattctgaccttactggatgggtgcc

SEQ ID NO: 91365 - DNA, 60 bp, Artificial
  Synthetic oligonucleotide
ggctatcaaaggctagaagatgtttcatcacaactatggacacagtggaaaccatatgtc

SEQ ID NO: 91366 - DNA, 60 bp, Artificial
  Synthetic oligonucleotide
tgtaagaatagccaaagaagcagtagaagaatatggggatcacgaaagaaaaataataca

SEQ ID NO: 91367 - DNA, 60 bp, Artificial
  Synthetic oligonucleotide
aatatggggatcacgaaagaaaaataatacaaattggaatacactttcaagtttgctgca

SEQ ID NO: 91368 - DNA, 60 bp, Artificial
  Synthetic oligonucleotide
aaataatacaaattggaatacactttcaagtttgctgcatgttctgtgatgagtatttga

SEQ ID NO: 91369 - DNA, 60 bp, Artificial
  Synthetic oligonucleotide
gaatacactttcaagtttgctgcatgttctgtgatgagtatttgagtacaaatgggagtg

SEQ ID NO: 91370 - DNA, 60 bp, Artificial
  Synthetic oligonucleotide
gtttgctgcatgttctgtgatgagtatttgagtacaaatgggagtgatagatttgtgctc

SEQ ID NO: 91371 - DNA, 60 bp, Artificial
  Synthetic oligonucleotide
gctgcatgttctgtgatgagtatttgagtacaaatgggagtgatagatttgtgctcattg

SEQ ID NO: 91372 - DNA, 52 bp, Artificial
  Synthetic oligonucleotide
cagtgtctttacaaaatgagctatgtaaaagttatgaccttgaaccactacc

SEQ ID NO: 91373 - DNA, 52 bp, Artificial
  Synthetic oligonucleotide
cagtgtctttacaaaatgagctatgtaaaagttatgatcttgaaccactacc

SEQ ID NO: 91374 - DNA, 60 bp, Artificial
  Synthetic oligonucleotide
aaagcagatgatagctattttcaatccaagtttggtaaacttggaaatagctgcaagata

SEQ ID NO: 91375 - DNA, 60 bp, Artificial
  Synthetic oligonucleotide
ctgcaagatatttgtattctcctatgatggaagattagacaaaaattgtgaaggccctat

SEQ ID NO: 91376 - DNA, 60 bp, Artificial
  Synthetic oligonucleotide
ggctagaagatgtttcatcacaactatggacacagtggaaaccatatgtctaagagagtc

SEQ ID NO: 91377 - DNA, 60 bp, Artificial
  Synthetic oligonucleotide
tggggggaatgaagtaggtggagacggagggtctggccaaataagttgcagcccagtgtt

SEQ ID NO: 91378 - DNA, 60 bp, Artificial
  Synthetic oligonucleotide
aactaggaacgctctgtgctttgtgcgagaaacaagcatcacattcacacagagctcata

SEQ ID NO: 91379 - DNA, 60 bp, Artificial
  Synthetic oligonucleotide
acgccagcgtccgtagaaatgaagggaaagaaacttcctattgattttgctccaagcaac

SEQ ID NO: 91380 - DNA, 60 bp, Artificial
  Synthetic oligonucleotide
cgccagcgtccgtagaaatgaagggaaagaaacttcctattgattttgctccaagcaaca

SEQ ID NO: 91381 - DNA, 60 bp, Artificial
  Synthetic oligonucleotide
tttcttaaaatgtcgctgtttggagacacaattgcctacctgctttcattaacagaagat

SEQ ID NO: 91382 - DNA, 60 bp, Artificial
  Synthetic oligonucleotide
ctttaaacttgggcaaacaatatctagattaagggatatatctgttccagctggtttctc

SEQ ID NO: 91383 - DNA, 60 bp, Artificial
  Synthetic oligonucleotide
ctttaaacttggacaaacaatatctagattaagggatatatctgttccagctggtttctc

SEQ ID NO: 91384 - DNA, 60 bp, Artificial
  Synthetic oligonucleotide
gattgccaccgctgggatacaaatcagagggtttgtattagtagttgaaaacttggctaa

SEQ ID NO: 91385 - DNA, 60 bp, Artificial
  Synthetic oligonucleotide
catgctttggacttgcttatgaagacttcagtttggtctctgctatggttagccaccctc

SEQ ID NO: 91386 - DNA, 54 bp, Artificial
  Synthetic oligonucleotide
cagagtcggtgaaaaagtttcaacagtgctttctcccttattgagattcacaag

SEQ ID NO: 91387 - DNA, 60 bp, Artificial
  Synthetic oligonucleotide
gcatgctttggacttgcttatgaagacttcagtttggtctctgctatggttagccaccct

SEQ ID NO: 91388 - DNA, 60 bp, Artificial
  Synthetic oligonucleotide
catgctttggacttgcttatgaagacttcagtttggtctctgctatggtcagccaccctc

SEQ ID NO: 91389 - DNA, 60 bp, Artificial
  Synthetic oligonucleotide
cagagtcggtgaaaaagtttcaacagtgctttctcccttattgagattcacaagatgggc

SEQ ID NO: 91390 - DNA, 60 bp, Artificial
  Synthetic oligonucleotide
atttgctcttcaggcaaatacttcaagagaaggcgctcaaatcagcaattcagcagtttt

SEQ ID NO: 91391 - DNA, 60 bp, Artificial
  Synthetic oligonucleotide
tatcaaagaggaagaaacgcagcaagaagaaacggttctgctgaattgttcactctcact

SEQ ID NO: 91392 - DNA, 60 bp, Artificial
  Synthetic oligonucleotide
tatcaaagaggaagaaatgcagcaagaagaaacggttctgctgaattgttcactctcact

SEQ ID NO: 91393 - DNA, 60 bp, Artificial
  Synthetic oligonucleotide
gaaacgcagcaagaagaaacggttctgctgaattgttcactctcactcaaggggctggaa

SEQ ID NO: 91394 - DNA, 60 bp, Artificial
  Synthetic oligonucleotide
aatgcagcaagaagaaacggttctgctgaattgttcactctcactcaaggggctggaatc

SEQ ID NO: 91395 - DNA, 60 bp, Artificial
  Synthetic oligonucleotide
gcaacttcaacgcagattccattgggatcagactagttaaaagagctggttcaggcacca

SEQ ID NO: 91396 - DNA, 60 bp, Artificial
  Synthetic oligonucleotide
acaagccgctcaagaattgttcaaattctcaaatctcattggggaaatgaactaaacaga

SEQ ID NO: 91397 - DNA, 60 bp, Artificial
  Synthetic oligonucleotide
caagccgctcaagaattgttcaaattctcaaatctcattggggaaatgaactaaacagag

SEQ ID NO: 91398 - DNA, 60 bp, Artificial
  Synthetic oligonucleotide
gccgctcaagaattgttcaaattctcaaatctcattggggaaatgaactaaacagagcaa

SEQ ID NO: 91399 - DNA, 60 bp, Artificial
  Synthetic oligonucleotide
cactctcactcaaggggctggaatcgaaactagatataaatggataatggaaaagcacat

SEQ ID NO: 91400 - DNA, 60 bp, Artificial
  Synthetic oligonucleotide
cactctcactcaaggggctggaattgaaactagatataaatggataatggaaaagcacat

SEQ ID NO: 91401 - DNA, 60 bp, Artificial
  Synthetic oligonucleotide
gcatgctttggacttgcttatgaagacttcagtttggtctctgctatggtcagccaccct

SEQ ID NO: 91402 - DNA, 60 bp, Artificial
  Synthetic oligonucleotide
ggaacgactggttcccctctggaaagagccatgcaaggaattgagaaaaaagcgtttcct

SEQ ID NO: 91403 - DNA, 60 bp, Artificial
  Synthetic oligonucleotide
gcaaaagaggagttgatgccaatgtaaaattgagagcaggaacgactggttcccctctgg

SEQ ID NO: 91404 - DNA, 60 bp, Artificial
  Synthetic oligonucleotide
ggcaaaagaggagttgatgccaatgtaaaattgagagcaggaacgactggttcccctctg

SEQ ID NO: 91405 - DNA, 53 bp, Artificial
  Synthetic oligonucleotide
agcaggaacgactggttcccctctggaaagagccatgcaaggaattgagaaaa

SEQ ID NO: 91406 - DNA, 60 bp, Artificial
  Synthetic oligonucleotide
agcaggaacgactggttcccctctggaaagagccatgcaaggaattgagaaaaaagcgtt

SEQ ID NO: 91407 - DNA, 60 bp, Artificial
  Synthetic oligonucleotide
ctcactcaaggggctggaattgaaactagatataaatggataatggaaaagcacatcgga

SEQ ID NO: 91408 - DNA, 60 bp, Artificial
  Synthetic oligonucleotide
ctcactcaaggggctggaatcgaaactagatataaatggataatggaaaagcacatcgga

SEQ ID NO: 91409 - DNA, 60 bp, Artificial
  Synthetic oligonucleotide
gaaagagagaaggcaaaagaggagttgatgccaatgtaaaattgagagcaggaacgactg

SEQ ID NO: 91410 - DNA, 60 bp, Artificial
  Synthetic oligonucleotide
aatggaaagagagaaggcaaaagaggagttgatgccaatgtaaaattgagagcaggaacg

SEQ ID NO: 91411 - DNA, 60 bp, Artificial
  Synthetic oligonucleotide
gcaagagaagcccaaagagcggacagcaacttcaatgcagattccattgggatcagacta

SEQ ID NO: 91412 - DNA, 60 bp, Artificial
  Synthetic oligonucleotide
tgatcctggaaaatggcatagcaattgaaaaagctataagaatatgttgtgatggaaagt

SEQ ID NO: 91413 - DNA, 60 bp, Artificial
  Synthetic oligonucleotide
ccttaatggcgatgaaatgttgatcctggaaaatggcatagcaattgaaaaagctataag

SEQ ID NO: 91414 - DNA, 60 bp, Artificial
  Synthetic oligonucleotide
gcctacattgccatttgtaaggaagtgggccttaatggcgatgaaatgttgatcctggaa

SEQ ID NO: 91415 - DNA, 60 bp, Artificial
  Synthetic oligonucleotide
agcctacattgccatttgtaaggaagtgggccttaatggcgatgaaatgttgatcctgga

SEQ ID NO: 91416 - DNA, 60 bp, Artificial
  Synthetic oligonucleotide
gagaacattgaagcctacattgccatttgtaaggaagtgggccttaatggcgatgaaatg

SEQ ID NO: 91417 - DNA, 60 bp, Artificial
  Synthetic oligonucleotide
ataataaatgagaacattgaagcctacattgccatttgtaaggaagtgggccttaatggc

SEQ ID NO: 91418 - DNA, 60 bp, Artificial
  Synthetic oligonucleotide
ccagatgagcaacgcaaagccaatgctctcataataaatgagaacattgaagcctacatt

SEQ ID NO: 91419 - DNA, 60 bp, Artificial
  Synthetic oligonucleotide
agcggacagcaacttcaacgcagattccattgggatcagactagttaaaagagctggttc

SEQ ID NO: 91420 - DNA, 60 bp, Artificial
  Synthetic oligonucleotide
caagagaagcccaaagagcggacagcaacttcaatgcagattccattgggatcagactag

SEQ ID NO: 91421 - DNA, 60 bp, Artificial
  Synthetic oligonucleotide
ggtcatgtacctgaaccctgggaattattcaatgcaagtaaaactaggaacactctgtgc

SEQ ID NO: 91422 - DNA, 60 bp, Artificial
  Synthetic oligonucleotide
gaagcttatatgctctcgcttagagaagctggaccataacctgagcaaagcagtcctggg

SEQ ID NO: 91423 - DNA, 53 bp, Artificial
  Synthetic oligonucleotide
aggaagatctgtggatacctcatcgctagacaagtggccggaattgaaacagg

SEQ ID NO: 91424 - DNA, 60 bp, Artificial
  Synthetic oligonucleotide
gaaatccagggattgcagacatagaagacctaaccctgcttgctcgtagtatggtcgttg

SEQ ID NO: 91425 - DNA, 59 bp, Artificial
  Synthetic oligonucleotide
aataatcttatgcatggtattttctcaagacactaggatgttccaaggagtgagaggag

SEQ ID NO: 91426 - DNA, 60 bp, Artificial
  Synthetic oligonucleotide
tacaggaaaccagtaggtcagcacagcatgcttgaggctatggcccacagattaagaatg

SEQ ID NO: 91427 - DNA, 60 bp, Artificial
  Synthetic oligonucleotide
aagcttatatgctctcgcttagagaagctggaccttaacctgagcaaagcagtcttaggg

SEQ ID NO: 91428 - DNA, 60 bp, Artificial
  Synthetic oligonucleotide
gaagcttatatgctctcgcttagagaagctggaccttaacctgagcaaagcagtcttagg

SEQ ID NO: 91429 - DNA, 60 bp, Artificial
  Synthetic oligonucleotide
agaaagtgcctgcaattgcatcgggggaaattgttatcttatgataactgatggctcagc

SEQ ID NO: 91430 - DNA, 60 bp, Artificial
  Synthetic oligonucleotide
tagaacatactgaagaatgcacatgcggatttgccagcaataaaaccatagaatgtgcct

SEQ ID NO: 91431 - DNA, 61 bp, Artificial
  Synthetic oligonucleotide
ggaaagcccgttaaagtagttaaaaggaaaagatatagtgctttatccaatgacatttcac

SEQ ID NO: 91432 - DNA, 60 bp, Artificial
  Synthetic oligonucleotide
aagtagtcaaaaggaaaagatatagtgctttatccaatgacatttcacaagggattaaga

SEQ ID NO: 91433 - DNA, 60 bp, Artificial
  Synthetic oligonucleotide
cgccagtatccgtagaaatgaagggaaagaaacttcctattgattttgctccaagcaaca

SEQ ID NO: 91434 - DNA, 60 bp, Artificial
  Synthetic oligonucleotide
gaaaacgtcaacaaaagccaggttgagaacagaatcctcttttgcacctagaacgtggga

SEQ ID NO: 91435 - DNA, 60 bp, Artificial
  Synthetic oligonucleotide
aatcataaaggagttatgggaaaacactaaaggaagagatggtctgttggtagcagatgg

SEQ ID NO: 91436 - DNA, 53 bp, Artificial
  Synthetic oligonucleotide
ttgaaaaattcatttgtaatgagaactaaagatgtctttgtgttcaaatttta

SEQ ID NO: 91437 - DNA, 60 bp, Artificial
  Synthetic oligonucleotide
gtctcctacaatgacgccagcgtctgtagaaatgaaggggaagaaatttcctattgattt

SEQ ID NO: 91438 - DNA, 60 bp, Artificial
  Synthetic oligonucleotide
caaagctattaaaggaaaggggtttcttcggagctattgctggtttcttagaaggaggat

SEQ ID NO: 91439 - DNA, 60 bp, Artificial
  Synthetic oligonucleotide
ggaaaggggtttcttcggagctattgctggtttcttagagggaggatgggaaggaatgat

SEQ ID NO: 91440 - DNA, 60 bp, Artificial
  Synthetic oligonucleotide
tattaaaggaaaggggtttcttcggagctattgctggtttcttagaaggaggatgggaag

SEQ ID NO: 91441 - DNA, 60 bp, Artificial
  Synthetic oligonucleotide
gtcaacaaaagccagattgagaacagaatcctcttttgcacctagaacatgggaagatgc

SEQ ID NO: 91442 - DNA, 60 bp, Artificial
  Synthetic oligonucleotide
gaaaacgtcaacaaaagccaggctgaaaacagaatcctcttttgcacctagaacatggga

SEQ ID NO: 91443 - DNA, 58 bp, Artificial
  Synthetic oligonucleotide
gattgccaccgctggaatacaaatcagagggtttgtattagtagttgaaaacttggct

SEQ ID NO: 91444 - DNA, 60 bp, Artificial
  Synthetic oligonucleotide
gttgtttatatggtctccagagacaatgtttcttgctccatctgtctataagggaagtta

SEQ ID NO: 91445 - DNA, 60 bp, Artificial
  Synthetic oligonucleotide
gttgtttatatggtctccagagacaatgtttcttgctccatctgtctataaggaaagtta

SEQ ID NO: 91446 - DNA, 60 bp, Artificial
  Synthetic oligonucleotide
tgtttatatggtctccagagacaatgtttcttgctccatctgtctataaggaaaattaag

SEQ ID NO: 91447 - DNA, 60 bp, Artificial
  Synthetic oligonucleotide
ggagagaaacctaatccaaaatgcacatgctgtggaaagaattctattggctgccactga

SEQ ID NO: 91448 - DNA, 60 bp, Artificial
  Synthetic oligonucleotide
aatacaaaaggccaaaaacacaatggcagaatttagtgaagaccctgaattacaaccagc

SEQ ID NO: 91449 - DNA, 60 bp, Artificial
  Synthetic oligonucleotide
taatacaaaaggccaaaaacacaatggcagaatttagtgaagatcctgaattacaaccag

SEQ ID NO: 91450 - DNA, 60 bp, Artificial
  Synthetic oligonucleotide
aaacacaatggcagaatttagtgaagatcctgaattacaaccagcaatgctattcaacat

SEQ ID NO: 91451 - DNA, 60 bp, Artificial
  Synthetic oligonucleotide
caaaaggccaaaaacacaatggcagaatttagtgaagatcctgaattacaaccagcaatg

SEQ ID NO: 91452 - DNA, 60 bp, Artificial
  Synthetic oligonucleotide
acaatggcagaatttagtgaagatcctgaattacaaccagcaatgctattcaacatctgc

SEQ ID NO: 91453 - DNA, 60 bp, Artificial
  Synthetic oligonucleotide
gaagtcattctacgttgaagggacaactttcgagttcaactctatgttcgtaagagacgg

SEQ ID NO: 91454 - DNA, 60 bp, Artificial
  Synthetic oligonucleotide
caatgctaccttcaactatacaaacgttaaccctatttctcacatcagggggagtgttat

SEQ ID NO: 91455 - DNA, 60 bp, Artificial
  Synthetic oligonucleotide
tatacaaacgttaaccctatttctcacatcagggggagtgttattatcactatatgtgtc

SEQ ID NO: 91456 - DNA, 60 bp, Artificial
  Synthetic oligonucleotide
aacgttaaccctatttctcacatcagggggagtgttattatcactatatgtgtcagcctt

SEQ ID NO: 91457 - DNA, 60 bp, Artificial
  Synthetic oligonucleotide
ggaatacaacttaaaacaaatgctgaagacataggaaccaaaggccaaatgtgctcaata

SEQ ID NO: 91458 - DNA, 60 bp, Artificial
  Synthetic oligonucleotide
ctgaaggctcagtttcttctaggaaaagaggacatgttccaatgggatgcatttgaagca

SEQ ID NO: 91459 - DNA, 60 bp, Artificial
  Synthetic oligonucleotide
ttggaatatgggacggagaagaggagttccatgtaagatgtggtgaatgcaggggaatat

SEQ ID NO: 91460 - DNA, 60 bp, Artificial
  Synthetic oligonucleotide
ttcacaagggattaagagacaaagaatgacagttgagtccatggggtgggccttgagcta

SEQ ID NO: 91461 - DNA, 55 bp, Artificial
  Synthetic oligonucleotide
gggattaagagacaaagaatgacagttgagtccatggggtgggccttgagctaat

SEQ ID NO: 91462 - DNA, 50 bp, Artificial
  Synthetic oligonucleotide
gggattaagagacaaagaatgacagttgagtccatggggtgggccttgag

SEQ ID NO: 91463 - DNA, 55 bp, Artificial
  Synthetic oligonucleotide
ggaattaaaagacaaagaatgacagttgagtccatggggtgggccttgagctaat

SEQ ID NO: 91464 - DNA, 52 bp, Artificial
  Synthetic oligonucleotide
attaagaggcaaagaatgacagttgagtccatggggtgggccttgagctaat

SEQ ID NO: 91465 - DNA, 52 bp, Artificial
  Synthetic oligonucleotide
attaagagacaaagaatgacagttgagtccatggggtgggccttgagctaac

SEQ ID NO: 91466 - DNA, 51 bp, Artificial
  Synthetic oligonucleotide
ttaagagacaaagaatgacagttgagtccatggggtgggccttgagctaat

SEQ ID NO: 91467 - DNA, 60 bp, Artificial
  Synthetic oligonucleotide
attacaagaaacttccagactacaataatacaaaaggccaaaaacacaatggcagaattt

SEQ ID NO: 91468 - DNA, 60 bp, Artificial
  Synthetic oligonucleotide
cagactacaataatacaaaaggccaaaaacacaatggcagaatttagtgaagatcctgaa

SEQ ID NO: 91469 - DNA, 60 bp, Artificial
  Synthetic oligonucleotide
cagtaggtcagcacagcatgcttgaggctatggcccacagattaagaatggatgcacgac

SEQ ID NO: 91470 - DNA, 60 bp, Artificial
  Synthetic oligonucleotide
atgaaaacgtcaacaaaagccaggctgaaaacagaatcctcttttgcacctagaacatgg

SEQ ID NO: 91471 - DNA, 60 bp, Artificial
  Synthetic oligonucleotide
cgccagcgtccgtagaaatgaagggaaagaaacttcctattgattttgctccaaacaaca

SEQ ID NO: 91472 - DNA, 60 bp, Artificial
  Synthetic oligonucleotide
cgccagcgtccgtagaaatgaagggaaagaaacttcctattaattttgctccaagcaaca

SEQ ID NO: 91473 - DNA, 60 bp, Artificial
  Synthetic oligonucleotide
gctttcattgggaagaaaatgtttcaaatatcagacaaaaacaaaaccaatcccattgaa

SEQ ID NO: 91474 - DNA, 60 bp, Artificial
  Synthetic oligonucleotide
gctttcattgggaagaaaatgtttcaaatatcagacaaaaacaaaaccaatcccattgag

SEQ ID NO: 91475 - DNA, 60 bp, Artificial
  Synthetic oligonucleotide
ggggagattgttatcttatgataactgatggctcagcttcagggattagtgaatgcagat

SEQ ID NO: 91476 - DNA, 60 bp, Artificial
  Synthetic oligonucleotide
atgaaaacgtcaacaaaagccaggttgagaacagaatcctcttttgcacctagaacatgg

SEQ ID NO: 91477 - DNA, 60 bp, Artificial
  Synthetic oligonucleotide
atgaagacgtcaacaaaagccaggttgagaacagaatcctcttttgcacctagaacatgg

SEQ ID NO: 91478 - DNA, 51 bp, Artificial
  Synthetic oligonucleotide
caatgctaccttcaactatacaaacgttaaccctatttctcacatcagggg

SEQ ID NO: 91479 - DNA, 60 bp, Artificial
  Synthetic oligonucleotide
agaccagatgatggaagcataacagggccttgcgaatctaatggggataaaggaagtgga

SEQ ID NO: 91480 - DNA, 60 bp, Artificial
  Synthetic oligonucleotide
agaccagatgatggaagcataacagggccttgcgaatctaatggggataaagggagtgga

SEQ ID NO: 91481 - DNA, 60 bp, Artificial
  Synthetic oligonucleotide
agaccagatgatggaagcataacagggccttgcgaatctaatggggataaagggcttgga

SEQ ID NO: 91482 - DNA, 60 bp, Artificial
  Synthetic oligonucleotide
agaccagatgatggaagcataacagggccttgcgaatctaatggggataaagggcgtgga

SEQ ID NO: 91483 - DNA, 60 bp, Artificial
  Synthetic oligonucleotide
tgctgggcccctctgctgtagagatagggaatggatgcttcgaaaccaaacacaagtgca

SEQ ID NO: 91484 - DNA, 60 bp, Artificial
  Synthetic oligonucleotide
aatgctgggcccctctgctgtagagatagggaatggatgcttcgaaaccaaacacaagtg

SEQ ID NO: 91485 - DNA, 60 bp, Artificial
  Synthetic oligonucleotide
ggcccctctgctgtagagatagggaatggatgcttcgaaaccaaacacaagtgcaaccag

SEQ ID NO: 91486 - DNA, 60 bp, Artificial
  Synthetic oligonucleotide
gggcccctctgctgtagagatagggaatggatgcttcgaaaccaaacacaagtgcaacca

SEQ ID NO: 91487 - DNA, 60 bp, Artificial
  Synthetic oligonucleotide
gaagcttatatgctctcgcttagagaaactggaccttaacctgagcaaagcagtcttagg

SEQ ID NO: 91488 - DNA, 60 bp, Artificial
  Synthetic oligonucleotide
gtccaccacaatgacgccagcgtccgtagaaatgaaggggaagaaatttcctattgattt

SEQ ID NO: 91489 - DNA, 60 bp, Artificial
  Synthetic oligonucleotide
cgccccaacagaaggctctagttgatcaagtgatcggaagtagaaatccagggattgcag

SEQ ID NO: 91490 - DNA, 60 bp, Artificial
  Synthetic oligonucleotide
gtactactcatggtagtaacatccaacgcagatcgaatctgcactgggataacatcttca

SEQ ID NO: 91491 - DNA, 53 bp, Artificial
  Synthetic oligonucleotide
agcagaagcaggggatttctaaacaatggcacatgaaatactgattgctgaaa

SEQ ID NO: 91492 - DNA, 60 bp, Artificial
  Synthetic oligonucleotide
gaaaacgtcaacaaaagccaggctgagaacagaatcctcttttgcacctagaacatggga

SEQ ID NO: 91493 - DNA, 60 bp, Artificial
  Synthetic oligonucleotide
catccaatgcagatcgaatctgcactgggataacatcgtcaaactcaccccatgtggtca

SEQ ID NO: 91494 - DNA, 60 bp, Artificial
  Synthetic oligonucleotide
catccaatgcagatcgaatctgcactgggataacatcgtcaaactcacctcatgtggtca

SEQ ID NO: 91495 - DNA, 60 bp, Artificial
  Synthetic oligonucleotide
ctcgcttagagaagctggaccttaacctgagcaaagcagtcttaggaatccaaaattctg

SEQ ID NO: 91496 - DNA, 60 bp, Artificial
  Synthetic oligonucleotide
atgctctcgcttagagaagctggaccttaacctgagcaaagcagtcttaggaatccaaaa

SEQ ID NO: 91497 - DNA, 60 bp, Artificial
  Synthetic oligonucleotide
cagaagaagtcattctacgttgaagggacaactttcgagttcaactctatgttcgtaaga

SEQ ID NO: 91498 - DNA, 60 bp, Artificial
  Synthetic oligonucleotide
ggaacactctgtgctttgtgcgagaaacaagcatcacattcacacagggctcacagcaga

SEQ ID NO: 91499 - DNA, 60 bp, Artificial
  Synthetic oligonucleotide
gacagaagatggggaaggcaaagcagaactagcagaaaaattacactgttggttcggtgg

SEQ ID NO: 91500 - DNA, 58 bp, Artificial
  Synthetic oligonucleotide
tcctacttgcacatatttttgttattccattaaatgaaaaaatccccttgctactgct

SEQ ID NO: 91501 - DNA, 60 bp, Artificial
  Synthetic oligonucleotide
aagaaagctagaattgaaagtagatgaggaggggctgttaaaccctttcctcctacttgc

SEQ ID NO: 91502 - DNA, 60 bp, Artificial
  Synthetic oligonucleotide
gaaagctagaattgaaagtagatgaggaggggctgttaaaccctttcctcctacttgcac

SEQ ID NO: 91503 - DNA, 60 bp, Artificial
  Synthetic oligonucleotide
gaaagtaaagatggattattaattgctgatggtgggaaactgatgaacaacattagcacc

SEQ ID NO: 91504 - DNA, 60 bp, Artificial
  Synthetic oligonucleotide
caggggattatggaaatcaacccatatttgatgtttctaaacaacgacgttacatcgctg

SEQ ID NO: 91505 - DNA, 57 bp, Artificial
  Synthetic oligonucleotide
gcttccttcatttggggttgctggagtaaatgaatcagcagatatggcaataggaat

SEQ ID NO: 91506 - DNA, 53 bp, Artificial
  Synthetic oligonucleotide
aagaagatctgtggatacctcatcgctagacaggtggccggaattgaaacagg

SEQ ID NO: 91507 - DNA, 60 bp, Artificial
  Synthetic oligonucleotide
caccaaagtgtatggtgtgctggttgaccaactaaaacttcacggaaaagacaaggtact

SEQ ID NO: 91508 - DNA, 60 bp, Artificial
  Synthetic oligonucleotide
gtctcctacaatgacgccagcgtctgtagaaatgaagggaaagaaacttcctattgattt

SEQ ID NO: 91509 - DNA, 60 bp, Artificial
  Synthetic oligonucleotide
atattgacaagactgaagcttatatgctctcgcttagagaagctagaccataacctgagc

SEQ ID NO: 91510 - DNA, 60 bp, Artificial
  Synthetic oligonucleotide
atattgacaagactgaagcttatatgctctcgcttagagaggctggaccataacctgagc

SEQ ID NO: 91511 - DNA, 60 bp, Artificial
  Synthetic oligonucleotide
atattgacaagactgaagcttatatgctctcgcttagagaaactggaccttaacctgagc

SEQ ID NO: 91512 - DNA, 60 bp, Artificial
  Synthetic oligonucleotide
atattgacaagactgaagcttatatgctctcgcttagagaagttggaccataacctgagc

SEQ ID NO: 91513 - DNA, 60 bp, Artificial
  Synthetic oligonucleotide
aataggccaaaaatgaacaatgctaccttcaactatacaaacgttaactctatttctcac

SEQ ID NO: 91514 - DNA, 59 bp, Artificial
  Synthetic oligonucleotide
aaaatgaacaatgctaccttcaactatacaaacgttaactctatttctcacatcagggg

SEQ ID NO: 91515 - DNA, 60 bp, Artificial
  Synthetic oligonucleotide
tttctggttccggagtaaaagttaaagatacagtatatatccaaggcgtcagagcagtac

SEQ ID NO: 91516 - DNA, 60 bp, Artificial
  Synthetic oligonucleotide
cttgaaaccgatgatgtctcacctgaagtaacattatgtaaatctgctttaggaggacca

SEQ ID NO: 91517 - DNA, 60 bp, Artificial
  Synthetic oligonucleotide
tgctactcaagaaaatttctggttccggagtaaaagttaaagatacagtatatatccaag

SEQ ID NO: 91518 - DNA, 60 bp, Artificial
  Synthetic oligonucleotide
cctgaaaccgatgatgtctcacctgaagtaacattatgtaaatctgctttaggaggacca

SEQ ID NO: 91519 - DNA, 60 bp, Artificial
  Synthetic oligonucleotide
ttccaatgttgatcaaaggaaaaatgatatgagagcagtatgtagaaaagtttgtcttgc

SEQ ID NO: 91520 - DNA, 60 bp, Artificial
  Synthetic oligonucleotide
agggatttccaatgttgatcaaaggaaaaatgatataagagcagtatgtagaaaagtttg

SEQ ID NO: 91521 - DNA, 60 bp, Artificial
  Synthetic oligonucleotide
gaagaacttatacctgaaaccgatgatgtctcacctgaagtaacattatgtaaatctgct

SEQ ID NO: 91522 - DNA, 60 bp, Artificial
  Synthetic oligonucleotide
agatgaacacatggacacttcgttagcactattagaagggtttagtgtttgtgaaaacga

SEQ ID NO: 91523 - DNA, 60 bp, Artificial
  Synthetic oligonucleotide
gacaatagcaaaggaatacaaaagactatgccaagatgctaaggcagctcaaatgatgac

SEQ ID NO: 91524 - DNA, 60 bp, Artificial
  Synthetic oligonucleotide
aaggtaacatttcaggatgtaagctttcaacatcctgatctggcagtgttgagagatgag

SEQ ID NO: 91525 - DNA, 60 bp, Artificial
  Synthetic oligonucleotide
ggacacttcgttagcactattagaagggtttagtgtttgtgaaaacgaccccagagcacc

SEQ ID NO: 91526 - DNA, 60 bp, Artificial
  Synthetic oligonucleotide
atgtcttttctattgacaatagcaaaggaatacaaaagactatgccaagatgctaaggca

SEQ ID NO: 91527 - DNA, 60 bp, Artificial
  Synthetic oligonucleotide
ggattggaaatgtcttttctattgacaatagcaaaggaatacaaaagactatgccaagat

SEQ ID NO: 91528 - DNA, 60 bp, Artificial
  Synthetic oligonucleotide
tatatccaaggcgtcagagcagtacaatttgaatactggagtgagcaagaagaattctat

SEQ ID NO: 91529 - DNA, 60 bp, Artificial
  Synthetic oligonucleotide
agattattttaaagacgcccctgcaacaataacaatggcagatttaagtacgaagttagg

SEQ ID NO: 91530 - DNA, 60 bp, Artificial
  Synthetic oligonucleotide
tggattacaataggaggaggaataaatgaagacagaaagagacttctagctatgtgcatg

SEQ ID NO: 91531 - DNA, 60 bp, Artificial
  Synthetic oligonucleotide
caccttgagctctctgataatcttgaagcatttgattcatcaggaagaattgttgcaaca

SEQ ID NO: 91532 - DNA, 60 bp, Artificial
  Synthetic oligonucleotide
ggggagctcaatgggaattgatggttccaaaagagcaattaaatctttaagggctgtcac

SEQ ID NO: 91533 - DNA, 60 bp, Artificial
  Synthetic oligonucleotide
aaaatggggagctcaatgggaattgatggttccaaaagagcaattaaatctttaagggct

SEQ ID NO: 91534 - DNA, 60 bp, Artificial
  Synthetic oligonucleotide
attttaaagacgcccctgcaacaataacaatggcagatttaagtacgaagttaggaagag

SEQ ID NO: 91535 - DNA, 60 bp, Artificial
  Synthetic oligonucleotide
acaaaagggtatgaagcgctaatcaaaaggctaggaacaggggacaatgatattccttcc

SEQ ID NO: 91536 - DNA, 60 bp, Artificial
  Synthetic oligonucleotide
caaaagggtatgaagcgctaatcaaaaggctaggaacaggggacaatgatattccttcct

SEQ ID NO: 91537 - DNA, 60 bp, Artificial
  Synthetic oligonucleotide
ccaaggtgtcagagcagtacaatttgaatactggagtgagcaagaagaattctatggaga

SEQ ID NO: 91538 - DNA, 60 bp, Artificial
  Synthetic oligonucleotide
aattctatggagaatataagtcagccaccgctttattcagcagaaaggaaagatcactag

SEQ ID NO: 91539 - DNA, 60 bp, Artificial
  Synthetic oligonucleotide
agaattctatggagaatataagtcagccaccgctttattcagcagaaaggaaagatcact

SEQ ID NO: 91540 - DNA, 60 bp, Artificial
  Synthetic oligonucleotide
atgccaagatgctaaggcagctcaaatgatgacagtgggaactgtatcgaactacactac

SEQ ID NO: 91541 - DNA, 60 bp, Artificial
  Synthetic oligonucleotide
ggagaatataagtcagccaccgctttattcagcagaaaggaaagatcactagaatggatt

SEQ ID NO: 91542 - DNA, 60 bp, Artificial
  Synthetic oligonucleotide
gcctgttttcggagctataaggccagaaagaatggaattgatccatgcattaggaggaga

SEQ ID NO: 91543 - DNA, 60 bp, Artificial
  Synthetic oligonucleotide
tcggagctataagaccagaaagaatggaattgatccatgcattaggaggagaaacttgga

SEQ ID NO: 91544 - DNA, 60 bp, Artificial
  Synthetic oligonucleotide
gaactgtatcaaactacactacgttcaagaaatggactacatcaaggaaggaaaagaatc

SEQ ID NO: 91545 - DNA, 60 bp, Artificial
  Synthetic oligonucleotide
gccaagatgctaaggcagctcaaatgatgacagtgggaactgtatcgaactacactacgt

SEQ ID NO: 91546 - DNA, 60 bp, Artificial
  Synthetic oligonucleotide
gattcttacctgttttcggagctataagaccagaaagaatggaattgatccatgcattag

SEQ ID NO: 91547 - DNA, 60 bp, Artificial
  Synthetic oligonucleotide
actacactacgttcaagaaatggactacatcaaggaaggaaaagaatccttcactaagaa

SEQ ID NO: 91548 - DNA, 51 bp, Artificial
  Synthetic oligonucleotide
ctacactacgttcaagaaatggactacatcaaggaaggaaaagaatccttc

SEQ ID NO: 91549 - DNA, 60 bp, Artificial
  Synthetic oligonucleotide
aaagatcactagaatggattacaataggaggaggaataaatgaagacagaaagagacttc

SEQ ID NO: 91550 - DNA, 60 bp, Artificial
  Synthetic oligonucleotide
agatcactagaatggattacaataggaggaggaataaatgaagacagaaagagacttcta

SEQ ID NO: 91551 - DNA, 60 bp, Artificial
  Synthetic oligonucleotide
taaaggtcttaccctttacttatttcgccccaaaacaaggaatgtttgaaggaaggtttt

SEQ ID NO: 91552 - DNA, 60 bp, Artificial
  Synthetic oligonucleotide
tctggttccggagtaaaagttaaagatacagtatatatccaaggtgtcagagcagtacaa

SEQ ID NO: 91553 - DNA, 60 bp, Artificial
  Synthetic oligonucleotide
ataaaggtcttaccctttacttatttcgccccaaaacagggaatgtttgaaggaaggctt

SEQ ID NO: 91554 - DNA, 60 bp, Artificial
  Synthetic oligonucleotide
tatccaaggtgtcagagcagtacaatttgaatactggagtgagcaagaagaattctatgg

SEQ ID NO: 91555 - DNA, 60 bp, Artificial
  Synthetic oligonucleotide
ccaaggcgtcagagcagtacaatttgaatactggagtgagcaagaagaattctatggaga

SEQ ID NO: 91556 - DNA, 60 bp, Artificial
  Synthetic oligonucleotide
gagaaaactgccataacaaaagggtatgaagcgctaatcaaaaggctaggaacaggggac

SEQ ID NO: 91557 - DNA, 60 bp, Artificial
  Synthetic oligonucleotide
gccataacaaaagggtatgaagcgctaatcaaaaggctaggaacaggggacaatgatatt

SEQ ID NO: 91558 - DNA, 60 bp, Artificial
  Synthetic oligonucleotide
atgtaagctttcaacatcctgatctggcagtattgagagatgagaaaacggccataacaa

SEQ ID NO: 91559 - DNA, 60 bp, Artificial
  Synthetic oligonucleotide
gagagatgagaaaactgccataacaaaagggtatgaagcgctaatcaaaaggctaggaac

SEQ ID NO: 91560 - DNA, 60 bp, Artificial
  Synthetic oligonucleotide
atacaaaagactatgccaagatgctaaggcagctcaaatgatgacagtaggaactgtatc

SEQ ID NO: 91561 - DNA, 60 bp, Artificial
  Synthetic oligonucleotide
cctttacttatttcgccccaaaacaaggaatgtttgaaggaaggcttttctttagcaacg

SEQ ID NO: 91562 - DNA, 60 bp, Artificial
  Synthetic oligonucleotide
ggacacttcgttagcactattagaagggtttagtgtttgtgaaaacgaccccagggcacc

SEQ ID NO: 91563 - DNA, 60 bp, Artificial
  Synthetic oligonucleotide
cttctattgacaatagcaaaggaatacaaaagactatgccaagatgctaaggcagctcaa

SEQ ID NO: 91564 - DNA, 60 bp, Artificial
  Synthetic oligonucleotide
aatctcattttgcaaatctcaaaggaacaaagaccagagggaaactatgcccaacctgtc

SEQ ID NO: 91565 - DNA, 60 bp, Artificial
  Synthetic oligonucleotide
caagggaatacaacttaaaacaaatgctgaagacataggaacaaaaggccaaatgtgctc

SEQ ID NO: 91566 - DNA, 60 bp, Artificial
  Synthetic oligonucleotide
tgtttggaatgaaaaggatgtgggacatagggaacaaacacctagaagatgaaaatttgg

SEQ ID NO: 91567 - DNA, 58 bp, Artificial
  Synthetic oligonucleotide
ggaaccctaaggacaagatcttcaatgatgcaatgaacaaggccaagaggatgtacga

SEQ ID NO: 91568 - DNA, 60 bp, Artificial
  Synthetic oligonucleotide
atcctttgcttggacttaaggggaaaggtgggagactgactgtaaaggacctgaaagcaa

SEQ ID NO: 91569 - DNA, 56 bp, Artificial
  Synthetic oligonucleotide
ttttcacaaaacgcactaatgcctactttgcaaagtgtgaagagaagtgaccagtt

SEQ ID NO: 91570 - DNA, 60 bp, Artificial
  Synthetic oligonucleotide
gcttggacttaaggggaaaggtgggagactgactgtaaaggacctgaaagcaagaaagct

SEQ ID NO: 91571 - DNA, 60 bp, Artificial
  Synthetic oligonucleotide
gaccaatgagggttttttcacaaaacgcactaatgcctacgttgcaaagtgtgaagagaa

SEQ ID NO: 91572 - DNA, 60 bp, Artificial
  Synthetic oligonucleotide
ccagtagcacctataaagaaaagaacaagcaggtctactgttgtagtgaaggcggacgct

SEQ ID NO: 91573 - DNA, 60 bp, Artificial
  Synthetic oligonucleotide
gctggagtaccttggagggccttcatcttcgttctagaacagacaatgctcgtcgtgaac

SEQ ID NO: 91574 - DNA, 60 bp, Artificial
  Synthetic oligonucleotide
aagaaaagaacaagcaggtctactgttgtagtgaaggcggacgctgttaacgaatgcagg

SEQ ID NO: 91575 - DNA, 60 bp, Artificial
  Synthetic oligonucleotide
tgcttcttctttcagtttcacacctgaggcagtgtacaccctacaaagttcggatgactt

SEQ ID NO: 91576 - DNA, 60 bp, Artificial
  Synthetic oligonucleotide
ctatgttcgtaagagacgggaaagtcatggcaaatgggggcaactttgaaaacataacag

SEQ ID NO: 91577 - DNA, 60 bp, Artificial
  Synthetic oligonucleotide
tttcacacctgaggcagtgtacaccctacaaagttcggatgacttcgtgactgggagctg

SEQ ID NO: 91578 - DNA, 60 bp, Artificial
  Synthetic oligonucleotide
cggatgacttcgtgactgggagctgtgggagagacgtacaacatgcaagacaaagactcg

SEQ ID NO: 91579 - DNA, 60 bp, Artificial
  Synthetic oligonucleotide
gaatcacaaatgttgaaaaggtgtactatgggaacagaaaataccaagaactgaagaacg

SEQ ID NO: 91580 - DNA, 60 bp, Artificial
  Synthetic oligonucleotide
atgtggagaagagacaatgtctatacctgagagcatgggaggtgataggaaacccaaacc

SEQ ID NO: 91581 - DNA, 60 bp, Artificial
  Synthetic oligonucleotide
attggaatcacaaatgttgaaaaggtgtactatgggaacaggaaataccaagaactgaag

SEQ ID NO: 91582 - DNA, 60 bp, Artificial
  Synthetic oligonucleotide
tgagagcatgggaggtgataggaaacccaaaccttgggaacttcctcagagtttcgatgg

SEQ ID NO: 91583 - DNA, 60 bp, Artificial
  Synthetic oligonucleotide
gacaatgtctatacctgagagcatgggaggtgataggaaacccaaaccttgggaacttcc

SEQ ID NO: 91584 - DNA, 51 bp, Artificial
  Synthetic oligonucleotide
aacagacaatgctcgtcgtgaacaagttggacccaaactcagtcatctgga

SEQ ID NO: 91585 - DNA, 60 bp, Artificial
  Synthetic oligonucleotide
aacaggggacactggaaggccgccaagtacataaaatcttgttgcagcattgagttcgac

SEQ ID NO: 91586 - DNA, 60 bp, Artificial
  Synthetic oligonucleotide
caaacactggtaacgctcactggagacaactctaagtacaatgagagcatgtgcccagaa

SEQ ID NO: 91587 - DNA, 60 bp, Artificial
  Synthetic oligonucleotide
cagtagcacctataaagaaaagaacaagcaggtctactgttgtagtgaaggcggacgctg

SEQ ID NO: 91588 - DNA, 60 bp, Artificial
  Synthetic oligonucleotide
atctgtttggaatgaaaaggatgtgggacatagggaacaaacatctagaagatgaaaatt

SEQ ID NO: 91589 - DNA, 58 bp, Artificial
  Synthetic oligonucleotide
gaggaagaaccatgtcagacctgattgaacaccatttcaggtgtatgcaggggaaaca

SEQ ID NO: 91590 - DNA, 50 bp, Artificial
  Synthetic oligonucleotide
tggagacaactctaagtacaatgagagcatgtgcccagaagtgatgatga

SEQ ID NO: 91591 - DNA, 60 bp, Artificial
  Synthetic oligonucleotide
ctggtaacgctcactggagacaactctaagtacaatgagagcatgtgcccagaagtgatg

SEQ ID NO: 91592 - DNA, 52 bp, Artificial
  Synthetic oligonucleotide
aaaactggatagtagcaacaggtttcagaggaagaaccatgtcagacctgat

SEQ ID NO: 91593 - DNA, 58 bp, Artificial
  Synthetic oligonucleotide
atacctgatagacaacaagtacgatgaggcagagaaaactagcttaaggaagtcaatg

SEQ ID NO: 91594 - DNA, 60 bp, Artificial
  Synthetic oligonucleotide
ggccttgtgaaatacctgataaacaacaagtacgatgaggcagagaaaactagcttaagg

SEQ ID NO: 91595 - DNA, 60 bp, Artificial
  Synthetic oligonucleotide
ccaggataaaggagatcggaatgaagaaccaagggcaaacactggtaacgctcactggag

SEQ ID NO: 91596 - DNA, 60 bp, Artificial
  Synthetic oligonucleotide
cgaaactgttggtgttgcagacttaggtcttgtgaaatacctgataaacaacaagtacga

SEQ ID NO: 91597 - DNA, 60 bp, Artificial
  Synthetic oligonucleotide
gatgaaaatttggacgaaactgttggtgttgcagacttaggtcttgtgaaatacctgata

SEQ ID NO: 91598 - DNA, 60 bp, Artificial
  Synthetic oligonucleotide
gaagatgaaaatttggacgaaactgttggtgttgcagacttaggccttgtgaaatacctg

SEQ ID NO: 91599 - DNA, 60 bp, Artificial
  Synthetic oligonucleotide
aaacacctagaagatgaaaatttggacgaaactgttggtgttgcagacttaggccttgtg

SEQ ID NO: 91600 - DNA, 60 bp, Artificial
  Synthetic oligonucleotide
aaaggatgtgggacatagggaacaaacatctagaagatgaaaatttggacgaaactgttg

SEQ ID NO: 91601 - DNA, 60 bp, Artificial
  Synthetic oligonucleotide
ttctcagaagaagtctttctatgtggaggggacgaccttcgagttcaactctatgttcgt

SEQ ID NO: 91602 - DNA, 60 bp, Artificial
  Synthetic oligonucleotide
caaggaaccctaaggacaagatcttcaatgatgcaatgaacaaggccaagaggatgtacg

SEQ ID NO: 91603 - DNA, 60 bp, Artificial
  Synthetic oligonucleotide
cgccgtgtgtaaattctgcgttaaaaactggatagtagcaacaggtttcagaggaagaac

SEQ ID NO: 91604 - DNA, 60 bp, Artificial
  Synthetic oligonucleotide
cgagttcgacgaggaaggagaccagtcctgggacacgtccaaaacggcactagtggtaat

SEQ ID NO: 91605 - DNA, 60 bp, Artificial
  Synthetic oligonucleotide
gttcgacgaggaaggagaccagtcctgggacacgtccaaaacggcactagtggtaatcag

SEQ ID NO: 91606 - DNA, 60 bp, Artificial
  Synthetic oligonucleotide
gagacgggaaagtcatggcaaatggaggcaactttgaaaacataacagttccaggtggac

SEQ ID NO: 91607 - DNA, 60 bp, Artificial
  Synthetic oligonucleotide
ggggacactggaaggccgccaagtacataaagtcttgttgcagcattgagttcgacgagg

SEQ ID NO: 91608 - DNA, 60 bp, Artificial
  Synthetic oligonucleotide
tgagttcgacgaggaaggagaccagtcctgggacacgtccaaaacggcactagtggtaat

SEQ ID NO: 91609 - DNA, 60 bp, Artificial
  Synthetic oligonucleotide
gcattgagttcgacgaggaaggagaccagtcctgggacacgtccaaaacggcactagtgg

SEQ ID NO: 91610 - DNA, 60 bp, Artificial
  Synthetic oligonucleotide
caaagactcgaaatggctcttaaagtgagcaaagctgcaggtttgaacgtttctcagaag

SEQ ID NO: 91611 - DNA, 60 bp, Artificial
  Synthetic oligonucleotide
gagatcggaatgaagaaccaagggcaaacactggtaacgcttactggagacaactctaag

SEQ ID NO: 91612 - DNA, 60 bp, Artificial
  Synthetic oligonucleotide
ctcgaaatggctcttaaagtgagcaaagctgcaggtttgaacgtttctcagaagaagtct

SEQ ID NO: 91613 - DNA, 60 bp, Artificial
  Synthetic oligonucleotide
aaatgtgcaaaattggaatcacaaatgttgaaaaggtgtactatgggaacaggaaatacc

SEQ ID NO: 91614 - DNA, 60 bp, Artificial
  Synthetic oligonucleotide
acgtaatgtattgtccttgagagtgttggtaaacggaacattcctcaaacaccccaatgg

SEQ ID NO: 91615 - DNA, 60 bp, Artificial
  Synthetic oligonucleotide
gttgtccttgagagtgttggtaaacggaacattcctcaaacaccccaatggatacaagtc

SEQ ID NO: 91616 - DNA, 60 bp, Artificial
  Synthetic oligonucleotide
ctgtccttgagagtgttggtaaacggaacattcctcaaacaccccaatggatacaagtcc

SEQ ID NO: 91617 - DNA, 60 bp, Artificial
  Synthetic oligonucleotide
gcgtaatatattgtccttgagagtgttggtaaacggaacattcctcaaacaccccaatgg

SEQ ID NO: 91618 - DNA, 52 bp, Artificial
  Synthetic oligonucleotide
ggggaaattgttatcttatgataactgatggctcagcttcaggtgttagtga

SEQ ID NO: 91619 - DNA, 60 bp, Artificial
  Synthetic oligonucleotide
gttatcttatgataactgatggctcagcttcagggattagtaaatgcagatttcttaaga

SEQ ID NO: 91620 - DNA, 60 bp, Artificial
  Synthetic oligonucleotide
gttatcttatgataactgatggctcagcttcagggattagtgaatgcagatttcttaaga

SEQ ID NO: 91621 - DNA, 60 bp, Artificial
  Synthetic oligonucleotide
gcaaagcagtcctgggaatccaaaattctgaagatcttattttgattatacataacagag

SEQ ID NO: 91622 - DNA, 60 bp, Artificial
  Synthetic oligonucleotide
taacctgagcaaagcagtcctgggaatccaaaattctgaagatcttattttgattataca

SEQ ID NO: 91623 - DNA, 60 bp, Artificial
  Synthetic oligonucleotide
taacctgagcaaagcagtcttgggaatccaaaattctgaagatcttattttgattataca

SEQ ID NO: 91624 - DNA, 65 bp, Artificial
  Synthetic oligonucleotide
cctgagcaaagtagtcttgggaatccaaaattctgaagatcttattttgattatacataacagag

SEQ ID NO: 91625 - DNA, 65 bp, Artificial
  Synthetic oligonucleotide
cctgagcaaagcagtcttaggaatccaaaattctgaagatcttattttgattatacataacagag

SEQ ID NO: 91626 - DNA, 65 bp, Artificial
  Synthetic oligonucleotide
cctgagcaaaacagtcttgggaatccaaaattctgaagatcttattttgattatacataacagag

SEQ ID NO: 91627 - DNA, 65 bp, Artificial
  Synthetic oligonucleotide
cctgagcaaagcaatcttgggaatccaaaattctgaagatcttattttgattatacataacagag

SEQ ID NO: 91628 - DNA, 60 bp, Artificial
  Synthetic oligonucleotide
gagtcaaaagggcaaatccttatgacctatacagaacctgtgctactggtgactgtcccc

SEQ ID NO: 91629 - DNA, 60 bp, Artificial
  Synthetic oligonucleotide
gaagagccagaggccgctgctactcttgctctagtgatggtcgccggccctgcgtgttct

SEQ ID NO: 91630 - DNA, 60 bp, Artificial
  Synthetic oligonucleotide
gtcacttccagttcatcatccacggtgcaaggccctctttcgtcgggttcttcacaacac

SEQ ID NO: 91631 - DNA, 60 bp, Artificial
  Synthetic oligonucleotide
caggatatgtgcaatagcttcgatgctgaatttatagacaatgcgcctttagcacaggga

SEQ ID NO: 91632 - DNA, 60 bp, Artificial
  Synthetic oligonucleotide
tgtcaccgtaacagacaccgcgtacatccctacattttatcaggaggccaaaggatactg

SEQ ID NO: 91633 - DNA, 50 bp, Artificial
  Synthetic oligonucleotide
agttatgctgcttcgcccgccgccgcaaacacacaggtatttagaaatca

SEQ ID NO: 91634 - DNA, 60 bp, Artificial
  Synthetic oligonucleotide
tcgagtcgagtgagctgggcacggttggtagagcagtgctgcagcctgtgaaccacagca

SEQ ID NO: 91635 - DNA, 60 bp, Artificial
  Synthetic oligonucleotide
acctacctgctccggacctgctccagccatccctgactctccttcacgttgcttatccag

SEQ ID NO: 91636 - DNA, 60 bp, Artificial
  Synthetic oligonucleotide
acaccacagacggtctgcctggactccaagaggaacctcgaggaggagacggacctacct

SEQ ID NO: 91637 - DNA, 57 bp, Artificial
  Synthetic oligonucleotide
ttaagagctgagcacatgatgctgcagcctccaaaacttagaggggtaacatctgca

SEQ ID NO: 91638 - DNA, 60 bp, Artificial
  Synthetic oligonucleotide
gcgacctgcagagcccatgaaaagggctcagttgctttgcttttattatcctttcacgtg

SEQ ID NO: 91639 - DNA, 60 bp, Artificial
  Synthetic oligonucleotide
gggatgaagtgtacgtatgcactgtagatgggtggactttaaccactagcggcgctgacg

SEQ ID NO: 91640 - DNA, 60 bp, Artificial
  Synthetic oligonucleotide
gggcagccggcagtattatgagcttttcggagaggacgctcagaggtttgggacctctgg

SEQ ID NO: 91641 - DNA, 60 bp, Artificial
  Synthetic oligonucleotide
gcagacttggccagaaatcctctattcaaactagaagtggtgtgacagtgggaggacgtg

SEQ ID NO: 91642 - DNA, 60 bp, Artificial
  Synthetic oligonucleotide
cctgcaaaagaaagattggtgtgggcaatattgggccttcaggtaagtagaggacagcct

SEQ ID NO: 91643 - DNA, 60 bp, Artificial
  Synthetic oligonucleotide
gcactgccaggatcagatgatagaaagcagctaggaatggatgttaagcaaacacagatg

SEQ ID NO: 91644 - DNA, 60 bp, Artificial
  Synthetic oligonucleotide
ggcagcaacatagggtcgagcaggggagaagagattcaaatgcaattattttcagggcct

SEQ ID NO: 91645 - DNA, 60 bp, Artificial
  Synthetic oligonucleotide
cttctagcaccacacaccataacccctcttttcaaggtcaagtgacagtgtacactgata

SEQ ID NO: 91646 - DNA, 60 bp, Artificial
  Synthetic oligonucleotide
gtgtgactgtccctgatgtagtggctgtcctgccagaatctccagcagtaattacaccag

SEQ ID NO: 91647 - DNA, 60 bp, Artificial
  Synthetic oligonucleotide
ataggcagtacacaagctaggccagggcttggaacctattccccacttgggcggggaggt

SEQ ID NO: 91648 - DNA, 60 bp, Artificial
  Synthetic oligonucleotide
ttgaggacggagatatgatggatataggctttggggcctgtgattggaaagacttcagtc

SEQ ID NO: 91649 - DNA, 60 bp, Artificial
  Synthetic oligonucleotide
cagacagacaaggcaatggaactatcctaatcactttcactgatactactcaaagggact

SEQ ID NO: 91650 - DNA, 60 bp, Artificial
  Synthetic oligonucleotide
gtattctggtatgtatgtactggggactgggagtgggcttcgggtgggtcaaatacttgc

SEQ ID NO: 91651 - DNA, 60 bp, Artificial
  Synthetic oligonucleotide
ccaaaaacgctgacggtgcccattgttaaagggtggattagagcagctgtaagggtgagt

SEQ ID NO: 91652 - DNA, 60 bp, Artificial
  Synthetic oligonucleotide
aatgcttatagtacagccaaaaactgaggatgctgggacaaaaaaaaaagtggtatataa

SEQ ID NO: 91653 - DNA, 60 bp, Artificial
  Synthetic oligonucleotide
ggccgagctaattggtttagtaaaaggtactatactcagaccagtgtgcgagaccctacc

SEQ ID NO: 91654 - DNA, 60 bp, Artificial
  Synthetic oligonucleotide
cagggcctaaaaccagcacacctgaaactgatgcagtgactaaggtaagaggccgagcta

SEQ ID NO: 91655 - DNA, 60 bp, Artificial
  Synthetic oligonucleotide
tagggtccctggatgctctaaaatgcaagaatcataaatataggagggtgcatagagggg

SEQ ID NO: 91656 - DNA, 60 bp, Artificial
  Synthetic oligonucleotide
ttgtaacgctgcacgcacaatatagaccaacttttaaagataaaactcctagacgacctg

SEQ ID NO: 91657 - DNA, 60 bp, Artificial
  Synthetic oligonucleotide
gaagattgctgtgcaaagtaccccagactgtatctctcagtttgaacaacttctgcgagg

SEQ ID NO: 91658 - DNA, 60 bp, Artificial
  Synthetic oligonucleotide
gcggtgcatggcgccgctttatgacatcggacacacgccctacgggataaattagggcga

SEQ ID NO: 91659 - DNA, 60 bp, Artificial
  Synthetic oligonucleotide
tgtcagacagtgaaaaagatcgccacgccttggaccacgaaggttacctgtacgtccgtg

SEQ ID NO: 91660 - DNA, 60 bp, Artificial
  Synthetic oligonucleotide
gattggtcactcaacgatgttagccatgagcgctacaaggcccctcctagtgacactttg

SEQ ID NO: 91661 - DNA, 60 bp, Artificial
  Synthetic oligonucleotide
gtcctctaaatgaagatggaaaaccactgttccaaataactgaccccgattggaaatctt

SEQ ID NO: 91662 - DNA, 60 bp, Artificial
  Synthetic oligonucleotide
gattcaacggaaacagaaagggctcggacaccagtaaactctgaccgccagcgtgcagga

SEQ ID NO: 91663 - DNA, 60 bp, Artificial
  Synthetic oligonucleotide
ttcatggaattgagccaataagatttgtgaatgccttgcgcccatggcttcaaggagtgc

SEQ ID NO: 91664 - DNA, 60 bp, Artificial
  Synthetic oligonucleotide
gcgcatcccgctgctatggcagataaatcaggtagattgctggggggctgctcttttgta

SEQ ID NO: 91665 - DNA, 60 bp, Artificial
  Synthetic oligonucleotide
ccgcgagcggtgttttggtactgtgtgcaaaggtaagtcaaggcgggaacctctcaacca

SEQ ID NO: 91666 - DNA, 60 bp, Artificial
  Synthetic oligonucleotide
gagtcctccatagcttttcattatgcgcagatggctgatcatgactctaatgccagagca

SEQ ID NO: 91667 - DNA, 60 bp, Artificial
  Synthetic oligonucleotide
ggtattctggtgtttcatgatgaagctgaaacggatgtggtgcccgttatagatgtctca

SEQ ID NO: 91668 - DNA, 60 bp, Artificial
  Synthetic oligonucleotide
aattttaagtgagggccatgatgcatacgttgatgttgacatggatagtgtggggagtct

SEQ ID NO: 91669 - DNA, 60 bp, Artificial
  Synthetic oligonucleotide
cccctaaccctgtaactaaagtactgtgcacagaatcatatgtgaaaagaacatctatat

SEQ ID NO: 91670 - DNA, 60 bp, Artificial
  Synthetic oligonucleotide
cctcccccagccactgtattagaagacacttatagatatcaggaatccaaggctataaaa

SEQ ID NO: 91671 - DNA, 60 bp, Artificial
  Synthetic oligonucleotide
ggatttgcaagacagcattttacctggcataatcatcacagattcaggggtggatggcac

SEQ ID NO: 91672 - DNA, 60 bp, Artificial
  Synthetic oligonucleotide
gaccttactggctctaccaagctcaaggtttaaataacggggtctgctgggataatgagc

SEQ ID NO: 91673 - DNA, 60 bp, Artificial
  Synthetic oligonucleotide
gcaggcatgtagaggaatataagctagccgttattctggagctatgtagtgtggagctga

SEQ ID NO: 91674 - DNA, 60 bp, Artificial
  Synthetic oligonucleotide
actctccttcacgttgcttatccagaggttttgcaggaagagatcctggctgtcaccgta

SEQ ID NO: 91675 - DNA, 60 bp, Artificial
  Synthetic oligonucleotide
aggcgggaacctctcaaccaatcaattcaaactgtaccgggagcggtgccaccgcctgcg

SEQ ID NO: 91676 - DNA, 60 bp, Artificial
  Synthetic oligonucleotide
cagcaggtaccagataataaggacacttctttcacatttatggggacacctagtggctcc

SEQ ID NO: 91677 - DNA, 60 bp, Artificial
  Synthetic oligonucleotide
atttgtgcaccacacccggtcgggttgctacaagtaggtataaaactggcgccaagtgct

SEQ ID NO: 91678 - DNA, 60 bp, Artificial
  Synthetic oligonucleotide
gtgctggcagtagcccagacagtaaaagacatgaattgaaacacaaacagcgtagtccac

SEQ ID NO: 91679 - DNA, 60 bp, Artificial
  Synthetic oligonucleotide
ttgtgtgaggaacaagacagcggatatggcaatactgaagtggaaacgtacgagagacag

SEQ ID NO: 91680 - DNA, 60 bp, Artificial
  Synthetic oligonucleotide
tgaagtggaaacgtacgagagacaggtaccggggccggggggatgtttacaaagtactag

SEQ ID NO: 91681 - DNA, 60 bp, Artificial
  Synthetic oligonucleotide
gtagtaacaacggcagccaaatggcgtcgccaggggaaacaaatagtgggtccagtagca

SEQ ID NO: 91682 - DNA, 60 bp, Artificial
  Synthetic oligonucleotide
ttcacagcaggaaattgcacaggcattatatcactcacagcaagttaatgcagacaatga

SEQ ID NO: 91683 - DNA, 60 bp, Artificial
  Synthetic oligonucleotide
cccaatcctgaggaacggccatacaagctaccagccttatgtgaagaggtcaacatttca

SEQ ID NO: 91684 - DNA, 60 bp, Artificial
  Synthetic oligonucleotide
gggtcgtacaggatatgtgccattacccacaactactccatctagaccagttgaaattcc

SEQ ID NO: 91685 - DNA, 60 bp, Artificial
  Synthetic oligonucleotide
ggttagacaatatagaagatataaccaatcagtgtatggacggacgttagagaatttaac

SEQ ID NO: 91686 - DNA, 60 bp, Artificial
  Synthetic oligonucleotide
gggcctctgattcttctatagtttcattagtggaggagtcaagttttattgaagctggtg

SEQ ID NO: 91687 - DNA, 60 bp, Artificial
  Synthetic oligonucleotide
caacttttactgacccatccgtgttgcaacctcctccacccttagaggcctctggcagac

SEQ ID NO: 91688 - DNA, 60 bp, Artificial
  Synthetic oligonucleotide
acgcccattccagggaggcaccctcctgcacgcttagggctttatggacgtgctatacaa

SEQ ID NO: 91689 - DNA, 60 bp, Artificial
  Synthetic oligonucleotide
gggcctgcaagataccacattagaatttcagcacagtgacttgcataatgctcctgactc

SEQ ID NO: 91690 - DNA, 60 bp, Artificial
  Synthetic oligonucleotide
ggagacactgtgcaaacgtttaagtgcgtgtcaggacgcaatcctagaactgtatgaacg

SEQ ID NO: 91691 - DNA, 60 bp, Artificial
  Synthetic oligonucleotide
taaatgaatcaagctataacacagaagaatggacattacaacagacaagttgggaacagt

SEQ ID NO: 91692 - DNA, 60 bp, Artificial
  Synthetic oligonucleotide
ggcacgtgaaatgggactgcaatcagttaaccaacaagcggtgccaagccttgcagtatc

SEQ ID NO: 91693 - DNA, 60 bp, Artificial
  Synthetic oligonucleotide
tgtggtatggacatttgtgtattattggttggaaggcaagtggtataaagtgagtagcca

SEQ ID NO: 91694 - DNA, 60 bp, Artificial
  Synthetic oligonucleotide
ccagattatctaggcatggccgcagatccctatggcgattctatgtggttttatattcgt

SEQ ID NO: 91695 - DNA, 60 bp, Artificial
  Synthetic oligonucleotide
cccaaaatgctggggaatgtcctccgcttgaattaaagaacaccactatacaggatggtg

SEQ ID NO: 91696 - DNA, 60 bp, Artificial
  Synthetic oligonucleotide
caggatggtgatatgattgatgtgggctttggtgccatggattttaaggccttacaggca

SEQ ID NO: 91697 - DNA, 60 bp, Artificial
  Synthetic oligonucleotide
taatcctgacaaggagcggttggtttgggcctgtgcaggcgttgaggttggacgcggaca

SEQ ID NO: 91698 - DNA, 60 bp, Artificial
  Synthetic oligonucleotide
cagggcaggtactgtaggcgatgctattccagatgacttaatgattaagggtacaggcaa

SEQ ID NO: 91699 - DNA, 60 bp, Artificial
  Synthetic oligonucleotide
ttcgggatggtttaatgtagaagccattgtagaaaggaaaacaggggatgcaataccagc

SEQ ID NO: 91700 - DNA, 60 bp, Artificial
  Synthetic oligonucleotide
cggtgggagaagtacccgaatggattaaaagacaaacagtagtacagcacagcttagagg

SEQ ID NO: 91701 - DNA, 60 bp, Artificial
  Synthetic oligonucleotide
tagtacacgcttgctggcagtaggacatccctattatcctataaaggatactaatgggaa

SEQ ID NO: 91702 - DNA, 58 bp, Artificial
  Synthetic oligonucleotide
caataccagcagatgaaaattatgatggggacgatacagaggattctgaaatggggga

SEQ ID NO: 91703 - DNA, 60 bp, Artificial
  Synthetic oligonucleotide
caccagatacaggaaagtcacattttggaatgagtttaatgcagtttatgcaaggtgtgg

SEQ ID NO: 91704 - DNA, 60 bp, Artificial
  Synthetic oligonucleotide
ggaacaatgtgtagacattataaagctgcagaacgtaaacaaatgactatgtcacaatgg

SEQ ID NO: 91705 - DNA, 60 bp, Artificial
  Synthetic oligonucleotide
ccacagtgtgtcttaccattgagagcacacacgctgacctattagtgttagaagacctgc

SEQ ID NO: 91706 - DNA, 60 bp, Artificial
  Synthetic oligonucleotide
gcagatgatacctggaaatatttgcacagtagaatgaaagtgtttacgttttcaaatcca

SEQ ID NO: 91707 - DNA, 60 bp, Artificial
  Synthetic oligonucleotide
gacgcctataacagaagatggctgattcaggtaattgggaagggaggtgttcgggatggt

SEQ ID NO: 91708 - DNA, 60 bp, Artificial
  Synthetic oligonucleotide
gaggatgaggatgaaacagacagccatctagaaagacaagctgagcaagcctggtacaga

SEQ ID NO: 91709 - DNA, 60 bp, Artificial
  Synthetic oligonucleotide
accaacgaccgagactgaccttacatgttacgagtcattagacaactcagaggatgagga

SEQ ID NO: 91710 - DNA, 60 bp, Artificial
  Synthetic oligonucleotide
ggatgcataaagggtattcacatttgtttaataatgtaacaactacatggcattggacca

SEQ ID NO: 91711 - DNA, 60 bp, Artificial
  Synthetic oligonucleotide
gggcggtaaggtaatatgttttgctcctgtatttagcccgtgtgaagtatccactcctga

SEQ ID NO: 91712 - DNA, 60 bp, Artificial
  Synthetic oligonucleotide
cagagatgcaaaacgatatggggttaaaggaatatgggatgtatgtatgggcggtaaggt

SEQ ID NO: 91713 - DNA, 60 bp, Artificial
  Synthetic oligonucleotide
cgaggggcccttggactttgtacataacctacagcccacaacagactcatcgacccagtg

SEQ ID NO: 91714 - DNA, 60 bp, Artificial
  Synthetic oligonucleotide
gtgtgccaacacggaaacggcatagacagtgtgacccagacgaggggcccttggactttg

SEQ ID NO: 91715 - DNA, 60 bp, Artificial
  Synthetic oligonucleotide
ctacaactgcaaataccactattcctttaaatgctggtttggatacacatcctggccctg

SEQ ID NO: 91716 - DNA, 60 bp, Artificial
  Synthetic oligonucleotide
tcatgatttaagtccaatacctacggaaaatattgaactgcagcctttactgccttctgc

SEQ ID NO: 91717 - DNA, 60 bp, Artificial
  Synthetic oligonucleotide
gtgctaaaataccaccaactatatcagtgtcatcagggtatatgtccatataacacaaat

SEQ ID NO: 91718 - DNA, 59 bp, Artificial
  Synthetic oligonucleotide
aagcaaagtggcacatgtccccctgacataattccaaaggttgagggcaatactttagc

SEQ ID NO: 91719 - DNA, 58 bp, Artificial
  Synthetic oligonucleotide
agtttaccatgcgtcgcaagcgtgacacacatataagacgtaaacgtgcatcagccac

SEQ ID NO: 91720 - DNA, 60 bp, Artificial
  Synthetic oligonucleotide
catcctacgcaaggtcatacacgtttaaggcgccacctggcagttactcatgtgtctgca

SEQ ID NO: 91721 - DNA, 60 bp, Artificial
  Synthetic oligonucleotide
cgccatgtgcattatactggtacagaactagcctatcaaacattagtgaaacggtgggag

SEQ ID NO: 91722 - DNA, 57 bp, Artificial
  Synthetic oligonucleotide
cttttcagtttgtgtaggtacacaatccacaagtacaactgcaccatatgcaaacag

SEQ ID NO: 91723 - DNA, 60 bp, Artificial
  Synthetic oligonucleotide
gggtacaggcaatactgcatcgccatccagttgtgtgttttatcctactcctagtgggtc

SEQ ID NO: 91724 - DNA, 60 bp, Artificial
  Synthetic oligonucleotide
gcgtgcccgtcctaggttacaggcctctaaacggtctgcaccttcatcatctagtacagc

SEQ ID NO: 91725 - DNA, 60 bp, Artificial
  Synthetic oligonucleotide
tcacaggccattacatgtcagcgtccgcaacctcctaaggaaacagaggacccatatggt

SEQ ID NO: 91726 - DNA, 60 bp, Artificial
  Synthetic oligonucleotide
catgccaggtaattgttgaaaactgactaagcagtgcttactcattttgcacctggactg

SEQ ID NO: 91727 - DNA, 60 bp, Artificial
  Synthetic oligonucleotide
ctgtgaaaatccccaaaggtgtgacttgcttgaaagggtcttttgacgggctatagcagt

SEQ ID NO: 91728 - DNA, 60 bp, Artificial
  Synthetic oligonucleotide
gctggacatgggctagcaaaacctgtacagttaaatctgggcatagaatgctggtggcat

SEQ ID NO: 91729 - DNA, 60 bp, Artificial
  Synthetic oligonucleotide
acttcggatcccccagtggctctttggtctctagcgaccagcagatttacaatagaccct

SEQ ID NO: 91730 - DNA, 60 bp, Artificial
  Synthetic oligonucleotide
gagcttataagtgcagcatacgaccctcctgtgcttctgcttcaaggttgtgcaaacaca

SEQ ID NO: 91731 - DNA, 60 bp, Artificial
  Synthetic oligonucleotide
gtcagtgctgcgccaatggcagaatttcaagacattgtcacccttagcaggccagttgtt

SEQ ID NO: 91732 - DNA, 60 bp, Artificial
  Synthetic oligonucleotide
aacaacagggccctggaggaccagctccgccatctcctggagaagtgggaacgcgatctg

SEQ ID NO: 91733 - DNA, 60 bp, Artificial
  Synthetic oligonucleotide
ctcagcatcagacaatgtgtttattttgcatgggtttaatggtgaatatgtaggtcctgc

SEQ ID NO: 91734 - DNA, 60 bp, Artificial
  Synthetic oligonucleotide
tgatcaaaccacagatgaccgggttaacatggctgtagaccctaagcaggtgcaaatgtt

SEQ ID NO: 91735 - DNA, 60 bp, Artificial
  Synthetic oligonucleotide
tccaaatgtatacaactctgataatcaaaggctagtctgggctctgcggggcattgaaat

SEQ ID NO: 91736 - DNA, 60 bp, Artificial
  Synthetic oligonucleotide
atattatttgcctggagcaggacgagctaccttacctacctctgtgtacttcggatcccc

SEQ ID NO: 91737 - DNA, 60 bp, Artificial
  Synthetic oligonucleotide
gagcagatgtacgtgaggcatttatggtccaggggtggcacaataggagaagaaattcca

SEQ ID NO: 91738 - DNA, 53 bp, Artificial
  Synthetic oligonucleotide
tttggggtgcctgaaagcccacctagcagcagcacacccaatactagcttcag

SEQ ID NO: 91739 - DNA, 60 bp, Artificial
  Synthetic oligonucleotide
gcaagcttaggcaaactgtaccgtttgcggtgcagtttctcacacaaaggtaagtgttgt

SEQ ID NO: 91740 - DNA, 60 bp, Artificial
  Synthetic oligonucleotide
gccagttgtttatgagagagagggcttagtcagagttagccgtttaggccaacgtggcac

SEQ ID NO: 91741 - DNA, 60 bp, Artificial
  Synthetic oligonucleotide
cgtgaggacaaggttctggtacccaaagtttctggcagtcaattcagagtattcaggcta

SEQ ID NO: 91742 - DNA, 60 bp, Artificial
  Synthetic oligonucleotide
ctggtgacagtgtcataatgcaacctttggcagaaagcacatttgtggattcaggggatg

SEQ ID NO: 91743 - DNA, 60 bp, Artificial
  Synthetic oligonucleotide
caaccctgcattcacagcttatgttgcaagtgcacaattaccaggggaaacctcagcatc

SEQ ID NO: 91744 - DNA, 60 bp, Artificial
  Synthetic oligonucleotide
ggccaacgtggcacaattcgtactcgcagtggcttgcgaataggtggacatgttcattac

SEQ ID NO: 91745 - DNA, 60 bp, Artificial
  Synthetic oligonucleotide
cctgaaactcaccctactactcgtgttagaaccacggttagcaagcatgacaaccctgca

SEQ ID NO: 91746 - DNA, 60 bp, Artificial
  Synthetic oligonucleotide
gtttgcacaacaagaggctttcgctttccaggagcacatacgcactacaaaacgaaagtt

SEQ ID NO: 91747 - DNA, 60 bp, Artificial
  Synthetic oligonucleotide
gcgaggaggagatagaaactgaggaagtagactgtccggccccgtatgctgtagaggctg

SEQ ID NO: 91748 - DNA, 60 bp, Artificial
  Synthetic oligonucleotide
atctgggtccgatacccgagactccaggggacggtcgcggtcgccctcgtcttcgcgatc

SEQ ID NO: 91749 - DNA, 60 bp, Artificial
  Synthetic oligonucleotide
atcgccgtcggggtcgcactccagaccacgagcgccgcacgtacccgaccaggagaccgg

SEQ ID NO: 91750 - DNA, 57 bp, Artificial
  Synthetic oligonucleotide
agttctttctcctcctgttaccagctcgcttcctcctgggcccaacagaagacgggg

SEQ ID NO: 91751 - DNA, 60 bp, Artificial
  Synthetic oligonucleotide
cgtgcctctgaggatgatttgtacaggggttgcagggctgggcaagactgccccatcgat

SEQ ID NO: 91752 - DNA, 60 bp, Artificial
  Synthetic oligonucleotide
actgccccatcgatatcaaaaacaagtatgaacagaacacactagctgacagaatactca

SEQ ID NO: 91753 - DNA, 60 bp, Artificial
  Synthetic oligonucleotide
cagagtaacaggagcccgggtagagctgcgcctaaaaggagagttctagacgacagtggt

SEQ ID NO: 91754 - DNA, 60 bp, Artificial
  Synthetic oligonucleotide
tcttatcttccttgtgatttgttaccccctcccaaatattcgtgcaaagcggtgcacctg

SEQ ID NO: 91755 - DNA, 60 bp, Artificial
  Synthetic oligonucleotide
tatgccaggcgacaaggtatactgaggctaggaatatatcaagtgcctcctacaggggtt

SEQ ID NO: 91756 - DNA, 60 bp, Artificial
  Synthetic oligonucleotide
ccacggccctgaatcaaatgacacagataggtaccagcctttcattccagtcacacctgc

SEQ ID NO: 91757 - DNA, 60 bp, Artificial
  Synthetic oligonucleotide
aagactactgtttgtggggcatccatactttgacattaaacgtgaggacaaggttctggt

SEQ ID NO: 91758 - DNA, 60 bp, Artificial
  Synthetic oligonucleotide
agaggctgtttgttatgtttgtgaaaaccccttacgtttagctctcgtctcctcaccgga

SEQ ID NO: 91759 - DNA, 60 bp, Artificial
  Synthetic oligonucleotide
acacaatatctagacacggatgactttgtcacacgcactgacaccttttaccacacgaac

SEQ ID NO: 91760 - DNA, 60 bp, Artificial
  Synthetic oligonucleotide
cggtctgcaccgaaagcggtcacttttgaaagtagcagccgcagcaaaaaggcgccaaag

SEQ ID NO: 91761 - DNA, 60 bp, Artificial
  Synthetic oligonucleotide
agagtattcaggctaaagtttccagacccaaataagttcagttttcccgatccaaatgta

SEQ ID NO: 91762 - DNA, 60 bp, Artificial
  Synthetic oligonucleotide
ctgtgtgcaaactgctctagagaggtctactctaaccgcagaccccaacgaaatggaccc

SEQ ID NO: 91763 - DNA, 60 bp, Artificial
  Synthetic oligonucleotide
gggaagtgtccttagttctgcaactgtgtatagtggacctaacaccagaggctttagctc

SEQ ID NO: 91764 - DNA, 60 bp, Artificial
  Synthetic oligonucleotide
gctggaacttaggctttatacatgcaccgaataatatagaggatcaatacagatacctac

SEQ ID NO: 91765 - DNA, 60 bp, Artificial
  Synthetic oligonucleotide
aaaccaggggacaccccagacacaagagcgcctccttccgcagatctgcctcatctgggt

SEQ ID NO: 91766 - DNA, 52 bp, Artificial
  Synthetic oligonucleotide
ggatcagaggggtatgggagcttagcctcgcagtctttgtctggtcagagtc

SEQ ID NO: 91767 - DNA, 60 bp, Artificial
  Synthetic oligonucleotide
ggactggatgggacccctgtctctttagatatgaagcatagagcccccatgcaaatatgc

SEQ ID NO: 91768 - DNA, 60 bp, Artificial
  Synthetic oligonucleotide
gatgcccagggaaacaagaattattatgtgagctttgcagatgatgcagccttgtactct

SEQ ID NO: 91769 - DNA, 60 bp, Artificial
  Synthetic oligonucleotide
ctttggaatcagctagacctcacagaaccagaggacgaagacgatggagaccctccaagc

SEQ ID NO: 91770 - DNA, 60 bp, Artificial
  Synthetic oligonucleotide
gctgcagctcactttcactacatggacctttgggctccatctgcattatgagcttgactc

SEQ ID NO: 91771 - DNA, 60 bp, Artificial
  Synthetic oligonucleotide
tgatgcgtactttgaaaggcagagtgttatcttttgttaattctaagagtcacttttggc

SEQ ID NO: 91772 - DNA, 60 bp, Artificial
  Synthetic oligonucleotide
cttcgctgtaacaatcaagtaaagcatgttaaagaatgtgctcaaatgaccagatactat

SEQ ID NO: 91773 - DNA, 60 bp, Artificial
  Synthetic oligonucleotide
gctgacctttgctctgcaattaagtggcgtcttaaagggagttatttaagccgtgtagag

SEQ ID NO: 91774 - DNA, 60 bp, Artificial
  Synthetic oligonucleotide
gcacacgtttgttagctgctagcagtcacagggcggtgcaattggcaatcttcaaagaaa

SEQ ID NO: 91775 - DNA, 60 bp, Artificial
  Synthetic oligonucleotide
gccatttgacctgtcagcaatggtgcaatgggcctatgatcataatttcgtggatgaggc

SEQ ID NO: 91776 - DNA, 60 bp, Artificial
  Synthetic oligonucleotide
gcagagatactgtgagacatttatttcagcagattttgcaggtggagaataatgatatgc

SEQ ID NO: 91777 - DNA, 60 bp, Artificial
  Synthetic oligonucleotide
ccacatttcgatgtgttgagacatttcctggggcttatgtttgcgcgttcaaccgttcgg

SEQ ID NO: 91778 - DNA, 60 bp, Artificial
  Synthetic oligonucleotide
gctgataaaatactccaatggggaagtgccctagcatatttaggtggccttgcggtcggg

SEQ ID NO: 91779 - DNA, 60 bp, Artificial
  Synthetic oligonucleotide
tgccagaactccccttagacagattgatcctaatggtcgacctccaggacgtgtcacacc

SEQ ID NO: 91780 - DNA, 60 bp, Artificial
  Synthetic oligonucleotide
ccgtgtgctttcacgggcaacaagagaggttcaacagcatctggggttaatggacttcat

SEQ ID NO: 91781 - DNA, 60 bp, Artificial
  Synthetic oligonucleotide
gaatgggtgttcatggtgttggggtgttcacatattgcattagaagctgtaaaagatgta

SEQ ID NO: 91782 - DNA, 60 bp, Artificial
  Synthetic oligonucleotide
tgggacgcgactagaccgcctcatcgcggaggctaaggacccacctgggctgtgctttgt

SEQ ID NO: 91783 - DNA, 60 bp, Artificial
  Synthetic oligonucleotide
gaaacggcatcagaaacgaggcagactgaaggacagaaactacttcaacgctgcctagtt

SEQ ID NO: 91784 - DNA, 60 bp, Artificial
  Synthetic oligonucleotide
cggcattgtatattcctaatgctgcgcctctacaaccacccctatttactacggacgact

SEQ ID NO: 91785 - DNA, 60 bp, Artificial
  Synthetic oligonucleotide
cgagcaattacgaccctagggagcgtgggacaggggcggaaaacagctaccgatacctac

SEQ ID NO: 91786 - DNA, 60 bp, Artificial
  Synthetic oligonucleotide
tggatgatcccgagtacagcggtgccagcgtcgggagtcgccctgacgggtatgatgaaa

SEQ ID NO: 91787 - DNA, 60 bp, Artificial
  Synthetic oligonucleotide
ccttgattatggaggggctacgggagagcctggagagactgcagaggagagaggctgaga

SEQ ID NO: 91788 - DNA, 60 bp, Artificial
  Synthetic oligonucleotide
cggacagtgggaaaagcatgttcgggatgtcactcatacaatttctagatggacgggtgt

SEQ ID NO: 91789 - DNA, 60 bp, Artificial
  Synthetic oligonucleotide
gcgtctgcagtgccccgacccacggcccctgatactacaattccgtttacccgtcctgtt

SEQ ID NO: 91790 - DNA, 60 bp, Artificial
  Synthetic oligonucleotide
gaggccctagatattgacaggttatttcaagaaggtttgcaggagtgggtggatagtgat

SEQ ID NO: 91791 - DNA, 60 bp, Artificial
  Synthetic oligonucleotide
tatcgaggcggcggagagccgcagcggacgacctatggcgtaaatgccaatatggggatt

SEQ ID NO: 91792 - DNA, 60 bp, Artificial
  Synthetic oligonucleotide
gaaacgacgaacccgacaatatcagccatgtgcaattgttgcactcccagcgatcacaag

SEQ ID NO: 91793 - DNA, 60 bp, Artificial
  Synthetic oligonucleotide
gattcgcatcagcgggaagtatttgcaagagcgtttcgggtcgtatcgggtgtacgggtc

SEQ ID NO: 91794 - DNA, 60 bp, Artificial
  Synthetic oligonucleotide
gaaacagtgttctctgctgcagacacaataggctgggacggtcagaatatttcggcctct

SEQ ID NO: 91795 - DNA, 60 bp, Artificial
  Synthetic oligonucleotide
tgtgctttgtcggccggacaggccagctcaagaccatacggtaccgggtgcagaccggac

SEQ ID NO: 91796 - DNA, 60 bp, Artificial
  Synthetic oligonucleotide
ggggacttgtcgtccatagctcccgatctggaattacagcccttgcagcctgttggtgca

SEQ ID NO: 91797 - DNA, 60 bp, Artificial
  Synthetic oligonucleotide
ggcctgcaacgcgtaccaccactacacgtaagcgaacaggaggcaagggacggtattctg

SEQ ID NO: 91798 - DNA, 60 bp, Artificial
  Synthetic oligonucleotide
aagggtcgtgatgttgaaagccctgcacgtttagttgcggacgatgccacgcgagaggat

SEQ ID NO: 91799 - DNA, 60 bp, Artificial
  Synthetic oligonucleotide
aattaccgcgttttcccctcggtcgcaagttcctagctttgcccggaccccgtccggcaa

SEQ ID NO: 91800 - DNA, 60 bp, Artificial
  Synthetic oligonucleotide
ggcaaccccattatatggaaaacgttctgctactgccgcagccctcacgggtgcagctgg

SEQ ID NO: 91801 - DNA, 60 bp, Artificial
  Synthetic oligonucleotide
gtgcagctggtgtgcgatctgctggcgtccgctcaggcgtgcgcactgcgaagcgtaggc

SEQ ID NO: 91802 - DNA, 60 bp, Artificial
  Synthetic oligonucleotide
tgtccgacatgtagaggaatacgaattatcctgtgtgttacggctatgtaaagtgcccct

SEQ ID NO: 91803 - DNA, 57 bp, Artificial
  Synthetic oligonucleotide
ccccatgtgctgggccgttggggtatttccgagtacccacaggccgatactaccccg

SEQ ID NO: 91804 - DNA, 60 bp, Artificial
  Synthetic oligonucleotide
ttatccgttccctgctatcacatctgcggcgtacccgtctgtgagcattcaggaggatgg

SEQ ID NO: 91805 - DNA, 60 bp, Artificial
  Synthetic oligonucleotide
ggggcaaatgcaagcgataggggtaatggaacatttggctacacgtatgcgggaatatgc

SEQ ID NO: 91806 - DNA, 60 bp, Artificial
  Synthetic oligonucleotide
ccgaaaatgtagtgctatctaatccgccaaataaacgctccgtgctatccgcgctattct

SEQ ID NO: 91807 - DNA, 60 bp, Artificial
  Synthetic oligonucleotide
tacaatgggctctggacaacaatatgtacgatgaaggggcaatagcatataactatgcgt

SEQ ID NO: 91808 - DNA, 60 bp, Artificial
  Synthetic oligonucleotide
acagaccattccaggtgcccactgccaacgttcctgtggatgtggtacctgtgtccggga

SEQ ID NO: 91809 - DNA, 60 bp, Artificial
  Synthetic oligonucleotide
cctgtgtccgggaccgagcatgctaatacattacctcctaatacgtttgtgaatcctgcc

SEQ ID NO: 91810 - DNA, 60 bp, Artificial
  Synthetic oligonucleotide
gcgatttggttcgtagtgaggatgccccacggacacggggtgacacctttattatggaac

SEQ ID NO: 91811 - DNA, 60 bp, Artificial
  Synthetic oligonucleotide
acccgccaaacatacgaggcggttcaaattcggcgcgcacccgatctcgacgaatccgta

SEQ ID NO: 91812 - DNA, 60 bp, Artificial
  Synthetic oligonucleotide
cggtagtactgctgatgaggattctgcaatagtcggtcgggagcctagcacaagcactcc

SEQ ID NO: 91813 - DNA, 59 bp, Artificial
  Synthetic oligonucleotide
cattaatgggcgagggtatcatatgatatggagggatgaagcgcgtagagtgtgtgggg

SEQ ID NO: 91814 - DNA, 60 bp, Artificial
  Synthetic oligonucleotide
gggacgtcttttgatggtcggtaacccatacttttctgtccctgatgctgataaggaccg

SEQ ID NO: 91815 - DNA, 60 bp, Artificial
  Synthetic oligonucleotide
aacagcgtccttcggaacacggttgcaggtatctagaccgggacagctccctggtatccg

SEQ ID NO: 91816 - DNA, 60 bp, Artificial
  Synthetic oligonucleotide
tgaggtttgccgtggtcagcctctgggtgtgggcatttccgcggccccggcctttaataa

SEQ ID NO: 91817 - DNA, 60 bp, Artificial
  Synthetic oligonucleotide
cgattaaccgtggaggaaagcgcaagcgaggacgacaatgacagccgtcaaagcctgtcc

SEQ ID NO: 91818 - DNA, 60 bp, Artificial
  Synthetic oligonucleotide
atccgtccagaggacgtggggacggcgagaacaacggtccggggtggtgggacgcgacta

SEQ ID NO: 91819 - DNA, 60 bp, Artificial
  Synthetic oligonucleotide
cggacggtctgtttgacccggagaagtttcgatatgtatggcaacttgtaggccttgagg

SEQ ID NO: 91820 - DNA, 60 bp, Artificial
  Synthetic oligonucleotide
ccgcaccggtgtcgtatggtgggctcgtcagtatggaccctaactcgttgttctggtttc

SEQ ID NO: 91821 - DNA, 60 bp, Artificial
  Synthetic oligonucleotide
gcttcgggtgcatggactttgcagccttggccgccaatacgtccgatatacccttggaac

SEQ ID NO: 91822 - DNA, 60 bp, Artificial
  Synthetic oligonucleotide
cagcactggggcaaggcaactccgtgtccggatgacacattggatacccagtgtccacct

SEQ ID NO: 91823 - DNA, 60 bp, Artificial
  Synthetic oligonucleotide
gtgtgttccttccgggtctgtatacacctctgatacccagttgtttaatcggccgtactg

SEQ ID NO: 91824 - DNA, 60 bp, Artificial
  Synthetic oligonucleotide
tgatcctaagggcgattgctgtttctttctaatgcgtagagaacagttgtatgcacgaca

SEQ ID NO: 91825 - DNA, 60 bp, Artificial
  Synthetic oligonucleotide
gttggacaatacgcggggtggggtcatgaacatttctacgaaacctacggatagtgggga

SEQ ID NO: 91826 - DNA, 60 bp, Artificial
  Synthetic oligonucleotide
tagacggtataccgccaccgctactggaatcaacgcgtgtggagtcacccgaaccagcca

SEQ ID NO: 91827 - DNA, 60 bp, Artificial
  Synthetic oligonucleotide
gaacacgaagaaattgaattgcagcctttacatacatctacccattcatctgcacctttg

SEQ ID NO: 91828 - DNA, 60 bp, Artificial
  Synthetic oligonucleotide
caggggacacaatatcagatgatgaaacagacaatagtagtgatacagggtcggacctaa

SEQ ID NO: 91829 - DNA, 60 bp, Artificial
  Synthetic oligonucleotide
cgccgcgcatgtcatattcccctacaacattaccagttccaagatatgcctccaatgtgt

SEQ ID NO: 91830 - DNA, 60 bp, Artificial
  Synthetic oligonucleotide
cagtgtgctgcacagtaaacctgcaatggactgtgaaggtacaaatgaggaggggcgggg

SEQ ID NO: 91831 - DNA, 60 bp, Artificial
  Synthetic oligonucleotide
ctagtgacagcaaggtatatcttcctcccacccctgtgtctcgggttgtcaacacggatg

SEQ ID NO: 91832 - DNA, 60 bp, Artificial
  Synthetic oligonucleotide
gagtgctggagcagatgttaatggaagacgtgtccttggtgtgccatcagtgtgctgcac

SEQ ID NO: 91833 - DNA, 58 bp, Artificial
  Synthetic oligonucleotide
aggccgaaattcctaaggtatctgcctatcagtacagggtatttagagtgcacctacc

SEQ ID NO: 91834 - DNA, 60 bp, Artificial
  Synthetic oligonucleotide
ggccttagtggacatcctttgtttaataagttggatgataccgaaaactctcatttggct

SEQ ID NO: 91835 - DNA, 60 bp, Artificial
  Synthetic oligonucleotide
ccgtgcccctcgacgcaaacgagcatcagctacagacttatacaaaacatgtaaggccgc

SEQ ID NO: 91836 - DNA, 51 bp, Artificial
  Synthetic oligonucleotide
atgtattataggttgtacaccgcccttgggagagcactggggtattggcac

SEQ ID NO: 91837 - DNA, 60 bp, Artificial
  Synthetic oligonucleotide
gctacttagtccctttaataaacgtgttacaatggtagctgtccgtgcccctcgacgcaa

SEQ ID NO: 91838 - DNA, 60 bp, Artificial
  Synthetic oligonucleotide
cggccctacccgtccgcccattattattgaacctgtgggtcctacagaaccttctatagt

SEQ ID NO: 91839 - DNA, 60 bp, Artificial
  Synthetic oligonucleotide
taaggccgctggtacgtgccctcctgatgttattcctaaaattgaaggttctacccttgc

SEQ ID NO: 91840 - DNA, 60 bp, Artificial
  Synthetic oligonucleotide
aagtgattatgcagaacaggaggtaacccaggcattgtttcaggcacaacaaaaacaggc

SEQ ID NO: 91841 - DNA, 60 bp, Artificial
  Synthetic oligonucleotide
ctacatttagtggtggcaatggctttgaacttaccacatcctctgcaacaacacctgctg

SEQ ID NO: 91842 - DNA, 60 bp, Artificial
  Synthetic oligonucleotide
tgacagctcagatgaggatgaaacagataatatgcgtgaccagcaggccagacaagctgg

SEQ ID NO: 91843 - DNA, 60 bp, Artificial
  Synthetic oligonucleotide
caacacatcctgcctcctacgcttggcttgccattttggcactataagtggcgcgcctgt

SEQ ID NO: 91844 - DNA, 60 bp, Artificial
  Synthetic oligonucleotide
ccactagggcgtaagtttatgttacaggccggcatacaacggcggccgaaactaggcacc

SEQ ID NO: 91845 - DNA, 54 bp, Artificial
  Synthetic oligonucleotide
aactaggcaccaaacgtcccttatcttctacctcttcctctaccaaacgcaaaa

SEQ ID NO: 91846 - DNA, 60 bp, Artificial
  Synthetic oligonucleotide
ccatactggttacaacgtgcacagggtcataataatggtatctgttggggcaatcaattg

SEQ ID NO: 91847 - DNA, 57 bp, Artificial
  Synthetic oligonucleotide
cccctacatcttctatttattctgctacacctagtggctctatggttacttcggatg

SEQ ID NO: 91848 - DNA, 60 bp, Artificial
  Synthetic oligonucleotide
atgaatgcctccatattggaggattggaattttggactaaccttacctcccactgctagt

SEQ ID NO: 91849 - DNA, 60 bp, Artificial
  Synthetic oligonucleotide
ggagatacaccagaatggatagtacgacaaacacaattagaacatagttttgatgatgct

SEQ ID NO: 91850 - DNA, 60 bp, Artificial
  Synthetic oligonucleotide
ccacctcatttgaactacctgtatatagtgggtcagacatttacacgcccacatcttccc

SEQ ID NO: 91851 - DNA, 60 bp, Artificial
  Synthetic oligonucleotide
aatggcgggttgcctagtgtgtgtagtcagggggggtcaaatgcctcagtggaagatatc

SEQ ID NO: 91852 - DNA, 60 bp, Artificial
  Synthetic oligonucleotide
ccgtggacagtgtaccggacagcgggtatggctatactgaagtggaaactcttacgcccg

SEQ ID NO: 91853 - DNA, 60 bp, Artificial
  Synthetic oligonucleotide
acaccaagtaaataattcacaggccaaaaggagagccgtggacagtgtaccggacagcgg

SEQ ID NO: 91854 - DNA, 60 bp, Artificial
  Synthetic oligonucleotide
cagaacagcccgttgcaagacataacaaatcaacacagacagcaaagcgacagtcagcag

SEQ ID NO: 91855 - DNA, 60 bp, Artificial
  Synthetic oligonucleotide
gtgccagaaacgcaattactaattgaaccaccaaaattgcgaagtacagcagtagcatta

SEQ ID NO: 91856 - DNA, 60 bp, Artificial
  Synthetic oligonucleotide
gcctatcaacaggtaaaggttacagatcccaattttattggtaatccctccacatttgtt

SEQ ID NO: 91857 - DNA, 60 bp, Artificial
  Synthetic oligonucleotide
taaaagtgacaaaacatgctgttcagattgggtgtgtgcagcattcggtgtggcaggctc

SEQ ID NO: 91858 - DNA, 60 bp, Artificial
  Synthetic oligonucleotide
tgtgttgtttgttgccacttttgctttccatttatgtgtttgcagcctcgctattattag

SEQ ID NO: 91859 - DNA, 60 bp, Artificial
  Synthetic oligonucleotide
atagtgtatattttaccaacacacaagccaatatgtgctgctaacacacctatatacctg

SEQ ID NO: 91860 - DNA, 60 bp, Artificial
  Synthetic oligonucleotide
cgaggatcctagagaacgacccagaacgctacatgagctatgtgaaagcttgaatactac

SEQ ID NO: 91861 - DNA, 60 bp, Artificial
  Synthetic oligonucleotide
aagtaaaaggctagctacgtgcaaaacagctatgttcgaggatcctagagaacgacccag

SEQ ID NO: 91862 - DNA, 60 bp, Artificial
  Synthetic oligonucleotide
cgtccggcccttacatctcgcaaaggtactgtacgctatagtaggttgggtcaaaaggcc

SEQ ID NO: 91863 - DNA, 60 bp, Artificial
  Synthetic oligonucleotide
ggatatattatacacaaggggcatataagcagtattacgtggactttaaacaagaggcgg

SEQ ID NO: 91864 - DNA, 60 bp, Artificial
  Synthetic oligonucleotide
gtgtattataaaactgatatagggtggtgtaaaggtactggagatgttgatgcaaaaggg

SEQ ID NO: 91865 - DNA, 60 bp, Artificial
  Synthetic oligonucleotide
agtatcaaacgccaccacccagaccaccgaagcctacgtgcccgtgggcaccaaggaaac

SEQ ID NO: 91866 - DNA, 60 bp, Artificial
  Synthetic oligonucleotide
ccactgtcaccacagctgccacacagcccggacagtcagtggactatacaaacaacaacc

SEQ ID NO: 91867 - DNA, 60 bp, Artificial
  Synthetic oligonucleotide
gatataccacaggccggggaagcatcaggtcatatatttactacaacgtccacagctggc

SEQ ID NO: 91868 - DNA, 60 bp, Artificial
  Synthetic oligonucleotide
aacaacaacctacacagtacaagtggaggccatcacccgggaagggacacgagtagtgac

SEQ ID NO: 91869 - DNA, 60 bp, Artificial
  Synthetic oligonucleotide
ggtcttggtataggtacaggaactgggtctggtgggcgtactggatacattcccctagga

SEQ ID NO: 91870 - DNA, 60 bp, Artificial
  Synthetic oligonucleotide
tatatatgcagaccctgatacagttcctagcatacatacgccgcgcatgtcatattcccc

SEQ ID NO: 91871 - DNA, 60 bp, Artificial
  Synthetic oligonucleotide
tttggaggaggacgcggacaaagaaaatggagaacctttgccagcgtttaaatgcgtgcc

SEQ ID NO: 91872 - DNA, 60 bp, Artificial
  Synthetic oligonucleotide
gaaactggtacgatatgaatgtgcaatattttataaagctcgtgaaggaaacatgcaatg

SEQ ID NO: 91873 - DNA, 60 bp, Artificial
  Synthetic oligonucleotide
ggcatggcaggcaattgaaatacatatagcattgcagtcgttaataaacacggactataa

SEQ ID NO: 91874 - DNA, 60 bp, Artificial
  Synthetic oligonucleotide
tgtcaggcaaaatatgtaaaagactgtgcaaccatgactagacattataaaagagcacag

SEQ ID NO: 91875 - DNA, 60 bp, Artificial
  Synthetic oligonucleotide
gatggaaatccctgttgtatagacagaaaacatagaagcctactgcaagttacatgcccc

SEQ ID NO: 91876 - DNA, 60 bp, Artificial
  Synthetic oligonucleotide
cctgcattcacagagccgtcccttgtagaagttccacagagtggtgaggtttcgggacac

SEQ ID NO: 91877 - DNA, 60 bp, Artificial
  Synthetic oligonucleotide
taatccggtcgctgcttgctttctagctttaattaatgcagttgctacacgtctctttct

SEQ ID NO: 91878 - DNA, 60 bp, Artificial
  Synthetic oligonucleotide
tataaccctgacgccgagcgactggtctgggcttgtactggggttgaggtaggtcgtgga

SEQ ID NO: 91879 - DNA, 60 bp, Artificial
  Synthetic oligonucleotide
cgactcgcagtaccaatatgtgcttgtgtgttccttctgaggcctcccctgccactacgt

SEQ ID NO: 91880 - DNA, 60 bp, Artificial
  Synthetic oligonucleotide
atttggtgtggagagcgggagtgccatacggtgcctgtgcacggtgtttactcctacagg

SEQ ID NO: 91881 - DNA, 54 bp, Artificial
  Synthetic oligonucleotide
ttttgctgcagctgggtgtacgttctcgctccgccgtctccgtccgcaaacgcc

SEQ ID NO: 91882 - DNA, 60 bp, Artificial
  Synthetic oligonucleotide
gcacggtccgcatcccacagtaaaagatatcgaattgagtcttgcaccagaggatatccc

SEQ ID NO: 91883 - DNA, 60 bp, Artificial
  Synthetic oligonucleotide
actgtaaaacgaaagtttgcacccagtccttatttcagccccgtgtgtgagcaagccagc

SEQ ID NO: 91884 - DNA, 60 bp, Artificial
  Synthetic oligonucleotide
ccctcacgggtgccggaccctgatttccttgacattgtgcgtctgcatcgccctgcatta

SEQ ID NO: 91885 - DNA, 60 bp, Artificial
  Synthetic oligonucleotide
cctgtgagtaagtaaggttgttctaggtcaggagaccgatttcggtacaagatggccgcc

SEQ ID NO: 91886 - DNA, 60 bp, Artificial
  Synthetic oligonucleotide
gtgtgtgcttcccgcgctgacgtgctatctggcatttgtgctttgtgtgtacttgggcct

SEQ ID NO: 91887 - DNA, 60 bp, Artificial
  Synthetic oligonucleotide
gggctagtgctgttggagacgccatcccagacactttcatattaaagagcaacggtgggg

SEQ ID NO: 91888 - DNA, 60 bp, Artificial
  Synthetic oligonucleotide
tatccactcctggacctgtgtgcaccagtaacaccaccccagcgtccacccaagcccagg

SEQ ID NO: 91889 - DNA, 60 bp, Artificial
  Synthetic oligonucleotide
ggagggaactttatgtgcagaactatagtgacgatagatgggtgaaggtgccaggaaaag

SEQ ID NO: 91890 - DNA, 59 bp, Artificial
  Synthetic oligonucleotide
ccccagatgttattcccaaagtagagggcaccaccttggcagatcgcattttgcagtgg

SEQ ID NO: 91891 - DNA, 60 bp, Artificial
  Synthetic oligonucleotide
gacacaggcaaccaaaatggccgccagaacaatgatgaggggagtgggaggaatgtgggg

SEQ ID NO: 91892 - DNA, 60 bp, Artificial
  Synthetic oligonucleotide
gcacggacgactatgtgacacgcaccaacatttactattatgcaggcacttcacggttgc

SEQ ID NO: 91893 - DNA, 60 bp, Artificial
  Synthetic oligonucleotide
gctgtagcgacgtgtatggggaaacaccagagtggatagtcaggcagacaatggtgggac

SEQ ID NO: 91894 - DNA, 60 bp, Artificial
  Synthetic oligonucleotide
gccgactgggtggtgtgtgtgttcggggtgttttgcacagtggcagagggcataaagacc

SEQ ID NO: 91895 - DNA, 60 bp, Artificial
  Synthetic oligonucleotide
aaagattccacccagaaggccgcggaacgagcgggtggacaagtggacagtgacaggacc

SEQ ID NO: 91896 - DNA, 60 bp, Artificial
  Synthetic oligonucleotide
ggcaagagttttggaaactgacgaatatatcactggaacatctctgtatttccacgctgg

SEQ ID NO: 91897 - DNA, 60 bp, Artificial
  Synthetic oligonucleotide
ccatgggagatgctctaccagaaccttttgaagctacctcagattattttattggtgctc

SEQ ID NO: 91898 - DNA, 56 bp, Artificial
  Synthetic oligonucleotide
ttggacgacttctgcagacgattcgacatttccttttttgatttgcgccttacttg

SEQ ID NO: 91899 - DNA, 60 bp, Artificial
  Synthetic oligonucleotide
cttaatttagaactaaatgacttagtgttaccagcaaacctgctgagtgaggaggtcttg

SEQ ID NO: 91900 - DNA, 60 bp, Artificial
  Synthetic oligonucleotide
gctgaaccttgtcccagccctgctccgcaacagggagattgcccaccaatagagcttgta

SEQ ID NO: 91901 - DNA, 60 bp, Artificial
  Synthetic oligonucleotide
cctctagaaccagctttgttatctgatatatttagtacggattttgtatatcgtcctagt

SEQ ID NO: 91902 - DNA, 60 bp, Artificial
  Synthetic oligonucleotide
gggacccctagtggctctttagtatccagtgaatcccagttgtttaatcgaccgtattgg

SEQ ID NO: 91903 - DNA, 60 bp, Artificial
  Synthetic oligonucleotide
aggcacaataaaaactagaagtggtgtgcaaattgggcaggcggttcatttttattacga

SEQ ID NO: 91904 - DNA, 60 bp, Artificial
  Synthetic oligonucleotide
caatctagagctacaagatgccctacacagacccctgcaactgaaaaagaagatccatat

SEQ ID NO: 91905 - DNA, 60 bp, Artificial
  Synthetic oligonucleotide
aatgaatcctaatattttggataattggcagttaaattttgttccaccacctccctctgg

SEQ ID NO: 91906 - DNA, 60 bp, Artificial
  Synthetic oligonucleotide
gtatgctgctgagctcggactacggaccttggaacaacttcttgtagaaggaaagctgac

SEQ ID NO: 91907 - DNA, 60 bp, Artificial
  Synthetic oligonucleotide
cagacatagtcactatagggcgtccaaggttttcagagacagatgctggtcaaattagag

SEQ ID NO: 91908 - DNA, 60 bp, Artificial
  Synthetic oligonucleotide
gagcgggatttagaacaggttgcagcagctccagatgctgactttgcagacatagtcact

SEQ ID NO: 91909 - DNA, 60 bp, Artificial
  Synthetic oligonucleotide
ggttgggaagtgtaatatacctaggaggcttgggtattggtactgggagaggtagtgggg

SEQ ID NO: 91910 - DNA, 60 bp, Artificial
  Synthetic oligonucleotide
tggacaaacaccggattggatcgcaaaacaaactctcgtaagtcatcaagcagcaactac

SEQ ID NO: 91911 - DNA, 60 bp, Artificial
  Synthetic oligonucleotide
aaaagttaactcaaattgctgcaacttcttattcatgagtactgtttggaactgggttgg

SEQ ID NO: 91912 - DNA, 60 bp, Artificial
  Synthetic oligonucleotide
gctagggatccgcctatgatattgttaaagggcacagcaaattctttgaaatgttggaga

SEQ ID NO: 91913 - DNA, 60 bp, Artificial
  Synthetic oligonucleotide
gaaagacaaggtctgtcgcgacttggactcttacaagcagaagctagggatccgcctatg

SEQ ID NO: 91914 - DNA, 60 bp, Artificial
  Synthetic oligonucleotide
gcctattttagatgatggtagtcctatgtatacatttactgacggtacttggaaatcttt

SEQ ID NO: 91915 - DNA, 61 bp, Artificial
  Synthetic oligonucleotide
gcatgtacgagattgtagtacaatggtcaggatgtataaaagatatgaaatgagagatatg

SEQ ID NO: 91916 - DNA, 60 bp, Artificial
  Synthetic oligonucleotide
cctgcacaagtagatatttcaacatcacatgaccctatatcagatgtcactggtgctagc

SEQ ID NO: 91917 - DNA, 60 bp, Artificial
  Synthetic oligonucleotide
tcacacctagtggtactttagtaaggcctacagtgcctgtggaaagtttgggaccctcag

SEQ ID NO: 91918 - DNA, 60 bp, Artificial
  Synthetic oligonucleotide
gtcactggtgctagcagccaccctacaatcatatctggcgaggataacgccattgcagtg

SEQ ID NO: 91919 - DNA, 60 bp, Artificial
  Synthetic oligonucleotide
caatttgtctggcggcgctgaacgaatttggctgtcagcctttgcaccgggagtggtgga

SEQ ID NO: 91920 - DNA, 60 bp, Artificial
  Synthetic oligonucleotide
ttgaatttaacaactgtaagctacaaaagaccgttatcgtttcctctaaccttgggaaaa

SEQ ID NO: 91921 - DNA, 60 bp, Artificial
  Synthetic oligonucleotide
cgccattgcagtgttagatgtgtcccctatagaacctcccacaaaacggatagcattggc

SEQ ID NO: 91922 - DNA, 60 bp, Artificial
  Synthetic oligonucleotide
gatccacttacagaagattttagtcagtcacacttggtgcttactagtagcagacgtggg

SEQ ID NO: 91923 - DNA, 60 bp, Artificial
  Synthetic oligonucleotide
tccaagaatatcaaatgttatgtgatcctccaaaattacgaagtgtacccacagcattat

SEQ ID NO: 91924 - DNA, 60 bp, Artificial
  Synthetic oligonucleotide
gggatctgcaccatctcctgcagaagtggggagcagacatcgacaagttgaaagacaagg

SEQ ID NO: 91925 - DNA, 53 bp, Artificial
  Synthetic oligonucleotide
aggaacaacagttacccgggccctccaccagctactccgaagttaccgagcag

SEQ ID NO: 91926 - DNA, 60 bp, Artificial
  Synthetic oligonucleotide
ggtttcaggaagtcaatttagagtgtttagattcaatttgccagacccaaacagatttgc

SEQ ID NO: 91927 - DNA, 60 bp, Artificial
  Synthetic oligonucleotide
cgagttggttatctacaacgggtaaagtctacttacctccagctcaacctgtggcaagag

SEQ ID NO: 91928 - DNA, 60 bp, Artificial
  Synthetic oligonucleotide
ggttcagcaaatacctactaggaacccagctttactgacacagccttcccgcgcaatagt

SEQ ID NO: 91929 - DNA, 60 bp, Artificial
  Synthetic oligonucleotide
ccacgctggtacagaaaggcttttaactgtaggccatccttattttccagtgaaagatgt

SEQ ID NO: 91930 - DNA, 60 bp, Artificial
  Synthetic oligonucleotide
ccctagtcgcacgtttcgatgcacttcaagaagcaattctgactcatattgagtcacagg

SEQ ID NO: 91931 - DNA, 60 bp, Artificial
  Synthetic oligonucleotide
ttcaggcgattccattggttatacagaagaaattccattagaaccgttgaacccctttca

SEQ ID NO: 91932 - DNA, 60 bp, Artificial
  Synthetic oligonucleotide
atgctataatgcattatgctcgaaaacaaggcctaaccaaattaggtctacaaccacttc

SEQ ID NO: 91933 - DNA, 60 bp, Artificial
  Synthetic oligonucleotide
cattggcaactaggggagcctcagcaactccacatgtaagtgtcatatctggcacaaccg

SEQ ID NO: 91934 - DNA, 60 bp, Artificial
  Synthetic oligonucleotide
gatgttgctgtgtggtttgataatgatagacagaatgcaatgctgtacacaaattgggac

SEQ ID NO: 91935 - DNA, 60 bp, Artificial
  Synthetic oligonucleotide
gttaaaggtgaagtggattatgatggcttatactttacagaccatacgggagaaagagct

SEQ ID NO: 91936 - DNA, 60 bp, Artificial
  Synthetic oligonucleotide
ggactgtggactgtgcattttaaaacccaagttatttcctcccctattgttagctctaca

SEQ ID NO: 91937 - DNA, 60 bp, Artificial
  Synthetic oligonucleotide
ggaataattggtatattgtccatgaagcagaatgcactgacagtatagatacgttggatg

SEQ ID NO: 91938 - DNA, 60 bp, Artificial
  Synthetic oligonucleotide
gaaggaaagctgacgttttgctgcaccgcttgtgcaagaagtcttaacagaaatggcaga

SEQ ID NO: 91939 - DNA, 60 bp, Artificial
  Synthetic oligonucleotide
ctcttacacaggtagaatccgagagccaggctggaccttctagccaagatggcggcggag

SEQ ID NO: 91940 - DNA, 60 bp, Artificial
  Synthetic oligonucleotide
caaactaataccaaacgttctgccaaacgaaaacggtctctgaaataacaatgtgaactc

SEQ ID NO: 91941 - DNA, 60 bp, Artificial
  Synthetic oligonucleotide
tttccagtgaattgagccaattttccttaggcaggcggtttttatatcaaagtggtttaa

SEQ ID NO: 91942 - DNA, 60 bp, Artificial
  Synthetic oligonucleotide
tgaaataaactgccacatacttgccagtgtccagtctctctgagtcatttggtcaacatg

SEQ ID NO: 91943 - DNA, 60 bp, Artificial
  Synthetic oligonucleotide
ggtcaacatgcgtccgcaccccaataattatttgcatacacagatcagtaggagaggcgc

SEQ ID NO: 91944 - DNA, 64 bp, Artificial
  Synthetic oligonucleotide
ctgccaggaaaaccttcaactgagccaaattattatataatcgttcttaatctcaaaattgagc

SEQ ID NO: 91945 - DNA, 60 bp, Artificial
  Synthetic oligonucleotide
cgataacggtaagtttcaatcgggcgcggtcacattatacttagtcatctcttgtggttg

SEQ ID NO: 91946 - DNA, 60 bp, Artificial
  Synthetic oligonucleotide
gcaagtcaacaggcccaaaatactcttggcagctccatctatttccctaccgtcagtggc

SEQ ID NO: 91947 - DNA, 60 bp, Artificial
  Synthetic oligonucleotide
ggctgataataccagaaataccaattttactattagtgtaagtacggatggccagacacc

SEQ ID NO: 91948 - DNA, 60 bp, Artificial
  Synthetic oligonucleotide
acccctgataatcctatacatgacacatataggtatcttacatcacaggcaacacgatgc

SEQ ID NO: 91949 - DNA, 59 bp, Artificial
  Synthetic oligonucleotide
ttttatttcaagctgggctacaacgggcttctagagtgtctaaatcctctgctgctaga

SEQ ID NO: 91950 - DNA, 60 bp, Artificial
  Synthetic oligonucleotide
gattaacccacctgcaaccgcacccggttaatcagattataaaggtgcgccggtgttcac

SEQ ID NO: 91951 - DNA, 60 bp, Artificial
  Synthetic oligonucleotide
ggtacaggccgtggtaccggtggcagtactggctatgtacctataggtgaaggcccagca

SEQ ID NO: 91952 - DNA, 60 bp, Artificial
  Synthetic oligonucleotide
ggtgcgtgctcgcagaacaaagcgagattctgtaacaaacatttacagaacctgcaaaca

SEQ ID NO: 91953 - DNA, 56 bp, Artificial
  Synthetic oligonucleotide
ggggagagcctgtttctggaggggttggcatctcgcctgacaaggtgggatcaaga

SEQ ID NO: 91954 - DNA, 60 bp, Artificial
  Synthetic oligonucleotide
accacctggtcatgggttggtgtagatggcaatgaaagaataggtagatcacgtatgctt

SEQ ID NO: 91955 - DNA, 60 bp, Artificial
  Synthetic oligonucleotide
gctgaagcgccagctgaacaagagttggaggcagaggaggagcttatccaaggcatccct

SEQ ID NO: 91956 - DNA, 60 bp, Artificial
  Synthetic oligonucleotide
atcctcaacccgatttgccaactgtaataattcatactgcagatacctctggggacttct

SEQ ID NO: 91957 - DNA, 60 bp, Artificial
  Synthetic oligonucleotide
gcggtgccagactgcgagtcttcgtgttagccactgacgctgctattagaagtttccaag

SEQ ID NO: 91958 - DNA, 60 bp, Artificial
  Synthetic oligonucleotide
tcaaagaggatggtacccctgtatttcaacttactgaccaaagctggaaatctttttttg

SEQ ID NO: 91959 - DNA, 60 bp, Artificial
  Synthetic oligonucleotide
gcttctggaggaactgcaattcttgtgtcctcagtgtcgtgaagaaattcggaatggcgg

SEQ ID NO: 91960 - DNA, 60 bp, Artificial
  Synthetic oligonucleotide
atggtagtggcaggcgttctaccacatttactgtaccccgcttctctactcccagatctg

SEQ ID NO: 91961 - DNA, 60 bp, Artificial
  Synthetic oligonucleotide
gatatagcaaaattaagccgccctctttactctgaaacaccacagggatatgtcagggta

SEQ ID NO: 91962 - DNA, 54 bp, Artificial
  Synthetic oligonucleotide
gcagggaaattcgcgagatctgcttcgccagcaggaatttgaggagagcgcgga

SEQ ID NO: 91963 - DNA, 60 bp, Artificial
  Synthetic oligonucleotide
ctgagtggatacatcacagaatacaacaagtagaaggggaaggccattggtctgaaatag

SEQ ID NO: 91964 - DNA, 60 bp, Artificial
  Synthetic oligonucleotide
ggcctatgatagcgatctcacagatgaagctgacattgcatatctttatgctaaaatggc

SEQ ID NO: 91965 - DNA, 60 bp, Artificial
  Synthetic oligonucleotide
ctgtctccactttcagaatgtaaaatagggctgttggatgatgctaccgatccttgttgg

SEQ ID NO: 91966 - DNA, 60 bp, Artificial
  Synthetic oligonucleotide
gaaatggtctcgatggaaatgttgtaagtgtggattgcaaacataaaacccctatgcaaa

SEQ ID NO: 91967 - DNA, 60 bp, Artificial
  Synthetic oligonucleotide
ctgcaactggtaaggtatatctaccaccttcaacacctgtggcaagggtacaaagcacgg

SEQ ID NO: 91968 - DNA, 60 bp, Artificial
  Synthetic oligonucleotide
cgttccagctacattttggcgccaactctttggcagcaacaccagaacgataacggtaag

SEQ ID NO: 91969 - DNA, 60 bp, Artificial
  Synthetic oligonucleotide
ctgctaaaccttgtgatgcagatgctggtcagggtaaatgccctccattagaattaatca

SEQ ID NO: 91970 - DNA, 51 bp, Artificial
  Synthetic oligonucleotide
ccggaggatctgtcacaacctccagagattccagccccaagagaacccgca

SEQ ID NO: 91971 - DNA, 60 bp, Artificial
  Synthetic oligonucleotide
gacgatccaggtctagaaccaggacccgcagacgggaagcgagcacctcaaggtcccaaa

SEQ ID NO: 91972 - DNA, 60 bp, Artificial
  Synthetic oligonucleotide
cagcctttaggtgttggtacaacaggacatccattgtttaacaaagtcaaagatactgaa

SEQ ID NO: 91973 - DNA, 60 bp, Artificial
  Synthetic oligonucleotide
gatacagcagacaattctaaaattttagtaccaaaggtttcaggtaatcaatatcgagcc

SEQ ID NO: 91974 - DNA, 60 bp, Artificial
  Synthetic oligonucleotide
tatatactgcttggaaagagatttattttgtagactcagatgatatgtggcaaaaggtgc

SEQ ID NO: 91975 - DNA, 60 bp, Artificial
  Synthetic oligonucleotide
cagtgacccagaagacgaggcagacaatggaggcactcaacgctcgtttcaatgtactac

SEQ ID NO: 91976 - DNA, 60 bp, Artificial
  Synthetic oligonucleotide
gactctagtcctacagcagcctccaactccaggaaagaggtctcgcgacgacgatccagg

SEQ ID NO: 91977 - DNA, 60 bp, Artificial
  Synthetic oligonucleotide
gccacaggagcacctgaactctcatccaaaaccggtaccaggaaaggaaggtacgggcga

SEQ ID NO: 91978 - DNA, 54 bp, Artificial
  Synthetic oligonucleotide
ggctacgagaatcctccaacgccagccccgttcacgacaccgtcgacgagacac

SEQ ID NO: 91979 - DNA, 60 bp, Artificial
  Synthetic oligonucleotide
tttaaagatggcaaatgacatatatggggatgcttgtttcttctatgctagacgtgaaca

SEQ ID NO: 91980 - DNA, 60 bp, Artificial
  Synthetic oligonucleotide
ggaggttgcctctgaacccacaccacccactcgcaccagaatttccagaacacagtacca

SEQ ID NO: 91981 - DNA, 60 bp, Artificial
  Synthetic oligonucleotide
cctctttgggagaatctgcattaactgatcatgttgttgttactagtggttctggtggtc

SEQ ID NO: 91982 - DNA, 60 bp, Artificial
  Synthetic oligonucleotide
gcatcatctgtggtcccactcactgacacaggacctgatttgctacctgggacaattgag

SEQ ID NO: 91983 - DNA, 60 bp, Artificial
  Synthetic oligonucleotide
cggaatggcggacgataaaggtactgatcccaaagaagggtgtagcgagtggtttataga

SEQ ID NO: 91984 - DNA, 60 bp, Artificial
  Synthetic oligonucleotide
cctgggacaattgagactattgcagaagtgaaccctgccccagatattcctagagttgac

SEQ ID NO: 91985 - DNA, 60 bp, Artificial
  Synthetic oligonucleotide
gtcgtaggcatcgaaatagaaggacgagcagcggctaatattgctgagatagtagtcaga

SEQ ID NO: 91986 - DNA, 60 bp, Artificial
  Synthetic oligonucleotide
tctccgcgacaaaagtctaaacgaaggctatttgaggaggacagcgggctggaattatcg

SEQ ID NO: 91987 - DNA, 60 bp, Artificial
  Synthetic oligonucleotide
gctgtggaaagacggatttgtctttggttgttgtgcagcttgtgcctatagatcagcata

SEQ ID NO: 91988 - DNA, 60 bp, Artificial
  Synthetic oligonucleotide
ctcatttgtagatttaaatgttcaggaactgcctcaagtaatagaagtagacccagaacc

SEQ ID NO: 91989 - DNA, 60 bp, Artificial
  Synthetic oligonucleotide
ggaacctacaccaccaagacgctctagtaccccactacgcaacatcacacaagctgtagg

SEQ ID NO: 91990 - DNA, 60 bp, Artificial
  Synthetic oligonucleotide
gctgtaaagattgggtaattgcagcctatggcgtgcgagaagagctggtagaaagtgcaa

SEQ ID NO: 91991 - DNA, 60 bp, Artificial
  Synthetic oligonucleotide
gaagtgtggtgtcagcactatactggtacaaaggcagtatggactcatctgtgtatgctc

SEQ ID NO: 91992 - DNA, 60 bp, Artificial
  Synthetic oligonucleotide
ggaggtaccggcggcaacgccggcagagcagggtggtcagggagagggcaatttgcatta

SEQ ID NO: 91993 - DNA, 60 bp, Artificial
  Synthetic oligonucleotide
gcttgccctttgcaattgcagtggaagcgaaactcagcttttgggtgctgtctcagctgc

SEQ ID NO: 91994 - DNA, 60 bp, Artificial
  Synthetic oligonucleotide
gggatgacagtggagtagatcttgagcaacatgaagctgacgattctgttaaccaggggc

SEQ ID NO: 91995 - DNA, 60 bp, Artificial
  Synthetic oligonucleotide
tttgcgttttgattataaggtctgcgtgagaaaacgttggagggcattcatggcgcgtcc

SEQ ID NO: 91996 - DNA, 60 bp, Artificial
  Synthetic oligonucleotide
gaatggattcataagcagtgtaaaggggctgagggtgacggtgactggaaagaggttgtg

SEQ ID NO: 91997 - DNA, 60 bp, Artificial
  Synthetic oligonucleotide
catgaagcagctggaagcctcagacaaacttcggtgctgtcttgcacaggaattggacgt

SEQ ID NO: 91998 - DNA, 60 bp, Artificial
  Synthetic oligonucleotide
caattcaaatgacaccccggagattattgtgcccaaagtttctccaaaccagtacagagt

SEQ ID NO: 91999 - DNA, 60 bp, Artificial
  Synthetic oligonucleotide
ggcggtttggcttcctgcacagaataagttttacctgccacctcagccaagcacgcgtgt

SEQ ID NO: 92000 - DNA, 60 bp, Artificial
  Synthetic oligonucleotide
gcctagcccgcaggtgtttccagaatttgagggcgtgcatgtgagtcagggcaattactc

SEQ ID NO: 92001 - DNA, 60 bp, Artificial
  Synthetic oligonucleotide
cgaacctgtagaagacgtgtgtgattctgcaagtgacatttctgacttagtagacaatgc

SEQ ID NO: 92002 - DNA, 60 bp, Artificial
  Synthetic oligonucleotide
gctaagccactagccaagattacaagatacaaaggggtccatataacatcttaggttaag

SEQ ID NO: 92003 - DNA, 60 bp, Artificial
  Synthetic oligonucleotide
ttttgtctgagcattatccatactctggcaccattgctccaaactctgtgaaacatgatc

SEQ ID NO: 92004 - DNA, 60 bp, Artificial
  Synthetic oligonucleotide
tttatacagggtgtcagcgtcctgcggtctttgtggcagtggggtgaggttcgcctgcct

SEQ ID NO: 92005 - DNA, 60 bp, Artificial
  Synthetic oligonucleotide
caccaaaaggaatcagcaccaactgctctttgtaaataccagctccctcccctggtcacc

SEQ ID NO: 92006 - DNA, 60 bp, Artificial
  Synthetic oligonucleotide
ggggctcatatggctatgtgcctgttggaagtgggcaaggggtgcggttaggaaccagag

SEQ ID NO: 92007 - DNA, 60 bp, Artificial
  Synthetic oligonucleotide
gaccactaacttaaatgtcaagggcgatgagcgctggctttatctgcacagcaggctttc

SEQ ID NO: 92008 - DNA, 60 bp, Artificial
  Synthetic oligonucleotide
tcaacaggagggagcaggcgctttattattgtgctaggaagcaaggaattacaagaatag

SEQ ID NO: 92009 - DNA, 60 bp, Artificial
  Synthetic oligonucleotide
gcattgggtaaaggcaaaatggtgcaatggtgcaggccatgcaagccagcagtgccctcc

SEQ ID NO: 92010 - DNA, 60 bp, Artificial
  Synthetic oligonucleotide
acacgaactgtggctactaaaaatggtgcttaccccacactcaactattttagttccccc

SEQ ID NO: 92011 - DNA, 60 bp, Artificial
  Synthetic oligonucleotide
caatacacgtggcacacctttgaccattaatattggtccgaatgacaaggctcaagttgg

SEQ ID NO: 92012 - DNA, 60 bp, Artificial
  Synthetic oligonucleotide
caagaaggcagggtgagggtcagtcgattgggaacaaaagccagcatgcgcacacgcagt

SEQ ID NO: 92013 - DNA, 60 bp, Artificial
  Synthetic oligonucleotide
ggactgacatatatcaccagactgaacaagatcagtggcgcaaaacaaaaggtcaggcag

SEQ ID NO: 92014 - DNA, 60 bp, Artificial
  Synthetic oligonucleotide
ttccgagacgatctggagaccgacttgggcgccttctactcgacgctcgtgatcccccag

SEQ ID NO: 92015 - DNA, 60 bp, Artificial
  Synthetic oligonucleotide
gtcccaagaagcaaacgcctaccaaagccaggaagcgacctcttcgtctgtcctccccga

SEQ ID NO: 92016 - DNA, 60 bp, Artificial
  Synthetic oligonucleotide
ctaccgggccggataggtggggtcgatctcgaatgctcctgacatttacagatacagcac

SEQ ID NO: 92017 - DNA, 60 bp, Artificial
  Synthetic oligonucleotide
ccacattttagttgaagggttttctggtgggcacacaataggcgagcgcattcccctgca

SEQ ID NO: 92018 - DNA, 60 bp, Artificial
  Synthetic oligonucleotide
gattatcaaaaccgctagcgttgttggctgccatcccggaaccacaagagttagtcagcg

SEQ ID NO: 92019 - DNA, 60 bp, Artificial
  Synthetic oligonucleotide
caaaccccacttgggaggaagtttctgttccagactaatgtgttgcagggtggaggctca

SEQ ID NO: 92020 - DNA, 60 bp, Artificial
  Synthetic oligonucleotide
gtctctgggaggtggggtgcgtgactgtataggagtggacattttgaaatgcagtaatac

SEQ ID NO: 92021 - DNA, 60 bp, Artificial
  Synthetic oligonucleotide
taacgaagcgcttcaggagcaggtagacatcgtacagtctctgggaggtggggtgcgtga

SEQ ID NO: 92022 - DNA, 60 bp, Artificial
  Synthetic oligonucleotide
ctgctgaggaggaggagtctgaatatccatatgcaattgtgcttccttgtggtttgtgcg

SEQ ID NO: 92023 - DNA, 60 bp, Artificial
  Synthetic oligonucleotide
ggcggcagcgttatattggtataggagatctatgtctccagctgtatatacctggggaga

SEQ ID NO: 92024 - DNA, 60 bp, Artificial
  Synthetic oligonucleotide
gctgtagttactgggtcatagcagtgtggggagtaacatctacgtctgtggacgttgtga

SEQ ID NO: 92025 - DNA, 60 bp, Artificial
  Synthetic oligonucleotide
atgcacaagcaaaatatgttaaggactgtgctagaatggttagtcattacaaaagggcag

SEQ ID NO: 92026 - DNA, 60 bp, Artificial
  Synthetic oligonucleotide
gcaggcactgtctgcaaatatccagattatattaaaatgggacaggaagtacatggtaat

SEQ ID NO: 92027 - DNA, 60 bp, Artificial
  Synthetic oligonucleotide
caagtgccagttactgcacctgaatttatcacaaggcctgcttccttagttacttttgag

SEQ ID NO: 92028 - DNA, 60 bp, Artificial
  Synthetic oligonucleotide
gttgccagctttttccttataaaactctggtgggaatttctcttgggacagatggacctg

SEQ ID NO: 92029 - DNA, 66 bp, Artificial
  Synthetic oligonucleotide
ggaggaatatgagttatcctttatagttcagctttgtaaggtaaaactaacacctgaaaatttagc

SEQ ID NO: 92030 - DNA, 60 bp, Artificial
  Synthetic oligonucleotide
actataggtgctcaatcacacttttatatggatattagctctatctcctcaaatgatggc

SEQ ID NO: 92031 - DNA, 60 bp, Artificial
  Synthetic oligonucleotide
gggatgtagacctcagtgagcgaatgtcggagcagcttgatcaatttcctttaggccgca

SEQ ID NO: 92032 - DNA, 60 bp, Artificial
  Synthetic oligonucleotide
aacacagttattgaggatggtgatatgtttgacataggtctaggtgctatggactttggt

SEQ ID NO: 92033 - DNA, 60 bp, Artificial
  Synthetic oligonucleotide
ctcccagtggatctttagtgtcctctgatgtgcaaatttttaataggccctattggttac

SEQ ID NO: 92034 - DNA, 60 bp, Artificial
  Synthetic oligonucleotide
tcacttcagtctgagacttattcagatgaacatttgttagatatgtatgaacctgtaggt

SEQ ID NO: 92035 - DNA, 60 bp, Artificial
  Synthetic oligonucleotide
gttcacaaatgttatgtctcctgtcaatagctccccactacggacttctgggtctcctac

SEQ ID NO: 92036 - DNA, 60 bp, Artificial
  Synthetic oligonucleotide
atttaagcagaccaacatacagtcgtgcccctgatggccgcatgcgcctaagccgcctgg

SEQ ID NO: 92037 - DNA, 60 bp, Artificial
  Synthetic oligonucleotide
ctgggtctcctacagacaccaacccagccacccaaggacaatccacccaaactgccagaa

SEQ ID NO: 92038 - DNA, 60 bp, Artificial
  Synthetic oligonucleotide
ctgaaggtgagcttgaaactgagttcacaactagtacaccaagaaccacacaagtacagg

SEQ ID NO: 92039 - DNA, 60 bp, Artificial
  Synthetic oligonucleotide
gcctctgccggtagtggagaacgggtggcattcatttctccgggagacgttggaacatca

SEQ ID NO: 92040 - DNA, 60 bp, Artificial
  Synthetic oligonucleotide
tgttcgcaagcgacggccctacggacgaagaaggtccagaagtcccagagataccaccct

SEQ ID NO: 92041 - DNA, 61 bp, Artificial
  Synthetic oligonucleotide
cattttgaattgtcacaaatggtacaatgggcttatgataatggctatacagatgaaagtg

SEQ ID NO: 92042 - DNA, 60 bp, Artificial
  Synthetic oligonucleotide
ttggctgtacaccagccactggggaacactggtcaatagctcgacgctgtgcaggaacac

SEQ ID NO: 92043 - DNA, 60 bp, Artificial
  Synthetic oligonucleotide
ctgctgtcatttacctgtcttcgagtcattattgcctagtcatatagcctcatgacttgg

SEQ ID NO: 92044 - DNA, 60 bp, Artificial
  Synthetic oligonucleotide
gctgttgtttctgctggagaaagagttcataaagtaaggaacaaattcaaagcaaagtgc

SEQ ID NO: 92045 - DNA, 60 bp, Artificial
  Synthetic oligonucleotide
tgccagaaaagcagagacgaaggggtcgagacaccacccgaaatcgccggctgttcgcaa

SEQ ID NO: 92046 - DNA, 60 bp, Artificial
  Synthetic oligonucleotide
gcgaattggaggatttggaggacacctataattcattgtttaatagatctgaaagtgaca

SEQ ID NO: 92047 - DNA, 60 bp, Artificial
  Synthetic oligonucleotide
cctgctgcacgtacaatcacacgttcccaatacaataatcctttattcaggatcacagct

SEQ ID NO: 92048 - DNA, 60 bp, Artificial
  Synthetic oligonucleotide
ggtgggagagcagccaaatataggtgatttggtgagtcaagaagaaccaagcgtcctaga

SEQ ID NO: 92049 - DNA, 60 bp, Artificial
  Synthetic oligonucleotide
gctgttaaggctgacctgcgtttctgacctgtctactcttacgcgtctggaggagctgct

SEQ ID NO: 92050 - DNA, 60 bp, Artificial
  Synthetic oligonucleotide
ctcttacgcgtctggaggagctgctgttaggctcactgaggatcgtgtgtcccctgtgtg

SEQ ID NO: 92051 - DNA, 60 bp, Artificial
  Synthetic oligonucleotide
cccctgtgtgccattcgacaccaacgacactaagatgaccgacagaggtacaaataatga

SEQ ID NO: 92052 - DNA, 60 bp, Artificial
  Synthetic oligonucleotide
cctatttgtgtagatctgaaacataaggcaccacaacaaataaaatgtcctccacttatg

SEQ ID NO: 92053 - DNA, 60 bp, Artificial
  Synthetic oligonucleotide
cttaagtgaccaagaagacgaggagagtgatggaaagcctcaacaaccgcttagactggc

SEQ ID NO: 92054 - DNA, 60 bp, Artificial
  Synthetic oligonucleotide
ccctggaactgttccacttacaggagcacttgcagaacgagcaggacctaaataccctaa

SEQ ID NO: 92055 - DNA, 60 bp, Artificial
  Synthetic oligonucleotide
gcaaccactagctagcactaaaatagcattattagatgatgcaacaaaaccagcatggga

SEQ ID NO: 92056 - DNA, 60 bp, Artificial
  Synthetic oligonucleotide
cagagactgcctgcaatagcctcagtcccagattggaatctataacaatttcgcagaggg

SEQ ID NO: 92057 - DNA, 60 bp, Artificial
  Synthetic oligonucleotide
tgactctttatcttagtggcctcagagactcacaatatggttctgaacagtggtctttac

SEQ ID NO: 92058 - DNA, 60 bp, Artificial
  Synthetic oligonucleotide
gcagcgatgattatgtgtctcgcaccaacatcttctatcacgctaccagtgatcgactgc

SEQ ID NO: 92059 - DNA, 60 bp, Artificial
  Synthetic oligonucleotide
ccagtgatcgactgctcattgtgggacacccgctctatgaggttacccgtgcaaatgata

SEQ ID NO: 92060 - DNA, 60 bp, Artificial
  Synthetic oligonucleotide
ctgcccagaataagttttaccttcctacccaaccgatcaccaagattctaagcagcgatg

SEQ ID NO: 92061 - DNA, 60 bp, Artificial
  Synthetic oligonucleotide
cccagaaactgagagactagtttggggtcttagaggcatagaaatcggtaggggtcaacc

SEQ ID NO: 92062 - DNA, 60 bp, Artificial
  Synthetic oligonucleotide
ctatgactgtgcctaaagtttctccaaatcagtatagagtctttcgtgttagatttccag

SEQ ID NO: 92063 - DNA, 60 bp, Artificial
  Synthetic oligonucleotide
ggaagtagtggctgaagtgcatcccatatctgatactccacaaataccggcacctactac

SEQ ID NO: 92064 - DNA, 60 bp, Artificial
  Synthetic oligonucleotide
gtttctgttattttaggggcatttgacggttcctaagggtgggtgttggggtatattttg

SEQ ID NO: 92065 - DNA, 60 bp, Artificial
  Synthetic oligonucleotide
aatatgggagtttgggaatattcctgggaggtttgggtattggtactggcaagggtgggg

SEQ ID NO: 92066 - DNA, 60 bp, Artificial
  Synthetic oligonucleotide
ggggtggccggtatggttatacacctctaggggacagtggtgcggtgcgagttggtggca

SEQ ID NO: 92067 - DNA, 60 bp, Artificial
  Synthetic oligonucleotide
gggccctaatcaacttaagtgcttaaggtataggattaaagcttcaaattcatctgactt

SEQ ID NO: 92068 - DNA, 60 bp, Artificial
  Synthetic oligonucleotide
ggcgcgcgcgcgaattttgaagttaccactgttccaacttgttctgagacgtctggatct

SEQ ID NO: 92069 - DNA, 60 bp, Artificial
  Synthetic oligonucleotide
gtaggcgcgaaccgtttgtggtttccctggggctagcagaaactctttaggttgcgaccg

SEQ ID NO: 92070 - DNA, 60 bp, Artificial
  Synthetic oligonucleotide
gtcaaggctatggagatttgcagaggtcagcccatagggcctcaggtgactgggcaccca

SEQ ID NO: 92071 - DNA, 60 bp, Artificial
  Synthetic oligonucleotide
ccccggacgttgtaaacaaggtggagggtacaacccttgcagacaagcttctccaatggt

SEQ ID NO: 92072 - DNA, 60 bp, Artificial
  Synthetic oligonucleotide
ggaccctgtaattgtagaggttgtgtatgatgggaactctgaaaatgcaaactggtatac

SEQ ID NO: 92073 - DNA, 60 bp, Artificial
  Synthetic oligonucleotide
ggcgtgaccaaaccatgcgggtgcccaaggtgtctgcaaatcagttccgggttttcagag

SEQ ID NO: 92074 - DNA, 60 bp, Artificial
  Synthetic oligonucleotide
cccccggctccgaaggggggtttacagctacattcccgaacccttcatttgatggggatg

SEQ ID NO: 92075 - DNA, 60 bp, Artificial
  Synthetic oligonucleotide
tttctggtcccggaccgtctaccagcacccctgacccaagtgtgcgtgtctcagcccgca

SEQ ID NO: 92076 - DNA, 60 bp, Artificial
  Synthetic oligonucleotide
ctagtcattggtagtgggcgcgagtcacgtccttatccaacagaagtaatgtacaggccg

SEQ ID NO: 92077 - DNA, 60 bp, Artificial
  Synthetic oligonucleotide
tgctattggcaggcggtgcgaaaggagaatgtactgctgtactacgccagggagaagggc

SEQ ID NO: 92078 - DNA, 58 bp, Artificial
  Synthetic oligonucleotide
tctgcagggctcctcctatgagcaggaaccgtggacactgtcggactgtagctgggaa

SEQ ID NO: 92079 - DNA, 60 bp, Artificial
  Synthetic oligonucleotide
cagtgaccggcttctgacggtgggccacccattctacgagataacaaatgggcgtgacca

SEQ ID NO: 92080 - DNA, 60 bp, Artificial
  Synthetic oligonucleotide
ctggcaacccggcgagttgctgtgtgagaacttggcagtagaacaggggctatggttttg

SEQ ID NO: 92081 - DNA, 60 bp, Artificial
  Synthetic oligonucleotide
gtgggcacctctgtttactgtggggtggtgtctggctccttatttagtagcgatgcacag

SEQ ID NO: 92082 - DNA, 60 bp, Artificial
  Synthetic oligonucleotide
caggccgcctgtggtgacctttgacctttcttttgagcagggcattgaacctgcagtgta

SEQ ID NO: 92083 - DNA, 60 bp, Artificial
  Synthetic oligonucleotide
tttggttgatagtccagacacctcgggtgtctttgacctgcacccctccttgctgcgccg

SEQ ID NO: 92084 - DNA, 60 bp, Artificial
  Synthetic oligonucleotide
cagactataagcaaatacagatggtggtactgggctgcaggcctgccttgggggagcact

SEQ ID NO: 92085 - DNA, 60 bp, Artificial
  Synthetic oligonucleotide
gtttaatggttacattttcctctgatttgcaaagacgtctgctgcttgccactgtgcccc

SEQ ID NO: 92086 - DNA, 60 bp, Artificial
  Synthetic oligonucleotide
agacataggtctagggaatctggactttgcacagctgcaggccgataagtcaggtgcccc

SEQ ID NO: 92087 - DNA, 60 bp, Artificial
  Synthetic oligonucleotide
ggcgggagcagagctatcttagacacatgatgacacgtgccggtatcaacaaagaggcta

SEQ ID NO: 92088 - DNA, 59 bp, Artificial
  Synthetic oligonucleotide
ctctatggtctggaggaacgggacgccatacggcgcgtgtaaggcgtgtgtggagttcc

SEQ ID NO: 92089 - DNA, 60 bp, Artificial
  Synthetic oligonucleotide
gtgctggtcctgcagcaagcccctgacgaagaacgagaagcaggaaatagagctgctggg

SEQ ID NO: 92090 - DNA, 60 bp, Artificial
  Synthetic oligonucleotide
ggcgcggccgcgacctatgctagggaaactatgtatgtggtgccatgagccactgaccaa

SEQ ID NO: 92091 - DNA, 60 bp, Artificial
  Synthetic oligonucleotide
ggagagctctgtgctacaactgcggtctgccacgacatgatagggaatggctccccgtca

SEQ ID NO: 92092 - DNA, 60 bp, Artificial
  Synthetic oligonucleotide
ccccgtcattgagggagattgttctatctgagctaccgcaaagcctggcagacccagcag

SEQ ID NO: 92093 - DNA, 57 bp, Artificial
  Synthetic oligonucleotide
ggggctccgctgcccagccgactggtgccgcaggaagctacaacgcacgtctgcccc

SEQ ID NO: 92094 - DNA, 60 bp, Artificial
  Synthetic oligonucleotide
cggagaaaaagttggactttgtgtgcttgcaaccgacgagggaatacacggcttagaaga

SEQ ID NO: 92095 - DNA, 51 bp, Artificial
  Synthetic oligonucleotide
ctaatcaatcgcctcggcctggagccttggcagtgtcgcctcaggagcccc

SEQ ID NO: 92096 - DNA, 60 bp, Artificial
  Synthetic oligonucleotide
gacggcaaccctatatctttggacatgaaacacaaggcccctgttcaaataaagtgcccc

SEQ ID NO: 92097 - DNA, 60 bp, Artificial
  Synthetic oligonucleotide
taccgcctgtggctgctagaggaactggcgggtatcctatacggtgagtaagacctcggg

SEQ ID NO: 92098 - DNA, 60 bp, Artificial
  Synthetic oligonucleotide
cagaggggtttctgtgtcccgtgtaggtcataggggcacaatgagcacccgatctggccg

SEQ ID NO: 92099 - DNA, 60 bp, Artificial
  Synthetic oligonucleotide
taggggcacaggtccactattttcacatcttaagcagcattgcgcctgaggagtcgctgg

SEQ ID NO: 92100 - DNA, 60 bp, Artificial
  Synthetic oligonucleotide
cctgggtgccgccgtcggtatcggaagtacctgaagcgccggagggatcagtatcggaga

SEQ ID NO: 92101 - DNA, 60 bp, Artificial
  Synthetic oligonucleotide
gggaggacgcgtttgaggagattagcttgaccagcttccctagcctgtacagtgagtcag

SEQ ID NO: 92102 - DNA, 60 bp, Artificial
  Synthetic oligonucleotide
tgcacttcatagatgatgctgccaggtattcaaagactcggacctgggaggtacgatgca

SEQ ID NO: 92103 - DNA, 60 bp, Artificial
  Synthetic oligonucleotide
gtgagtgtcctgtgactgtcccttagtgtccttgctatttgtccttccttcacggaccgc

SEQ ID NO: 92104 - DNA, 60 bp, Artificial
  Synthetic oligonucleotide
cggggcaggcaaaggttgtgaaggatgtggccacaatggtgcgctactacagaagggcag

SEQ ID NO: 92105 - DNA, 60 bp, Artificial
  Synthetic oligonucleotide
tatggttttggcacgggtacggatggggtcgcctgaaggcgtcgcagtactcaggacggt

SEQ ID NO: 92106 - DNA, 58 bp, Artificial
  Synthetic oligonucleotide
ggggccacctaacacaggaaagtcgtggttctgcatgagccttatgcacttcctgggg

SEQ ID NO: 92107 - DNA, 60 bp, Artificial
  Synthetic oligonucleotide
gcctctaggggacgctaaagtggcactgctggatgatgccacgactgtggtctgggacta

SEQ ID NO: 92108 - DNA, 54 bp, Artificial
  Synthetic oligonucleotide
ccccaaagattcgcagtgtggcggcggctatgtattggtacaagcagtcattga

SEQ ID NO: 92109 - DNA, 59 bp, Artificial
  Synthetic oligonucleotide
ttttggccctttccgcaccccgtacccgcacgtccgcagctaagcgtaagaccccggtt

SEQ ID NO: 92110 - DNA, 60 bp, Artificial
  Synthetic oligonucleotide
ccattgggaagaaggtttttggccctttccgcaccccgtacccgcacgtccgcagctaag

SEQ ID NO: 92111 - DNA, 60 bp, Artificial
  Synthetic oligonucleotide
tgacccctaagcctccccacggtagcattcctgggattattattttggttgatagtccag

SEQ ID NO: 92112 - DNA, 56 bp, Artificial
  Synthetic oligonucleotide
acggcggtggataatacccgggccactaatttcactataaccgtggcgacagatga

SEQ ID NO: 92113 - DNA, 60 bp, Artificial
  Synthetic oligonucleotide
gaactttgtaaggtcaagctgacccctgagaacctgacaatcctgcaccagcaggacccc

SEQ ID NO: 92114 - DNA, 60 bp, Artificial
  Synthetic oligonucleotide
cctgttcaacccagagcaggacagcgggttagacctctcgctgcagaatgaagctgtcga

SEQ ID NO: 92115 - DNA, 60 bp, Artificial
  Synthetic oligonucleotide
gtcctaaagagaaagtagcagatctcagcccgcgactgggagctattagcatttccccga

SEQ ID NO: 92116 - DNA, 60 bp, Artificial
  Synthetic oligonucleotide
tgttgttgagccgacggagaaccaggtaccctcggatgcagttcggacagttcgccacgt

SEQ ID NO: 92117 - DNA, 60 bp, Artificial
  Synthetic oligonucleotide
atcggtcgccatggacgctgaggaagcaggtacgcctgtgagagatgcaggtacccctgt

SEQ ID NO: 92118 - DNA, 60 bp, Artificial
  Synthetic oligonucleotide
ggcagactgtagtgatatggacggtagcgaggccagtgaggaaagtgaggccgaggatct

SEQ ID NO: 92119 - DNA, 60 bp, Artificial
  Synthetic oligonucleotide
ccatgccacggggcactgtgctgcttatgcttgtgtcatttaataaccaaaagtgccgcg

SEQ ID NO: 92120 - DNA, 60 bp, Artificial
  Synthetic oligonucleotide
aaaatccaagcaacaccgttcccggtcccagcaaccgctcccggtcttgcaaccgcccac

SEQ ID NO: 92121 - DNA, 60 bp, Artificial
  Synthetic oligonucleotide
ccagagaaggaacggcttgtgtggtgccttagaggtattgaggtcaatcgaggccagcct

SEQ ID NO: 92122 - DNA, 60 bp, Artificial
  Synthetic oligonucleotide
gcacgagtttggagtcccagctacagcactggaacttactaagaaaagaacaggtccttt

SEQ ID NO: 92123 - DNA, 60 bp, Artificial
  Synthetic oligonucleotide
gcagatggcagtgtggctgtctacgcagaataagttttacctgccgcctcagcctgtcac

SEQ ID NO: 92124 - DNA, 60 bp, Artificial
  Synthetic oligonucleotide
gccataagaaccttgaatcgactgctatccgcatcgctttccctggtgtgcccggagtgt

SEQ ID NO: 92125 - DNA, 60 bp, Artificial
  Synthetic oligonucleotide
cctgccgcctcagcctgtcacaaagatacctagcacggatgaatacgttactcggacaaa

SEQ ID NO: 92126 - DNA, 60 bp, Artificial
  Synthetic oligonucleotide
gctagatcagtatccacttggcagaaagttcctgaatcaaagtggcctgcaaagaattgg

SEQ ID NO: 92127 - DNA, 60 bp, Artificial
  Synthetic oligonucleotide
gcaatgctcgctgaaactgatgaaaatgcaagagcgtttctagcttctaattctcaggcg

SEQ ID NO: 92128 - DNA, 60 bp, Artificial
  Synthetic oligonucleotide
cccatatcggtggacctgaagcacaaggcaccaatagagattaagtgccctcccctcctg

SEQ ID NO: 92129 - DNA, 60 bp, Artificial
  Synthetic oligonucleotide
taaaaggttctggtccaccttagaactaagcgacccggaagacgagggtgacgatggagg

SEQ ID NO: 92130 - DNA, 60 bp, Artificial
  Synthetic oligonucleotide
ggactctgaaggaaacaaagtgtattatgtggacttctcaaccgacgcgggacgttttgc

SEQ ID NO: 92131 - DNA, 60 bp, Artificial
  Synthetic oligonucleotide
ttcgcgtcagccgcctggggaggacgctaacaatgcaaacacgcagtgctaaggcctttg

SEQ ID NO: 92132 - DNA, 60 bp, Artificial
  Synthetic oligonucleotide
gccgctcaaaagaaagcagggcccaaaacctcgcgtacactgggcagacgaaggtcaagg

SEQ ID NO: 92133 - DNA, 60 bp, Artificial
  Synthetic oligonucleotide
gcactcctcactattcgactgcataagcactacttggagctgggttgacacaacgagcac

SEQ ID NO: 92134 - DNA, 60 bp, Artificial
  Synthetic oligonucleotide
caggcccagggaactggtgcaattcgaaaacacatttgacaatcctgcttttgtggatga

SEQ ID NO: 92135 - DNA, 60 bp, Artificial
  Synthetic oligonucleotide
gagcacatgcaggctaggtagcgggcgcatgcttataaagtttgcggactctgagcagcg

SEQ ID NO: 92136 - DNA, 60 bp, Artificial
  Synthetic oligonucleotide
aatgcacggggctatgcattgtatggcataaagggtggccgtatgggacctgcagagact

SEQ ID NO: 92137 - DNA, 60 bp, Artificial
  Synthetic oligonucleotide
gaggttccccttgagttagcacagtcaatcagcaagtatccagactatctaaaaatgcaa

SEQ ID NO: 92138 - DNA, 60 bp, Artificial
  Synthetic oligonucleotide
cggacctgacacatctaactccggtggatctggaggaacttggattatatccaggccccg

SEQ ID NO: 92139 - DNA, 60 bp, Artificial
  Synthetic oligonucleotide
gagctttcaagcatagcagaaggtcccgagccagacatcctcatccccgaatcagaacag

SEQ ID NO: 92140 - DNA, 60 bp, Artificial
  Synthetic oligonucleotide
gaggggacaaggaaaatgtgaagagcagggcctacataaaacgcacacagatgcagggag

SEQ ID NO: 92141 - DNA, 60 bp, Artificial
  Synthetic oligonucleotide
gtgaccggctactcacagtgggacatccatactatgaaatacgtgataaaggcaccatgc

SEQ ID NO: 92142 - DNA, 60 bp, Artificial
  Synthetic oligonucleotide
acaccaaaccctgatagatctgcgttgcgatctataaacgtagctagcagaagatatcag

SEQ ID NO: 92143 - DNA, 60 bp, Artificial
  Synthetic oligonucleotide
cggacattcatgtaagcgtgttggagagcttgcagacatctctgagaagtcattgcgtat

SEQ ID NO: 92144 - DNA, 60 bp, Artificial
  Synthetic oligonucleotide
gccatagaaatggtgctgtacattgaaagcctactcaggtccccgtattcagatgagcca

SEQ ID NO: 92145 - DNA, 60 bp, Artificial
  Synthetic oligonucleotide
gtggaggagtatgaactgcaatttgtgctccagctatgtaaggtcaagttaacacccgaa

SEQ ID NO: 92146 - DNA, 60 bp, Artificial
  Synthetic oligonucleotide
gactgtggtagataacaccaggggtacaatattaagtcttgtcacaaaatccaaggagca

SEQ ID NO: 92147 - DNA, 54 bp, Artificial
  Synthetic oligonucleotide
tgcttctggtgctgagtcgttacaggtagaatcgggatttgggtctcaacaaag

SEQ ID NO: 92148 - DNA, 60 bp, Artificial
  Synthetic oligonucleotide
ggcaattgtcagtgtcagctcagcccagtggaacgctagaagaccagtacagatacctgc

SEQ ID NO: 92149 - DNA, 56 bp, Artificial
  Synthetic oligonucleotide
ggggttcttagacacggaagcggactgtttagactgtgacaaccttgaggaggacc

SEQ ID NO: 92150 - DNA, 60 bp, Artificial
  Synthetic oligonucleotide
tgtcgatagtcctgataagagcctgggtatcgacaactccgtcaatgccttgagtccaag

SEQ ID NO: 92151 - DNA, 60 bp, Artificial
  Synthetic oligonucleotide
catcaagatagacaggtgtacagagataggccctatgcagtgtccgtgccatgtaagagc

SEQ ID NO: 92152 - DNA, 60 bp, Artificial
  Synthetic oligonucleotide
cagacagaggcagaggtcagggttcatatgtacctattccaggcaagtccacaattgggg

SEQ ID NO: 92153 - DNA, 60 bp, Artificial
  Synthetic oligonucleotide
cctgttccggctggcactgagcctgatcgcaggcagtgatcttaaccgtaagcgttctca

SEQ ID NO: 92154 - DNA, 60 bp, Artificial
  Synthetic oligonucleotide
ggggattggaaggtggtcgtgcattttctgcggcaccaacgagtggagttcatacctttc

SEQ ID NO: 92155 - DNA, 60 bp, Artificial
  Synthetic oligonucleotide
gcaccacaagacatttatccaacatgcaagattgctggcaattgcccagctgacatacag

SEQ ID NO: 92156 - DNA, 60 bp, Artificial
  Synthetic oligonucleotide
acgtcacatctgatacatccggcacagtgtccagaacacacattaataaccctgcattcg

SEQ ID NO: 92157 - DNA, 60 bp, Artificial
  Synthetic oligonucleotide
agtagtataactatcaaccaaacagaaaacacgggcggagagctaatagagatggtcccc

SEQ ID NO: 92158 - DNA, 60 bp, Artificial
  Synthetic oligonucleotide
gcagtatggcagccttggtgttttctttggaggacttggaatcagtagtgccggaggttc

SEQ ID NO: 92159 - DNA, 60 bp, Artificial
  Synthetic oligonucleotide
taggccctctagatatagtgcctgaggtagctgatcctgggggtcctactctagtgtcac

SEQ ID NO: 92160 - DNA, 60 bp, Artificial
  Synthetic oligonucleotide
gatgagccatggacattgcaggataccagtagagaaaggttcgaaagccctccgcaaaag

SEQ ID NO: 92161 - DNA, 60 bp, Artificial
  Synthetic oligonucleotide
tagtgttgaggtttactatgatggtgacagagggaacaacaatgaatacacactgtgggg

SEQ ID NO: 92162 - DNA, 60 bp, Artificial
  Synthetic oligonucleotide
gcaaccattagcagacgccaagctagcgctcgtggatgatgctacatccgcgtgctggga

SEQ ID NO: 92163 - DNA, 60 bp, Artificial
  Synthetic oligonucleotide
caactgggctacacgcctgtcccgtctcttcttacctcacaggaatgtgcaaagcaagcc

SEQ ID NO: 92164 - DNA, 60 bp, Artificial
  Synthetic oligonucleotide
ggaggacttgccgttgggttgtatattttgcgggaaattgcttggggctgcagaaaaaga

SEQ ID NO: 92165 - DNA, 60 bp, Artificial
  Synthetic oligonucleotide
tgggctcaggcaaagcagtgtgcagaggatccaccacaacagaccgactgtccccccatt

SEQ ID NO: 92166 - DNA, 60 bp, Artificial
  Synthetic oligonucleotide
agtgaacactgttatagaagatggggacatgtgcgaaataggctttggggcaatggacca

SEQ ID NO: 92167 - DNA, 60 bp, Artificial
  Synthetic oligonucleotide
agcttagtgagctggttttaggtgaaactgctgaagcgcttagtctgcattgcgacgaag

SEQ ID NO: 92168 - DNA, 60 bp, Artificial
  Synthetic oligonucleotide
cgagaatcccacaaagtattacaataaccatgcagaccagcaagactacagaaaaagcat

SEQ ID NO: 92169 - DNA, 60 bp, Artificial
  Synthetic oligonucleotide
gtagggacggggttaaagcgctgctatcccaattgttgggagttcaagatctaaaagttt

SEQ ID NO: 92170 - DNA, 60 bp, Artificial
  Synthetic oligonucleotide
cgaccaagaggacgaggttgatgaagatgagtgcagccagcgatcatttacttgcagcgc

SEQ ID NO: 92171 - DNA, 60 bp, Artificial
  Synthetic oligonucleotide
cgcagatggagcaggacggggcactggactgtgagggataacgatgtgatatatcattca

SEQ ID NO: 92172 - DNA, 60 bp, Artificial
  Synthetic oligonucleotide
aaaggcgccagagtggtggaagtggagtatgatgggaactcttctaataagacttggtat

SEQ ID NO: 92173 - DNA, 60 bp, Artificial
  Synthetic oligonucleotide
aagttggggctctccccagcaacacagacgcacggtacgactccggactggattaagcag

SEQ ID NO: 92174 - DNA, 60 bp, Artificial
  Synthetic oligonucleotide
cgaaagcatttcttgcaagtaccaatcaggcacggctggtcaaggactgctgtactatgg

SEQ ID NO: 92175 - DNA, 60 bp, Artificial
  Synthetic oligonucleotide
ggagcaaggcggtctcacattccaattgtggcacgaccaggtgttcaaactggtacagtg

SEQ ID NO: 92176 - DNA, 60 bp, Artificial
  Synthetic oligonucleotide
ggaagcatgtctttgttcttagctgtcttcaatgttgggaagagtagggagactgtcaga

SEQ ID NO: 92177 - DNA, 60 bp, Artificial
  Synthetic oligonucleotide
gccgcctactattgcaaccgccgaaaattcgtggactatgtcctgctttattttggttta

SEQ ID NO: 92178 - DNA, 60 bp, Artificial
  Synthetic oligonucleotide
cttccagataaagccatgtatgacccaagtaaggaaaggctagtctgggctgttgtgggg

SEQ ID NO: 92179 - DNA, 60 bp, Artificial
  Synthetic oligonucleotide
aaggattctggagcgacgccggggagcgtagaggctcgagagggtccgacacaaccgaca

SEQ ID NO: 92180 - DNA, 60 bp, Artificial
  Synthetic oligonucleotide
gaacttccagcgccaccatcttaacgctgcaaaacctcctgctgaaagacctagacttcc

SEQ ID NO: 92181 - DNA, 60 bp, Artificial
  Synthetic oligonucleotide
ttgctccggtgcaacagacaggcattcaggcaccgcagaggaagccaccttcccagaaag

SEQ ID NO: 92182 - DNA, 60 bp, Artificial
  Synthetic oligonucleotide
gacacagactgttttgtgaagacttctggatattcaggcatcaggtgcggggacgttgct

SEQ ID NO: 92183 - DNA, 60 bp, Artificial
  Synthetic oligonucleotide
cgtgcaggaacggaaaacattgtgctgtctgtacatcttgcctggaaaatgggctgtacc

SEQ ID NO: 92184 - DNA, 60 bp, Artificial
  Synthetic oligonucleotide
actgctgcatgctgtgatgacatacggtttgcttttgtttctggggctcacatttggact

SEQ ID NO: 92185 - DNA, 60 bp, Artificial
  Synthetic oligonucleotide
cgtggagtctcttatctctgtccctttgtttctctcttttgaactgttatccgagtcagc

SEQ ID NO: 92186 - DNA, 60 bp, Artificial
  Synthetic oligonucleotide
tctcctaactgcatccccaagagctggtgtaacgtcagaagaacagtcgagaatctagcc

SEQ ID NO: 92187 - DNA, 60 bp, Artificial
  Synthetic oligonucleotide
ccgctggcgttcgggatcaaatttcctctaccgctgccggttgttaaagcgcccttcctg

SEQ ID NO: 92188 - DNA, 60 bp, Artificial
  Synthetic oligonucleotide
tgaaaagcagacacttggctagacacacaggcgcctggcgccctcatcgaattggcgcac

SEQ ID NO: 92189 - DNA, 60 bp, Artificial
  Synthetic oligonucleotide
cgcagcaaggattagggtgcagtactagaaagagggttgcacctgtccctaaggtcaccg

SEQ ID NO: 92190 - DNA, 60 bp, Artificial
  Synthetic oligonucleotide
catctcatccctaaatttaataaaccttcccctatttaacccctaccatggcgcctcggc

SEQ ID NO: 92191 - DNA, 60 bp, Artificial
  Synthetic oligonucleotide
caggggttaatgccttcgatcctggaacactgggatattaacatgcagcctcctacgtcc

SEQ ID NO: 92192 - DNA, 60 bp, Artificial
  Synthetic oligonucleotide
gctctgagcaatatattaggcgtaaggacgtattttatcacggggagacggagcgcatgc

SEQ ID NO: 92193 - DNA, 60 bp, Artificial
  Synthetic oligonucleotide
ccacattaaccattacggtgcctacatccgggtccccactcactgaatatgacacgagca

SEQ ID NO: 92194 - DNA, 60 bp, Artificial
  Synthetic oligonucleotide
ttgtcgccccgtcagaactggcgaaaaccggagtcgggccgttcaccgccaggctcccta

SEQ ID NO: 92195 - DNA, 60 bp, Artificial
  Synthetic oligonucleotide
accgccaggctccctacagcgcaccatcatccccggggagttccgtgggccccgattccc

SEQ ID NO: 92196 - DNA, 60 bp, Artificial
  Synthetic oligonucleotide
cagtttgtattgacagaaagcacaaatccgctgtgcagctcaaagcccctccccttttgc

SEQ ID NO: 92197 - DNA, 60 bp, Artificial
  Synthetic oligonucleotide
tcgcagagggtgacaaggaacctgagcggttcagcattctctcaaaaccaggtgggcagc

SEQ ID NO: 92198 - DNA, 60 bp, Artificial
  Synthetic oligonucleotide
gaaaggcacggagatgcctgtgtgctggtgacattcaaagacagttcccagagaggggtg

SEQ ID NO: 92199 - DNA, 60 bp, Artificial
  Synthetic oligonucleotide
tttgaagcgagtgcctttgccacctggaatgcgcgcgcaggcacttacaatgattgcgga

SEQ ID NO: 92200 - DNA, 60 bp, Artificial
  Synthetic oligonucleotide
gcccatggcgcatcagaggtgctttatgccgcaagctttgaaatactgagcaaacactgc

SEQ ID NO: 92201 - DNA, 60 bp, Artificial
  Synthetic oligonucleotide
tgcaactggaaaaggcagttggttgagcattatgaatctgttaaagtttcaaggcatcga

SEQ ID NO: 92202 - DNA, 60 bp, Artificial
  Synthetic oligonucleotide
ggaaaggtactgacgtttgccaaccactccagccacttctggttagcgccccttaccgac

SEQ ID NO: 92203 - DNA, 60 bp, Artificial
  Synthetic oligonucleotide
tttgtttgtatcctgattatttaaagatgactgaagaagcggctggcaacagtatgtttt

SEQ ID NO: 92204 - DNA, 60 bp, Artificial
  Synthetic oligonucleotide
gcccaccgcacaagttttcacagacggttcaggatacttctaatacatgcatgtgtggcg

SEQ ID NO: 92205 - DNA, 54 bp, Artificial
  Synthetic oligonucleotide
agggtccgacacaaccgacagagccctgccttaccctgctgctcgacaatcccc

SEQ ID NO: 92206 - DNA, 60 bp, Artificial
  Synthetic oligonucleotide
ctgagacaatagagctaatacccacagtacttgaggatgatactgaggtgcttacaggtg

SEQ ID NO: 92207 - DNA, 60 bp, Artificial
  Synthetic oligonucleotide
ctgcaagattgctggcgggaccctcgggcaggattgggtggagtcgtatcacacgaccca

SEQ ID NO: 92208 - DNA, 60 bp, Artificial
  Synthetic oligonucleotide
cgctaccgctcccggtgtgcatggtaagtaggcggtcattgtcgaagagaactggtaagc

SEQ ID NO: 92209 - DNA, 60 bp, Artificial
  Synthetic oligonucleotide
gctctgctcctattggctgtgctgaaattactcacgccgctttgcctgtaccgtgaacgg

SEQ ID NO: 92210 - DNA, 60 bp, Artificial
  Synthetic oligonucleotide
gctttgaagccgactgtagcgactctgatacagaggttgattcacctgtacaatgctctg

SEQ ID NO: 92211 - DNA, 60 bp, Artificial
  Synthetic oligonucleotide
atatcgttccgggaaaccacctggagttgttccaaacgcaggaaaaagaggcgggagaaa

SEQ ID NO: 92212 - DNA, 60 bp, Artificial
  Synthetic oligonucleotide
cccaggagtcaggtacagtcgggaagtagcagtaggtcttgggagggacatctggaatcc

SEQ ID NO: 92213 - DNA, 60 bp, Artificial
  Synthetic oligonucleotide
ccttactggctgtttcgtgcacagggcatgaataatggcatatgctggcttaatcaactg

SEQ ID NO: 92214 - DNA, 60 bp, Artificial
  Synthetic oligonucleotide
ggcgctactatacacaggtacctgtcgaagacccagacgagattgctgctgcaggctcgt

SEQ ID NO: 92215 - DNA, 60 bp, Artificial
  Synthetic oligonucleotide
gggtggaagtggcattggaagcaatgcaggagaggacattgaactgacactgtttgctga

SEQ ID NO: 92216 - DNA, 60 bp, Artificial
  Synthetic oligonucleotide
cgcaccagcagttgtcactcctgaggcagtgccagtggatgaggggttaagtgggctaga

SEQ ID NO: 92217 - DNA, 60 bp, Artificial
  Synthetic oligonucleotide
tctactgctaggatgcaccccagctattggtgagtattggacaactgctaggccctgcgt

SEQ ID NO: 92218 - DNA, 60 bp, Artificial
  Synthetic oligonucleotide
aagcgtgcaaatgtctatgacctgtatcgcacatgcaagcaggcaggcacctgtcctccg

SEQ ID NO: 92219 - DNA, 60 bp, Artificial
  Synthetic oligonucleotide
tgatgccgtagagtactggaagctaatgcgtaaggagcatagcctgctcttccttgcaag

SEQ ID NO: 92220 - DNA, 60 bp, Artificial
  Synthetic oligonucleotide
cctgtttcacacagatttggtattggtcctgcacctgcttatgtgcatcattctgtctcg

SEQ ID NO: 92221 - DNA, 60 bp, Artificial
  Synthetic oligonucleotide
aatgcccatattacactcacctttgcaaacacacataaaagagagtacttcctgaatggc

SEQ ID NO: 92222 - DNA, 60 bp, Artificial
  Synthetic oligonucleotide
gcacaccgatgaatttattgttcgcaccaatgcattttaccatgctatgacagaacgcct

SEQ ID NO: 92223 - DNA, 60 bp, Artificial
  Synthetic oligonucleotide
gatgatactgggggtcagttccgattttggcacttccttcgcaagaagcgtaggcggcgc

SEQ ID NO: 92224 - DNA, 60 bp, Artificial
  Synthetic oligonucleotide
cgcattcagctgcctgatcccaatcagcttgctttggtagacgccagtgtgtatgacccc

SEQ ID NO: 92225 - DNA, 60 bp, Artificial
  Synthetic oligonucleotide
ctgcagaggcggttgctcatctacaaggcatggacgcttccattttagaggagtggaaca

SEQ ID NO: 92226 - DNA, 60 bp, Artificial
  Synthetic oligonucleotide
ctcacaattctacttgtaattgccctccttgccctccttgcattactacctggtgttcca

SEQ ID NO: 92227 - DNA, 60 bp, Artificial
  Synthetic oligonucleotide
gaaaacgatggaggcgacaggtgcgatggagaacctgaccaaccatttagatgtgctcca

SEQ ID NO: 92228 - DNA, 60 bp, Artificial
  Synthetic oligonucleotide
aatgtcaatgaatgagtggatagggaggcgaataacagaagtggaaggtggagatgagaa

SEQ ID NO: 92229 - DNA, 60 bp, Artificial
  Synthetic oligonucleotide
gccactaaatgccctgataaccctcccactcctaaggtgcaagatagatatgatgggttg

SEQ ID NO: 92230 - DNA, 58 bp, Artificial
  Synthetic oligonucleotide
tggtgttcctgccactaggaaacgcacctcaggtggtccctcctctaagctccccact

SEQ ID NO: 92231 - DNA, 60 bp, Artificial
  Synthetic oligonucleotide
attcttgttgtattacactgttctgtgactgtgtgttgtgttatgtgctgtgccctcgtg

SEQ ID NO: 92232 - DNA, 60 bp, Artificial
  Synthetic oligonucleotide
accacatcaggagaacgaaggggacagcgaggctgatacagagtccataggaacggagga

SEQ ID NO: 92233 - DNA, 60 bp, Artificial
  Synthetic oligonucleotide
ggcgctcctgtatctggtactacaaccgacctcacacggttttccacatcatttcctggg

SEQ ID NO: 92234 - DNA, 60 bp, Artificial
  Synthetic oligonucleotide
gggccactgttggaccatctcgtgttggttctattcctgcttcggcagccgctactcctg

SEQ ID NO: 92235 - DNA, 60 bp, Artificial
  Synthetic oligonucleotide
gcttgcagccatacctcctgatacccctgctattcattctgatattcaactgtccacctc

SEQ ID NO: 92236 - DNA, 60 bp, Artificial
  Synthetic oligonucleotide
gcagccacagaaagaggacagcaagagacaggagcccagacagtggacatggggtggaag

SEQ ID NO: 92237 - DNA, 60 bp, Artificial
  Synthetic oligonucleotide
cgtggcaccgccttgcagccttattagggtgtgcagcaccccattgcagtatatgattgc

SEQ ID NO: 92238 - DNA, 60 bp, Artificial
  Synthetic oligonucleotide
tctccactggtagcactcccttactcggtgaaggcacatcgtctggtaacatgcttgtgc

SEQ ID NO: 92239 - DNA, 60 bp, Artificial
  Synthetic oligonucleotide
accgggagcccagcaaagcaaaacagcaagcacctcacaagccacaagcacagagcatgc

SEQ ID NO: 92240 - DNA, 60 bp, Artificial
  Synthetic oligonucleotide
cagaagtaagcgggcaggaatccagcgatgagtgtgaaagcaatatatgtacccaggagg

SEQ ID NO: 92241 - DNA, 60 bp, Artificial
  Synthetic oligonucleotide
tcacaagatagcacagacccactggagggcggtagcgggggctttattttaatggaggca

SEQ ID NO: 92242 - DNA, 60 bp, Artificial
  Synthetic oligonucleotide
gacaggcatcctaggtgtgagtacagctcgcaaacgcggcagtaatggcctcacaagata

SEQ ID NO: 92243 - DNA, 60 bp, Artificial
  Synthetic oligonucleotide
gggagacacctaaacgcattgttggcagaggacgatgcaagggcggtacaggcagttatg

SEQ ID NO: 92244 - DNA, 60 bp, Artificial
  Synthetic oligonucleotide
taccatagcaaaactgctgggtaatgctgggcgatactggtgtaaactggtgcaaacagg

SEQ ID NO: 92245 - DNA, 60 bp, Artificial
  Synthetic oligonucleotide
gtgacagtgcaagtggacgttggaaacaaagcccctattgtactgaagttccagctctca

SEQ ID NO: 92246 - DNA, 59 bp, Artificial
  Synthetic oligonucleotide
gttgttgcagacaacaccgaaatcggtctcgacccgttaagagcagagcacaaatcccc

SEQ ID NO: 92247 - DNA, 60 bp, Artificial
  Synthetic oligonucleotide
gctgcaagctcttgatggctctgacgcccctgttcctcggtctagtacacctcactctac

SEQ ID NO: 92248 - DNA, 60 bp, Artificial
  Synthetic oligonucleotide
agcctggagcgtgtcctgccttagtgcttaaaaacagtcccttggaggatggtgacatga

SEQ ID NO: 92249 - DNA, 60 bp, Artificial
  Synthetic oligonucleotide
cacgtggtactaactttaacatttctgttaaggctgatggtaaggctattgatggggctt

SEQ ID NO: 92250 - DNA, 60 bp, Artificial
  Synthetic oligonucleotide
agcaccctgatatgcttaaaatggctgctgagccttatggaaactcatgctggttctgcc

SEQ ID NO: 92251 - DNA, 60 bp, Artificial
  Synthetic oligonucleotide
gctactcctgcgtatttgtgcaccccaagtggttctctggtttctagcgacacccaggtg

SEQ ID NO: 92252 - DNA, 60 bp, Artificial
  Synthetic oligonucleotide
ggtatgagatcctctttgcggctgcgcagtggtactcagcttggtacacgtgtgcattac

SEQ ID NO: 92253 - DNA, 60 bp, Artificial
  Synthetic oligonucleotide
acaggtaagtacacgttcgctgtaaccgttcccggtttctccctctttggcgccacaggt

SEQ ID NO: 92254 - DNA, 60 bp, Artificial
  Synthetic oligonucleotide
gtgtcagaaagtagtgcaaaggacgccataggtatgcagctgctactggaggggctacaa

SEQ ID NO: 92255 - DNA, 60 bp, Artificial
  Synthetic oligonucleotide
ctctgtgtatcgattgaccatttcctgccccgccagtgctacagtgaccattcctgcttc

SEQ ID NO: 92256 - DNA, 60 bp, Artificial
  Synthetic oligonucleotide
tcctgcttctcctcacttgactcacttgcttcagcctcttcccgcctgtgtcttcccggg

SEQ ID NO: 92257 - DNA, 60 bp, Artificial
  Synthetic oligonucleotide
ggggccagggagtgtgcaatgaaaagggacttgcatatgaaaagcacggacaactgtgct

SEQ ID NO: 92258 - DNA, 55 bp, Artificial
  Synthetic oligonucleotide
tacacgccgtgaaggctagctggaggggatacgagcagtccgcctacgcgtgcta

SEQ ID NO: 92259 - DNA, 60 bp, Artificial
  Synthetic oligonucleotide
tactggacctctttcggacaacccacctgacgaaaccgacgaggagcaacaagacgagcc

SEQ ID NO: 92260 - DNA, 60 bp, Artificial
  Synthetic oligonucleotide
ggcaggtcagcctaagtagccattttggggacgcacagccattttgtttatcacgcatgg

SEQ ID NO: 92261 - DNA, 60 bp, Artificial
  Synthetic oligonucleotide
gcatgaaggctcctcgtggtccccgtgtgaagcgtgtgaagcgagcctctgatgtagact

SEQ ID NO: 92262 - DNA, 60 bp, Artificial
  Synthetic oligonucleotide
cacacctgctgaccttcagttcttagttgaaccccgcccgtatatattctttggtactga

SEQ ID NO: 92263 - DNA, 60 bp, Artificial
  Synthetic oligonucleotide
gtgttgtcgtgaatcctcaggctgggaatactactgtggacgtttccgtacaaggctctc

SEQ ID NO: 92264 - DNA, 60 bp, Artificial
  Synthetic oligonucleotide
gcgatgctccttgtaacgtgcataattctagcacttattgctgtactattcaacgtgcat

SEQ ID NO: 92265 - DNA, 60 bp, Artificial
  Synthetic oligonucleotide
ggtcgggaaaggcaagagccgccatgttaggcatatttaaagacagctttggagtgaggt

SEQ ID NO: 92266 - DNA, 60 bp, Artificial
  Synthetic oligonucleotide
ctgggtgttcctagccgtgggagtggcgtgttcagtatcagatgcggttccagagctggt

SEQ ID NO: 92267 - DNA, 60 bp, Artificial
  Synthetic oligonucleotide
caagctaggcaatatggcgcttgggttagtaaggtggaaaacagccaaatgcagagacac

SEQ ID NO: 92268 - DNA, 60 bp, Artificial
  Synthetic oligonucleotide
gggagacagggagaacgcatgcatggaacgtatggaagaggtggacagaggtgacaggga

SEQ ID NO: 92269 - DNA, 60 bp, Artificial
  Synthetic oligonucleotide
tcaacgtgtacagattgggtgtacgcagtgtttggggttaatcccactatagcagaaggc

SEQ ID NO: 92270 - DNA, 60 bp, Artificial
  Synthetic oligonucleotide
gcggttgtttgagcgattggagcagcgagacagtggctatggctattcacaagtggaaac

SEQ ID NO: 92271 - DNA, 60 bp, Artificial
  Synthetic oligonucleotide
gttaacaaaatacacattactcatggtacacacctgcaaaccgctttcggttgctacacg

SEQ ID NO: 92272 - DNA, 60 bp, Artificial
  Synthetic oligonucleotide
taaatcattagctccagatgttattgctaggccgcctgttgtggtggatactgtcgcccc

SEQ ID NO: 92273 - DNA, 60 bp, Artificial
  Synthetic oligonucleotide
cgcaacacagttatatcaaacatgcaaggcagcaggcacctgtccaccagatgttgttaa

SEQ ID NO: 92274 - DNA, 60 bp, Artificial
  Synthetic oligonucleotide
cggccgtgctggctatgtgcctttgtctacaggttcccgtgcaatacctcctaaatcatt

SEQ ID NO: 92275 - DNA, 60 bp, Artificial
  Synthetic oligonucleotide
ttgttcatagtgatccactgtccagtacacctgtgcctggtgtgtcagcgcggcctaaag

SEQ ID NO: 92276 - DNA, 60 bp, Artificial
  Synthetic oligonucleotide
catgttacatctaccacacaccataaccccatatttactgatccttcggttgtgcagcct

SEQ ID NO: 92277 - DNA, 60 bp, Artificial
  Synthetic oligonucleotide
ggttgtgcagcctattccacctgtagaggctagtggtcgtatcattgtgtcgcattcctc

SEQ ID NO: 92278 - DNA, 59 bp, Artificial
  Synthetic oligonucleotide
tatgtccacccctcaacgtttaattacttatgacaatcctgtatttgacaacattgaag

SEQ ID NO: 92279 - DNA, 60 bp, Artificial
  Synthetic oligonucleotide
gcatggagaaaggccaacgctcggagacatcgtgttagacttgcaacccgaaccagtaag

SEQ ID NO: 92280 - DNA, 60 bp, Artificial
  Synthetic oligonucleotide
gatgcaggctttggtgccatggattttgcatcattgcaggccaataaaagcgatgtgcct

SEQ ID NO: 92281 - DNA, 60 bp, Artificial
  Synthetic oligonucleotide
ctgcaagattcgtggacagggtactgtctgcactgttggaagaaatgcatggagaaaggc

SEQ ID NO: 92282 - DNA, 60 bp, Artificial
  Synthetic oligonucleotide
ggaaacccaacaagtatagatagaaaacataaatcattggctgtgattaaatgtcctcca

SEQ ID NO: 92283 - DNA, 60 bp, Artificial
  Synthetic oligonucleotide
caggcattatacttacatacacagtggacaacgtgtagatggggtatggtattgcttgca

SEQ ID NO: 92284 - DNA, 58 bp, Artificial
  Synthetic oligonucleotide
aaacgtctgggccaccaggtggtgccaagtttagatgtgtcaaaagccaaagcccatg

SEQ ID NO: 92285 - DNA, 60 bp, Artificial
  Synthetic oligonucleotide
gggccactatgtctgcacgttgcggctccacagctagaactttatttgaattatgtgacc

SEQ ID NO: 92286 - DNA, 60 bp, Artificial
  Synthetic oligonucleotide
gtgatgttatacagcaacttagtccgcgtacacaggtggtagagctgtttaaatgcaagg

SEQ ID NO: 92287 - DNA, 60 bp, Artificial
  Synthetic oligonucleotide
taagtccaaggctgcatgccataaagcttggcggcggtaaaaaggctaaaaggcggttgt

SEQ ID NO: 92288 - DNA, 60 bp, Artificial
  Synthetic oligonucleotide
gggttcacgcgttatatgttctcctagtactgtcgaagggctacccattgttgcgcctgt

SEQ ID NO: 92289 - DNA, 60 bp, Artificial
  Synthetic oligonucleotide
aatagagtcaacgcttggcatactaatagtatatatactctgtcttataactgcaatttt

SEQ ID NO: 92290 - DNA, 60 bp, Artificial
  Synthetic oligonucleotide
ccatttgacagcaacggaaatgctgtgtatgaattaagtgatgcaaattggaactccttt

SEQ ID NO: 92291 - DNA, 60 bp, Artificial
  Synthetic oligonucleotide
gggcagtgggagggctgcgacagttgaaacggaagcggttgaagtgctagaagaaagcag

SEQ ID NO: 92292 - DNA, 60 bp, Artificial
  Synthetic oligonucleotide
gtaccagataatcaactaatggtacaaccacctaaattacaaagttctgcagcggcttta

SEQ ID NO: 92293 - DNA, 60 bp, Artificial
  Synthetic oligonucleotide
acatgtgcagatgctgtagagttgtgtgagctaaaacgaaagtacattagtccatatgta

SEQ ID NO: 92294 - DNA, 60 bp, Artificial
  Synthetic oligonucleotide
ggtgcctaaagtgtctggacatcaatacagagtgtttagagtacgcttgcccgaccctaa

SEQ ID NO: 92295 - DNA, 60 bp, Artificial
  Synthetic oligonucleotide
cgccttgtatgggcctgtgttggtgttgaggtcggtcgaggtcagccattaggtgtaggc

SEQ ID NO: 92296 - DNA, 60 bp, Artificial
  Synthetic oligonucleotide
ccctgccaaaaatgccgcccaatatgtactattagggtgaggttgccacacctttaatta

SEQ ID NO: 92297 - DNA, 60 bp, Artificial
  Synthetic oligonucleotide
cagtggacggatgtagtggaagaaaatacgtggacactggaaacagagcacgctcgcctg

SEQ ID NO: 92298 - DNA, 58 bp, Artificial
  Synthetic oligonucleotide
cccctacgccctgcccgcgtcgaccaccaaagtatacaacgacagccacgcaccgccc

SEQ ID NO: 92299 - DNA, 60 bp, Artificial
  Synthetic oligonucleotide
tacaacgacagccacgcaccgccccgaaagcgaaggagagacggagacttgtccatcagt

SEQ ID NO: 92300 - DNA, 56 bp, Artificial
  Synthetic oligonucleotide
gtggatacaaaaggcccagggtcataacaatggcatttgttttggcaatcagttat

SEQ ID NO: 92301 - DNA, 60 bp, Artificial
  Synthetic oligonucleotide
acagcagagaaaatgttgctatggattataaacaaactcagttatgtattgtaggctgta

SEQ ID NO: 92302 - DNA, 60 bp, Artificial
  Synthetic oligonucleotide
gatcaatttccattaggacgtaagtttcttatgcaggcaggcctacgcacagggcctaag

SEQ ID NO: 92303 - DNA, 60 bp, Artificial
  Synthetic oligonucleotide
cagcgccttgttatggtgtccagcaggccccgtaggcgtaagcgggcgtccgcaacacag

SEQ ID NO: 92304 - DNA, 60 bp, Artificial
  Synthetic oligonucleotide
ccacccataaccgtttccagtctcggttggcaagtcaccatgtttgtcagcatatttgca

SEQ ID NO: 92305 - DNA, 60 bp, Artificial
  Synthetic oligonucleotide
aaactcacttattttaaaatgtctgctctgcacactgcaaccgttttcggtcgcggttgg

SEQ ID NO: 92306 - DNA, 60 bp, Artificial
  Synthetic oligonucleotide
agaatctttgcaaactactgaatataacttagagccatggacgttacaggacacaagtca

SEQ ID NO: 92307 - DNA, 60 bp, Artificial
  Synthetic oligonucleotide
gcattataggttggcagaaatgaggcggatgtcaatggcagactggataaagcatagagg

SEQ ID NO: 92308 - DNA, 60 bp, Artificial
  Synthetic oligonucleotide
gcatattaggatgtggcaacttaatgaaaaccaagtgtatttaccaccgcccacgcctgt

SEQ ID NO: 92309 - DNA, 60 bp, Artificial
  Synthetic oligonucleotide
ccaactagacagctcacacaatagacagcgtgagcaacccacgcaacaggacttgcaagt

SEQ ID NO: 92310 - DNA, 60 bp, Artificial
  Synthetic oligonucleotide
ggaagtgaggtgtctggcacaacaccggaatggatagctaaacaaacaatgttggaacat

SEQ ID NO: 92311 - DNA, 60 bp, Artificial
  Synthetic oligonucleotide
gcagctacagcgtgacaacaatggcagacgattcaggtacagaggatgtggggtctgggt

SEQ ID NO: 92312 - DNA, 60 bp, Artificial
  Synthetic oligonucleotide
gcttcatctgaagaaattgaattgcaccctctagtggcctcacctaataacagtgacctt

SEQ ID NO: 92313 - DNA, 60 bp, Artificial
  Synthetic oligonucleotide
cctgccttgacctctaggcgtggtgtggtacgttttagtagggtgggtcaacgtggaacc

SEQ ID NO: 92314 - DNA, 60 bp, Artificial
  Synthetic oligonucleotide
aacgcaccagatcctgcctttatggatatcattactttacataggcctgccttgacctct

SEQ ID NO: 92315 - DNA, 60 bp, Artificial
  Synthetic oligonucleotide
ggtacaccatatttgcctgtgtcaccttctatacctgccatatctgtactgattcgcggt

SEQ ID NO: 92316 - DNA, 60 bp, Artificial
  Synthetic oligonucleotide
ggttgcaatcattagtggacgcaaaagtagctatgttagatgatgtgacttctgcatgct

SEQ ID NO: 92317 - DNA, 60 bp, Artificial
  Synthetic oligonucleotide
ccaggtaattctacacgcatagcaaatacatctatacctcttgccacaattcctgataca

SEQ ID NO: 92318 - DNA, 57 bp, Artificial
  Synthetic oligonucleotide
aggctaatggacatatattaatttctgcacccactgtaacgtcacaccctatagagg

SEQ ID NO: 92319 - DNA, 60 bp, Artificial
  Synthetic oligonucleotide
gcaacgttcgactggttgtgcagtgtacagaaacagacatcagagaagtgcaacagcttc

SEQ ID NO: 92320 - DNA, 60 bp, Artificial
  Synthetic oligonucleotide
cgcaccgaagacctaacaacgatggcggacgattcaggtacagaaaatgaggggtctggg

SEQ ID NO: 92321 - DNA, 60 bp, Artificial
  Synthetic oligonucleotide
ggaaccgtggacattacaagaaacaagttatgaaatgtggcaaacaccacctaaacgctg

SEQ ID NO: 92322 - DNA, 60 bp, Artificial
  Synthetic oligonucleotide
gggcctaagccacataggaatgcaagtagtgccaccattaaaggtgtccgaagcaaaagg

SEQ ID NO: 92323 - DNA, 60 bp, Artificial
  Synthetic oligonucleotide
gcgtttagatgcgtgccaggaacagttgttagaactttatgaagaaaacagtactgacct

SEQ ID NO: 92324 - DNA, 60 bp, Artificial
  Synthetic oligonucleotide
tttatatttgtaacagtgtatgctttgtataccatggcacatagtagggcccgacgacgc

SEQ ID NO: 92325 - DNA, 60 bp, Artificial
  Synthetic oligonucleotide
gcacaggcattgtttaacaggcaggaggcggacacccattatgcgactgtgcaggaccta

SEQ ID NO: 92326 - DNA, 60 bp, Artificial
  Synthetic oligonucleotide
gcaaccgttagtagatgctaaggtagcattgttagatgatgcaacacagccatgttggat

SEQ ID NO: 92327 - DNA, 60 bp, Artificial
  Synthetic oligonucleotide
ctctgaaacaactacccctgcaatattggatgtatcagttactagtcacactactactag

SEQ ID NO: 92328 - DNA, 60 bp, Artificial
  Synthetic oligonucleotide
ctatggctcgtcctcctgtggtggtggagcctgtggccccttcggatccatctattgtgt

SEQ ID NO: 92329 - DNA, 60 bp, Artificial
  Synthetic oligonucleotide
ttaacaacccccttgcaatttttcctactaactctacttgtgtgttactgtcccgcattg

SEQ ID NO: 92330 - DNA, 60 bp, Artificial
  Synthetic oligonucleotide
gtgtatgtgcaggacaatgacacctgggtaaaggtgcatagtatggtagatgctaagggt

SEQ ID NO: 92331 - DNA, 60 bp, Artificial
  Synthetic oligonucleotide
ttgcacagacctgccattgcgtcccgacgtggccttgtgcggtacagtcgcattggacaa

SEQ ID NO: 92332 - DNA, 60 bp, Artificial
  Synthetic oligonucleotide
tgatacatttgatatttatgctgaatcttttgaacctggcattaaccctacccaacaccc

SEQ ID NO: 92333 - DNA, 60 bp, Artificial
  Synthetic oligonucleotide
agtgatagcggtcctacatccagtacccctgttcctggtactgcacctcggcctcgtgtg

SEQ ID NO: 92334 - DNA, 60 bp, Artificial
  Synthetic oligonucleotide
atattcacacaatgaatccctctgttttggaagactggaactttgggttatcgcctcccc

SEQ ID NO: 92335 - DNA, 60 bp, Artificial
  Synthetic oligonucleotide
aatgcacctgatgaggcttttatggacataattcgtttgcacagacctgccattgcgtcc

SEQ ID NO: 92336 - DNA, 60 bp, Artificial
  Synthetic oligonucleotide
gtgcatccgtaactacatcttccacatacaccaattctgattataaagagtacatgcgtc

SEQ ID NO: 92337 - DNA, 59 bp, Artificial
  Synthetic oligonucleotide
tgtgcctgatacacttataattaagggtagtggaaatcgcacgtctgtagggagtagta

SEQ ID NO: 92338 - DNA, 60 bp, Artificial
  Synthetic oligonucleotide
ctactgcacctatgggaacaccctttagtcctgtaactcctgctttacctacaggccctg

SEQ ID NO: 92339 - DNA, 60 bp, Artificial
  Synthetic oligonucleotide
caggatggcgatatggttgacacaggctttggtgctatgaattttgctgatttgcagacc

SEQ ID NO: 92340 - DNA, 60 bp, Artificial
  Synthetic oligonucleotide
gtcctataaacactatagccgaggcagtggaaagtgaaataagtccacgattggacgcca

SEQ ID NO: 92341 - DNA, 60 bp, Artificial
  Synthetic oligonucleotide
ccagggaactaacggacagtggatatggctattctgaagtggaagctggaacgggaacgc

SEQ ID NO: 92342 - DNA, 58 bp, Artificial
  Synthetic oligonucleotide
ggggaggaacatacagaggcggaagcgcccacaaacagtgtacgggagcatgcaggca

SEQ ID NO: 92343 - DNA, 60 bp, Artificial
  Synthetic oligonucleotide
caacatgtttagattgggtggtagcagggtttggtatacatcatagcatatcagaggcat

SEQ ID NO: 92344 - DNA, 60 bp, Artificial
  Synthetic oligonucleotide
accaaatgttaatagagccaccaaaaatacaaagtggtgttgcagccctgtattggtttc

SEQ ID NO: 92345 - DNA, 60 bp, Artificial
  Synthetic oligonucleotide
gagtccaacagtccccttgcaacgccttgtgtgtggcccacattggacccgtggacagtg

SEQ ID NO: 92346 - DNA, 60 bp, Artificial
  Synthetic oligonucleotide
ggagcaccaaacattgggaagtatgttatggcagcacagttatatgttctcctgcatctg

SEQ ID NO: 92347 - DNA, 60 bp, Artificial
  Synthetic oligonucleotide
aaggaagacgcagtgcaaacgccgcctaggaaacgagcacgaggagtccaacagtcccct

SEQ ID NO: 92348 - DNA, 60 bp, Artificial
  Synthetic oligonucleotide
cctaccattagccacaaactgggatttatgtcactgcacctattgtaatttgtatatatg

SEQ ID NO: 92349 - DNA, 60 bp, Artificial
  Synthetic oligonucleotide
caatcacgaccagcaccaaagacggaacaacagtaacagttcagctacgcctatagtgca

SEQ ID NO: 92350 - DNA, 60 bp, Artificial
  Synthetic oligonucleotide
cgtggcactgggcctcctcaaaggcaccacataaacatgccattgtaactgtaacatatg

SEQ ID NO: 92351 - DNA, 60 bp, Artificial
  Synthetic oligonucleotide
cacctaaaggtcctgtttcgaggcggctatccatatgcagcctgcgcgtgctgcctagaa

SEQ ID NO: 92352 - DNA, 60 bp, Artificial
  Synthetic oligonucleotide
aaccaaggcgcggttcataaagctaaattgtacgtggaagggtcgctgcctacactgctg

SEQ ID NO: 92353 - DNA, 60 bp, Artificial
  Synthetic oligonucleotide
ggaaagtgcaaatgcctccacgtctgcaacgaccatagaccagttgtgcaagacgtttaa

SEQ ID NO: 92354 - DNA, 60 bp, Artificial
  Synthetic oligonucleotide
cagaaatggtgcagtgggcgtatgataatgacatatgcgaggagagtgaaattgcatttg

SEQ ID NO: 92355 - DNA, 60 bp, Artificial
  Synthetic oligonucleotide
gttactcgcaccaacatattttatcatgccagcagttctagacttcttgcagtgggacat

SEQ ID NO: 92356 - DNA, 60 bp, Artificial
  Synthetic oligonucleotide
cgtaaacgccgtaaacgtattcccttatttttttcagatgtggcggcctagcgacagcac

SEQ ID NO: 92357 - DNA, 60 bp, Artificial
  Synthetic oligonucleotide
cagggttaatgtaggtatggattataaacaaacacaattatgcatggttggatgtgcccc

SEQ ID NO: 92358 - DNA, 60 bp, Artificial
  Synthetic oligonucleotide
gaggtgggcaggggacagccattaggtgtgggtgtaagtggacatcctttcctaaataaa

SEQ ID NO: 92359 - DNA, 60 bp, Artificial
  Synthetic oligonucleotide
caatacagggtatttaaggtggtgttaccagatcctaacaaatttgcattgcctgactcg

SEQ ID NO: 92360 - DNA, 60 bp, Artificial
  Synthetic oligonucleotide
ctgtacaggctggtgactgcccgcccttagaacttattaccagtgttatacaggatggcg

SEQ ID NO: 92361 - DNA, 60 bp, Artificial
  Synthetic oligonucleotide
cacctggcgccagggtgcggtattgccttactcataaacctgtctttgtgttatactttt

SEQ ID NO: 92362 - DNA, 60 bp, Artificial
  Synthetic oligonucleotide
caggtgttaagcgccctgctgtttccaaagcctctgctgcccctaaacgtaagcgcgcca

SEQ ID NO: 92363 - DNA, 60 bp, Artificial
  Synthetic oligonucleotide
cctaaggtcacacacctgcgaccggtttcggttatccacaccctacatatttccttctta

SEQ ID NO: 92364 - DNA, 60 bp, Artificial
  Synthetic oligonucleotide
atcttcgaccctgaaaaggaacgtcttgtatggggatgtcgtggccttgaagttagtaga

SEQ ID NO: 92365 - DNA, 60 bp, Artificial
  Synthetic oligonucleotide
catttgcatcagaggcctggacatttgcagagaccagccaggaacggctagctgcgccac

SEQ ID NO: 92366 - DNA, 60 bp, Artificial
  Synthetic oligonucleotide
cggacccgcacccactaccaccggagacctatccgagccatcccctggatccatccccgg

SEQ ID NO: 92367 - DNA, 60 bp, Artificial
  Synthetic oligonucleotide
ggcgctaccttgttagtagggtggcgtgtttcaaattttctgaaccattccccttcactg

SEQ ID NO: 92368 - DNA, 60 bp, Artificial
  Synthetic oligonucleotide
cagcaggaacattgggagtgtattagacaggaacagatactctattatgcctgcagaagc

SEQ ID NO: 92369 - DNA, 60 bp, Artificial
  Synthetic oligonucleotide
tagtggagccccttttctatacagggctagctgaaagtctaggcctcaacaccgctgatg

SEQ ID NO: 92370 - DNA, 60 bp, Artificial
  Synthetic oligonucleotide
gctgaacctcctaaaacccggagtgttcctgtagctttgttttggtataaagggacacta

SEQ ID NO: 92371 - DNA, 60 bp, Artificial
  Synthetic oligonucleotide
tactgtcgataaggagggagactccactgataccagcccccctatacaccctctaacccc

SEQ ID NO: 92372 - DNA, 60 bp, Artificial
  Synthetic oligonucleotide
aaaagtgataaaacgtgttgtgaggattgggtggcggcactatatggtattagtggacct

SEQ ID NO: 92373 - DNA, 60 bp, Artificial
  Synthetic oligonucleotide
aaatattataaaagagcacagatgcgggagatgactatgggtgaatggattaaacatcgc

SEQ ID NO: 92374 - DNA, 60 bp, Artificial
  Synthetic oligonucleotide
ccagtaccgtgtatttcgtatccaacttccggatcctaatcgcttcgcactgacagataa

SEQ ID NO: 92375 - DNA, 60 bp, Artificial
  Synthetic oligonucleotide
tatccagatgagagcttgctagacacctatgaagatgtggccagctcaggccggcttata

SEQ ID NO: 92376 - DNA, 60 bp, Artificial
  Synthetic oligonucleotide
ccatccccggtggagggtcccccaccgacacacccgtcacccataccgaggagtccatac

SEQ ID NO: 92377 - DNA, 60 bp, Artificial
  Synthetic oligonucleotide
gcactatgttgactaggagtggtttaagaataggcacggccctgcattactaccaggata

SEQ ID NO: 92378 - DNA, 60 bp, Artificial
  Synthetic oligonucleotide
tccttggcaatccttcaacctggcatccctccacctccgaccgtctcgggtctcatcaag

SEQ ID NO: 92379 - DNA, 60 bp, Artificial
  Synthetic oligonucleotide
aggggaatctactggatcctcgaatattgtgcaaggggatctttctggatatgaggtggt

SEQ ID NO: 92380 - DNA, 60 bp, Artificial
  Synthetic oligonucleotide
ttacctttcagagacttggagccacgtgccaccagcacgccggaaggccctcctccacgt

SEQ ID NO: 92381 - DNA, 60 bp, Artificial
  Synthetic oligonucleotide
cgttagatcttacagacaccaccctaccaaccactaccccgcaccctgaattttcggaca

SEQ ID NO: 92382 - DNA, 60 bp, Artificial
  Synthetic oligonucleotide
ttttgtatgtttgagctgcgcacaacgcgaaggttatcggaatgacggataagtcaggtg

SEQ ID NO: 92383 - DNA, 60 bp, Artificial
  Synthetic oligonucleotide
cccttgcagagtataaccggaaagaggcagacaggcataaacgggacttggaacagttaa

SEQ ID NO: 92384 - DNA, 60 bp, Artificial
  Synthetic oligonucleotide
gcaggacacacccgacaatttgcgcatagttacttctgagttggctcctggcttcctgct

SEQ ID NO: 92385 - DNA, 60 bp, Artificial
  Synthetic oligonucleotide
ccaagaatacgcggacagttcggcatttgatcttttatgccacgaaaatttggatgatcc

SEQ ID NO: 92386 - DNA, 60 bp, Artificial
  Synthetic oligonucleotide
cggactcacaatcgtctaaacgaagatgtttgcgtggtctagagaatgacagcggaatac

SEQ ID NO: 92387 - DNA, 60 bp, Artificial
  Synthetic oligonucleotide
gcactattgcctatcagtatgctcgattagcagaaacagacgcaaatgctaacgcctggt

SEQ ID NO: 92388 - DNA, 60 bp, Artificial
  Synthetic oligonucleotide
ggagggtaagcaatgtgcaagggtcactattagctttcactcagctgtacagagagagcg

SEQ ID NO: 92389 - DNA, 60 bp, Artificial
  Synthetic oligonucleotide
acattttcaaggttatgatgaattattagaggggtgtggtgaagttagaccggattaggt

SEQ ID NO: 92390 - DNA, 60 bp, Artificial
  Synthetic oligonucleotide
gcagccactcgcagatgcaaaagtggggctattggatgatgctacaggagtttgttggga

SEQ ID NO: 92391 - DNA, 60 bp, Artificial
  Synthetic oligonucleotide
ctcggacattgggaaggggatctggatctgttagtaacttcagtacgcagagcagtgttg

SEQ ID NO: 92392 - DNA, 60 bp, Artificial
  Synthetic oligonucleotide
gggaaccacaccgcagaggatacccgcagaggcggctgcgaaggatacgcgcgaccaggc

SEQ ID NO: 92393 - DNA, 57 bp, Artificial
  Synthetic oligonucleotide
ccccaggatcaacacccgtctcttgcattcggtgcgtaccacccaccaataccgggg

SEQ ID NO: 92394 - DNA, 60 bp, Artificial
  Synthetic oligonucleotide
cattggcaagctgcactaccctgtgcagatccacacgttcagcccccacctctgccgggt

SEQ ID NO: 92395 - DNA, 60 bp, Artificial
  Synthetic oligonucleotide
ccgcccgcatcctcaataccgaagactatgtaacacgcacctctttatattaccatgcca

SEQ ID NO: 92396 - DNA, 60 bp, Artificial
  Synthetic oligonucleotide
tcaacagaaaggcggacaatgagaaccctgatcccattgttgggccagaggcggttgata

SEQ ID NO: 92397 - DNA, 60 bp, Artificial
  Synthetic oligonucleotide
ggcggatctaggcttcggtgccatggattttaagaatctccaacacacgaaagcagacgc

SEQ ID NO: 92398 - DNA, 60 bp, Artificial
  Synthetic oligonucleotide
tctgccgggtgaatgtcctccactggaacttgtgtcaactataattgaggatggcgatat

SEQ ID NO: 92399 - DNA, 60 bp, Artificial
  Synthetic oligonucleotide
ctagctcggtgtacattgtgcttgaccttgcattaatcatgcatggggatcacgcaacaa

SEQ ID NO: 92400 - DNA, 60 bp, Artificial
  Synthetic oligonucleotide
cacccctgcagatagattcctgaagtggataagctcctttctttattttggtagattggg

SEQ ID NO: 92401 - DNA, 60 bp, Artificial
  Synthetic oligonucleotide
ggtcgcgtaaacgccgtgcagctgcagaggacatctataggcagtgcagaccacaaggca

SEQ ID NO: 92402 - DNA, 59 bp, Artificial
  Synthetic oligonucleotide
acaatccttggctacacgctgtcctcctaaagaggtgcctgctgaaaatgatgatcctt

SEQ ID NO: 92403 - DNA, 60 bp, Artificial
  Synthetic oligonucleotide
ctgtgcatcattttattggcgccaaacatccttgccaagttcacttgtagccttggagcc

SEQ ID NO: 92404 - DNA, 60 bp, Artificial
  Synthetic oligonucleotide
tggtattgcatggcagaatcagctctttgttactatactggataacacaaggggtaccaa

SEQ ID NO: 92405 - DNA, 60 bp, Artificial
  Synthetic oligonucleotide
ttccactgagcttccttctgtaaatacacactacatccctaaccaacaaaaacaagcccc

SEQ ID NO: 92406 - DNA, 60 bp, Artificial
  Synthetic oligonucleotide
gctatatcacgtaaacgtcctcgtccaggcacctctacctctaccccaaaaaaagcagtt

SEQ ID NO: 92407 - DNA, 60 bp, Artificial
  Synthetic oligonucleotide
cgctgagattacaccagaggctccgagcgtggtcaccctgtctgacaccacagcaacagt

SEQ ID NO: 92408 - DNA, 60 bp, Artificial
  Synthetic oligonucleotide
gagcagtggtcaggccgagcctcgctgtcgagcctatagggcccatccccgctgagatta

SEQ ID NO: 92409 - DNA, 60 bp, Artificial
  Synthetic oligonucleotide
acataggctctgaacctgctattctagaccttcacccctccaccacatcaacacggacat

SEQ ID NO: 92410 - DNA, 60 bp, Artificial
  Synthetic oligonucleotide
gaccgatcgttttcgggcttcaactcgcccggtaatcccggcacgtcacattccttggca

SEQ ID NO: 92411 - DNA, 60 bp, Artificial
  Synthetic oligonucleotide
ggaaaccctataagtattgatttgaaacatagagcgccgacgcagatgaaatgtcctcca

SEQ ID NO: 92412 - DNA, 60 bp, Artificial
  Synthetic oligonucleotide
gaggtagaatccgtgacaggtattgcgtttcgggacatcaatgtgcgttgttctgcatgt

SEQ ID NO: 92413 - DNA, 60 bp, Artificial
  Synthetic oligonucleotide
taccttgtgcattttgcaatgacatcttaacctttttggataagtctgcgtttgcatttg

SEQ ID NO: 92414 - DNA, 60 bp, Artificial
  Synthetic oligonucleotide
ttctatgcgtgttctgcaggaaaaccctgtccacggcagaggtttattcatttcagtata

SEQ ID NO: 92415 - DNA, 60 bp, Artificial
  Synthetic oligonucleotide
gactcaactagtcaacgcttagtgtgggcctgcacaggtttagaggttggtaggggtcaa

SEQ ID NO: 92416 - DNA, 60 bp, Artificial
  Synthetic oligonucleotide
ggtgggaccgaaaacggttttaaccgaaaacggtgatatataaaccagccccaaaattga

SEQ ID NO: 92417 - DNA, 60 bp, Artificial
  Synthetic oligonucleotide
caggatggtgacatggtagatacaggatttggagccatgaattttgaggaattgcaatct

SEQ ID NO: 92418 - DNA, 60 bp, Artificial
  Synthetic oligonucleotide
ggcacatagtagggctcgcagacgcaaacgcgcttcagctacacaactatatcaaacttg

SEQ ID NO: 92419 - DNA, 60 bp, Artificial
  Synthetic oligonucleotide
tttactaacaactcccttgcaattctatttactaaccctgtctctttgctttcttcctgc

SEQ ID NO: 92420 - DNA, 60 bp, Artificial
  Synthetic oligonucleotide
cgtgtttatatcgccatctactatttcccctcattctacagaagacattcctttagatac

SEQ ID NO: 92421 - DNA, 60 bp, Artificial
  Synthetic oligonucleotide
tgcctgaccctttgcctccggttcatgggggttttgaaattaccacatctcaatcagcca

SEQ ID NO: 92422 - DNA, 60 bp, Artificial
  Synthetic oligonucleotide
ggatgtgctaattcgctgctatttatgccacaaaccattgtgtgaagtggagaaactaag

SEQ ID NO: 92423 - DNA, 60 bp, Artificial
  Synthetic oligonucleotide
agagcacacagggaccacgcgggtgttagaactacttaaatgtaaggatgtaagggctac

SEQ ID NO: 92424 - DNA, 60 bp, Artificial
  Synthetic oligonucleotide
catgtggggactgggtggttgcggcatttggtatacatcatagtgtatcagaggcatttg

SEQ ID NO: 92425 - DNA, 60 bp, Artificial
  Synthetic oligonucleotide
aattgtggcttcatggcacgccaaagaaaaactgtattgcaatagtggggccaccagata

SEQ ID NO: 92426 - DNA, 60 bp, Artificial
  Synthetic oligonucleotide
ggctgtagtagaacaaacaactgggcaacaaatatcagatgatgaggatgaaacagtgga

SEQ ID NO: 92427 - DNA, 60 bp, Artificial
  Synthetic oligonucleotide
gtggatatggctattctgaagtggaagctggaacgcaggtagagagaaatggcgaaccgg

SEQ ID NO: 92428 - DNA, 60 bp, Artificial
  Synthetic oligonucleotide
ctgccaaaattatccaccgcttgccaaaatcacccacacacctggcgttgctagggcgcg

SEQ ID NO: 92429 - DNA, 60 bp, Artificial
  Synthetic oligonucleotide
cctaaggtcacacacctgcaaaccggtatcggttgaaacacaccctctatagttccttat

SEQ ID NO: 92430 - DNA, 60 bp, Artificial
  Synthetic oligonucleotide
acgctgaatatagtgtgccctttgtgtgcaccaaaaagctaactacgatggcagaggata

SEQ ID NO: 92431 - DNA, 60 bp, Artificial
  Synthetic oligonucleotide
tttgcgaaaggaacaaatgtttgcaaggcatttctttaacagggcaggctctgttggtga

SEQ ID NO: 92432 - DNA, 60 bp, Artificial
  Synthetic oligonucleotide
tctgtggtgtcctgttccaccctatgagtaagtggtatgttgtgtctcgtgtgttgtttt

SEQ ID NO: 92433 - DNA, 60 bp, Artificial
  Synthetic oligonucleotide
gtctaggtcacctattcgtgtaggtagaaaacgtgctgcatctacatctactgccacacc

SEQ ID NO: 92434 - DNA, 60 bp, Artificial
  Synthetic oligonucleotide
ctaacatgactgtgtgtgcagccactacatcatctctttcagacacatataaggccacag

SEQ ID NO: 92435 - DNA, 60 bp, Artificial
  Synthetic oligonucleotide
ccctgtggctgtaaacacctctgggtcattgtcttctgcctccacaccatttgcgcaatc

SEQ ID NO: 92436 - DNA, 60 bp, Artificial
  Synthetic oligonucleotide
cctttgataacccaacatatgaaggtgaagatataagtttgcagtttgcccacaatacca

SEQ ID NO: 92437 - DNA, 60 bp, Artificial
  Synthetic oligonucleotide
ggggtctatgtatactcgaagcggcaagcatataggtggaagggtccatttctttaagga

SEQ ID NO: 92438 - DNA, 60 bp, Artificial
  Synthetic oligonucleotide
caaaggacgggacaacagttactgtgcagctacgcctatagttcaattacaaggtgactc

SEQ ID NO: 92439 - DNA, 60 bp, Artificial
  Synthetic oligonucleotide
gcaatgagcaattagacagctcagaagacgaggtggacgaacaagccacgcaagccacgc

SEQ ID NO: 92440 - DNA, 60 bp, Artificial
  Synthetic oligonucleotide
agtgtcctgcagcgccccggaagaatgtgtgcaagcgccgccttgtaaacgacaacgagg

SEQ ID NO: 92441 - DNA, 60 bp, Artificial
  Synthetic oligonucleotide
gcacgccaaatgggcctaagccacattggattacaagtggtgccaccattgacagtatca

SEQ ID NO: 92442 - DNA, 60 bp, Artificial
  Synthetic oligonucleotide
cctagtagataatgcttctgtacatgattgccagggactttccctgcaactgtttcgcct

SEQ ID NO: 92443 - DNA, 60 bp, Artificial
  Synthetic oligonucleotide
cagactaacagttaaatttgatggcgaggaccacaaagcagtggaatacgttagttgggg

SEQ ID NO: 92444 - DNA, 60 bp, Artificial
  Synthetic oligonucleotide
tacaaggcgccccggggatgggcaggaagtgccgcttgcgttgttcgttcaacaaaatgc

SEQ ID NO: 92445 - DNA, 60 bp, Artificial
  Synthetic oligonucleotide
gtagccctgcaagcagcacctgtgtgtccttggtggacagtgaattaagtccccggctgg

SEQ ID NO: 92446 - DNA, 60 bp, Artificial
  Synthetic oligonucleotide
cccggctggacgccatacggatacaccggggacaggacagggctaggagaaggctgtttg

SEQ ID NO: 92447 - DNA, 60 bp, Artificial
  Synthetic oligonucleotide
gcaatgttatttaaggcacgacaagcaggactaacgcgtgtgggccaccagatggtgcca

SEQ ID NO: 92448 - DNA, 60 bp, Artificial
  Synthetic oligonucleotide
ggagaggccgaggccacaggtaaccaggaaacgcaagcgcaggagcaggcggcagacata

SEQ ID NO: 92449 - DNA, 60 bp, Artificial
  Synthetic oligonucleotide
gtgggaagagcagggaaacagtagcacacagcatgggaaaactgttaaacataccggaaa

SEQ ID NO: 92450 - DNA, 60 bp, Artificial
  Synthetic oligonucleotide
gcaccgtgcgcactatattggtatagaacagccatgggaaacgccagcgaggtgtatggc

SEQ ID NO: 92451 - DNA, 60 bp, Artificial
  Synthetic oligonucleotide
tcattgcaagggttacaaacaagtgcatatgcgcatgaaccctggacattgcaaaccacc

SEQ ID NO: 92452 - DNA, 60 bp, Artificial
  Synthetic oligonucleotide
gtgtattgtgtgaccctgtactgacccttgtcccctgtgttgtgtatctgtggaatgtgt

SEQ ID NO: 92453 - DNA, 60 bp, Artificial
  Synthetic oligonucleotide
gtcagcaaagcacactcatctatgggaccgtgcaatccaactaatattttcctgctctgc

SEQ ID NO: 92454 - DNA, 60 bp, Artificial
  Synthetic oligonucleotide
atgcgcaccatgcttggcacgtgaagtaaaagtgagggagctgcgacattgggaccattc

SEQ ID NO: 92455 - DNA, 60 bp, Artificial
  Synthetic oligonucleotide
aacccctgaaattatggcctacctacataatatgaataaggccttgttggatgactggaa

SEQ ID NO: 92456 - DNA, 55 bp, Artificial
  Synthetic oligonucleotide
ttttattgcaggccggtccccgctcagtatctgtgtcacgcaaacgtgctgcccc

SEQ ID NO: 92457 - DNA, 60 bp, Artificial
  Synthetic oligonucleotide
tgtgtcctggctgcgcataagggacatggctgacagtgaaggtacagaaagcggggatgg

SEQ ID NO: 92458 - DNA, 60 bp, Artificial
  Synthetic oligonucleotide
ctggccttgtgcatgtgctgtttgtatggtgcctggtttgtatgactgtatttgctatgg

SEQ ID NO: 92459 - DNA, 60 bp, Artificial
  Synthetic oligonucleotide
ggtgtcctctgattcccaattatttaataagccatattggctgcaacgtgcccagggcca

SEQ ID NO: 92460 - DNA, 60 bp, Artificial
  Synthetic oligonucleotide
tcctacgtttaaatacctgcacagtagaatagtggtgtttcagtttttacataagtgtcc

SEQ ID NO: 92461 - DNA, 60 bp, Artificial
  Synthetic oligonucleotide
agcgtcctgaggtggttgacctacattgcaatgagcagttattagacagctcagagtcag

SEQ ID NO: 92462 - DNA, 60 bp, Artificial
  Synthetic oligonucleotide
tattggggaacactggacaaagggtactgcttgtgctaaccccgcgccccggcccactga

SEQ ID NO: 92463 - DNA, 60 bp, Artificial
  Synthetic oligonucleotide
gcctgatggcaccttgtataatcctgatactgagcgcatggtgtgggcctgcaggggcat

SEQ ID NO: 92464 - DNA, 60 bp, Artificial
  Synthetic oligonucleotide
cacccgctgtacaatcgcctggatgacactgaaaacaccacattacttgttgcagagtcc

SEQ ID NO: 92465 - DNA, 60 bp, Artificial
  Synthetic oligonucleotide
ggcccgcgctcacatcccgccagggaactgtacggtttagtcgccttggtcaacgtgcca

SEQ ID NO: 92466 - DNA, 60 bp, Artificial
  Synthetic oligonucleotide
atggggaaacaggcaaatgggaggtacatatgggaaacacagtgatttatgaaccctgcg

SEQ ID NO: 92467 - DNA, 60 bp, Artificial
  Synthetic oligonucleotide
ccccacccagacatccacctcggtgcagacgccgcctcataagcgacagcgactccacag

SEQ ID NO: 92468 - DNA, 60 bp, Artificial
  Synthetic oligonucleotide
gggtgaggcactgcctgactcttattatcttaagggtgcgaatgacaaggcggcccctgg

SEQ ID NO: 92469 - DNA, 60 bp, Artificial
  Synthetic oligonucleotide
cctggaagtagtaccccgctgcctggcatccgtcgccttgcacggccccgcctgaattta

SEQ ID NO: 92470 - DNA, 60 bp, Artificial
  Synthetic oligonucleotide
cattcagtacctgagctgtttgacaaagcatcatccacatggcattgggccggtggacaa

SEQ ID NO: 92471 - DNA, 60 bp, Artificial
  Synthetic oligonucleotide
attgaacctcctcaggcaggggaccttgccggccatgtcatttccagtacccctaccgct

SEQ ID NO: 92472 - DNA, 60 bp, Artificial
  Synthetic oligonucleotide
tgacataacagatgaaagtgtgctggcctatgaatatgcattgctgggaaatgaggaccc

SEQ ID NO: 92473 - DNA, 60 bp, Artificial
  Synthetic oligonucleotide
gcgacacagggaagtcgctattttgcatgagcctactaaattttctgggaggagctgtga

SEQ ID NO: 92474 - DNA, 60 bp, Artificial
  Synthetic oligonucleotide
gaggccgcaaggtggcagacacaggggattggaaggctattgtaaagtatttaagatatc

SEQ ID NO: 92475 - DNA, 60 bp, Artificial
  Synthetic oligonucleotide
caggggggtggtttctggtagaagccgtggtagaccgcaccacaggataccaggtgtcca

SEQ ID NO: 92476 - DNA, 60 bp, Artificial
  Synthetic oligonucleotide
gtgcagcttccccatttctgtgttccttgtgttcgggtagccattttgtgttgccgaccg

SEQ ID NO: 92477 - DNA, 60 bp, Artificial
  Synthetic oligonucleotide
cctgaaggtgctacatgaactactgctgggcgacttgtccatagtgtgtcctggctgcgc

SEQ ID NO: 92478 - DNA, 60 bp, Artificial
  Synthetic oligonucleotide
gcaactttgggcatgttttacacacattatgttacaaagccgatccggtcgctccctatg

SEQ ID NO: 92479 - DNA, 60 bp, Artificial
  Synthetic oligonucleotide
atacggtgccatgcatgcagcaaaccgttaagtatacaggaaaaggagcatcaggtacag

SEQ ID NO: 92480 - DNA, 60 bp, Artificial
  Synthetic oligonucleotide
cccgtctgcttactgtaggacatccctattgtagtttgcagcttgatgggctgcagggca

SEQ ID NO: 92481 - DNA, 60 bp, Artificial
  Synthetic oligonucleotide
cgctgggtcccacagttttgaggaaatcccaatgcacacctttgctacctctgagggtcc

SEQ ID NO: 92482 - DNA, 60 bp, Artificial
  Synthetic oligonucleotide
cgggtggacagtactgaccagtggatcaacggtcaccgtaacagcacagaaacaggggac

SEQ ID NO: 92483 - DNA, 60 bp, Artificial
  Synthetic oligonucleotide
gctcctgcgcctgtaccagctgtaccatatgtacctgccacccatccacattctatatat

SEQ ID NO: 92484 - DNA, 60 bp, Artificial
  Synthetic oligonucleotide
tctctgctgcatctgcatctaccaaggtacacaatgtcactgttccactggccacagggc

SEQ ID NO: 92485 - DNA, 60 bp, Artificial
  Synthetic oligonucleotide
tcttcctgcacaacatacacaacccacacttacagtacagggcccttccctctctgctgc

SEQ ID NO: 92486 - DNA, 60 bp, Artificial
  Synthetic oligonucleotide
gtgggctagtttgggggttttctttgggggattgggtataggcaccggctctggtactgg

SEQ ID NO: 92487 - DNA, 60 bp, Artificial
  Synthetic oligonucleotide
ccagccatacactgctgctcatatgtaaatagtgttccttgtgtctgttgttcgtttgca

SEQ ID NO: 92488 - DNA, 60 bp, Artificial
  Synthetic oligonucleotide
ttatggctcttaaacgtcgcaagcgtgcatctgcaactgacctctatcgtacatgtaaac

SEQ ID NO: 92489 - DNA, 60 bp, Artificial
  Synthetic oligonucleotide
tggatggtgtacgatactcctgctgcttatacttttctggctttcctatctttcctcact

SEQ ID NO: 92490 - DNA, 60 bp, Artificial
  Synthetic oligonucleotide
ctgaaccgtccattgtcaccttagtggaggattccagtattgttgcctccggtgccccgc

SEQ ID NO: 92491 - DNA, 60 bp, Artificial
  Synthetic oligonucleotide
ctactgttgtggatgtaggccctccagcccgcccccctgttgttattgagccaattgggg

SEQ ID NO: 92492 - DNA, 60 bp, Artificial
  Synthetic oligonucleotide
tgctacctgtgccatgcaccgttgtgcactgtggaaaaggaacggctaataacagaaggc

SEQ ID NO: 92493 - DNA, 59 bp, Artificial
  Synthetic oligonucleotide
ttttaccttttgtatgtacatgtactagggtgggttttatattattgggtgttgtgggt

SEQ ID NO: 92494 - DNA, 55 bp, Artificial
  Synthetic oligonucleotide
catcccgcgcctctgctacaagctcactatatgggtccacgcctagcgggtcaat

SEQ ID NO: 92495 - DNA, 60 bp, Artificial
  Synthetic oligonucleotide
ttacgcagggaacaaatgtttgttaggcatttttacaacagggccggtaccatgggggag

SEQ ID NO: 92496 - DNA, 60 bp, Artificial
  Synthetic oligonucleotide
gcactaacggaggcggaggttgtatcgtttgcatgtaaggagcttaaagttgtgtggaga

SEQ ID NO: 92497 - DNA, 60 bp, Artificial
  Synthetic oligonucleotide
cctcctggtcaccccacaggcgatgtgcttgtgcacgggtctacatattatttattgccc

SEQ ID NO: 92498 - DNA, 60 bp, Artificial
  Synthetic oligonucleotide
tggctgtaaaccgccattgggcgaacactgggcaaaaggcactccatgcaatacctccaa

SEQ ID NO: 92499 - DNA, 60 bp, Artificial
  Synthetic oligonucleotide
gcaaacaaataaatcggatgtgcctttagatatagttaccaccacatgcaagtacccaga

SEQ ID NO: 92500 - DNA, 60 bp, Artificial
  Synthetic oligonucleotide
cgttatataatccagactcccagcgtcttgtctgggcctgtacgggtgttgaggttggta

SEQ ID NO: 92501 - DNA, 60 bp, Artificial
  Synthetic oligonucleotide
ccgaccttcgtgccgccgccgcctaagcgtcagcgactcggatacggacctcagcacaca

SEQ ID NO: 92502 - DNA, 60 bp, Artificial
  Synthetic oligonucleotide
ggccaatagtgcggtacctaagacatcaggacatagagtttatttcatttgtaatcgcac

SEQ ID NO: 92503 - DNA, 60 bp, Artificial
  Synthetic oligonucleotide
tcagcacacagagcaaccggactcaacaggggacaggggtcagcggctggcacgtgacaa

SEQ ID NO: 92504 - DNA, 60 bp, Artificial
  Synthetic oligonucleotide
cctgtattatttaccaaagcatcatccacctggcgatggtcaacgtgcagtagccccacc

SEQ ID NO: 92505 - DNA, 60 bp, Artificial
  Synthetic oligonucleotide
gaaagcatattggcatatgaatatgcacgattggcagatgtagatggaaatgcagcggca

SEQ ID NO: 92506 - DNA, 60 bp, Artificial
  Synthetic oligonucleotide
ggaaaccaggtatgcatagacagaaaacacaggccattgctgcaactaaaatgtccacca

SEQ ID NO: 92507 - DNA, 60 bp, Artificial
  Synthetic oligonucleotide
cagaggctgtgttagcgctgctaaagacaagtaacctaagggcgacgctgctaggtaagt

SEQ ID NO: 92508 - DNA, 60 bp, Artificial
  Synthetic oligonucleotide
gcaaacccttgctgtgcagggcactggggaggagcctataagcagtaccccacttccggg

SEQ ID NO: 92509 - DNA, 60 bp, Artificial
  Synthetic oligonucleotide
gagccagatgttgttgacctgcattgtaacgagcaatttgccagctcagaagaggaggat

SEQ ID NO: 92510 - DNA, 60 bp, Artificial
  Synthetic oligonucleotide
cagggtattaacatgctgttgtaggtgtgggcgtgcagtaaggctggtggtggagagtgg

SEQ ID NO: 92511 - DNA, 60 bp, Artificial
  Synthetic oligonucleotide
gcttctgttgggtgcactgggcatagtgtgtccgcactgcgcataactgctatggccgac

SEQ ID NO: 92512 - DNA, 60 bp, Artificial
  Synthetic oligonucleotide
aattgttcaacaaattcaaacatgtgtttaccacacctattccggtcgctcccactacac

SEQ ID NO: 92513 - DNA, 60 bp, Artificial
  Synthetic oligonucleotide
atgacgaggcaattgtgcaggccctaaaacgaaagtacatagctagcccgttgtccgccg

SEQ ID NO: 92514 - DNA, 60 bp, Artificial
  Synthetic oligonucleotide
tagactgtttgagctgcaggacagtggttatggcaatacgcaagtggatactgacgcgac

SEQ ID NO: 92515 - DNA, 60 bp, Artificial
  Synthetic oligonucleotide
cgttggttgtatgtgctgtgactgtgtgtgtatggggcgggacccccccctggtatgtat

SEQ ID NO: 92516 - DNA, 52 bp, Artificial
  Synthetic oligonucleotide
tgccttggcagcacgtaagggcactgtacggtacagtcgtctgggtcagcgg

SEQ ID NO: 92517 - DNA, 60 bp, Artificial
  Synthetic oligonucleotide
actgttcccctgtctacaagctttgatgtccctgtttttagtggccctgacagtgctctt

SEQ ID NO: 92518 - DNA, 60 bp, Artificial
  Synthetic oligonucleotide
aaagtaacgggccatgtggaccatgcaggactatattatgtgcacgaagggacacgtgta

SEQ ID NO: 92519 - DNA, 60 bp, Artificial
  Synthetic oligonucleotide
agtgacaacaaagtatacctgcctcccgcccctgtgccaaaggttctgagcaccgacgac

SEQ ID NO: 92520 - DNA, 60 bp, Artificial
  Synthetic oligonucleotide
gggtcgcgtcagggcaccttagcttctatacacacatccacacctttgcaggcgccttca

SEQ ID NO: 92521 - DNA, 60 bp, Artificial
  Synthetic oligonucleotide
gtccggttgcgccttgtgagtaactatacatttatgttgtgtagtccagtccttgtggcc

SEQ ID NO: 92522 - DNA, 60 bp, Artificial
  Synthetic oligonucleotide
gccgtttagatgtgtgccaggagaagttgctagaactgtatgaaaaggatagtgaccagc

SEQ ID NO: 92523 - DNA, 60 bp, Artificial
  Synthetic oligonucleotide
cctcccctgtgtcccgtaagcgtcctgcaccatcgtccaccccaccagccacaaagcgta

SEQ ID NO: 92524 - DNA, 60 bp, Artificial
  Synthetic oligonucleotide
aatttaactgccgaggttatggcctacctacatagtatgaatgctgctttactagaggac

SEQ ID NO: 92525 - DNA, 60 bp, Artificial
  Synthetic oligonucleotide
gccctactggctacaacgtgcacagggccgaaacaatggtatctgctggggcaatcaggt

SEQ ID NO: 92526 - DNA, 60 bp, Artificial
  Synthetic oligonucleotide
agtgcggaacattaagggcacgtaggcacgtgtgtatactacaccctggagatttttatt

SEQ ID NO: 92527 - DNA, 60 bp, Artificial
  Synthetic oligonucleotide
caactgtgaccttaccacacaaccagccaaatctgctgctcaattgtatatattccctgt

SEQ ID NO: 92528 - DNA, 60 bp, Artificial
  Synthetic oligonucleotide
gcacggaaccgtggacattgcgtgacacaagccaggaaatgtgggacacagagcctaagc

SEQ ID NO: 92529 - DNA, 60 bp, Artificial
  Synthetic oligonucleotide
gaaccgcccaaaattagatatccaccagcagcactatattggtacaaagcaggcatgggc

SEQ ID NO: 92530 - DNA, 60 bp, Artificial
  Synthetic oligonucleotide
taagacaacatgtatagactgggtaatttgtgcatttggcgtgtattgtacagttgcaga

SEQ ID NO: 92531 - DNA, 60 bp, Artificial
  Synthetic oligonucleotide
gctggcacgtgacaacgcaagggaccagtgtaaccctgacggcgcgaaccagcacaggaa

SEQ ID NO: 92532 - DNA, 60 bp, Artificial
  Synthetic oligonucleotide
gttggggcaatactttgtttgttactgttgtagatactacacgaagtactaacatgactg

SEQ ID NO: 92533 - DNA, 60 bp, Artificial
  Synthetic oligonucleotide
aggggaacactggggcaaaggcaaacaatgttcaggtgtatctgtgcaggatggcgattg

SEQ ID NO: 92534 - DNA, 60 bp, Artificial
  Synthetic oligonucleotide
tattacaaacaggcgttcaaagtacatcacttgctcgtgcaggaacaaaacgtgctgcaa

SEQ ID NO: 92535 - DNA, 60 bp, Artificial
  Synthetic oligonucleotide
tttgctttgcctgatacatctatatttgattccaccagtcaacgtttagtgtgggcctgc

SEQ ID NO: 92536 - DNA, 60 bp, Artificial
  Synthetic oligonucleotide
atgttcctttagagtctgccccacgccctgccataccctttgggcctactgcacgtcctc

SEQ ID NO: 92537 - DNA, 60 bp, Artificial
  Synthetic oligonucleotide
gctgtgcaagacttaaaacgaaagtatttaggtagtccatatgttagtcctttaggccat

SEQ ID NO: 92538 - DNA, 60 bp, Artificial
  Synthetic oligonucleotide
ggggagggacaggtgcatacggaagtgcatacagaaagcgagatagaacaacacacgggt

SEQ ID NO: 92539 - DNA, 60 bp, Artificial
  Synthetic oligonucleotide
cctccattgtatcactggtagaggactcagctattattaattcaggagcgtcagaccttg

SEQ ID NO: 92540 - DNA, 60 bp, Artificial
  Synthetic oligonucleotide
caacatgtggagactgggtggttgcaggatttggtgtgcaccatagtgtgtctgaggcat

SEQ ID NO: 92541 - DNA, 59 bp, Artificial
  Synthetic oligonucleotide
gaacactggcaacacttcttaacattccagaagaccacatgctaattgaacctccaaaa

SEQ ID NO: 92542 - DNA, 60 bp, Artificial
  Synthetic oligonucleotide
gttgtaaatggaattacaagttgtacctgtggacgtcactacaacaacaaccaacgcatc

SEQ ID NO: 92543 - DNA, 60 bp, Artificial
  Synthetic oligonucleotide
caggccacctacacagtgccgtccagtgtttcagaagaatgtgtgcaagcgccgccttct

SEQ ID NO: 92544 - DNA, 60 bp, Artificial
  Synthetic oligonucleotide
ggcctcgaagacgtaaacgtgcgtctgctacacagctctatcaaacctgcaaagcttccg

SEQ ID NO: 92545 - DNA, 60 bp, Artificial
  Synthetic oligonucleotide
aactcagcaactataactatacacaatgttaacgtgtagttttgatgatggtgacacatg

SEQ ID NO: 92546 - DNA, 60 bp, Artificial
  Synthetic oligonucleotide
ggctaaaggtaaaaggcatggtagactataaagggttgtactatatgatggaacagtgta

SEQ ID NO: 92547 - DNA, 60 bp, Artificial
  Synthetic oligonucleotide
atctgtggtgtcctgttccaccctatgactaactattatgttgtgtatgttatgtacttt

SEQ ID NO: 92548 - DNA, 60 bp, Artificial
  Synthetic oligonucleotide
cctaaggtcacacacctggtaacacacctgcaaaccggtatcggttgaatcacacccttt

SEQ ID NO: 92549 - DNA, 60 bp, Artificial
  Synthetic oligonucleotide
gtatagtaacaggagacacaccagaatggatagcaaggcaaacaatagtagaacatggcc

SEQ ID NO: 92550 - DNA, 60 bp, Artificial
  Synthetic oligonucleotide
cacaggtggtgccaccattacaggtatcacagactaagggacatgaggcaattgaaatgc

SEQ ID NO: 92551 - DNA, 60 bp, Artificial
  Synthetic oligonucleotide
gaattggtcaacgagggtccatgtatacacgcagtggcaaacatataggtggcagggtgc

SEQ ID NO: 92552 - DNA, 60 bp, Artificial
  Synthetic oligonucleotide
gcatggaaaatatcctaccttaaaggacattgtgttacacctgagtcctgaccctgtagg

SEQ ID NO: 92553 - DNA, 60 bp, Artificial
  Synthetic oligonucleotide
cacagtttgcagattttatgcgtgttttgcaagaaaaccctgtccactgcagctgcagag

SEQ ID NO: 92554 - DNA, 60 bp, Artificial
  Synthetic oligonucleotide
aatgctgggcctacttcatactccaccacccttgcacaggccacctacacagtgccgtcc

SEQ ID NO: 92555 - DNA, 60 bp, Artificial
  Synthetic oligonucleotide
cctgcatttgcggaaccttctattgttcagtcacaaccttccgtggaggctggtggacac

SEQ ID NO: 92556 - DNA, 60 bp, Artificial
  Synthetic oligonucleotide
cctgcatccagcactcctgttcctacaactgttgcacgtccacgacttggcctttatagt

SEQ ID NO: 92557 - DNA, 60 bp, Artificial
  Synthetic oligonucleotide
gtgctccacaaacttaagaaggatggcagacgatacaggtacagacaatgaggggacggg

SEQ ID NO: 92558 - DNA, 60 bp, Artificial
  Synthetic oligonucleotide
ggggtaatactactatccctttatcactaccaaataacatatttgtacagcctggtcccg

SEQ ID NO: 92559 - DNA, 60 bp, Artificial
  Synthetic oligonucleotide
gaagtaaatttaaaggaaaagttttctgcagacctagatcagtttcctttaggacgcaaa

SEQ ID NO: 92560 - DNA, 60 bp, Artificial
  Synthetic oligonucleotide
actacaataatccatgtataaaactaagggcgtaaccgaaatcggttgaaccgaaaccgg

SEQ ID NO: 92561 - DNA, 60 bp, Artificial
  Synthetic oligonucleotide
cattacttcctatagttccagggtctccacaatatacaattattgctgatgcaggtgact

SEQ ID NO: 92562 - DNA, 60 bp, Artificial
  Synthetic oligonucleotide
tatactaccacttcacatgcagccttacctacttctattaataatggattatatgatatt

SEQ ID NO: 92563 - DNA, 60 bp, Artificial
  Synthetic oligonucleotide
cctataggggaacactggggcaaaggatccccatgtaccaatgttgcagtaaatccaggt

SEQ ID NO: 92564 - DNA, 60 bp, Artificial
  Synthetic oligonucleotide
gctccagatcctgactttttggatatagttgctttacataggccagcattaacctctagg

SEQ ID NO: 92565 - DNA, 60 bp, Artificial
  Synthetic oligonucleotide
cccactaaacttattacatatgataatcctgcatatgaaggtatagatgtggataataca

SEQ ID NO: 92566 - DNA, 60 bp, Artificial
  Synthetic oligonucleotide
gacgactatccagcgaccaagatcagagccagacaccggaaacccctgccacaccactaa

SEQ ID NO: 92567 - DNA, 60 bp, Artificial
  Synthetic oligonucleotide
tattggtataaaacaggtatgtcaaatattagtgaagtgtatggagacacgccagaatgg

SEQ ID NO: 92568 - DNA, 60 bp, Artificial
  Synthetic oligonucleotide
cattaggaaaacgaaaagctacacccaccacctcatctacctctacaactgctaaacgca

SEQ ID NO: 92569 - DNA, 60 bp, Artificial
  Synthetic oligonucleotide
tgtgtgtctccaatgtgtatgatgatagagcctccaaaattgcgtagtacagcagcagca

SEQ ID NO: 92570 - DNA, 60 bp, Artificial
  Synthetic oligonucleotide
caacgtgttgcgattggtgtattgctgcattcggacttacacccagtatagctgacagta

SEQ ID NO: 92571 - DNA, 60 bp, Artificial
  Synthetic oligonucleotide
ggagatacacctacattgcatgaatatatgttagatttgcaaccagagacgactgatctc

SEQ ID NO: 92572 - DNA, 60 bp, Artificial
  Synthetic oligonucleotide
ctgcacaggaagcaaaacaacatagagatgcagtacaggttctaaaacgaaagtatttgg

SEQ ID NO: 92573 - DNA, 60 bp, Artificial
  Synthetic oligonucleotide
gggaagttcatgcgggtggtcaggtaatattatgtcctacatctgtgtttagcagcgacg

SEQ ID NO: 92574 - DNA, 60 bp, Artificial
  Synthetic oligonucleotide
ggaaatttagtttctatggatgtaaagcatagaccattggtacaactaaaatgccctcca

SEQ ID NO: 92575 - DNA, 60 bp, Artificial
  Synthetic oligonucleotide
tgtgccccatctgttcccagaaaccataatctaccatggctgatcctgcaggtaccaatg

SEQ ID NO: 92576 - DNA, 60 bp, Artificial
  Synthetic oligonucleotide
caggatggtgatatggttgataccggctttggtgctatggactttactacattacaggct

SEQ ID NO: 92577 - DNA, 60 bp, Artificial
  Synthetic oligonucleotide
gggtcaggtacaggcggacgcactgggtatattccattaggaacaaggcctcccacagct

SEQ ID NO: 92578 - DNA, 60 bp, Artificial
  Synthetic oligonucleotide
atatggaagtatgggtgtattttttggtgggttaggaattggaacagggtcgggtacagg

SEQ ID NO: 92579 - DNA, 60 bp, Artificial
  Synthetic oligonucleotide
ccgctgttaggcacatatttttggcttgttttaactaacctaattgcatatttggcataa

SEQ ID NO: 92580 - DNA, 60 bp, Artificial
  Synthetic oligonucleotide
cctaaggttgaaggcaaaactattgctgaacaaatattacaatatggaagtatgggtgta

SEQ ID NO: 92581 - DNA, 60 bp, Artificial
  Synthetic oligonucleotide
acaaggccagagaaatgggatttaaacatattaaccaccaggtggtgccaacgctggctg

SEQ ID NO: 92582 - DNA, 60 bp, Artificial
  Synthetic oligonucleotide
cagtgccctgttggaactacatagatgacaatttaagaaatgcattggatggaaatttag

SEQ ID NO: 92583 - DNA, 60 bp, Artificial
  Synthetic oligonucleotide
tctacctctacaactgctaaacgcaaaaaacgtaagctgtaagtattgtatgtatgttga

SEQ ID NO: 92584 - DNA, 60 bp, Artificial
  Synthetic oligonucleotide
ctgcaggtaccaatggggaagagggtacgggatgtaatggatggttttatgtagaggctg

SEQ ID NO: 92585 - DNA, 55 bp, Artificial
  Synthetic oligonucleotide
aaacgatggggactctttgccaacgtttaaatgtgtgtcaggacaaaatactaac

SEQ ID NO: 92586 - DNA, 60 bp, Artificial
  Synthetic oligonucleotide
ctccaggtgattgtccaccattagagttaataaacacagttattcaggatggtgatatgg

SEQ ID NO: 92587 - DNA, 60 bp, Artificial
  Synthetic oligonucleotide
cctaacacagtaactagtagcacacccataccggggtctcgcccagtggcacgcctagga

SEQ ID NO: 92588 - DNA, 60 bp, Artificial
  Synthetic oligonucleotide
cacctgcagaaactggagggcattttacactttcatcatccactattagtacacataatt

SEQ ID NO: 92589 - DNA, 60 bp, Artificial
  Synthetic oligonucleotide
cccactttcactgacccatctgtattgcagcctccaacacctgcagaaactggagggcat

SEQ ID NO: 92590 - DNA, 60 bp, Artificial
  Synthetic oligonucleotide
cccagtatctaaggttgtaagcacggatgaatatgttgcacgcacaaacatatattatca

SEQ ID NO: 92591 - DNA, 55 bp, Artificial
  Synthetic oligonucleotide
ggggagagggtgttagtgaaagacacactatatgcgaaacaccacttacaaatat

SEQ ID NO: 92592 - DNA, 60 bp, Artificial
  Synthetic oligonucleotide
cggggtgagttttacagaattagtaagaccatttaaaagtaataaatcaacgtgttgcga

SEQ ID NO: 92593 - DNA, 60 bp, Artificial
  Synthetic oligonucleotide
tagagctgcaaaaaggagattatttgaaagcgaagacagcgggtatggcaatactgaagt

SEQ ID NO: 92594 - DNA, 60 bp, Artificial
  Synthetic oligonucleotide
gaaactcagcagacgttacaggtagaagggcgccatgagactgaaacaccatgtagtcag

SEQ ID NO: 92595 - DNA, 51 bp, Artificial
  Synthetic oligonucleotide
actgcatttaacagcgcacacaaaggacggattaactgtaatagtaacact

SEQ ID NO: 92596 - DNA, 60 bp, Artificial
  Synthetic oligonucleotide
tgtgcttttgtgtgtctgcctattaatacgtccgctgcttttgtctgtgtctacatacac

SEQ ID NO: 92597 - DNA, 60 bp, Artificial
  Synthetic oligonucleotide
gcaaagattccataatataaggggtcggtggaccggtcgatgtatgtcttgttgcagatc

SEQ ID NO: 92598 - DNA, 60 bp, Artificial
  Synthetic oligonucleotide
cttaacaatgcgacacaaacgttctgcaaaacgcacaaaacgtgcatcggccacccaact

SEQ ID NO: 92599 - DNA, 60 bp, Artificial
  Synthetic oligonucleotide
ctgcgacgtgaggtatatgactttgcttttcgggatttatgcatagtatatagagatggg

SEQ ID NO: 92600 - DNA, 60 bp, Artificial
  Synthetic oligonucleotide
aacgtgcatcggccacccaactttataaaacatgcaaacaggcaggtacatgtccacctg

SEQ ID NO: 92601 - DNA, 60 bp, Artificial
  Synthetic oligonucleotide
gctagtgcttatgcagcaaatgcaggtgtggataatagggaatgtatatctatggattac

SEQ ID NO: 92602 - DNA, 60 bp, Artificial
  Synthetic oligonucleotide
attatcatgcaggaacatccagactacttgcagttggacatccctattttcctattaaaa

SEQ ID NO: 92603 - DNA, 60 bp, Artificial
  Synthetic oligonucleotide
catttgaattatcacggatggtacaatgggcctacgataatgacatagtagacgatagtg

SEQ ID NO: 92604 - DNA, 59 bp, Artificial
  Synthetic oligonucleotide
ttagccagttcaaattattttcctacacctagtggttctatggttacctctgatgccca

SEQ ID NO: 92605 - DNA, 60 bp, Artificial
  Synthetic oligonucleotide
tgatgcaggtgacttttatttacatcctagttattacatgttacgaaaacgacgtaaacg

SEQ ID NO: 92606 - DNA, 60 bp, Artificial
  Synthetic oligonucleotide
gtcaatggataaaatatagatgtgatagggtagatgatggaggtgattggaagcaaattg

SEQ ID NO: 92607 - DNA, 60 bp, Artificial
  Synthetic oligonucleotide
atagatggtccagctggacaagcagaaccggacagagcccattacaatattgtaaccttc

SEQ ID NO: 92608 - DNA, 60 bp, Artificial
  Synthetic oligonucleotide
ggacagcgggttggacctcgtagattttgtagacgacagcagaataatacctacaaatca

SEQ ID NO: 92609 - DNA, 60 bp, Artificial
  Synthetic oligonucleotide
acctatgacaaccctgcatatgagggtcctgctgagggtacgttggaatttgaacatccc

SEQ ID NO: 92610 - DNA, 60 bp, Artificial
  Synthetic oligonucleotide
ggaacccgtgtggaaatcagactacgccagtaatacacttacaaggtgatcctaattgcc

SEQ ID NO: 92611 - DNA, 60 bp, Artificial
  Synthetic oligonucleotide
aacaaagcacctgcagcactacggcgtcacaaacgtacccgtggaccccggatcgcaaag

SEQ ID NO: 92612 - DNA, 60 bp, Artificial
  Synthetic oligonucleotide
actattgtgtgggacaaccggccagacactgctgctattattgtttatagttgttgctgc

SEQ ID NO: 92613 - DNA, 60 bp, Artificial
  Synthetic oligonucleotide
ctaaagtgtgtgcactgcgacactacgacagatcagcattttggcatacagtagaacaag

SEQ ID NO: 92614 - DNA, 60 bp, Artificial
  Synthetic oligonucleotide
ctggacctcgccctactatgcgccttggtttatataccagggtcactcaacaacgtccag

SEQ ID NO: 92615 - DNA, 60 bp, Artificial
  Synthetic oligonucleotide
gtcccacaatccagtatacagtgatccttttactttacggccttctttgccagtagaggg

SEQ ID NO: 92616 - DNA, 60 bp, Artificial
  Synthetic oligonucleotide
ctatatgtcaaaagcctttatcgccaagtgagaaagatcatcatatttataacggacggc

SEQ ID NO: 92617 - DNA, 60 bp, Artificial
  Synthetic oligonucleotide
cgtcctctgcaagtggcccgtcctctacacctgctgtattggacatttctcctcccacca

SEQ ID NO: 92618 - DNA, 60 bp, Artificial
  Synthetic oligonucleotide
gtctgcagttattgattctagcataccagtgcctaccgacacgtctcatggtgggtttaa

SEQ ID NO: 92619 - DNA, 60 bp, Artificial
  Synthetic oligonucleotide
acagtgtggacggtcagttaaacttgttgtcagtagtacaggcgcggacatacaacagct

SEQ ID NO: 92620 - DNA, 60 bp, Artificial
  Synthetic oligonucleotide
gaatcgcaccacagtgtctaaaggaatgtgcaaactattaaatatacctgctaatcaact

SEQ ID NO: 92621 - DNA, 60 bp, Artificial
  Synthetic oligonucleotide
gtagttgtacagattgggtagttgcagcatttggtgtacatcatagtattgcagaaggct

SEQ ID NO: 92622 - DNA, 60 bp, Artificial
  Synthetic oligonucleotide
ggtttcgagcaggaatatctaatgccagtgtagtaaccggggaaacacccgaatggatac

SEQ ID NO: 92623 - DNA, 60 bp, Artificial
  Synthetic oligonucleotide
aggtggacgggtcgctgtacccagtgcagagaataatgcgtggaaacgcaccaacgctaa

SEQ ID NO: 92624 - DNA, 60 bp, Artificial
  Synthetic oligonucleotide
ggtgggttgtaaacctgccattggcgagcattggggtaagggtgctgcttgctctgcaca

SEQ ID NO: 92625 - DNA, 60 bp, Artificial
  Synthetic oligonucleotide
ggatggtgatatggcagatgtagggtttggagcaatggactttagtgctttgcaaacttc

SEQ ID NO: 92626 - DNA, 60 bp, Artificial
  Synthetic oligonucleotide
ggcaggaacccttggtgaacctgttcctgaggacatgtatataaaagcttctaatggtgc

SEQ ID NO: 92627 - DNA, 60 bp, Artificial
  Synthetic oligonucleotide
gcacaaggccacaataatggtatatgttggggtaatcaagtgtttctaactgttgtggat

SEQ ID NO: 92628 - DNA, 58 bp, Artificial
  Synthetic oligonucleotide
atgtcaatgccacagtggattaaacatagaagtgaaagaactggcgataatggtgatt

SEQ ID NO: 92629 - DNA, 60 bp, Artificial
  Synthetic oligonucleotide
caaatagtgccagcactggaaatatccagggccaaggcccacgttgcaattgaaattcaa

SEQ ID NO: 92630 - DNA, 60 bp, Artificial
  Synthetic oligonucleotide
tgtttgtaccaaagtgtattatcaatgccaccacaccgaagtcgcagacgcaaacgggca

SEQ ID NO: 92631 - DNA, 60 bp, Artificial
  Synthetic oligonucleotide
cgtgataatatggtacattgtactttagaaaatggcgatgtgtggctgctgctgtggttt

SEQ ID NO: 92632 - DNA, 60 bp, Artificial
  Synthetic oligonucleotide
catatgaaagtcccgccagtgatttacaggagagcataaacaaagagctaagccctaggc

SEQ ID NO: 92633 - DNA, 60 bp, Artificial
  Synthetic oligonucleotide
gtatggtgtgggcctgtgtgggtttggaggttggccgtggacagcctttaggtgttggtc

SEQ ID NO: 92634 - DNA, 60 bp, Artificial
  Synthetic oligonucleotide
ggcacatatttgtgggttttggcacagtactttacaagttactctggcctagacaagact

SEQ ID NO: 92635 - DNA, 60 bp, Artificial
  Synthetic oligonucleotide
ggtggtcagcacagatgaatatgtgcaacgtaccaactacttttatcatgccagcagttc

SEQ ID NO: 92636 - DNA, 60 bp, Artificial
  Synthetic oligonucleotide
tctgttatggtattaggatgggattttatattgcatcccagttatatgtggcgtaagcgc

SEQ ID NO: 92637 - DNA, 60 bp, Artificial
  Synthetic oligonucleotide
ttggcataggtaccggtgctgggtcaggtgggcgcacagggtatgtgcctataggaacac

SEQ ID NO: 92638 - DNA, 60 bp, Artificial
  Synthetic oligonucleotide
gctatctgctaggcagggcactgtccgtgtcagtcgtattgggcaacgggcttccttgca

SEQ ID NO: 92639 - DNA, 60 bp, Artificial
  Synthetic oligonucleotide
gggcaacgggcttccttgcaaacacgtagtggggctcgtattgggtctagggtacatttt

SEQ ID NO: 92640 - DNA, 60 bp, Artificial
  Synthetic oligonucleotide
ctgaagtggaaatacggcaggaacaggtagaaaatggacatggcgccccagacgggagta

SEQ ID NO: 92641 - DNA, 60 bp, Artificial
  Synthetic oligonucleotide
cccaaggggccaaacgacgactatttcaatcattggaaaatcgcgacagtggatatggct

SEQ ID NO: 92642 - DNA, 60 bp, Artificial
  Synthetic oligonucleotide
ccccggatcgcaaagggtcacatctgacaataacaataaccagcgacggaacccgtgtgg

SEQ ID NO: 92643 - DNA, 60 bp, Artificial
  Synthetic oligonucleotide
aaatggagacactggccaaacgtttagatgcgtgccaggaacagttgttagaactgtatg

SEQ ID NO: 92644 - DNA, 60 bp, Artificial
  Synthetic oligonucleotide
tcaattaaaggcgcaggcattattaaataggcaacaagcacatgcagataaggaggcagt

SEQ ID NO: 92645 - DNA, 60 bp, Artificial
  Synthetic oligonucleotide
catggacatttatatacgtgcaaacactagatggcacatggtgtaaagtatacggacacg

SEQ ID NO: 92646 - DNA, 60 bp, Artificial
  Synthetic oligonucleotide
aaatatggggtaaccggacaatgggaggtacatgatggcactcaggtgattgtttctcct

SEQ ID NO: 92647 - DNA, 60 bp, Artificial
  Synthetic oligonucleotide
ggcggatgatacaggtacagaggaggggctagggtgttctggttggttttctgtagaagc

SEQ ID NO: 92648 - DNA, 60 bp, Artificial
  Synthetic oligonucleotide
cgacccagacggcacagacggaatattatacaaagaccccaccccgaccaccccgccgcg

SEQ ID NO: 92649 - DNA, 60 bp, Artificial
  Synthetic oligonucleotide
caccacacctacacccacaaccatcacaaggagtaactgcgacccagacggcacagacgg

SEQ ID NO: 92650 - DNA, 60 bp, Artificial
  Synthetic oligonucleotide
gggtgcaggaaaatcaggaaataggcacaaatacgcctacaacaagggtggtggaattgc

SEQ ID NO: 92651 - DNA, 60 bp, Artificial
  Synthetic oligonucleotide
tgcctcatcacagccaagtacattataccaattgtgcaaagattttgggctgaccctgcg

SEQ ID NO: 92652 - DNA, 60 bp, Artificial
  Synthetic oligonucleotide
tcattgtatgttgttgtaccaccattttatttttcaatcctccattttagtacatgcaac

SEQ ID NO: 92653 - DNA, 60 bp, Artificial
  Synthetic oligonucleotide
gcaagctgggttacgtgcaagacctaaacttacagcagtaaaacgaacagcatcttccag

SEQ ID NO: 92654 - DNA, 60 bp, Artificial
  Synthetic oligonucleotide
gttatagatttgtgcagtctcaggccatacgatgtcaagctaaggtaacagcacctgaaa

SEQ ID NO: 92655 - DNA, 60 bp, Artificial
  Synthetic oligonucleotide
ctgacatactagacgattggaatgttggtgtagctccaccgccctctggtactttagaag

SEQ ID NO: 92656 - DNA, 60 bp, Artificial
  Synthetic oligonucleotide
gtaaggcctctgggacatgcccacccgatgtaattcctaagattgaaggtcgcacgtggg

SEQ ID NO: 92657 - DNA, 60 bp, Artificial
  Synthetic oligonucleotide
acccctgctgacagcattgaactacaaccattggttgcccctgagcaggcggaccctatg

SEQ ID NO: 92658 - DNA, 60 bp, Artificial
  Synthetic oligonucleotide
ctatgcatggaccaaagcccaccgtgcaggaaattgtgttagagctatgtccatacaatg

SEQ ID NO: 92659 - DNA, 60 bp, Artificial
  Synthetic oligonucleotide
atagcaggaaactttacaggacagtgtcggcactgctggaccagtaagcgagaggaccgc

SEQ ID NO: 92660 - DNA, 60 bp, Artificial
  Synthetic oligonucleotide
ggtcctgatgttgtattaccatctacaaccccacagttgcctttaacaccctctactcca

SEQ ID NO: 92661 - DNA, 60 bp, Artificial
  Synthetic oligonucleotide
ttgataaggtgcatgagttgcctgaaaccattgtgtccagcagaaaaactaaggcaccta

SEQ ID NO: 92662 - DNA, 60 bp, Artificial
  Synthetic oligonucleotide
aagtatcccagacagtgcggaatcactgagccctctgagcccgacaacgtgtccgtggac

SEQ ID NO: 92663 - DNA, 60 bp, Artificial
  Synthetic oligonucleotide
ggccgcaagcagggcattcctaaggtgtctgcatatcaatacagagtgtttagggttacc

SEQ ID NO: 92664 - DNA, 60 bp, Artificial
  Synthetic oligonucleotide
ccaccgcaggtgccccatgcaccaaaaaaacaaactcgacgtcgtctcggaagtatccca

SEQ ID NO: 92665 - DNA, 60 bp, Artificial
  Synthetic oligonucleotide
gcaccggaggtcgtgctgggtacattcctttaggtggaaaacctaatactgttgtggatg

SEQ ID NO: 92666 - DNA, 60 bp, Artificial
  Synthetic oligonucleotide
ggtttcacaccgtgctgccaggcgcaagcgtgcatctgcaactgacttatataaaacatg

SEQ ID NO: 92667 - DNA, 60 bp, Artificial
  Synthetic oligonucleotide
ccaacatctactactagccagacgggacgaacaacagcgtcacagaattcagtgtctgtg

SEQ ID NO: 92668 - DNA, 60 bp, Artificial
  Synthetic oligonucleotide
gacagaggtatatgaatttgcctttagtgacctatgtgtagtgtatagagacggggtacc

SEQ ID NO: 92669 - DNA, 60 bp, Artificial
  Synthetic oligonucleotide
ggccgggttgtgtgcgaccgctttcggtcgttggtactatttgcttttagatagtattaa

SEQ ID NO: 92670 - DNA, 60 bp, Artificial
  Synthetic oligonucleotide
cagttccttcattggcttctgctgcatccactacatatactaatactaccattcctcttg

SEQ ID NO: 92671 - DNA, 60 bp, Artificial
  Synthetic oligonucleotide
gctaaaatacgggaactacgatattactcggaatcggtgtatgcaactacattagaaacc

SEQ ID NO: 92672 - DNA, 60 bp, Artificial
  Synthetic oligonucleotide
catcatcctgtccaggtgcactgcaacaatagtttggcaaccaacgtatctcctcccttg

SEQ ID NO: 92673 - DNA, 60 bp, Artificial
  Synthetic oligonucleotide
gtcaatacagatgattatgtgacacgcactggcatgtattactatgctggtacatctagg

SEQ ID NO: 92674 - DNA, 60 bp, Artificial
  Synthetic oligonucleotide
cctttgtggttgcaccctgtgactaacatatgtccttgttttacatataataggactgca

SEQ ID NO: 92675 - DNA, 60 bp, Artificial
  Synthetic oligonucleotide
gccacaaacaggtgaggtgtctggtaatgtgtttgtaagtacccctacatcaggaacaca

SEQ ID NO: 92676 - DNA, 60 bp, Artificial
  Synthetic oligonucleotide
ttggaataggggaggcatggtaggggacactattcccactgacatgtatattaagggcac

SEQ ID NO: 92677 - DNA, 60 bp, Artificial
  Synthetic oligonucleotide
atccactactgaatctgttgccgacctacagaacaccaccgcgacccataccaccgcagg

SEQ ID NO: 92678 - DNA, 60 bp, Artificial
  Synthetic oligonucleotide
gcttgtattggtatttttggtgtggttttgtgtatgcatgtatatatgttgcactgtccc

SEQ ID NO: 92679 - DNA, 60 bp, Artificial
  Synthetic oligonucleotide
gcacgagaacgtggtatgcataatattgaccaccaggtggtgccgcctgtaaacatttca

SEQ ID NO: 92680 - DNA, 60 bp, Artificial
  Synthetic oligonucleotide
ccctgtagaagacaataggtggccgtatttacatagtagactaaccgtgtttaaatttcc

SEQ ID NO: 92681 - DNA, 60 bp, Artificial
  Synthetic oligonucleotide
acagacacatggtgtaaaacccaagggcgtgtggattactggggtgtatattatatgtat

SEQ ID NO: 92682 - DNA, 60 bp, Artificial
  Synthetic oligonucleotide
agtggaagtatggtatgatggggacaagagtaactcaatgcattatgtagtgtggggtac

SEQ ID NO: 92683 - DNA, 60 bp, Artificial
  Synthetic oligonucleotide
cacagtctcagaggatgaggacgaaaacgcaacagatacaggttcagacatggtagattt

SEQ ID NO: 92684 - DNA, 60 bp, Artificial
  Synthetic oligonucleotide
cagcacaggtacttttgaatatgcaagaggcccaaagggatgcacaaagggtgcgtgccc

SEQ ID NO: 92685 - DNA, 60 bp, Artificial
  Synthetic oligonucleotide
gtctgtgttgtaagtgtaacaaggcactgcaactagtagtagaagcgtcgcgggacaacc

SEQ ID NO: 92686 - DNA, 60 bp, Artificial
  Synthetic oligonucleotide
tgcaatggccaattgtgaaggtaccgatggggacgggacggggtgtaacggatggttttt

SEQ ID NO: 92687 - DNA, 60 bp, Artificial
  Synthetic oligonucleotide
cgcctagcgggtctatggtgtcctctgactcccagttatttaacaagccctattggctgc

SEQ ID NO: 92688 - DNA, 60 bp, Artificial
  Synthetic oligonucleotide
cactacaccggcagttttagacattaccccttcgtccgggtctgtgcaggtaagcagtac

SEQ ID NO: 92689 - DNA, 60 bp, Artificial
  Synthetic oligonucleotide
ggaggattccagtgttattacatctgggacaccagtaccaacatttacaggcacctctgg

SEQ ID NO: 92690 - DNA, 60 bp, Artificial
  Synthetic oligonucleotide
ctatacctggggttagtcgtgtggcagggccacgtttatatagtagggcacatcaacagg

SEQ ID NO: 92691 - DNA, 60 bp, Artificial
  Synthetic oligonucleotide
actcctattgaggatggcgatatgattgatacaggatatggtgctatggactttggtaca

SEQ ID NO: 92692 - DNA, 60 bp, Artificial
  Synthetic oligonucleotide
gaaaattccccgttttcctctaataaaaatcctaaagacagtagggacaatgttgcagtg

SEQ ID NO: 92693 - DNA, 60 bp, Artificial
  Synthetic oligonucleotide
cttttgagcctgttgatactactcttacatatgaacctgctgacatagctcctgatccgg

SEQ ID NO: 92694 - DNA, 60 bp, Artificial
  Synthetic oligonucleotide
gctcctgatccggattttctggacattgttcgtttacataggcctgccttaacatcccga

SEQ ID NO: 92695 - DNA, 60 bp, Artificial
  Synthetic oligonucleotide
cggcgtatacagtgccggacagcggctatggcaatatggaagtggaaactaactcggagg

SEQ ID NO: 92696 - DNA, 60 bp, Artificial
  Synthetic oligonucleotide
gtgtgtccgtggtgtgcaactgaaacccagtaatctgcaatggccaattgtgaaggtacc

SEQ ID NO: 92697 - DNA, 60 bp, Artificial
  Synthetic oligonucleotide
atttctgttacaggcaggtgttcgcagacggcccaccataggccctcgtaaacgcactgc

SEQ ID NO: 92698 - DNA, 60 bp, Artificial
  Synthetic oligonucleotide
ctcgtaaacgcactgccactgcagctaccacatctacctctaaacacaaacgtaaacgtg

SEQ ID NO: 92699 - DNA, 60 bp, Artificial
  Synthetic oligonucleotide
cataccgctacctacaatcagcagcaattacatgtcaaaaggacgcccctgcacctgtta

SEQ ID NO: 92700 - DNA, 60 bp, Artificial
  Synthetic oligonucleotide
ggaattttggtgttgcccctccaccatctgctagtcttgtagatacataccgctacctac

SEQ ID NO: 92701 - DNA, 66 bp, Artificial
  Synthetic oligonucleotide
ggcatgttgaggaatatgatttgcagtttatatttcagttgtgtactataacattatccactgatg

SEQ ID NO: 92702 - DNA, 60 bp, Artificial
  Synthetic oligonucleotide
cacaataatttcatatgtaaattcagcaagtcacttttggttagagccacttgcagatgc

SEQ ID NO: 92703 - DNA, 60 bp, Artificial
  Synthetic oligonucleotide
gcttttgcagccaccaaaattacgtagccctgttgcagcattatattggtatagaacagg

SEQ ID NO: 92704 - DNA, 60 bp, Artificial
  Synthetic oligonucleotide
ctaactcggaggtaactgtagcacctaatataaatggggaggatggggaaaatgaagggg

SEQ ID NO: 92705 - DNA, 60 bp, Artificial
  Synthetic oligonucleotide
tgacctggtacgtacatttaaaagtgataaaaccacatgtacagactgggtagcagcaat

SEQ ID NO: 92706 - DNA, 60 bp, Artificial
  Synthetic oligonucleotide
tatccgctcctggacctgtgtgcaccagaaactccaccccagcgcccaccaaagcccagg

SEQ ID NO: 92707 - DNA, 60 bp, Artificial
  Synthetic oligonucleotide
gtaaccaagtgtgtatggacaggaagcatagggccttgttacagctaaaatgccctccgc

SEQ ID NO: 92708 - DNA, 60 bp, Artificial
  Synthetic oligonucleotide
tgaatcctggacattgagagacacatcacgtgaaatgtgggacgcggcccctaaagggtg

SEQ ID NO: 92709 - DNA, 60 bp, Artificial
  Synthetic oligonucleotide
cagttattcaagatggcgatatggtggacactggctatggtgctatggacttcactgcat

SEQ ID NO: 92710 - DNA, 60 bp, Artificial
  Synthetic oligonucleotide
aaagaggagaacaggcgcgtatgagtatgtcagaatggatacggttcagaggcgacaaag

SEQ ID NO: 92711 - DNA, 60 bp, Artificial
  Synthetic oligonucleotide
tagagccagtgcagtgggagacaccattcctgacactctaatattgaagtcggccggtgg

SEQ ID NO: 92712 - DNA, 59 bp, Artificial
  Synthetic oligonucleotide
ccactgaaaagcaagatccctatgcaaaactaaacttttgggacgtggatctgaaggat

SEQ ID NO: 92713 - DNA, 60 bp, Artificial
  Synthetic oligonucleotide
gccgccaccgaggaaattgaaatggaacctttacttgccccagcagatcctgacactcta

SEQ ID NO: 92714 - DNA, 60 bp, Artificial
  Synthetic oligonucleotide
cgggcgggaggatggtttatagtggaagccattgtagacaggcggacaggcgatcccgta

SEQ ID NO: 92715 - DNA, 60 bp, Artificial
  Synthetic oligonucleotide
gcagatcagatgctacacgtgccacaaaccgcttgtaaaggaagaaaaggacagacatcg

SEQ ID NO: 92716 - DNA, 60 bp, Artificial
  Synthetic oligonucleotide
gcacggtccgcatcccacagtaaaagatatagaattgagtcttgcaccagaggacatccc

SEQ ID NO: 92717 - DNA, 60 bp, Artificial
  Synthetic oligonucleotide
tttggtgtggaaagcgggagtgccatacggtgcctgtgcccattgtctacttctgcaggg

SEQ ID NO: 92718 - DNA, 60 bp, Artificial
  Synthetic oligonucleotide
cctgacgccgagcgcttagtctgggcttgcactggggttgagataggtcgcgggctgccc

SEQ ID NO: 92719 - DNA, 60 bp, Artificial
  Synthetic oligonucleotide
gggcctggtagcattgtattttcaaattgtgtcacgtatacttcaaaacacataggtctc

SEQ ID NO: 92720 - DNA, 60 bp, Artificial
  Synthetic oligonucleotide
cctgggtgtattgtgatatggatgtagacgcctgtgcataatctaatgttttgctgtgtg

SEQ ID NO: 92721 - DNA, 60 bp, Artificial
  Synthetic oligonucleotide
gtgctaccatgccagtggggaatgacagtgtttatgctggtacggtacaaacgtgccaag

SEQ ID NO: 92722 - DNA, 60 bp, Artificial
  Synthetic oligonucleotide
actgcagtggggtagtcttggtatatttctgggtggtttaggcattggcaccgggtctgg

SEQ ID NO: 92723 - DNA, 60 bp, Artificial
  Synthetic oligonucleotide
ggcacggaacccatcagtagtactcctgtacctggtgttagtaggattgcaggcccacgc

SEQ ID NO: 92724 - DNA, 60 bp, Artificial
  Synthetic oligonucleotide
cgggcctgacattatattacccacctcggcgcagtggccttatgtgcctttaacacctgc

SEQ ID NO: 92725 - DNA, 60 bp, Artificial
  Synthetic oligonucleotide
tggtgtacctgcctcctactcccgtgtccaaagttctcagcacggacgactatgtgacac

SEQ ID NO: 92726 - DNA, 60 bp, Artificial
  Synthetic oligonucleotide
cttattatgactactttcacataattgctgtcttggctgcgttttctaggttgccctgcc

SEQ ID NO: 92727 - DNA, 60 bp, Artificial
  Synthetic oligonucleotide
aagatcccacccagaaagcctgtgaacgagcgggtggaccattggacagtgacagcaccc

SEQ ID NO: 92728 - DNA, 60 bp, Artificial
  Synthetic oligonucleotide
cagccctgtgtgtgaacaagccagcatagaacatgaactaagtccaaggctagacgccat

SEQ ID NO: 92729 - DNA, 60 bp, Artificial
  Synthetic oligonucleotide
gcagatgtgagatgggcaatcaaaatggccgccagaacagtacagaggggagcgggagga

SEQ ID NO: 92730 - DNA, 60 bp, Artificial
  Synthetic oligonucleotide
gcagacacaaaggaatcactgtcggtctcaacacgctcggatttggcgcattcaaccgtt

SEQ ID NO: 92731 - DNA, 60 bp, Artificial
  Synthetic oligonucleotide
caccaaggcgtagcagtaccccattacaaagagctacacaagcatttagacaaagatcac

SEQ ID NO: 92732 - DNA, 60 bp, Artificial
  Synthetic oligonucleotide
ctaatgtatccaaggggaccaaacgaaaacgcacgtaaaataaaggctgtttaccgtttt

SEQ ID NO: 92733 - DNA, 60 bp, Artificial
  Synthetic oligonucleotide
ggcaacaccttgtccagataaagtagctccaaaagaaagagaagatccttatgcccctta

SEQ ID NO: 92734 - DNA, 60 bp, Artificial
  Synthetic oligonucleotide
cacattacctgcagttgtcatacatacagaagatagtagtggggacttttatttacatcc

SEQ ID NO: 92735 - DNA, 60 bp, Artificial
  Synthetic oligonucleotide
aaggaaactgtgtttgcccctgtcaccagctccacaccacccgactccccaggagggtcc

SEQ ID NO: 92736 - DNA, 60 bp, Artificial
  Synthetic oligonucleotide
caaaatggggtgctgcggctgggttacttaccagttccaccactagctacctcagaagcc

SEQ ID NO: 92737 - DNA, 60 bp, Artificial
  Synthetic oligonucleotide
gcgatctgcagcatggcggacaataaaggtagtgaaacagacgggttgcatgaatggtgc

SEQ ID NO: 92738 - DNA, 60 bp, Artificial
  Synthetic oligonucleotide
gcagctgcaatctttacaacaatctccttatggcacagaaaagtggacactggtggacac

SEQ ID NO: 92739 - DNA, 60 bp, Artificial
  Synthetic oligonucleotide
actgaagatgttactacattggtgcagcaggaggaagaggtaccagctttagagacatct

SEQ ID NO: 92740 - DNA, 60 bp, Artificial
  Synthetic oligonucleotide
gtggcagaggagcaaattttatcagaacctccaaaattgcgaagtacagtgtcagcttta

SEQ ID NO: 92741 - DNA, 60 bp, Artificial
  Synthetic oligonucleotide
tcagatcttataagtaatgatggggacttggaacagggaaactcccgagaactgtttcaa

SEQ ID NO: 92742 - DNA, 60 bp, Artificial
  Synthetic oligonucleotide
cagctgagtccacaacttgaatccatttcgctgtcatcagaccataaaactaagaggaaa

SEQ ID NO: 92743 - DNA, 60 bp, Artificial
  Synthetic oligonucleotide
gcagcgaagtgggtttctcgacctagtaagatttcctaagggtgtagattggtcactggg

SEQ ID NO: 92744 - DNA, 60 bp, Artificial
  Synthetic oligonucleotide
acatgcaagcaggcgggcacatgtccacctgatgttattaataaagtggaacagtcaacc

SEQ ID NO: 92745 - DNA, 60 bp, Artificial
  Synthetic oligonucleotide
acagatgtcggtgtggttgccagccagtggtaaggtatatttgccaccatcaacacctgt

SEQ ID NO: 92746 - DNA, 60 bp, Artificial
  Synthetic oligonucleotide
aggccgagggactggaggcaccacaggatatgtgccattgggtgaaggtactggagttcg

SEQ ID NO: 92747 - DNA, 60 bp, Artificial
  Synthetic oligonucleotide
gtggttcacagttagttataggcaatagaagatccactacatcatatactgttcctagat

SEQ ID NO: 92748 - DNA, 60 bp, Artificial
  Synthetic oligonucleotide
ctggagttcgtgtgggcagtacacccacagtcgttcggcctgcccttgtgcctgaagtaa

SEQ ID NO: 92749 - DNA, 60 bp, Artificial
  Synthetic oligonucleotide
atttcacttatactgcagctatgtaaaatccctttaaaagcagatgtgttagcacagatc

SEQ ID NO: 92750 - DNA, 60 bp, Artificial
  Synthetic oligonucleotide
ggtatctagtgatgctcaattatttaatagaccattttggttacagcgtgcacaaggtca

SEQ ID NO: 92751 - DNA, 60 bp, Artificial
  Synthetic oligonucleotide
gtacgaggaggtaaaccaggggatgacatacctggtgagcaaattgatgcagggacctac

SEQ ID NO: 92752 - DNA, 66 bp, Artificial
  Synthetic oligonucleotide
gtgatatggcagatattggttatgggaatttaaattttagaacactacaacaaagtagatcagacg

SEQ ID NO: 92753 - DNA, 60 bp, Artificial
  Synthetic oligonucleotide
ggtgttgggacaagtggacatccattatttaacaaagtgaatgacacagaaaaccctgta

SEQ ID NO: 92754 - DNA, 60 bp, Artificial
  Synthetic oligonucleotide
gcaactactttcattacctaacaagtattttcatgcaccgtttccgtatcactgtgaatg

SEQ ID NO: 92755 - DNA, 60 bp, Artificial
  Synthetic oligonucleotide
tgaccaagaagacgagggagaggatggagaacctgaaaaagcgtttcgatgtgttgcaag

SEQ ID NO: 92756 - DNA, 60 bp, Artificial
  Synthetic oligonucleotide
atccctttcctatgaaagatgacgatacccctgaatttgaacttactgaccaaagctgga

SEQ ID NO: 92757 - DNA, 60 bp, Artificial
  Synthetic oligonucleotide
aggaagtaacacaggtatttgaacaagaccttgcaggttttgtagagcctcctaacagag

SEQ ID NO: 92758 - DNA, 60 bp, Artificial
  Synthetic oligonucleotide
gctggcacctgatgatgtaaatgcaactgcttggttggctcacaataatcaggcgcgttt

SEQ ID NO: 92759 - DNA, 60 bp, Artificial
  Synthetic oligonucleotide
aatgtctatgtcggcatggatccactttaaattagagcaagtagaaggggaagggcagtg

SEQ ID NO: 92760 - DNA, 60 bp, Artificial
  Synthetic oligonucleotide
caaccaatgtctgaagccaaaatagctttacttgatgatgctactgatccatgttggata

SEQ ID NO: 92761 - DNA, 60 bp, Artificial
  Synthetic oligonucleotide
cctgatgtgcccacatttgatactccagtagtgacaacaagcaaaggctctagtgccatt

SEQ ID NO: 92762 - DNA, 60 bp, Artificial
  Synthetic oligonucleotide
tgcactgtgaagaggagttgccagagcaggatacggaggtggagcctgaaagaagagctt

SEQ ID NO: 92763 - DNA, 60 bp, Artificial
  Synthetic oligonucleotide
ggatgcgacacacggtctgttagggacagtggcatctctcctggggacgtgggaagaaag

SEQ ID NO: 92764 - DNA, 60 bp, Artificial
  Synthetic oligonucleotide
gttaactgactttgacaccaaatgcttaagtttgatttggaaagacgattttgtgtttgc

SEQ ID NO: 92765 - DNA, 60 bp, Artificial
  Synthetic oligonucleotide
gtcgcctctggtgcaggtggacaatcagtaggcgtttctgaaaatatagaactgcaggat

SEQ ID NO: 92766 - DNA, 60 bp, Artificial
  Synthetic oligonucleotide
ttcttggcactcgcacagcaccgttaacggtaagtgttttgtatactgtaccgggcgcga

SEQ ID NO: 92767 - DNA, 60 bp, Artificial
  Synthetic oligonucleotide
gcccaacccaacagccacaacaagcctgtagtgacgaaacaaccaagcggaagaggtacg

SEQ ID NO: 92768 - DNA, 58 bp, Artificial
  Synthetic oligonucleotide
agcagattgggtcgtagagcaactattagaacaagggcaggaacacaaataggagcac

SEQ ID NO: 92769 - DNA, 60 bp, Artificial
  Synthetic oligonucleotide
aggagggtcccgagaactacccggatccaccgctaactccaaggcctcaagcccaaccca

SEQ ID NO: 92770 - DNA, 60 bp, Artificial
  Synthetic oligonucleotide
aacctccaggggcaacaggaggtgtaggggagacacccccagagggcaacgaggagtctc

SEQ ID NO: 92771 - DNA, 60 bp, Artificial
  Synthetic oligonucleotide
gctagaagaggtggtcattttgtgtcccgactgccgtaacagcgatctgcagcatggcgg

SEQ ID NO: 92772 - DNA, 60 bp, Artificial
  Synthetic oligonucleotide
acgatcctcgtcccggcaaaagaagcaagggcgacgagcacggtcccgcacccggtcgcg

SEQ ID NO: 92773 - DNA, 60 bp, Artificial
  Synthetic oligonucleotide
catcttctatcatgcttatagtgaccgcctattaactgtaggacacccatatttcaatgt

SEQ ID NO: 92774 - DNA, 60 bp, Artificial
  Synthetic oligonucleotide
gtgcctgtttgtctgctttaatgtgccgctattgcagtctgcctctgtgtttgcctcgtg

SEQ ID NO: 92775 - DNA, 60 bp, Artificial
  Synthetic oligonucleotide
tgaaaagtgcagctataacctgtcaaaaggatcagccccctcctgaaaagcaggacccac

SEQ ID NO: 92776 - DNA, 60 bp, Artificial
  Synthetic oligonucleotide
caagcgcaaacgcaaatagtatgttgtgtgtctgtattgtgtatgtatggttgtattatg

SEQ ID NO: 92777 - DNA, 60 bp, Artificial
  Synthetic oligonucleotide
gttgtggataccaccaggaatacaaacatgactctttccgcaaccacacagtctatgtct

SEQ ID NO: 92778 - DNA, 60 bp, Artificial
  Synthetic oligonucleotide
tatgaattctaccttactggaagactggaatataggtttgtcgcctcctgttgccactag

SEQ ID NO: 92779 - DNA, 53 bp, Artificial
  Synthetic oligonucleotide
ccaactgaacaaatgcttgtgcagcctccaaaaatacgtagccctgcggttgc

SEQ ID NO: 92780 - DNA, 60 bp, Artificial
  Synthetic oligonucleotide
gtcccgactctgtgtccagtacctttagatccaacgtatcctctgttgaaactgttaacg

SEQ ID NO: 92781 - DNA, 60 bp, Artificial
  Synthetic oligonucleotide
gggaggcaagtggcgggaaagagcaaaatggaggctcacaacatagtgtgtgtagcagag

SEQ ID NO: 92782 - DNA, 60 bp, Artificial
  Synthetic oligonucleotide
cccgacagtactgactccaccacacagtccactaccacagccagagagtcctacgcagag

SEQ ID NO: 92783 - DNA, 60 bp, Artificial
  Synthetic oligonucleotide
cggtttcacaaaatttcacatatgtggaccgggtcgtgcctgacatgctggagacacaca

SEQ ID NO: 92784 - DNA, 60 bp, Artificial
  Synthetic oligonucleotide
cctccctggtggagcttcgtgtaacaacaccgaaatcgacagtggttataagactgcacc

SEQ ID NO: 92785 - DNA, 60 bp, Artificial
  Synthetic oligonucleotide
aggagcggcttgtatgggcctgtgtagggctagagattggccgtggacagcctttaggtg

SEQ ID NO: 92786 - DNA, 60 bp, Artificial
  Synthetic oligonucleotide
ctttggaaacgtggaagcaacgcaacaggtacaggaacagtatgtaagggaggcaagtgg

SEQ ID NO: 92787 - DNA, 60 bp, Artificial
  Synthetic oligonucleotide
gacatccctaaggtgtctgcatttcagtatagggtgtttagagtacgcctcccagatcct

SEQ ID NO: 92788 - DNA, 60 bp, Artificial
  Synthetic oligonucleotide
gtgtgtgtagcagagatgggagcatagggtcaggaagtgatatggatgtggatagacagg

SEQ ID NO: 92789 - DNA, 60 bp, Artificial
  Synthetic oligonucleotide
ggccaccaggtggtgccctgtttacaagtgtgtaaagcaaaggcatgcgttgctatagaa

SEQ ID NO: 92790 - DNA, 60 bp, Artificial
  Synthetic oligonucleotide
ccacaagcatattcagcagaactgttaatcctttggcatagtgccgtttcctgtgtttaa

SEQ ID NO: 92791 - DNA, 60 bp, Artificial
  Synthetic oligonucleotide
ccaggtgtgcacctattactcatgcaccgcaaccgtttacggttttgcagcaacaggcct

SEQ ID NO: 92792 - DNA, 60 bp, Artificial
  Synthetic oligonucleotide
ggcagtccattaggtgatattagtaatcagcaaacagtgtgccgggaagctgtaaaacga

SEQ ID NO: 92793 - DNA, 60 bp, Artificial
  Synthetic oligonucleotide
gaagtaacatcctcctcaactaccacacctgcagtattagatataacacccacctctacc

SEQ ID NO: 92794 - DNA, 60 bp, Artificial
  Synthetic oligonucleotide
ggttgcccaccgggcacgcagacgtaagcgggcatcagcaacgcagctatatcaaacatg

SEQ ID NO: 92795 - DNA, 60 bp, Artificial
  Synthetic oligonucleotide
ttggtattggcactggctctggcactggggggcgtacaggatatattcctttgggtacta

SEQ ID NO: 92796 - DNA, 60 bp, Artificial
  Synthetic oligonucleotide
ggtaggccccactgacccttcaattgttacattggttgaagaatccagtgttattgagtc

SEQ ID NO: 92797 - DNA, 60 bp, Artificial
  Synthetic oligonucleotide
ggctgtgcacccgctataggtgaacactggacaaagggtacggcctgtcgttccacacct

SEQ ID NO: 92798 - DNA, 56 bp, Artificial
  Synthetic oligonucleotide
aaggtccgaaaattaagatattacaattgttcagtgtacggggctagcctggaagc

SEQ ID NO: 92799 - DNA, 60 bp, Artificial
  Synthetic oligonucleotide
caatcgggctgaatatgttgtgtggaaatgggtatattattgtggggaggatgggtggtg

SEQ ID NO: 92800 - DNA, 60 bp, Artificial
  Synthetic oligonucleotide
gcaggagcagccacagcaagctagacgggacgaacaacatccttgttacctaattgaaac

SEQ ID NO: 92801 - DNA, 60 bp, Artificial
  Synthetic oligonucleotide
agtgttgtaggtgtgagtcgttggtgcagttggctgttcagagttcaacaaaagagctgc

SEQ ID NO: 92802 - DNA, 58 bp, Artificial
  Synthetic oligonucleotide
aaaacgtacaggggatgtaatatctgaagatgaaacagacgaggaaagcaccgaatct

SEQ ID NO: 92803 - DNA, 60 bp, Artificial
  Synthetic oligonucleotide
ctacacaggcagaaagggagacagctcagcagttgttacatgccaaaacacacatgcaga

SEQ ID NO: 92804 - DNA, 60 bp, Artificial
  Synthetic oligonucleotide
cgatggagacgctatgccaacgtttagatgcgtgccaggagaaaattctagactgttttg

SEQ ID NO: 92805 - DNA, 60 bp, Artificial
  Synthetic oligonucleotide
gggcacaacaacaacagatgaatatgaaacaatggataaagcatgtatgtagcaaggtgg

SEQ ID NO: 92806 - DNA, 60 bp, Artificial
  Synthetic oligonucleotide
tggttacaaccgttagacaatactaaattaggtatgctagatgatgccacagaggcatgt

SEQ ID NO: 92807 - DNA, 60 bp, Artificial
  Synthetic oligonucleotide
gccgggaagctgtaaaacgaaggctaattgatacagaagtgccggacagcgggtatggca

SEQ ID NO: 92808 - DNA, 60 bp, Artificial
  Synthetic oligonucleotide
atatggaagagtggacattaagggatgtatgtgaaagtatgtggtatacagaacccaaac

SEQ ID NO: 92809 - DNA, 60 bp, Artificial
  Synthetic oligonucleotide
ggatattgtacaatccacatgtaaatatcccgattatttgaaaatgagtgcagatgccta

SEQ ID NO: 92810 - DNA, 60 bp, Artificial
  Synthetic oligonucleotide
cgcgtggttgcataaactaaggcgcggtggtgtccctaggcagttgggtggcatgttagg

SEQ ID NO: 92811 - DNA, 60 bp, Artificial
  Synthetic oligonucleotide
cccctagctctgtatatgttgctacacctagtgggtctatgataacttcagaggctcaat

SEQ ID NO: 92812 - DNA, 60 bp, Artificial
  Synthetic oligonucleotide
agcctcatcatccctgcggccgggaaaacgtcccagaaccacagagcccgacagtactga

SEQ ID NO: 92813 - DNA, 60 bp, Artificial
  Synthetic oligonucleotide
gctctcgcttgcttaccgtgggacatccttattaccccatttctaaatctggtaaagcag

SEQ ID NO: 92814 - DNA, 60 bp, Artificial
  Synthetic oligonucleotide
cacccaggacatccatggatcgtcagttatttgaaaatacagaagagcgaccacgtacat

SEQ ID NO: 92815 - DNA, 60 bp, Artificial
  Synthetic oligonucleotide
gttgcctaccaacactgttcctttgtcttttagtggtagtacctctaatgttacaatacc

SEQ ID NO: 92816 - DNA, 60 bp, Artificial
  Synthetic oligonucleotide
cattgctggagctgcaacttggctgtgtgttctgcaagaaggcattgacagcgtcagagg

SEQ ID NO: 92817 - DNA, 60 bp, Artificial
  Synthetic oligonucleotide
cctttacaacacgtagaggtggtgtgcgttttagtaggcttggcacaaaggccactatgc

SEQ ID NO: 92818 - DNA, 60 bp, Artificial
  Synthetic oligonucleotide
ggcctagtgacagcaaggtttatctgcctcctacccctgtatcaaaggtcattacaacgg

SEQ ID NO: 92819 - DNA, 60 bp, Artificial
  Synthetic oligonucleotide
gccttatgcacctcaatctccttttgataccacccatgatgtagttatacagggctccac

SEQ ID NO: 92820 - DNA, 60 bp, Artificial
  Synthetic oligonucleotide
aactataatatgactaagctgtgcatacatagtttatgcaaccgaaataggttgggcagc

SEQ ID NO: 92821 - DNA, 60 bp, Artificial
  Synthetic oligonucleotide
tggctgttctgaagtggaagcaacacagattcaggtaactacaaatggcgaacatggcgg

SEQ ID NO: 92822 - DNA, 60 bp, Artificial
  Synthetic oligonucleotide
ccaggtgcgctacaacaattgcttgcataactatatccactccctaagtaataaaactgc

SEQ ID NO: 92823 - DNA, 60 bp, Artificial
  Synthetic oligonucleotide
ttgcaaactttaatcttttgggcactgctcctacatattttgaacaattggcgcgcctct

SEQ ID NO: 92824 - DNA, 60 bp, Artificial
  Synthetic oligonucleotide
cccggcctttgagcctgtggacactacattaacatttgatcctcgtagtgatgttcctga

SEQ ID NO: 92825 - DNA, 57 bp, Artificial
  Synthetic oligonucleotide
cgaccactatagagatatatcatccacctggcattggacaggtgcaggcaatgaaaa

SEQ ID NO: 92826 - DNA, 60 bp, Artificial
  Synthetic oligonucleotide
tgcagtaccagtgacgacacggtatccgctactcagcttgttaaacagctacagcacacc

SEQ ID NO: 92827 - DNA, 60 bp, Artificial
  Synthetic oligonucleotide
ctgatgcaggaacatgggacaaaaccgctacctgtgtaagtcacaggggattgtattatg

SEQ ID NO: 92828 - DNA, 60 bp, Artificial
  Synthetic oligonucleotide
acgtcggctgctacacgacctggacactgtggactcgcggagaagcagcattgtggacct

SEQ ID NO: 92829 - DNA, 60 bp, Artificial
  Synthetic oligonucleotide
acagcacaccccctcaccgtattccagcaccgtgtccgtgggcaccgcaaagacctacgg

SEQ ID NO: 92830 - DNA, 59 bp, Artificial
  Synthetic oligonucleotide
ggggcacagagggcaacaacagcagtgtagacggtacaagtgacaatagcaatatagaa

SEQ ID NO: 92831 - DNA, 60 bp, Artificial
  Synthetic oligonucleotide
atggcgaacatggcggcaatgtatgtagtggcggcagtacggaggctatagacaacgggg

SEQ ID NO: 92832 - DNA, 60 bp, Artificial
  Synthetic oligonucleotide
attttgggctgtgcccctgctattggggaacactgggctaaaggcactgcttgtaaatcg

SEQ ID NO: 92833 - DNA, 60 bp, Artificial
  Synthetic oligonucleotide
cacaacgtttagtgtgggcctgtgctggagtggaaattggccgtggtcagcctttaggtg

SEQ ID NO: 92834 - DNA, 60 bp, Artificial
  Synthetic oligonucleotide
caaactggggaggtggcaggtaatgtatttgttggtacccctacatctggaacacatggg

SEQ ID NO: 92835 - DNA, 60 bp, Artificial
  Synthetic oligonucleotide
ggcagctctagattattaactgttggtaatccatattttagggttcctgcaggtggtggc

SEQ ID NO: 92836 - DNA, 60 bp, Artificial
  Synthetic oligonucleotide
ctgttgcgttacaaatgtggtaagagtagactaacagttgctaaaggtttaagtacgttg

SEQ ID NO: 92837 - DNA, 60 bp, Artificial
  Synthetic oligonucleotide
tactacctctgtatggcccattgtatcacccacggcccctgcctctacacagtatattgg

SEQ ID NO: 92838 - DNA, 60 bp, Artificial
  Synthetic oligonucleotide
actgtgcggcgtgtagcaggtccccgcctttacagtagggcctaccaacaagtgtcagtg

SEQ ID NO: 92839 - DNA, 60 bp, Artificial
  Synthetic oligonucleotide
aggatgctgcaccggctgaaaataaggatccctatgataagttaaagttttggaatgtgg

SEQ ID NO: 92840 - DNA, 60 bp, Artificial
  Synthetic oligonucleotide
cgtcgcaagcccaccataggccctcgcaaacgttctgctccatctgccactacgtcttct

SEQ ID NO: 92841 - DNA, 60 bp, Artificial
  Synthetic oligonucleotide
ctcccagtaccaatttaacaatatgtgcttctacacagtctcctgtacctgggcaatatg

SEQ ID NO: 92842 - DNA, 60 bp, Artificial
  Synthetic oligonucleotide
cctggcagctgtgtgtattctccctctccaagtggctctattgttacctctgactcccag

SEQ ID NO: 92843 - DNA, 60 bp, Artificial
  Synthetic oligonucleotide
cattaatagaggactccagtgtggttacatcaggtgcacctaggcctacgtttactggca

SEQ ID NO: 92844 - DNA, 60 bp, Artificial
  Synthetic oligonucleotide
gttgggctatatattgtcctgtatttcaagttataaaactgcacaccttacagcatccat

SEQ ID NO: 92845 - DNA, 60 bp, Artificial
  Synthetic oligonucleotide
gccttgcacaaagtcgatacaaaaccgaggattggacactgcaagacacatgcgaggaac

SEQ ID NO: 92846 - DNA, 61 bp, Artificial
  Synthetic oligonucleotide
ccattaatacaactaaaatgtcctccaatactactaaccacaaatatacatccagcaaagg

SEQ ID NO: 92847 - DNA, 60 bp, Artificial
  Synthetic oligonucleotide
cagtattggcaactaatacgttgggaaaatgcaatattctttgcagcaagggaacatggc

SEQ ID NO: 92848 - DNA, 60 bp, Artificial
  Synthetic oligonucleotide
ttggttggaaccgttaacagatactaaggtggccatgttagatgatgcaacgaccacgtg

SEQ ID NO: 92849 - DNA, 60 bp, Artificial
  Synthetic oligonucleotide
cgaggacgaaaatgcaacagacacagggtcggatatggtagattttattgatacacaagg

SEQ ID NO: 92850 - DNA, 60 bp, Artificial
  Synthetic oligonucleotide
gcctgctttaacatccaggcgtgggactgttcgctttagtagattaggtcaacgggcaac

SEQ ID NO: 92851 - DNA, 58 bp, Artificial
  Synthetic oligonucleotide
ccctgtcctttgtgtgtccgtggtgtgcatcccagcagtaagcaacaatggctgatcc

SEQ ID NO: 92852 - DNA, 60 bp, Artificial
  Synthetic oligonucleotide
gatataagtcctattgcaccttccccagaatatattgaactgcagcctttagtatctgcc

SEQ ID NO: 92853 - DNA, 60 bp, Artificial
  Synthetic oligonucleotide
cgaccttcgagcattccagcagctgtttctgaacaccctgtcctttgtgtgtccgtggtg

SEQ ID NO: 92854 - DNA, 60 bp, Artificial
  Synthetic oligonucleotide
catttaccagcccgacgagccgaaccacaacgtcacacaatgttgtgtatgtgttgtaag

SEQ ID NO: 92855 - DNA, 60 bp, Artificial
  Synthetic oligonucleotide
gcagatgacatggaccctgcagtgcctgtaccatcgcgttctactacctcctttgcattt

SEQ ID NO: 92856 - DNA, 60 bp, Artificial
  Synthetic oligonucleotide
gtgtatgcatgtatgtgtgctgccatgtcccgcttttgccatctgtctgtatgtgtgcgt

SEQ ID NO: 92857 - DNA, 60 bp, Artificial
  Synthetic oligonucleotide
ggtatcccaccgtgccgcacgacgcaaacgggcttcggtaactgacttatataaaacatg

SEQ ID NO: 92858 - DNA, 60 bp, Artificial
  Synthetic oligonucleotide
ggtacattccattgggtgggcgttccaatacagtggtggatgttggtcctacacgtcccc

SEQ ID NO: 92859 - DNA, 60 bp, Artificial
  Synthetic oligonucleotide
gcaggaggcagcacagaaaacagtccattaggggagcggctggaggtggatacagagtta

SEQ ID NO: 92860 - DNA, 60 bp, Artificial
  Synthetic oligonucleotide
gatttatttgtggtgtatagagacagtataccccatgctgcatgccataaatgtatagat

SEQ ID NO: 92861 - DNA, 60 bp, Artificial
  Synthetic oligonucleotide
acgatttcacaacatagctgggcactatagaggccagtgccattcgtgctgcaaccgagc

SEQ ID NO: 92862 - DNA, 60 bp, Artificial
  Synthetic oligonucleotide
gcgcgctttgaggatccaacacggcgaccctacaagctacctgatctgtgcacggaactg

SEQ ID NO: 92863 - DNA, 60 bp, Artificial
  Synthetic oligonucleotide
ctacacctgcggttttggatatcacaccttcgtctacctctgtgtctatttccacaacca

SEQ ID NO: 92864 - DNA, 60 bp, Artificial
  Synthetic oligonucleotide
gccccaaaatgaaattccggttgaccttctatgtcacgagcaattaagcgactcagagga

SEQ ID NO: 92865 - DNA, 60 bp, Artificial
  Synthetic oligonucleotide
tcgggatttgtgtagccttagtccgcaattggcaagcattagcttaacgccacggacgtc

SEQ ID NO: 92866 - DNA, 60 bp, Artificial
  Synthetic oligonucleotide
ctgcagatgaaaccagtgaaaatgcaagtaatgtctctgatcttgtagacaatgcgagca

SEQ ID NO: 92867 - DNA, 60 bp, Artificial
  Synthetic oligonucleotide
caagcttgaccatggcggctagaaaaggtactgactctgagactgaggatggtggttggg

SEQ ID NO: 92868 - DNA, 60 bp, Artificial
  Synthetic oligonucleotide
gtgcggacatctgagcacattgtaaatacatttaaccgctaaaaccccgtgcagcaaagg

SEQ ID NO: 92869 - DNA, 60 bp, Artificial
  Synthetic oligonucleotide
actgaaaaaaatgtttacagaatagaggctgcctgtggattttgtgggaaaggggtgagg

SEQ ID NO: 92870 - DNA, 60 bp, Artificial
  Synthetic oligonucleotide
tgtgctgacagagcagccggagccgatagacttgcaatgctatgaacaattaccatcgtc

SEQ ID NO: 92871 - DNA, 60 bp, Artificial
  Synthetic oligonucleotide
ccccacctgctctttcatcatactgtaaaactgtttactgttcaactacaatactgttat

SEQ ID NO: 92872 - DNA, 60 bp, Artificial
  Synthetic oligonucleotide
cctgtagaacatctctgcatttcttcacatgtcttacataggataacacacatttgcaaa

SEQ ID NO: 92873 - DNA, 60 bp, Artificial
  Synthetic oligonucleotide
gtgcacaggacaggtacacactgcaggacaatgtccaccaatagaactgagaaacacaac

SEQ ID NO: 92874 - DNA, 60 bp, Artificial
  Synthetic oligonucleotide
tcatagtgtttacaacaacaacaagatagttaaagtgaacaacgacaagtccgacagtcc

SEQ ID NO: 92875 - DNA, 57 bp, Artificial
  Synthetic oligonucleotide
gggtagtatgtctttatcatgtatctgatgatagaagagaggcaggaaaaacattat

SEQ ID NO: 92876 - DNA, 60 bp, Artificial
  Synthetic oligonucleotide
tggcattcagtccagcaatgaagctgatgattctcttgaggggcaaagacaggtagaacc

SEQ ID NO: 92877 - DNA, 60 bp, Artificial
  Synthetic oligonucleotide
ggataggcatgcagcctgtgcctccacagtctgtgtctcaagccaaagctaagcaggcca

SEQ ID NO: 92878 - DNA, 60 bp, Artificial
  Synthetic oligonucleotide
ccttactggatccagcgctcgcagggcaagaataatgggattgcatggggcaatcagctg

SEQ ID NO: 92879 - DNA, 60 bp, Artificial
  Synthetic oligonucleotide
taacagtagtggacaacacacgaggaactcccttaactataaacatagggcaacaagaca

SEQ ID NO: 92880 - DNA, 60 bp, Artificial
  Synthetic oligonucleotide
tcagcgaggccttagacttactgcaagaggaactactgagtctgtatgagcagaatagcc

SEQ ID NO: 92881 - DNA, 60 bp, Artificial
  Synthetic oligonucleotide
cttcgcagcagatgctctttctttcattttccacaagaatttcctttggatgacaatgga

SEQ ID NO: 92882 - DNA, 60 bp, Artificial
  Synthetic oligonucleotide
cctcgcacgtttctgtcaaacgaaaagctgtgaaacgcaaacgcaaataatgtgtcattg

SEQ ID NO: 92883 - DNA, 60 bp, Artificial
  Synthetic oligonucleotide
cagcaccagcaaaggcaggctaactcagacaagccggcacctgaattaagcttttaatct

SEQ ID NO: 92884 - DNA, 60 bp, Artificial
  Synthetic oligonucleotide
ttttctggtggccactcaattggtgaacacattccattgcaagaccttgcacccagcagg

SEQ ID NO: 92885 - DNA, 60 bp, Artificial
  Synthetic oligonucleotide
tcaagaccacggtcacttgtcacgtttgataacccagcctttgatgaatctgttgacctg

SEQ ID NO: 92886 - DNA, 60 bp, Artificial
  Synthetic oligonucleotide
tgcaaatgaaccgtggacactatgcgatacaagcagggagaggttggttgcagaacctgc

SEQ ID NO: 92887 - DNA, 58 bp, Artificial
  Synthetic oligonucleotide
ttgcagttgggagaatatcaagaacacaccatccacagacaaatgcattgacatcgga

SEQ ID NO: 92888 - DNA, 60 bp, Artificial
  Synthetic oligonucleotide
gcaagcacaaagcgcctttgcaactaaaatgcccgcctctgctgattactactaatgtca

SEQ ID NO: 92889 - DNA, 60 bp, Artificial
  Synthetic oligonucleotide
atgtacagatgttggctgatcctcctaaaactagaagtcctgcagttgcattatattggt

SEQ ID NO: 92890 - DNA, 60 bp, Artificial
  Synthetic oligonucleotide
tcaggtacatttacacacggagagttgccaagttggatagctcagcagacactaataaca

SEQ ID NO: 92891 - DNA, 60 bp, Artificial
  Synthetic oligonucleotide
cacatcatttagctgcagagaaaacctttgatttgagtgagatggttcagtgggcttatg

SEQ ID NO: 92892 - DNA, 57 bp, Artificial
  Synthetic oligonucleotide
actgatgatggtccaggtgattggaaggaagttgtgaaatttttaagacatcaaggg

SEQ ID NO: 92893 - DNA, 60 bp, Artificial
  Synthetic oligonucleotide
caacctcttacagaggggaaaatgggtctgttagatgatgccactaggccttgctggctc

SEQ ID NO: 92894 - DNA, 60 bp, Artificial
  Synthetic oligonucleotide
aggcccctcatctgaaatcccactcgctggccctaagattaccactgatgctcagcctgc

SEQ ID NO: 92895 - DNA, 60 bp, Artificial
  Synthetic oligonucleotide
gacttttcctaagtctgtgcgagtatttcggggagggttagatgagttataagggaggga

SEQ ID NO: 92896 - DNA, 60 bp, Artificial
  Synthetic oligonucleotide
cagcattataagtcaggagttccaattgacatagtaaattctgcatgcaaatatccagac

SEQ ID NO: 92897 - DNA, 60 bp, Artificial
  Synthetic oligonucleotide
cgcttacgcaatggcattgatcaggaaaagacgcgcagcccctcaagatatataccctgc

SEQ ID NO: 92898 - DNA, 60 bp, Artificial
  Synthetic oligonucleotide
ggcgcacaggttacattcctttgggaggaacagaaagtggagtgggtgtaggcacaaggg

SEQ ID NO: 92899 - DNA, 60 bp, Artificial
  Synthetic oligonucleotide
ccatctggtactttagatgacacatataggtacataaactctcttgctactaagtgccct

SEQ ID NO: 92900 - DNA, 60 bp, Artificial
  Synthetic oligonucleotide
ccagatctggcacacaaggtttagaaccagtccccaaagatacctatgcaacaagagaag

SEQ ID NO: 92901 - DNA, 60 bp, Artificial
  Synthetic oligonucleotide
tggaaatggacatcaggcggggatggagcatctaagcatgaccggggcagtgcgcggatg

SEQ ID NO: 92902 - DNA, 60 bp, Artificial
  Synthetic oligonucleotide
gagtctgcagcgttgtggagcaatgttttggaagccacagacacttgacttctgaggagc

SEQ ID NO: 92903 - DNA, 60 bp, Artificial
  Synthetic oligonucleotide
gcacatggcaagctagatcacaaaggactctcatacatgcatgggactcagcaggtgtat

SEQ ID NO: 92904 - DNA, 60 bp, Artificial
  Synthetic oligonucleotide
acgaaccaccagcagcgccggaggacgactgggaagacttctgcaagaagcttacgatcc

SEQ ID NO: 92905 - DNA, 60 bp, Artificial
  Synthetic oligonucleotide
gggcactgttatcaatggagcgcccgacgtcggtgagagatctttgcatgtctctaaagc

SEQ ID NO: 92906 - DNA, 60 bp, Artificial
  Synthetic oligonucleotide
gcggtttggcttcctgcacagaataaattttaccttccaccacagcccagcaccaaggtc

SEQ ID NO: 92907 - DNA, 60 bp, Artificial
  Synthetic oligonucleotide
agccttgaagacagtattttggaatcctacaatgatgaggatttaatagacgtgtttgag

SEQ ID NO: 92908 - DNA, 60 bp, Artificial
  Synthetic oligonucleotide
agtaccgggtattccgcttgctacttccagaccctaacaattttgcatttggagataagt

SEQ ID NO: 92909 - DNA, 60 bp, Artificial
  Synthetic oligonucleotide
ctcagcaggtgtattatgtggactttgaagaggaggccaacaaatatagcgagactggga

SEQ ID NO: 92910 - DNA, 60 bp, Artificial
  Synthetic oligonucleotide
aaagggtggttcataagaatttcagccagagctttaatatttacagagtcaacaaacgtt

SEQ ID NO: 92911 - DNA, 60 bp, Artificial
  Synthetic oligonucleotide
gtttaggatgcctcagtattctgagtgaggcggacaaagaactatgtgctgaattgaacg

SEQ ID NO: 92912 - DNA, 58 bp, Artificial
  Synthetic oligonucleotide
cgttattggtttggagtgacgcccggacattcctgacaagaccggattcgttcgaccg

SEQ ID NO: 92913 - DNA, 60 bp, Artificial
  Synthetic oligonucleotide
cccagaaagatttcctatagcagtagaggatccttttactctacctccaccacgtttccc

SEQ ID NO: 92914 - DNA, 60 bp, Artificial
  Synthetic oligonucleotide
taaaatggagcaaaatacgcttgcagataaaatcctcaaatatggtagtgctggtgtttt

SEQ ID NO: 92915 - DNA, 60 bp, Artificial
  Synthetic oligonucleotide
cctaagcctggtgggcccgtgttgcgcgaacaactaacaacggcgatggacagtgaaggt

SEQ ID NO: 92916 - DNA, 60 bp, Artificial
  Synthetic oligonucleotide
aactgccaggcaaaatatgtaaaagattgtggtactatgacacggcactataaacgtgca

SEQ ID NO: 92917 - DNA, 55 bp, Artificial
  Synthetic oligonucleotide
atttaaccattagcactgctgctactccatcagttgcacagacattcactccaac

SEQ ID NO: 92918 - DNA, 60 bp, Artificial
  Synthetic oligonucleotide
tgcattcctatttgaccccaatgggaatcctgtatatgcactaaatgatgtaaactggaa

SEQ ID NO: 92919 - DNA, 60 bp, Artificial
  Synthetic oligonucleotide
ggagaccctatgtcatcgtttaaatgtgtgccaggagaaaatactagactgttatgaact

SEQ ID NO: 92920 - DNA, 60 bp, Artificial
  Synthetic oligonucleotide
catagtaatacagggcccaccaaacacaggcaaatcacaatttgcaatgagtttaattag

SEQ ID NO: 92921 - DNA, 60 bp, Artificial
  Synthetic oligonucleotide
cttagatggtaacccgtgtagtatagataggaaacacagaagcctgctgcaaatagtatg

SEQ ID NO: 92922 - DNA, 60 bp, Artificial
  Synthetic oligonucleotide
cagtatagggtgtttagggtacagttacctgaccccaacaaatttggtcttcctgatcct

SEQ ID NO: 92923 - DNA, 60 bp, Artificial
  Synthetic oligonucleotide
taagggaaagaccacgaacgctgtacgaattatgtgaagcctacaatacttctatgcaca

SEQ ID NO: 92924 - DNA, 60 bp, Artificial
  Synthetic oligonucleotide
ggctttgtggcgtactaatgacagcaaagtatatttaccacctgcaccagtgtcccgaat

SEQ ID NO: 92925 - DNA, 60 bp, Artificial
  Synthetic oligonucleotide
gtagggtgtaaccgaaaagggttatgaccgaaaacggtttatataaaagcaagcagggaa

SEQ ID NO: 92926 - DNA, 60 bp, Artificial
  Synthetic oligonucleotide
cgtttggtgtgggggtgtgttggtgttgaggtaggtaggggtcaacctttaggtgttggc

SEQ ID NO: 92927 - DNA, 60 bp, Artificial
  Synthetic oligonucleotide
tggagtgggttgggtatatttttggggggtttgggtattggcaccgggtctgggacaggg

SEQ ID NO: 92928 - DNA, 60 bp, Artificial
  Synthetic oligonucleotide
gactggctatattcctttgggtggtggtggaaggcctggtgttgtggatatagccccggc

SEQ ID NO: 92929 - DNA, 60 bp, Artificial
  Synthetic oligonucleotide
cgcaaagcaatagtcagcaacaaacaacacaggcaaaccacccacacggcaaaaggagat

SEQ ID NO: 92930 - DNA, 60 bp, Artificial
  Synthetic oligonucleotide
gtaatacaagccaatatgtgctgctaattgtatatattgaattgcaaccattgcggtatt

SEQ ID NO: 92931 - DNA, 55 bp, Artificial
  Synthetic oligonucleotide
ccctgtaggttaggttaagggtggtgtttaggtggcgtccctattgccctaccca

SEQ ID NO: 92932 - DNA, 60 bp, Artificial
  Synthetic oligonucleotide
ctgcagccattttgtggcgaccgatttcggttgctaacatttcactacatttgccaactt

SEQ ID NO: 92933 - DNA, 60 bp, Artificial
  Synthetic oligonucleotide
gcagtcaggcggaacaagagacagcacgggcgttgtttcaggtccaagaaacacaggcac

SEQ ID NO: 92934 - DNA, 60 bp, Artificial
  Synthetic oligonucleotide
aacggcgatggacagtgaaggtacagatgaggagggggcggggtgtactgggtggtttta

SEQ ID NO: 92935 - DNA, 60 bp, Artificial
  Synthetic oligonucleotide
caatcaggtgaggtatcgggacatatatttaccagtactcctacgtctggtacccatggc

SEQ ID NO: 92936 - DNA, 60 bp, Artificial
  Synthetic oligonucleotide
tactaccacatacaatgcctatcatgtgagtggggcactattgtgctaatgttagctaga

SEQ ID NO: 92937 - DNA, 60 bp, Artificial
  Synthetic oligonucleotide
ggcccctactgaaccttctattgttaaccttgttgaggactctagtattattaattcagg

SEQ ID NO: 92938 - DNA, 60 bp, Artificial
  Synthetic oligonucleotide
ggacacttgtgaccaccaaatacactgtggaactggaagcgcaaacactggagggcacca

SEQ ID NO: 92939 - DNA, 60 bp, Artificial
  Synthetic oligonucleotide
gattgtcctcctttggaacttgtgtctactattattgaggatggcgatatgatagacact

SEQ ID NO: 92940 - DNA, 60 bp, Artificial
  Synthetic oligonucleotide
tttaggcagtccgcggagcagcccattaggagacattacaaatcaaaccacgcaaagcaa

SEQ ID NO: 92941 - DNA, 60 bp, Artificial
  Synthetic oligonucleotide
gcgtgaccagccagccagacaagctggacaggctacgtgttacagaattaaagtgcagtg

SEQ ID NO: 92942 - DNA, 60 bp, Artificial
  Synthetic oligonucleotide
tgaaatagcgggacgctggacgggacagtgtgcaaattgcagaacagcggcaagacaacg

SEQ ID NO: 92943 - DNA, 60 bp, Artificial
  Synthetic oligonucleotide
gcggcaagacaacgtagcgaaacccaggtgtaataaagccatgcgtggtaatgtaccaca

SEQ ID NO: 92944 - DNA, 60 bp, Artificial
  Synthetic oligonucleotide
ctagaattagagaatacagaaggtatagtaggtctgtgtatggtgctacattagaggcca

SEQ ID NO: 92945 - DNA, 60 bp, Artificial
  Synthetic oligonucleotide
gggtcgcaagttcctattacaaattggtgcacaacgcaaggccaggccaggccttaaaag

SEQ ID NO: 92946 - DNA, 60 bp, Artificial
  Synthetic oligonucleotide
cgacagcgaattactgagcccgactcctccacagtcaccccactgtccgtggacacttgt

SEQ ID NO: 92947 - DNA, 60 bp, Artificial
  Synthetic oligonucleotide
atataatatggaagcatggactatgcgggacacatgctatgaactatggggcgaggcccc

SEQ ID NO: 92948 - DNA, 60 bp, Artificial
  Synthetic oligonucleotide
ctcttaaccatcaagtagtaccagcatctgcagtatcaaaacaaaaggcctgccaagcaa

SEQ ID NO: 92949 - DNA, 60 bp, Artificial
  Synthetic oligonucleotide
acaaacacagttatgcattataggctgtgctcctcctattggggaacactgggccacagg

SEQ ID NO: 92950 - DNA, 60 bp, Artificial
  Synthetic oligonucleotide
ggcaatgtaataacatgtcctgaatatgtatctagtacctgcagagacccgttaccctct

SEQ ID NO: 92951 - DNA, 60 bp, Artificial
  Synthetic oligonucleotide
gacaggtgggtaaaaacacatggaaacgtggaccatacaggtatttattataaaccagat

SEQ ID NO: 92952 - DNA, 60 bp, Artificial
  Synthetic oligonucleotide
gcaggtgtgctacacaattgtgttacccaaccgatttgtgttttgcctatgcttgcaaca

SEQ ID NO: 92953 - DNA, 60 bp, Artificial
  Synthetic oligonucleotide
gcttcgctcctcatattctcctttgtctacacaattaccttcactgtcttcctctgtgtc

SEQ ID NO: 92954 - DNA, 60 bp, Artificial
  Synthetic oligonucleotide
ctggacagttatccggacagtggatatggcaatacacaagtggagactgtggaagcaacg

SEQ ID NO: 92955 - DNA, 60 bp, Artificial
  Synthetic oligonucleotide
agcaacgttgcaggtagatgggcaaaatggcgggtcacaacacagtatgtgtagtggcgg

SEQ ID NO: 92956 - DNA, 60 bp, Artificial
  Synthetic oligonucleotide
gcccacaccttgttcttggcgcgccttcctggcgcatgtcatgcacaccacattagtcat

SEQ ID NO: 92957 - DNA, 61 bp, Artificial
  Synthetic oligonucleotide
gtttaggtaccttattaaatattccacactcacaaatgtttatagaaccacctaagctacg

SEQ ID NO: 92958 - DNA, 60 bp, Artificial
  Synthetic oligonucleotide
cgccctgcgcttacatctcgcagaggtacagtgcgctttagtagactgggtcaaaaggcc

SEQ ID NO: 92959 - DNA, 55 bp, Artificial
  Synthetic oligonucleotide
aaaatgcagcaacctcttgtcaacgggacagccctccacaggctaaacaggaccc

SEQ ID NO: 92960 - DNA, 60 bp, Artificial
  Synthetic oligonucleotide
caactacaacatagttttgatgatagcacgtttgaactatcgcaaatggtacaatgggca

SEQ ID NO: 92961 - DNA, 60 bp, Artificial
  Synthetic oligonucleotide
ctaacaactgaggtgatggcttacctgcacaccatggattctacgatactagagcagtgg

SEQ ID NO: 92962 - DNA, 60 bp, Artificial
  Synthetic oligonucleotide
gcagtgttgcaggtgttcaagtttgctacagttggcagtggaaagcagtggagacaacct

SEQ ID NO: 92963 - DNA, 60 bp, Artificial
  Synthetic oligonucleotide
ggccctttattccacatacatctattgatacacaacatgctattgttatacaaggtgggg

SEQ ID NO: 92964 - DNA, 60 bp, Artificial
  Synthetic oligonucleotide
cggtgtggttggtgatgctattccagacaaagcatatattaagggtactggtactggccg

SEQ ID NO: 92965 - DNA, 60 bp, Artificial
  Synthetic oligonucleotide
gctgtggggtgaaatttacatgcgcactgcagatgggtggactgtaaccactagtagcgc

SEQ ID NO: 92966 - DNA, 60 bp, Artificial
  Synthetic oligonucleotide
gttcggtgctattattgtggctgcccattatcagacagtgagaaggatcgccacgccttg

SEQ ID NO: 92967 - DNA, 60 bp, Artificial
  Synthetic oligonucleotide
cggcttggaatttgccctgttcccaccctagcaactgcaacagccaatgccagagcagct

SEQ ID NO: 92968 - DNA, 60 bp, Artificial
  Synthetic oligonucleotide
cctgccaggagaaaatgaagctagtcctgtttcttcgcccgcctcccaggtacggcattc

SEQ ID NO: 92969 - DNA, 60 bp, Artificial
  Synthetic oligonucleotide
cctgcatatgaaccagatcctttagaggacagttttgatgtgtcagaggtcagcccctca

SEQ ID NO: 92970 - DNA, 60 bp, Artificial
  Synthetic oligonucleotide
cagcccctcagtaagggtggagcctgaatttcgagacttaacacatgtcactgcagccaa

SEQ ID NO: 92971 - DNA, 60 bp, Artificial
  Synthetic oligonucleotide
ctgcagccaaaaccttaacaggcaatactggtcgacttggggtgagtagggtggggacga

SEQ ID NO: 92972 - DNA, 60 bp, Artificial
  Synthetic oligonucleotide
gggatgtgctgcggatgcacagagctgctgctgaaaattgagagagaagataacccctgg

SEQ ID NO: 92973 - DNA, 60 bp, Artificial
  Synthetic oligonucleotide
tgccgcaccgctgaaggtgctctcacaaataggtgggactatgccatgcttcatcccctc

SEQ ID NO: 92974 - DNA, 60 bp, Artificial
  Synthetic oligonucleotide
atcagttgtttgcacctgacgctgagaggtttggcacgcgtggaacatgggatgtctttg

SEQ ID NO: 92975 - DNA, 60 bp, Artificial
  Synthetic oligonucleotide
aaattgtaccatggctgttcgtgtgcgtagagtgaaaagagccaacccatacgatctata

SEQ ID NO: 92976 - DNA, 60 bp, Artificial
  Synthetic oligonucleotide
tggtccctattacagatgtctcatatgctatcaagcctctgtcaacaatacctggtgatg

SEQ ID NO: 92977 - DNA, 60 bp, Artificial
  Synthetic oligonucleotide
ctttgtgcaccacacccggtcgcgttggcagagtatccctataaaatcttgcacctggat

SEQ ID NO: 92978 - DNA, 60 bp, Artificial
  Synthetic oligonucleotide
tgtaacggtgagtaacaagggagggcgccagcaccgcctgcgttcgcaggggacacctaa

SEQ ID NO: 92979 - DNA, 60 bp, Artificial
  Synthetic oligonucleotide
cagaaacagttttaacagatggacacgatgcgtacgtggaggtggaccataacagcacag

SEQ ID NO: 92980 - DNA, 60 bp, Artificial
  Synthetic oligonucleotide
gccacaggtgaatactggggcaaagctgcagaatgtcctgaaaagcggcctgctcctgga

SEQ ID NO: 92981 - DNA, 60 bp, Artificial
  Synthetic oligonucleotide
gacaaatttgagcataacacacttgcagacaagattttaaaatggggcagcacaggtatt

SEQ ID NO: 92982 - DNA, 60 bp, Artificial
  Synthetic oligonucleotide
ctcacagtgcggtcagtgaccatcagtcaggactaacagacgcatttggttccagctcat

SEQ ID NO: 92983 - DNA, 60 bp, Artificial
  Synthetic oligonucleotide
gcaaggacagagactgtatttccctccaaaccctgtcaccaaaatactgtgcacagaagc

SEQ ID NO: 92984 - DNA, 60 bp, Artificial
  Synthetic oligonucleotide
tgcggtgtctttgtattcttttggtgttctgcaatctggagtgcactctgtggtgttgtg

SEQ ID NO: 92985 - DNA, 60 bp, Artificial
  Synthetic oligonucleotide
gagctttgcactgtccccttaactcctgaaactgtctcctacttgcaaactgttaacccc

SEQ ID NO: 92986 - DNA, 60 bp, Artificial
  Synthetic oligonucleotide
gcagtgctcgcaaacgcccctcttcctcaagtaagtctgcaaccccttctaagaagcgga

SEQ ID NO: 92987 - DNA, 60 bp, Artificial
  Synthetic oligonucleotide
agaggtagcggcggcccaaggtgccgttggggaacccgcgtgcatccctacgttgttcct

SEQ ID NO: 92988 - DNA, 60 bp, Artificial
  Synthetic oligonucleotide
cccactgcaaagccgtgtttcgccgggtgctgaacgacaccaggaaggcggccctcgccc

SEQ ID NO: 92989 - DNA, 60 bp, Artificial
  Synthetic oligonucleotide
cctcgcccgccatcaccggactcgaccgaggaagacaggaggcaggcacccgtagctgca

SEQ ID NO: 92990 - DNA, 56 bp, Artificial
  Synthetic oligonucleotide
ggggcaccggcatcggttttgccatatcacaaccacattctgggctactggagatg

SEQ ID NO: 92991 - DNA, 60 bp, Artificial
  Synthetic oligonucleotide
gcagaaaatgtcacaagtaaacgtgcaacacaagggtcagatgacaggaagcaactaggg

SEQ ID NO: 92992 - DNA, 60 bp, Artificial
  Synthetic oligonucleotide
ggaaataccctggccctattccagacccaactgtcccaggcgggaaaagagaaagtaaac

SEQ ID NO: 92993 - DNA, 60 bp, Artificial
  Synthetic oligonucleotide
ctttgcttctctgcatgaaagcttcaagcctggagatggatgtttccccaagccagcctc

SEQ ID NO: 92994 - DNA, 60 bp, Artificial
  Synthetic oligonucleotide
atcttctgtgtccacactgcgcctccagacattatggcaaataatccaggtagattgggg

SEQ ID NO: 92995 - DNA, 60 bp, Artificial
  Synthetic oligonucleotide
tcaacctgcctgatcaaaatattcccaaagttagtggcaatcaatatagggtgtttagag
